United States Patent Application Publication US 2005/0228172 A9 - sequence listing, part 113

SEQ ID NO: 526389 - DNA, 525 bp, Homo sapiens
ggtcatttgaggccaggagtttgagaccagcttggctaacatggtgaaaccccatctctactacaaatacaaaaattagctgggcatggtgtcatacgcctgtaattccagctactcgggtggctgaggcacaagaatcgcttgaactcaggaggcagtggttgcactgagccaggactgtgccactgcactccagcctgggcaacagagtgagaatctctcaaaaaaaaaaaaaaaaaaaaaagaaatatttactactaaataacaacaacaacaaaaagccaaataaacttacttgatggatacaagctatataatttgtcaacagttttaaaatcttctagatttggtataagggtatgatgaatacacactgtttcattttatgtaatacaccatcagcagaaaaaaaaccatcaagctaaactaaactgtgttaataatttyaatcttaatggtaaaaatttttatctcattttatttttatcaatctaaagatagaagaattccatgtataaagacttg

SEQ ID NO: 526390 - DNA, 517 bp, Homo sapiens
ctaatttttagaatggcagatagtattaaccctgtcttagtccatttgggctactataacaaaaatgccttagaccagatgagttataaacaatggaaatttatttctcacagcacttgaggcagggaaatccaagatcagggtgctggcagattcagcatctgctgtggggccattttctgattcatagttggctacttcttgctgtgttcacacataacaggagrgacaaaggagctctctggagcctcttttatcagggcattatcccattcacctccaagaggccccaccttcaaataccatcacactggggattaggtttcaacatatgaattttggagggacacaaactttcagtcaatagcaaacctctaaacctctacctgattttcctttaggcataggagtgttaaggatgtacattttggcagacagcaaggagaataccaggatcataggctaaacagtcaacaagctcagaaacataataggacctctaataccagagaaagaa

SEQ ID NO: 526391 - DNA, 618 bp, Homo sapiens
gggtggacccctagcctgcgaccaaggcttagagaagcagcaagtacctggcaggactgtgtatgagccgcctccactcctagtgatcgcagatttggggtgctaaagacctggagtcatggtgttcctgrcccctctagtggactctcaaggaggtctgctgattatgcaatggtagcagagttgcaaggaaacaggttttgaaccaatgaagctgtatttacttaaaaagacggaccacccatcatgtgacctacagcattcgtggacagatttacattgggttcattgtgccatcaggcatgcagtttcagccaagtttccctaagctctcagagggttgctttaacttttgaatctgagttgcaaagttcaataaataatggccctatggataagcacaaagtcaagagacagtgattgaacagaatttgtgaagggtgaaggtatccgctttcagaccgtgaacaggccctttgcaccccagcaccccccagcccccagtggcactgctggactgaggccactgcaccgtggagatgactatcctgaaaaacttagccaccgtggccttctgtgacacgcagtccacacaggagatccaagagtaggtttaaa

SEQ ID NO: 526392 - DNA, 618 bp, Homo sapiens
gggtggacccctagcctgcgaccaaggcttagagaagcagcaagtacctggcaggactgtgtatgagccgcctccactcctagtgatcgcagatttggggtgctaaagacctggagtcatggtgttcctgacccctctagtggactctcaaggaggtytgctgattatgcaatggtagcagagttgcaaggaaacaggttttgaaccaatgaagctgtatttacttaaaaagacggaccacccatcatgtgacctacagcattcgtggacagatttacattgggttcattgtgccatcaggcatgcagtttcagccaagtttccctaagctctcagagggttgctttaacttttgaatctgagttgcaaagttcaataaataatggccctatggataagcacaaagtcaagagacagtgattgaacagaatttgtgaagggtgaaggtatccgctttcagaccgtgaacaggccctttgcaccccagcaccccccagcccccagtggcactgctggactgaggccactgcaccgtggagatgactatcctgaaaaacttagccaccgtggccttctgtgacacgcagtccacacaggagatccaagagtaggtttaaa

SEQ ID NO: 526393 - DNA, 512 bp, Homo sapiens
tgagcacaccaaccccagcagcagtctatatttgggctgctgacatgctccccatcaccttcctcacctttcaggccccaggtgagtcatcccttctccgagaagcctttctgagccccataagctctgacactgggcatctcccctgatcacagtcctcactgccctgtactgggaccaggtttatttgccattttcccctgtgcccacccctactggactggaaataccttcatgggaaggttctggtttctagcccctgccatcattttagcaccagcatgacagaataaataccggcacacagactatcttcttagaattcaataatgcaaggcaacatggtctcaaacaaaaaggagcaaatacaaccaatactctgcttccaaagatctcacccgctaggaaggggagaaagataagtacacaaattcctgaaacaagaacttcaaggaaaaaaacagatcataatgacatgttctcaaatmatttttctataaatgacttattaa

SEQ ID NO: 526394 - DNA, 595 bp, Homo sapiens
aaatccccgcaagagcctggtttctgattgcctagctctgtccctggtgggcagcttcctgactcgaggcagccagttgcctcacggcctgatgggggcagcccgagggccatccaggcgcccacctggtaaccctgcagactggtctgccacacctgcacctgtggacactccacctggccagcctcattggagtggccaggatctccttcccaaaaacggctgccatctcccacaaacctccaacccttgcccggctccctctggcccgagcagccctgctgaccttggcagccacatctttctcatgcacgtgctgccccacaggccccagcaccaaccctgctgtgctagcatccccagctctctcaatatgtggaggctctctcaatatgtgcaagacaaggacttcacatccatgacaaccatgcccagaaccaaaagaccaggacccccagctcagagtcctctgatgtgtaaccacacataatgctctcggcggtgccccagttgctcactgggagaacaggtcttgccctggggcattgggarccctgcatcggcctcacattctagctgggggctggtgcagcac

SEQ ID NO: 526395 - DNA, 519 bp, Homo sapiens
ctgccacactgtgtgtgtgtgtgtcccacctgctggagagggaccccggggagaattgaaccttggcggtgttcgaagctgactatgccgcaagcacacacctcccacccccacccagggtcctggagcagagatccccacacacctccaagggcaaggcagggctgacctgctgactccaaggcagccccagggactggcagctcagaagacctcacttccagaagtgtcccacaatggagccaggcacttttagaatgcagaggtgccacgactcacataagcaatcccagcttcacccactggttgtacaactacagaccccctcttgctataatactgaccacrctaccgtgagaattgaatggcaggttgcctggtagagcacaggataactttccataatcgctcacttgcctccctttccaacatgacttagcttgttggagatttaaaagccactgctcagaaaggccaggcaggagtgggccatggaaggggaaggtgtcaggatgagcc

SEQ ID NO: 526396 - DNA, 484 bp, Homo sapiens
actgaggtactaatggctagggcttcacatatgaattttggagggacattattcagcctataacagttacgtacaatatataattgcagattatatatatatatatattataagagcaactgcaagaatatgataactattataaagaaagcatactgacttgaggccaggagttcaagacaagcctgggcagcatagcaagaccttgtctctactaaaaaaaaaaaaatagctgagtatgatggcatgtacctgcagtcccagttactcgggtggttgagaaaggaggattgcatgagcctagcagttcaaggttacagtragctataatggcgccagtgcactctagcctgggtgacagagcaagatcagaaagaaagagtactggctactgtgagagcgtaagaagagacataatcttggagaggggtgttaggaaaagtcctgctatataagtgatacatgaaggttgaaaagagatcac

SEQ ID NO: 526397 - DNA, 558 bp, Homo sapiens
aaaactccatggcaatgatcttcttattctctcagaaaatttttgcagccaatcagactgccaaatttatttaagtctgtacacttatctcagaacacccttgggtttattcttgggcctataaaataggaagaaatgtaagagaccatgggctattttgccaaatcagcatagtgttaagactcatgggaaggaggccatgggtttcccttccccatctagagatggagactgttctgctaagggaagatcaatatccagttagagaaragagaacacaaatctgaaaagctaacactccatgggtaagcctggctggaacaatttagcatcaacagagcgtcaagtgccaaccccacacataatgcctacagagaccctcctggctgattggctctatgaagccaaggaactggctggcttttcccattcccccacttcagtttgatctgactgctttgctttgtatctcctcagcatctgcccatgcttttatctgggcacctcaaacactttaatgctcttgcttgttttcttaaagcccttggaaaaacggac

SEQ ID NO: 526398 - DNA, 631 bp, Homo sapiens
ctgggagcagcactcaccggcggaggtggaaacgccagtgttcacagccgcaggactctggggcatgtttttcttcaccccatatgctgcaagaaaggaagctgggtcagcatgggagggtggttccaggtgactcaggagaagcctgrtcagccctggcagagaggtacccccgaccctctccagtgagaagcagatgatgaatcaactctctccagccatggggacagtaatgagggtttagatggaacgttcttaggtataatcctcctcatccttctagctacttccaggaagtcctcctagacccccatgcatctccttctctcctgaactcctacagcccttaacacctgctctgcatggcctatcacttattcccattgtcttatagagcctctcgttgtctcatgtgtgttagactttctcttccaattaagtagcaggcaagttggaggcaaaggctgacctaggtttcatgtccccagtcacccccaggttggcacagcggtggcaacctgtagggggtgcaccataaaatcaaccagatgattgatttgcagtgacagtgggctgtcaaggacagcagtgagctggcaagaccaccaacctaaccagtttggctgtgaga

SEQ ID NO: 526399 - DNA, 627 bp, Homo sapiens
aagttccagggggaatctcctgggatgtttggccacagaaagcctctccaggaggccctgaggatggcaaacattctgagggtcatccagctccaggatagaggcatgccgagttcaggggtgagagagggtgtgggctgcccgccaggtacctgatcccgcagagtaggcattggtgttgaggagggatgagctctgggttgtcatgttgttgtgataggtccccatggaggaccccgcgggcagggtggaggaccacacatgggagggaaggttggcatccaggatcrttgcatcgtaggtgcctgacactggaaacagacacatgcacacaccccagtgagagacaaatcaacactccctgctggggaatctagtcacctcattttgctgggatttcctggtttgggcattgaaagccccacatttcaggaactttctcagtccaggaacctggggtagtttccatctgaaatctcagagctggtgaaatcattatctcttggattagaaatttttgctggctcctggtaaaatctgaggtagccaaattttgccttggggtccaacaatttctccttctaaacctggctccccatctcctggtgggctgtcccaccaatggca

SEQ ID NO: 526400 - DNA, 652 bp, Homo sapiens
ctggagatgttctaataaaattccaggctgagcaaggaggttccagtacaatcagcaatggtcaatcctttccccatcatccacctcatggctgccagaaccaaggttctctcctgcstccatggtctcaggcattggcaaaagattctaaaagccagagtgtttacttgccattttggcctcttcagagatgggaggggcaggaagctggtagctaacattattagttagcttcaggtggagaattggcatctttcaactatcagcctaaagttgtgagtggttggcatactcctaacttccaagttattgatgataataaggcccataggaagtctaggtgggtcattgtgaagaattctgccttcagctcagccctaacatgctgccccctaccctgcccaaagcttagcaagggctgcttctcccaggaccacatttctctcctatatcattgtctacatgactagattacaaaactgtcatggagctgtttatctcctggatgaattttgaaaaaaaatttggggagattttgctcatcttttgacgtgtaaaggcaattagagcatatcttgttaaagtcagccaggagaccagaagtgaaagcagatgtggtatctgcatcttcagatgatccacagcaagacaa

SEQ ID NO: 526401 - DNA, 610 bp, Homo sapiens
actgtgggacatgtcctcacattgaactggaaagcagtgagtcactaccctagagagcggaaatacaaaatggcatgaaataactgcaaccgcagcaccacatggtaatctgccttttgtaacctctgcaggctacatcgcatgcttacaacttggggttatgtgtgaagccccaagtttggctcaaagttttctccccaaatagccacaaatatgggcacccccacattagagaacacattaatggagaacaaagggaggagagtggataagatgggagaggagagaaggagggggcaggcattcaaactgctcattttcccctaggaagcataaggcccagccactacggtggatgagcaaagcaaattggtaatgggtgatccagattgcatcgcagagtcttgcctgctttccaggcacttactaaactttataactcttttgggggtaaggcacataaacccagggtttctcattgaccagtcggggagagggagtctgagctsgctggtccaggtctgttgcttttccacaatactgtagtccatcaagattttttttaatgcgttttttaaaggagggctggaaaatgatgatatgagcagca

SEQ ID NO: 526402 - DNA, 346 bp, Homo sapiens
agctgttagtgaagttctccaggctaggttcaaggacactccttgaattaacaaggaatatatttttcccctcttattagcaaaacctgtccataattagtcacataaatttcattaagatcattatgatcctcaacttttctctctctctctctctctctctctgtctctctctygtgtgtgtgtgtgtgtgtgtgtgggggggggggggggtgttcatcataattctaaactttttcctcaaaagagtaacttgatagaaatatttcagaaaattctacctgtgtgaaccgccccacccaccaaacaagccaattaaaaacaggcaaagaatctgaaaagacat

SEQ ID NO: 526403 - DNA, 607 bp, Homo sapiens
tgtaataatatgtggggttttgtccatttgtaatttctgatgctgtttttatgttactggccattgtcattgagcaacaaaaatcctctactgctttctgttgggtggcacatattttataactgatgtattctgccacataactgttttctcctttttctgtgcttttgcttgtttgtataaaggaggtgctgtgctgttgtacagttttagagtctgtctgcactcatgtttttccatccatctatagtacagcaaggcccagtgctctgtcgattcttgcttgcacagattccattacccattcatattctttcactaaaagaggcttgctcaaagaatgctgctgggcaaatggtatgacagtcttagtaatttgaaaacttcctgcagtatgtgttttccattattgacaatggtgttccagaagaatatatggcaagagtttggtcaattttttctgctctttaagtgtcacctgtgtgctaatgaagcmattgagagtgctttgtatgcagtggccagcacctttgctggctcaggggtcctgaacagggtactcctttgtggagatactggtgttatagactccgcagcagcaggtgca

SEQ ID NO: 526404 - DNA, 597 bp, Homo sapiens
ctgctggccccaccatgctaaatttccaggggccctggaaccccttggctgtctcggcccaaatgtgggcaaatctcaggcgtccagacaaggctgagattgttcaaaaagcacttcgctaggaaactggggggaacgccaaaaaagtaaattacaaaggcagagaaacagacaacttacggaacacagattccttccccagcataattcaagtctagrcccagaatagtttgttgcaagaacaagaggctaagaagggtaggaagaaaaggtacaggtttttgaccccttgctcctcattcttcctcaattcattagggcttggagtttagcctgagatagaggttgttctgggaaagggccatatgtgcaaagtggcccccaaatgctgaaggagctgagaaacaaagaacgaggcaaacaaatccaatttgtcagtaaagggtgttttattggggggaacttacagagagaagcatggtcttgcatggatgcaagataggtagatttctgcactgttactccccagacccatggcttatataccatagagaaagggtgcacacactccagcaggacaatgcaaggcaaccctcc

SEQ ID NO: 526405 - DNA, 384 bp, Homo sapiens
atggaatgcattattttattyctcttcaaatagtcttatgaaggaggtattgttatccctgttttactaataatgaaactcatttggacaagtcaaataattttctcaaggtcccatgattattccttgattagtaataagcagagcttgaattcaaacttagttctatctaccaaattctaaagtctgtctatgtctttaaggattagctgaagtggatcttaaataaaatcacttcagctaaagtatctttctcactttgcctgttagttatacggaggaaggaagtgagacactgagagttccttagaatcagagcatgatataactggcattaaggcttaattccttctgcacataactatcttatgtctatatttggct

SEQ ID NO: 526406 - DNA, 614 bp, Homo sapiens
ccaaagtgctgggattgcaggcctgagccaccatgcttggctagttcttgatctagaacagaaggcagcacacattgcctgtaaaatgtcagtggtgaatatattaggctttgtgggccagatgatcygtcacaaccacacggctctgctggtgcagcctgaaagcaaccatagataatacacaggcaactgggcacggctgtgttcaaataaaactttatttataaaaactggtgatgtgctggattggggttgtagtttgctgactcctaactagaatagtgattttttttttctcacaattttatcattgatcgacatataggctaccagagttctcttcattgatactgaaccagtctctagaggtggaaggtgatggttgggaggttgtaagggctaaggccactggcgtgccacctttcagggcagaaattgtgatatggtttggctgtgtccccacccagatctcatcttgaatggtagctcccataattcccacaagttgagagagggactcagtgggaggtaattgaatcatggggcaggtctttcccgggctgttctcatgaaaacaaataagtctcatgagatctgatggttttataaaggag

SEQ ID NO: 526407 - DNA, 614 bp, Homo sapiens
ccaaagtgctgggattgcaggcctgagccaccatgcttggctagttcttgatctagaacagaaggcagcacacattgcctgtaaaatgtcagtggtgaatatattaggctttgtgggccagatgatctgtcacaaccacacggctctgctggtgcagcctgaaagcaaccatagataatacacaggcaactgggcacggctgtgttcaaataaaactttatttataaaaactggtgatgtgctggattggggttgtagtttgctgactcctaactagaatagtgattttttttttctcacaattttatcattgatckacatataggctaccagagttctcttcattgatactgaaccagtctctagaggtggaaggtgatggttgggaggttgtaagggctaaggccactggcgtgccacctttcagggcagaaattgtgatatggtttggctgtgtccccacccagatctcatcttgaatggtagctcccataattcccacaagttgagagagggactcagtgggaggtaattgaatcatggggcaggtctttcccgggctgttctcatgaaaacaaataagtctcatgagatctgatggttttataaaggag

SEQ ID NO: 526408 - DNA, 584 bp, Homo sapiens
acatccaatgactttattttaccttcattacctctttaaagatactctcttcacatacatcacattctgaggtactagggacttgtaattggggggacacagttcataacacacacgttggatctttyttctttaaattttttttttttttttttgagacggagtctcgttctctcaccaggctggagtgtagtggtatgacttcagctcactgaaacttctgactccctggttcaagcaattcttctgcctcaccctcccgagtaggtgggattacaggcacgtgccaccacgcctggctaatttttgtatttttagcagagatgggatttcaccatgttggccaggatggtctcgatctcctaacctcgtgatctgcctgccttggcctcccaaagtgctgggattccaggcgtgagccaccacgcccggccttttctttaaatttttaaatttcaacttttattttagattcagggtgtacatatgcagttttgatatatttccatgatgctgatgtttggggcgcaatggatcctgaaacaggaattgaaagaaaataaagaatgtgtgagcaaaaactc

SEQ ID NO: 526409 - DNA, 584 bp, Homo sapiens
acatccaatgactttattttaccttcattacctctttaaagatactctcttcacatacatcacattctgaggtactagggacttgtaattggggggacacagttcataacacacacgttggatcttttttctttaaattttttttttttttttttgagacggagtctcgttctctcaccaggctggagtgtagtggtatgacttcagctcactgaaacttctgactccctggttcaagcaattcttctgcctcaccctcccgagtaggtgggattacaggcacgtgccaccacgcctggctaatttttgtatttttagcagagatgggatttcaccatgttggccaggatggtctcgatctcctaacctcgtgatctgcctgccttggcctcccraagtgctgggattccaggcgtgagccaccacgcccggccttttctttaaatttttaaatttcaacttttattttagattcagggtgtacatatgcagttttgatatatttccatgatgctgatgtttggggcgcaatggatcctgaaacaggaattgaaagaaaataaagaatgtgtgagcaaaaactc

SEQ ID NO: 526410 - DNA, 584 bp, Homo sapiens
acatccaatgactttattttaccttcattacctctttaaagatactctcttcacatacatcacattctgaggtactagggacttgtaattggggggacacagttcataacacacacgttggatcttttttctttaaattttttttttttttttttgagacggagtctcgttctctcaccaggctggagtgtagtggtatgacttcagctcactgaaacttctgactccctggttcaagcaattcttctgcctcaccctcccgagtaggtgggattacaggcacgtgccaccacgcctggctaatttttgtatttttagcagagatgggatttcaccatgttggccaggatggtctcgatctcctaacctcgtgatctgcctgccttggcctcccaaagtgctgggattccaggcgtgagccaccacgcccggccttttctttaaatttttaaatttcaacttttattttagattcagggtgtacatatgcagttttgatatatttccatgatgctgatgtttggggygcaatggatcctgaaacaggaattgaaagaaaataaagaatgtgtgagcaaaaactc

SEQ ID NO: 526411 - DNA, 510 bp, Homo sapiens
tttgaacaccaatctctatttcttccaaatctggtgttttagatctcctctcaggaccagtgcactgaagagaaagggactgatggttctgcagcacccacaccrtgcaggctcctctcgctcctctagccctcaggacagcaaacccgtgcaatgtgcatcatcatacccagtgtcaggtgaggactgtaggcacagagagatttaggcaacttcctccaggccccctctcaattctaactcttaactgccatgcgtctttggctccctttgtaagatggaagcatggagaggaggaatgactaacttacagccttggaaatgtagaatcaggaaagcctcacaaaggggatgagtgggaggatgatgagtgagctgcagtttggcaggtggataacaagaggaaagggcatgctggctaaagggacagcatgtgcaaaggccctggggtgagaaagagcaaggcactgtcagggcaggagcaggaggggtgcagtgagggcaagccag

SEQ ID NO: 526412 - DNA, 486 bp, Homo sapiens
cactggatatgagagctgtgaggggggcagggatcaaggatgactcccaggtttggggcttggggaagggagagaatggtcccactatctcrggctgggaactcatgagaagaaggcagtttggggtagagaatggtaggtgggctgatgagttcagttttgcacaggctatgtttgagatattggtggggtccctgaatgaagatccccagtcaactgcaggaaagagaaggctgagatggagatggagacttggggtctttgtctgctggtggcaattcaagctctgggatagcatgtagagtgagcagaggcaaggaccagaaccgggatggagtgggatggaggctgtactaccagtgctgtttggtttgggccaggggttagcagggaggttagaacacgggcagagaagagatgctgatgcccagatctgacagtggagtctaggacaccaaggccagccttcaatcctgtctataagca

SEQ ID NO: 526413 - DNA, 630 bp, Homo sapiens
agctgtttaataagagttcagattagtgtcaacaaactgaccctactaagacagacaagaatttgatttgtattttttaaaacctcaatamatttactttcaccttttcagctatttaatgcctctatttgtgttcactcattatcaacaaagataaagtacttatttagattttttaaaaaaattatctcttttcaaatgaaaaccatttgtgaaagcacattgatgggaatgtacctaaacaaggatatacctcctaattagctctttttagttgctcacattgctgtaattaaagctcattgaggccaattcaaatgaagaactgtcttctttattttttaaagtatcatttcaaatgattttgaaactgacattatcctcattatcccttcttagaaatgagctttcatgattaaagaacagaaagtgagattagctcaatggttgatgaaggtttattattgttttctttccttttgttttgcttccgttttgtttttgaccgttatacttattatttggcctttgttttgcaccaaaactcttgtaatatgcatgtattcaagtcagactgaaaccatctttgcaaaaattataagtgagtaaattatgagagtgaaagagacc

SEQ ID NO: 526414 - DNA, 630 bp, Homo sapiens
agctgtttaataagagttcagattagtgtcaacaaactgaccctactaagacagacaagaatttgatttgtattttttaaaacctcaataaatttactttcaccttttcagctatttaatgcctctatttgtgttcactcattatcaacaaagataaagtacttatttagattttttaaaaaaattatctcttttcaaatgaaaaccatttgtgaaagcacattgatgggaatgtacctaaacaaggatatacctcctaattagctctttttagttgctcacattgctgtaattaaagctcattgaggccaattcaaatgaagaactgtcttctttattttttaaagtatcatttcaaatgattttgaaactgacattatcctcattatcccttcttagaaatgagctttcatgattaaagaacagaaagtgagattagctcaatggttgatgaaggtttattattgttttctttccttttgttttgcttccgttttgtttttgaccgttatacttattatttggcctttgttttgcaccaaaactctygtaatatgcatgtattcaagtcagactgaaaccatctttgcaaaaattataagtgagtaaattatgagagtgaaagagacc

SEQ ID NO: 526415 - DNA, 469 bp, Homo sapiens
caactgtacagacaaaatagacacccctcttgataaggaatatgacaaaggaagcacttaatttaaaatagatctggctttaaatcattcattagaattgagaatttcaaaaaattagggaataaaatttccagaaacttttaggtatattgcaattatagcactctcctgtgggaaggattaaaaaatgatgccaagtggcttcaggtagggagaasggtctgtatggagaaaaaggtgtcagcactagggatgccaggtacatctttatgaaaaagaaattgacgttatctatgcattggttacattcataaaggcagaaagtggaggatttaggtcagaatcaagtcacagaagcacagaaactggtaattgctaaacctgttgaagcagatgtctgaagtccagtgttagtatagcctttcaaagctcctgatcatcctttccaacatactgtgatatattcaaa

SEQ ID NO: 526416 - DNA, 617 bp, Homo sapiens
aaacttggccataaatgagccaattttaatgaaagtcattattaagtgataattgaacacagctgataaagcaacagtaacgattatttccacgtgttgatttggcctcccagttgctctcatttcattcattcaatcattccctcagaaagaaatgtatttttgtactaagtacctaagatcaacaataatgtgtatacattccttcatgtggscaggtggggggaaaccttttagcacatattctcaggatacccagaatggatagaggaagaagactcaataaaattcaaacttttatgattatgtgcataatttccatttccacaatatattttttctagatctaaatttatgtttgagagtatttttgtagctgagtggtgtaagggacagagaaacctgaggaggggttggcttcccactagaaaccttccctcacaacagtttgagtaaatcttccctgcagtaatgataaaaccatccaatgactcttgaaatcttgggagaatggtcttcttggacaaattgaggagagtcttaggatcaaaaggattcattagataaaatgttgtcattaatataattagttattaaatgaaagtatttcccaggct

SEQ ID NO: 526417 - DNA, 617 bp, Homo sapiens
aaacttggccataaatgagccaattttaatgaaagtcattattaagtgataattgaacacagctgataaagcaacagtaacgattatttccacgtgttgatttggcctcccagttgctctcatttcattcattcaatcattccctcagaaagaaatgtatttttgtactaagtacctaagatcaacaataatgtgtatacattccttcatgtgggcaggtggggggaaaccttttagcacatattctcaggatacccagaatggatagaggaagaagactcaataaaattcaaacttttatgattatgtgcataatttccatttccacaatatattttttctagatctaaatttatgtttgagagtatttttgtagctgagtggtgtaagggacagagaaacctgaggaggggttggcttcccactagaaaccttccctcacaacagtttgagtaaatcttccctgcagtaatgatmaaaccatccaatgactcttgaaatcttgggagaatggtcttcttggacaaattgaggagagtcttaggatcaaaaggattcattagataaaatgttgtcattaatataattagttattaaatgaaagtatttcccaggct

SEQ ID NO: 526418 - DNA, 533 bp, Homo sapiens
gtagacatagacagtttggaagggaaactttgaccagtcaagatgggaactgatggaggagtactcctggggcccatccttcaagggcatgccacatgattcttggaaggtcctggtggtattgagctccagtgtccacagccgtgaccttgataacacacccttctgttggcttttcttccttctctgacctgtctccctagtccctcatttctggtccctggatcatcttycaaataaacacccacatacttgccttgcctcagactttgccttcaggggaagcaagtctcaaacgccatccaaatgaaaccagtgtttcttccgagaagaaaggtgtatgaatatttgcccgttggataagccacatcaacagtgtcagccatagtgcttgtgggttcataaagaagccatcccagatcctgtttccctgactcccaaaacagaaatctaacatacatactgtataccaaacacagtggttattttcaggtatattttcttatttcacatgtacaacagccacttgcagt

SEQ ID NO: 526419 - DNA, 504 bp, Homo sapiens
tgacaacaattaccactggtgagaaaggaagaagaatgggatccaggaaagggaccagtagacctcaatttatttaaggcaagtaactgaagcacaaagttaaaatttagtaaaaccaagttgtgggtatagggatgttcacyacattagccttttttgttatcttcgtgtttgaattatttcccaataaagtaaataatttttaaagctccacaggcgatgccaatgtactgccagtttggagagagagaaaaaattcaatttcaaatgctagtctaggcatcttctttttgatccttataaagcatccaggccctgtgactgataaattctaatctattttttccccaacatctacttccagtcttttggaaattaattcagagtataatgtaatctacaatctttgcatgtatctttgtcaacatctaccctatggaacataaattcctagaaaacagaaaaaaatcttattttcttaatctcccattgctaggtgaccat

SEQ ID NO: 526420 - DNA, 504 bp, Homo sapiens
tgacaacaattaccactggtgagaaaggaagaagaatgggatccaggaaagggaccagtagacctcaatttatttaaggcaagtaactgaagcacaaagttaaaatttagtaaaaccaagttgtgggtatagggatgttcaccacattagccttttttgttatcttcgtgtttgaattatttcccaataaagtaaataatttttaaagctccacaggcgatgccaatgtactgccagtttggagagagagaaaaaattcaatttcaaatgctagtctaggcatcttctttttgatccttataaagcatccaggccctgtgactgataaattctaatctattttttccccaacatctacttccagtcttttggaaattaattcagagtataatgtaatctacaatctttgcatgtatctttgtcaacatctaccctatggaayataaattcctagaaaacagaaaaaaatcttattttcttaatctcccattgctaggtgaccat

SEQ ID NO: 526421 - DNA, 609 bp, Homo sapiens
acatttttgtaaattccattgccactggaggaaaccatggaccagagtaacctaaagatgcatgttggtatatattttaattccaggtaacattggaatgtggtatgtgttgggggtgggatcttcctgtttgtttttgtcaagctaatattatttacaaaaaccatcccaaggactgagagcaaaatgtattgattatctttatgtggaccatgacaaattgattttttaattgagacttcctattttcagggagttcagtgtctcgtaggaaaatagtaaattttgaaaaactttaaaatgttcatgccactgatcatgggaccacatgattgttgataagggaaggtaggacaggaggaagttcaagaattctcagggcagtccaaagcagaaggaaagggtggcatttcatttatgtatctgactgccatcttaactgtgttctctgtgaatkgcctccaacaatatggagataattcaaaacaagcattaacaagatatagacagtgttttggagaagaagcaaaatagggtctctgtttcgaaaacacactgtcttatgtttagtgtttaataagttcctaatctgctataataacatcttca

SEQ ID NO: 526422 - DNA, 635 bp, Homo sapiens
agtatctcccatccctgtggagtctgtagatggtgacccttaagtttactaacacctcgggttcacaggtatcacttgagttgtggaatatccatttgattgatattcatttaggtgaatcctgatttcccttttttttttacattataaaacggaggtatgctaactgaggatgggaagcagatatccctgaaacataataaaattggtttttaaaacatagaaaacatttttaataactatattaaaatgttaatactatactaataactatattaatatcctattacattatatattataagttattacacaaatcacactcttattgtacaacatactactaatacaagttacatattttagaaatacaattatgataaatataaataatgctaatataattataccaaaatattaacatgtcaaatcttagcaatmatacttgaattatgaaacattcacaaatctggacagagcagagtgtaacactggctagtgactcagtgggcctcctgtactgccctcactgtagaagaaactatcccttaagctttgacaattcgctttcaaattatgtagcatttttctctaggaaggctttttattatattttggtggcacttaagccctcc

SEQ ID NO: 526423 - DNA, 386 bp, Homo sapiens
tgctgagtttgaattctgttatcttcccagggtttatggacgaccccaggaatgctcttcatayaccggctcccaaactgaatgaacaatgtaaaaagattgataggtgatgagagatgtgtttcgtatatattgggatggggtgtggatgataaagcattggtattttaagcagttgacactagacaagagtaaacctaaagagtcctaggactcccaggtctttttcaaggggcaaaaacctgtgtcttttgagtgcctgaaagagttctaactgaaattgcccaggtgaagggaagtagcaactggcttctccatttaaattatgcccttctgacggcccgtcgactgacgtagaacatggcactgttatcgcacagcagcga

SEQ ID NO: 526424 - DNA, 266 bp, Homo sapiens
atcattaaacagcaggggccatrcaaaccaaactctccagcggtcttacacccagggctcagggagtgaaagaatagtcagttctcttgttggctgttaatttggatgtaaatctaaacttttgagagctaggaatcgggatttttcagtgtcctttgttatttgtaatgtggccatagggtgaaagcccttgggtatgctccattgataaagagaggcaggtttagggtagtaactggataaaaaaaaaaaatgagagtttcaca

SEQ ID NO: 526425 - DNA, 266 bp, Homo sapiens
atcattaaacagcaggggccatacaaaccaaactctccagcggtcttacacccagggctcagggagtgaaagaatagtcagttctcttgttggctgttaatttggatgtaaatctaaacttttgagagstaggaatcgggatttttcagtgtcctttgttatttgtaatgtggccatagggtgaaagcccttgggtatgctccattgataaagagaggcaggtttagggtagtaactggataaaaaaaaaaaatgagagtttcaca

SEQ ID NO: 526426 - DNA, 616 bp, Homo sapiens
atcattaaacagcaggggccatacaaaccaaactctccagcggtcttacacccagggctcagggagtgaaagaatagtcagttctcttgttggctgttaatttggatgtaaatctaaacttttgagagctaggaatcgggatttttcagtgtcctttgttatttgtaatgtggccatagggtgaaagcccttgggtatgctccattgataaagagaggcaggtttagggtagtaactggataaaaaaaaaaaatgagagtttcacacaagcaaccagtggctcagagaggagagctcaaccgtaacaactaaattttgaaaatacttctctcttgaggggattaagtctctcaattcactcccttttttaaaataaaccaatgatgtgttataacatgctgtcttcattttaattcactccaaaatggcgcagtggtccagggtttatgctgttagagcrgtgatggtagcgttttgccacactgctgtcacctctcggttttgctatcctgtccacttactttgtcactacagccttaaatccctactgcccccattaaagtgtctacttgtctcctaaaactcatttatactgtttgtttttgatgtcttcctt

SEQ ID NO: 526427 - DNA, 645 bp, Homo sapiens
aagggaaaagaaaacaaagcaaagaaggatatgaagtagaaggcaggcactgaaattcctggagggcgaattatctgaataaagacctraacaggtagtgcctggcacaggtgaatacgcagtaaattttagctattttactaggatatatttttgctccactgctctggatttggagcacattgtggctaacatgtcttggagaatgctgatttaaggtaatgacttggagttgtcacactttgctagtgattagacttaaccaccattcagatttctcatctgcattactggctgttctcattttttcccctttgcgctcatgaaggttcttttcttgaaacaaatacacatcatccccctctggggtgatattgctaccagaggagctactacagcatttgctcttccatctttcataaggacctgtccccataaaagaagcacttgtctcccacaattgtttctcatcagatgctaaattacataaaaggatgccttgttccaagtggagcatgggggcctctcgctcaaatgtggttagtgctgctaatgggatctgcgtggcttgcatggagggggagacctttagcctgtcatagaagctgacattctaaatagcaacaggttccagatagaaatacc

SEQ ID NO: 526428 - DNA, 604 bp, Homo sapiens
gaagaattctgaatcacatcctccctccccaccaaaaccataacttcacgaagctaaatgccaacaaccaaacacaaaatggtcctaaatctggtgcgagctccaccggctctgacttttcatcgtcaagtagacatggtgaagatggagtattttacttgctaaacgtggggtcccaatttagagttaagccaatatattggtgtatctcaggtgctctgaacatggacagcaggtgcttatacacacatactatcattgtcattcatcattttgaacttttgattggttctcaaatcaattatcaccactgtcagtcttaactttttaaatgtttaattcccctgtaatttaaagaatatagaatttaaaggaatgctagaaggttcacagggcttatttttgaacaaggttaaataaatagacattgtttctgtctaatattgtaagacttgaccaacatttagcctaattgctaaaggaatcaaacaagaaagaataygttcaaaacagacaaaacgtaaagagactctccccagaggcatccaatgtggaagtgcctctgcccgtcctgaagggtgtgggattgattccccagagtcca

SEQ ID NO: 526429 - DNA, 589 bp, Homo sapiens
aataaagcaggtccccgggcaggttcctggtacacaaggtcattttctcctccgcagacccaaagagcatttgtttcttagctactcaaacattttgctracaggttagattcctctactaaatatatttatctttccagatttacatttagctacaaataacattttcaaggtcattaaaagtagtacttcaaaaggaagcataacagtaactttatattgggaggctgaggcgggcggatcacctgaggtcaggagttcaagaccagcctgcccaatatggcaaaacctcatctctactaaaaatacaaaaaattagctgggcatggtggagggtgcctgtaatcccagctacttgggaggctgaggcaggagactcacttgaacttgggaggtggaggttgcagtgagccaagatcacgccactgcgctccagcctgggcaacaagagcaaaattccatctcaaaaaaaaaaaaagaaaaaaaaaaagtaactttatggcttattccttcctcaattacaactttcatcttccaatgttctgctaattcaaacatcacatcgtattatggctttaatacatacgct

SEQ ID NO: 526430 - DNA, 641 bp, Homo sapiens
acccgtcttctgcgtcgctcacgctgggagctgtagaccggagctgtagaccggagctgttcctattcggccatcaagacgccataaagaatttttgtgattcagtgatcattttaatggagggtgatgtatgcatgcacaaatgcaatgcgcctgggaaagtgcattgatgaaatctcacatagggatctgtacagatgaatagggatggcagcagggctggagatggaaactgatagattaaaaaatagtttcagtgtaatatgaagctgtattaacatctcccagcaaccttagcactggtatgtatttggaaactcctagtagaaaccaccatgacaagcgtgagacctgtggactagaccatttctataatctctcttagctatcaaaatttcacagtttcaaagtttctctattaataccagttatagccaagcatccggcgtcattccctatcgcatcccttttgtttactgtgcccttggctgttraagtagtttccccactaatctgtaaattcccagaaaccaaaaaccacatttactctcttctctctgcatctctgctcaggtatcagagctgtgtcttattccacatctgccttcttctctccatatctctgatcaggtatcagagct

SEQ ID NO: 526431 - DNA, 594 bp, Homo sapiens
gatctgagttctacaaccctaagaaaatggatccttctctagtgtcttctgaaagaactacaggcctgctgacactttgatttttgtctagtgagatctgtatcagacttctgatctacagaactcaaaaagaggaaacttgtatagtttaagccactaagattttggcaatttgttatggcagaagtgtaaaactaataaactcattttaaaaaaaaggggtagaagacacaaactattaatgctaaggatgacggtagagatactactagagatcctgtaataatcaggggataagagaatatgaatattttatggccatgaaggttgagtatcccttatctaaaatgcttgagascagaagggtttgggatttttgatttctaaaagattttggaatacaatgtttgcattattcctatgtactagttcagaatccctaatcttaaaatctgaaatccaaaattctgcaatgagcattttctttgagcatcatgttgggtgctcaagaagttttgaatttcagagcattttggatttcagattttcagattagggatgctcaacctgtacttgggattactcagatgaatt

SEQ ID NO: 526432 - DNA, 505 bp, Homo sapiens
ccagcaaggtcacaccttaggagcaaaaactgtatctgaaagttacgtaaccttccttaaggaaacctaaaatgaagcctcaacaaaatacggtagagatgctagcaaatttgcatcccattaaaacaaaattcagtgttctaaaaaagacattaatccagacttaacaacaattgatcatttacaawaaccagcattcttgcttattccctagacatgagaataggcaagaagagaaatatctatttatttaatccaaaaagaagactgaaaaagagaaacaatatgacaagagataggatagaaaacaagcagaaatatggtatatataaacccaaatatatcaataactgcaataaatgtaaatgcaccaaacactccaattaaaatgcagattatcagactttgtaataaagtgagactcaacaaaatgcaatctacagagattcactttaaaatatgaagatactaccatatgatccagcaattccactactgtgtgtgt

SEQ ID NO: 526433 - DNA, 505 bp, Homo sapiens
ccagcaaggtcacaccttaggagcaaaaactgtatctgaaagttacgtaaccttccttaaggaaacctaaaatgaagcctcaacaaaatacggtagagatgctagcaaatttgcatcccattaaaacaaaattcagtgttctaaaaaagacattaatccagacttaacaacaattgatcatttacaataaccagcattcttgcttattccctagacatgagaataggcaagaagagaaatatctatttatttaatccaaaaagaagactgaaaaagagaaacaatatgacaagagataggatagaaaacaagcagaaatatggtatatataaacccaaatatatcaataactgcaataaatgtaaatgcaccaaacactccaattaaaatgcagattatcagactttgtaataaagtgagactcaacaaaatgcaatctacagagrttcactttaaaatatgaagatactaccatatgatccagcaattccactactgtgtgtgt

SEQ ID NO: 526434 - DNA, 495 bp, Homo sapiens
tcttctgtaacatttccccctgatgctctgagcaactcactttcctccactgaataaaataaaacctttaagtgtatattttcaaagcagatgcaggcaaaagagacgattaagtgatcctgcaggatagaaatagaagagtgagaaccagcggtggctcacacctgtarttccagcatttagagaggctggttggatcacttgaggtcaggagtttgagaccagcctggccaatatggtgaaactctatctctactaaaaatacagaaattagccaggcgtggtggcgcatgactgtaatcccagttacttgcgtggctgaggtaggagaatcgcttgaacccgggaggcagaggctgcagtgagctgagatcctgccactgcacaccagcctgggtaacagaatgagactctatctcaaagaaaaaataaaaataaaaagagacagggagagagagagagagagaaccagcgtgtctaaggggagaaaaggga

SEQ ID NO: 526435 - DNA, 495 bp, Homo sapiens
tcttctgtaacatttccccctgatgctctgagcaactcactttcctccactgaataaaataaaacctttaagtgtatattttcaaagcagatgcaggcaaaagagacgattaagtgatcctgcaggatagaaatagaagagtgagaaccagcggtggctcacacctgtaattccagcatttagagaggctggttggatcacttgaggtcaggagtttgagaccagcctggccaatatggtgaaactctatctctactaaaaatacagaaattagccaggcgtggtggcgcatgactgtaatcccagttacttgcgtggctgaggtaggagaatcgcttgaacccgggaggcagaggctgcagtgagctgagatccygccactgcacaccagcctgggtaacagaatgagactctatctcaaagaaaaaataaaaataaaaagagacagggagagagagagagagagaaccagcgtgtctaaggggagaaaaggga

SEQ ID NO: 526436 - DNA, 569 bp, Homo sapiens
ctggccttgtcacttgcatgctgacagatacctgttttgaatgaactggcagattgctaaaatgttgttttgtggttgttatctgttcatttaactttgaaaatggatataaaatttagtgatgaagagtaagttttaaaaatggaaaagtaacctttttgaatgaactgscagattgctaacttttttttgtttttttttttttggttgttgtctgttcatttaactttggaaatggatacaaaatttagtgatgaagagtaagtttcaaaaatggaaaagtaaccttctctggttacttagtgggttattcagtaggtagaggttttgtatttttctaagtccctctttcaaattaaaaataatacttaatgatctcactcatacgtggaatctaaacagttgttctcatagaagtagaagagagatggtagaatagtggtgactagaggaaagggaggataaaagactacagagtgcaagactgttgactgaaaacaatcaattaatacatacaagcgaattaattgtattaattgcccatgtccttgcttacaaagaagatgcga

SEQ ID NO: 526437 - DNA, 586 bp, Homo sapiens
cttcttgctgtgtcctcaaatggcccttctgtgcacgcctgaagagagaaggagaggtggtgtcttctcctcttcttatacagacactggtccttcagattaagtctcacccttgcaaactcctttagccttcattacctctctaaagaccttatctccaagcatagtcacattgggggttagaatgccaacatacagattttggggagacacaattctatccataacaccttactttagataaatggaataggaaggtgttgtgtatacaagaaaaataaactattattggtggaaagaggtgggagagaagggtccatcagaaggaaatggctagaagcagaaagccatgttttttgtgtggctagaatgtaggatgcagggtgaacagaaatattggaaagagatgagtttgaaaaaatgaggttgaggagagatagttcaaggctttgtgtgataagctaaagcgtttgggtaacttagtactttgtaataccagtggcaggcaaaaaaataagaataaagcaaggccaggtgatgcttgatagtggaatratttctcaataagttgtgattcaactaattc

SEQ ID NO: 526438 - DNA, 568 bp, Homo sapiens
ccatggggaagacacgaagatgtacatgaggaatctgcccccatgacccaaacacctcccaccaggcctcacttctaaccttgagaatcacttttcaacataggatttggaggggacagatatccaaaccatataaatcctctacatatgtgaagccattcmttttgatccaaacaagagctgtttagcctcactgaggccaagtttagagacccatcctaccaattcaatagaacagagacttctcagatatcctgcaagtgcaacatgtccagaactgtgtatccaaagtagctcagcaccctcatttgcagaagctctgctaaaattaataaccattctggatatatgtaccataatacctgtgtctgtattcagaccatgtttttttagtgacttatatttaacgtgcctaaatagcaggcacgttaaaagtagcttatattttaacatttctcaaattaaactttccacatcgtttttactctgcctagaatacttactgcagcactctgttactgtgcatcaaagccctctagcaacactccaactactacccaaagtggat

SEQ ID NO: 526439 - DNA, 590 bp, Homo sapiens
ctgaagtgttctggtaacacatagcccctccttcccaggctttcaaatgtgtagagttgagcgcactgcgtatattagcagcagatgccatctgtgagaaagctgcagtcggtgtcagaacacttggtgattcattaaaccagaatgtacttggctggataatgcctatgaagaagaaagggyacccacaacactatgaacttggtgctgtgtcttgtgggaatactagccctggaaccaatttctccctctttctccacattcaattcttccttctagtctttcaaaaaacttttgcctctacttgtgtcctgaaaccccaccaacatctctagtctctggattacaagactcaactttccactaatgggaaacaaggttacttacaccacttgcttaaggtctactttgttccacacacttcatattcatggtctctaatcccatgaatgttcccggtagacaaattagttttctactaacttgtaatctttatggcaaatttagcactttggaacaacacagagttattatacagtttccacaggtcatgggtccaggcatgctttagctgacctcactcttcaggg

SEQ ID NO: 526440 - DNA, 590 bp, Homo sapiens
acctaccatggtataaacacaggaagaggaaaggaggtgactagatataaaatataatagcttcactggaaatggtaaggtggttctccttgctggtgctggggagacattgaaggtggctaggatggtattgactcmctatacaagcagcagtgagataaatgcaatcaatgacatgggtttctgttgcagctaagcaatgtgtttggaatcttgaatccctgacatatgaattagagacacttaagagatttttaatgtaacaaagaaaattcaacataaacagagaagaaatatagatgaggcttaaagtgaaggacaaaccaatgtatttagcattttcatcttttaatttcttaagagtaaacatatcgtattgactaaactatgttataacaatcttgcttatttaaaattcatgcaaataaagtagtcattctataatgttaaggggagcatggatagattgatattttgaggaccatctggcccatcatctcctaaaaattcctaaagtggcaccatgtccctagcatcagttacatgaattttaagccaactgcctagtaatgatgagaacattccaacga

SEQ ID NO: 526441 - DNA, 590 bp, Homo sapiens
acctaccatggtataaacacaggaagaggaaaggaggtgactagatataaaatataatagcttcactggaaatggtaaggtggttctccttgctggtgctggggagacattgaaggtggctaggatggtattgactcactatacaagcagcagtgasataaatgcaatcaatgacatgggtttctgttgcagctaagcaatgtgtttggaatcttgaatccctgacatatgaattagagacacttaagagatttttaatgtaacaaagaaaattcaacataaacagagaagaaatatagatgaggcttaaagtgaaggacaaaccaatgtatttagcattttcatcttttaatttcttaagagtaaacatatcgtattgactaaactatgttataacaatcttgcttatttaaaattcatgcaaataaagtagtcattctataatgttaaggggagcatggatagattgatattttgaggaccatctggcccatcatctcctaaaaattcctaaagtggcaccatgtccctagcatcagttacatgaattttaagccaactgcctagtaatgatgagaacattccaacga

SEQ ID NO: 526442 - DNA, 590 bp, Homo sapiens
acctaccatggtataaacacaggaagaggaaaggaggtgactagatataaaatataatagcttcactggaaatggtaaggtggttctccttgctggtgctggggagacattgaaggtggctaggatggtattgactcactatacaagcagcagtgagataaatgcaatcaatgacatgggtttctgttgcagctaagcaatgtgtttggaatcttgaatccctgacatatgaattagagacacttaagagatttttaatgtaacaaagaaaattcaacataaacagagaagaaatayagatgaggcttaaagtgaaggacaaaccaatgtatttagcattttcatcttttaatttcttaagagtaaacatatcgtattgactaaactatgttataacaatcttgcttatttaaaattcatgcaaataaagtagtcattctataatgttaaggggagcatggatagattgatattttgaggaccatctggcccatcatctcctaaaaattcctaaagtggcaccatgtccctagcatcagttacatgaattttaagccaactgcctagtaatgatgagaacattccaacga

SEQ ID NO: 526443 - DNA, 590 bp, Homo sapiens
acctaccatggtataaacacaggaagaggaaaggaggtgactagatataaaatataatagcttcactggaaatggtaaggtggttctccttgctggtgctggggagacattgaaggtggctaggatggtattgactcactatacaagcagcagtgagataaatgcaatcaatgacatgggtttctgttgcagctaagcaatgtgtttggaatcttgaatccctgacatatgaattagagacacttaagagatttttaatgtaacaaagaaaattcaacataaacagagaagaaatatagatgaggcttaaagtgaaggacaaaccaatgtatttagcattttcatcttttaatttcttaagagtaaacatatcgtattgactaaactatgttataamaatcttgcttatttaaaattcatgcaaataaagtagtcattctataatgttaaggggagcatggatagattgatattttgaggaccatctggcccatcatctcctaaaaattcctaaagtggcaccatgtccctagcatcagttacatgaattttaagccaactgcctagtaatgatgagaacattccaacga

SEQ ID NO: 526444 - DNA, 617 bp, Homo sapiens
ttcatttatctccagtgcatttttgataacaaagctttgttggtgacaacaattttgagtcctttcatgctttatgataaatgatacctttgccctcaacttaaatgataatttttgtggacaaatgtctcgctcctaatattttttttccacagaattagaaaagaagtcaatatcttttgttagcatctatattttcaacggacaaatttgaggctaacacttctgatttttttgtacatcctttgagttcagaaacttaagaaacatttaagtaagtgtctactttttttgttgttgctcaaagggccactttagtctcaagatttgttctattactcagttcatagaaattcttcaacaaattattaattcagtcacaattatcacttctcatcccacaattcaataacctcattatatatatatataaaatattatatatacatatatacaatttttttccttgtttttactaagacttttgctaatggttactggatctgctcaatgtgttctccacagcttctcacttttatctcacttsttgggtccccatttttctatattctgggagatttctttgactctttcttgcacaatgctaattctgtctt

SEQ ID NO: 526445 - DNA, 648 bp, Homo sapiens
agctgcaagggtagatgggaaatcacctttgtcattttcaacttctaaagtgggaagcaggctctgtcttatgagctggagagcttttcaaatacaggagggagttcagatgcctgggatctcaaaacaaacagaatttcactccgactggtcgattcacgcctgtcatgttgactcttatgttacagtaagtttgttaaataatggttttgcatttcttcagagttcaaataatcctggtaaccattaactggcatcagatgataacttcaggattaaagtaggaagcttacagggatgcactgagtatcactagtggcaggctttgcttttgaacaattctgaacagacatttattttttatgtatgtaacttttttgttgttgatctcttgcagctttgacaaaatctgtgatattgtcctgtctaagtgttatttatttagtacatgaagaggtaggcttatctagtgttctattcaytcaaagagatctaactggaattagttgaatcacaacttattgagaaattattccactatcaagcatcacctggccttgctttattcttatttttttgcctgccactggtattacaaagtactaagttacccaaacgctttagcttatcacacaaagccttgaacta

SEQ ID NO: 526446 - DNA, 642 bp, Homo sapiens
tgaactctacacagattgagaarcctagatcagtagagatattgattgttcgatgacttccagctgtgctggaatttgtgctgacattttagttttcaagttaaagaggctaatttcaggcgaaagtgggtcttaagtatattcacatgaggcaatgtttacaggaatcataggagaaaaatatactgctggctattaaaaatttgtaagcatttccaaacagctggaagtgaaaaaaaaaagaatatccctaccaactcaagcgtctccaacttgaatatccctaccaagaatatccctagcaactcaagcatctggatgctgtccaatgttattaaaggactgtggaacttcagaatccttatatgtgaacatttgttccaaaccacggaaacaatccaaagagtagtggctatgctagtgcccgtttaattcaacagtgttaagaagttacatggtatgtgctaaacatgcatgaagaaaacatgagtaagaaacaaatttcacccttgagaagctaccagtcctcgctaaaaactggtgacaaaaaaggatcaattgcttcgcatcttctttgtaagcaaggacatgggcaattaatacaattaattcgcttgtatgtattaattgattgttttcagt

SEQ ID NO: 526447 - DNA, 642 bp, Homo sapiens
tgaactctacacagattgagaagcctagatcagtagagatattgattgttcgatgacttccagctgtgctggaatttgtgctgacattttagttttcaagttaaagaggctaayttcaggcgaaagtgggtcttaagtatattcacatgaggcaatgtttacaggaatcataggagaaaaatatactgctggctattaaaaatttgtaagcatttccaaacagctggaagtgaaaaaaaaaagaatatccctaccaactcaagcgtctccaacttgaatatccctaccaagaatatccctagcaactcaagcatctggatgctgtccaatgttattaaaggactgtggaacttcagaatccttatatgtgaacatttgttccaaaccacggaaacaatccaaagagtagtggctatgctagtgcccgtttaattcaacagtgttaagaagttacatggtatgtgctaaacatgcatgaagaaaacatgagtaagaaacaaatttcacccttgagaagctaccagtcctcgctaaaaactggtgacaaaaaaggatcaattgcttcgcatcttctttgtaagcaaggacatgggcaattaatacaattaattcgcttgtatgtattaattgattgttttcagt

SEQ ID NO: 526448 - DNA, 642 bp, Homo sapiens
tgaactctacacagattgagaagcctagatcagtagagatattgattgttcgatgacttccagctgtgctggaatttgtgctgacattttagttttcaagttaaagaggctaatttcaggcgaaagtgggtcttaagtatattcacatgaggcaatgtttacaggaatcataggagaaaaatatactgctggctattaaaaatttgtaagcatttccaaacagctggaagtgaaaaaaaaaagaatatccctaccaactcaagcgtctccaacttgaatatccctaccaagaatatccctagcaactcaagcatctggatgctgtccaatgttattaaaggactgtggaacttcagaatcctyatatgtgaacatttgttccaaaccacggaaacaatccaaagagtagtggctatgctagtgcccgtttaattcaacagtgttaagaagttacatggtatgtgctaaacatgcatgaagaaaacatgagtaagaaacaaatttcacccttgagaagctaccagtcctcgctaaaaactggtgacaaaaaaggatcaattgcttcgcatcttctttgtaagcaaggacatgggcaattaatacaattaattcgcttgtatgtattaattgattgttttcagt

SEQ ID NO: 526449 - DNA, 642 bp, Homo sapiens
tgaactctacacagattgagaagcctagatcagtagagatattgattgttcgatgacttccagctgtgctggaatttgtgctgacattttagttttcaagttaaagaggctaatttcaggcgaaagtgggtcttaagtatattcacatgaggcaatgtttacaggaatcataggagaaaaatatactgctggctattaaaaatttgtaagcatttccaaacagctggaagtgaaaaaaaaaagaatatccctaccaactcaagcgtctccaacttgaatatccctaccaagaatatccctagcaactcaagcatctggatgctgtccaatgttattaaaggactgtggaacttcagaatccttatatgtgaacatttgttccaaaccacggaaacaatccaaagagtagtggctatgctagtgcccgtttaattcaacagtgttaagaagtyacatggtatgtgctaaacatgcatgaagaaaacatgagtaagaaacaaatttcacccttgagaagctaccagtcctcgctaaaaactggtgacaaaaaaggatcaattgcttcgcatcttctttgtaagcaaggacatgggcaattaatacaattaattcgcttgtatgtattaattgattgttttcagt

SEQ ID NO: 526450 - DNA, 451 bp, Homo sapiens
attaaaattgagatttttctctataaycaatgatctttcacctgtactaggcaactaaagggaatcatcactttttcaaatgctttcgacagattttttttttttttcttggagaataagtctaggtgacattcacaattaggaggatcatatagcacatgcttgaatattgtttgtctccaactagttatatatgttaacatataaaaatacgcacacagagcctacatgactcacctctgtaaaatgcaaacatggaatcaaggcagcacattttttatttactaatgataaatacttccgggttttggcaaatctcaagtgcaagacgtgacagatgatacaactgtgtatctctggtttacaccaggaagacctgatgtactgtgggtttgtatctccatgtgcccttcaaattaagtgtggctatgtgattagttttgttcaaaaa

SEQ ID NO: 526451 - DNA, 451 bp, Homo sapiens
attaaaattgagatttttctctataaccaatgatctttcacctgtactaggcaactaaagggaatcatcactttttcaaatgctttcgacagattttttttttttttcttggagaataagtctaggtgacattcacaattaggaggatcatatagcacatgcttgaatattgtttgtctccaactagttatatatgttaacatataaaaatacgcacacagagcctacatgactcacctctgtmaaatgcaaacatggaatcaaggcagcacattttttatttactaatgataaatacttccgggttttggcaaatctcaagtgcaagacgtgacagatgatacaactgtgtatctctggtttacaccaggaagacctgatgtactgtgggtttgtatctccatgtgcccttcaaattaagtgtggctatgtgattagttttgttcaaaaa

SEQ ID NO: 526452 - DNA, 540 bp, Homo sapiens
ttttttataatttttaaaggagtaaatttggaagaaagtaacattatgaaatgtcccctttatattatttaatatttttctcataaaaataaagcgttcttaatttagaaattaaaggaaattaattaaaagaaagttcaaaatattaataaaatgatagccaacacaaactggaaaattaatcctcataaaataacctgcaatcacatcattcaggaaaacacaattaacatttcccttcagtcttattttccataagattgaccttattttcttcataaatttatactttacaacatttaatttgaagrcaaatttatggatttaattatttgaaatcataattttgaaggatatgtaatatttcatttatacatactataattatttatacatttgttttcattttcttacttagtctatattgtttcgtgtttatgaataacccaataattaatattcttgtaaatttttctttgaagatattaggaaaatcagagataagattctgaaaagtgtaatcaatgaacttgaaaaatc

SEQ ID NO: 526453 - DNA, 540 bp, Homo sapiens
ttttttataatttttaaaggagtaaatttggaagaaagtaacattatgaaatgtcccctttatattatttaatatttttctcataaaaataaagcgttcttaatttagaaattaaaggaaattaattaaaagaaagttcaaaatattaataaaatgatagccaacacaaactggaaaattaatcctcataaaataacctgcaatcacatcattcaggaaaacacaattaacatttcccttcagtcttattttccataagattgaccttattttcttcataaatttatactttacaacatttaatttgaagacaaatttatggatttaattatttgaaatcataattttgaaggatatgtaatatttcatttatacatactataattatttatacatttgttttcattttcttacttagtctatattgtttcrtgtttatgaataacccaataattaatattcttgtaaatttttctttgaagatattaggaaaatcagagataagattctgaaaagtgtaatcaatgaacttgaaaaatc

SEQ ID NO: 526454 - DNA, 540 bp, Homo sapiens
ttttttataatttttaaaggagtaaatttggaagaaagtaacattatgaaatgtcccctttatattatttaatatttttctcataaaaataaagcgttcttaatttagaaattaaaggaaattaattaaaagaaagttcaaaatattaataaaatgatagccaacacaaactggaaaattaatcctcataaaataacctgcaatcacatcattcaggaaaacacaattaacatttcccttcagtcttattttccataagattgaccttattttcttcataaatttatactttacaacatttaatttgaagacaaatttatggatttaattatttgaaatcataattttgaaggatatgtaatatttcatttatacatactataattatttatacatttgttttcattttcttacttagtctatattgtttcgtgtttatgaataacccaataattaatattcttgtaratttttctttgaagatattaggaaaatcagagataagattctgaaaagtgtaatcaatgaacttgaaaaatc

SEQ ID NO: 526455 - DNA, 647 bp, Homo sapiens
ttttactagaccatattccacatgacattccgtcttccttgacactgctattgtcctatcctaaatctttccacttgtcccctggaatccctgctttgtaataagcaaactttcacagatgcttgacttcttcttttaagagttccctccatcttcttgttttaataaaaaccattttctttcccacggacactgcttcccctgtaagtttctcaaatgatattctagcacaccatgcaagttcagaattggtgtctggttccctattgccatttagaaaccattattctcccaaatatatcaaaayatcattattgcctgggcacagtggctcatgcctataatcccagcattttgggaagccaaagtgggaggatcacttgaggctgggagattaaaatcagtctggacaacacagtgagactccatctctacaagaaaatttaaaaattaactgggtgtggtagtatgcacctgtggtcctagctacttggaaggctgaggcaagaagatcagttgagcccaggagtttgaggctacagtgagctatgatgacaccactgcactccagcctggtcaacagagtaagactctgtttataaaaataattttaaataataaaaacaaaactttattattgaagaaca

SEQ ID NO: 526456 - DNA, 647 bp, Homo sapiens
ttttactagaccatattccacatgacattccgtcttccttgacactgctattgtcctatcctaaatctttccacttgtcccctggaatccctgctttgtaataagcaaactttcacagatgcttgacttcttcttttaagagttccctccatcttcttgttttaataaaaaccattttctttcccacggacactgcttcccctgtaagtttctcaaatgatattctagcacaccatgcaagttcagaattggtgtctggttccctattgccatttagaaaccattattctcccaaatatatcaaaatatcattattgcctgggcacagtggctcatgcctataatcccagcaytttgggaagccaaagtgggaggatcacttgaggctgggagattaaaatcagtctggacaacacagtgagactccatctctacaagaaaatttaaaaattaactgggtgtggtagtatgcacctgtggtcctagctacttggaaggctgaggcaagaagatcagttgagcccaggagtttgaggctacagtgagctatgatgacaccactgcactccagcctggtcaacagagtaagactctgtttataaaaataattttaaataataaaaacaaaactttattattgaagaaca

SEQ ID NO: 526457 - DNA, 647 bp, Homo sapiens
ttttactagaccatattccacatgacattccgtcttccttgacactgctattgtcctatcctaaatctttccacttgtcccctggaatccctgctttgtaataagcaaactttcacagatgcttgacttcttcttttaagagttccctccatcttcttgttttaataaaaaccattttctttcccacggacactgcttcccctgtaagtttctcaaatgatattctagcacaccatgcaagttcagaattggtgtctggttccctattgccatttagaaaccattattctcccaaatatatcaaaatatcattattgcctgggcacagtggctcatgcctataatcccagcattttgggaagccaaagtgggaggatcacttgaggctgggagattaaaatcagtctggacaacacagtgagactccatctctacaagaaaatttaaaaattaactgrgtgtggtagtatgcacctgtggtcctagctacttggaaggctgaggcaagaagatcagttgagcccaggagtttgaggctacagtgagctatgatgacaccactgcactccagcctggtcaacagagtaagactctgtttataaaaataattttaaataataaaaacaaaactttattattgaagaaca

SEQ ID NO: 526458 - DNA, 563 bp, Homo sapiens
taattttcaactcctgtttgacctctctggacctcaccaaatatttatatggatgctgtcagattcggcactacaaacttattctctgctaaatatccttttcaaagtgaaattcactaatcacagcgcaaaataccaaaatacgtgtcttctatcctccttgttcctgacacttctgcaatattaaagaggggacttggaagttactatgtgacctttctttagcattcctgtcttccagattgatcacatacatcaaaataggaggaaagttttttactaacaatttctgttgaagtgatcataccttttttcatacggctaacaaccacaacacagaaaccaaataaaagtttctatctacatggtgcaatttatgaagcattttcatgctattatgtatttgactctcrtaacaattagagatatgcagtgcaaatattttacaaatgtgaaaaatgaaagtaatagaatttaaaggacttgatcaaagtcagacatctaacaagtgatgaagccagtaccaagaactatgtttcaactctcggtccagtatcttccca

SEQ ID NO: 526459 - DNA, 518 bp, Homo sapiens
aaaataaggagtcataaaggtatccaactcagacttcaatattacaaacaaacctactaaagatatttatttaaatatgttttttttgttattgttgaaacaaataaaaaatgttgccctagcattttgtgataagaaaaaatgccggaacctagagtacyggtcggaatccacaacctggacctcctaaaggggcgtgactctttcccaatatgatcctcaggagttttaaaatatatcaacagactcatctttgatcaaagtaaggactgatggagggtatacagtgatggcaagaggaaaaccaaagctaactcatttaggttgcttattagaaactgggttaaagtacaatctgtacaaccagcaaaaaaagacaaatttatctgaataaaactgatagcatctagcataatgacaccactcaattgacccaagactttgttttaattaaagccttttgcttattttattagatgctgatcctataccaagaccttcctggaaatctcactaat

SEQ ID NO: 526460 - DNA, 621 bp, Homo sapiens
tattgattactttatgacactacacattgaatatttagtctaataaatgattctcctgactccctctgagtctctagctcgagagagctgtagctgccagcatagttggaattagaccacctcttcattgcctttcctttacatggatactggaaaagcagggttccattttcaagagtaacaatggagaatgtgggctatgatgagaatagagtcaaactgaagattatttataagtaattacattttctgttttgttttatgaaacatataccatatgttttcatattaatgggtttttacattttgaaagaaaaattatttatatatgttgaatcttctcaaatggtcttaaaacttatgattctaayaaataaccttgaaaggctaataaattaactctgtatcataatataaaattaagaaatgattgtgaggggaaaggaagaatgaattttgaatttcttttaacagaaagagactgtcaaaatgcatctggattctgcaaaagagtgctggatcttggcaaaggagtagcatatcaataaccacacacctccccctagagtatgcctcttatcatcctcaactcttattcacatgttcctgaagcatcactgt

SEQ ID NO: 526461 - DNA, 621 bp, Homo sapiens
tattgattactttatgacactacacattgaatatttagtctaataaatgattctcctgactccctctgagtctctagctcgagagagctgtagctgccagcatagttggaattagaccacctcttcattgcctttcctttacatggatactggaaaagcagggttccattttcaagagtaacaatggagaatgtgggctatgatgagaatagagtcaaactgaagattatttataagtaattacattttctgttttgttttatgaaacatataccatatgttttcatattaatgggtttttacattttgaaagaaaaattatttatatatgttgaatcttctcaaatggtcttaaaacttatgattctaacaaataaccttgaaaggctaataaattaactctrtatcataatataaaattaagaaatgattgtgaggggaaaggaagaatgaattttgaatttcttttaacagaaagagactgtcaaaatgcatctggattctgcaaaagagtgctggatcttggcaaaggagtagcatatcaataaccacacacctccccctagagtatgcctcttatcatcctcaactcttattcacatgttcctgaagcatcactgt

SEQ ID NO: 526462 - DNA, 304 bp, Homo sapiens
gaaggccactgggccagagccgctgggtgccagcattaggaactaaaacatcaccaatttcggaggaactaagtccagtagaatcctacaaataggggtgtatcttctctaatgactgcttctgtgatttaggtaataaattgcttttttttccaaataatacttgctgatgtcccagccaggcccagccacccagggagcacccatggagaggccccacccttaatttggccaggccrcagggtgccctgcctgggtgacaggagtgggctgggattgcgagagacgcaggcttcgagggcct

SEQ ID NO: 526463 - DNA, 608 bp, Homo sapiens
aatatataaacattgagataatagcatcttgatgcctgtcttcattttttgtcttctgttttaaggactattagagacaaactaaccaaagataattctcccctcccaygtggctcgtgctgggacgccggcaccgtgagatggcgcccgtggccagatagagggtggcgtgtaaagcaggtggtcacccgtcactcgacttttcgcgtgctggtgagggtggtcgcatgtccatggatcagggctcacacctggcccatctggtggctgtgccatgggaggagcagagccacagccccgctccttgctgtgggtttcccgtgtcctccctgccctgcagtcccctgactccagctctggattagacaccccctgcttcccactgtgcacccgcccagagaagcacagcatgcgtgcctgcacttgcccccacgctgctaccctgctctgggtaccaaggacacaggcacagcagagcccccaccctcgaggcacctgtcatcttgtgacagggacaggctgaggggcaaatgaccagaaagggtggcaagtgccatgtcagacatatggtcttcatacaggggatgtcccaggactgctgggccaga

SEQ ID NO: 526464 - DNA, 409 bp, Homo sapiens
cctctctcctgtcctgcccctcccccgacatattggcagccgtccgtgagggggtccggaggccagtggtgtcctttggacccttgtggaaaatccccccagggtcagaagggcccagagggaagacaggactctgtggaagaggttgcctgcccatggagagagtccagatgcattgtgggccctgtgggtyggccctagtctccgccactgggacctcaagctggccaaggccatggccaggccctggctcctaggaggggtgaaactgatggctggacatgtacgtggacgacagcctccagggagggctgttcaacccccggcactggtatcattctctgccccctggagctcctgggaagatccgttaagcaagtggtggggcttccacggcacggaatattac

SEQ ID NO: 526465 - DNA, 608 bp, Homo sapiens
ctcaaggtgttgaatttttcttcccctctacagaaaaaaaaagaaaaaaaaaaaagaaaaaattcattttctttccttctagttccaggactatatggctgtgtattgctattaacttacagattgactgctcaatatgcttgatgataacactaataacaatcagtgttttatcacctggaaaatagacaaagcaagagcctgaattagaatagaccatagtgttgatgtttatttagtcttcccaaaatgtacttctaaatagattcagttcagtgagttcaaaacctatcagccagatttttgatgatatgatcctgctgttcagtacttttcctgagttctaatttacwtgagcattcatcttccaatctcatgctttcctgaaaaaggctctgcagtcattccctatctcttcattcttcccaattttgggaacttgtctgaggccgctggttatatatttgtattgcctccatctcagttctgacttgcgaccctttacaacatatataggaattgtttttcttttgggggagcaaattcagcatgaaaatcttgtgttaggtgagcactacacacacacaaaattaattagaaggtaatta

SEQ ID NO: 526466 - DNA, 608 bp, Homo sapiens
ctcaaggtgttgaatttttcttcccctctacagaaaaaaaaagaaaaaaaaaaaagaaaaaattcattttctttccttctagttccaggactatatggctgtgtattgctattaacttacagattgactgctcaatatgcttgatgataacactaataacaatcagtgttttatcacctggaaaatagacaaagcaagagcctgaattagaatagaccatagtgttgatgtttatttagtcttcccaaaatgtacttctaaatagattcagttcagtgagttcaaaacctatcagccagatttttgatgatatgatcctgctgttcagtacttttcctgagttctaatttacttgagcattcatcttccaatctcatgctttcctgaaaaaggctctgcagtcattccctatctcttcattcttcccaattttgggaacttgtctgaggccgctggttatatatttgtattgcctccatctcarttctgacttgcgaccctttacaacatatataggaattgtttttcttttgggggagcaaattcagcatgaaaatcttgtgttaggtgagcactacacacacacaaaattaattagaaggtaatta

SEQ ID NO: 526467 - DNA, 669 bp, Homo sapiens
ataacattgtgaactcatagatttgaacacatttggtatgtttcaatccagtgcagcatctgtccttattgataactcacattttcccacctttggctagcaggagcctctttaagctgwctggcaagtccttttgacttaactgtaattttctctgataactttctttgagttatgacaaaatgtttaaggcttctttttttgatgtaataatttttttattattatactttaagttctagggtacatgtgcacaacatgcaggtttgtcacatatgtatacatgtgccatgttggtgtgctgcacccattaactcatcatttacattaggtatatctcctaatgctagtttaaggcttgtatttcctgtcccagatttgaaatcagtcagttttgtagaagccctggtgtttctggcaaatttttaaatgttaaaattcaatgtttccaaagataaaagaattatcttttgctctttggttatttccaagactgttgtgtgtttcactattgaggttgtttgaatgaaaaaatataattgaaacattaaaaatatatacccatatatattactgaatttataaacataagtttctgcaaaattaaatactaaataattaattaaatattaaattaaatattaaaatatgttaggataccaatcttat

SEQ ID NO: 526468 - DNA, 669 bp, Homo sapiens
ataacattgtgaactcatagatttgaacacatttggtatgtttcaatccagtgcagcatctgtccttattgataactcacattttcccacctttggctagcaggagcctctttaagctgastggcaagtccttttgacttaactgtaattttctctgataactttctttgagttatgacaaaatgtttaaggcttctttttttgatgtaataatttttttattattatactttaagttctagggtacatgtgcacaacatgcaggtttgtcacatatgtatacatgtgccatgttggtgtgctgcacccattaactcatcatttacattaggtatatctcctaatgctagtttaaggcttgtatttcctgtcccagatttgaaatcagtcagttttgtagaagccctggtgtttctggcaaatttttaaatgttaaaattcaatgtttccaaagataaaagaattatcttttgctctttggttatttccaagactgttgtgtgtttcactattgaggttgtttgaatgaaaaaatataattgaaacattaaaaatatatacccatatatattactgaatttataaacataagtttctgcaaaattaaatactaaataattaattaaatattaaattaaatattaaaatatgttaggataccaatcttat

SEQ ID NO: 526469 - DNA, 669 bp, Homo sapiens
ataacattgtgaactcatagatttgaacacatttggtatgtttcaatccagtgcagcatctgtccttattgataactcacattttcccacctttggctagcaggagcctctttaagctgactggcaagtccttttgacttaactgtaattttctctgataactttctttgagttatgacaaaatgtttaaggcttctttttttgatgtaataatttttttattattatactttaagttctagggtacatgtgcacaacatgcaggtttgtcacatatgtatacatgtgccatgttggtgtgctgcacccattaactcatcatttacattaggtatatctcctaatgctagtttaaggcttgtatttcctgtcccagatttgaaatcagtcagttttgtagaagccctggtgtttctggcaaatttttaaatgttaaaattcaatgtttccaaagataaaagaattatcttttgctctttggttatttccaagactgttgtgtgtttcactattgaggttgtttgaatgaaaaaatataattgaaacattaaaaatatatacccatatatattactgaatttataaacataagtttctgcaaaattaaatactaaataattaattaaataytaaattaaatattaaaatatgttaggataccaatcttat

SEQ ID NO: 526470 - DNA, 528 bp, Homo sapiens
gtagacaagtacataaaataattgtaggtattataaatgttaaggtgtcatatttaaattttcatattgataatgtattatttaaatattttaggtatcactactattgatccaaatcactgagaaagaaaataaaatgaaagatttaacatttctgctagaggaatccagagataaagttaatcaattagaggaaaagacaagtaagagtttatataagataatataatgtgccttatgtattcctcttgttatgttctaaacattgactttcattacaagttygttgtaatgctttctagtactgtacttctcaatctgagttggttcggttggaggagggcataatagattaacctggggagcttttgtaaaatacatgtactcttcttttcctttttccatgctcttacctttttcaaatgtttcaactatatgctccacagagacagagaccttgtcttttttgttcactgacttggaactgttgcattccaagtgccgagaacaatgcctggcacatataag

SEQ ID NO: 526471 - DNA, 544 bp, Homo sapiens
tcagaaggggttttgctcttttatgccattcttcattctgctcactcccttcgttrttaacgtttctgttgtcttccttttcaaagacttccatttttatgtattcgtacatttaaaacatcctaccgttcttcttttaccctaaaatgtctttagacccatctcatgtaagaagcagactcagatgagagcaaactgggagatgtttcctcctccacagatttttgcttaaaacaacaacaacaaaacttaggccgagcatggtggtttacgcctgtagtccctgcactttgggaggccgaggtgggaggattgcatgaggcttggggccaggagttcgaggccagccagggcaacataattagaccccatctctaaataaataaataagccaggaatggtggcaaaggcctttagtcccagctactcgggaggctgaggcaggaggatcgctgaagccgaggatttgaggcaacagtgagctatgatcaccactgcgctccacccagagagagcaagaccctgtctcaaaacaatcttggtg

SEQ ID NO: 526472 - DNA, 569 bp, Homo sapiens
tagcctgaaatgcccaaaataaaggcttgcttgtagatggcttaagtgggaatatgattctacggagcagaaatgagaaatagaatgaaacagggaaggaaggaaagtcaatcaaagaatgggttatcaattcagcactgctgtgatagagatgtcaattcaaatggagtcttgagaaatgttacagaatgyatttcagaaccattcccccaacaagttgagaaaggaaagaatttatccatcagctctcatcttttattgataaagtttggcttatgtttcaatttttgagagaatgagtgctaagtgtgttttagtgtgagatctgtgctgcaggatctgaaaagcctcatggcaagaaataaatgccacagggcactggactgaagcaaagtgctcatcagcatgaagcttatcccagcccatgtaggactggttccaataacagaacctggagtgtgaagtagatccatgatacatttgaagtggtatacaaggagtgctagtacagtccaactcataatatcattcaatccacttgccctctccagtgggacagcccatcatag

SEQ ID NO: 526473 - DNA, 578 bp, Homo sapiens
ccctcagtgttttcacagattcttgatgtggctggcagtatatttattgcagcactacctggggctgctaagctagttgatttargaatgaaaattcttagctcattatgtaataggctgagaaatcctggtaagaaaattataagctgaggtttcttttgttaaaatggtataacgctgttgctcattttaaaagtatatgtgttattgcagtttcatttaagaaaagtttaaaattaaaaagcaaatttcaaagaatattatggcctgaagttcataaaaacaaacttaattttgactaaagtaataattaatagaaatggggaacaagttagaagataaaattattcctagaaaagatttaagtaaagcaaaaggacaaatggtaatataaagaaattattttcaattaatgttatagtcacagagataatttaagttataattagctcttgcaaatcagtgagaagagagtaacgccacatattttaaacaggcaaaaatatgataataaaaatgtttaattttactgacaataaaagttgtgcaaagaaaaactatgaggttcttgcttcaat

SEQ ID NO: 526474 - DNA, 577 bp, Homo sapiens
cctcagtgttttcacagattcttgatgtggctggcagtatatttattgcagcactacctggggctgctaagctagttgatttaggaatgaaaattcttagctcattatgtaataggctgagaaatcctggtaagaaaattataagctgaggtttcttttgttaaaatggtataacgctgttgctcattttaaaagtatatgtgttattgcagtttcatttaagaaragtttaaaattaaaaagcaaatttcaaagaatattatggcctgaagttcataaaaacaaacttaattttgactaaagtaataattaatagaaatggggaacaagttagaagataaaattattcctagaaaagatttaagtaaagcaaaaggacaaatggtaatataaagaaattattttcaattaatgttatagtcacagagataatttaagttataattagctcttgcaaatcagtgagaagagagtaacgccacatattttaaacaggcaaaaatatgataataaaaatgtttaattttactgacaataaaagttgtgcaaagaaaaactatgaggttcttgcttcaat

SEQ ID NO: 526475 - DNA, 500 bp, Homo sapiens
tgtactgggcatttgaaaaatctgggggccgtggagctggatggctggagggtcaggcagcctggggttcctctctggggactgagctaagatcgactgatccttactgccccaagcagagggggccgcagggcaggagttggtgatctctggagagacaccatggttggtggtctccatcagggcacaggtgctgtcactggcttcccagtggactggtgaacacctacaaacccttggacacamaatgaccctagatgataatgaggagaaaccacagacatgctcacccagccacacacagccttgcacccttctgagagccatgcacagtcacacaccgacccaaacattcattagattcatgcggacaccctcctctaatgaaacatacaccaccacaagacacaggcggacacatgcacacacacccaaactcctacagacacatggcaggccccacgtggcccagccagacatactcagacaggacggcacac

SEQ ID NO: 526476 - DNA, 611 bp, Homo sapiens
aaattctaactatcctttgaagagaaaagagagctttaaacggagtttgaggccaaagtcataaaatatataagggtaaagattaaatattgaaacagaattgctccaataactgaaagaacgtggaatattaaagagcctattcatgattccactaggcagagtgaatggcattgctttttccagagtttaggccaagtcatgagcaaagctaacagtcacagaaatagagataagcagatgcattgttttgaaagatagaagcaggcctggaccccaaaaaatggatctgaactaaaggtacagacttggaagctctcagctcttcaaaataataacattgataaataatgcaattagcaaaatataatattattaacaataacagttaacatctattaatctcttactacttgactggtactttactgagagttttatatgaattatataatttaatctttcrcacaatcttacgaggtgggtctgaaaaaccaaccactttgggcccattttacttagaaggaaagtgaaaatttaaagaatttaaggactctgcttcacttcctaacagaacaggtatctaaaatagttctgactacaatggccac

SEQ ID NO: 526477 - DNA, 614 bp, Homo sapiens
ctcggttctcttttgtttgttacatgctatgataatcattggtttaattaaccccataggctgtaaattctctgaagactgtgattctgtctgttttgctctttctagtacctattaaagtgttggcacataccaagtaggtgcttactaagtattttatgaaaaagcaaatgaataaacaaatgatactatctcagctactctgtcctctgcccaatgagcactgtctctgtctttgcctctgtctctctctctctacacacacacacacacacacacacacacacacacacrcacacaccctagctgtgtctatccaaacacctaatctccttagcactcatccatggtctcagtgcttactcagacatgggtgtctgtgtttgtctaatcaaggtaaaccaggctgggaaaggactggtattgctttgaagcttttactaaggactgacataggttgggcttgaaatatgacctgaacagagcagttttgccatttgaatgtggagccttatattgaataaactgaaacttttccacttggttttttccatctctttggagaacaggactggacactaaagcaggctctggcaggagaatgtcctggtctt

SEQ ID NO: 526478 - DNA, 333 bp, Homo sapiens
cattaaaaagcaaagcaaccacactatacttataagaaaactgaggctcatagtgattagttaacctgcccaaggtcacctagcaggaaagtgatagagccagrattcgaacctaattctttctggctttaggttggtttcatagtgcctctcactttccctgttgtttgtttatttttatttgaatattcaaagattcctcatgcaaaaatagtattaatagtaagggacttttcagggaactttctgttgatcagtttatacctgatagagattccctatgtcacatcatgagactaagaactaggcagaggacatccatatagctccagt

SEQ ID NO: 526479 - DNA, 333 bp, Homo sapiens
cattaaaaagcaaagcaaccacactatacttataagaaaactgaggctcatagtgattagttaacctgcccaaggtcacctagcaggaaagtgatagagccaggattygaacctaattctttctggctttaggttggtttcatagtgcctctcactttccctgttgtttgtttatttttatttgaatattcaaagattcctcatgcaaaaatagtattaatagtaagggacttttcagggaactttctgttgatcagtttatacctgatagagattccctatgtcacatcatgagactaagaactaggcagaggacatccatatagctccagt

SEQ ID NO: 526480 - DNA, 333 bp, Homo sapiens
cattaaaaagcaaagcaaccacactatacttataagaaaactgaggctcatagtgattagttaacctgcccaaggtcacctagcaggaaagtgatagagccaggattcgaacctaattctktctggctttaggttggtttcatagtgcctctcactttccctgttgtttgtttatttttatttgaatattcaaagattcctcatgcaaaaatagtattaatagtaagggacttttcagggaactttctgttgatcagtttatacctgatagagattccctatgtcacatcatgagactaagaactaggcagaggacatccatatagctccagt

SEQ ID NO: 526481 - DNA, 584 bp, Homo sapiens
gcattttcagtgtctggtgagggcccactttctggtttatggatttcctgctgtgtcttcacatggtagaagggattagctaactctctgaggtctctttttataaggacactaatctctcccaaakcccccacctcctaataccattatgttgggggttaggatttcaacatatgaatttggaggggaatacaaactttcaaaccatagcagataccaagatgagaaagctgtggttccttttcttaagtagcttaccagctaatggggagaacgcagtatggagaaatgacatacaagttactataggtacaaaaaagtattttggaagatggaagaagagaaagatgtcttttggtggtactcagaaaggcagcttggaggaaatacttgaagggtggataggattttgataggtggaggtggtagtgatagaaaagaatattccaagtgtatgaagtatagaggtggggaagttcagggtagagaagtagtagcaggaatagaatatagggggacagaaaaatagagtggagccagattcagagaactttaagaagcaggtaaagaagtttaggattaat

SEQ ID NO: 526482 - DNA, 584 bp, Homo sapiens
gcattttcagtgtctggtgagggcccactttctggtttatggatttcctgctgtgtcttcacatggtagaagggattagctaactctctgaggtctctttttataaggacactaatctctcccaaagcccccacctcctaataccattatgttgggggttaggatttcaacatatgaatttggaggggaatacaaactttcaaaccatagcagataccaagatgagaaagctgtggttccttttcttaagtagcttaccagytaatggggagaacgcagtatggagaaatgacatacaagttactataggtacaaaaaagtattttggaagatggaagaagagaaagatgtcttttggtggtactcagaaaggcagcttggaggaaatacttgaagggtggataggattttgataggtggaggtggtagtgatagaaaagaatattccaagtgtatgaagtatagaggtggggaagttcagggtagagaagtagtagcaggaatagaatatagggggacagaaaaatagagtggagccagattcagagaactttaagaagcaggtaaagaagtttaggattaat

SEQ ID NO: 526483 - DNA, 584 bp, Homo sapiens
gcattttcagtgtctggtgagggcccactttctggtttatggatttcctgctgtgtcttcacatggtagaagggattagctaactctctgaggtctctttttataaggacactaatctctcccaaagcccccacctcctaataccattatgttgggggttaggatttcaacatatgaatttggaggggaatacaaactttcaaaccatagcagataccaagatgagaaagctgtggttccttttcttaagtagcttaccagctaatggggaraacgcagtatggagaaatgacatacaagttactataggtacaaaaaagtattttggaagatggaagaagagaaagatgtcttttggtggtactcagaaaggcagcttggaggaaatacttgaagggtggataggattttgataggtggaggtggtagtgatagaaaagaatattccaagtgtatgaagtatagaggtggggaagttcagggtagagaagtagtagcaggaatagaatatagggggacagaaaaatagagtggagccagattcagagaactttaagaagcaggtaaagaagtttaggattaat

SEQ ID NO: 526484 - DNA, 584 bp, Homo sapiens
gcattttcagtgtctggtgagggcccactttctggtttatggatttcctgctgtgtcttcacatggtagaagggattagctaactctctgaggtctctttttataaggacactaatctctcccaaagcccccacctcctaataccattatgttgggggttaggatttcaacatatgaatttggaggggaatacaaactttcaaaccatagcagataccaagatgagaaagctgtggttccttttcttaagtagcttaccagctaatggggagaacgcagtatggagaaatgacatacaagttactataggtacaaaaaagtattttggaagatggaagaagagaaagatgtcttttggtggtactcagaaaggcagcttggaggaaatacttgaagggtggataggattttgayaggtggaggtggtagtgatagaaaagaatattccaagtgtatgaagtatagaggtggggaagttcagggtagagaagtagtagcaggaatagaatatagggggacagaaaaatagagtggagccagattcagagaactttaagaagcaggtaaagaagtttaggattaat

SEQ ID NO: 526485 - DNA, 554 bp, Homo sapiens
acatttttcttttggtgcatagtttttagtaattagaatagctatttccaatgtcataactagggcagtgaaacctaatacaactggtttgggacatggggattttccacctctccaattcttttggaaactccctctcagcccagmagtaggtcttagaaacactacaacccagttgccacacagggggtgcaaaagtgactatggtgactgcaaaatttagaggtcaaaacagagatagtgcaaaacaccccataccacagtaatatttagaaatcttgttccacatgcggatacagttctctaaattcaacatagattttgtaagtagttcttcattggtgtgcttttctgtctatctgcagaagttctgatctgttgtctgatacagcttaggatagttctcattcagtggttttcaaagtgtgattcccagatagcagcatcaacatgatctgggaacttgtcaggaatgcaaattcttgagccccaccccagaccttattgtgtcagaaactcaagggggtaggtcccaacaatttatgttaacaagc

SEQ ID NO: 526486 - DNA, 554 bp, Homo sapiens
acatttttcttttggtgcatagtttttagtaattagaatagctatttccaatgtcataactagggcagtgaaacctaatacaactggtttgggacatggggattttccacctctccaattcttttggaaactccctctcagcccagaagtaggtcttagaaacactacaacccagttgccacacagggggtgcaaaagtgactatggtgactgcaaaatttagaggtcaaaacagagatagtgcaaaacaccccataccacagtaatatttagaaatcttgttccacatgcggatacagttctctaaattcaacatagattttgtaagtagttcttcattggtgtgcttttctgtctatctgcagaagttctgatctgttgtctgatacagcttaggatagttctcattcagtggttttcaaagtgtgattcccagatagcagcatcaacatgatctgggaacttgtcaggaatgcaaattcttgrgccccaccccagaccttattgtgtcagaaactcaagggggtaggtcccaacaatttatgttaacaagc

SEQ ID NO: 526487 - DNA, 481 bp, Homo sapiens
gctgtcaaccgcgagcggaggcggggctcccgacaaccagtgtgctggggcasaatcggcccaggttacacgccccgaacccaccctgcgtctcccgaccccctctctcgctggctcagatgaatgatgacggcagagggcagagagcttagaggacgcggtaccaagccccgtccctcgcccatcccaacgaaggtcttagaatacaatcaaccaactacaggaagaatttgtagaggaggttttcttgtgtgtctgcatcgccccacccacaggtaaccccagagccagagatggagtctaggaaggtttaggagcaatcccggctgaatgcagatgtataccctacgtggtcatggaacacgatgttgtcttcctagagatgtgacatgccagtttcaccattaatccagggacaggacccttcatcaggaagggaagcatcccaacaaaaccttacagccctattagctgcctgtat

SEQ ID NO: 526488 - DNA, 481 bp, Homo sapiens
gctgtcaaccgcgagcggaggcggggctcccgacaaccagtgtgctggggcagaatcggcccaggttrcacgccccgaacccaccctgcgtctcccgaccccctctctcgctggctcagatgaatgatgacggcagagggcagagagcttagaggacgcggtaccaagccccgtccctcgcccatcccaacgaaggtcttagaatacaatcaaccaactacaggaagaatttgtagaggaggttttcttgtgtgtctgcatcgccccacccacaggtaaccccagagccagagatggagtctaggaaggtttaggagcaatcccggctgaatgcagatgtataccctacgtggtcatggaacacgatgttgtcttcctagagatgtgacatgccagtttcaccattaatccagggacaggacccttcatcaggaagggaagcatcccaacaaaaccttacagccctattagctgcctgtat

SEQ ID NO: 526489 - DNA, 481 bp, Homo sapiens
gctgtcaaccgcgagcggaggcggggctcccgacaaccagtgtgctggggcagaatcggcccaggttacacgccccgaacccaccctgcgtctcccgaccccctctctcgctggctcagatgaatgatgacggcagagggcagagagcttagaggacgcggtaccaagccccgtccctcgcccatcccaacgaaggtcttagaatacaatcaaccaactacaggaagaatttgtagaggaggttttcttgtgtgtctgcatcgccccacccacaggtaaccccagagccagagatggagtctaggaaggtttaggagcaatcccggctgaatgcagaygtataccctacgtggtcatggaacacgatgttgtcttcctagagatgtgacatgccagtttcaccattaatccagggacaggacccttcatcaggaagggaagcatcccaacaaaaccttacagccctattagctgcctgtat

SEQ ID NO: 526490 - DNA, 481 bp, Homo sapiens
gctgtcaaccgcgagcggaggcggggctcccgacaaccagtgtgctggggcagaatcggcccaggttacacgccccgaacccaccctgcgtctcccgaccccctctctcgctggctcagatgaatgatgacggcagagggcagagagcttagaggacgcggtaccaagccccgtccctcgcccatcccaacgaaggtcttagaatacaatcaaccaactacaggaagaatttgtagaggaggttttcttgtgtgtctgcatcgccccacccacaggtaaccccagagccagagatggagtctaggaaggtttaggagcaatcccggctgaatgcagatgtataccctacgtggtcatggaacacgatgttgtcttcctagagatgtgacatgmcagtttcaccattaatccagggacaggacccttcatcaggaagggaagcatcccaacaaaaccttacagccctattagctgcctgtat

SEQ ID NO: 526491 - DNA, 582 bp, Homo sapiens
tgagctgtcaaccgcgagcggaggcggggctcccgacaaccagtgtgctggggcagaatcggcccaggttacacgccccgaacccaccctgcgtctcccgaccccctctctcgctggctcagatgaatgatgacggcagagggcagagagcttagaggacgcggtaccaagccccgtccctcgcccatcccaacgaaggtcttagaatacaatcaaccaactacaggaagaatttgtagaggaggttttcttgtgtgtctgcatcgccccacccacaggtaaccccagagccagagatggagtctaggaaggtttaggagcaatcccggctgaatgcagatgtataccctacgtggtcatggaacacgatgttgtcttcctagagatgtgacatgccagtttcaccattaatccagggacaggacccttcatcaggaagggaagcatcccaacaaaaccttacagccctattagctgcctgtatcccagacatctcctgttttagggtattctacctcctcgyttttcagtttcgccagcaactgggctctaccaatagcttcaaggagggagaagcttcct

SEQ ID NO: 526492 - DNA, 567 bp, Homo sapiens
tttaaatttctccaaattccctttagtcattatctatatatattaaatatctatttacataattaygattacagcttaggtatatgtttatattctccttctttcacttagtaaatatttgtccatgcttttagggaaagttcatagttattattctaatgagtgtacaatattttataatattagtaggaccatagattacttaaaatattctactattgcatagttatgctgtttctgatattagactgttataaataatgccttaatgaagagctttctgcctttatcattctccttttttgaattatgctatggttgaatgtatgtatgccttcaaaattcatacattggtacttaacaccgagtgttatagtactacagggtggggccttttaggaatatgtcttaggaagtgataaggcatgaacactccactctcatgaatgggattagtgctcttaaaaaagaggttgaaaggattgctctggtcccttttgtcctctgtccctccagccatgtgaggacacagcatctgtggcaacaaggagccatcttgggagcaga

SEQ ID NO: 526493 - DNA, 567 bp, Homo sapiens
tttaaatttctccaaattccctttagtcattatctatatatattaaatatctatttacataattacgattacagcttaggtatatgtttatattctccttctttcacttagtaaatatttgtccatgyttttagggaaagttcatagttattattctaatgagtgtacaatattttataatattagtaggaccatagattacttaaaatattctactattgcatagttatgctgtttctgatattagactgttataaataatgccttaatgaagagctttctgcctttatcattctccttttttgaattatgctatggttgaatgtatgtatgccttcaaaattcatacattggtacttaacaccgagtgttatagtactacagggtggggccttttaggaatatgtcttaggaagtgataaggcatgaacactccactctcatgaatgggattagtgctcttaaaaaagaggttgaaaggattgctctggtcccttttgtcctctgtccctccagccatgtgaggacacagcatctgtggcaacaaggagccatcttgggagcaga

SEQ ID NO: 526494 - DNA, 567 bp, Homo sapiens
tttaaatttctccaaattccctttagtcattatctatatatattaaatatctatttacataattacgattacagcttaggtatatgtttatattctccttctttcacttagtaaatatttgtccatgcttttagggaaagttcatagttattattctaatgagtgtacaatattttataatattagtaggaccatagattacttaaaatattctactattgcatagttatgctgtttctgatattagactgttataaataatgccttaatgaagagctttctgcctttatcattctccttttttgaattatgctatggttgaatgtatgtatgccttcaaaattcatacattggtacttaayaccgagtgttatagtactacagggtggggccttttaggaatatgtcttaggaagtgataaggcatgaacactccactctcatgaatgggattagtgctcttaaaaaagaggttgaaaggattgctctggtcccttttgtcctctgtccctccagccatgtgaggacacagcatctgtggcaacaaggagccatcttgggagcaga

SEQ ID NO: 526495 - DNA, 567 bp, Homo sapiens
tttaaatttctccaaattccctttagtcattatctatatatattaaatatctatttacataattacgattacagcttaggtatatgtttatattctccttctttcacttagtaaatatttgtccatgcttttagggaaagttcatagttattattctaatgagtgtacaatattttataatattagtaggaccatagattacttaaaatattctactattgcatagttatgctgtttctgatattagactgttataaataatgccttaatgaagagctttctgcctttatcattctccttttttgaattatgctatggttgaatgtatgtatgccttcaaaattcatacattggtacttaacaccgagtgttatagtactacagggtggggccttttaggaatatgtcttaggaagtgataaggcatgaacactccactctcatgaatgggattagtgctcttaaaaaagaggttgaaaggattgctctggtccyttttgtcctctgtccctccagccatgtgaggacacagcatctgtggcaacaaggagccatcttgggagcaga

SEQ ID NO: 526496 - DNA, 640 bp, Homo sapiens
tgaatattcaaggagactctccacagatctctggaattttctattctttctggtactcttccccatgaactctacctgccttggccttctcaaatctctgcatgatctcttcaactcaggcagatcaccaggctctgcctggattccctctctgtgagctctggggcagttaagtaggacagttgtatggcttactttgcttgtttctctcttctcttggataactttcctatgttgtctgayatccagtgtctgaaaataattattttatatatcttgtcctattttttagtaatttctgtcaggggtgaaggggaatgaataccaaccctattaccgcatgctgtctggaagtagaagtgtctttctagccacgttataaattagtagttttcaaccctgactacatattagaattatttgggggaggtctttaaaaagctgatgtaaggcttcattccagaccaattaaatcagactttttcagattgaggtcttagcatcagtgttctttaaatgcactacaagttttctcatgtataccagggttaaagaacctccatattaaagaaaaggttgcatttataaatcattctgagaaacttttgtattctgtcatttcagctaagacacagaggcg

SEQ ID NO: 526497 - DNA, 640 bp, Homo sapiens
tgaatattcaaggagactctccacagatctctggaattttctattctttctggtactcttccccatgaactctacctgccttggccttctcaaatctctgcatgatctcttcaactcaggcagatcaccaggctctgcctggattccctctctgtgagctctggggcagttaagtaggacagttgtatggcttactttgcttgtttctctcttctcttggataactttcctatgttgtctgacatccagtgtctgaaaataattattttatatatcttgtcctattttttagtaatttctgtcaggggtgaaggggaatgaataccaaccctattaccgcatgctgtctggaagtagaagtgtctttctagccacgttataaattagtagttttcaaccctgactacatattagaattatttgggggaggtctttaaaaagctgatgtaaggcttcattccagaccaattaaatcagactttttcagattgaggtcttagcatcagtgttctttaaatgcactacaagttttctcatgtataccagggttaaagaacctccatattaaagaaaaggttgcatttataratcattctgagaaacttttgtattctgtcatttcagctaagacacagaggcg

SEQ ID NO: 526498 - DNA, 428 bp, Homo sapiens
cggccccttcttgctacctagatcctaattgcttcccctgttcctgcccctccctattcctgccccttctgagcctgttcttttgagtcttcaactgttcctttgattctgtgggtctcctcttccagtaaatcctattttaaaaaatagctggagtctgttcactgatctttccaaaaggtatatatggaatggcaggcacaatactaggtgctagaataaaatgaggaacaaaattattggataaaggctcagtgaggacgtagacagaaaacaaataaataaatatacaaataaagkgatttctgatattaataaagtttattttaaaaaaatttcgttagagaggaattaaagcaggaggtgaaagaactgcaaaacccctaaggtagaaataagcttagtgtgtttgaggaagaaaatggcca

SEQ ID NO: 526499 - DNA, 550 bp, Homo sapiens
taatgttttgttttggtttttgagacagcgtctggctctttcacccaggctggagcgcagtggcacagtctccactcactgtgacctctgcctcccaggctcaagccactttcctacctcagcctcctgagtagctgggactacagatgtgcaccagcacgcctggctaatttttgttgtattttttgtagagatgggtttcacatgttgcccaggctggtctcgaactactgtgctcaagccatctgcctgcctcacctcygacagtgctgggattacaggcatgaggcgtggcaccctacccctatggcattaactcctaaagccacttgaactttgcaaagataaaggactgttgagttttgctcatcttttgtccagaattgccagatgtttgatacggtactcaacagctcagtattttgacattttatatgctaaaataaaaatgaaaacaaaagcgaatacagaacgtgagatttttctcattaaaatttcttcctcgtgtgaagctttctgaggctgtatcttgatatttttgaacctttgc

SEQ ID NO: 526500 - DNA, 550 bp, Homo sapiens
taatgttttgttttggtttttgagacagcgtctggctctttcacccaggctggagcgcagtggcacagtctccactcactgtgacctctgcctcccaggctcaagccactttcctacctcagcctcctgagtagctgggactacagatgtgcaccagcacgcctggctaatttttgttgtattttttgtagagatgggtttcacatgttgcccaggctggtctcgaactactgtgctcaagccatctgcctgcctcacctccgacagtgctgggattacaggcatgaggcgtggcaccctacccctatggcattaactcctaaagccacttgaactttgcaaagataaaggactgttgagttttgctcaycttttgtccagaattgccagatgtttgatacggtactcaacagctcagtattttgacattttatatgctaaaataaaaatgaaaacaaaagcgaatacagaacgtgagatttttctcattaaaatttcttcctcgtgtgaagctttctgaggctgtatcttgatatttttgaacctttgc

SEQ ID NO: 526501 - DNA, 598 bp, Homo sapiens
ggtggttaatggcacctctctatggtgctaaaaggcagatgaggccggtcacggtggctcatgcctgttaatcccagcagtttgggaggccaaggccggtggatcacttgaggtcgggagtttgagatcagtctggtcgacattgtaaaactccatcactaatgaaaatacaaagaattagctgggtgtggtggtgcgcctgtcatcccagctactcagaaggctgaggaaggaggatcacttgaaccaggaggcggaggttgcagtgagccgagattgcaccactgcactccaacctgggtggcagagtgagactccatctcaaaaaagaaaaattaaaaaattaaaaaatttaaaaaggcagatgatcagagacggctttatacaggasgtgaatttttgtctggcttgacaagataacaaagccaggttgagtgggaagaaaattttgccaaaagaacacaagcagatttatgacagtgggaagatgctttattgaagtgaatcccatgctgtgatagaaattttctgtgaggatttaattcaaactcgatcctttttcaagtatataactatttaaaaagagaaattaagtgaa

SEQ ID NO: 526502 - DNA, 526 bp, Homo sapiens
ccttctgtgctcttctaagggtcagcaacctgttggcacagggaaaactggaccttgacccatagtgattttcatactgttaatcaaattattttccaatgggctgagtactgtgcctgagcattcagtggtggattagacatagttatcttcaagaagcttcatgaagacaataattttaaaatattggagctggtttctcaataacttaaacatagaattactatatgacctagcaattctactcctgagtatgtaatcaaaagaactgaaaacagatgttcaaacaaaaactcatatgagaatgtttataacaacactatttacaatagccaaaaggtggaaatgacccaaatgccatcagtagaggagcggttaaacaaattgtggtatatccagacagtgaaacattatttatccataaaaaggaatgaaatacagatacrtgctacaaacctggatgaacctggaaaacattatactaagtaaaagaagccagacaccattgtatgatccatttatatga

SEQ ID NO: 526503 - DNA, 565 bp, Homo sapiens
tgaagatggttggccagatgagggcactgaaatccatgtcctctaaacttgtagttcagtaaaagaacgacagcagtaaagggtctttaggaagaggaggtggaagacctgatttgggttgggggctccaagaagaatgtctgccttgctgtgcagaagcctgctacacaacctccctggtccccttgctcagtctcctggccagacccctgtgagccctggaagtgcacagtcagcttagccaaggcatctccagccaggactcatccctgggcatttctgtggccttgggtgccctggcctcctccaggccctgtcttgcaggcaatcatcctgcwagggaagggggaaaggaggctacttgacagttaactctgagcagctccacaaggtcctgacttagctcctagtcacttacaaacctatatacccccatctcatcccccaaacgatgaaaagaaactttgcaggactcatgccagacaaatagggtgggaccattctgcagagccaagttctcaggacatcaataagagatgggaaccacctgctggaaggtgccaca

SEQ ID NO: 526504 - DNA, 565 bp, Homo sapiens
tgaagatggttggccagatgagggcactgaaatccatgtcctctaaacttgtagttcagtaaaagaacgacagcagtaaagggtctttaggaagaggaggtggaagacctgatttgggttgggggctccaagaagaatgtctgccttgctgtgcagaagcctgctacacaacctccctggtccccttgctcagtctcctggccagacccctgtgagccctggaagtgcacagtcagcttagccaaggcatctccagccaggactcatccctgggcatttctgtggccttgggtgccctggcctcctccaggccctgtcttgcaggcaatcatcctgctagggaagggggaaaggaggctacttgacagttaactctgagcagctccacaaggtcctgacttagctcctagtcacttrcaaacctatatacccccatctcatcccccaaacgatgaaaagaaactttgcaggactcatgccagacaaatagggtgggaccattctgcagagccaagttctcaggacatcaataagagatgggaaccacctgctggaaggtgccaca

SEQ ID NO: 526505 - DNA, 565 bp, Homo sapiens
tgaagatggttggccagatgagggcactgaaatccatgtcctctaaacttgtagttcagtaaaagaacgacagcagtaaagggtctttaggaagaggaggtggaagacctgatttgggttgggggctccaagaagaatgtctgccttgctgtgcagaagcctgctacacaacctccctggtccccttgctcagtctcctggccagacccctgtgagccctggaagtgcacagtcagcttagccaaggcatctccagccaggactcatccctgggcatttctgtggccttgggtgccctggcctcctccaggccctgtcttgcaggcaatcatcctgctagggaagggggaaaggaggctacttgacagttaactctgagcagctccacaaggtcctgacttagctcctagtcacttacaaacctatatacccccatctcatcccccaaacgatgaaaagaaactttgcaggactcatgccagacaaatagrgtgggaccattctgcagagccaagttctcaggacatcaataagagatgggaaccacctgctggaaggtgccaca

SEQ ID NO: 526506 - DNA, 565 bp, Homo sapiens
tgaagatggttggccagatgagggcactgaaatccatgtcctctaaacttgtagttcagtaaaagaacgacagcagtaaagggtctttaggaagaggaggtggaagacctgatttgggttgggggctccaagaagaatgtctgccttgctgtgcagaagcctgctacacaacctccctggtccccttgctcagtctcctggccagacccctgtgagccctggaagtgcacagtcagcttagccaaggcatctccagccaggactcatccctgggcatttctgtggccttgggtgccctggcctcctccaggccctgtcttgcaggcaatcatcctgctagggaagggggaaaggaggctacttgacagttaactctgagcagctccacaaggtcctgacttagctcctagtcacttacaaacctatatacccccatctcatcccccaaacgatgaaaagaaactttgcaggactcatgccagacaaatagggtgggaccrttctgcagagccaagttctcaggacatcaataagagatgggaaccacctgctggaaggtgccaca

SEQ ID NO: 526507 - DNA, 542 bp, Homo sapiens
ccctctcagagctcgtacctctgccaccaggtggctcaggtcactgctcaaagggatttggtgacaggcatccaggctgtaagctgagagagaaggagtctggtaacattgacccaagtatttccaagcacttgtcagaaccctcctctgtgacattcttttctgccaaggaccccactatcatctgagtctcatgcaacccatctgtgatggagatgtcaccatttctgtgtgtggcctggggatggcactgagctggcacacatccagtctgaaacttccctgcggcttaagttacacacatgcacctatagagcatttgattggcagatgaagataagtccatatttcatctccatagtaaccttartcctgtaggctaaagtataggatactccaaggtagaaggtcagcactgagctagagaagggtaggggatgaggaagaaagagatttcatagtcctcactctcaaaaatgaaagagaaggaggaggtcttttggtagcatgtgagaatgtgagttgggcaccttagacgaggg

SEQ ID NO: 526508 - DNA, 533 bp, Homo sapiens
atccttggctacaagtagcactacctcttgcagaggatctccatgcagatttaatgggtaacacatacagtggatcaatagatgtgaatttcttttcatcctatggctgttgtaatcctgggagaaacattttgcctctttgctcccaggataaaatgagagaaaaccaataaaaatgtttctttttaaatgattagccaactactggtcagaactggtatgcagatcaaaacctgatgtggattacttattttctaaaatattttcttaaatcagacacaactggaaaatgaggatggtttctcgattctgtctaggttttgatgcatttaggcccctaacagtycaaacctctgtcgttgaagaaaaatcaaacaggcagcagagaaagaggagatgaagcttctgccccattggctgttgcatacctgaatgggcctggttggcctccttgggggtattctggggagttggcaagctgatggggttgctgttggattcggccttagccccctgagatgcactggttgatg

SEQ ID NO: 526509 - DNA, 533 bp, Homo sapiens
atccttggctacaagtagcactacctcttgcagaggatctccatgcagatttaatgggtaacacatacagtggatcaatagatgtgaatttcttttcatcctatggctgttgtaatcctgggagaaacattttgcctctttgctcccaggataaaatgagagaaaaccaataaaaatgtttctttttaaatgattagccaactactggtcagaactggtatgcagatcaaaacctgatgtggattacttattttctaaaatattttcttaaatcagacacaactggaaaatgaggatggtttctcgattctgtctaggttttgatgcatttaggcccctaacagtccaaacctctgtcgttgaagaaaartcaaacaggcagcagagaaagaggagatgaagcttctgccccattggctgttgcatacctgaatgggcctggttggcctccttgggggtattctggggagttggcaagctgatggggttgctgttggattcggccttagccccctgagatgcactggttgatg

SEQ ID NO: 526510 - DNA, 533 bp, Homo sapiens
atccttggctacaagtagcactacctcttgcagaggatctccatgcagatttaatgggtaacacatacagtggatcaatagatgtgaatttcttttcatcctatggctgttgtaatcctgggagaaacattttgcctctttgctcccaggataaaatgagagaaaaccaataaaaatgtttctttttaaatgattagccaactactggtcagaactggtatgcagatcaaaacctgatgtggattacttattttctaaaatattttcttaaatcagacacaactggaaaatgaggatggtttctcgattctgtctaggttttgatgcatttaggcccctaacagtccaaacctctgtcgttgaagaaaaatcaaacaggcagcagagaaagrggagatgaagcttctgccccattggctgttgcatacctgaatgggcctggttggcctccttgggggtattctggggagttggcaagctgatggggttgctgttggattcggccttagccccctgagatgcactggttgatg

SEQ ID NO: 526511 - DNA, 533 bp, Homo sapiens
atccttggctacaagtagcactacctcttgcagaggatctccatgcagatttaatgggtaacacatacagtggatcaatagatgtgaatttcttttcatcctatggctgttgtaatcctgggagaaacattttgcctctttgctcccaggataaaatgagagaaaaccaataaaaatgtttctttttaaatgattagccaactactggtcagaactggtatgcagatcaaaacctgatgtggattacttattttctaaaatattttcttaaatcagacacaactggaaaatgaggatggtttctcgattctgtctaggttttgatgcatttaggcccctaacagtccaaacctctgtcgttgaagaaaaatcaaacaggcagcagagaaagaggagatgaagcttctgccccattggctgttgcatacctgaatgggcytggttggcctccttgggggtattctggggagttggcaagctgatggggttgctgttggattcggccttagccccctgagatgcactggttgatg

SEQ ID NO: 526512 - DNA, 619 bp, Homo sapiens
ttaatattagctggatattccacctggtcttggaacccaggtgtgggttcctcttcctattaggccctacctcttcattctctagcttgcatctcaagtgtagctggaagagaaacatgggtagagcttcagagctgtaatatacttgggtatgttatactaaagcaagctaaatcrgaactcaagagaaaacctgtagtgaaagccaggaagatggaaaagggggatggtggtgataggaaataaagtcactgaagggaacttctaccctccctattcagagaaatagaaattaagagagaagtatatgtagttagagtggtattcatcttgtttttagttgcagaactcttttactcttctgcaaatgaaatatttcagagaacctcaaaatgtgaaacattaaaaaatttctctgcaacatgctgaaaacccaagttatacctgctcagacacttctcacatctttccccaaaacttggaagcacccgagatgcttcctggtctctaaggcattaaggaagccattgacaaatagctgggaaaccactaagtcagacaggtgtgggttccagtctcagctttgcatttactttttctaggaacttgagaaacttaa

SEQ ID NO: 526513 - DNA, 603 bp, Homo sapiens
ccatgctgtgaggagagacccacgtggccaggaattttgacttcctgccacaagccagtgaggaagtgaggcctcctgccaatagtcacgtgaggaaggaaccttggaaacagatccttcatccacagccaagcctttggataacagcagctcctgccaatgtcctgacagcatcaacatgagaaaccttgagtcagaaccacccagctaatctactcccagatacctgggccacaacatctgtgagatgttaactgtattaacttaaaccatcaaattttagtgtaatattttgcacagtaatagataactgctataaatattgttggtgatacattagcatactggatatcagtcaagaaggaagttgtcttggtttgtttttggtctgtttgtgttttgtaaagaaataaccatcctgggaaggggaacacccaacagtaatcttagasgtggttcctgtgttttactgtttgctcatgatccactaacttatttactccccaacatacatactgtcatgtctgccttgacccttctagtttggtctcaggttgttatcatgaagggcacaactggctgaccagtggctaggtttgagat

SEQ ID NO: 526514 - DNA, 491 bp, Homo sapiens
cctgtgtgacaggcatagtttcccttaaaacacacactcattccttcattcgttcattcaatcaatcaatcaatcaccacacactcactcacccctcactgtgtaccagaccttgtgctgaggacaaaggtggatgggrcaaggtggaaaatctggggttcccttgtggactccccccagtcctccttgacaaggacgtcattctacatctgctaaactcaagccatggctgtccctgcctgtcccctcagctcaggtggtggctttcccacctgctcccagcctggttcccatgctgacgggggtggggagcaggatggctgggttgtcatcaccccgggtggcactgacctgggcctcggggagattgccagggtcagtgtgaacggaacatacgaattcccaacacaccacataccacagcaggccagtctgtctacaccagccagccagggcacagcatgtgcttgtggttttgcactcagccatca

SEQ ID NO: 526515 - DNA, 502 bp, Homo sapiens
agcaataaggctcactagccacaaaaaaacaggcagttaatttttaagggactccagctctttttttttttttccccagggaaaattgttttttttttttaacatagaactgagtttttgcttacacgttttaaaatttcttttaattcctgttctacaataacaacaatgaccctgcacactccccgagagcattcctcaactctcttgtttaacccagaccctgccacagagcatggcactcagcatttgttaaatgagtaaataaaaactaccaaggatgggcccaccactgtgctaagtactcagccaacatctgcacattttttyacattgaattcctacaaccagcccatgatgtgagtattatccccatttcacagatgaggcaactgaggctcagttgcccaaggcctccttgctagccagcagcaggtccaggcttcctacctcagtctctgccacgccacagagccccgtttcgccatccccacccacgcta

SEQ ID NO: 526516 - DNA, 502 bp, Homo sapiens
agcaataaggctcactagccacaaaaaaacaggcagttaatttttaagggactccagctctttttttttttttccccagggaaaattgttttttttttttaacatagaactgagtttttgcttacacgttttaaaatttcttttaattcctgttctacaataacaacaatgaccctgcacactccccgagagcattcctcaactctcttgtttaacccagaccctgccacagagcatggcactcagcatttgttaaatgagtaaataaaaactaccaaggatgggcccaccactgtgctaagtactcagccaacatctgcacattttttcacattgaattcctayaaccagcccatgatgtgagtattatccccatttcacagatgaggcaactgaggctcagttgcccaaggcctccttgctagccagcagcaggtccaggcttcctacctcagtctctgccacgccacagagccccgtttcgccatccccacccacgcta

SEQ ID NO: 526517 - DNA, 623 bp, Homo sapiens
atgcagtaagtggattctatcgtatgttagtggggtagaaaaaggaaaaaggacagggtaaaggccaccaggaacacagggagaaggttccaagtcaagagaacagccagtgcaatcggtacaaaggccctgaggcagggacatgcctggcgggttcaagaaagagcaaagaggccagtgtggctgaaatgcagtgagggagggggagagcagcccagggcggggtgcgatcatatagggcctttcgggcatcctaagagctttggcctctgctccaagtaacrtggggagcctggagtcattttgagcagagaaggaccgcgaaccaacttgcttgaacgtgatcactctggctgtgatgtgagaacagactgtaggggacccgggaggaggccagaagacctgtgaggtggccgctgcacacaggccggtgacagacggtggggctcaggctagggtggtggcagtggaggaggggaggatgggtcaggttctggacattttgtgatgcaatacagccaataggagttgcagagggactggatgaggggtgttaagaaagacagagggatggaggaggacaccgcagtttggagcctgaggccctggagggatggggctgc

SEQ ID NO: 526518 - DNA, 165 bp, Homo sapiens
tctcagccacctctgcaacttcatcatccccrtcctcatcttccaaacctccgtcctcttcctcaggctctgagttcatgttgccccgttcaaacacttgggccactgctgcggtgggtggaactctggctaagggacctaagggagtgctgccagaaggtctcc

SEQ ID NO: 526519 - DNA, 560 bp, Homo sapiens
ggtcagtttcgtttattttaatagaaaacatgatttctctaggtttttttgaattgcagagatattttacttacagtattttttttttcttaaaaaattgattactcttgcttttctttttgtacatagactgttgccttgtgggatctgagaaatctgaaacttaagttgcattcctttgagtcacataaggatgaaatattccaggtaagagaaactaatgctactattttgtttgttttaagaaaaacctgctgggcgcggtcgctcacgcctgtaatcccagcactttrgggggctgaagcgggcggatcacaaggtcaagagatcgagatcagcctggctaatttggtgaaaccctgtctctactaaaaatataaaaaattagccgggcatggtggcatgtgcccgcagtcccagctactcgggaagctgaaacgagagaatcgcttgaacccgggaggcggaggttgcagtgagctgagaccatgccattgcactccagcctgggcgacagaacgagagtccgtctcaaaaaaaagaaaaaagaaaaacctgga

SEQ ID NO: 526520 - DNA, 615 bp, Homo sapiens
gtcagtttcgtttattttaatagaaaacatgatttctctaggtttttttgaattgcagagatattttacttacagtattttttttttcttaaaaaattgattactcttgcttttctttttgtacatagactgttgccttgtgggatctgagaaatctgaaacttaagttgcattcctttgagtcacataaggatgaaatattccaggtaagagaaactaatgctactattttgtttgttttaagaaaaacctgctgggcgcggtcgctcacgcctgtaatcccagcactttagggggctgaagcgggcggatcacaaggtcaagagatcgagatcagcctggctaatttggtgaaaccctgtctctactaaaaatataaaaaattagccgggcatggtggcatgtgcccgcagtcccagctactcgggargctgaaacgagagaatcgcttgaacccgggaggcggaggttgcagtgagctgagaccatgccattgcactccagcctgggcgacagaacgagagtccgtctcaaaaaaaagaaaaaagaaaaacctggatgtgtgagtgggcacacatgtgctttatgccgttgctaaaaatagaaatctatatg

SEQ ID NO: 526521 - DNA, 579 bp, Homo sapiens
tcacaatgagactattttagcttccagtggtactgatcgcagactgaatgtctgggatttaaggtaattcttgtattcattcctctctctacataattatttcctttatttacactttgcaaaggtagttactaagggtaaatctgttttaacttttaaaattatgcttttgtactagtaaaattggagaggaacaatccccagaagatgcagaagacgggccaccagagttgttggtatgttaaaagcattggacagtactgaaatagtctgtaatttaatgtcctctatctgcatttcacctctttgttttcttccctctttcagtttattcatggtggtcatactgccaagatatctgatttctcctggaatcccaatgaaccttgggtgatttgttctgtatcagaagacaatatcatgcaagtgtggcaaatggtaagggtttagtcatttattttggggaggtgaaataagtgagacatagaatcaatttacatttgcatattytatgattacagataccatctctgatcatttcactcccaggtgtgattgtaagacttgtctatacattat

SEQ ID NO: 526522 - DNA, 458 bp, Homo sapiens
gggcatctgctcctctgtcagtacaatgaaagaataaagtcatattccctggagttaataaagcagagggtctccgtacakggagtgagtgttaaggtcaggggttctatacactgaacttagaaagcgtacgtgcgtatttacctggcaggggagacacccttatcacaaaggtggttttcccagggtgaggcttaaatgctgcatttcagatatgttgaccctatgatttaaccacatttgggaaattcgtctgcataatttgtggtagtgggagactgcgtttgcttctcccctggttaaaaaaaaaagaaaaaagaaagcctatgtgaatgtctgcatatgatccttgaaatcggggatccaattacttttgtgattcccagaacacaggcaatcaggctttcagcctaagtagaggactggggaatggattgcccccaaagagacaaagaata

SEQ ID NO: 526523 - DNA, 609 bp, Homo sapiens
taaagccttaccagatttaactgcttgtgattaattgctcagtaccattaattttgaattttaacttatttctagcatttactatcttctgcctaatagtatgattagtttatatatatatatatatatctcatccctaccaggttacaatctcctttaaacttggaaccatctcattggatcttagtatcttctacagggttttgcacaggatttttcatttatattaaactcaatgatcgttcttggaatagcattatgctaacgactaataatacaattaataataataacaatgacataactaaaaattttgagcgcttagtaatgtgccagaaactataacagatgtatatgactatttcttttattcttaatattatacctatgtggtagttactgttatctccattttataggcaagaaaactgatgctgagagaggttaagaaacttggccaaattcacacagctgataagcaactaccatatttttgcaaatgcaagcctagatattggtctcaggtgcagaaagayagattgtcacaattatacgtgtggtattggcatgtgcttgtatttctcttttccaatttaaggtcgtcaaccc

SEQ ID NO: 526524 - DNA, 659 bp, Homo sapiens
tttttctatagtgcagatgttcctctcctacttaatatcttttgatggcttcacattatccagagaataaaatccaaactctttatgaatggcaagtcctcatttacctagaccctagacccaagctacttatacacttcctttatgatcttaggcaaggtatttcacttctctgtttctcagtttcttcatttgtgtaataaaatgaatcttataatagtacatactttacaagactgttgtgaggaataaatgaatgcatgtatgtaaagcacttagaacaatgactgggacattgtagatgcttttaagttgtttctatcaccactatcaccaccactaccactaccaccgccatcatcaccaccccgtcatcatcattgttatcatcattaccatcatcacatcttcctcctcctcatcatcctcatctttgtatctcatgctttttccctcttactctctgctacagctatacagagacttaattcctcctaatgycccaaccatatctcccctcagaatcttcatatgtgctgaactcttttccagggaatagatcctaggattcccacatcatgcctcttcacttttatcttaagtgtttcttccccagagaagccttccctgagtatctcagatggggatatgatgctgct

SEQ ID NO: 526525 - DNA, 637 bp, Homo sapiens
tggcccatgggctctgttaaccctttccagcctgcccttgaatggctctgccaatactctgtatcacttggctttgacatgaacccacatggcttcttgcctcatgatrtttacactgctaccctgcctctctctctcagttcccccaacctggcttctccagtcacacagagccacatgagaagagagctggtattaagcacagatctggaaggaaggcaatgcataaagctgtcagccttaccttgtgcccatggcacagttacctggcccaggcctctgaccacagggcttatgttcattttgctacagtaaaagtcttctcaaagtcgtttcagtgagatggagcgttattcctatccctctttctgtctcatctccacagcctatcttagattctttgcctctttattatctctaattttacaaagggataaactgaggctcagaaataatatgagatctatataatcatgaagtctcatcactggaaaggaaacagccctccagttgatggaatcctggcgatgcacacatgaataaaagcagcagagcttgttctagagggtacaccttctgactgcttgaggtctagcctaactccagagcatcttctgcttacactgcagtggcattt

SEQ ID NO: 526526 - DNA, 617 bp, Homo sapiens
agagtttcctcccaaagattgcacagtgaggcaatgataaagcacaaactcagagccaaggcttgagtctgttgccaccttacaagaaatgctcattgaataaatgagcgagtagtgaacaaggatgtattgtgaaagttctttggtaggcaaaagaaaaaagtcacctagttaggtagttagatggaagtcatgacttgagtctagctcaactatgcagatatcttcatgacatccgccagcagccagagtagcctagaaggcctaagtccgaaaccttcttcatctttgacatcagctctctctcactgcagcttctcagtagtcccctgtattcccatgtattgtgcattttgtttccatttgtttatygtttctgcaaatgctcagcagagccaaaaaatatcaaaataaaaaatataccttcctagagcagcctcagaaagccccaggggagatggcagcagtcataagaagagaaaataacccagtagagtataaataaagcccgcacagcaatggaaaggctgaattgcatcatctttttcctacttaccactggaaaccacaggagaatctggcatgggcagggtaacctttagatgacccagctacca

SEQ ID NO: 526527 - DNA, 616 bp, Homo sapiens
agtcaaaggagctgaagaaataaatttggttatagcacttagatgtgtttaaagccatggaacagaataaaccaccccccaagaggaatgtggaccaagaagagatccaaggttcaccccatttgtctttgtgttttccactgtgacatgcacgggatcaggcatgtagtcaatgttcaataaatgatttttaaattggatgtaaaatctttgtaccagaaggaagaataagatgcagatgcaaacatccaggacataccaattccctcagcatgctggggtctaggcttgcatcttgttaatcatcatggtcatattctgttctggcgtttgaaggttttctgggttctgatctcaaaagaaagaattctatgctttgctggcatttgcttcagatgtcctctttgagtacctagatygcttgatctgtgaggttgagatgttttatttaaaataataatctttacaatagtaataatagtagcttatgtttattgaacacttatgtttcaagagctttctaaatatcatcccaagaaaccagcaagataggtattatgattcccattttgcaatgagaaaatcaagtccatactactaataagtggcagaaatg

SEQ ID NO: 526528 - DNA, 490 bp, Homo sapiens
actggaaatcattataaaaatacatgtgtattaatcatatatgaaaatggacacaatctctgtatataaatggagaaaggggcatattaacccggagagacagtggtttgtcatcattgcagtcacatggtaggtgttcaataaatgttaagttcagtgagtatagagtttcagtcatgcaaaatgaaaaagttgtacagatctcttacacaacaatgtgcatatagttaacagtactattaygtacactgccaagttggtaagaggataaacttacatgttttttccactatatatatatatgaagaaaagcttagccaagaaaaaaaaaatagccactaacatttgaagacaactcttcatttcaaaagtttgtttctaaaagccaaagtcactcttgaacacctggggaacaccttcaggatttcacacaaagcaaacctttacttcgagaaataaaccttgatgtttgaaaataaaagacaaaaag

SEQ ID NO: 526529 - DNA, 615 bp, Homo sapiens
gctgggtggatgccagtatctttttctcaatttctatccatacattctgggctccctgtggacccagctaatgttagtgtattattcacataagcatcatttattggataaaaacaatgtgcattaatttgaagcaaaaaataattaagaattgagggagaggagaaatgtgtcatatgacagtcaagtttattttttacaactattttcttatgatttccaaaattaggctcatctctctcataatagtctatcagttaaaaagaaagcatttcagaggttatctgctctgaagccrtaacaggaggatggaaaaactgtggcccaggaaagtcgcatgcttctccaaaattgacacctacttagaagcaaaacttggactgaaacccaataatcttgattcccagtttcatgctctttcaatctactctaccacttatgatagtgggaagcagagactatattttaaactggaaagaaccttggagtttacacaaaacataaaattcagaaccatttattaaacataacatccttatgaagtagatcgtatctgcagtttacagataagtggaatactcagatgggctgagtaacttacctgagatcacaaaa

SEQ ID NO: 526530 - DNA, 493 bp, Homo sapiens
ctgttttctcatttgtaacaggggaatattactgcctagcttkcaggattgctgcaagggttaaatgaggtgataggcatctaatgatgggcacaagataggctcttattgaatactcaaaatattattctctatctttttctcactacctttcccaaattcagctaggtctttcagcctctctgttatatggccattgtaataggcttctaactggcatcccagcctagcacctatagatgcatttgctcatcaatgaagtgaaaagaggaaaaggaccctttccaccccttcagcccaccttccactgggctgccagaattaacctcaaaagcacagttctgatcttatcagtctgctggtcaaaagactttcattgtttttcattaccctgaaacactgaccacatctcttagcccacaatttaaggccctcccagaccttagcctacctcagtagtctcatttcgccacttcttggaacaacccatttc

SEQ ID NO: 526531 - DNA, 586 bp, Homo sapiens
tgttgagacccttaagaagcctgttgagccatactagatgaatgcttttctaaggacggtgagtctaggtaacctcagagttgatattttcagggaagttggagtaggatgggaatgcaagttaagggccagagtgaaatgactgaattgcacaggataaatcaggagccactggccacttctgccactgggtcctcttctttactcctccgccatgaagccctagcctctcctttaaatccatcagcttgaaggcctgctcagggcatcctgttatctcagacatgtctcagttggcctgacttgcatatgtaagcacttcctacagtgcacaygcataggaagcactgattttctctccagaaatccctatttttctcttatgcctagatgcctcccctgcctcctctaaattaacctgtgctgaggacataatgtagggaaatggcaatcctgtgtatatgccagagtcttcttcaaaatactgtgcctgaaatcatgtgtgcaactcaaccttcctattagtaataataataaatgtatattgaatattttaaaacgctgatgaggaagtagaattagtcac

SEQ ID NO: 526532 - DNA, 450 bp, Homo sapiens
cccactctgataaaactcatttatttgaatacttattctttgctacacatgagattatttccttatgtggcagatgttgttgttccaattttatgtatttatttattatttatttttgagacggagtctcgctctgtcrcctaggctggagtacaatggcgtgatcttggctcactgcaacctccacctcccaggttcaagcgattctcctgcctcagcctcctgagtagctggggttacaggtgtgcaccaccatacccagctaattgttgtctttttagtagagacagggtttcgccttgttagccaggctggtctcgaactcctgacctcaggtgatccacccgcctcagcctcccaaagtgctgggattacaggcgtgagccacttcacccggccccaattttacagatgaggaaactggacctagaaattttaacagatgtgctc

SEQ ID NO: 526533 - DNA, 624 bp, Homo sapiens
ccctcaccccagcatcgcaatcctctcaactcctgccctgtatcagcctctcccctccccaaacagacaggcagccaggagtaaggccatggtggttgactcaagcatctctcttcccaggctgaagttccacaggtcttgctctaccagctacagtcctgtgacacttagcaatggggtatgttctgagaaatgtgttgttaggtgatgtcatcattgtgggagcatcatagagtgtacacacacaccttcatggcatagcctactacacatctaggctagatggcttggtctgttgcttctaagatacaaaatctgtacagcatgttactgtaccgaacacctcaggcaaccgtaacacaatggtaagtgtttgtgtatctaaacatagaaaaggtacaatacaaatatggtgtaaaagattaaaaaaaaaagatacacctgtgtagggcactgtattagtccgttttcacactgctgataaagccatacccaagactgggtaatttacagaagaaagaggcttaatggacttacagttccacatggctggggaggcctcacaatcatggcaraaggcaaggaggagcaagtcacatcttacatggatggtggcaggcaaag

SEQ ID NO: 526534 - DNA, 532 bp, Homo sapiens
caactgttcctgagtttgtctttaacggttaaacatgcctcatgtggtgtgtcaaaagcttataaattcataattggggcaaggctgctgtgggtttagttgccaataatgtgttgatgttgggttcagagkgcccaattaggatggaacataaagcaatgcatggcaacgaatgaatatgagatcactcatgtttcagtggaattttctttgaagatccacaaaactggagaaatggctgcccggataacgctgacatcaccatgtggccatattcagagggctgaagaagtcctgacaaactaaagtggggtgcttctgaagttccctaaataggattggataaagtgtagggatagagagatggtcacatgcaggattccttcccacctccttcctgtcatatcagaatacttgttactgtggctgaagtgacatttccatccagaagccaggatctggtttagctgtgcttgtcttccttcccggagctgagtcatgaatggcagtttgggatcctccaaagtgaaag

SEQ ID NO: 526535 - DNA, 365 bp, Homo sapiens
aaacttgtttagatttaactatgcagttattatggcaatcactaagttaggagcaggagaaaataaacaaaagaaaaagaaggagcttgttattttgtaaggaagctgctaaaggaagctttaggcaagtaaaggaaggtaggttaggtaaatacattggaaacaatgtggaatggagactgctgaaagaggtagaggtagaagaaggtggtcgggaccaagccagtgtgggaggtcaggagagygtggaggttgttttggtggatgcagaggagtaggactctgacatggaaaggtggaggtaggggtggaggtagcgtaggccgagatgggaaggtctgggagtgtgagtggaggcagttggt

SEQ ID NO: 526536 - DNA, 488 bp, Homo sapiens
gtgtcactatggttccccaaatcatagatgattaccttcaagttagcatgaagtcagaactgacattattgtcaggaaaaaatctgctttgttttcctcttaagaaaaaawtgtaatcataataaccttccctgcccagggcaaagcaaacaactaaactttcagcaaatcttcaccagactcagcacatcagatcaagctctttttaacaccttgatttttttttttttttttttttaaatcactgtagcacccaacttagcttcttctttttatgctgttttcttctggcctctgagatgtcatgacctttttaggttcatgttagtaggtaatatttaagtacaagagttctgaaatttaaaaaataaaagaaaaagatacacacacacacacacacacacacacacacacacacacaattagggtttagggtgacctgaagattatcctggacaagctgaatgtgacttgggtaagtcacatat

SEQ ID NO: 526537 - DNA, 488 bp, Homo sapiens
gtgtcactatggttccccaaatcatagatgattaccttcaagttagcatgaagtcagaactgacattattgtcaggaaaaaatctgctttgttttcctcttaagaaaaaattgtaatcataataaccttccctgcccagggcaaagcaaacaactaaactttcagcaaatcttcaccagactcagcacatcagatcaagctctttttaacaccytgatttttttttttttttttttttaaatcactgtagcacccaacttagcttcttctttttatgctgttttcttctggcctctgagatgtcatgacctttttaggttcatgttagtaggtaatatttaagtacaagagttctgaaatttaaaaaataaaagaaaaagatacacacacacacacacacacacacacacacacacacacaattagggtttagggtgacctgaagattatcctggacaagctgaatgtgacttgggtaagtcacatat

SEQ ID NO: 526538 - DNA, 617 bp, Homo sapiens
acatattcaccagaaaatttctataattatattctgaagtggtccagaatctaacagtctaaatacttttgaaaaacaaaggttggtatatattggtaartggtttttggaaaatcgaattgggacttttgcaagtaatgacttgtgtaatcataggtagacattattcagacttctattaccacacattggcctgggcttttttttttcccctctattaagcaaaacaaaatgttgtaatcaggcagtgctttcgatggaaataactgacattacagggtcttcacttgaatcttcagaattgtcatcccaaagacaaaatgataacctctttcaaaaactagctgtcgggagcaagatggtcaaatagaagcctccactgattatcctctccataagatcaccaaatttaacaactacctacatagaaaagcaccttcataaaaaacaaaaatcaggcgagtgatcacagtacctggttttaactctgcatcgctgaaagaggcactaaagagggtaggaaagacaagtcttaaaagctgatgtcaccagtttcccccacccctcagcagcagctgcatggcatggagaatctgtgtgcatagaggagagagagc

SEQ ID NO: 526539 - DNA, 609 bp, Homo sapiens
acaatttgggagattttgcattttcaagaaagaactttaaagaaaagattttaaggtgtattcggttaattttaattgagagtaaacaagttgaattttctccactgtgattttagtaaatagtaaatcatcaagctcatacagtccttcaccagaaatagatgagtctgtattttaggggataactgagcttgtctttaaaatttattagtaatgagacacacattctgaggtttcttagaaagygtacatgaagaaataagatatctagaggcaattacagagttgggcttcaaaattacttttatgaaaagaaacaacatttgtcatttttgtttaaaatcttgatttatcacattctgagcagagcttgaaatgttgtgtttttattttacctaacagaatgccttgcctgcaggcaagcagaatgttggattaaaacttttaatactctagggcaaaatctgctgattttaataagagacaaaggctcatttggatctttctgtcattataaaaacaagctgagcttctgtttatcatgttcattgctttaattctgggcgcatggcattggaaaaggagatggttaccagggcacacatggcc

SEQ ID NO: 526540 - DNA, 604 bp, Homo sapiens
atacatatataatatacatatatagttatataggtrtatatatacatatatagttatacatgtatacctatacatatataggtatacattatataggtatatataatatatataatatacatgtatactatgtatacatatattatagttgtataatgtatacatatacataactttatattataattgtactccctttcagaagcaatgtctctatggtacagtgaaaacaatactctttgagggtcaaagggctatcctggctctctttctcatttaacttgtctggatcagtgtcatgtttgtaaagtgggaggactggcttgaattcgctttcagttcttactttgctgtgaaattattttgctcctgaaaatatttctgactattgagtgcatgctagagaaaaatatgtttatggttctctcggccaatattaggaaagatttgagactagcaattcattccttcaatatttaaggatacttttttcttttttttttgagactaagtctggctctgtcgccaaggctagagtgtagtgtctcgatcttgtcttatgcaacctccgcctcccaggctcaagccattctctcacctcagt

SEQ ID NO: 526541 - DNA, 604 bp, Homo sapiens
atacatatataatatacatatatagttatataggtatatatatacatatatagttatacatgtatacctatacatatataggtatacattatataggtatatataatatatataatatacatgtatactatgtatacatatattatagttgtataatgtatacatatacataactttatattataattgtactccctttcagaagcaatgtstctatggtacagtgaaaacaatactctttgagggtcaaagggctatcctggctctctttctcatttaacttgtctggatcagtgtcatgtttgtaaagtgggaggactggcttgaattcgctttcagttcttactttgctgtgaaattattttgctcctgaaaatatttctgactattgagtgcatgctagagaaaaatatgtttatggttctctcggccaatattaggaaagatttgagactagcaattcattccttcaatatttaaggatacttttttcttttttttttgagactaagtctggctctgtcgccaaggctagagtgtagtgtctcgatcttgtcttatgcaacctccgcctcccaggctcaagccattctctcacctcagt

SEQ ID NO: 526542 - DNA, 604 bp, Homo sapiens
atacatatataatatacatatatagttatataggtatatatatacatatatagttatacatgtatacctatacatatataggtatacattatataggtatatataatatatataatatacatgtatactatgtatacatatattatagttgtataatgtatacatatacataactttatattataattgtactccctttcagaagcaatgtctctatggtacagtgaaaacaatactctttgagggtcaaagggctatcctggctctctttctcatttaacttgtctggatcagtgtcatgtttgtaaagtgggaggactggcttgaattcgctttcagttcttactttgctgtgaaattattttgctcctgaaaatatttctgactattgagtgcatgctagagaaaaatatgtttatggttctctcggccaatattaggaaagatttgagactagcaattcattccttcaatatttaaggatacttttttcttttttttttgagactaagtctggctctgtcgccaaggctagagtgtmgtgtctcgatcttgtcttatgcaacctccgcctcccaggctcaagccattctctcacctcagt

SEQ ID NO: 526543 - DNA, 632 bp, Homo sapiens
tcatcttctgaatatccattagatttccattgcctactgcaaactcagcatggtatgcaaggtcctccttgatttgaccacctgtttacctctccaacttcatctcctgctgctccctcaactctacgccttggttcaccatagaccaagggggatgtttcgtatgtgcgaaacatctggtgacctcaaattaggcatttcccccattttcttatgaaatgatcatataagaaaacttgtattgccaacttgaatgtataaatgtttggggatataactgaraatttccagtgtctccttgtaatatttcatgtattaatttagttaaatatattttaaattaaatattatataaaatattaatttagaaacattgattctttttgtgtctcaaattttatgaataagtttattccaactcttcacaggcaattctgacaatgtcttcatcgtcactagagctacattttgagtcacagaacacagcttttcaagacataccatcttcacagctttctacattgtttgtaacataggactttttgaaacgaaatgatgcagccactggaatttttatcacaaatcgtacatatacctttatataacaacaggatattttttaaaagtccctt

SEQ ID NO: 526544 - DNA, 509 bp, Homo sapiens
ttgagcaagatagctgtctccaaaggaaaaataaaatgtacatttggattcaaagatttccaagaaaatgattttttatgattccatacataattttattgggaatttattttattttatataaaacacaaacatagcacttataatcactgttgcaagagctttatacctatgaacttctttaccataatagctctataaagtaggcactacaattatcctcatagtatgaatgaaaaaactgaagcccatagaagtttggtaatttgacctaggtcacacaggttttaagaggtagagccagagttagaaaatatcagattagttgcagcatctctctttttaaccactatacttggtcatacttaaaagtaagatgtttatgtattcatttatatattttagatatgcattctaatcactgtactgaaaaggaacatattttaactaattctttcacctacctactatgccaatgtctggggctsccactgaccctaagtaattat

SEQ ID NO: 526545 - DNA, 615 bp, Homo sapiens
tttcgtagagaatataaatgagacataattcaaataattttctataaatcatacttttttctcccttagatattttataaggtccgaagcacaggaagacagcttgcacagggtttgactaaaggtctagrgaatttgaagaaaaaaaatgacatctagagttatgatgtttatttatattattagtccatttgtgaaagaacagtgaaagtaaatctactatagtttatttataaacaaagaagacaaaatatttttataaatctttcattccgtaaattctcatttaaccatcattctccaggcccattttctctgaatggttttgaactaggttgtctggaaggtcctacccatccctgatgatctgtgatactaaataatgatgacgatattgacaacttatgcttatttaacagcatagttttctacagttaaatatctttctgtgttaaatagtacctcatactctgtgctagggactgtttcaagaagtttatatgtatattctcccatcattcacattttgtccttggttagtctaaactgtttttgatcataatacatttaatttctttaacatgcattttgtattaaattcagagagacaatatc

SEQ ID NO: 526546 - DNA, 589 bp, Homo sapiens
cttttacaccttttataatttcctcatacttcgttacttatgaagtacaagaaaggggaatttagtgttacctaaattttcaaactctgtgtttagatttccatttagaaaggaatgcattcaggtcttgttatatgcaatasttatgttctataaagtcacctcaagcactttatttgtgaattctgaaacgctgctcctaggggagataaagatttgggttcctggaaaactctgattacatttccatatatcaatcaatacagacccttgttttatatacgtttctgtttaaagacaccttatttcacacatactgttgattcgttaacgttgaactcctggccaacaacaatataactcgttcctgaataaagcttatctaacacatttcctctgtaaagcatatcacagagtttttgtgcttaggaacattaaacagcacttcagcaccatgtttggggtctatttcaaatggcaaaatcaccaacaaaagcaaaaacatacaaaaaaaaaagtggcactaaatagacattaaaaaagacacttggttacaatatgagagctgaaacagcattgccttgttcaa

SEQ ID NO: 526547 - DNA, 632 bp, Homo sapiens
aagtcatcttcccattagcattggtagcacaatgccaaacccacttttacaccttttataatttcctcatacttcgttacttatgaagtacaagaaaggggaatttagtgttacctaaattttcaaactctgtgtttagatttccatttagaaaggaatgcattcaggtcttgttatatgcaatagttatgttctataaagtcacctcaagcactttatttgtgaattctgaaacgctgctcctaggggagataaagatttgggttcctggaaaactctgattacatttccatrtatcaatcaatacagacccttgttttatatacgtttctgtttaaagacaccttatttcacacatactgttgattcgttaacgttgaactcctggccaacaacaatataactcgttcctgaataaagcttatctaacacatttcctctgtaaagcatatcacagagtttttgtgcttaggaacattaaacagcacttcagcaccatgtttggggtctatttcaaatggcaaaatcaccaacaaaagcaaaaacatacaaaaaaaaaagtggcactaaatagacattaaaaaagacacttggttacaatatgagagctgaaacagcattgccttgttcaa

SEQ ID NO: 526548 - DNA, 635 bp, Homo sapiens
aatgcccatgaataagtcaagatgtatttgaatatttaactatatttttattttccaaatacttgcaaatgcaaaaggaatctccaagttatctaattctgattacaactctattcaagagccagtttttgctttgaaaagaaatactacctttctaatgtaatataaaagatctttgagtagttgattccatattagaggrtatattcagtattcagaaaatggtgctagattttttttaatattgtttaacagacttttgtatgggtatattgggccctcagtggcttgactattgtgggaagagatggtgtgaacagagcaccacaagggctaagggaattgaccacatcctaggaatggccaacaacctgtccaggtggagtgagatgcccaaatgcagtgtccatggcactaagatttttaggcaaaagtctcatgaagtcagatcaagaaggcaaaatatgaaagaagaatatttgaatagttgtgaatcagaaaatatgatgaatggctacttcatagttccaactattcttttcagtttttttcagaaccccaggcaatccctgagaatgtgaggactagggtggcagtgaaaaataattgacaagtgtttggaggtgggatagcac

SEQ ID NO: 526549 - DNA, 576 bp, Homo sapiens
aaataaacagaataacttaaacaccacttaaaaacagcaatacaaatataaaatggaatttttagtccttcttatttttttacacattttaattaaaatatatgttttctcatttgcccaagctagtgaatctgcccatggctaggagaaaggaacgtaattatacacttaaatttaatyaatatgctgaaaccagtcaagaattcaaacctcgataaaaaatttgtcctaaaatgaaagtgttattaatgaagaaagccaattaaaactgtccgttgaggggaaagtctgtatattttagaatcagcatcagtgatttatttgtatgtacttattttggcccctagtgtgatagttctttagaatcttaaaaataattcttgggatcaaatatttatctatataaaaataaaaatcagaccgggtgtggtggctcactcctgtaatcccagcactttggaaggcaaaggccagcaaatcatctgagctcagcagttcaaggccagcctgggcaacatgatgaaaccctgtctctacaaaaaattacttgggggtggtggcatgcacctgtgttgc

SEQ ID NO: 526550 - DNA, 254 bp, Homo sapiens
gccaaatgcactgcagccctgccgctccctctgccctgcagggcttccctgcccagcgtctatactcacagcatccccacccgcttaccctgatcccaagcacccagcttccccatctggccaaagccatgcctaaccacagccctyctgcctctgggccccttcccatagccctgttggtggtgcttggcattttatgacaattaaaccaaaaagcagtgaagtttacaggaaaagagtcaaaatccaaccct

SEQ ID NO: 526551 - DNA, 647 bp, Homo sapiens
acttttccaacggaactccacagttggtaccacaaatttgcattccggtcgtttctacgaaagaccacctgacgtaattttaggctcatgcttttctgtggaaggacagaattactgsggcgcaggtccccaataacagataaaaatacttatgaacaaaatcgtttagtgtcaggtcgctgttttgttttgtttttggaaatacagaccaatcactgagctttcccattaaaagagtcaatacgtgcaaagcaagtagaacagcgagctcctggtaagaataagcgctatgtaagtgtttgttgcattaaaaataaatacaaaccaaacaactggcagtcctcaactgagggctccttttctcttcccaccacctctccaacccctcctccctccattggttccccatcccccataatttcaggtccttgcaaggaaaacttaccatctcttcatatttaaataattctttctatggatatgtacccttttccatccccaacgtgataacaatttcatttgttgttaaagttacagtctggaatatatacatttgattatttaactaacagccttgtgatcaagagtgttcaccaaagcaacccatcttctcagaaagaaatctatctcaaatacagatttctact

SEQ ID NO: 526552 - DNA, 647 bp, Homo sapiens
acttttccaacggaactccacagttggtaccacaaatttgcattccggtcgtttctacgaaagaccacctgacgtaattttaggctcatgcttttctgtggaaggacagaattactggggcgcaggtccccaataacagataaaaatacttatgaacaaaatcgtttagtgtcaggtcgctgttttgttttgtttttggaaatacagaccaatcactgagctttcccattaaaagagtcaatacgtgcaaagcaagtagaacagcgagcycctggtaagaataagcgctatgtaagtgtttgttgcattaaaaataaatacaaaccaaacaactggcagtcctcaactgagggctccttttctcttcccaccacctctccaacccctcctccctccattggttccccatcccccataatttcaggtccttgcaaggaaaacttaccatctcttcatatttaaataattctttctatggatatgtacccttttccatccccaacgtgataacaatttcatttgttgttaaagttacagtctggaatatatacatttgattatttaactaacagccttgtgatcaagagtgttcaccaaagcaacccatcttctcagaaagaaatctatctcaaatacagatttctact

SEQ ID NO: 526553 - DNA, 562 bp, Homo sapiens
tttgtgtgttttgtagggatggggtttcaccatgttgcccaggctaaatttttcttccttgtaaattacccagtctctgctatttcttttattttctcttcttttcttttctttctttcttttttttttttttttttgccacttctgctagggtgtctgtttgtttgttttgaggcaggatctcactctgtcacccaggctggagtacagtggtgccattacagctcactgcagtctcaacctcacgggctcaaacgacctttcccactcagcctcccaagtagtagctgggactacaggtaagtaccaccatgcccagacaatttttgtatttttcgtaaagacagggtctcactatgttgcccaggctggtcttgaattcctggcctcaagtaatattcctgccttggcttctcaaagtgctgggattacaggcatgagttgccaagcccagcagaatgtgctactttttrtaggagcacaaagatactaagatagggtgttctgctccttctcctttagggtggaatattgtaggggagggaaaaataatttgcttcta

SEQ ID NO: 526554 - DNA, 673 bp, Homo sapiens
tatgtatgctaaagtttatcaaattgtacactgtaagtatgtacagtttattacatatcaattataccccaatgaagctgttttttaaaataaaatttcttgctcaatatttctaactctttgaagatctaaagaaaatgaggagcaggagttgctggtagttcattatgactatttagtgtagtgagttaaagggacacaattaaacctactatactayataataataatgaacaacaatttctgtccttcattttgtatgcccaaaaaagatacgttcaagtcctgacactggtacctgtgaatgtgatcttatctggaaagagagactttttggcctatgagatgtgggggccccaaatccaatgactgaagtcaatggaagaagatgagaggatgcacagagagacacacaaagagaagagcaccatgtgtagatggaggcacaggttggagcgatgcagctacaagccaaggaacaccaaggaactagaaagaggcattaagaatccttccttagagccttcagagggtagctggccctgctgacaccttaattttggacttctagcctctagaattatgagtgaatacatttctgttattttaagccacagaagtggtaatttgttatagcaatgcttgggaacaaatacatataccaatatggttc

SEQ ID NO: 526555 - DNA, 673 bp, Homo sapiens
tatgtatgctaaagtttatcaaattgtacactgtaagtatgtacagtttattacatatcaattataccccaatgaagctgttttttaaaataaaatttcttgctcaatatttctaactctttgaagatctaaagaaaatgaggagcaggagttgctggtagttcattatgactatttagtgtagtgagttaaagggacacaattaaacctactatactatataataataatgaacaacaatttctgtccttcattttgtatgcccaaaaaagatacgttcaagtcctgacactggtacctgtgaatgtgatcttatctggaaagagagactttttggcctatgagatgtgggggccccaaatccaatgactgaagtcaatggaagaagaygagaggatgcacagagagacacacaaagagaagagcaccatgtgtagatggaggcacaggttggagcgatgcagctacaagccaaggaacaccaaggaactagaaagaggcattaagaatccttccttagagccttcagagggtagctggccctgctgacaccttaattttggacttctagcctctagaattatgagtgaatacatttctgttattttaagccacagaagtggtaatttgttatagcaatgcttgggaacaaatacatataccaatatggttc

SEQ ID NO: 526556 - DNA, 488 bp, Homo sapiens
agtgaggagggagtctcttaatctttccacattgatcatctttgaatctccaatcttctcctgagtcttcatttcagtatctatgaattggggatgctacctgcctagtctactccataagattgttctgaaggctccacgtcacattagatgtaaaagtactttaaaatatgttaaattattgtaagtggcaagtcatcattatttttagatcaggtgtttttttttttttcactctycatgaacttctctcagggaggaaaaaaatgttgtaagttctcccattgtggagcgtttgtgggtgaaaagagagctctgcctgatctctgtgtctccctcaagcaacatccctccctttctttcccttctgagccaagcttttgggaagcattgttagcactcattagctctctttcctaaccatcaattcatgccccactgctccactgcatttccggtgcttctgctaaggacatcactatctagca

SEQ ID NO: 526557 - DNA, 488 bp, Homo sapiens
agtgaggagggagtctcttaatctttccacattgatcatctttgaatctccaatcttctcctgagtcttcatttcagtatctatgaattggggatgctacctgcctagtctactccataagattgttctgaaggctccacgtcacattagatgtaaaagtactttaaaatatgttaaattattgtaagtggcaagtcatcattatttttagatcaggtgtttttttttttttcactctccatgaacttctctcagggaggaaaaaaatgttgtaagttctcccattgtggagcrtttgtgggtgaaaagagagctctgcctgatctctgtgtctccctcaagcaacatccctccctttctttcccttctgagccaagcttttgggaagcattgttagcactcattagctctctttcctaaccatcaattcatgccccactgctccactgcatttccggtgcttctgctaaggacatcactatctagca

SEQ ID NO: 526558 - DNA, 353 bp, Homo sapiens
tctcttcagatgatattagtccaaggtgggaattatgctctgatattttgagatatatgataaggttgaaaaacagtcaactgtrgttctggtaatagaatgaacaggctctccgtctgctctggcttcctccagctacagatcaccatctcaggtttaaatctaacttgctgctctcattgtcttccagacttatttaagctataaaaggtttgcctagagatgtggattgtttatgtagagtgtgaggtgcaactgtacaatatatccatgactttgctttatgatttcagtcaaagcaaaatgaaaggctcattatcactcgtgctcgggaagcaatggggaatatttta

SEQ ID NO: 526559 - DNA, 663 bp, Homo sapiens
gaaatggacccaaacacaaaacccctacaggcccaaccaaagactcttgcttgaccaatgaatgactggatttgtttgagccaamtgggttcaggcctttgggttcactggggccacctgcaatgctggtgttcaaaccctaatctgtgagccctcattttctagattgaaaaatccctaactttccccctctctgctaactattcagtgaatttctttactagtgtgtgcttccttgcctggaaagttaacaaacttggttttgtggtttttatttattttatacctctggtggcctatgttttattatttttcagaatgcaggctgtcggggagccaactatcacttaacatctggcagcagcacagaaaaaattctgaacattaagaccaactgaaagaaagccccaaaccaaaccaaaccaaacacaaccaaagcaaacaaaacaaaaaacataaaccagtaacagcagcaccaacaacataataacagcaaatctcactcatcagaccaccttgctgggaaatgctacccaaaataatttcctgactcaggtcatttaaacttggagttgatttcaactggactaagccaatttcaatagtggtctagatttgaatactgcttctagatgtttgtgtgacctccttgtttggtttagc

SEQ ID NO: 526560 - DNA, 663 bp, Homo sapiens
gaaatggacccaaacacaaaacccctacaggcccaaccaaagactcttgcttgaccaatgaatgactggatttgtttgagccaactgggttcaggyctttgggttcactggggccacctgcaatgctggtgttcaaaccctaatctgtgagccctcattttctagattgaaaaatccctaactttccccctctctgctaactattcagtgaatttctttactagtgtgtgcttccttgcctggaaagttaacaaacttggttttgtggtttttatttattttatacctctggtggcctatgttttattatttttcagaatgcaggctgtcggggagccaactatcacttaacatctggcagcagcacagaaaaaattctgaacattaagaccaactgaaagaaagccccaaaccaaaccaaaccaaacacaaccaaagcaaacaaaacaaaaaacataaaccagtaacagcagcaccaacaacataataacagcaaatctcactcatcagaccaccttgctgggaaatgctacccaaaataatttcctgactcaggtcatttaaacttggagttgatttcaactggactaagccaatttcaatagtggtctagatttgaatactgcttctagatgtttgtgtgacctccttgtttggtttagc

SEQ ID NO: 526561 - DNA, 599 bp, Homo sapiens
aatcttatgagtaaattatttccattttattttattctagatagtgttaactattttaatttgattaatccactattatctaaacagtagtgggagttttatatatgtaatcttgcaggtggtgaggttttaaattctaaagtctttgtccttattccaagaactgtatttactgtggttgtagacaaatgtgaaagtaaatttatgcttaattgaataaattatagttgatttaaaaaatatatataggttgcattattcttcaggtatggagagatgaacagatcaagtgtcgattaccactgaaaagatggtttgttactcacagatcccaacagaagggaaagtactatgccatgcagcwccgaatagggaggcagtatggtcagcgagaagataggagtgatggaaaaacatgggcaagagcctttacggtggtttccatgggaaggaatgagtgaggcaaggtgagcagggttaaggttagctattatagtttgagtagtttcagcaggctctgggtataggggctgtccctagttgtctggtacctggccttggggtgcttagggcagaggaatagtggcctagagtgtgtg

SEQ ID NO: 526562 - DNA, 617 bp, Homo sapiens
atgactgctatgacatcactaggtgataggaattttttagttccattataatcttaaggaaccaccatctgtgtggtccatcattgactgaaacattgttatgtggctcatgactgtgactgtatgtcctttcctctagcaggctctcctccccttgctcctctgcttcaccctgtcctgtggtgtgaagtggtcaccttggattcaggactgggagagtggcagggccagccctagagtgagcccsgagaggtgccctcctcccaggggtgtgcaatgcaggggtagcttcagagggagcagctccttgcattttacataataggctcttctcttgcctcacaccagtccctcccccagtccctccccagtagactggccttttccaccgaaatgacaacaaaaaacctggaatgtcagggttggagaatgcctttaagtcatgtgacgccagtttctctaagtgtggtccatggagcacctacaggagacttagcagagtctaaactgcagattcctgggcccaggcccagacctacagattgagaatctttgggaggtggtacaggaatctgcatttcaataaagaatctctggcacttcttataaatcagcag

SEQ ID NO: 526563 - DNA, 616 bp, Homo sapiens
atgactgctatgacatcactaggtgataggaattttttagttccattataatcttaaggaaccaccatctgtgtggtccatcattgactgaaacattgttatgtggctcatgactgtgactgtatgtcctttcctctagcaggctctcctccccttgctcctctgcttcaccctgtcctgtggtgtgaagtggtcaccttggattcaggactgggagagtggcagggccagccctagagtgagccccgagaggtgccctcctcccaggggtgtgcaatgcaggggtagcttcagagggagcagctccttgcattttacataataggctcttctcttgcctcacaccagtccctcccccagtccctccccagtagactggccttttccaccraaatgacaacaaaaaacctggaatgtcagggttggagaatgcctttaagtcatgtgacgccagtttctctaagtgtggtccatggagcacctacaggagacttagcagagtctaaactgcagattcctgggcccaggcccagacctacagattgagaatctttgggaggtggtacaggaatctgcatttcaataaagaatctctggcacttcttataaatcagca

SEQ ID NO: 526564 - DNA, 605 bp, Homo sapiens
agggtcaaagctagacctcttgaataggatcagtcatggaagaactatcctgcttctccgtcccctctacttctacctcggaaggatccgaacctacrtgagcacaaccaggagagaaaaaggagaagtattcatccctcttcgactgcaggatttctgattcctgcagagcgtacttgagggtccagagctttattacatgggaatggaacatcttaattactgaattgaggccaggcgcggtggcttacacctgtaatcccagcactttgggaggctgaggtgggcggatcacgaggtcaggagttggagaccagcctggacaacatggcgaaaccccgtctctactaaaaatacaaaaattagccgggcatggcggcaggtgcctgtaatcccagctactcaggaggctgaggcaggagaatcccttgaactctggaagcagaggttgcagtgagccgagatcgtgccactgcactccagcctgggcgacagggcgagactccatctcaaaaaaaaaaaaaaaattactgaattgggactgggttttttaacttaaagtgactggaagaatccatggtgtctactcgagttttaatttaggg

SEQ ID NO: 526565 - DNA, 499 bp, Homo sapiens
tgtgttaagtggtacatggatattttatgtaccccagtcaatacagtatttttcacaataaaataaaagctgggaggaagaaagaaggaaaagaaaaaaagaaaagaaaaagagagggagggaaggaaggaagggagggaaggaagggagggagggaaggagaaagattttcaaacattgacatatatctgaggaatcagatagcagaatttatccatagcaatccctgtaactacaaacatgaatcaagggmtgagaaaaagtgctggacataggaaggtggttagagtgcagtaaagagctcagtgttgtcagataaggagtgcaggcacatgctgacagcattgttttccattttgtgctttctggaggaagctgccagggtccggccctcactcagtggatctcaccaacccatcatccgtgagacctattggggaaattttcagggctttctctgtatttttccatttctggtttaggaacagggagtggagga

SEQ ID NO: 526566 - DNA, 615 bp, Homo sapiens
caatgacaacataatcatcactgctcatggcctcagtctctgtattgaaagaagagaactgtttctagccacaccagccataaaggaatcatgccctggaagcaggctttgtgaaagaggagactttgtcatgttcactgctrtatccacagtgcccattttataaagagcttctgaaattgagcagacaaagaccaccaacccaatagataaatggccaaaggatatgaacaaattggttgcagacaaatgcaaatggctcttaaatatatgaaaaaaattttcaaccatacttataattagagaaatgcaattgattaagaaaactgttgcatttctcatcgatcaaactggcaaaaatccaaaagtttgacaatacactctgttagcagagttggaaggaaataggccctgctatacagtgctggtaggaatacaaactgttataacccccatgtatggggatttgtcagaaactaagaaaattacacgtgaatttgccttttcacccagcaattccatgtctagaaatttatccagcaggtacatgtacacaattacagaaagatacttgtataggttattcatcggagtattgtttgtaattccaaaaga

SEQ ID NO: 526567 - DNA, 615 bp, Homo sapiens
caatgacaacataatcatcactgctcatggcctcagtctctgtattgaaagaagagaactgtttctagccacaccagccataaaggaatcatgccctggaagcaggctttgtgaaagaggagactttgtcatgttcactgctgtatccacagtgcccrttttataaagagcttctgaaattgagcagacaaagaccaccaacccaatagataaatggccaaaggatatgaacaaattggttgcagacaaatgcaaatggctcttaaatatatgaaaaaaattttcaaccatacttataattagagaaatgcaattgattaagaaaactgttgcatttctcatcgatcaaactggcaaaaatccaaaagtttgacaatacactctgttagcagagttggaaggaaataggccctgctatacagtgctggtaggaatacaaactgttataacccccatgtatggggatttgtcagaaactaagaaaattacacgtgaatttgccttttcacccagcaattccatgtctagaaatttatccagcaggtacatgtacacaattacagaaagatacttgtataggttattcatcggagtattgtttgtaattccaaaaga

SEQ ID NO: 526568 - DNA, 632 bp, Homo sapiens
ccctctgtcccaggccaaggctgcacccactgccgcctggattgccgcagtctaggcctcccctgagctcaaccattctgtgctttgaggtgcactggacactggtttcccagtgactctgcctcccacagggccctcccgcgtctgggcctctgcttgtgcctttggtccatggcaccatctgaaggcccccagaggttctcgcataactgccctctttgactgaggcttgggcttcttcctctgaccatccctttgctggggacacttgtgctttctctttactccaagtcttgggtgctggcagcgtttcyaggtgcgatccgtctggcacactgtagtttccttgctgctgctgctgcttagtctccatgggctttcttctctcctttttccttgtggatggtccttggggttctggtggtactgcctctgtctttgtgtgttacacaccgtcactgggacgtctcactctcccacgtctttggttaacagccgtgagaagctcattctcaaacctacgtctagatcccagagactacctgctggttggagtgtttttcttggttgactggtaaaggctcagactcggcctgtctgtattcttcttcaccttcccccactttttcccc

SEQ ID NO: 526569 - DNA, 515 bp, Homo sapiens
tccaactctttctcctctcaggagtccctgtttataagcagatgcctcaccttttgcctgaatgtctttggatagaaatattcagtaatcatcaaggtgatgaaatgagattggaacattccagacacaaatcaatgtacataatacttaaaatccttggacttgaaatgagggaagggcaggcaggcctgtttgctggcattgaatacatcgttacctggtctgttatccaagaatctgtgctttatacaactcaaaaacaaaaatcccagttagaaaatggacaaaggacatcaatagacatctctcggaagaaggtacacaaatggccaaaacacacatgaaaagatactccatatcatcaatcarggaaacataaatcaaaccacaataaggtgccacttcacaacagatgggtggatgaacacaatatgggctgggctatccctacaatgcaatgtcattctgctgtgaaagaaagacagccccgacactgacacacgcagatggatctt

SEQ ID NO: 526570 - DNA, 424 bp, Homo sapiens
gagtagcaggaggagaattccaagtaaagccaatggcgatcttataaacaccagcagcgcccacccatgcccgggagaaggtagtcaggagcagacgggagcatgagtagcaggaacaggaggagccagggagcccaggccggcggccccagaggtgccaccagggcagtgctgccctgctctcggtggcactggccttatctccaggagggggctgtcccctttgcttccttctccacgctgctcttcccacctgaacgattttccttcctcsctcccactgggccttcccacaggcttttctctctgcctgaaagaaaaactacctctaggagtagggaaatgataattgtgctgcattttcaatcctaagcgtgtcacctgcagggacactgatatgctggatggaatttctggagcgtgt

SEQ ID NO: 526571 - DNA, 585 bp, Homo sapiens
cgggttggggtctcactgccgaggccctgggcactaggagcagcacgcaccgggacctgcctggcacccagagcccattcccagaggacctggggcaggtacgcagggtcccccggagccgggagcagaggctcctgaaagcctgccaggctgcccggggctgggctgaggccgggackttggtgatattgggcactggccgcgacctcgcgtcacgagagtgtaggaggggagccgatttggaggggactcgtgcctgcgggggagcaggaggatctcaggagagggccagcgccggcatcccatgacccgcttgagtccccaagccggactgtcccggggaacgctcggcgagcgcccgctcctccccgccgctctcggaccgcggggccccagtgcgctgcgctcagccacccgggtggggcctctgccgggagcaggcgtggtgcgcggtccagtccgtgtcgcggacatcagtgaccctgacccacaagggcagcccagggcccaaataccgttaacttactgacttacaagcctagcctttaaaatccgagcgaagagagggcgggcgattttgaccaa

SEQ ID NO: 526572 - DNA, 345 bp, Homo sapiens
ctcccgctttgtgtgcacagggagaagcagccctgaatttcagaacaatagataggataagagccaagccgggagcactgaatacgaaacttaggtgggctataktatccttatttacagctgggtctataaaggaacaatgaggagacagggattttatgtttgaacggaacgagggaaaacaaggaaggcattctaaaatgcttttctttccaaagaaatggagggacacacacatgtgtacacacatacacacacaaggaaaggtatgtctgtagttatcactgatttctggctccaaagatagctggaaattgctcacagtgtacagtcacagagtcatct

SEQ ID NO: 526573 - DNA, 636 bp, Homo sapiens
tgtcttgttactagctttttattgaacatgagagggaagggactatggrtagtttcatctaaagtgctttgttaacatgacactgatgatccagcatcaattacaatattccttaggagcctaagtgttacgtagaagggtcaaaaagtccattttaaattttatttcctatttcaaagtccaagaacccaatgactttcaattactaagaaagaaagaaaagaaagaaagaaaaaagaaagagaaaattaaatcaacatatagtttatcatttgcaaaaattgcaacctagttctacagaaaaaagcttcagtcattacctctttaattcaatcaaggtcacctcataaacttgcccaaacagctctgtttctcaattagaaaaaaaggtagagctgtttaaaaagcatttactcatcttcctcttagccccatccttctgcttgccatagtcccccacattttaatgacctgaaagaacatcaccttcttcctaccaaaaagagtaacatacagagtgtctgatatataatgatggaagcagaattccacagaggggagggggcaccacacacaggtgatactttggggactactgggtgtgtctgaggcacagtcaccctgagagacacactc

SEQ ID NO: 526574 - DNA, 636 bp, Homo sapiens
tgtcttgttactagctttttattgaacatgagagggaagggactatgggtagtttcatctaaagtgctttgttaacatgacactgatgatccagcatcrattacaatattccttaggagcctaagtgttacgtagaagggtcaaaaagtccattttaaattttatttcctatttcaaagtccaagaacccaatgactttcaattactaagaaagaaagaaaagaaagaaagaaaaaagaaagagaaaattaaatcaacatatagtttatcatttgcaaaaattgcaacctagttctacagaaaaaagcttcagtcattacctctttaattcaatcaaggtcacctcataaacttgcccaaacagctctgtttctcaattagaaaaaaaggtagagctgtttaaaaagcatttactcatcttcctcttagccccatccttctgcttgccatagtcccccacattttaatgacctgaaagaacatcaccttcttcctaccaaaaagagtaacatacagagtgtctgatatataatgatggaagcagaattccacagaggggagggggcaccacacacaggtgatactttggggactactgggtgtgtctgaggcacagtcaccctgagagacacactc

SEQ ID NO: 526575 - DNA, 636 bp, Homo sapiens
tgtcttgttactagctttttattgaacatgagagggaagggactatgggtagtttcatctaaagtgctttgttaacatgacactgatgatccagcatcaattacaatattccttaggagcctaagtgttacgtagaagggtcaaaaagtccattttaaattttatttcctatttcaaagtccaagaacccaatgactttcaattactaagaaagaaagaaaagaaagaaagaaaaaagaaagagaaaattaaatcaacatatagtttatcatttgcaaaaattgcaacctagttctacagaaaaaagcttcagtcrttacctctttaattcaatcaaggtcacctcataaacttgcccaaacagctctgtttctcaattagaaaaaaaggtagagctgtttaaaaagcatttactcatcttcctcttagccccatccttctgcttgccatagtcccccacattttaatgacctgaaagaacatcaccttcttcctaccaaaaagagtaacatacagagtgtctgatatataatgatggaagcagaattccacagaggggagggggcaccacacacaggtgatactttggggactactgggtgtgtctgaggcacagtcaccctgagagacacactc

SEQ ID NO: 526576 - DNA, 636 bp, Homo sapiens
tgtcttgttactagctttttattgaacatgagagggaagggactatgggtagtttcatctaaagtgctttgttaacatgacactgatgatccagcatcaattacaatattccttaggagcctaagtgttacgtagaagggtcaaaaagtccattttaaattttatttcctatttcaaagtccaagaacccaatgactttcaattactaagaaagaaagaaaagaaagaaagaaaaaagaaagagaaaattaaatcaacatatagtttatcatttgcaaaaattgcaacctagttctacagaaaaaagcttcagtcattacctctttaattcaatcaaggtcacctcataaacttgcccaaacagctctgtttctyaattagaaaaaaaggtagagctgtttaaaaagcatttactcatcttcctcttagccccatccttctgcttgccatagtcccccacattttaatgacctgaaagaacatcaccttcttcctaccaaaaagagtaacatacagagtgtctgatatataatgatggaagcagaattccacagaggggagggggcaccacacacaggtgatactttggggactactgggtgtgtctgaggcacagtcaccctgagagacacactc

SEQ ID NO: 526577 - DNA, 618 bp, Homo sapiens
tcagaatgagatactaagagtgtcgataaaatgacactaaaataaatgtaaatttggattgctgttacaagtggctgcttggctctgctaagacgttaggttgctatagtactttccatagcaactttgcatcttattacataaatattccctcagtgtccttcaagcctgctacagaaacaggattaaatccactctcctatgtaatgatcctgcatcaaaccttaccggaatgaaatgcccagaacacataataaactgtaatgtagataatggtgttcctggcagtcaataagcatcagggcactttggsctgcacacaggcggcggtgcagtgaccctgtactactccctggtcatgcgtcttaacctttcccaggtcaaggcgtcagtggctctccctttgtgaagattggttgctcatgtcctcattctcctcctctccctgccaactgcccatcagctcaagccctccaccaggctcaagggactcatagcactaagcaagaagccagggcctgacaggagctgggaacatgctgggctgtcatgcaggaaactttgtggagaccccacccaggtctaagctaggatcaaacaggtatggattgtttaaga

SEQ ID NO: 526578 - DNA, 726 bp, Homo sapiens
ctgcactccatctgtccttctggagcatcatttctgtctcctagtaccaaacaaagcaagcaggctccttagacctgcatggaagccttcacacgtcctgctccccaccacacccacgcagaggaggcagggttaagcgaaggtgagaagttgaggcagacatggcaggaagtgtgattcagatcaatatgtgacatttgctgacactcacattctaatgatggcctttttatgctcaggtttattcggcagcaggccaccagcctttctctcaacattccttttaatcatgtttggtttttatgtgaaaaaataaataattcacagactgatcattcccaaatctgaatcatagtttatggactccaatttgtgttttcataaccctcagtttgtctactgcatcacaaacagaggactcttttttttttaatcttgaaaatcagccttgacctcagtcttaagtcagagtcagggagaacatcaggtaagcacccttcatttttctggcccctgaaaaattaaagagaaatcccacctcttccttactcataatcctgaacagaaaaacagaactgtatcagtcaccaaccaccgtaggcattagtgaacaaactaaaaaatgtccttcttaacaataaattgcactagcattttaagtgtcacattattgtgaagtcattcggtaktcaccataataacagtgataataaagaattcatttgg

SEQ ID NO: 526579 - DNA, 523 bp, Homo sapiens
gctgttgctagtgttagtatattttacttgtggtccaagacaattctttttgtccagtgtggactagggaagccaaaagattggaccacccccrcctcccctgctgatacaggcaatagataatgtactgatcgaactgaataaggaatggaggacataaaattaaagacgttgatttcaagctgctgaagtcaacattcagatgtatgtaatgtgaccaggcatggtggctcacgtctgtaatcccagcacttcgtgaggctgaggcaggcagatcacctgaggtcaggagtttgagaccagcctggccaacatggcaaagccctgtctctactaaaaatacaaaaattagctgggcgtggtcgtggatgcccgtaatcccagctacttgggaggcagaggcaggagaatagcttgaacctgggaggtggaggttgctgtgagctgagattgtgccactctactccaccctgggcaacagagtgagactctgtctcaaaaaaaaaaaaatgtatgtaaggcc

SEQ ID NO: 526580 - DNA, 523 bp, Homo sapiens
gctgttgctagtgttagtatattttacttgtggtccaagacaattctttttgtccagtgtggactagggaagccaaaagattggaccacccccgcctcccctgctgatacaggcaatagataatgtactgatcgaactgaataaggaatggaggacatamaattaaagacgttgatttcaagctgctgaagtcaacattcagatgtatgtaatgtgaccaggcatggtggctcacgtctgtaatcccagcacttcgtgaggctgaggcaggcagatcacctgaggtcaggagtttgagaccagcctggccaacatggcaaagccctgtctctactaaaaatacaaaaattagctgggcgtggtcgtggatgcccgtaatcccagctacttgggaggcagaggcaggagaatagcttgaacctgggaggtggaggttgctgtgagctgagattgtgccactctactccaccctgggcaacagagtgagactctgtctcaaaaaaaaaaaaatgtatgtaaggcc

SEQ ID NO: 526581 - DNA, 499 bp, Homo sapiens
gggatggagcacatggacaggcttctggtgtggctgacaaagttcgattttcttggtttaggaagtgattacaaggatgtccaccttataataaaccataaagctgttgaagaaactgacaaaaatgaggagttttctactcatataccctcactctaaactccaaaagatagatatagatatatatagatatatatagatatatacttcataagaaggaaatgcaactgagaagcatggagtgagatgcaaaaataaatgactttatgaaaattagaccctgcaagactaattcctgagttaaacaagtttgagaaaaatagtctgtaaaagcaygacgaattgaccgcatgtacttatctcccttccaaaacactcattgaaataaaacaaaggaataaagttacaaacctacaaggtagatgtatttttgcaaggtagaaggtccttgagtgaaggagaggttcaaaacttggaggtatatggtactttggaaatt

SEQ ID NO: 526582 - DNA, 499 bp, Homo sapiens
gggatggagcacatggacaggcttctggtgtggctgacaaagttcgattttcttggtttaggaagtgattacaaggatgtccaccttataataaaccataaagctgttgaagaaactgacaaaaatgaggagttttctactcatataccctcactctaaactccaaaagatagatatagatatatatagatatatatagatatatacttcataagaaggaaatgcaactgagaagcatggagtgagatgcaaaaataaatgactttatgaaaattagaccctgcaagactaattcctgagttaaacaagtttgagaaaaatagtctgtaaaagcacgacgaattgaccgcatgtacttatctcccttccaaaacactcattgaaataaaacaaaggaataaagttacaaacctacaaggtagatgtatttttgcaaggtagaaggtccttgagtgaaggagaggttcaraacttggaggtatatggtactttggaaatt

SEQ ID NO: 526583 - DNA, 444 bp, Homo sapiens
acgttatgtacaataaagaaatggggaagggggaaatgaaagaatagagaaagctatattatagtactcacgatgtggtggaaccaaatcggttttctaattgcgaatgtaatcttggtctttaaagttaacagttctggagtraagaaccaggttctctcttcaggaaacacctcctgtctgctgttggagcatatcgattgtatcttcatcctccaactgtgtaggtgttatctatttcattgatgggttgcccatcaaatcagaatctgacctgcctcattgacaatccctgtcattcacaataggctttaattagtttactaagtggtgcatacctcttaaagtgcaccccagaaccgccccgcccccttcaaattaatatgatcattgttctcaggctcgactccttcctagggcttttcgtaggccatgggaaacgcc

SEQ ID NO: 526584 - DNA, 566 bp, Homo sapiens
ctgctaatcctgctggaccagccccgataatgatgactgatttcttaaaaagaaaagaaacaaaagtccaattagagcagatgataacaacgtcctgttttagttgttccggaactgcagagcaaattcgttcatttacatttctttgatgtccttagaaagttattttcctaaagaatgtggtggcacttgtcttattactcccttccctttttccctacaatctggggaaagagtgcttgatattctcctttcaggagaaacacattctgcgaaagccttgcttctgttaagtttyatggtgataatgtggcttttactatatttattaacagcaacagactagcgtttgtcctgatcaatggcaaggctatcgctaaagctacaatcacctacattgtggtagtccttagggagaagatactggtcggctcccacgctgagaactccagtgttgatgagaccttttctggtcataaaatacagtattctctccacttcctgaacgcatcgaatacgcacgagaccccggacgatgatgtgaggaatacatttctgaggagtaa

SEQ ID NO: 526585 - DNA, 566 bp, Homo sapiens
ctgctaatcctgctggaccagccccgataatgatgactgatttcttaaaaagaaaagaaacaaaagtccaattagagcagatgataacaacgtcctgttttagttgttccggaactgcagagcaaattcgttcatttacatttctttgatgtccttagaaagttattttcctaaagaatgtggtggcacttgtcttattactcccttccctttttccctacaatctggggaaagagtgcttgatattctcctttcaggagaaacacattctgcgaaagccttgcttctgttaagtttcatggtgataatgtggcttttactatatttattaacagcaacagactagcgtttgtcctgatcaatggcaaggctatcgctaaagctayaatcacctacattgtggtagtccttagggagaagatactggtcggctcccacgctgagaactccagtgttgatgagaccttttctggtcataaaatacagtattctctccacttcctgaacgcatcgaatacgcacgagaccccggacgatgatgtgaggaatacatttctgaggagtaa

SEQ ID NO: 526586 - DNA, 499 bp, Homo sapiens
gaaatctgaacatcaagcaggcaatttggcaaagataacttgtcaaacagttgataatatagcaagagaatgaaaaatcatgccactatgaacacgatcaccacgtctttgtgtttatttttaatatttttttatttatttgagatggagtcttgctctgtcactcaggctggagtacagtggcacgatctcaggctcattgcaacctctgcctcctgggttcaagcgattctcatgcctcagcctcctgagtggctgggattacaggcttctgccaccgtgcccagctaatttgtgtatttttagtagagacagggtttcaccatgttggccaggctggtctggaactcctgacctcaactgatccgcccatcttggtctctcaaagtgctgggattacaggcgcatgccaccatgcctggccctctttgtgtttaaaaacaaataggatttgttttctcgatkttattgaaccttaacccttaattgaatattttcc

SEQ ID NO: 526587 - DNA, 449 bp, Homo sapiens
gtttcagaaaagcacagtagtgaaatgttttggatctaagagtcattttgacctggtttaatccagctctattacttaatagctgtgtggtcccaggcctctttgtgcttcagtttccttatttttaaaatgctgataaaactattagtacttaattcatataattgattcaagtattaaatgtattagtgattgcaaagcacttagaacatttcatggcatttagtatagccccaataaatgtctgcaattaytatgcaaatatttattcatgaggcttggggctggacctcaccaccttttcataacaagcttactgggcctgggctggtgggtagagggaaataaatgaactaatggagatattagaattgaaaaagttctgtcattccaaataatagaatagagtaaatggtcaaacattttctctttgatattcagggagagca

SEQ ID NO: 526588 - DNA, 566 bp, Homo sapiens
ataatcactggttcaaaagtaaatccaaagatgaattagaatatgcttagtatgaataataacaaaaatacaatgtgccaaaacttatgagatacagtgaatgcatatgaaaatgcaagaaacctaaatagcagaaatcatcttgaaaaaggacagtgttggaggactcacacttcctaacttcaaaacttactatcaagaaactgaggaaggttggagcaagatggtggaagagaaggcttcacttatagtccccttaccacccccaactgcaagggcaccaatttaacaattatctaaacaaraaaacgcaccttcataaataaatcaggtgagcactcacagcacctggttttaatttcatgctgaaagaggcactggaagagggtaggagaaacagtcttaaatcacagataccacccccttttttcatcccttgacagtagctgagtggtgcagagaaagaatcatgtgcttgagagagggagagaacagcaactgtgagacagacactgcattgaactcagtgctgctctgacatagcagaaagcaaaactgggttgaac

SEQ ID NO: 526589 - DNA, 487 bp, Homo sapiens
ttaaatggtgactgcttgtatgttctcctaaaaattagaacaatacatacatatatggaatgagaaaaaggctgcctgaccaaaaccataaaatatatttgaagaaaaagaagatgccactttttccttctgttggtttttagattcaatccttatttttacaccaaatattcattctaatactattaacacatgtgccacaaatattttttaatatagagaaaaaatttctttaggagwctatgataatctagtttatgtttctgcttttcataagcatggccaaggagatgactaccgaaaattctttagctgatggaaatgacattgactttttttttttttttagagctggggtctcattctgtcacccaggcaagtgtgcagtggcaccttcttagctcactgcagcatcaaactcctgggttcaagcaatactctcacttacacctcctgagtagccttcaggcacatgctacctattcca

SEQ ID NO: 526590 - DNA, 607 bp, Homo sapiens
ataccttaatgtagcctatcatgactgatatgattacaataacaatacaaacagcaatagctgcagcatgtatgaaacacttatgtgtcactttgtgttgatgcttctaatccccttaataaatctatgattttgataaattattatcccttgtttcacttttattgatgaggaaagagatatagaaagaaactaagcagcttgtttaagttgacaaaaacttgtgagccaggatctgaactcaaacaattcagccttgaagcctgtggtcttaactactgagatttacttcctcttgtgtaacttcaatgattaattatttagaatcatggagtgatttggcaacgagtttaataaatktctagattctcatctcttataaagtttgactccaaggccattacaatttgtattttattaatagaaaaagaacaaagcatttccaaagaatcgagttgctttttaagggccaagaattgtaggtgtaaattatttaatttccatggttttgcaaattccataagtaaaaggggcattttctgcttgggaattgtattggtttggttacatgtatgaatttccaacacttttggaagatgtagttacc

SEQ ID NO: 526591 - DNA, 401 bp, Homo sapiens
agtaatgctcaatgccctctgcataattggatggatgattatttctaggcctttccaatgaaaagaattgtgaggtgtttaaagataaaatatgtcatacattcatattgatattttcaattaaaattcagaatccatattatatcttttatttcatataaggaatcctggttttcaaagacacaggtgatgatagaatattccataattactaattttctttatttcacattatgtatggaacaacctaagaataattatagtaatactatcatcttccayacaattgccaaaaagagttttgtacattttttactaatgccctcccttccctgctctcctcatgtttacttttgtaccatttcttctttatcagagcatatggtgatgacataatattc

SEQ ID NO: 526592 - DNA, 617 bp, Homo sapiens
tgagaaaacaaaacttccaaagtccatgatgcaatactgacctttttttttttccaaatcttaccctgacattccaggtttgtttcgaaaaattctgggaaaaacttatgtatggaaagaaaataaatttctcattgaatataagtgaatattctttattaattaggattccagataagctgttctcaaaagagggaaaggaaaaaggagagattcgatacaaggagacaaagaataatctctgccacaaggggatattggtttctgtatgagcaactcaaatattactgggaaagtcacatggctgcccagctaagggtgatctgtgtacaaggatgttggcatctaaattacaggtgattttaccaagattgtgcctatgctcaaaattcagtatttattatgactrcaatatctagaaagtatatgagccactcacactgctttcccatcatcctccagatgttatctttgaaaattcttggcaattataagagttttaaagttttaagagtctaagtaaataaaaagcaaaaagcagatacataataatttttacttgcttattttcattaactcatttcctaatcactaggtaaatcctaattaaatacatt

SEQ ID NO: 526593 - DNA, 615 bp, Homo sapiens
tagaattttttttctgtgaactgcctgttcaaaaatctttctcaagttcttaattctgtctttaattttaagtttgacttttgactcttttatggtagttttacagttgtttttatgaggtcaaatttatgtatcttttacttttagacttgcagagtttatgtaatgccaagattctaaaaagaagtgcccatattttattctcractgtatacagtgttatttattttaggtttagccctttaattcatctgtaatttattttggaaatgaagtagaaatctatcttctttttaaacctaaatgacaagccaggtgttgtaataacatgtatgaaataatcaacatttctttctccactaatttgaaattctacttacttcctaaatattttgaggtccatttttgggttctctactgttgtgacctatattaataaaaatattcaatcaatgataattaaatattttaaatttgtttagattattattagatataattatcgagtgtctctttaccaagtgtatcaacgaaagtgcattatcaaagagaaattagacataaatcatatcactaacttgctaacagtctgtttactataaattagaagcattg

SEQ ID NO: 526594 - DNA, 615 bp, Homo sapiens
tagaattttttttctgtgaactgcctgttcaaaaatctttctcaagttcttaattctgtctttaattttaagtttgacttttgactcttttatggtagttttacagttgtttttatgaggtcaaatttatgtatcttttacttttagacttgcagagtttatgtaatgccaagattctaaaaagaagtgcccatattttattctcaactgtatacagtgttatttattttaggtttagccctttaattcatctgtaatttattttggaaatgaagtagaaatctatcttctttttaaacctaaatgacaagccaggtgttgtaataacatgtatgaaataatcaacwtttctttctccactaatttgaaattctacttacttcctaaatattttgaggtccatttttgggttctctactgttgtgacctatattaataaaaatattcaatcaatgataattaaatattttaaatttgtttagattattattagatataattatcgagtgtctctttaccaagtgtatcaacgaaagtgcattatcaaagagaaattagacataaatcatatcactaacttgctaacagtctgtttactataaattagaagcattg

SEQ ID NO: 526595 - DNA, 615 bp, Homo sapiens
tagaattttttttctgtgaactgcctgttcaaaaatctttctcaagttcttaattctgtctttaattttaagtttgacttttgactcttttatggtagttttacagttgtttttatgaggtcaaatttatgtatcttttacttttagacttgcagagtttatgtaatgccaagattctaaaaagaagtgcccatattttattctcaactgtatacagtgttatttattttaggtttagccctttaattcatctgtaatttattttggaaatgaagtagaaatctatcttctttttaaacctaaatgacaagccaggtgttgtaataacatgtatgaaataatcaacatttctttctccactaatttgaaattctacttacttcctaaatattttgaggtccatttttgggttctctactgttgtgacctatattaataaaaatattcaatcaatgataattaaatattttaaatttgtttagattattattagatataattatcgagtgtctctttaccaagtgtatcaaygaaagtgcattatcaaagagaaattagacataaatcatatcactaacttgctaacagtctgtttactataaattagaagcattg

SEQ ID NO: 526596 - DNA, 643 bp, Homo sapiens
aacagtatctggtatattttaattactacgtaagtgtgtccctgctgctgctgctgctgttgttattttgaaggcagaaagaaaatgcaggagagtaaatgacctatttcactcatgcagagatttagcagccaagctaaaattcaaatttaggtcttctcttttctctgcttgttgttctttctcaagagctaagcctatcgtcatctttatgatatatttgagtattaagctttcagaagtttccatccacatawttgaacatttctatcaaaagttttgaggtagaccaggaggccagaaaatagatttaagttactagcaataaccagatgctactgtaggattataggttatcacaacttgtaactaaaaattatgatttttattataataagtttaattacatttatttaattttaattaaaattaaaatacattttattattataatttctactttaacaagtaactatacctttcactgtgttttatttagcacctttcacagtgttgttgtcttttttaatataccttcctattaaaccagttgctctttgcagaatgcttgaatcatttggctcttggttagtaggctcccgttacctaaccaagcactgagtgaacgtatttactggggagg

SEQ ID NO: 526597 - DNA, 610 bp, Homo sapiens
gtatctcttagcaccaatttcaattcccaaaacagaggatttgattgtcccagatttggggcagtgattcatcccaattcatccactatttctggatggggagccacagaatagatacgtggttactgtgaggcccctctgcagaagagagcggtgtgggacccttctcagaggatgagagactcaggagatgctttctatcacagaatgtaatggcaaagcccgtatgccctgaaaaattcaactctccaaatgaagtcagtattctgttaccaagtcagtgccaggaaaatgcaagaaaaattgaaaacaagcttgtcattttcttctatttttttctgagtctgaagtgcccgtagatactcttaattcttctagaaagcttgaaagcaatatttaatggaagtcaaatttggtctgcagcagatttctttctcatttgattttctccytcttatcttggaaacaacctctaatgagagaaatattccagagcaccatctcaagatgtatctgggaaaagaacccattgtaccccagagcaaatcgaccctctgctccctgacaatatgcttggttttcaacagcttccctgatcccagttcttatg

SEQ ID NO: 526598 - DNA, 673 bp, Homo sapiens
ctgccctgctctctctttatctcagggtagaataacaggctggatgttatgcaatgatcctcttatttattagaactaaaagagcacagccaacagaaggagggagaggaagccctcttccattttatctcatttatagtaagtctggattgtggcaaagtcacgcacagggtgttccccaagccacataattcctggcacatcctctctacggtattcttgttgaccaaatgtgcatgtgcgcatgcataatttttgtgcgtatatgtacatatatttttttcattcattaccatggttcttaacattttcagaatctgcaacttattttaaaatttgataagagtaacttatagaccctctccctaggaaaatgtgcatgcaaacatcctatgaaaatttgcaaatagctccctgaaagcccatttgtgtctcagcaaacgggcccttgagaggctaaaaggctacatttccaaagatttttaaataccatgtgtcgttaatgggtttgctcagcttatatattatgtaacgtgattttttcctttgatactgaaaacttgaagatytctgccagttcctcatctataacttaatgcagagtaaagatttcttgatccaggtcatgtcctgtacaactaatctgaagttactacaaaagagagcgtatgca

SEQ ID NO: 526599 - DNA, 562 bp, Homo sapiens
ggaaactaatttctttgtgggatttctcatggacagtcttgtaatgcttttcaaaatcaagcttattataaactaaaaatacaggggcccctgaacaaaagtagttggttgacttcatgacgcctgttctggccagatggctcatgaatgattatgattcccaagtggaattcccaaaatagacctctcctctgcactttagtccattatttctagctttcttcyggacatttccactcgattctcctgcaaactcaacctgtcccagtggagcttaccatctttcccctaactcatcctctaacttttctgactgttgatctcagctccaatttttcagatggccagaccaactctggctctcccaatattcagtatcctccagttttatgtcttcttttatatgaaatctgtggatttacactatcatctctacagccatcacagtctgcagcctgattacatttctttggattcattgaaactgtgtctcctacatatggatgttagttaattttctcaaacagtgttttatacggttcaccttttttgcaaaattctc

SEQ ID NO: 526600 - DNA, 546 bp, Homo sapiens
ggatgctctagatcggcggaaactagcaacatccccaaatgtaagacccggtagtaacaaatggtatcattgattcttctctccatccatgtgaccagagcttggtccctcacaggccattgagggccaacatcaaaggctgtgagactgtaagagttcggaaaaccccgtggtggggatttggtttgtgattggtgactgggagcaaagtggctgggtaggggtctgaggatatttactttaaaccgcacccaccccaactcccatccccagtgaagcttggttctggacttctttcctaaatctttgagtaaattactacttaaaccttccatagggattggagataagattgtatctaagaataaratggccccttggcaatcagcttgggaacctcttggcagaccaggagggccccaagccccagagtggggcagggggatgatttctgtgatgttccacccaggagagcagctagaagcatcctgtaagagatggaaaacagatgggctgagagtgtgttctagaaacatggcaagacca

SEQ ID NO: 526601 - DNA, 609 bp, Homo sapiens
caggaaaaattatttgaacagcagcatcttgaacagatggcttagagacaagttagaaatggaaacacctatgagaagaaaattgcaaaagtcaagcctagacttcaaagcacagggaatggactgctcaccagccctgttctctagctatgggatggaaaggtatatttttcctacacatgttaaacacacttcttttacccctttggtccatgccagactcttgctggctgccttacatggctaccccaactccgtaagtgttgagggacaatgcaactccattctttctttctcagcagtcagttcttctgggagaatcaatccaaggtagtagyagacgggagacacattgtctaccagtttccttctcttattcctcatttctttctctgtgaccagggcctgctttccttcccagcctttagctgtatgtcctgttttgtccttatcattcaatatggctgtggtagacaggagaatgtgccttgcagtactgcaactgagaggagcataattgaccaagggacccattgctgtattctgaatccagcactgagttggctgaggccatgcttcccatgtgctgctcccaggcagtgattgagc

SEQ ID NO: 526602 - DNA, 660 bp, Homo sapiens
atcatttttgtagaggtgaataaaatccagaaacttggatatttttaaaaagtatttgtcagccaggcgcggtggctcatgcctgtaatctcagcactttgggaggcccaggtgggcggattgcttaagtccagtagttcaagaccagcctgggcaacatggtgaaatgccatctctgcaataaaatacaaaaatttgctgggygtggtggcacaaggctgtagttccagctcctcgggaggctggggcgggaagatctctgagcccaacaggcggaggttgcagtgagctgagatcatgccactgcattccagtttgggcaacagagtgagactctgcctcaaattaaaaaaaaaaaaagtatttgtcaaacatcattgaacaaaagttacaacaaaagagttattaatcagcaaactcctttaaaatttacacttccaatgcattcttcatattatagttacctataccttcttcattttatagttaagacagtttacaacaaacttatctagtgattgtagacaagaggcttgagaatatacattaagaacaaaaggaatgaaaacagagaagggtttccaagtgatgcaaaaaatgaactgtgctagacaaatataaatgtccagatcccacttcaagaaaggatttgctgcccag

SEQ ID NO: 526603 - DNA, 637 bp, Homo sapiens
atttaaaactcacaatgttcttaaatagctctctgaatgttctgcagtcagtaataaaggaattaggaaaatctggaactgttcacttaaatctttttttaatttttttgggagacagtctcgctctgtcayccaggctggagtgcagtggcacgatctcagctcactgcaacctccgccccctgagttcaagcaattcttctgccttagcctctcaagtagctgggactacaggctgcaccaccacgcccagctaatttttgtattttcagtagagacaaggtttcaccatgttggccaggctggtcttgaactcctgacctcaagtgatccacctgccttggcctcccaaagtgctgggattacaggtgtgagccactgtgcccagcctcacttaaatcttgttagaagcagtcctctccactcatgcttgagtttactcttaaagatgagtggacatttttggaaggtagctagagtttttaacttcaagatctagcagccaggctcagggggggcgtgagattttcttttggggtcataaaaatgttttggaaccagagagagacagtggttgtacagcattgtgaatgtactaataccactaaattgtacaatttaaaatggttaattttat

SEQ ID NO: 526604 - DNA, 548 bp, Homo sapiens
cttattctagaaaacaccagaaactagactttaaaaaaaaaaaagaggataacgaagtggacttaaaagtacaargagataatgtatagatttgattatttcctctgctactttaggaaaaccaaaacccagagtttggacagagctggcaaacacggtcctggagctggctttctgtgagcaatattaccatgtgatctaaatttgcccaggtttggccgagctctcgcagtgtgctcatgacaatgctagagacgtcttctttcttgttctgaatcaaagcaagtccattctgctcaattttctctacttctttttcttttgctttaatcaaatcttccagatcctgaaagatttaaaaaatagtcactttaaattgttctattatggaactctggggtgcactgaaattgggccattatagtttcatgtcctaaaaaccttttactaatccaaaaagcttatctctttcagaagaggcacgctgcagaagtacttcttcctacactcaaatgcaaaaaaaaagtcatctttttacacatggcaaa

SEQ ID NO: 526605 - DNA, 548 bp, Homo sapiens
cttattctagaaaacaccagaaactagactttaaaaaaaaaaaagaggataacgaagtggacttaaaagtacaaggagataatgtatagatttgattatttcctctgctactttaggaaaacsaaaacccagagtttggacagagctggcaaacacggtcctggagctggctttctgtgagcaatattaccatgtgatctaaatttgcccaggtttggccgagctctcgcagtgtgctcatgacaatgctagagacgtcttctttcttgttctgaatcaaagcaagtccattctgctcaattttctctacttctttttcttttgctttaatcaaatcttccagatcctgaaagatttaaaaaatagtcactttaaattgttctattatggaactctggggtgcactgaaattgggccattatagtttcatgtcctaaaaaccttttactaatccaaaaagcttatctctttcagaagaggcacgctgcagaagtacttcttcctacactcaaatgcaaaaaaaaagtcatctttttacacatggcaaa

SEQ ID NO: 526606 - DNA, 548 bp, Homo sapiens
cttattctagaaaacaccagaaactagactttaaaaaaaaaaaagaggataacgaagtggacttaaaagtacaaggagataatgtatagatttgattatttcctctgctactttaggaaaaccaaaacccagagtttggacagagctggcaaacacggtcctggagctggctttctgtgagcaatattaccatgtgatctaaatttgcccaggtttggccgagctctcgcagtgtgctcatgacaatgctagagacgtcttctttcttgttctgaatcaaagcaagtccattctgctcaattttctctacttctttttcttttgctttaatcaaatcttccagatcctgaaagatttaaaaaatagtcactttaaattgttctattatggaactctggggtgcactgaaattgggccattatagtttcatgtcctaaaaaccttttactaatccaaaaagcttatctctttcagaagaggcacgcygcagaagtacttcttcctacactcaaatgcaaaaaaaaagtcatctttttacacatggcaaa

SEQ ID NO: 526607 - DNA, 647 bp, Homo sapiens
tggctatccttccttgcacctgagactatttaaatccaacctcactcccccacccccattctaaataaaactggctgttcctgccaccttcatatttctcttaaaagtacatttccccagtcacttaggcttggcccaaagtcatttctgttcctcctccctagcctcccaccaaaccccctactctgtgccaaaacaaccacctgccgaccgggcacggtggctcacacctgtaatcccagcactttgggaggccaaggcgggtggattgcctgaggtcaagagttccagaccagcctggctaacgtggtgaaacaccttctctactaaaaatacaaaaaaattagccgggcatggtggcacccgccttcagtcctacaaaatacaaaaaattagctggacatggtggtgcagacctgtagttcccagctactcgggaggctgaggcaggagaatctcttccacccgggagatggaggttgcagtaagccgagatcgcacyactgccctccagcctgggcgacagaaggggaccccgtcaaaaaacaaaaacaaaaaaaaaaaacacctggctcttccatttcagttttttcatgtctctggaattttttgtttgttttgaaacagagtatcactctgtcacccag

SEQ ID NO: 526608 - DNA, 673 bp, Homo sapiens
tactttaaaggaccttgagactggttgaggtttcttctctgtgagtcccctgtttcatacaaaaatatttctttacaaaagcaattcaaatagatgttttcccagggtatcaagtatcattagaaaaataaggaggcaagaactgagccttggagcatatcaacagttaatggttgaagaaaccaaagaaaacagaagagggcaccggaagcacgaaatgagagaactccatacagaagcaagagagagagagttactaaagaagaggtggctgatttataagttacaacccagaaataaagagggcaaaagggaagagaatcattcaattgggccagaagraagttctagatatttttgtcagatggtgtttacttcaagctaacacacatcttattttttttaaagtactcagagtattacttaagagtgagaaaattgagatatctttaaaactggtgatagagtattagccagtaaagacctgatttagagattgagtacatctgaaatgtttgaaagttagactttggcacatagttctggtctggcttctggtaattgtggagtagcttgtatgagaataacagtcctaccaataccaattatgaactccgcacaaaatataaaagaacaattgttttgaaggtattggagactgatcaaaagcagg

SEQ ID NO: 526609 - DNA, 571 bp, Homo sapiens
gtagactcttagcacagaaaacttgtaggagtcaaatccctaytgaagaccaagaacattttaaagtagtggactttctagttgttataggccagatgctaatgttgataactaaaaagagacttagataaggaagggaaggcaaaagaggcaagcaagcaaacaagccagcataaggtcctagaagtgaggatatatgatttttgcagagagtaaatcagactagcttcatttaatttcctttcaaagatactgaaaagccacattgctggtagtaacagtacgaagaagtgtacaatttgagtaagggctttggtctcagacaacagaaagttaggggtgctttcaatttattattcaacctgagctctcctgtgactcttgttctcttttgaaacatgttaagttatgaaagcttactttctggaaagcttcagaaacaagtgatgttgactggacaacatgaggaggttcctcaagctctaaacttacgtgcatttttttttcaagatcagattgtgtggagattcttaaaaaatgtggagaccagaacaaattccctgaagaccac

SEQ ID NO: 526610 - DNA, 539 bp, Homo sapiens
tgggaatgtgctgggtcgcctctgaagccagcacatctcagagcccacggccccacagtgtcctccctggctactgctgctggttattcagggcccaagggctctttagtcagtaggtgatgaatgccgccaggactgggtccttcccttgaaggcggcagattcccttttggcacagggtgtgtctagaaatgttgtctgggagctaggtcctggaatgggggcctcacagctctgcttgataccctatactactgtggctgagcttgtatccaagatgcaagacaaagtccgctttactctttgcatcctctccttaaacaaaaggaaggagtcacttttgttgctgcgagatgcactgcctggggttggsggagggatggcacaagacaagtttacttatatgtgcatttctttttataataaaaatgggttatgtgcctaatgaaaaaaaaaaagaatgcatttgactctatcaggccactatcaaatttagtatgtgtaatactaaaataattaaccaagtactgcctagaagg

SEQ ID NO: 526611 - DNA, 607 bp, Homo sapiens
ttactgtccagtattacacaagagatgaccttcagagccctatatgaatgtaagcctccgaggtgttttgtcatctttccatttgaaatttattttggcatcagtttacttcataagtttgccttttaacctgaggcacattcccacaattaaaatgcaaaatagtaaatacagttgtccctgagcatgggatggggcttggctccaggaccttcccaccataccgaagtcttcagatgctcaagtcctttccataaaatggcacagtatttgcatatgcacgtcctcccagatactttaaggttacttataatacctaatacaatgtaaatgctatgtaaataattgttgttttatactgttttcttaaattttcattttttattgttgtactgttatttttaattggtttttaaaaaatattttcaacctgcattgcttgaatctgcagatgtggaactcacagataaggaaagctgactgtaaattttaagatacacygtagagctagtcctcaaataatgtagtttcagtacaacattgttgaagacaaatgattcccagtggaagctactatctgtgtggagtttgcatgttctccccatgt

SEQ ID NO: 526612 - DNA, 546 bp, Homo sapiens
gctattaaccatgagagtgtagtatcacagaagtcaagagaagaaaaagttttgagctgcagaaattygtcagcagtttgaaattgtacagaaagagtgggaaacattcattatacttagtaaacagaaggtcattggtaactttttgaaaatgatagcttcagtagagtggcgggggtggccatggggatatgaaaagccacatgagagagaactgtggcatgagatgccgataagaagtggagacagcatgcggatcaccttttgtatgtttggcaatgaaaggaagaaaagaaatagaaaagtgattagtgaaggcagcacagtcaagcggaagattaattttccctgtctgcttcattattttcgttgacctaaaatattattctttttatttcatatccttaatagcaagtcagcagttcatttcttaaacttactgctttgataactacctgaatgtttcactgaacagtaatagtgtagctgtcgtttattgagtgctcactatgtgctaggcatcgtgctaagctctttgtatacatt

SEQ ID NO: 526613 - DNA, 546 bp, Homo sapiens
gctattaaccatgagagtgtagtatcacagaagtcaagagaagaaaaagttttgagctgcagaaattcgtcagcagtttgaaattgtacagaaagagtgggaaacattcattatacttagtaaacagaaggtcattggtaactttttgaaaatgatagcttcagtagagtggcgggggtggccatggggatatgaaaagccacatgagagagaactgtggcatgagatgccgataagaagtggagacagcatgcggatcaccttttgtatgtttggcaatgaaaggaagaaaagaaatagaaaagtgattagtgaaggcagcacagtcaagcggaagattaattttccctgtctgcttcattattttcgttgacctaaaatattattctttttmtttcatatccttaatagcaagtcagcagttcatttcttaaacttactgctttgataactacctgaatgtttcactgaacagtaatagtgtagctgtcgtttattgagtgctcactatgtgctaggcatcgtgctaagctctttgtatacatt

SEQ ID NO: 526614 - DNA, 627 bp, Homo sapiens
agtcctgacatcacttgacacttaccacttgaccaagtcctacgccaaccaacctggattcctttgtgggggaaatcagacaagactgagattgtgttgcctcctcccattacctgtctcatccccgttcagagtgtttgttctcattttctatgcccaacatggaccaggtaagcctaagaaaacgtgagaagaaaaatatgaagagatgtccaatataaactgcagtatacatcatgaaacacagtttacatggctgggctgggtcttctccatagtctcctagttatgctgtggcatggtctccataaggcactgtagtagttatccactgctgtgtaacaaattaccccaacatttaccagcttaaaacaaaattttctacttatcttttaagactcaattcaagcattacctctcagaaggcatttcccagcttgctttttaagaattagtaatcttcctctttgatatttcttcgtacttyagcatctcattatagcatttaccacattgttataattgctagggaccatgtctttttcatacccttaacttcagttcctaaaactatttcttgaatgtcacagatgctcagtaaatggttgttaaaagagcttaagaata

SEQ ID NO: 526615 - DNA, 563 bp, Homo sapiens
tgctatgctgcaacgttgataagaaaatgaagagtttgttgaagtgggaagattggggccttctgattattttggtgaatttgcattcctgatgaatcaccctcctgctgccacagtggttgtacatggccccttraagtacattaagctggaccagcctagatttgaatgtgctcttgcccaggctcagacctcctcaaacgaaacatccagcagtacaacagttttgtgtcactgtctgaaatctgcctcttgggcctcccttttctcctctcctcaatcctcttcactcatgcagaccgctttattttcgctatttgcagtgccaaatggacactggcatcacagcttcttgtctgtttatatattaaaagttgcacttattgtacggtttttaatttggagcagtaattaaatgcttgtacacaattaaatagagttttatggagtctttgctgttactgcttcattttgggcaatgttagcattcaacctctgagcagtgagtgccatgcttttgggtgaaggcagatcccagcatcagttgaattaccatagagtaa

SEQ ID NO: 526616 - DNA, 563 bp, Homo sapiens
tgctatgctgcaacgttgataagaaaatgaagagtttgttgaagtgggaagattggggccttctgattattttggtgaatttgcattcctgatgaatcaccctcctgctgccacagtggttgtacatggccccttgaagtacattaagctggaccagcctagatttgaatgtgctcttgcccaggctcagacctcctcaaacgaaacatccagcagtacaacagttttgtgtcactgtctgaaatctgcctcttgggcctcccttttctcctctcctcaatcctcttcactcatgcagaccgctttattttcgctatttgcagtgccaaatggacactggcatcacagcttcttgtctgtttatatattaaaagttgcacttattgtacggtttttaatttggagcagtaattaaatgcttgtacacaattaaatagagttytatggagtctttgctgttactgcttcattttgggcaatgttagcattcaacctctgagcagtgagtgccatgcttttgggtgaaggcagatcccagcatcagttgaattaccatagagtaa

SEQ ID NO: 526617 - DNA, 490 bp, Homo sapiens
gctggcgatgtggaaaattcaattcttgaagcagatgctatgtgccccaagtgcttttgccccccacaacttgactctgatttagttgggtatgaaaagaatgatccaatttktataatcaacttacacaacaccttatagcctgaaggcaattttataaagtattttaaatagttttgtgaatgaaacaaattttgtgtatattgaaccatcggaaagcaaaggtgtcactatctctcataaaatgctaaaattttgtagcattttagatttccgattttcagattagcaatgctcaacctgtagaatgtgctctaatgcaagagccaaagttggcttgcttactgtatccctctaaaacagctcacctgagagaaagtttgaatctgcatggcagatatacttcttctccatcatctcttcccactggttcagcagagaagaaaggagaacatatatcagattacctcttatctggagttcctcccaa

SEQ ID NO: 526618 - DNA, 490 bp, Homo sapiens
gctggcgatgtggaaaattcaattcttgaagcagatgctatgtgccccaagtgcttttgccccccacaacttgactctgatttagttgggtatgaaaagaatgatccaatttttataatcaacttacacaacaccttatagcctgaaggcaattttataaagtattttaaatagttttgtgaatgaaacaaattttgtgtatattgaaccatcggaaagcaaaggtgtcactatctctcataaaatgctaaaattttgtagcattttagatttccgattttcagattagcaatgctcaacctgtagaatgtgctctaatgcaagagccaaagttggcttgcttactgtatccctctaaaacagctcacctgagagaaagtttgaatctgcatggcagatatacttcttctccatcayctcttcccactggttcagcagagaagaaaggagaacatatatcagattacctcttatctggagttcctcccaa

SEQ ID NO: 526619 - DNA, 612 bp, Homo sapiens
aaaccactaggtttcttgggatggagaataggtaggtatagagtggagtaaagcacagggaattgctcacctattcccaggtacttgytccagggaaagataaaggaaagggagggaaggaaacttgaaacttgaaacttgcaggaggtaaattcaggatcaataaaaggaagtgctccttcacacagcagggaatgaatttacagaactcatcaccccaagaggagatgcagctgaaaatataagatcccaaaacctatagatacaaattggatgattgaaagaaaaatgatgacattaagttgacatctaggagaacaatcctgttctcccccaatttactctttagtgcctagtttaagacaagatcctgcactatgggtaccaaggagatgacctagtgtgattatccaacaatctcatgtttgattgcctaggaaactaacttttcttccttcttgcttccttccttgtaagcaccagtgacaggttccatctgttaaacaccttctatttcccaggcactgttactttacacccactgtctaattcaaatcaagaatccaaaaagcatttattgagtactttcttgtgtgctcatcactttacaag

SEQ ID NO: 526620 - DNA, 612 bp, Homo sapiens
aaaccactaggtttcttgggatggagaataggtaggtatagagtggagtaaagcacagggaattgctcacctattcccaggtacttgttccagggaaagataaaggaaagggagggaaggaaacttgaaacttgaaacttgcaggaggtaaattcaggatcaataaaaggaagtgctccttcacacagcagggaatgaatttacagaactcatcaccccaagaggagatgcagctgaaaatataagatcccaaaacctatagatacaaattggatgattgaaagaaaaatgatgacattaagttgacatctaggagaacaatcctgttctcccccaatttactctttagtgcctagtttaagacaagatcctgsactatgggtaccaaggagatgacctagtgtgattatccaacaatctcatgtttgattgcctaggaaactaacttttcttccttcttgcttccttccttgtaagcaccagtgacaggttccatctgttaaacaccttctatttcccaggcactgttactttacacccactgtctaattcaaatcaagaatccaaaaagcatttattgagtactttcttgtgtgctcatcactttacaag

SEQ ID NO: 526621 - DNA, 646 bp, Homo sapiens
agaatcccccggtacacttcccagagtctggctctccaagattacaactaggaacaactgccgcagaaaaatctcaccaactagatacaaatgtggcaatttacaggcctggggcagtctcgatccagaattagaaaggaaacatttctctaaaggaaacataatttgcagaggcctgattccgctaaaatacccacctgatttccattactaagmagtacacctaacatctcagtctgaagcaatggcatttaggtcttggagaaccagggaaagcacttgcttctcatttacataactacaagggcccactcaagaggttctgccaagaacaaagggacagtctgccctaaaggtaaatttcagtctccacccttaaagacagaaactgctcaaaatttttacaatactgctcaaaattttttcagctacaaaaattgtaaggtctgagtctctaccaggcatcctattacataaggagtagaaggaggacgataaatgtgacggcagggatgatgctgtatttatctcctgccctggctaatgcccagctcaagactctctgcatatctaataggtcctcaacaaatcgttgttgaatgagatggcataaactggaacaagtgtgagatcctgtgtggggcag

SEQ ID NO: 526622 - DNA, 588 bp, Homo sapiens
atttttcagagctattctggacaggaaggagggacagaggagagaaggaaggaaggagggagacagggagagaaggaaggagagaggagggaaagaaaagaaggaaagaagaaaagagggaaggaaggaaggaaaggggggagggaggaaggaagaaacagagagaaaaatagaaaaatggtagaatggagttgagtcaggaagcagagtcagcaaaaagagttcatgtgagaaggcagaaaaccaaatcccagcatggagccaaaaactggcagatatccaaatactgggtcaaactcagatccagtattcaggggtgaagcactttagygacagaaataaaattacaatagagtggctaggatttggtgcctgattgtggggtatgaggcccagtgtccctggaggcttcacgttcctcattctccctaatgagaagggggaagaaaagagaaatggcactttctgaatgccaggtactgcctaaagttgtcttattgaactctcacggtaaccctattatagaactgggaaactgaagctcagagaggtgagataacttgcccaagctcacacagctaattagtg

SEQ ID NO: 526623 - DNA, 498 bp, Homo sapiens
gcccacactctgacacctgagtagctagtttgtaggtgagaaaatggaaatgcaaagaagtgactgacccagtagcacaactagattgaaagctttctttccaatctggatcaacatgccttccattgaatctcctgggcaccatcagggcctggatcttgctaatcctcctaaaaaagaaaaccttgataggtaacaatagcaaaagccaagataagaggtgccgacaaaagtatgaagtaccaaaaataacatctactacaaaaataaacaatattctatgagaataaactttaaagagaatggctcagtcaaagtgggtcaacaggattatgcaaatttggcagagcatacattatgcacatagtacttggtctctcccatgtgtttgaggtggaatttgttggcaattgtttgttgtggaaccctatggatatagtatgcctattttctgtcagatgagaatrcaaaataatatatcaaaaagagaaggacaaa

SEQ ID NO: 526624 - DNA, 533 bp, Homo sapiens
ttggtcctacaggaagctctggagcaccagaggtcaattcgcccttatagtatgtgtgtaggtgtggggaaggaggtgtaggggtggggaagygggtgcaggcagggaaggaagagctttcatattccttatatcagtaaagtattggctgttggctgcctgggcgggggaatggcccaagtaaagcaatttcccttctcagggaagggaagtagctgggtatgggtactttcctattccttctttgggacaacccatttatcccaattacacttctgtttatgacctagaagcattttcattaatttctaaggaatagaaataggatggtcaaaatacaaagtatattaataatgccaaaaaggatgcaaaataattcctgttcattatggttttgtatttgataggtgttatcacttttcttagcccatttgtcaaaaccagaactaacatagtcaaagtgaacagaatggaatgacagtttggggagcaattacaagaaatatgtgcagtagcaggataaaacacaaata

SEQ ID NO: 526625 - DNA, 606 bp, Homo sapiens
tgtggattaaaccctgtaaccttctaaaaattatttgaactttcttaacttttcagtacacaactccaaagaaaagcttcccaccatttggagtgataaactgaggaacagagagtgctggatatacaatgtgatgccacaggtcttccagactttttctttcaaggtattgcattccatttgatttttctgtggggtggactagactgaggagcacaaaggtcaatggaggtgagtccacggatgaggcccagtttagcctatttaggctattcttgttctgtcccgacctttccctttgcttgacccttccctactctctgctgggcctgttatgtaaggagaaaagaatgaacagactttgactatcaattgattggtcatctccaggcaacagagtgatgggagaaagaagacagggaaaacaaaggtacaggattgtgaattccatgtgccctgagtcctgagatgttaggcaacrtccattctcagtccttgttgggctatgaagttgctgacaatcaaagttaatcaaatggtcagtaaacaggttcttggaaatgtctggctaggttcccagcttggatatttttaacctcctggaca

SEQ ID NO: 526626 - DNA, 601 bp, Homo sapiens
acttttctctgaaatactgcgctactgttctctccacagtttggccgttttctaactgtaaaggaaagctgaggaaaaaaaagtacacatgaacaattcttgcccattatgagccagaaaaactcccaaccccactaactagagcaagctgcctcacaccatcgctgctctgacaaacttttcttacgtttgatgactggcaggcctccttgttacattacaaacacggtatttccgtctcattgttccacaatgagtcacttcaaccttcaaacctgttcccaacaagaaaaatggaggttacagaactgtcacatgtaaaatatttatacttataaagcctgttcattaccataaaaactcaattstgaacagacaaaaaattctgtgatacaggcaagatgatataaacaccagattttacatataacattgctaataatggtcacagtcatgacagacctaatggcaaaatttttccttaccccatcaagctctacacattaaaaaataaaatcataaaatttgcaaagcccatagatcaagggccaaaatcttccattaataaaaaatcctgtttataataaattcaggtatttat

SEQ ID NO: 526627 - DNA, 573 bp, Homo sapiens
gggcccagattctggaggttttatgtcattggccacagaataactgtctctaagctatccatggtccagtggtccctgccaagtctgtagacttcagagagcacttctctcttatggggttcatgggaacaggggygggtgtgacttgcttggtggcctcattccatgtgtgcctgtgcctggggcatggactttgttaagcagagtcagcagtgaggtcctcattctccagccagcctctctgccctggagaatcatgtgctatgttctaagaatttgagaactagagtcctcatccccaggcttgaaggcacatggctttctcatgtagggctctctgtggtatttgttattattttgcaacaagaccattttagtaaaacagtcctgttcaagttgtattcttttaagttcttttattctcctttccctgagatttttgtatatattgttctgagtaatggtatctttgagctgattgttctaatcagagctggtacctactttcaataaattctggttttgtgttttcttttgtaatcactgttcatcctgcctgtcctctccaagctg

SEQ ID NO: 526628 - DNA, 556 bp, Homo sapiens
tgaaagggttggatgttgacctgtagtaattyacagaaggtagcaacactggcttcatttaacacacacacaatctgaaaaatactaaacatgggaaggccagggggcagaggcagccattctcacacactgctaacagcagtgtaacttgactcagttcttttgaaggctaatccatactgagagccataaatacttcctacactttgacctactctcctaaggaaataattcaaaagaagaaaaacaaaccatttacaaatatgtttaatagcagcatttctttaaagaaaaacaaagttcaaatgcccaataataattatgtttaacacttggtacacatataaatagacaaaaggctgcggagaacactggatttaaataaaggtgttatgggtataattaactataatttattttatgaataaataggaaaaaagtccctggctataaaggatagtggaggtttatttcccaatattcttccatttggactgaacccctgccaactaagcagacatcccactattacaccaaaaagactgctctccctgcg

SEQ ID NO: 526629 - DNA, 556 bp, Homo sapiens
tgaaagggttggatgttgacctgtagtaatttacagaaggtagcaacactggcttcatttaacacacacacaatctgaaaaatactaaacatgggaaggccagggggcagaggcagccattctcacacactgctaacagcagtgtaacttgactcagttcttttgaaggctaatccatactgagagccataaatacttcctacactttgacctactctcctaaggaaataattcaaaagaagaaaaacaaaccatttacaaatatgtttaatagcagcatttctttaaagaaaaacaaagttcaaatgcccaataataattatgtttaacacttggtacacatataaatagacaaaaggctgcggagaacactggatttaaataaaggtgttatgggtataattaactataatttattttatgaataaatargaaaaaagtccctggctataaaggatagtggaggtttatttcccaatattcttccatttggactgaacccctgccaactaagcagacatcccactattacaccaaaaagactgctctccctgcg

SEQ ID NO: 526630 - DNA, 556 bp, Homo sapiens
tgaaagggttggatgttgacctgtagtaatttacagaaggtagcaacactggcttcatttaacacacacacaatctgaaaaatactaaacatgggaaggccagggggcagaggcagccattctcacacactgctaacagcagtgtaacttgactcagttcttttgaaggctaatccatactgagagccataaatacttcctacactttgacctactctcctaaggaaataattcaaaagaagaaaaacaaaccatttacaaatatgtttaatagcagcatttctttaaagaaaaacaaagttcaaatgcccaataataattatgtttaacacttggtacacatataaatagacaaaaggctgcggagaacactggatttaaataaaggtgttatgggtataattaactataatttattttatgaataaataggaaaaaagtccctggctataaaggatagtggaggtttayttcccaatattcttccatttggactgaacccctgccaactaagcagacatcccactattacaccaaaaagactgctctccctgcg

SEQ ID NO: 526631 - DNA, 463 bp, Homo sapiens
gctttttcggtggctttttacatgggaattttttttttttatttgctggggttgcaagtgacagatcagattattttgcacacacacaaagtgttractcctgtaactgagtgtattgggtccagggataatgtcagcagcctcttatcttcgtatcttggataggttttccacaaaatggccactatgagatttgacagccccaggctcaaatcctcccagtttagttgtggcagaaaagatccaaggactcagttattggtgtgggctgggtcacatgtccttccttgaaccaattactatgtttaggggtataggagagtctgaccactgtgggtcacatgcccttctctatggcttgggagaaagatgtgttagccccacccaaatcttacagaattagttccttaccaaagaagggtttctaacctaaagaatgaggataagagtactgttcatagca

SEQ ID NO: 526632 - DNA, 605 bp, Homo sapiens
tacagtatgtttcagccccctggctgctgaagctttaggaattgctacagcagccagggggctataattctgttctccagaattatggtgagaacaaaaagtttctaagatagagcaacaatacattcagccatgttgctagagggtcttcaactattcttactttgggtatttttattttgttttagggtaatgctgtatttggggaactatcaatttgtcaccaaaaaatgttttgctttgctttttaatamaaacttgctgcacttactaaatttgatacagatttggggtcaattttttttctgactttatatcaggttttataataaaagtcaggggaaatgtaagagtcatttaacaaactgtcttaatagtgaactcctagcatacatttatgcaggtaaagaaggtatcattatggtaccaattttgttattacttctacctgaatgcctatggagcaatacattagtgcgaagcaagataattaaagtgagtattgaaaaccataaatttatttctgcctagctctaggtgagctgcagcaaagaccaactaaaaaaaggtactaagcactgacatcagcaaagcagtgtgaaaaa

SEQ ID NO: 526633 - DNA, 670 bp, Homo sapiens
agcagcatttgtcatcagaaaaattagtctgggctggatgtggtggctcacacctgtaatcccaacactttgggaggctgaggcgggtggatcacctgaggtcaggagttcgagaccagcctggtgaacatggcaaaaccccgtctctactaaaaatacaaaaatcagtcmtattcccagagattataatttaatttacctggtccttagaatttttaaagatttcccaggtgattctaatacacagacaagtttagggaccactgtcctaacattttttttaaaaaagcagagactaggctgggcgcggtggctcacgcctataatcccagcactttgggaggctgaggcgggtagatcacgaggtcaggagatcgagaccatcctggccaacatggtgaaaccccatctctactaaaaatacaaaaaattagccgggcgtgatggctggcacctgtagtcccagctactcgggaggctgaggcaggagaattgcttgaacccgggaggcagaggttgcagtgagccgagatcgcgccactacactccagcctggagacacagcaagattccatctaaaaacaaaaaaaaaaaagcagagactaaaactaatgaaacaaagcaagttggagacaacagagattatgcagggaaatgagaactttaaaaa

SEQ ID NO: 526634 - DNA, 656 bp, Homo sapiens
ctgcagcagcaggtgttgtagcttgtgcttctaagccatctrcttttacttttcctccaggaagagaggcccactggaaggctggaggagctgctccccagatgtagatgaagtagatttgagcagcacagtggtggacctagtagaggcggacatcaagatcctcttcaaggaaagattatcaatatagttttccctgacccaggtgccatgtgttttctgtcatattcacgtatgctaatacataattgtgcaagtggggtaatatctgggacacttcatggttcatatcaaaacacagagtgaagagaacatcctctgggccatctcagagtgtgagtttggggcgggggtggctcctggttaacatttctgtccactgcagcattccttttcccttttgcttttagattcttcccttgacatcacaccaggaaagtctgacaacttaactttattggatataggcaaccgttgaatccaagttttgcccactgaatccatcaaattgttacagccaattctagatgcctgagtggacacatgaaatccagattccccagtaagcgcatccccattaataaactgaccaaatgcaatgttaatctgttctataacctttagaatccatcccaacatatattttttaggttcct

SEQ ID NO: 526635 - DNA, 628 bp, Homo sapiens
ctgcagcagcaggtgttgtagcttgtgcttctaagccatctacttttacwtttcctccaggaagagaggcccactggaaggctggaggagctgctccccagatgtagatgaagtagatttgagcagcacagtggtggacctagtagaggcggacatcaagatcctcttcaaggaaagattatcaatatagttttccctgacccaggtgccatgtgttttctgtcatattcacgtatgctaatacataattgtgcaagtggggtaatatctgggacacttcatggttcatatcaaaacacagagtgaagagaacatcctctgggccatctcagagtgtgagtttggggcgggggtggctcctggttaacatttctgtccactgcagcattccttttcccttttgcttttagattcttcccttgacatcacaccaggaaagtctgacaacttaactttattggatataggcaaccgttgaatccaagttttgcccactgaatccatcaaattgttacagccaattctagatgcctgagtggacacatgaaatccagattccccagtaagcgcatccccattaataaactgaccaaatgcaatgttaatctgttctataacctttagaatc

SEQ ID NO: 526636 - DNA, 104 bp, Homo sapiens
agggacagcgctcaaaccagaaaaaggcagtcctgccctcctcctmctgccttcaaatctccgccagaatagaacccaagccagccggcaaggcagaagcgcag

SEQ ID NO: 526637 - DNA, 602 bp, Homo sapiens
gccttttgagattttgaaatgcaaaaaaaaaaaaaaaaaaaacaagtcaatagactaaaagcaattaactccaggaagagattttaaacaataaaccaatgtataaatgagcaaacacagctcacagctacagtatcaaacgattcagtgaccacccaagtacataacagctcagaaggaaaaaatcagttttctacaacaccttatgaaaaaaatttaaataagtgaccacacacattctcaatccatgctgagaaaagtgaaaataacagagaaaaaaataatctaaaaatgaagaaaaagyaaaaattgccaaatgggaatgtaatgtgattgacagtattcagaaaactaatgatagtaaaagctggggcaagaaaatcaggattacttggagaaaggaaatcagcattaaagaaaagaattacatacaaaaaaaaatgaaaaaatacagaaaggaaagaaatacagaaacttgtatctaataattaaactcttcatgtaaaacactgaaaataaatatttaaagatggatcataaagtacagacaattttgaaataaagactgaaaagccaggtgtggtggcacacatctgtaatcc

SEQ ID NO: 526638 - DNA, 628 bp, Homo sapiens
caatcctgggatgaaatgtctcacttcaacctagggcaactgactctgcaatccgcttgacaggtgcacagtgaaagtatgaaacaaacaagggcattcatgagatgaagttaaactttttattctgtatacttatactgggatccaggaggatgaatgctgaacaaaaccattggatactgttttaaaaagacagcagaatttatgactaacacttttaacatttttgygctatgtatagcccaatactatctaaaattaggggagatccttcaaatagacatctattaaaatatacaataaacgtctagtcattttgctctcaaaaaacaacagaaccccttttcagtgctttctaacatcagctttttttaaaaaaaaaaaaggagaaagatttcttaaaaatgaaggagctttactatcttatgttgaatccacatgtgacatctttggttagtaatctatgccaagatgctacccaaatatagcaatactcttttaatctctctataaattctaaagcatcatttcatttgctaaaatcttttgctaacctctggaccctatgtaaatgcatgtatttgatgatgtatcaattgacctattctcctcacatctacatatcccc

SEQ ID NO: 526639 - DNA, 628 bp, Homo sapiens
caatcctgggatgaaatgtctcacttcaacctagggcaactgactctgcaatccgcttgacaggtgcacagtgaaagtatgaaacaaacaagggcattcatgagatgaagttaaactttttattctgtatacttatactgggatccaggaggatgaatgctgaacaaaaccattggatactgttttaaaaagacagcagaatttatgactaacacttttaacatttttgcgctatgtatagcccaatactatctaaaattaggggagatccttcaaatagacatctattaaaatatacaataaacgtctagtcattttgctctcaaaaaacarcagaaccccttttcagtgctttctaacatcagctttttttaaaaaaaaaaaaggagaaagatttcttaaaaatgaaggagctttactatcttatgttgaatccacatgtgacatctttggttagtaatctatgccaagatgctacccaaatatagcaatactcttttaatctctctataaattctaaagcatcatttcatttgctaaaatcttttgctaacctctggaccctatgtaaatgcatgtatttgatgatgtatcaattgacctattctcctcacatctacatatcccc

SEQ ID NO: 526640 - DNA, 628 bp, Homo sapiens
caatcctgggatgaaatgtctcacttcaacctagggcaactgactctgcaatccgcttgacaggtgcacagtgaaagtatgaaacaaacaagggcattcatgagatgaagttaaactttttattctgtatacttatactgggatccaggaggatgaatgctgaacaaaaccattggatactgttttaaaaagacagcagaatttatgactaacacttttaacatttttgcgctatgtatagcccaatactatctaaaattaggggagatccttcaaatagacatctattaaaatatacaataaacgtctagtcattttgctctcaaaaaacaacagaaccccttttcagtgctttctaacatcagctttttttwaaaaaaaaaaaggagaaagatttcttaaaaatgaaggagctttactatcttatgttgaatccacatgtgacatctttggttagtaatctatgccaagatgctacccaaatatagcaatactcttttaatctctctataaattctaaagcatcatttcatttgctaaaatcttttgctaacctctggaccctatgtaaatgcatgtatttgatgatgtatcaattgacctattctcctcacatctacatatcccc

SEQ ID NO: 526641 - DNA, 637 bp, Homo sapiens
attttatttcagtctcctcatattcacttactttactgagtaaactgatgtcagagaaactgctatgtcgaaaagggcaacattagttcactgaaagctctgccacagaaataagtttttcgtatctgttagtccagtactcccattctctaaatcccttcaatttagatttctaggagttggtattcccagtatacttctaatatcttttacaggcagttaactgaattctcttagtcatctgatgaaaggagaagtcaagtttcccatgctggcattatggaactggctgtaatatagattttgcaaggggaaaaaatcagtttatagggaaatacaatgtcttctgtttatataacattttgacttattaaaacraaactgtttgaaaaagcaaaaatctgattaagcacaagaattatattctttgaaatgagaatggttaacttgggatcagatgaaaatgaaacttgattacttcaaaaaaatacattttaatttatttcagctttaattttatgtttttaaagagtatgtttataacccaaataagtcagcctaacaaggatgaataattaggtaatttttggtgtttctctttaaattgtattaataagctatttaaataaagtgttct

SEQ ID NO: 526642 - DNA, 465 bp, Homo sapiens
gccgtccactttggagcttgtctcatacagtaaaagctaactgatataagggctaatttccttcacatgataatagaaagaacccctacaaatcaatcaggatctctattctgcaaatatattctcatgcataagaaatttttgaatattcargtgtatcctttgctgcttattttgcaatggcaaaatatttgaaataatctcactttccatcaatagagacttaactgtattcacacatgttgctgatggaaatgcaaactgtggaaatttgcaacatctaccaaattatcatctacccttggacccagaaatccactttggaagaattgccctataaatatacccacacatgtattgtgaaaaggtcattcactgaagaattgtttgtataatcaataaaacattggaaacagcccacgtctatcaacagggaactggtcagggcatgtccacaatgaacca

SEQ ID NO: 526643 - DNA, 652 bp, Homo sapiens
agcagaggccctacagtgagtgggaaccggcagagaggctgcaggcctgttgggggtcaccagaaaggatgggatggaaggcaagagcctgctgattcttgttactgcagaagaccccaaggcctctcataatcctaaggataatgagcacgaaagtccaagcagatgacagggttgggctcagagtcagagtgggattggaatcaacttaaggagcatatgtaaatatagctatagakacccacacacatttatacgtgcatatgacattatatttgcatacaggcatacacatgtataatagataatatttctggcatagactaaggtttttacctactatactggcaaggatgatggggaacagagaaacaaggttatggaagtatgactgggctgcttttaacttaattttcttttgatttgtctatatttaaaaatttaaaaattttcctaaaacacatattattttgcgatataattcatctttttaaacacttatgtttttaagtattatgttacacatggaaaagcctgatagtataaatttagaaaaaggaatgaaattcaaagtggcatatatagtgtaaaaacttcctttaagtaaaataaaaataccttcatgcaaaacagacaaaaatacccatataac

SEQ ID NO: 526644 - DNA, 640 bp, Homo sapiens
ttcgtccaaacacaccttccagaccctgtggtgtctgcagcatctctcactctctggatgttcccagatctgacctccttgggctccctagaccaccacacccctgtgtcctctaacgctctgtctgtttttatcacaagactctgactacagaacccagccccctgacagttttgaattaaaaaagaaaaacagaaatctactcgcattaagagtttcatgatttatgtagaatttgctgaagatttggggtggtggaaggggccttctgtgttctcttgtgctcgctgtcttactctcrctctctttctttctcatctaccttttctccagtttcacctgcagaaggtccactgttcttactcttggagagttcagggatctaccttctaacccaagcagttttcaaggcatgatttctaaataagtgcaattctcttcctaggtggaaatttagtgactacaattttcttcatctcactacagaggacaattgtgaggattaaattaagtaatgattataaagtacttacagcattgcagattctcagcaaattattaaaagaaaacttatcaagtccactcagtatgtggggaaagcaggatatttgcataattagcattactgggagtcttggtt

SEQ ID NO: 526645 - DNA, 605 bp, Homo sapiens
cctctttgtttagggtgaaagtaaacagaactccttgtctttaaatcagtgaagatggaatgtttgtaatgtcaacaccgttcactctaccctgcaaatgaacaggaaagtcaatctggctagtgagctctgtctggatttcgcaggcttctatgaaaactgcttgcgctgcctctgggctccgacgcatgacggcacggaatttcccagggctggccccacttaagggtcaggcttgttttgctagacctggtttccacttgatccttttcttcaagataactcacctgcccagtgataaacgtatggcccagcgtccaccctctcaaaagcaatttgtctctggaatcctctcttccaagctgccataaaatcactatggggtttgcaacatgagggagacttgctttctaatcttcataaaggwtttaccccaaagctctcccatctcgtctggagctgttcccatcatacccctccaccttctcctaataagcgcttggattcctacagagaaatagccagcattgccccatgttggacaaacagcagagtccgcctcaaccagagacagatcaggcgctaaggagggcagaggctggaac

SEQ ID NO: 526646 - DNA, 605 bp, Homo sapiens
cctctttgtttagggtgaaagtaaacagaactccttgtctttaaatcagtgaagatggaatgtttgtaatgtcaacaccgttcactctaccctgcaaatgaacaggaaagtcaatctggctagtgagctctgtctggatttcgcaggcttctatgaaaactgcttgcgctgcctctgggctccgacgcatgacggcacggaatttcccagggctggccccacttaagggtcaggcttgttttgctagacctggtttccacttgatccttttcttcaagataactcacctgcccagtgataaacgtatggcccagcgtccaccctctcaaaagcaatttgtctctggaatcctctcttccaagctgccataaaatcactatggggtttgcaacatgagggagacttgctttctaatcttcataaaggttttaccccaaagctctcccatctcgtctggagctgttcccatcatrcccctccaccttctcctaataagcgcttggattcctacagagaaatagccagcattgccccatgttggacaaacagcagagtccgcctcaaccagagacagatcaggcgctaaggagggcagaggctggaac

SEQ ID NO: 526647 - DNA, 617 bp, Homo sapiens
agtcagtccctttgcagccaaggcagayccacttgccaacattgaacatgccgagcttggtggcgatgaatcctaatgtatcaaaaaatagatagttggtgactgccctgtgtgcagagcccagccctggatttgtgccgcagttgttggtaatacacacttcctgtctgttctggtgctggaaaggctccaacagagaaactatgtcaaaccacatttttgtttgtgggtctttgtacctctctaaaaaaaaaaaaaaaggagaaaaatgctctcctttaaactgtatgtgctatatgtgcccccaactgggtcatcttatatgttttgattctctcagactgttgttgtttatagcatttagaaaaaaattaaagactattgtttaaagcagttttaggtgtacagcaagtagagagaggtctcacacacctaacagttttccctgttattaaaatcttgcattggtgtgatagattggttacaactgatgagccagtaccgataccttatttttaactaaagtccatagtttatactacagttcactctgtgttgtacatgctgtttttgatgaatttatgatgtcatgtatccagcattacattattatacag

SEQ ID NO: 526648 - DNA, 525 bp, Homo sapiens
tcatgagcgtaaaggacattagcagtacttcgcacatggtatgcacaaatattaggcaagtccaaggacaggatgagctgcaagcagtctatgataagagtcaaaggcaggagttggggttgtagactcctccagccaaccacagcaaccaggaatttggatgcttcggccgccagagtgcttgcaagagttcatctctgaaatcgcttccattccagcgctaacattttatgaaacctgtgcttttcaaacagattgttttattgcttcctgcatcaccaatgtgttttctytttgctcccagctccctgagagcattttgaattatagcacagatcattgccatccacaaggtgcatgacatcacagtggacttgggggaagcaatgtcaaatgagactgagtggaatgggaaggagataggctggaaaatttaaataaaggtctttaggataaaatacagaatccagaatagttcctaactctcactacgtagtcgtttgtagcaaactgctaggactcttg

SEQ ID NO: 526649 - DNA, 525 bp, Homo sapiens
tcatgagcgtaaaggacattagcagtacttcgcacatggtatgcacaaatattaggcaagtccaaggacaggatgagctgcaagcagtctatgataagagtcaaaggcaggagttggggttgtagactcctccagccaaccacagcaaccaggaatttggatgcttcggccgccagagtgcttgcaagagttcatctctgaaatcgcttccattccagcgctaacattttatgaaacctgtgcttttcaaacagattgttttattgcttcctgcatcaccaatgtgttttctctytgctcccagctccctgagagcattttgaattatagcacagatcattgccatccacaaggtgcatgacatcacagtggacttgggggaagcaatgtcaaatgagactgagtggaatgggaaggagataggctggaaaatttaaataaaggtctttaggataaaatacagaatccagaatagttcctaactctcactacgtagtcgtttgtagcaaactgctaggactcttg

SEQ ID NO: 526650 - DNA, 254 bp, Homo sapiens
ttcttattccaaggaaatctgttttcttttcatggagaatcatgtttagaaaccacagtgagtgctagttctttgacaatgattcctaggagtggaattgctgggtcatagtgtttgaatagatttagctttaaatgagcaattttttccaaaagtagcwgtaccatattctctcttctggtccatataaaataatagggactggatgtatcctcagatactgaacaacaagctaaattggacaaagtatgtga

SEQ ID NO: 526651 - DNA, 630 bp, Homo sapiens
gtggtgtgcttcagcagctagcctcaccacggaaggtaaattgcggctcctgtcatgtgtcttggcaccgggtctagggaatgctgccatctggcttgtcatcaaacatggtcattgaatctctcagagataaaatggctttttaaaaatcttgctgtttttttaaaaattgacacacataaaatrtattatctttctctttacaggcatggtatattctaaaataagtgtttgagcttatttgagcaatagcttccagagtgttgtttttcctcactgattcccacgctcaaagggatttatagtctaaacctattatatgttaatggaaaatttaaattcatcggatctggccaagaaatgcaagctctcatttatatgtctcattggggaagggcaaaaagttaggttaactctctgaataattttagtttgtttttcattgtatagaaacatgtccttaactcttttactcaaaaaagagggcaggtgaagcaaataaagattgtaatccaaatgtacgatatttgtcccctccccatagtcccctcaaactacctgctaaatagaagtctccaggaaaatcaaagtggctttggcagccagaaagagaaagtcagtgcttactca

SEQ ID NO: 526652 - DNA, 609 bp, Homo sapiens
atgttgtaatgggatgagactttggtggactgttatcaattaggatttcaccagaacaaaccagtaggagactgtgtgtgtgtgtctgtgtgtgtgtgtctgtgtgtgtaataatatgtattatatgtatgtaaatatatgtaatacatatgtcatatatgtaattgatagtaggtaggtagatagctagctagctagatacatacatacatacatacatacatacatatctagatagatagatagatagatagatagayagacagacagacagacagacagacagacatgttgggaacaggccccccaaaatctggccataaactggccccaaaactggccataaacaaaatctctgcagcactgtgacatgtttgtgatggccacgatgcccacgctggaaggttgtgggtttaccagaatgagggcaaggaacacctggcccactcagggcagaaaaccacttaaaggtgttcttaaaccacaaacaatagcatgaacgatctgtgccttaaggacatgctcctgctgcagataactagccaaacccatccctttacttcagcccatccctttatttcctgtaaggaatacttttagttaatctat

SEQ ID NO: 526653 - DNA, 612 bp, Homo sapiens
ctgatgttgtaatgggatgagactttggtggactgttatcaattaggatttcaccagaacaaaccagtaggagactgtgtgtgtgtgtctgtgtgtgtgtgtctgtgtgtgtaataatatgtattatatgtatgtaaatatatgtaatacatatgtcatatatgtaattgatagtaggtaggtagatagctagctagctagatacatacatacatacatacatacatacatatctagatagatagatagatagatagatagatagayagacagacagacagacagacagacatgttgggaacaggccccccaaaatctggccataaactggccccaaaactggccataaacaaaatctctgcagcactgtgacatgtttgtgatggccacgatgcccacgctggaaggttgtgggtttaccagaatgagggcaaggaacacctggcccactcagggcagaaaaccacttaaaggtgttcttaaaccacaaacaatagcatgaacgatctgtgccttaaggacatgctcctgctgcagataactagccaaacccatccctttacttcagcccatccctttatttcctgtaaggaatacttttagttaatctat

SEQ ID NO: 526654 - DNA, 479 bp, Homo sapiens
tccttcagatttcagaattgctttggcatcctccacaatgaggcaagccaatatcttataataaatctctaatatctccgactggttctgtcctcctggttctgtccctctggttgaatgctgatgaatacagccatttaaaaacctttgggcaaataatacattaaagtttctattagaygttaacactaaaatgccaccgttttgtctgatggtttaccaagggacaggttactgaatatggaactttgagggaaatgacaggagtgatggggaatcggtgccctcttagaatgggagtggtcatcccataggctctagacatccaaaaagactgcaggaagggaaaagtatctgatgaaggaaaggatgcctaggcatgacaaagacctatgcaatgaaggcagggagacgggcaaagagagaatttatggttgtacatacaggcatccctggctacaaatccaaagtagaacagg

SEQ ID NO: 526655 - DNA, 440 bp, Homo sapiens
gttaaattagtccttgactaagaaaataatgatatgttactaagaaatgtcagtgatagcaatttgaattttattaataaaaacagcatctatacacttttggtaaagcatagaacatatgcaattcagaataattattcaataaaaagtcggtgcttcagaaaggaaattttctctgttaagtgccacatagcaagtatcttaggctctgctagccatatggtttccattgcaacttgaattcagctctcagcatgaaagtcaccataaacaatatggawaaaaatgaccctggctgtgtcccctaaatgtttatttataaaagcaagtgggtggtttggcccttacaccatagtttgctgacccctgctttagaccagcatgtttcaaagcatggtccatgtactggcagcatcagcatcaactgggagtttcttaca

SEQ ID NO: 526656 - DNA, 637 bp, Homo sapiens
aaacttcagagactacctcaaggcagttagtcagcaacccagcyattgttgatatgtcagccgcactccaggtagactacagctagatacagccaccagaacaagacatgcagatcttatactcaggcacccttcccatatgcctcccagtccaagtcccatttttaagaccctcttcccagcctcaagtctgaagcagtttctagaggagtaagcctgccactcctagctttggaaataaaagtcattttcctttcactgaacttcatccttgttattggctgtgcaagtggcaggcagccgatcctgcactcaggagcacaatgaattgctgctgaaagactgggcactacacttcctatatgtaattagcactctggacgatccaagaccaaatctataaatataagtgaaaattatttcactggcacatgcctttcaaatgccaagttaagaagttatcattaggaaactataaataatagaatattaaaacacttgattttcaaaaaagataaaagttgtaaatcttatctaataataatgagaaagaaacctgaagacccttgcattttgtgaaatgttttactgtaatccaatttcctttaaattttttgaagctagaactatggattca

SEQ ID NO: 526657 - DNA, 380 bp, Homo sapiens
ctgcaaggaacagaatgcctgcctaaaagtgactttaacagcragggcatttcagtacctcactcacaagtccagaggtaggctgtcatgggttttggttaatttattaggttggtaaaattgctgtttttgccatgtttttaatgaaaacacaaattattttttaccaacctaatagcatctctgaatcatttagctttccctcatagctgcaagattgttttgatgatccaagcatcataacctcacacagttgggttcaaaggcagaaaaacagaaaggcctttctttcctatgtatcaaggtggagatccagtcccagaagccccttagtggacctgcctttgcctctcattggctagaatcatgtcacatgtcca

SEQ ID NO: 526658 - DNA, 658 bp, Homo sapiens
gacacttatcattccctgaccaycgtcagcagccacccttcctcccatctgggggcagagggagagagctagagggactggactcatcctttctctctctccctttcagctaggatttgccacataacctggcttggctgactgctcacttctgccctggactttgagtctcaagtggccaaagatggaaaaaagtcaggctccctctcagtggtaatgggggagctttgggggtgttctgcataggctgttcccactaacagatgcctcttacctgttttccaaatctagagcctcctgtcatcacttctgagccccccatttcttttcttaagatagccagaagcagggggtgttccacagggggcacacatcctggttgaccctggatagtttgaagggggtgccactgagggacattagacggtggggagaagacatggtgtgggtcggggtaccatgtggaaagaagattgtgggaggaaatgagaattagggacctcagtcgggaggccacaggccaggggagggaggatggtgatgatggaaacccaagattcagaatatatacttggaagcagatttggtgattaaagaatcaagggtgatgtttagatttctgacttgagtgtggtgtggacggcggtggtatttaatc

SEQ ID NO: 526659 - DNA, 523 bp, Homo sapiens
ttttctttttcgttcagcctcaaggactattgacagtgtgcacacaacctggggactcggctgagttttacaatagcatccctgcggatttcccagtcaatatttccctgggggtttaaaatactcctagaaatgtccygtcaccaacttgcttctgggtttcctttctatttatgggggcttatcgccaaagctgctgctataaaacttcaagaagagatcacataactttttttccaaggacggggtgtgggtgctaagagcagggtctatgcactggacttctatgggattttttttttttctgtttcttctgggaattgagcttgtggtaccagatctccttttaatcgagttttaatatttttatggcaatgatggatgcgtgtgaagagaaagcagattgctttggaagtgatgaattaattctaaggaaaggttggcctcttgtaagccaaagcctcttctttctcttcaaccccttcagggcaggcagcgctcctggctccctgacctgagggca

SEQ ID NO: 526660 - DNA, 639 bp, Homo sapiens
tcttcggaggcagactctccctcacctgcctggccaaattccctctgggcagaaggaccctagggagcttttcctggcccatgtggcagaggcccaggctcccactcagacaatgaccccttgctttgcccactgaaagaagtccccagaagatgagctctgttacaagcagaacagaaaagaaacagtgggattagggctccaaaaaccctccagaactatcagagaattctggacagtggtccctgatggcatctgtgttaggggctgggaacaagaacccctctcacaggcacctctrcaggcggggttaagactgtcaaatactggccgaggccaagggagactctgtcatgtctgaggccataggcatgttttcttctggacttcagcgagaggcagagcccccagccccatgcagtcacctcagctctgcctgagaagaagcgagggaagcccattcctccccatcagttggcctctggggaggcaaagtcaagtatgtgatggttccttacctgtgcagggaaaatggaacttgggagtcagctgtctgaaggcatcacgccttgtatgacccttgcaagcccaagctacctacctgttcctgtacagaaaccctccctggcctcatcctgt

SEQ ID NO: 526661 - DNA, 488 bp, Homo sapiens
atcactgggtgtgtgacttactcaattcatcatttagctattgagagctgatgttaggcatattctttcttttcttatgaagccttggtttattgtgggcctcagaatagaagcttcttggcctgaaaatgaagttctttggaagtgccatctgacacttctcctggtgggcagagttgctgaaacyggaagcagggggtttgaggggtgctgtaactgatgtggggagaccgactggggacaaagaatgaggatagtaacaggagatgactcctcctccccaggaggccagatgcatccagaggcctcacatggctggatgtaggttacaaggtcgctctcacagtcaaggtgtgagcaaggccttggtcttcccatcagccatgctgccttataagccactcagtcaactccccatccacctccaaactgctgcttgcctggcctccctcttcattgatgatgtgatgagccacccaaatagacct

SEQ ID NO: 526662 - DNA, 488 bp, Homo sapiens
atcactgggtgtgtgacttactcaattcatcatttagctattgagagctgatgttaggcatattctttcttttcttatgaagccttggtttattgtgggcctcagaatagaagcttcttggcctgaaaatgaagttctttggaagtgccatctgacacttctcctggtgggcagagttgctgaaactggaagcagggggtttgaggggtgctgtaactgaygtggggagaccgactggggacaaagaatgaggatagtaacaggagatgactcctcctccccaggaggccagatgcatccagaggcctcacatggctggatgtaggttacaaggtcgctctcacagtcaaggtgtgagcaaggccttggtcttcccatcagccatgctgccttataagccactcagtcaactccccatccacctccaaactgctgcttgcctggcctccctcttcattgatgatgtgatgagccacccaaatagacct

SEQ ID NO: 526663 - DNA, 488 bp, Homo sapiens
atcactgggtgtgtgacttactcaattcatcatttagctattgagagctgatgttaggcatattctttcttttcttatgaagccttggtttattgtgggcctcagaatagaagcttcttggcctgaaaatgaagttctttggaagtgccatctgacacttctcctggtgggcagagttgctgaaactggaagcagggggtttgaggggtgctgtaactgatgtggggagaccgactggggacaaagaatgaggatagtaacaggagatgactcctcctccccaggaggccagatgcatccagaggcctcacrtggctggatgtaggttacaaggtcgctctcacagtcaaggtgtgagcaaggccttggtcttcccatcagccatgctgccttataagccactcagtcaactccccatccacctccaaactgctgcttgcctggcctccctcttcattgatgatgtgatgagccacccaaatagacct

SEQ ID NO: 526664 - DNA, 488 bp, Homo sapiens
atcactgggtgtgtgacttactcaattcatcatttagctattgagagctgatgttaggcatattctttcttttcttatgaagccttggtttattgtgggcctcagaatagaagcttcttggcctgaaaatgaagttctttggaagtgccatctgacacttctcctggtgggcagagttgctgaaactggaagcagggggtttgaggggtgctgtaactgatgtggggagaccgactggggacaaagaatgaggatagtaacaggagatgactcctcctccccaggaggccagatgcatccagaggcctcacatggctggatgtaggttacaaggtcgctctcacagtcaaggtgtgagcaaggccttggtcttcccatcagccatgctgccttataagccrctcagtcaactccccatccacctccaaactgctgcttgcctggcctccctcttcattgatgatgtgatgagccacccaaatagacct

SEQ ID NO: 526665 - DNA, 575 bp, Homo sapiens
gcctggatcaaattcactctctgccactgaagtacggggtgaccttggcaagttactgaatctctctgtacctccacttctccatctgcagcatgatcagtggtgcttgtgtgtgcgtgtgtgtgggagggctgagtgagttactggaataaagcacctaggacaatgcctgctgttatctgcagagggaccaaaaacacagaagggaggactggctcaccatggttccagcaatttcccaaaggaattatggccaaggacacaccgtgacttcaggaatgggaagagaacagcagaaaccrtctccatgggggtcctgctccaactctctatgcagcaaattcattattgctcctatcaacaagccccaataaatgggaggtaaacacctatgtccaactgcttactcaggggcaccaacacctagatgactgcagtcacctcaaatttaaagcaactcaagtggaaattaccattgctatgatctgaatgtatctcccaaaattcatctgtagaaacctaatcaccaatgtgatcgtactaagagagaggcctttaggagttgactaagccat

SEQ ID NO: 526666 - DNA, 555 bp, Homo sapiens
ctgctctcctctgggctctgtcccacagaagcctcaggcccagcagcagccactcccctgccagtgctttctcagtcccacagaaacacactcttgcatcactgcgcagatttcactcaccacttgaaatgggtaaagcaatttgccaactattttaaaatattaagagagtcatgactgtaatcacagcactttgggaggccgaggcaggcagatcacaaggtcaggagattgagaccatcctggttaacacggtgaaaccccatctctactaaaaaaatacaaaacattagctgggcgtggtggcgggtgcctgtagtcccagctactcgggaggctgaggcaggagaatggcgtgaacccgggaggtggagcttgcagtgagccgagatcgcgccactgcactcctgcctgagagacagagcgagactttgtctcaaaaaaaaaaaaaaaagaaagaaaaaaaattaagactggacattgaccgataggcaaaaaaaaaattcttcatkatagaataataaaggaataagatattgttatataattgtgtaa

SEQ ID NO: 526667 - DNA, 560 bp, Homo sapiens
agctgattcattaccaagtcagagccataactcagatctcctgaatccagtgaaataatcatttcataacaatcagcaccacccctttacctaagaatggctcccaggaagaagttcattgtgatttccctttggttgctcctggaatttaagtgatggctgaaaattacctggtaacaatcaatacatatgccacatatcgtgcacatacgacgtgcagtgtttcccattgtcacagtgggtttatttctctcaacaaaattatggatagaaatatctatccccatcttacatttgtaatagctaagacttagagtgactggataacttgcccaaggtcacacaacaaggaaatgggaggcctgggatgattyaaacccagattgtcctgacttcaaagtctgtgtgtttaaacagtaatggtctcgcttctcgagcaagttttaacagaaagcgattttccttaagtgcaagcaaccatgtcccatctccaacatgtttgtggagccccagtccttcagcctgaggacttgctgcaacatagtagcatctgccatatt

SEQ ID NO: 526668 - DNA, 554 bp, Homo sapiens
ttcacgtgccacctccagccccattttcctgataattttcctagctgtaattctcggttattcttagctacacttccttgtttctgtgatcctaacttcacatttccccttgttgtgagataacagtaatctggaatggattccttggtcacttgtcctccttggttctcttgtcgcatctcctgtgtttctcttgctrttgaggtaccttcctctgaactatttccaacttggatctttaggaggcaaatatccttcaggttttctataatttcgaatatttctaatacactgcagtgggtaggatttggaagctgccccttcaagtttcctgtaccttttctagaacgatatgttatagaaaacactgatgataggacaactaaccactgtcttagcctgtttcattgagcatggagcataccagccgcaggaaaatccagtattttaagcaaggaaggaaggagtatgaaagtgggaatgcaaacgggaaagaaaaggggggccaggaagaaggggatggagagagtaaggggtgaggggcctagagaaac

SEQ ID NO: 526669 - DNA, 625 bp, Homo sapiens
tatgcaatttctgcttggaaaaaccactgaagctttaaccatgagctttggggtaccgaccccaaaactttgagaaccaaaaacaaaaaactttgagaacctctagtataaagaagggtagcctcagctctcctccaagccccagaagctgcccaattctcgctgagatgacaaaaagtgctggaaggtcatgcacatcctcaaacttctttgtctgtcctgaagaggggagaccaattgctccctaaggctaccatctccaagcaaccagaactgactcccccagaaatgggcacagccagtgatatggaagtgctaggaaggaaagagcatggtccctttaaatgatacaaggggttaaggtcctggcccctggctggggcttcaccccggacctgtgcctatggacctaagtgaggacaggcatttttgtttatctgcccaaatgttgcatttcccaagacctcccctggcctgccacacccccatcctgtgcctataagaacccctagaccctagcaggcacacacacaagctrctggacgtccagaggagcagatcagcagaaaaagacacaggcagctaaacacagagaggagcgcatcagtggaggaacacaggggca

SEQ ID NO: 526670 - DNA, 170 bp, Homo sapiens
tgtctatagctgagcaagagcagggcccagacagccccctctttctgcagcatctttgtggctcctggttgctaggagcaggtgcttctgttactaagcaacaggagcytggtggattaaaaccaatttcctgagctctctaaaagggggagggaaagaaggtggaatgc

SEQ ID NO: 526671 - DNA, 170 bp, Homo sapiens
tgtctatagctgagcaagagcagggcccagacagccccctctttctgcagcatctttgtggctcctggttgctaggagcaggtgcttctgttactaagcaacaggagcttgktggattaaaaccaatttcctgagctctctaaaagggggagggaaagaaggtggaatgc

SEQ ID NO: 526672 - DNA, 170 bp, Homo sapiens
tgtctatagctgagcaagagcagggcccagacagccccctctttctgcagcatctttgtggctcctggttgctaggagcaggtgcttctgttactaagcaacaggagcttggtggatkaaaaccaatttcctgagctctctaaaagggggagggaaagaaggtggaatgc

SEQ ID NO: 526673 - DNA, 448 bp, Homo sapiens
tgagaactagtgctgcatattcrccacccattctatgtggaatgcctgtctcataatgacagcgtggcactgtgacatctggggtagagggggttttgaggcagcagggcctgtttagggctccacaaattccaccaccgtagaccacgccctacaagtgcaggtgggttccatgattacattgggctgtacactagccagatccctaaggggctgagaccgcggctaatgtaccagaagctgatattcactgaacctaggccctgggctctacatgaatcaatttactaagtactttgcatgaatcaatttacttaatccttgccacagtcctattgcttacttttgaaaaccaggctttcctgttcccacatgttccaaccctggtgtattaggtgttcattctgccactgggtcattggctgatactgacttcttcgtagagcag

SEQ ID NO: 526674 - DNA, 448 bp, Homo sapiens
tgagaactagtgctgcatattcgccacccattctatgtggartgcctgtctcataatgacagcgtggcactgtgacatctggggtagagggggttttgaggcagcagggcctgtttagggctccacaaattccaccaccgtagaccacgccctacaagtgcaggtgggttccatgattacattgggctgtacactagccagatccctaaggggctgagaccgcggctaatgtaccagaagctgatattcactgaacctaggccctgggctctacatgaatcaatttactaagtactttgcatgaatcaatttacttaatccttgccacagtcctattgcttacttttgaaaaccaggctttcctgttcccacatgttccaaccctggtgtattaggtgttcattctgccactgggtcattggctgatactgacttcttcgtagagcag

SEQ ID NO: 526675 - DNA, 626 bp, Homo sapiens
ttgtgaggttagcatataattttatttataaaaattaaaaagaaagctttacactcagcagctaaagaggacatttattaggtgacgtaaaatattatagttccacaaggcaggtcattatttgargttggcaagagtaatttcttcatattagtcagttttctattttcccaaatgtgttttaacctgaaacctctgaaatcagtgcagaatttcaaattgagtagtttttttttcctggtaaaatactctttttcatactcaatgagtttcacaggatggactgcattttattttctgaacttaaaagtaaaaaacattactctgtcctgagaaattttccttctagttccttgttttggtgaaatttttttctagctgttctcttttcaatggtgttctgaaggatcatcggccttagcatcagccttaacaatggtgcagaagaatcagatctgacatagagtgcaaccaattaacagcaaaaaaaaaaaaaaaaccctctaaaaacagcaaaacctactggcatgggtcacaaccttatatattccgtatcttattaccatttaatatacatccagatgaggcaaataagcaattttaatgggagagaaatgaaacttcag

SEQ ID NO: 526676 - DNA, 543 bp, Homo sapiens
ctctactaaaaatacaaaaattggctgggcatggtggtgcgtgcctgtaatcccagctactcaggaggctgaggcaatagaatcgcttgaacctgggaggcggaggttgcagtaaaccgagatcgcaccattgcactccagcctgggcaacagagtgaggctccrtctcaaaaaaaaaaaaaacaaaagtttgtttatgacagaatgaaagtcatatttcataaaagggtatactcaatatagatttccaccaatgctgtgtgacagtgttcttttccttgcattgttgccaaaactggatgctgccattaaattaaaaagccattttgatgatagcatcgcattgctattttcatttatttgattactggagaacaaaatatcctgtattttttacatttattggtcacatgtgttcctcattccatttttagatagaagtcccaccccaagattatcttctgatagtaggtgatcttaataccatatctgggctcatgttcttttactagagaagaagaaatctgctttggacattttctg

SEQ ID NO: 526677 - DNA, 306 bp, Homo sapiens
aagggtatactcaatatagatttccaccaatgctgtgtgacagtgttcttttccttgcattgttgccaaaactggatgctgccattaaattaaaaagccattttgatgatagcatcgcattgctattttcatttatttgattactggagaacaaaatatcctgtattttwtacatttattggtcacatgtgttcctcattccatttttagatagaagtcccaccccaagattatcttctgatagtaggtgatcttaataccatatctgggctcatgttcttttactagagaagaagaaatctgctt

SEQ ID NO: 526678 - DNA, 499 bp, Homo sapiens
gagagaaaatgaggcagttcccaaaaatgggtctcctccttggccctagtaccccctacccaagataatccagggagctctgccctgacatgagtttcctgaaggagattctctgtggctatgtgaaggcttcagcctgaggtatcagcctctggacagagaatggtatgtctgcaagtgcctgcaggtagaacccacccactagggcaggttcctacaaatacatgtttgcttttatctctccccagaatatgaacacatgtgtgtgtgtgtgtgtgtgtgtgwttgatatatatatatatatatatatcttcctagaatatatgtgtacattttttaggccaaatatatttctacttttttcccctaagagggcttttcagcggcccctccgtgctgagctagacaagaggctgtgtcccagcgtcacagcccttgtcttctcctagcctccctgcctgagagcagaacggctgccgcttaccttgagaaagtaaca

SEQ ID NO: 526679 - DNA, 499 bp, Homo sapiens
gagagaaaatgaggcagttcccaaaaatgggtctcctccttggccctagtaccccctacccaagataatccagggagctctgccctgacatgagtttcctgaaggagattctctgtggctatgtgaaggcttcagcctgaggtatcagcctctggacagagaatggtatgtctgcaagtgcctgcaggtagaacccacccactagggcaggttcctacaaatacatgtttgcttttatctctccccagaatatgaacacatgtgtgtgtgtgtgtgtgtgtgtgaktgatatatatatatatatatatatcttcctagaatatatgtgtacattttttaggccaaatatatttctacttttttcccctaagagggcttttcagcggcccctccgtgctgagctagacaagaggctgtgtcccagcgtcacagcccttgtcttctcctagcctccctgcctgagagcagaacggctgccgcttaccttgagaaagtaaca

SEQ ID NO: 526680 - DNA, 605 bp, Homo sapiens
tacaagaatgcaccataatttctttgagcaatcccttattgacaggtattcagcttgttttcatgttttgttcctcttggctagttacaaatggtgttgcagtaaatattgttaagtgtacctctgcacacattgtgagtatttcttagaaatgattcctaaagtggaattatggagtcatagctcataggcatcttgaattttcaaaaatacaaacttatatttccatgaacaaagtctgaaaatgttgatttctcctcaccctctgagggtttgaatagytttgacaaggcccttcaccctacctaagtgattcttgtcccacacccacctccatcccttccctgtgaattactatgtgtagatgagacgacagtgttggggagagtgctgaacttgggaatggtgcttaaacagaaagtagatgaaatccacaggaggaaagagctgggatacttgggttgtagctgtggccctgcaaataagtagcatgggatcccttccgtaagatccagcaaaatgggtaaggctttctggaccttggattcccatctggaaaacaaggaagttggcatctgatcattaaaggtctcttttggctctga

SEQ ID NO: 526681 - DNA, 605 bp, Homo sapiens
tacaagaatgcaccataatttctttgagcaatcccttattgacaggtattcagcttgttttcatgttttgttcctcttggctagttacaaatggtgttgcagtaaatattgttaagtgtacctctgcacacattgtgagtatttcttagaaatgattcctaaagtggaattatggagtcatagctcataggcatcttgaattttcaaaaatacaaacttatatttccatgaacaaagtctgaaaatgttgatttctcctcaccctctgagggtttgaatagttttgacaaggcccttcaccctacctaagtgattcttgtcycacacccacctccatcccttccctgtgaattactatgtgtagatgagacgacagtgttggggagagtgctgaacttgggaatggtgcttaaacagaaagtagatgaaatccacaggaggaaagagctgggatacttgggttgtagctgtggccctgcaaataagtagcatgggatcccttccgtaagatccagcaaaatgggtaaggctttctggaccttggattcccatctggaaaacaaggaagttggcatctgatcattaaaggtctcttttggctctga

SEQ ID NO: 526682 - DNA, 617 bp, Homo sapiens
agaaattgcccagaggcagaagcctgagcattctggttccttttattagacatacaaaggtatccagtagctgtagaactctacataaaagaatgcatcctgccacagggtgctgaaaatggaattggagtctgtaagcctggatgctgcacgggaaaaggctgcctgaccagtaggtctgcagcctgcagctgttggtggcactgattggtatttgagggttaatgaaacccttctccgctgcctttgtcttagttccagcactccctttctctcccttaaattactgccacagttttctaacccatctctctttctccctttctcccactcctcaggctgctgcccaagcaattctaactttatatccgtgcatgtcagcttcatgtttcaaagccctcattgttytctttttgcccccatcagccaaggcacaggttctaacctgattaacacaaacccattgcaaactctgctaatcacacatggtacaattttcctctgaaccaaaacacgaccatgttagtgcatcagcattttaaaaaataaatgaattgtaaaggaacacattatatttgaatggaatagaatagaagatatcttgatatttaagaagc

SEQ ID NO: 526683 - DNA, 482 bp, Homo sapiens
gacattagacaagtaactcaacctagctgaggcttgatgacctaatttgtaaagtgggaaaaacaatcaaaacctatatctgatggctattagaatgtttaaatgagataatatataatacgtattaagccccctgcccagcatataaataagtactcaataaatattaattatttgatcctctccttgtcattgttaatctcttgtgcaaagaaaaaaaaawttaatcaaaaacagcttgtggaaggagcacagacccttgacccagacacttctgcacacagcaaggtttgcaccaatcaacgcctgactccacaaagcataatatgaatgtaaggcaagggctatttagcccaggtcttacctgtatattttatatctggttgtaaatccttgacggtgtctttccacaaaggataggtagctcctggagtggtggaaaggccccctgtctgaaatgagccaatcaaattccttggaga

SEQ ID NO: 526684 - DNA, 657 bp, Homo sapiens
gttcctggtgggagggctgcactgagatacggccccatataaacaggaagtagaggagctcaacaaacctccagttcatgcttttctgccggcctttttcctctcattcttgctccattctgtggagtcctatagaagaaagaataaaaaagagagagaaaaaaagagaaaccaaaagagagagaggagaggggaagaggagtaaaagaaaaagacacaggaaaagaaaaaatgtgattaacacatcttcataataataccttatatcagtagagtgctttaaagtttataaaacccagtacagttctggttaaaaacatagaatctatggaaatctgggcccatgttcccattttgctgttcacatattgtctgaacatgtacaaactgtttggtctattatggatgcagttttcttggaagyaaaactgagggtgagcttacgagcctgtatcttggcacttggcacatcatggatgctcaaggaagatgtgttgaaaaaatgaataaatgaattaatgcagaaacagagtctcatacacccagtaagagacatagggacacaattcaagtgagtgtaccctcttctgtcttcactaacaacctgcctctcataaagaggtatcaataaacaagagttccttttccttctctcag

SEQ ID NO: 526685 - DNA, 608 bp, Homo sapiens
tgggaagccttgcctgggacccttacctcacacctcacagggcttgcatccagtcacccatcatcacatttgatgcacacaatgagacagctcctgaccatcagctccaggagggcagggaccatggcggtcttgctcctgctgaatccccagaatgtagtctggcagagcagagggacctaagtaccatctgaatgaatgaaaggaatgaatgcatgaatggatgccccagtgaaccatgctgatgtgtacatggcaaggatgattttgctaggggcttctctaatcagaacagagctggtgttggagtgagtgtcccagtgtaaccaatacctaatcccctgatttaagaygctcttaacagacttcgtagcaattggattacagcacgacatgcctgataaggtcgcttccactgctctgcctctttccagcccacaaatcagctccctgcaacttatttttgctatcataatagtctgctatttcccccaaagctgtataagagaaattggcatcagttccacctgtcttactataagatgtagtgagagcagactttggagaaacaactcatagcttggacacttagtttcctcatctgtaca

SEQ ID NO: 526686 - DNA, 584 bp, Homo sapiens
attaactgctaagattagagctttaagacagatggccaaaggtagcctaattggctattttttaaaaaatcttcctcagacacactgttaaatatgtttrttgggcattaatttaacctatgtctgttttagggaagtaaagaattgaagatctttagggaaaacacagcttccattcctagcctcaatgcattaagtcagcagtgttgaaaacctttccactcttccccattgtctagaggagaaagtccgttttccttacaggttcttcattcaggtgtcgcctcttcagtaaagtccttaccatattctcctctcctaaacctgggctccctcgccattacaacaggtatcacactggtttttaactctatttatttgatctttctcccctgggtctccagcacccagcacatgacccagcacagagcagatgcttcaaaaacgttgaatgaaaagcgaccaaataaataaataaataaataaataaataaataaataaataaatgaatgatctatccttctgggtccaccacaaaccaaatcctccaggtaatcctccatcttgccctaccctggataga

SEQ ID NO: 526687 - DNA, 539 bp, Homo sapiens
tagcctaattggctattttttaaaaaatcttcctcagacacactgttaaatatgtttattgggcattaatttaacctatgtctgttttagggaagtaaagaattgaagatctttagggaaaacacagcttccattcctagcctcaaygcattaagtcagcagtgttgaaaacctttccactcttccccattgtctagaggagaaagtccgttttccttacaggttcttcattcaggtgtcgcctcttcagtaaagtccttaccatattctcctctcctaaacctgggctccctcgccattacaacaggtatcacactggtttttaactctatttatttgatctttctcccctgggtctccagcacccagcacatgacccagcacagagcagatgcttcaaaaacgttgaatgaaaagcgaccaaataaataaataaataaataaataaataaataaataaataaatgaatgatctatccttctgggtccaccacaaaccaaatcctccaggtaatcctccatcttgccctaccctggat

SEQ ID NO: 526688 - DNA, 680 bp, Homo sapiens
tggggtggagaagattgattttttttccttaaacatcttggtctagttgcatgaaaggcttcaacaacagttacaaaggaggaataaggatagacaccattaactgctaagattagagctttaagacagatggccaaaggtagcctaattggctattttttaaaaaatcttcctcagacacactgttaaatatgtttattgggcattaatttaacctatgtctgttttagggaagtaaagaattgaagatctttagggaaaacacagcttccattcctagcctcaatgcattaagtcagcagtgttgaaaacctttccactcttccccattgtctagaggagaaagtccgttttccttacaggttcttcattcaggtgtcgcctcttcagtaaagtccttaccatattctcctctcctaaacctgggctccctcgccattacaacaggtatcacactggtttttaactctatttatttgatctttctcccctgggtctccagcacccagcacatgacccagcacagagcagatgcttcaaaaacgttgaatgaaaagcgaccaaataaataaataaataaataaataaataaataaatraataaatgaatgatctatccttctgggtccaccacaaaccaaatcctccaggtaatcctccatcttgccctaccctggata

SEQ ID NO: 526689 - DNA, 373 bp, Homo sapiens
agctgtcacatcccggtaaattatttctcttttctacaactagcaagtattatttttgcaattggaaaacacagtaaagattttaaaaaatatgtattacgctctgctaagggtgacagccagaatccgccactgtaaacttactattttccctttataattatgaagtacactgatagagatattttgaaaccacacacagaaaatcctttttctgcttaaactcrtgcccactttttttttttttttttgaacagagtctggctctgttgcccaggctggagtgcagcggcaccatcttggctcactgcaacctctgcctcctgggttcaagcgatcctcctgcctcagcctcccgagtagctgggattac

SEQ ID NO: 526690 - DNA, 439 bp, Homo sapiens
gcctactttttagcatctacttgtgattcttgcccacagaaatgattaccaaaatgtaatgttctaagggtgattttctattcccatgttccttctatgtttattaatgggaaaggaaaattcccattcttccttaaggaagaattgtcccttctcactcatttatctatttattcagttaattacrtaatgacactattatggcctcatggatgcttattttattctcctttgcctataggaagtgcttttaggttggcttctgtgcacatttgatatgcttatttatttgtttgtttactttacagcatgtctttactttctggcacaagaaatcccaggttcaccttgtttgttttccctgccctagacctggaatccaccacccctacaaagagcactggttccttttatttgaagaacagtatttagaaaccaa

SEQ ID NO: 526691 - DNA, 378 bp, Homo sapiens
aacttcctggctgggctggtccggctgcctggactgtcccagagagtctgtgactggcccgtccagaaggaaagcggcctcccgggccctcctccgttccaatcccttacctctctcgggctccaccaccgtcctgccgacccagtttcaggggacctgcctgtgaattctttgttccaaacccagggagccccctgtctccattgcgccctggcccacctccaggccgttctgccagcccaagctgctgctcacagaccagcatcgctcccyacctctccccgcccctgccgtggttgaggccgcctcgcctcggcaggaagcgcccagcctgatttcctacaagtgtttgtcagaaggagggggtttgtctgcgtg

SEQ ID NO: 526692 - DNA, 621 bp, Homo sapiens
ctgccctgcctctgcctcccaaagtgctgggattacaggcatgagccaccgcgcctggtctttttttttttgtgacaggatctcgctgtgtcacccacgctggagtgcagtggtgcaagctcgaytcactgcaacctctgcctctagggctcagtgatcctcatgcctcagcctcccaagtggctgggatgacaagcatgtgccaccatgcccagctaatttttgtattttttgtagggatggttttttgccatgttgcccaggctggtctccaactcctgggctcaagtgatctgcccacctcggcctcccaaaatgctggaattacaggtgtgagccgcctcacctggacagtttactttttctcaactgcatgaaagttggctggttcaccgggtataaaatgagccctgtagtccctattatgacctgtgtctcagatcgtgatgagatcaaatgagatacttatatgagttctgaaaagaaaaatcaccagcgtgctactggtagaaaccagaatgccaaatttggctaaagtctaatagagacatagcccttcctctgccaatactggcatagataataataatttgtatttatataatgaaacatccccaggca

SEQ ID NO: 526693 - DNA, 449 bp, Homo sapiens
tgaggactcgaggcagagccagtcctcctgcttggggcctgggcataggaaagcaaactccaggcaggaggaaggagccccaggctgtggatgcytctgggggaattttgggtcagcaacggccagaggagctcctgaacttaagcagtatctgccacctccctacctttgggtgtcttctggtgtccaatgtgctgctgtcaggtccctcgctggctcccaaattcgactgggcagcctccaaagcagtggagttggtgctactgctatctccactttgtggatctcagagctgcaggatggcttctcccaccacacccttagctggccccatttgtggttggcattgtgggacagcgtgttcagggcaactctgctcctgtatattgcgggctgcgtctgcgctgtctgcacactcatagacgtcagagccacaggctggctctgca

SEQ ID NO: 526694 - DNA, 379 bp, Homo sapiens
tgaggactcgaggcagagccagtcctcctgcttggggcctgggcataggaaagcaaactccaggcaggaggaaggagccccaggctgtggatgcctctgggggaattttgggtcagcaayggccagaggagctcctgaacttaagcagtatctgccacctccctacctttgggtgtcttctggtgtccaatgtgctgctgtcaggtccctcgctggctcccaaattcgactgggcagcctccaaagcagtggagttggtgctactgctatctccactttgtggatctcagagctgcaggatggcttctcccaccacacccttagctggccccatttgtggttggcattgtgggacagcgtgttcagggcaactctgctc

SEQ ID NO: 526695 - DNA, 595 bp, Homo sapiens
cctcatgttaatggaggtccactttattctcaaaattcaagtaagcttgtgctttgcaggcatacagcaacagtggagctccttttgaaggaaattatttgaaactgttattcttgccagtgatagacaacaattgaaaaccatgatgtttcatgtttatttttgttttaggatattagtccttgaatcataccattttaagagtaattgyttaccactttctcttccaaaatttagacttaccaagtatacttaactaaatttatcgagacgtgtctatattgagtataccaaaatttaactttaatatgcgattttattacataagtagaactagagaacaaaaacattgcagaaataaactgaatttattggcatgtttgagacagcgtagtaatggtaaaattaaagacacaaacattgtcaaagttttccttcaaattaatataatgaaattgctggctatcacttttaaggtcattaacgtgttcagaaatgagttcaaaaccgattaaaactgtttgtgatgcctgcttaattactctgtctttgaataattctaatggtgggaatttcttttgatttctttctgttt

SEQ ID NO: 526696 - DNA, 595 bp, Homo sapiens
cctcatgttaatggaggtccactttattctcaaaattcaagtaagcttgtgctttgcaggcatacagcaacagtggagctccttttgaaggaaattatttgaaactgttattcttgccagtgatagacaacaattgaaaaccatgatgtttcatgtttatttttgttttaggatattagtccttgaatcataccattttaagagtaattgtttaccactttctcttccaaaatttagacttaccaagtatacttaactaaatttatcgagacgtgtctatattgagtatacyaaaatttaactttaatatgcgattttattacataagtagaactagagaacaaaaacattgcagaaataaactgaatttattggcatgtttgagacagcgtagtaatggtaaaattaaagacacaaacattgtcaaagttttccttcaaattaatataatgaaattgctggctatcacttttaaggtcattaacgtgttcagaaatgagttcaaaaccgattaaaactgtttgtgatgcctgcttaattactctgtctttgaataattctaatggtgggaatttcttttgatttctttctgttt

SEQ ID NO: 526697 - DNA, 595 bp, Homo sapiens
cctcatgttaatggaggtccactttattctcaaaattcaagtaagcttgtgctttgcaggcatacagcaacagtggagctccttttgaaggaaattatttgaaactgttattcttgccagtgatagacaacaattgaaaaccatgatgtttcatgtttatttttgttttaggatattagtccttgaatcataccattttaagagtaattgtttaccactttctcttccaaaatttagacttaccaagtatacttaactaaatttatcgagacgtgtctatattgagtataccaaaatttaactttaatatgcgattttattacataagtagaactagagaacaaaaacattgcagaaataaactgaatttattggcatgtttgagacagcrtagtaatggtaaaattaaagacacaaacattgtcaaagttttccttcaaattaatataatgaaattgctggctatcacttttaaggtcattaacgtgttcagaaatgagttcaaaaccgattaaaactgtttgtgatgcctgcttaattactctgtctttgaataattctaatggtgggaatttcttttgatttctttctgttt

SEQ ID NO: 526698 - DNA, 595 bp, Homo sapiens
cctcatgttaatggaggtccactttattctcaaaattcaagtaagcttgtgctttgcaggcatacagcaacagtggagctccttttgaaggaaattatttgaaactgttattcttgccagtgatagacaacaattgaaaaccatgatgtttcatgtttatttttgttttaggatattagtccttgaatcataccattttaagagtaattgtttaccactttctcttccaaaatttagacttaccaagtatacttaactaaatttatcgagacgtgtctatattgagtataccaaaatttaactttaatatgcgattttattacataagtagaactagagaacaaaaacattgcagaaataaactgaatttattggcatgtttgagacagcgtagtaatggtaaaattaaagacacaaacattgtcaaagttttccttyaaattaatataatgaaattgctggctatcacttttaaggtcattaacgtgttcagaaatgagttcaaaaccgattaaaactgtttgtgatgcctgcttaattactctgtctttgaataattctaatggtgggaatttcttttgatttctttctgttt

SEQ ID NO: 526699 - DNA, 496 bp, Homo sapiens
ggcctccatcttctgagcacgttagcaatttatgaaacagccataattttcagcttatggacaaagaaataaaagtgttgacaccattattgtaacatctgtgaagggaaaaatatgagccgatttctaagtgcacaaatggtaccagagttataaagattcttttatgcttaattgtattcattatcagcagtaattatttctaacgygagcagtttcttccaatttaatgtcaacctaaaaggttaagaccttaccatgcaggcatttctacctcatcatttgttaggtctgcacagtcatgctaattggtaaatcagtagttgctcctgcgagctcacctgcctagtggtttctctgggtagagcagggcttttggactgcaatatcacaggagggtactgctaggcagggtctgaaatgagttcaagttgtgtgtttgtcaacggtggagaaattactgaagctttctgtctctccacccccacccaagcat

SEQ ID NO: 526700 - DNA, 496 bp, Homo sapiens
ggcctccatcttctgagcacgttagcaatttatgaaacagccataattttcagcttatggacaaagaaataaaagtgttgacaccattattgtaacatctgtgaagggaaaaatatgagccgatttctaagtgcacaaatggtaccagagttataaagattcttttatgcttaattgtattcattatcagcagtaattatttctaacgcgagcagtttcttccaatttaatgtcaacctaaaaggttaagaccttaccatgcaggcatttctacctcatcatttgttaggtctgcacagtcatgctaattggtaaatcagtagttgctcctgcgagctcacctgcctagtggtttctctgggtagagcagggctyttggactgcaatatcacaggagggtactgctaggcagggtctgaaatgagttcaagttgtgtgtttgtcaacggtggagaaattactgaagctttctgtctctccacccccacccaagcat

SEQ ID NO: 526701 - DNA, 496 bp, Homo sapiens
ggcctccatcttctgagcacgttagcaatttatgaaacagccataattttcagcttatggacaaagaaataaaagtgttgacaccattattgtaacatctgtgaagggaaaaatatgagccgatttctaagtgcacaaatggtaccagagttataaagattcttttatgcttaattgtattcattatcagcagtaattatttctaacgcgagcagtttcttccaatttaatgtcaacctaaaaggttaagaccttaccatgcaggcatttctacctcatcatttgttaggtctgcacagtcatgctaattggtaaatcagtagttgctcctgcgagctcacctgcctagtggtttctctgggtagagcagggcttttggactgcaatatcacaggagggtactgctaggcagggtctgaaatgagttcaagttgtgtgtttgtcaacggtggagaaattactgaagytttctgtctctccacccccacccaagcat

SEQ ID NO: 526702 - DNA, 537 bp, Homo sapiens
catgctttatggaagggtggtaaatccagaatatgtaacagtatgtatacttgtgcttggtaccatattgagatttctttaaaaattgtttcctgaaaaaaaaaacaaacacaccagcccaaaatgttcccatctattacaataaatgtggaaaaatgtcgtcttaggttttctgggttctgaataatgatgacatcaaatggtgatggtaatacttctgtgaatttccagaaggtttttgagccttttatacagatcagtgaagttttcttctttttttttccctttyagagacaaaaagttatacttgtccaaagtttaatgaaagtccaagaaactgcgtctctgtttcaatccacacaaggttcatgttgatccacactagaaaggctttagggagaaaagggaagatctgaatgttgggtttgtgatattctgattcaaaatctacaaaagccaaatgttcaaaatttctctcaagtggttaaatgtcacgtctgacaggaggagatattcatgaagttttttttttttttt

SEQ ID NO: 526703 - DNA, 580 bp, Homo sapiens
ctgggactacaggtgtgcgccagctaatttttgtatttttagtagagatgagatttcaccgtgttggccaggctggtcttgaactcctggcctcaagtgatccatggcgcccagcctgtaaaatagaataattacctggaagccatttccaattttctttctgtgcatgtatgcattgtgtatttaaaaaaatgtaaactctgcttatgtgcccagttcattctttttttttttttttttttttttgagacrgagtctcactctgtcccccaggctggagtgcactggcacaatctcggctcactgcaagctctgcctcccgggttcacgccattctcctgcctcagcctcctgagtagctgggactacaggcacccgtcaccatgcctggctaattttttgtattttttagtagagacggggtttcactgtgttagtcaggatggtctcaatctcctgacctcatgatccacctgcctcagcctcccaaagtgctgggattacaggcttgagccaccgcgcctggcccattccattctttattctaggccctctggcatttccctttgctggatgatga

SEQ ID NO: 526704 - DNA, 621 bp, Homo sapiens
acctcagtaaaagcagctttgatttctgaactttgccgacaggtaggggggcaccaagggaggtttacgccctgcaaagggacaggacccacttacagtttagaaagacgactctggccatggtctgaagggtgggcagaaccaagagaaggccctgaaagcagtgaggctaactgaacaccacacatttggcttaaaaagcaagggaaagaacagagtggggggccaggcacggtggctcacgcctgtaacccctgcactttgggaggccaaggtgggtggatcacctgaggtcaggagttcgagaccagcctggccaacatggygaaaccccgtctctactaaaaatataaaaattagccgggcatggtggcaggtgcctgtaattccagctacttgggaggctgaggcagaagaattgcttgaacccaggaggcaaaggttgcagtgagctgatatcatgccactgcactccagcctgggcggcagagtgagactctgtctcaaaatacaaaacaaacaaacaaacaaaaacaaaacaaaacaaaaacaaaccagagtggggcacactcccactttgacagggaaacaaaatatgtgtgtgaacctctgaaaagatac

SEQ ID NO: 526705 - DNA, 632 bp, Homo sapiens
ctgttgacatcaaagtcatcggtgaagttgcctgggaagagtgtggaggacagaattcaggatggctgacattcaggggtgaacagagggctagtagcccacgaaagaagtcaagaaggaccgaccagagaagtacaaaacaaccaggagagaagaaatctgtctccagaaggagggagtgatcragatggccagtggatttggatctggaaattaggagatggttggtgagaagagcttgggtggggtgggaggagctgagcctggttcctctgggttggagagtggactctgcagtttagaacactcacagtgtgggagccaaacagctaacaggacacatgaacagattccgcggcgcacaatggcctcgggggctggaatctttttatacaattttgcctgagaccttagcactaagattaagcatacgtcaccgatgggatggcagctttttatatttgctacaagaagcaccctcaatatttgatggagaggtttataagcagttctcccaccacccccaccaaatataagttttgaagtctatcagcaaatcagtgcaagtaatttttgtacttaggagagaacaatgtttataagaaacaacaagatgaatagcacagccactt

SEQ ID NO: 526706 - DNA, 632 bp, Homo sapiens
ctgttgacatcaaagtcatcggtgaagttgcctgggaagagtgtggaggacagaattcaggatggctgacattcaggggtgaacagagggctagtagcccacgaaagaagtcaagaaggaccgaccagagaagtacaaaacaaccaggagagaagaaatctgtctccagaaggagggagtgatcaagatggccagtggatttggatctggaaattaggagatggttggtgagaagagcttgggtggggygggaggagctgagcctggttcctctgggttggagagtggactctgcagtttagaacactcacagtgtgggagccaaacagctaacaggacacatgaacagattccgcggcgcacaatggcctcgggggctggaatctttttatacaattttgcctgagaccttagcactaagattaagcatacgtcaccgatgggatggcagctttttatatttgctacaagaagcaccctcaatatttgatggagaggtttataagcagttctcccaccacccccaccaaatataagttttgaagtctatcagcaaatcagtgcaagtaatttttgtacttaggagagaacaatgtttataagaaacaacaagatgaatagcacagccactt

SEQ ID NO: 526707 - DNA, 632 bp, Homo sapiens
ctgttgacatcaaagtcatcggtgaagttgcctgggaagagtgtggaggacagaattcaggatggctgacattcaggggtgaacagagggctagtagcccacgaaagaagtcaagaaggaccgaccagagaagtacaaaacaaccaggagagaagaaatctgtctccagaaggagggagtgatcaagatggccagtggatttggatctggaaattaggagatggttggtgagaagagcttgggtggggtgggaggagctgagcctggttcctctgggttggagagtggactctgcagtttagaacactcacagtgtgggagccaaacagctaacaggacacatgaacagattccgcggcgcacratggcctcgggggctggaatctttttatacaattttgcctgagaccttagcactaagattaagcatacgtcaccgatgggatggcagctttttatatttgctacaagaagcaccctcaatatttgatggagaggtttataagcagttctcccaccacccccaccaaatataagttttgaagtctatcagcaaatcagtgcaagtaatttttgtacttaggagagaacaatgtttataagaaacaacaagatgaatagcacagccactt

SEQ ID NO: 526708 - DNA, 632 bp, Homo sapiens
ctgttgacatcaaagtcatcggtgaagttgcctgggaagagtgtggaggacagaattcaggatggctgacattcaggggtgaacagagggctagtagcccacgaaagaagtcaagaaggaccgaccagagaagtacaaaacaaccaggagagaagaaatctgtctccagaaggagggagtgatcaagatggccagtggatttggatctggaaattaggagatggttggtgagaagagcttgggtggggtgggaggagctgagcctggttcctctgggttggagagtggactctgcagtttagaacactcacagtgtgggagccaaacagctaacaggacacatgaacagattccgcggcgcacaatggcctcrggggctggaatctttttatacaattttgcctgagaccttagcactaagattaagcatacgtcaccgatgggatggcagctttttatatttgctacaagaagcaccctcaatatttgatggagaggtttataagcagttctcccaccacccccaccaaatataagttttgaagtctatcagcaaatcagtgcaagtaatttttgtacttaggagagaacaatgtttataagaaacaacaagatgaatagcacagccactt

SEQ ID NO: 526709 - DNA, 512 bp, Homo sapiens
tacccacaaaaattaaatataaaaaattgggtcgggcatggtggctcatgcctataatctcaaaactttgggaggctgaggcaagcggatcacctgagatcaggagttcaagaccagcctagccaacatggtgaaaccccatctctactaaaaatatgaaattagccaagtgtggtggcgggcacctgtagtcccagctactcgggaggctgaagcaggagaattgcttgaaccsgggaggtggaggttgcagtgagccgagatctatagagggagttattttcattctgggctcgttttctaacttttttctaaggaacaatggaaagaaagcagtggaaggtagccactgtttgtcagatttctccagcgcctgctatcatgctaagcttgcagcctctctgggtggtgttgattttggaaccgctgtgcattgccctctccgtggaggtggcagtcatgtttctgacagcaaacatggagaaaaagagaaacaaatcaagggaagaggg

SEQ ID NO: 526710 - DNA, 614 bp, Homo sapiens
tcggtaatatttgctaagcaaataaagacaaagcacacaaacttgtttcacaaaagtagaatgacttcaactggaattttcttctatccataaataatttgctcaggaatccagaaatgtaatagacataccagctgtccatttttcaaaaatgagctgagtaaaaaacrtgcagtgtctctcttcacaaacatttcttttttcaattttcattattttccaaaacctcggagattgataccagtttgcaaacattgcatcagctagaactgttccccagctagactctgctctggttgacctcccctcgccttccttctgggtcattcctttttgttactaggacccaatcagatgtctggtcaagattgttttcaggtgagattttactttaggaaaatctggttttggtatctttttcagtgatggcgaaccgacactaggaaacttcttccctcgaggcctgttaaaacccagcctctctaggtaaggcgacctggtgaacttgtttgctttaagtgtgggcgaaatcaattacttccatgtgatgtgtggctgggagtaaatcactgctcctattaacacagctgaaactattcacaacagagacagtt

SEQ ID NO: 526711 - DNA, 614 bp, Homo sapiens
tcggtaatatttgctaagcaaataaagacaaagcacacaaacttgtttcacaaaagtagaatgacttcaactggaattttcttctatccataaataatttgctcaggaatccagaaatgtaatagacataccagctgtccatttttcaaaaatgagctgagtaaaaaacatgcagtgtctctcttcacaaacrtttcttttttcaattttcattattttccaaaacctcggagattgataccagtttgcaaacattgcatcagctagaactgttccccagctagactctgctctggttgacctcccctcgccttccttctgggtcattcctttttgttactaggacccaatcagatgtctggtcaagattgttttcaggtgagattttactttaggaaaatctggttttggtatctttttcagtgatggcgaaccgacactaggaaacttcttccctcgaggcctgttaaaacccagcctctctaggtaaggcgacctggtgaacttgtttgctttaagtgtgggcgaaatcaattacttccatgtgatgtgtggctgggagtaaatcactgctcctattaacacagctgaaactattcacaacagagacagtt

SEQ ID NO: 526712 - DNA, 658 bp, Homo sapiens
atccttcagacctccgttgccccactgcacagagaggagcttggtgctgggagcttggttggtccctgaggactcagaggagcattttgggttagggggtcctgactttttctgtgtccaggccccctttggcagtctggtgaagcctgtggactccttacagtgtttccaaatacagaagctgaaatatataggattacaaaggaagccaatcttactgaaataygttattgaaagcatcaaaaaacaaatttgtgacatagtaatctactgccttctttaataatgcattcaataaccagatctagtggcagacctaataactactataatttccaagttgtgatgagtataaacaatatttcaagagactacaacaactgatagaatatggaaacattttgatttctattagtgacagagacacaggtattgctaatactattggggcttgtaataaacatctactaagttcactcagaggttagtgaaaatctagtcatcctcccatccaagtactaagaaccctcaaaacgtatccatggatcccaggttaagagtagaagtaactggttgaaatccatgttaatgtaaatttttaaagtacaagctagaggtattttttaaaggaatagataattggggagatcaagtaaag

SEQ ID NO: 526713 - DNA, 611 bp, Homo sapiens
gacctgccagcccaggcccactcacaggactttgagctctacatggaaaaggctggaagtgatgctggaaacactcccacctgccccatttgaacctccagctcagggcacctgcgccagacctagtaggacagctctatgcaaatgtaccctggcaagggctcctgagaatgttttatgggaaggacaatggcatggggagcctaaatgtgttggctatagcaggtatgacagacagrtgggagcagaaagggggtggtagggctgatggatggttctgctgaaaacctgaattttaatctggctttagtgggcaagggaagggaggtaggggagacaggaggcaggtggcaggtagggacttagttcagataggaggctaagaggaaggagagcaaaagacagagcgggaaggaggcgagagagcagaaactaggccagggccagagaaggctgcaagagatggagaaaggcaccagaagctggggtgggaaagcagaaagggacggggagcctctgtcctctccatccaggccctgcacctgcctccctgacctacaggagcacatggaggcagggtccaaggcttggctttccagcaattcccaggg

SEQ ID NO: 526714 - DNA, 406 bp, Homo sapiens
gctggggcccttcatgctactagggacacagtgagtgatgaaaacttccccaaagtaaggatattcctatgcttggacactaaggtagagttctcaggggctagggcctgtcattccttctctttctcttcttctccacacctccacaatggaacagaaagcaacagttgtgccccagaaaaaaaatgcctcttggccttcagaaccctggggtgaaacagaatatcattcccaggaagtagctccagacataaaattctccccatattatctaccctgggttatctattttgttctttaaaataggggcagcatttttgtctaaaaaaaaaarttccaggattaaataaaacattaattaatctagaatattgcactcatctgttcacccaatgaatatatagtg

SEQ ID NO: 526715 - DNA, 611 bp, Homo sapiens
ggcatgatagagcccatgttgccagtccccagggttctaaaaccaaaagaccagctctttgtaaagcaggaacctgggggaggagaaagatcacttcattggcactcactttcccatttcctttactcattgtaattagctacacagaggcaacctcccggggagagcagagycatcagctccccaaattgaaccagggagctttgtctttttgttcctttccatataatactgctctcctggtggtcgctatgcaaacacatcctgcattcatttgcaaactggggaatatttcatattttgaggatcagattaatgttctacctccccaaaagagacactggttgggacttctagtctaacagtatcctgtcagcactcctagcaaagggtctggctcccagaatcatgtgatcgcctgagggatgaccaaaaccttgcttttctcagagcctctatgattccctcactaaaatagatcattaacagtggataatcgaatctcaaaaattgaaggcacctctggggtcacctggccctgttatggacctgaagcagaagccccaattcagcttcagagacaaatgggctctgcatcaagaccaacaggg

SEQ ID NO: 526716 - DNA, 611 bp, Homo sapiens
ggcatgatagagcccatgttgccagtccccagggttctaaaaccaaaagaccagctctttgtaaagcaggaacctgggggaggagaaagatcacttcattggcactcactttcccatttcctttactcattgtaattagctacacagaggcaacctcccggggagagcagagccatcagctccccaaattgaaccagggagctttgtctttttgttcctttccatataatactgctctcctggtggtcgctatgcaaacacatcctgcattcatttgcaaactggggaatatttcatattttgaggatcagattaatgttctacctccccaaaagagacactggttgggacttctaktctaacagtatcctgtcagcactcctagcaaagggtctggctcccagaatcatgtgatcgcctgagggatgaccaaaaccttgcttttctcagagcctctatgattccctcactaaaatagatcattaacagtggataatcgaatctcaaaaattgaaggcacctctggggtcacctggccctgttatggacctgaagcagaagccccaattcagcttcagagacaaatgggctctgcatcaagaccaacaggg

SEQ ID NO: 526717 - DNA, 593 bp, Homo sapiens
catatcttataacctctggaatcatttatgcctgcaccttagcaggactcagggtcctctcctctcctcagcctcatggtcttgcattagctttacaaaagcagtggagttttgggcaaggcctattatcattcctagcttccctgcaagccccattgaatgcagaccaacatatttttgtaaacttccttaaaatattgtttttttttttgtttttttttttgtttttgttttttgctcctgagctatcattagtgttagagtattttatgtgtggcccaagataattcttcttccaaagtgrcccagggaagccagaagattggaaatccctgactgtagccaaaaatgtcttcaaaagttagctcagcccaatagcgtaggaatagttaagggaaaggcaagttttgcaggggagtagagaggagagttagttcaccttactgttatgattttctcagtgatttaatttttgcaagggtgggttcaggttttgctgagaatatggagaggtttgggagaatgtgagagggaatcagtagaatgatgaaaatgtgggctctggattcaaactacttgcatttaaatcctgg

SEQ ID NO: 526718 - DNA, 331 bp, Homo sapiens
gtcacctgagaggctgatgattgtgtcaggcagcatgagtgttgtgcagagatggacacttggmtcaaccccagatttataattttccaggagcttccaaacccttagaattttctgaggaacaggaatgtctttattattcacacgaaccccttttgaccatatctgagtgtacactaatgcgttgactcttggcaggtccctgcagagcttcaggatagtgactggttgcttgaggaaccgtgcatgtgattagagagttggcaatttcaactccacccttatcccaacctctggggaggagagagagactagagatggagctctcctt

SEQ ID NO: 526719 - DNA, 331 bp, Homo sapiens
gtcacctgagaggctgatgattgtgtcaggcagcatgagtgttgtgcagagatggacacttggatcaaccccagatttataattttccaggagcttccaaaccmttagaattttctgaggaacaggaatgtctttattattcacacgaaccccttttgaccatatctgagtgtacactaatgcgttgactcttggcaggtccctgcagagcttcaggatagtgactggttgcttgaggaaccgtgcatgtgattagagagttggcaatttcaactccacccttatcccaacctctggggaggagagagagactagagatggagctctcctt

SEQ ID NO: 526720 - DNA, 523 bp, Homo sapiens
gtcaggagggttgcctagttatagagtgagtcactggccaagtctagagtagagcacacatctcctgcagccaggacatcagccataggcctgtggtctggtccatggtggacctggcagttccaacctcaactgccttgccaatgtgctcatgtaaccaccaggtggagcgagatcgccattcattgggaagcagggcacaggcttcgggttggactgaatgttcctttgagagggcccacgggcacacacagtggagctggggagtcctgttaaagaaagattgtgtgtgtgttgaggggcgggggtgttgtaacagagctggagttcaggagcgttggcgactgggatgaagaggggaggagggaagggcattttgctgccttcctctggccctgcctagtctggccctactggggaaagggcagagmtggggaaagggagggatctccagaggggatggcttctgcctccacctccgctctcttcaggctcagtcagggcctggaacagaccggacatt

SEQ ID NO: 526721 - DNA, 523 bp, Homo sapiens
atccaagctcttgaccacagccttacaaggccttgcatggtctagctcacctcatgccaagctccacctcctcaactgacatttcttaattcaacaaatattgagtgcctgttccaccaggctctggggtgagcaaaaacagactccttcagctctgcttagtcctctagatacttgaacatacctccttcccatccacagcctgtgcatgtggtttcccttgttctggaatccagtcctttccctctccttctttctctaccttcctgactttgcccagtcaacacctactcacccatcagatctgattacacaccattcattcagggatatcttatccgacctgaagctagtttaggtccccctgtatacgctcttaactgctccctatgtttgacttcacagcactcaccacattttctwttttaacatttgttcctgtggtgatatggtgatttggtttatacccatcttccttgccaggaagcgccaggagcttctacgtctggtttttgcttaccat

SEQ ID NO: 526722 - DNA, 510 bp, Homo sapiens
tggctgtggttgcagaaaaggctgcctgcctgtccccacccccagccaccacctccaacttgctcttgaggctcctgccaggcttcctgccctctgcggcattgtgctttgtctctgttctcctctcctacagggcaacctctgtcctcagggtccagacccatatgccggctcccccgaggggcacagagccctgggtaaggtagagkggggatggggacctggagtatgtgagggctccagggacctggtgttcttgctgagctctggaggaggcttggtgggagctacaaggggctctggagggggaagggctgggccttctcttacttctactgggggagttccagagcgtggcagaggactttgagagccgcttgttgattatagagtccacgtgtttgggcaggttaactgccgacacggagcacctgctcccacctggagggggaaaagacacggcattagggccgggcccggcaggagccagtggggggcaccgaggccttc

SEQ ID NO: 526723 - DNA, 336 bp, Homo sapiens
tgtcttggccccaggtgagccctcacctgtgcctcaggccccagcagcccaaccactattgctgagtctgtcttaaaagaggccattaaacaagacactgcccacttccaaataaaagacagcatcgcagagaaaaacatatttatccccactacccccacggcaaacactggaaacatatttcctcctctgtgcaggggtcaaactggggcctggagggttaagatarggatttccttgaaatgctacagaggaaaattggccaaggtctggcttggacagagggtcttggtgccccagtgctgaatggaatgagtaggtggccagggtcagtgc

SEQ ID NO: 526724 - DNA, 544 bp, Homo sapiens
tctgtacagagcattttaccaaagttttggtgataaaagaggaaagtcacatcacaggaaaggaaacaattaagactaaatgtcagacagcatgtcagtggtattcatcctccgccccttgaaggcagtgactcactgcccccttcgctcttggctgcagcctccttccattgggctgggctcttgttcctttctctccccaattcaaagacataagactctgacaggggctgacggtgggaaaactctctagtcctattatgttgtaaaagagaaaaatgtaaatctcatcctttcttkccctttcccatcaagaggagccccagcacctataattacatagccccaaaagccaactggagtgacttttttagcagaacatttactttcttacagaaagttttcctagatttgtgtgtttcacatggcacccttactaaaaatgcaaacaactgtgcccacaccaaatccagtgaagaagaatgtcttggtttgggacctggtaatctgtatttcaactagcacgtcccctcaccaaactctc

SEQ ID NO: 526725 - DNA, 423 bp, Homo sapiens
gagtggaaaggtcaaataagactaaagaaaatattggwcactgatgatcttggcagtagtagggtcagtgaagtgggtggtctaagtaagaattaaataagttgaagaatgaattagaggtgtgcttgctttgacagcatatttacaaaaaaaaaggaacaatacagagaaaattggcttgactcctacacaaggatgacacatctgtgaagcattctatatgccttttgtatagattttaattttgtgacaatgtttacctttacatatttaaaaacggaattaaataaacaagaatggaagggatcctaaaactgaatataaacagaaacaagtgaaccaaactatatttaaataagtaatataatcactctgaaggaaaaaaaatgaatctaaatacttttgaacatagtacttgaatat

SEQ ID NO: 526726 - DNA, 423 bp, Homo sapiens
gagtggaaaggtcaaataagactaaagaaaatattggacactgatgatcttggcagtagtagggtcagtgaagtgggtggtctaagtaagaattaaataagttgaagaatraattagaggtgtgcttgctttgacagcatatttacaaaaaaaaaggaacaatacagagaaaattggcttgactcctacacaaggatgacacatctgtgaagcattctatatgccttttgtatagattttaattttgtgacaatgtttacctttacatatttaaaaacggaattaaataaacaagaatggaagggatcctaaaactgaatataaacagaaacaagtgaaccaaactatatttaaataagtaatataatcactctgaaggaaaaaaaatgaatctaaatacttttgaacatagtacttgaatat

SEQ ID NO: 526727 - DNA, 666 bp, Homo sapiens
tatgttttaattgtacttgctaaacatttttagtagttattccacccatttaagatttttagcatatttcccttacataaatattcatttatatacacatgaactgttatataatgtgtacattatacaacacacacagagcacaagtgattgcaaaggttaggataaaattataactgcaagtagaatttattattttcttgtcatactttaacagattatcttgtgcatgtcctgtgtgtgttcgccccgcttaggagaagcccgactgaagttaaacagcgattgtcaacttctttagcactgaaataaattatgtaaattgtcaaattgtgtggcacagacatttaaaactgagcacttgcttgaattatgtaagcaaattttaatgaactttatataactgactaggcaagacccgaatattaacataagggcaagaacctggtctgtctttaggcagcagtgaactctccgcaggaggggcctagcctctggcatgactcagccattagtgcctgaatgaatgaatgaatgaatgaaagaatgcctctaaacacaagctcagggtgaatccaaatggccttggtcttagcaacacattcctgttctatttagtgggatttrtttacttgatcaaggttttgccattattattatcagttt

SEQ ID NO: 526728 - DNA, 533 bp, Homo sapiens
aaaccaaggtccacagaaatctaggaaacagaggcttagaggcaaaaaactcaaaatctgtcataaagcagaattttctctgacagacagagaaatgggaaatcaggccatattttgatgattacaactctaaaggaaaataaaaatctcagatcccccaaactcattacgccaaagggaaagataagcctggagagcctggaggctgagtcatgcaacackgccattcttttcccaaatgaatagcttgttcttcacaaccttgtgtcaaagcattgtacatttgtcagaccccacagaaaggcaaaaagcttcactgtccaagctgttcctaggtgagttctttgctggcctggaaacctttcaaaaatgtgtacgttcccataaaacaagggcatgtcaattacaactttagatctgcaatccaagtctagtaccgaaaactaaagtctgttagaattcacactgacaatgtcgataacaagtttgtcttcccaggtgcagaacatacaagaagggatcaatcattcctc

SEQ ID NO: 526729 - DNA, 520 bp, Homo sapiens
ttcacttctaattaaaaatgcaggcagtttagagtgtcaaacatattttattaaatatttggaagctattttattgaaattagagcatcttaaactcraatggcttcaaatactagctttctgaggaaaactaacaagttagcattaaaatatttctaagaaagagaaatttctattttcatttggcctaatatcttaacagcaggcagttaaagatcattacaaatagattttttctctccagaagcagggtagtattggacatcccctggttactttttctttcctttcttttttttctgtgtgtcaggagctggggtcatcttttctgtctccagcttcatggctgcttcctgagcagccagagtttccagctttaggtgctcagcttccagcaatttgtttctgtactcttcccggatgtcgaaaattttctgtcgggcttcatctaaggagtcctgttccaaagcaaaaccccaaacaaataagttccactggtaaaggcttatgttcccagaaa

SEQ ID NO: 526730 - DNA, 520 bp, Homo sapiens
ttcacttctaattaaaaatgcaggcagtttagagtgtcaaacatattttattaaatatttggaagctattttattgaaattagagcatcttaaactcaaatggcttcaaatactagctttctgaggaaaactaacaagttagcattaaaatatttctaagaaagagaaatttctattttcakttggcctaatatcttaacagcaggcagttaaagatcattacaaatagattttttctctccagaagcagggtagtattggacatcccctggttactttttctttcctttcttttttttctgtgtgtcaggagctggggtcatcttttctgtctccagcttcatggctgcttcctgagcagccagagtttccagctttaggtgctcagcttccagcaatttgtttctgtactcttcccggatgtcgaaaattttctgtcgggcttcatctaaggagtcctgttccaaagcaaaaccccaaacaaataagttccactggtaaaggcttatgttcccagaaa

SEQ ID NO: 526731 - DNA, 520 bp, Homo sapiens
ttcacttctaattaaaaatgcaggcagtttagagtgtcaaacatattttattaaatatttggaagctattttattgaaattagagcatcttaaactcaaatggcttcaaatactagctttctgaggaaaactaacaagttagcattaaaatatttctaagaaagagaaatttctattttcatttggcctaatatcttaacagcaggcagttaaagatcattacaaatagattttttctctccagaagcagggtagtattggacatcccctggttactttttctttcctttcttttttttctgtgtgtcaggagctggggtcatcttttctgtctccagcttcatggctgcttcctgagcagccagagtttccagctttaggygctcagcttccagcaatttgtttctgtactcttcccggatgtcgaaaattttctgtcgggcttcatctaaggagtcctgttccaaagcaaaaccccaaacaaataagttccactggtaaaggcttatgttcccagaaa

SEQ ID NO: 526732 - DNA, 520 bp, Homo sapiens
ttcacttctaattaaaaatgcaggcagtttagagtgtcaaacatattttattaaatatttggaagctattttattgaaattagagcatcttaaactcaaatggcttcaaatactagctttctgaggaaaactaacaagttagcattaaaatatttctaagaaagagaaatttctattttcatttggcctaatatcttaacagcaggcagttaaagatcattacaaatagattttttctctccagaagcagggtagtattggacatcccctggttactttttctttcctttcttttttttctgtgtgtcaggagctggggtcatcttttctgtctccagcttcatggctgcttcctgagcagccagagtttccagctttaggtgctcagcttccagcaatttgtttctgtactcwtcccggatgtcgaaaattttctgtcgggcttcatctaaggagtcctgttccaaagcaaaaccccaaacaaataagttccactggtaaaggcttatgttcccagaaa

SEQ ID NO: 526733 - DNA, 537 bp, Homo sapiens
tacaataatattaccctgtgttgcctcacaagtgattaaagaacaagagcacagcaagtcctgcttcccagccctctcacaggagagcatagaggcttctgcagggagaacgagccttctgcaacatacagatattcccagaaagacaattcacaaagcagtttattagtgcctgtgttttcaaggcactgctgagcggaatgccagggccattggctcctgttttattaargttcttgtctatctgactcagactcacaaattttctggccacagacttggaatttactgtaaagtgagtcatccggtatgaaccaatgaaaattctccaggcaaattcagttcagactctgagttgttatttttattctaaaatggtctttttctttattatctggaaactcatcagttaggtgagtctgagtgagtctgtgttaagaggctaaaattaataaatccatctgggtaatttcatgccaaaagccacaaccttcggttgataaaaaggaagatgtttcatttcaattggaaggtcac

SEQ ID NO: 526734 - DNA, 556 bp, Homo sapiens
agatataatagcaggaactctttatctgttttctcactgaatgtccttaagaattatatgagatgtggcactatccccattgctctagacactgagaaccaaggaagttctgttacttcctcaaggttgggattcagttccaggtaggctttaatcctgtatgttatttacatcatttccaactaataaagatgagagtgtaatttatgcacatatcacactcaagtatttcaggcggatgtcaattaactaacatctttgttataaaattataacaggttatcacaggcaaaattttccattagtgcatctatacttttgagtacagtgaaatatagacaagtaattctcaatgggaggagtcagggaagagaagcacatcaggattacctgagcaacctgttcaagcagatctcccattaccctcccctccccaacccccttcacgcrtgttagtcaatgttatcagcagaatgtgtctgactcataaacgtactgggctggggaaaaacaacaacaacaacgttgcaacctcgttttgtgtattttcacatca

SEQ ID NO: 526735 - DNA, 581 bp, Homo sapiens
tgcacgtggcgtaaaagaaccaaactcaaagaattctgcaggttcagagagcaaagagatgacacaaacaggatcagggagtgcggtgtggaagaagtggcaattgaccaaaggcttgagggatgtggcaaaatccacgagtagcgaaagtggaggagtgtcttcaccagggaaagaagagcgcgagcagagcacacggaaggaaaacattcgtaagtattgctgtcattggtaacataaacatgtattttcaaataaaaattatggaaaagattttaacttaaacatmagtgacggctagggctatagaagtagaaaagatgtctttccgatatatagattttcattttacttaatggagttgggaatttgctcaaggacctgactactaaatattaaccaaaagacaaaagtgggcaaaagcccccctacagatttgcaggtgtattttttctgtgtataggttttctgtgtctacaaatgctagaaataaaatgtcagcattcacacatacacttctcgttaaacacagatttttttgtgttatctgtagtatgctacaagatagatttcctttttac

SEQ ID NO: 526736 - DNA, 596 bp, Homo sapiens
taaataatttgtctaagtgctctcacctcttctgagtggagactgtcatgcctggacagcataaccttagtcataattagtttgggttccttttggatcctttatctccctgtccacaccccactccctgcccccaccaaaaaaacgctgggctggggattctttagcagaggctgtgggctagatagtctcagcacggagaggtctctaagtatggcagccctatgacctacatatcccaaacacctccattccagccartgcaggtactcactgcaccccaaacccatctttgtatcttgctactgcttttattctccggtgtatgccttttccaccattggtagggtttcttccctcactttaattgccccaatcctatctacccttaaaacacaattgaaactgtccaagaagcctttcatccttatctcagggggaggtgaatgctatctgattatgctctcgcatggcattttaattcatgtatcatttatttagcatcactctttactgctttctattatctatgcacatgtgtatttctcatctcctcaactacattacatactctttgaagctaaagaataggtact

SEQ ID NO: 526737 - DNA, 596 bp, Homo sapiens
taaataatttgtctaagtgctctcacctcttctgagtggagactgtcatgcctggacagcataaccttagtcataattagtttgggttccttttggatcctttatctccctgtccacaccccactccctgcccccaccaaaaaaacgctgggctggggattctttagcagaggctgtgggctagatagtctcagcacggagaggtctctaagtatggcagccctatgacctacatatcccaaacacctccattccagccagtgcaggtactcactgcaccccaaacccatctttgtatcttgctactgcttttattctccggtgtatgccttttccaccattggtagggtttcttccctcactttaattgccccaatcctatctacccttaaaacacaattgaaactgtccaagaagcctttcatccttatctcagggggaggtgaatgctatctgattatgctctcrcatggcattttaattcatgtatcatttatttagcatcactctttactgctttctattatctatgcacatgtgtatttctcatctcctcaactacattacatactctttgaagctaaagaataggtact

SEQ ID NO: 526738 - DNA, 548 bp, Homo sapiens
taagggttttctgttgttgttttttattagtacactggtgacctaagttaaatttgatattcatcctgaagtcaatgttgccccacttatttawactcaacatttaatttatatgaaaaatacaatatgtaatttgtggggtttttttcaaaaattcatgtctttataacccatgataagaaagaataaggcttgaaataatggctatgtacaacttaggatatttctattataaatgtttagaaaccttggcctctggttaacatgaggcaacagtgccacctttagtatattttaaaacctaagttttggtaaaaactgcttactgagatggttcatggtcacttaagaaaatagaaggctagagaaccttgagcagatagtacttagtgatgtcacctgccttcatgtataattactggtgttgtgattttaaattccttttgccaatatgttacagttttgtgttgctggcctggatctttgaagttgtaatctatttgtaaaaacaaatataaatttgtcattctcaaaaatatttggtttca

SEQ ID NO: 526739 - DNA, 548 bp, Homo sapiens
taagggttttctgttgttgttttttattagtacactggtgacctaagttaaatttgatattcatcctgaagtcaatgttgccccacttatttatactcaacatttaatttatatgaaaaatacaatatgtaatttgtggggtttttttcaaaaattcatgtctttataacccatgataagaaagaataaggcttgaaataatggctatgtacaacttaggatatttctattataaatgtttagaaaccttggcctctggttaacatgaggcaacagtgccacctttagtatattttaaaacctaagttttggtaaaaactgcttactgagatggttcatggtcacttaagaaaatagaaggctagagaaccttgagcagatagtacttagtgatgtcacctgccttcatgtataattactggtgttgtgattttaaattccttttgccaatatgttacagttttgkgttgctggcctggatctttgaagttgtaatctatttgtaaaaacaaatataaatttgtcattctcaaaaatatttggtttca

SEQ ID NO: 526740 - DNA, 503 bp, Homo sapiens
ggaagtgaggtgaagactccgcccagacgtttgcatggattcacggagcgggtcaccctagtcctctaatgctgttgagatacgaggttttgaatccacgttgattctgccacttgcaattttctccccagagctgcccatttgtataaagtraggctaggttgttcggtttgttttaaacccctcaggtcttcctctaagttcaaggtttcggacctccaggagataatggctcattctatgtcctttctgtgatattcaacatcagtaattttgagtgacaccccagagataataatgaaatctgtaccttttcctttacattttataaaatctgtgtaacctttataaggtgaagaagtatcaaatgttcttcagaaagttcattttaagaagggaacaataaacaagtataaacatgaacatttttaagtaggagagaatgaggaaagaaaagggcccagcctctcaaagccgggacttgagggccgcccaccacagcc

SEQ ID NO: 526741 - DNA, 611 bp, Homo sapiens
gctataaatgtgaggaaagtttgtacacatggttctgagatacgacttcagatttacatttttttctcaacgttataagaaacgccatggcagaggaataagggggcaagcgtgtgggtggattcatgtgaagacggatcaatctgcacagacactgggaatcagacaacagaagctggacacagggagccacaggcaggtctgcgttcacttctgaagatgggcgatgggccacaaatgtggttccatgtgagcgaagaaagaaaaaaccaggtaattaggtgtaaaaaaactgaacatgggggttagattttgagtggcacattagacccacaacaccaaatgcaagcagggcatcataaaatagtaaaattggaaaatatttggtgatatgtgtctgcccaacacagggaccccattgaggtaatatcaaycctaccattctaaaactgaaaacgtgcccaaagacattagaattattagtctactcactccaacaacacgtttccatccttgctcaaagtgctacgaatatgttaattagtactttactttaaaacgtaaatatgtatcgcaaggcttatggtaggaagagggagtttagcaaaaga

SEQ ID NO: 526742 - DNA, 570 bp, Homo sapiens
tggccaggcctggcctcagcctcccctactgtggcatccagcctggacacccacctcagccagcagtttaagccctgggatttgggcattgaaccccagctccttctccttccctggaggacaccttggcttgatacctttatcagcacctctcttacttctggaaaaagcaacaccatgttctattccttgtctttaataattgcatgggaaaaaactacttaaactgtatctaccgtaaaacgttctccraactgaccatcagagagagtttagaagcatggaagggatctgtcattcccattcttcaatgtaccacatttgcttgaagagtacataataaaaataaggagaatgattattttgccaccaaattctgcacactcattggtggaagaagcttggggcctgtgggctgtagagaccctggggagagcctgcatcacaaaggtgaagaaggggcctccggaggtgccagggacaggacccgggcaacagaggcaggcatgggggtcacactgactctcagtgtgacttacgccggccacagaagtgcagttctgccctggt

SEQ ID NO: 526743 - DNA, 611 bp, Homo sapiens
gaaggaagcctattagaattaaatgtattcaatatattagagtcaaaatcatcaaacaatttagttttaaaagtttgatggaaaatgaagcgcaattttaaattctttattttaactgagtgcttccagaaaacagttttctctctcacaaaaggaaacacagtataatctctaaaatggttttaaaggaaaaatataaaaatatataaataagtaatcttaaaaccctaaattgrctcagttttataaaacactggtagcatcctcattttatctgtaatgcctctactcaaccccctaaaacttctctataaaaagataaatgtatgctatagaaaggaagcaattctctcctccaaaattgcaagatcggttatgcttccatgtcctccacctccagctaagtcaatctctgtggctgctaaactataatttggccccaggactgctgtgaaatctgtctgttgaccagtataagcagtccatcttacaacaggaaggcccagatataatcaaaaggtgatttgttgctgaattttctcaaaaagaaaataaaagaaacaaagtcacagaggaaacctggccaaagaaagtacagcctgtgaaaattc

SEQ ID NO: 526744 - DNA, 611 bp, Homo sapiens
gaaggaagcctattagaattaaatgtattcaatatattagagtcaaaatcatcaaacaatttagttttaaaagtttgatggaaaatgaagcgcaattttaaattctttattttaactgagtgcttccagaaaacagttttctctctcacaaaaggaaacacagtataatctctaaaatggttttaaaggaaaaatataaaaatatataaataagtaatcttaaaaccctaaattggctcagttttataaaacactggtagcatcctcattttatctgtaatgcctctactcaaccccctaaaacttctctataaaaagataaatgtatgcwatagaaaggaagcaattctctcctccaaaattgcaagatcggttatgcttccatgtcctccacctccagctaagtcaatctctgtggctgctaaactataatttggccccaggactgctgtgaaatctgtctgttgaccagtataagcagtccatcttacaacaggaaggcccagatataatcaaaaggtgatttgttgctgaattttctcaaaaagaaaataaaagaaacaaagtcacagaggaaacctggccaaagaaagtacagcctgtgaaaattc

SEQ ID NO: 526745 - DNA, 611 bp, Homo sapiens
gaaggaagcctattagaattaaatgtattcaatatattagagtcaaaatcatcaaacaatttagttttaaaagtttgatggaaaatgaagcgcaattttaaattctttattttaactgagtgcttccagaaaacagttttctctctcacaaaaggaaacacagtataatctctaaaatggttttaaaggaaaaatataaaaatatataaataagtaatcttaaaaccctaaattggctcagttttataaaacactggtagcatcctcattttatctgtaatgcctctactcaaccccctaaaacttctctataaaaagataaatgtatgctatagaaaggaagcaattctctcctccaaaattgcaagatcggttatgcttccatktcctccacctccagctaagtcaatctctgtggctgctaaactataatttggccccaggactgctgtgaaatctgtctgttgaccagtataagcagtccatcttacaacaggaaggcccagatataatcaaaaggtgatttgttgctgaattttctcaaaaagaaaataaaagaaacaaagtcacagaggaaacctggccaaagaaagtacagcctgtgaaaattc

SEQ ID NO: 526746 - DNA, 657 bp, Homo sapiens
ttcttcatggccgtaaaacttctccaggaaaggggacttatggcaatcttcatttctgaaaagcttctgcttttagctctgggaaggattctttctgcatctgttggatctcaaatgcttttggttcaaaataatccatatgccaaagtggcatattttggggttgcatattttgatcccctacagaaacaccagagagtgaaagaactgatgaacacacagctttatggaatatagaatacagcactttatttttattatttttatttttttatttttaaatttttttatttccacaggttattggggaacaagtcgtgtttggttacatgagcaagttctttagtggtgatttgtgagattttggtgaacccatcacctgagcagtatacattgcaccctatttgtagtattttattcctcacccccttctcttctttccccctgagtccccaaagtcattcttatggctttatatcctcatagcttagctgtcacttatgagtgataacataygatgtttgattttccattcctgagttacttcacttggaataatagtttccaatctcatccaggtcgctgtgaatgccattaattcattcgtttttatggctgagtagtattctatcatatatatatgccacagtttcctta

SEQ ID NO: 526747 - DNA, 565 bp, Homo sapiens
gcactgtgagtagagaagctctgactctccaagtgctgtaggtaggacagttaggtaggggcctagactttccatggtgtgtatttgccagcacctacttgtgccctggagctataggcatactagccatgagtacccttacatgagaagagcagggcaagagattttgatatggtgctggactggcttattgttggtttggtggagggagaggcagcctattcctaaatggatacttctttgacaatataattgggttgatggcagagggcagatggccacagtattacagccttctttttacctgtgtttgttgggtcccgagttcttgtcccacatccaagaagaatgaggctactttgacaatcgaagggtgaggagggtggagaagaattttattgagcaacgaaacagctctcagcagatgggggatgtgagggtgatccttcacctgaagtttggtggtctgtctctcagtgtggctgggtctggggcttttatgggstcagaatggggagtgcgtgctgattggtttgtgagtatgaaaaaaaaaaaaggctaaaac

SEQ ID NO: 526748 - DNA, 565 bp, Homo sapiens
gcactgtgagtagagaagctctgactctccaagtgctgtaggtaggacagttaggtaggggcctagactttccatggtgtgtatttgccagcacctacttgtgccctggagctataggcatactagccatgagtacccttacatgagaagagcagggcaagagattttgatatggtgctggactggcttattgttggtttggtggagggagaggcagcctattcctaaatggatacttctttgacaatataattgggttgatggcagagggcagatggccacagtattacagccttctttttacctgtgtttgttgggtcccgagttcttgtcccacatccaagaagaatgaggctactttgacaatcgaagggtgaggagggtggagaagaattttattgagcaacgaaacagctctcagcagatgggggatgtgagggtgatccttcacctgaagtttggtggtctgtctctcagtgtggctgggtctggggcttttatggggtcagaatggggagtgygtgctgattggtttgtgagtatgaaaaaaaaaaaaggctaaaac

SEQ ID NO: 526749 - DNA, 561 bp, Homo sapiens
tacaggcattcttgattctggaaagtttctagatcttttctttagtagaactattactaagaagtttgcattaatataccatgcttacatgattttcttcctctttttttttttttttttttttgagatggagcttcgctcttgttccccaagctgaagtgcactggcatgatctcagctcaccgcaacctctgcctcctgggttcaagtgagtctcctgcctcagcctcccgagtagctgggattacaggcgcccgacaccacacctggctaatttttgtatttttagtagagacagggtttcaccatgttggccaggctggtctcgaactcctgacctcaagtgatctgcctgcctcggcctcccagagtgctgggattacaggcatcagccaccgcacctggcctttactctattttttatatagagacacaggaaatacaattygcctgaagagaaaatgtgatctaacatgacaaaaagaataaaatgaatattctccattaagtctgttctgttataatccaattgtcacagatttaagaaatactgccttatac

SEQ ID NO: 526750 - DNA, 623 bp, Homo sapiens
gctcccagcccccagcccctagccccagttccccgtcctaactgaacactactacagaaaagtccagaaagaagacagcagttcacttatcatcttgaaacttcaatcagatcatgccattctgcttaaaaccctccattgctctcctataacatttagaataagatacagaatgtccacaatggcctctaaagtctgtggggttttcctctacccacagcatcccaccctattccctgctcactgctatctagccccatgaaaaccctttctgttcatggaagatgcgaaacctttttctgcctcagactcttgtacttgttttcccttctgcctggaatgcttccccatgcccagttctttggatggagaggtcattctaatgcttcargacccagttctaaggtgttaagaatattctatatcctggaatttgtgcaccttattgtatggatgtcacatctcggtaaaaggtaaaatgtaatgtattactaattcactactagatcacccttttgatttccttcctgacaatgatcacaaaccataattatcatattaacttgtttacttgtttactgtctgtcttccacttagatcaggaggtggcaaactatgccacc

SEQ ID NO: 526751 - DNA, 529 bp, Homo sapiens
acattggagtccaaaaactcaccttcatgttttagacctttgctgaagtcttcctcacataacactctattcccttttccccaggctaaaggtgcatggaataggtggatggttttccccagatgycaagaaatgccaaaaaaattgtctcccctgccctttactattatttaagaaacagtaatatttatgactaagaaggcatcaagacatttggcttttgaagaatgtgtcacctccatggaggggtgaggtgaaggttgtcactcttgacatacgcctggctggggcagcaggtacatgtagggaagaattaaaaataagtttgataattgattacaatttttcaggcatgaaaagctgagatcgacagttcatctcagtccatcttttgggactaattttcttcttgtcattcaggtcttagcacatgtcaccttctcagagaggctgtccttaagcaccaaatctctcccaccccactctattactcttatcacatcacaccgttttatttgttttattttgt

SEQ ID NO: 526752 - DNA, 609 bp, Homo sapiens
gaaacgatacaaattttattaatatacaacgggaaatttgacagtttagggaatcaggtactcaatcttttgattctcttctgcacttatggtatatgagaagccagattataatcacatagttatttgataacacaaatatacaaagaacaaggagtgctgattttrtaatgcagtgttcagggacatgaagacttgactgtgtactcattgggccatgtttcttaaaatgaagttcaagagtccctcaaaccagaggtacataaagcccaggataaatatgacacatctgcctagggtaccaaagatttggggaataaaaagctaaataactgaattggtaatttaaaaaaaaaaatttacactaaaacacacagatatattattaattaggatgcaaaaaattgcatggattttttttttttaaagcatgaagcctccaagaggatttgagcttgaagtgggcagctttaggcttagggtaagcagaatagtggagtcaggagcacaggcttgtagttggacagaccagggttttgagaataagactcttgacacttattagctatgtgatcttcgaaaagtcatgtaacttgtccaagctctata

SEQ ID NO: 526753 - DNA, 600 bp, Homo sapiens
ctgggatcaccatgacaccagtgaatactgagtgcacacaataacaaatacatggaatgactgactggactgctgagttttttatgtttttaatgaagtctgacatatgaaaaggaaagtgcgtaagttctgagattaattatcagagtgaatacacctatacacacctatagccaccatcttagtcaagaaacaggacatggccagcacccggaaagtccctttaacccctcccaattatayttcctccctctctctagaagttaatgtcctaaattccaacaacatagattagttttcctacttttcaactttgtgtaaatggaatcatagtgtctattctttctgtgcctggattctttcattcaacactatagttgagagatttgagagattctccatgatgtcctatgaggtggtagtttgttcactttgaataatgtactgttacataaatttttctttctaccatgggtggatatttgggttgtttccacgttggagctgtcatgaaaagtatattgtaatgaactttcttgtatattttttgaagtggggcctcaatcagaaggatttgggcctcctttgtacatttcttga

SEQ ID NO: 526754 - DNA, 559 bp, Homo sapiens
ttgtggattaacccctaaatcaacaaataattactggtggtctgctgtgcacccagaattgcactaggtttgtggaatagataagatattgcttgcttattgaaaattacttatagtctagttagtgaatgcatgtgtagttaatacaatcacaagtttatcttttctcaattttttttggtagggatggggtctcactattttgcccagackggcctcaagatctcctggcctcaagagatcctcccaccttggccccccagagctctgggattacaggaatgagccatgtgccaggccaaaagtttatattttatgaaacagaagttacccccagtacctgattaaactttttgttatttctgatctgattggctaaaaatcaggtatctgattttaatttgcattcccctgattactagtgagactaagcctcttttaatgtttattggccattctgatttcctcttctgtgaattcacatcacccacttttctttgaatttctgttttatacagactttatacaatcataaaaaacaatattagcaaattattac

SEQ ID NO: 526755 - DNA, 559 bp, Homo sapiens
ttgtggattaacccctaaatcaacaaataattactggtggtctgctgtgcacccagaattgcactaggtttgtggaatagataagatattgcttgcttattgaaaattacttatagtctagttagtgaatgcatgtgtagttaatacaatcacaagtttatcttttctcaattttttttggtagggatggggtctcactattttgcccagactggcctcaagatctcctggcctcaagagatcctcccaccttggccccccagagctctgggattacaggaatgagccatgtgccaggccaaaagtttatattttatgaaacagaagttacccccartacctgattaaactttttgttatttctgatctgattggctaaaaatcaggtatctgattttaatttgcattcccctgattactagtgagactaagcctcttttaatgtttattggccattctgatttcctcttctgtgaattcacatcacccacttttctttgaatttctgttttatacagactttatacaatcataaaaaacaatattagcaaattattac

SEQ ID NO: 526756 - DNA, 518 bp, Homo sapiens
tagtagaaaggcttttctgaactccagggatgcttagtctctggaaatcacactgaatccacatctcaagctgactccaagggtcattatgcttttgctgtttgagcccttagcttcttagtagctgtactaaattgtggatagtactgacacaccttgggcatttgcagtgtggggggctttttcagttacartgactgagtgggtccagagatgcaaatgtcctgccttgcataaggtagttctgcacagtgaagaagtgtcctgccttggaaaccataatatttctgctgagggccaaggcaaaaggagcagtttcctatcactgctcgtctgtgaagttggaggcacatttcccagagcacctagtagtagaagaccagtgacagatccccaggtttttgtctgctgtgctatgtgagacctatcctgctcctgcacaggaatgtctccagcccttccttgcctggataccttccacctgcagataacgccttccttctgtattatagtacaag

SEQ ID NO: 526757 - DNA, 650 bp, Homo sapiens
tttatcatttaactatacttacattttagcagaattcaggcccctctcagaatactaatcttgtgacctttcattgtcttacaaagactgtttcagtctccaaacaaggagsggatcagttttaggaagcgactattattatccttgcttcacaattaaactgtaaactaaattcttctcatggttagcttcgtccatgcccaggaatgagcggagacagccagcctgtgatgctagaggcaagacggaggcggccatgccagacttctctcacgtcataatctttgcaaaggcagtttcacaatggttgtcttggttttataacaactcactgtatcaggaactaattcagtctcatgagtactaatcctgtcccactagagcaagaatttactgctgaaagaactgcaccaagccattgatgatgacctaagcatctcccactaggttttccctcccaacaccaccacaagttttaacataagatttgccagggataaacaagccgtatccaaaactagcacgtccccaccaggagccaaatcaacaacaccttgatcttgagcttcccagcctccagaactgtgcaaaataaatgtttgttgtttaagtcacccagtctatggtatttattatagcagcccccaaac

SEQ ID NO: 526758 - DNA, 650 bp, Homo sapiens
tttatcatttaactatacttacattttagcagaattcaggcccctctcagaatactaatcttgtgacctttcattgtcttacaaagactgtttcagtctccaaacaaggagcggatcagttttaggaagcgactattattatccttgcttcacaattaaactgtaaactaaattcttctcatggttagcttcgtccatgcccaggaatgagcggagacagccagcctgtgatgctagaggcaagacrgaggcggccatgccagacttctctcacgtcataatctttgcaaaggcagtttcacaatggttgtcttggttttataacaactcactgtatcaggaactaattcagtctcatgagtactaatcctgtcccactagagcaagaatttactgctgaaagaactgcaccaagccattgatgatgacctaagcatctcccactaggttttccctcccaacaccaccacaagttttaacataagatttgccagggataaacaagccgtatccaaaactagcacgtccccaccaggagccaaatcaacaacaccttgatcttgagcttcccagcctccagaactgtgcaaaataaatgtttgttgtttaagtcacccagtctatggtatttattatagcagcccccaaac

SEQ ID NO: 526759 - DNA, 650 bp, Homo sapiens
tttatcatttaactatacttacattttagcagaattcaggcccctctcagaatactaatcttgtgacctttcattgtcttacaaagactgtttcagtctccaaacaaggagcggatcagttttaggaagcgactattattatccttgcttcacaattaaactgtaaactaaattcttctcatggttagcttcgtccatgcccaggaatgagcggagacagccagcctgtgatgctagaggcaagacggaggcggccatgccagacttctctcacgtcataatctttgcaaaggcagtttcacaatggttgycttggttttataacaactcactgtatcaggaactaattcagtctcatgagtactaatcctgtcccactagagcaagaatttactgctgaaagaactgcaccaagccattgatgatgacctaagcatctcccactaggttttccctcccaacaccaccacaagttttaacataagatttgccagggataaacaagccgtatccaaaactagcacgtccccaccaggagccaaatcaacaacaccttgatcttgagcttcccagcctccagaactgtgcaaaataaatgtttgttgtttaagtcacccagtctatggtatttattatagcagcccccaaac

SEQ ID NO: 526760 - DNA, 650 bp, Homo sapiens
tttatcatttaactatacttacattttagcagaattcaggcccctctcagaatactaatcttgtgacctttcattgtcttacaaagactgtttcagtctccaaacaaggagcggatcagttttaggaagcgactattattatccttgcttcacaattaaactgtaaactaaattcttctcatggttagcttcgtccatgcccaggaatgagcggagacagccagcctgtgatgctagaggcaagacggaggcggccatgccagacttctctcacgtcataatctttgcaaaggcagtttcacaatggttgtcttggttttataacaactcactgtatcaggaactaattcagtctcatgagtactaatcctgtcccactaragcaagaatttactgctgaaagaactgcaccaagccattgatgatgacctaagcatctcccactaggttttccctcccaacaccaccacaagttttaacataagatttgccagggataaacaagccgtatccaaaactagcacgtccccaccaggagccaaatcaacaacaccttgatcttgagcttcccagcctccagaactgtgcaaaataaatgtttgttgtttaagtcacccagtctatggtatttattatagcagcccccaaac

SEQ ID NO: 526761 - DNA, 617 bp, Homo sapiens
gttctttatatattcccaaaagaagatttttactaaatattttttactattttctcccctgttaatgacatatctattcctattattgatgtcttttgataaagagaagttttaaatttttctgaagtccaatttttatcaattttgccctttttggattctgctttctgtgacttttcttttctagaaaatatttgtcaacacaagtcatgaagattttctcctatgtttacttctagaaatttaaagatttggttttcatatttaggcctatgatccattttgaaataatttttgtggatggtataagtgaggtaggaagcaaggttcattttggttttcttgaaagatagtcatttcttccagcactattttccatttaattcttttggtaattcagaaaytagttgactatattaatgtaggtctatttctggtttctatccattccatgatttatttgcctatccctacatcaatattacagtgtcttgattactgtaagctttatggtaaattttaaaataacttttttctgttatctttcaaaatttgtttatgctaggtcttttgtatatctacataattttttaggtcagcttgttaatttctaaaaa

SEQ ID NO: 526762 - DNA, 617 bp, Homo sapiens
tgcagccttcccctcaggtttaggtgatcctcccacctcagcctcctgagtagctggaaccacgggygcacaccgcgaagtctggctaacttttaaaatgtctggtcaagacaaggtctcactatgttgcccaggctggactcaaactcctgggctcaagcgatacacccacctcgacctcccaaagtgctgggattgcaggcaccagccactgcgcctggccaaaaaacctaaatcttaattataaccatgattataataaaaataaaatgtaagtacaagccctttatttcaacagtctcttttcagtgcaggctaggtcctggactctataatctgatagggagcagagattgtcaggtttttatattttaagggccatggagaagaaaggcagaaaacatctccattggcaaaatagaggaaaaacaagtagtttggatctcttggttttggatagtttactctctgtgatgacatattaaggttggaggctagatgtcaaacctaattcttaatttaaacattgttcaaatttctaaaatgcatcccagcctctcctcccaaaatgaggagaaaccatgacatcaaattacatctgctgtaaattatctgct

SEQ ID NO: 526763 - DNA, 617 bp, Homo sapiens
tgcagccttcccctcaggtttaggtgatcctcccacctcagcctcctgagtagctggaaccacgggcgcacacygcgaagtctggctaacttttaaaatgtctggtcaagacaaggtctcactatgttgcccaggctggactcaaactcctgggctcaagcgatacacccacctcgacctcccaaagtgctgggattgcaggcaccagccactgcgcctggccaaaaaacctaaatcttaattataaccatgattataataaaaataaaatgtaagtacaagccctttatttcaacagtctcttttcagtgcaggctaggtcctggactctataatctgatagggagcagagattgtcaggtttttatattttaagggccatggagaagaaaggcagaaaacatctccattggcaaaatagaggaaaaacaagtagtttggatctcttggttttggatagtttactctctgtgatgacatattaaggttggaggctagatgtcaaacctaattcttaatttaaacattgttcaaatttctaaaatgcatcccagcctctcctcccaaaatgaggagaaaccatgacatcaaattacatctgctgtaaattatctgct

SEQ ID NO: 526764 - DNA, 617 bp, Homo sapiens
tgcagccttcccctcaggtttaggtgatcctcccacctcagcctcctgagtagctggaaccacgggcgcacaccgcgaagtctggctaacttttaaaatgtctggtcaagacaaggtctcactatgttgcccaggctggactcaaactcctgggctcaagcgatacacccacctcgacctcccaaagtgctgggattgcaggcaccagccactgcgcctggccaaaaaacctaaatcttaattataaccatgattataataaaaataaaatgtaagtacaagccctttatttcaacagtctcttttcagtgcaggctaggtcctggactctrtaatctgatagggagcagagattgtcaggtttttatattttaagggccatggagaagaaaggcagaaaacatctccattggcaaaatagaggaaaaacaagtagtttggatctcttggttttggatagtttactctctgtgatgacatattaaggttggaggctagatgtcaaacctaattcttaatttaaacattgttcaaatttctaaaatgcatcccagcctctcctcccaaaatgaggagaaaccatgacatcaaattacatctgctgtaaattatctgct

SEQ ID NO: 526765 - DNA, 588 bp, Homo sapiens
aggagatttcacatccagttctggtctctcttgcacaatgggagacctgtcaacactgagcatgtacaatcaggtggtgctgtgtggtggttgcccctttcagatggatgtgtgccatctaggctaccaaagtactctctctccaaagccagcttcacctacttaggccaccagcctggcccccttgacatctgactttgagacccatggtgagacacccccaagatgaggccctagggtggaccctcagctaccctcggcagagaagccttcctgttttgcccctgctggcagccggggcctcctggaatgccctatgtggccagagctgaaacatcacccgcctgatcggttgcagctattaaaatgcctgtatcagtatcaaagggaaaatgccaggcagctactcactccccccagagaatgtggctccagcctggtcttgggtttagggaacactccctccctgtgtctcagcctcagggctcttaaaacgtcctagctcaacctgggcctctgcaatacrtggggtgggtccaagctgtggcatagacacagcccagagggagaagccaggtgagacctgca

SEQ ID NO: 526766 - DNA, 468 bp, Homo sapiens
gaccgttagcatgcccgtgtcctcactgtgcacgtcagggagggccagcaggcaggcaggggcgggcgtggatggccactgtgcaccctgcctgaggcccattggcccgtcctggtttctgtttagcagtgagttaggcacttcacccctccagggtctgccacccacagcctctttctcaaagccccctctcgggctccggccccaccctcctccatgcctctctctgttcctttctctttctggtgtccactccccacctccctcccacggccgcagcagcagccctatctcattactggcaacagccaagaatgacaaattcaagtgttccgagrgggagaaaaaaggaataggggtggggagcgggagggaaggtttagaaaagcagtcccagaaagatagggaaggaaaggcgcttctgcggaacatgagccacgaaaccccaccctcccggtgattcccagc

SEQ ID NO: 526767 - DNA, 421 bp, Homo sapiens
gtttcatctttttcatgtgactatgacttatgcagacaatactgatttagaatacacatacatgcatggattgtgacatctcactcattaaggagatatataaagatacagggtaggtgagagacagtagaaagtcatgtagagtaatcttaggaggaggaggaagatgagggaccggtcttactgtctcagggtggggacagaggtggaagaaaattcatatataaatggacccatgcagytcaaaaccaggttgttcaagggtccgctgtactataaatgaaaaaatactgtagaaatttttgaggacatgtttcttttctggtttttttttttttttttttttttttttgtgatggagtttcgctctgtcgcccaggctggagtgcagtggcatgatctcagctcactgcaacctccg

SEQ ID NO: 526768 - DNA, 599 bp, Homo sapiens
tctctactttagacttaatattataaatgatgttactgacatgcagatatgtttagtatatttcttatattttaatttaaacttctggaatgtacatattgtcactaagtctttcctaatagtattaagttctaaaatgagagttacattccactacatatggattataatcatggaagacacatactcaaatgccatatctttaaatctgtagaactctttacaacaaatataatggcaattaagttttgctgaatgccacaataagctgctccttaagtttgcattctgatcaatcctattaacatttctattttgatgttcatttccagagatgccatctcgcttcccattctatacaccacacaaattgcatattctgagaagtcttgaatattattgtaaataggaaatatattttgaaatgataaattagcatattctaattatttgctcacccactccaaattatggtttattcctatctttcacacttattactgcatggccaacataattgcagawataaaatgtgatggcttttgaagatgtaagtttggaaaacagaaatcatagagtttgccctctatctggaggca

SEQ ID NO: 526769 - DNA, 462 bp, Homo sapiens
tatgaatgcaagaaacaaatcagaaaggtggtctgagtaaagaaaagagttaagattttaacttcgaggaagataataagaggctgcgagaggaagaaaatcctatgcaaataaayaaaactgaagaactgataagataggtagaaaaccaagtgtaattaatgaagttaaaggagttaacatttttatataaagttttcaaaagatttccataaagcaaaatgccacaaaaagggcaaggcataaaaagtaagaactgacattttgtccattgactttgactacacagaggatgctgctacattttaggacttgacattacctgtggagtggtaatgtcactccacagtatcagattgcattgaattaaaggttggtcagagagaaataagtagatagagaggtgaaatagaaaacaggagttacctatttttttgttttgtttaagtatatacatttatg

SEQ ID NO: 526770 - DNA, 462 bp, Homo sapiens
tatgaatgcaagaaacaaatcagaaaggtggtctgagtaaagaaaagagttaagattttaacttcgaggaagataataagaggctgcgagaggaagaaaatcctatgcaaataaataaaactgaagaactgataagataggtagaaaaccaagtgtaattaatgaagttaaaggagttaacatttttatataaagttttcaaaagatttccataaagcaaaatgccacaaaaagggcaaggcataaaaagtaagaactgacattttgtccattgactttgactacacagaggatgctgctacattttaggacttgacattacctgtggagtggtaatgtcactccacagtatcagattgcattgaattaaaggttggtcagagagaaataagtagatagagaggtgaaatagaaaacrggagttacctatttttttgttttgtttaagtatatacatttatg

SEQ ID NO: 526771 - DNA, 607 bp, Homo sapiens
accaccccatccaggaccattttgttttgtttttttgctactctttctgttgttaatgccttttcttctcatttgttgctaatcacagatacacggactttgtgaaactaaatgttattcatcattcatcatttatgatacttgctcataaaactacttctccaacatccttggattagcatagccccatttgtaataaaatctagtaacagctgctattttcttcagtagcatattttgcagtataaagcatttaatattaaatatttttctaaaattttgtgaattttatcatctactcactaagctgtaaatttcttgagaacagataatgtgctactgttttttaaaccattgaaaatatagtattagaatggtgcctaaaagagtgagttgtcatgtgtgtttttatgccagtactatgctgctttaatcactatagctttggcatatattttaaaatctggtactgtgatgcctccagctttattcttttygatcaaaattgcttttgctattttggcactttgtaattccataaaaattttaggacttttttttctatttatctgcagaatgacatcaaaattatgatagggatttcctt

SEQ ID NO: 526772 - DNA, 607 bp, Homo sapiens
accaccccatccaggaccattttgttttgtttttttgctactctttctgttgttaatgccttttcttctcatttgttgctaatcacagatacacggactttgtgaaactaaatgttattcatcattcatcatttatgatacttgctcataaaactacttctccaacatccttggattagcatagccccatttgtaataaaatctagtaacagctgctattttcttcagtagcatattttgcagtataaagcatttaatattaaatatttttctaaaattttgtgaattttatcatctactcactaagctgtaaatttcttgagaacagataatgtgctactgttttttaaaccattgaaaatatagtattagaatggtgcctaaaagagtgagttgtcatgtgtgtttttatgccagtactatgctgctttaatcactatagctttggcatatattttaaaatctggtactgtgatgcctccagctttattcttttcgatcaaaattgcttttgctattttggcrctttgtaattccataaaaattttaggacttttttttctatttatctgcagaatgacatcaaaattatgatagggatttcctt

SEQ ID NO: 526773 - DNA, 497 bp, Homo sapiens
gtttattatgtctttgagcacttctttttaaatgttatgctttctattttttttctcagaatgctgaattttgctgtttgctcttcattatctaacttactagaatcttctttataataattttaatgtctttggtcttttgcatttctttttttttgtcatttctcaggtctagctaccatttttatgttttgtaatattgtatctgtgttactctaatatgactttaactcctataatattttttatttttataattttatgctggtctctgattattttctattwtcttttgccttatattctcttttaagagctattttatctttattttgagctctctctcagtaaatatcatactctcttttctattcctgcacctgatcattttttagagtactcttgagacatttctgttgtagtatttgttatttaacttaactgcttacatttattccttcaattaaaaaaataatgctctttttaatgctcttctt

SEQ ID NO: 526774 - DNA, 590 bp, Homo sapiens
atattttctatgtacttatagtttcacgtatcacaccattattttttacatgtctcagtagaatgtgggcacatcaagggctgtggcttgtagagctataggcatttcaatactctgactttgctaggagatactttgttccagatgagaacayatacttaacacctgaaataatcaaaagcatgtttttatttccaaactattaccacgctgtcttcctaatcggagtgtactgaggttaattttatctgcctttttgactcatggtcattatttacaactgttgtcactgaggtgtttttcaggtctgttgatatttggagttatgctttcttgaaattttttacaattatttttacacttatttctttttctctctgcctttgtcatgtgttacagcgttctcttcttgttgttaatgtgcctgtccttaggacatctcccatgccaaagtttatctgaatatatatatatatatatttatatataattttatatatatatttatatataattttatatatatatatatatataattattcttcaaactcaagtctctaaatctattctgaatgagataagtccttc

SEQ ID NO: 526775 - DNA, 613 bp, Homo sapiens
atgttgtctttcactggaggttaagtggaatagaataattgtgggctttgtcaaacatgttcaaatcctggctttgccatcttctagctctgtgaatttggatgatacacttaatctccttgagtctcgtgttgctattttgtgaactaaggataatatttcttctgccaygaatttaatttaagattaaatcagaatccatatacaaggagcttaaaaaatatgctaagataataagataggctagctccccacctttgtccttgaccgtttcttctaattcatttattttttctcctcaactgttttaatacttagagctaagttagatgtctctttgtaggtaacttaaaagttctaatatgatgattttattcattttttaatccaaaaatgactttagggtttaacttttagaagttacttactaaataagtaaaataagttatttactaaattaataagttactaaataagtaaaataaaaatgtgcatgtttattcaaatgaatcagtttttctattctgtttattttttatttttaaatttacacattgtaattatacatattctggggtaaaattgatcttttcatatatatatgtatgttgta

SEQ ID NO: 526776 - DNA, 589 bp, Homo sapiens
tgaagtccacgactgagccctgcgagagtgctcacatttatagaagagacaccatcaaaagaaacagaagagaccaagcagtaagagtgcaagagaggcaccaatagtgggccatatcacagagaggagaaagagtctcaaggaggagattgccactgatgtctaatgattcagcgttcaacgggataaagactgaaaatggccctgggtttgcccgttacgaggttattgatggcctttgagaatgtagtacaagtaagacaactcgayggaaggccagagtctaggggactgacagagtaggtggtaaagcatggaggaaaaacttgacagtgaaagaagggtgatgagataggacagtagctagaaggtcaggtgaaactaatttatttttgttttaaaatagaagagactgggggttgggggggaggagctagggagggtaagcagagagagatgtccccagtgggcctgctctaggttagatgctcctgctcatggcctctctggaactccaggtttccctctcatagcacttgccacattgtgtggtggtcatcaatctgcgtgtctgtgttctggacactgt

SEQ ID NO: 526777 - DNA, 589 bp, Homo sapiens
tgaagtccacgactgagccctgcgagagtgctcacatttatagaagagacaccatcaaaagaaacagaagagaccaagcagtaagagtgcaagagaggcaccaatagtgggccatatcacagagaggagaaagagtctcaaggaggagattgccactgatgtctaatgattcagcgttcaacgggataaagactgaaaatggccctgggtttgcccgttacgaggttattgatggcctttgagaatgtagtacaagtaagacaactcgatggaaggccagagtctaggggactgacagagtaggtggtaaagcatggaggaaaaacttgacagtgaaagaagggtgatgagataggacagtagctagaaggtcaggtgaaactaatttatttttgttttaaaatagaagagactgggggytgggggggaggagctagggagggtaagcagagagagatgtccccagtgggcctgctctaggttagatgctcctgctcatggcctctctggaactccaggtttccctctcatagcacttgccacattgtgtggtggtcatcaatctgcgtgtctgtgttctggacactgt

SEQ ID NO: 526778 - DNA, 634 bp, Homo sapiens
tattgtaattgcaatttggagagattctagagccttctgttttaaggggtctaattcagtgtgggccagtttgcaagtaggagcataaatgggcttaagtaaaaagtgatacttgttaatgaggaatatcttccatccgaaaccccaaaaggcctaaaaatgttagttttgtcttaacattgtggatactgacaggtcattgtttctcgagcgtgtcagtgatgaagtagcctttgatcaaataatgctcagaaatttgactacactggggarccttgcagtttgtataagacaatggtctattctttcttgtgagctcctttttgaatgtttattcatcctgaatgagtgtgtcaaaggaatctccttggaagagcatggcatcaatgtaatgtcatacctattttcccacagaaacttggatgcagtaaagatctgcctgcagagggattgtttgtgacagcaggactgtttaagtattctatgtgtagtcaggtagagaattttgagttcttttgaagataaagaaaagctataagcctttccctgtaactgtggggatcgggatctgtgttgttacagaggcataggcagcaacagcagcaggagcatttttgtgggtggccaaatgagc

SEQ ID NO: 526779 - DNA, 521 bp, Homo sapiens
ctgtagtttctcctttgaggatccttaaaaacaatgtgaattgggggaaggcacagtcatagttatatacaggcatttgcattttagggcttgaccaactaaaaagccatgtatcagtaaatgaacgcgtatcagcaaacacttaagtacattataaatgccaaaagttccttgaattgttacttcagggtcttcacagttaagagtacccatatcctaccttattcttgctttactgattaaaaaaaaaaaaaaaaaaaaaacctgaggcaagkcagggggacacagacttaggatgtaatcaacagaggaagaaataagaaatccaccttttaagcgccgcacagcacccacagaacaagattgctttcgtctcaaaaagtctaaacgcgaggaagaaagctaactttcacacctgttcctttcgactgtggggtgggtggctggggttgtgggaaaaacgagacatctggacaaagtgggagagggtcaggctcgaagtccaggaagaggcctagaga

SEQ ID NO: 526780 - DNA, 530 bp, Homo sapiens
tttctcctttgaggatccttaaaaacaatgtgaattgggggaaggcacagtcatagttatatacaggcatttgcattttagggcttgaccaactaaaaagccatgtatcagtaaatgaacgcgtatcagcaaacacttaagtacattataaatgccaaaagttccttgaattgttacttcagggtcttcacagttaagagtacccatatcctaccttattcttgctttactgattaaaaaaaaaaaaaaaaaaaaaacctgaggcaaggcagggggacacagacttaggatgtaatcaacagaggaagaaataagaaatccaccttttaagcgccgcacagcacccacagaacaagattgctttcgtctcaaaaagtctaaacgcgaggaaraaagctaactttcacacctgttcctttcgactgtggggtgggtggctggggttgtgggaaaaacgagacatctggacaaagtgggagagggtcaggctcgaagtccaggaagaggcctagagaagggagtgaagcgac

SEQ ID NO: 526781 - DNA, 515 bp, Homo sapiens
atcaccttagagattagaaaggatagctctgtctaacatacattgcctgccttctccaccaggtccagtgcgaggcattgacttccataagcagcagccactgttcgtctctggaggagatgactataagattaaggtacagagggtctgtcataactgagaataaaggamagaggatgtgggaaggtttgggaatcatgaaaggaactgaaagacaggaaatttcattcatacagagctcaggcctttgacaacattatccggagaacttactcagcaaacatttattgatgcttactgtgtaccagacactgttttctttttagggaattcaaaataaataagaaatggcttctgttttcaaggagcttttattctaatacagaagataaacatatatccaagtaatagcatgtacagtttggtaagcaatataatagagagatattcacagtgaaataggaaagagcagtataggtgcaaagacaaaaagcatgacacagctagatacaggg

SEQ ID NO: 526782 - DNA, 515 bp, Homo sapiens
atcaccttagagattagaaaggatagctctgtctaacatacattgcctgccttctccaccaggtccagtgcgaggcattgacttccataagcagcagccactgttcgtctctggaggagatgactataagattaaggtacagagggtctgtcataactgagaataaaggaaagaggatgtgggaaggtttgggaatcatgaaaggaactgaaagacaggaaatttcattcatacagagctcaggcctttgacaacattatccggagaacttactcagcaaacatttattgatgcttactgtgtaccagacactgttttctttttwgggaattcaaaataaataagaaatggcttctgttttcaaggagcttttattctaatacagaagataaacatatatccaagtaatagcatgtacagtttggtaagcaatataatagagagatattcacagtgaaataggaaagagcagtataggtgcaaagacaaaaagcatgacacagctagatacaggg

SEQ ID NO: 526783 - DNA, 515 bp, Homo sapiens
atcaccttagagattagaaaggatagctctgtctaacatacattgcctgccttctccaccaggtccagtgcgaggcattgacttccataagcagcagccactgttcgtctctggaggagatgactataagattaaggtacagagggtctgtcataactgagaataaaggaaagaggatgtgggaaggtttgggaatcatgaaaggaactgaaagacaggaaatttcattcatacagagctcaggcctttgacaacattatccggagaacttactcagcaaacatttattgatgcttactgtgtaccagacactgttttctttttagggaattcaaaataaataagaaatggcttctgttttcaaggagcttttattctaatasagaagataaacatatatccaagtaatagcatgtacagtttggtaagcaatataatagagagatattcacagtgaaataggaaagagcagtataggtgcaaagacaaaaagcatgacacagctagatacaggg

SEQ ID NO: 526784 - DNA, 557 bp, Homo sapiens
ccggccagctgctgctgttttagacaatggttgatgaaggattcgaaggcctaaacaatagagcttttgttctgttttgtttttgagtggtcctgaacagttcttttgggcaggggaatttgtctgtgtgtgaatgtgcaaacatatatataatctgagtggctgcctggccttgtcctaggttttgtcccgtatatacgccgtctttttttttttttctttctgcatgtatgtatattttctcaaggcatctgtcctgcactagactttggcttgtctttccaggccagcttccagaggatgctttggcagttttccctctgggtaaccaagcaggctgcagccagcagatgrcactgcagcagaaaggggcagagtccctttaggcccttgacaagcacggcggattagtaaccgtataatttaaccctccagttagccttggaggactcggtgtcgcacttccgcccgaactctaataaagcgggccgagttgtgtgcaattaaggatttcagtatgcaaatctgaatctgtacttttgtctcctccaccccac

SEQ ID NO: 526785 - DNA, 486 bp, Homo sapiens
gctgtaacatctatgacatttttgttgatcatgataatatgtgattgtttagtcaactgagtttattgtaattgagattggaaatcactataagagtgaaattgaatatatagatagagaaataggataagttaatatggcagctcaacactgaacacagactacaacttcttgaccaccgaaatatgcaaaatattatataatagcttgtatctggacagcgtgctaagctgttcacttgttctttatcatttaatcctcttttcaaatatgtgagatatgttctgagaagataagcaccttgttgagtcatacaggtaatacattttaaaggaggaatttatatacacttaagattgtgtgtgtgtgtgtgtgtgtgtgtatgtgtgtgtgwgagagagagagagagagagagagagagagagagtttcaggctccaagacagatattaatggtagactgcctttgttgcataactgtagcagt

SEQ ID NO: 526786 - DNA, 619 bp, Homo sapiens
atcttaaacacagctaaacattacagaaacaatgtttaaattttttagaaaagttaattttgccctgcaaataaaaatatattgtagatgactaaatctaatttaattgtttgaagtctcatcttatttaatcaaaatcaggtaccaaattcctacaagagtggagtttgtcccataatctggatggatggatgtattctaaatttgttcacaagggtatctgagaagatataaatagatcagtgggttaaaaaaaataaccatcattgtctggaaaattgctaaaaatacattcaacaaaacaatgggcaatagcccagtagtttattcttagaagaacggcacatttattttttgtgtaggacataaatgaagggctcaagtaacttccagcttttttaagaagttattgaggaatcaaaataccatagagtagtagttaataagtccatctgtgctccaaacctggccaggtcactttatgtgacgctatttagtttctttgtgtatcagttttctcatttttaaaatggttaataaaatgaatttatcatatagcttgtaagagtaaaggagctaatacaagtaatrtgcttagaacagtaaattccatgtaaaa

SEQ ID NO: 526787 - DNA, 655 bp, Homo sapiens
gacagcagcagccattatcagactgggcattggcaattgtacctcttttatcggrcagtggtgaaggcataattggcagatattagtggcctagcttctgattctgacttcaaaatcaaaagcagacattacaatgatgattcagagataacgatgaaaaatgataaattcaaagtagaaaatgaaaggggtaactttaagagtactaaagagaccttctgcagtcacatgccctgaagatgttcccaaatcatttgaaaaggttttgcagaaacctagaattccagcagaacagagagaagagcccccaaaccactctttgatgccatgtttaccccacaggctggttcacattgagaaatacaagttacataacgaccgtcctgctccttggttttcatatagttcattttcaactctccatggaacctcgttgttaggatttctttgtggaccattcatatccatgaggtctttagaataaataacttagatgaattcgctgtgctgtcatgcttagaatcggaatgttcccccatgagcaacccattggcctggggcccacaaccctacatgagaggatgttttagatctattcaattttcacagaaggaattttgagagaatgctccatgcactgtcagtctgtcactcc

SEQ ID NO: 526788 - DNA, 478 bp, Homo sapiens
gctgctctggtacagagttctttcaaaatgagtttaaaaaaatttttaatgccactgtcttgacaggcaatagatgccatataatactaggcatagaaaataagtattttacaagaatactattttaatttttaaaaagttaaatattaaatcaaaatatttaagaatacaattaaaatgagagaaaatataaatccctgaattatgtttatggaaatatgtttatgaaaatatgattatgaaaaaagactttttcttcccttctatattwgcactattctagacgtttccggtagcatgatatgagaaaaatacacatacacacttttaggctggtgcgtttttgtttaaaatgtgagcctatctccaaatacatgtgtatgcaggaccatgacattgaggaccacatctgaccctccaatccagcccagtgctcagtggaatgccagcatgtggtagatgctaatgaaatattttt

SEQ ID NO: 526789 - DNA, 478 bp, Homo sapiens
gctgctctggtacagagttctttcaaaatgagtttaaaaaaatttttaatgccactgtcttgacaggcaatagatgccatataatactaggcatagaaaataagtattttacaagaatactattttaatttttaaaaagttaaatattaaatcaaaatatttaagaatacaattaaaatgagagaaaatataaatccctgaattatgtttatggaaatatgtttatgaaaatatgattatgaaaaaagactttttcttcccttctatattagcactattctagacgtttccggtagcatgatatgagaaaaatacacatacacacttttaggctggtgcgtttttgtttaaaatgtgagcctatctccaaatacatgtgtatgcaggaccatgacattgaggwccacatctgaccctccaatccagcccagtgctcagtggaatgccagcatgtggtagatgctaatgaaatattttt

SEQ ID NO: 526790 - DNA, 478 bp, Homo sapiens
gctgctctggtacagagttctttcaaaatgagtttaaaaaaatttttaatgccactgtcttgacaggcaatagatgccatataatactaggcatagaaaataagtattttacaagaatactattttaatttttaaaaagttaaatattaaatcaaaatatttaagaatacaattaaaatgagagaaaatataaatccctgaattatgtttatggaaatatgtttatgaaaatatgattatgaaaaaagactttttcttcccttctatattagcactattctagacgtttccggtagcatgatatgagaaaaatacacatacacacttttaggctggtgcgtttttgtttaaaatgtgagcctatctccaaatacatgtgtatgcaggaccatgacattgaggaccacatctgaccctccaatccagcccagtgctcagyggaatgccagcatgtggtagatgctaatgaaatattttt

SEQ ID NO: 526791 - DNA, 633 bp, Homo sapiens
tgtcagaaaatatttatattaaactaagttcaaaaatcaaaccatggtataatacaccctttaatgttgttttttacaaaaacgtacacggaaaacaatagaacaaatgtaagagaggaagaaagagaagaaaaggacacgtcattattaaccatctttcaggaagtagagtttcagttatgtttttatgaattattgtttttctttcacttttctgggtttcctaaatactctgtattgattatttagtgttaggataattaggaatataattttccttttaaagtttaataactttrtggaagtcacttccagttgtctagccagttcttattcattcacatttcctcctttctaatagatcctcatttttgtatgaagttgcaatatgcccaatttaaagtactcacctgctccaaatgccttgcagatagggtttgctataaagtgtgagcaattatgtgttaatgtaagtgactttggttgtatgtaccttttggactttcacattttaccctttactctactatatcttctttctgcctataacacaaatgtgatgcctagagatggagcagccgtgttattaatgtaagaatgaaaagtcccaagctagacaaaaacttagaagaa

SEQ ID NO: 526792 - DNA, 633 bp, Homo sapiens
tgtcagaaaatatttatattaaactaagttcaaaaatcaaaccatggtataatacaccctttaatgttgttttttacaaaaacgtacacggaaaacaatagaacaaatgtaagagaggaagaaagagaagaaaaggacacgtcattattaaccatctttcaggaagtagagtttcagttatgtttttatgaattattgtttttctttcacttttctgggtttcctaaatactctgtattgattatttagtgttaggataattaggaatataattttccttttaaagtttaataactttgtggaagtcacttccagttgtctagccagttcttattcattcacatttcctcctttctaatagatcctcatttttgtatgaagttgcaatatgcccaatttaaagtactcacctgctccaaatgccttgcagatagggtttgctataaagtgtgagcaattatgtgttaatgtaagtgactttggttgtatgyaccttttggactttcacattttaccctttactctactatatcttctttctgcctataacacaaatgtgatgcctagagatggagcagccgtgttattaatgtaagaatgaaaagtcccaagctagacaaaaacttagaagaa

SEQ ID NO: 526793 - DNA, 471 bp, Homo sapiens
tgtcctatgttactaaacagcttggggtcacagaggatcattttatattagggatatatgacatgtatgtatgctttctgtatttatgttttatacacaccgagtatatatatatatatatatakagagagagagagagagagagagagagaatatgtatatgtgcataaaatatagagtaatatatgtgcatagataaaagctggaaaagataaatgcaaaatgaacagtgattacttccggataacatgagagctacaatttaaattttctattttgttattttttttcctttctacaaaaaaagctaaaatatttatttttctattgtactgaactggtttcaatggcagaactctttcctcacatggtatacctttcaggttccactatggaagagtaattttcaagttctctgccatttttctaaaattgtcaacatttccaggtactctggtaaatttgttttaa

SEQ ID NO: 526794 - DNA, 568 bp, Homo sapiens
tgtatctaaatccatctaaatgtagaaaaggtatagtaaaaatatggtattataatcttatgggacccctttggatatgcartgcatgactatattttagctgaaagcaccagcccacttcttttagagaggagcagagccacaccccctgtctttccaccatgtatttagatcttggagattaggaattaaaaacatgagcaatgcaagcaaaaatgcagatgataagatttgtgtgatacattgcaagctggaaagttcctttatggaggaattcagtttaaacaacaacagaaagagacatgagaatcctctagtgtatgagctccaagccttgaagttggtcaacacagtgtgtggattagcagaaaaagctgaaacagaacatggggctaccaaggaacagagggatctggggagagatgctaatcaatccattaggaatgcaggatttatcaatacccaattgagaaaaggctactaacattgcagttttgtctgcgtgatacttataattgcatgccactccagtttgctggcaaaattagtcccagcaaaaattttacta

SEQ ID NO: 526795 - DNA, 649 bp, Homo sapiens
gttacatcttatttcaggaaaagtatctaaaaaaaacccataatcagtcacttagaaactacaaactcaaaaactgcaawtctcacagttccaaagactaatttaaaaataacctttcgaaataaaagaatccctgttttaggatagtaggttgagcacggaagtattaaccatctagcagttttaggtcatccaaaattagacatgtcccacattggctacacgatttgttacaaatgggactggaaatttttggtgtaacttggagttcatactgggaaatctgcagtgcaaaggtcccttctgccaattcttctcaaagaagttagaattgtggttacctggctgcttctgtgatctaaaacatcataatcttacacttcaaatttctaattcaacagagtagataggcgtgcagtatagagctatgccattatgacagctataaatctgttttttaactaatggtaaaagagaacaaaggtaagcttactgacataagcagttaatcaattttgaacccagaccattctgaggtcatcaaatttgttcccgtgtggcttttttttcccatggacttcagaaaatgatacatatccataacttcctgaagtgctttgaaataaaaggtggccttttttgggaaaag

SEQ ID NO: 526796 - DNA, 607 bp, Homo sapiens
tcttaagctccttatattctttacttttgatctcactctgcacttcagtcctcctctgaatcagctcagaacctcacaggcttcttagactgtgggtgagttcagatgggcttcaattgagtgccttgggaaacatcagcatccagcgcctcagttgatgctctcccctgtgttctgtccaagctcttggtcctagagtctaccattttgcccagcctatccaggctgacttctttggacaggtttacttagcccttattggacctccatcaactcctgctctgtggctgaaatactaattatgcctccccgtcaaatctggcctggcagtcaggaacctcttcctgaatctggtgtacctgtcatttcatctcatctagatggtttcttgtaaacatgrgctctggtttcataagggtcatgttttcctgtggcttggtgagaaaccagagtagacattttctcattttcttttaattttaacattatgcttttaatgtgagttttcaagataatatttccatctcaaatattctagtagcctccatattaattttgtatgttactagacccttggcagagctttccaaagccatgtatagacaag

SEQ ID NO: 526797 - DNA, 607 bp, Homo sapiens
tcttaagctccttatattctttacttttgatctcactctgcacttcagtcctcctctgaatcagctcagaacctcacaggcttcttagactgtgggtgagttcagatgggcttcaattgagtgccttgggaaacatcagcatccagcgcctcagttgatgctctcccctgtgttctgtccaagctcttggtcctagagtctaccattttgcccagcctatccaggctgacttctttggacaggtttacttagcccttattggacctccatcaactcctgctctgtggctgaaatactaattatgcctccccgtcaaatctggcctggcagtcaggaacctcttcctgaatctggtgtacctgtcatttcatctcatctagatggtttcttgtaaacatgagctctggtttcataagggtcatgttttcctgtggcttggtgagaaaccagagtagacattttctcattttcttttaattttaacattatgctttyaatgtgagttttcaagataatatttccatctcaaatattctagtagcctccatattaattttgtatgttactagacccttggcagagctttccaaagccatgtatagacaag

SEQ ID NO: 526798 - DNA, 475 bp, Homo sapiens
catgtctattaaaattacaaaaattagctggatatggtggcacgcacstgtaattccagctactcaggaggctgaggaaggagaatcgtttgaacccaggagacagaggttgcagtgaaccgagattgcaccactgcactcctgcctgggcaatggtgcaagactttgcctcaaaaaagaaaaaaaaaaaaaatgctttaatcttcattacatatgtatatcagaattaaggactttaattacacagaaaatttacgtgcattgaaccagtcttttgtggaggtgaataatctgctcggaaattttatttccattaagtaaaagagcttgaacgagcttgttgtggtcacgcattggagtgttttactctgatccatgctctgtgactgtcttcttcatccgtgatggtcctctttgtcttgccctagtacaaacaccacagaaccatggatactgtgattctgggtttccctac

SEQ ID NO: 526799 - DNA, 473 bp, Homo sapiens
attggaacaacgataagcacctgactgaagatgggtcagtaagtcagagacctttgccaataaatttggaattgggaagaaaacaaaatgatgacaggaaagaacaaagacagagaagttgtgataggcagcctctgaaagggctcccagtgatctctatccactggagtggatgtctctcccatcagttcagtgtgggctgaaactagtgtctcatttctaacaaatagaagacctaaaactgagagaatgtcatttccatgattaggtttcaagaagacagagacttccatcttgcgtttcatctctgatctctttcacttgctcaacctgatgggaaccagcagtcatgttgtgaactgccctagagaggggcccatgttgcaaggaattaagagggcttaataaccttcaaggaactgaatccygccaacagccaagtgagggagtttggcaacttcattagtgaagcc

SEQ ID NO: 526800 - DNA, 570 bp, Homo sapiens
ctcagcctcaggctaggcttcagcttcgctattagacttctctatccagttacatgaagcagaacacattgttttacccaacataagaatgggcatggttagggtcagtactagtaatctataaatggaagctaggcaagatgcagaatcgtggactgatcaatgcagttcatttaaagatggcgttaacttcctgacactcttttcattggctctgaaatttttgaccctcttctcattgagaggtagggcccatgactcttcttcttgcatatgtgtggattttatgactgttttgatgaataaaacatggcaaatgttaacactgtgccaaattctgagcctaaaccttaagtcactagtggcttccatttcctcgctctcacctcctgactgtgagttctgccaccrcatcaggagtccagctacctcatgaccaccatgctggagaggccatgtagagcttccccggctgccagtctctgcttaacccagtgttccaaccacgcccctaaagtgacagatctgtgaataaaccatctcaagccttccagacaaacccacttacca

SEQ ID NO: 526801 - DNA, 570 bp, Homo sapiens
ctcagcctcaggctaggcttcagcttcgctattagacttctctatccagttacatgaagcagaacacattgttttacccaacataagaatgggcatggttagggtcagtactagtaatctataaatggaagctaggcaagatgcagaatcgtggactgatcaatgcagttcatttaaagatggcgttaacttcctgacactcttttcattggctctgaaatttttgaccctcttctcattgagaggtagggcccatgactcttcttcttgcatatgtgtggattttatgactgttttgatgaataaaacatggcaaatgttaacactgtgccaaattctgagcctaaaccttaagtcactagtggcttccatttcctcgctctcacctcctgactgtgagttctgccaccgcatcaggagtccagctacctcatgaccaccatgctggagaggccatgtagagcttccccggctgccagtctctgctyaacccagtgttccaaccacgcccctaaagtgacagatctgtgaataaaccatctcaagccttccagacaaacccacttacca

SEQ ID NO: 526802 - DNA, 671 bp, Homo sapiens
ctaagtgagagaatccacctgcttgccagttggagtgtgataggaagcaaacggccctgatagagactctatttctaggcacactgacagagcattcagcgaagtgtcaccacactttgcttcatctagatcatcagggcaaacctgaaactctatcaggagagggaccagactcttccaagaagatggagggaaccagggacacagagcatcctccctactcaggtccctattgctatggtaaaggaggagargaaagacagatgaggtgaggaggctattccagaaactgcgtgtgaaatgggtggtaagacattgccttgaggcattgctgaaacaatcagactttcgagtctagtctgaaggacataagaccagggagaccttgatatgcagagatgctacccaagcttggaacccttccagagagagccccccaaactttgtagaatgtacctagcaagtcaaagcctcctttgtgccaaatatctgtgttcctgctctctacttctctactttctactccacagcaaaatgtccaagaaaattcgatcttcctctttgctctccaaccctattcctagccttcagttttgttttgtttttttttgtttgtttgtttgtttctgtttatcaaaggagtggaatgcatcaggcaagaaagtacctac

SEQ ID NO: 526803 - DNA, 551 bp, Homo sapiens
ctaattgcttcaagatgatgctaccgtcgaagacctaagaaaaatgggagctatgtttcaaaatgcgaacctggggttagtgttaccaagcacactgtcttcctactgaagcttcaaacaaacctgaagcatccagcagtcataaaaattcatctcactggccaggcacggtggctcacacctgtaatcccagcactttgggaggctgagggggtggatcatttgaggtcaggagttcaagaccagcctggccaatgtggtgaaatcccatctctactagaaatacaaaaattagccaggcggtagtgkcatgcgcctgtaatcccagctactcgggaggctgaggtaggagaaccgcttgagcctgggaagcagaggttgaagtgagctgagatcgcgccactgcactccagcctgggtgtcagaatgagacactgtctcaaaataaataaataaataaataaataaataaaataaattcatctgactgagcaaaaggattctttcttgttatactttaaaaggtttacttagaataaggttaaatataa

SEQ ID NO: 526804 - DNA, 551 bp, Homo sapiens
ctaattgcttcaagatgatgctaccgtcgaagacctaagaaaaatgggagctatgtttcaaaatgcgaacctggggttagtgttaccaagcacactgtcttcctactgaagcttcaaacaaacctgaagcatccagcagtcataaaaattcatctcactggccaggcacggtggctcacacctgtaatcccagcactttgggaggctgagggggtggatcatttgaggtcaggagttcaagaccagcctggccaatgtggtgaaatcccatctctactagaaatacaaaaattagccaggcggtagtggcatgcgcctgtaatcccagctactcrggaggctgaggtaggagaaccgcttgagcctgggaagcagaggttgaagtgagctgagatcgcgccactgcactccagcctgggtgtcagaatgagacactgtctcaaaataaataaataaataaataaataaataaaataaattcatctgactgagcaaaaggattctttcttgttatactttaaaaggtttacttagaataaggttaaatataa

SEQ ID NO: 526805 - DNA, 551 bp, Homo sapiens
ctaattgcttcaagatgatgctaccgtcgaagacctaagaaaaatgggagctatgtttcaaaatgcgaacctggggttagtgttaccaagcacactgtcttcctactgaagcttcaaacaaacctgaagcatccagcagtcataaaaattcatctcactggccaggcacggtggctcacacctgtaatcccagcactttgggaggctgagggggtggatcatttgaggtcaggagttcaagaccagcctggccaatgtggtgaaatcccatctctactagaaatacaaaaattagccaggcggtagtggcatgcgcctgtaatcccagctactcgggaggctgaggtaggagaaccgcttgagcctgggaagcagaggttgaagtgagctgagatcrcgccactgcactccagcctgggtgtcagaatgagacactgtctcaaaataaataaataaataaataaataaataaaataaattcatctgactgagcaaaaggattctttcttgttatactttaaaaggtttacttagaataaggttaaatataa

SEQ ID NO: 526806 - DNA, 598 bp, Homo sapiens
tgtcataatattcaactgctgaatatcattatattaggtcttacagacacctatgttgcacatttacccytttgcattaaaacttgccattcatttatgtgttactcataatggatattgtaacataggcatctgaagaatatgtgaatgtgaatatactgatcttttcctgtgtgtctaacccccactaagcagaacccgtcagaagagtttataagataccttatgtgataacatgtttctggaaaacagagctgaataacagaagagtaaaaagttaatgtatgttaaaggtaatttggaaaagttcatgtatattacaaggagtatcattaaatagacctcttctgcaggcaacagttttgttatataataaacaaacacctaaggaatgaaagggagaaggttttagacattgatttccagtgcccacagtgtttagcttggcccaaaggaggttatcttctttccacttctgagatatctgtgcactgggttctttcagacaatccaggcagtggcacctgagaaaccttggggccagagtgagacctcaggtgtggcactgaaaagtagaagtgggatgcaggcttcctgg

SEQ ID NO: 526807 - DNA, 598 bp, Homo sapiens
tgtcataatattcaactgctgaatatcattatattaggtcttacagacacctatgttgcacatttacccttttgcattaaaacttgccattcatttatgtgttactcataatggatattgtaacataggcatctgaagaatatgtgaatgtgaatatactgatcttttcctgtgtgtctaacccccactaagcagaacccgtcagaagagtttrtaagataccttatgtgataacatgtttctggaaaacagagctgaataacagaagagtaaaaagttaatgtatgttaaaggtaatttggaaaagttcatgtatattacaaggagtatcattaaatagacctcttctgcaggcaacagttttgttatataataaacaaacacctaaggaatgaaagggagaaggttttagacattgatttccagtgcccacagtgtttagcttggcccaaaggaggttatcttctttccacttctgagatatctgtgcactgggttctttcagacaatccaggcagtggcacctgagaaaccttggggccagagtgagacctcaggtgtggcactgaaaagtagaagtgggatgcaggcttcctgg

SEQ ID NO: 526808 - DNA, 645 bp, Homo sapiens
aacaaaacttaaggtatatttgaatgctgagttcttcatattttttcatatttgtctcaatcttgtggtactctgtaaagctaatggtcrctgataatgcaatgaataatttgccattgtaaactcgagctgcaaactgaatggataatctgtccactttctgttgcttgggttaggctggtgtgccaaaatagaatatagaatttgtagataatatatacagaacttaaaattttaagataaagagatgatgccagtattctgcttgggacattaaagagtaggtgtttggctttctgggtgggtggacatatgctgctcgggaggtcaccacttcctgaactagagaaccttcagaggcatctctaacctccaggggcaacgtcacaagagttttacatgctaattggcagactctgaggtcactccctaaagcaccacttccttgtggaatgtaaagacagtgtgccaggatcagccagaccacctgtgggcgggtgaggaacagtactggggtaaatgtggaggcaccagctcttagagccgtctcttcccatcctgtttgtagctggaatgcacagccttaacatactattctgcttaatcaattctgccatctagtggctactttctaccctactactt

SEQ ID NO: 526809 - DNA, 456 bp, Homo sapiens
tattattcatattaccaacctcctccagaaaatacctcggaagtgtgctcaaggttgcygtggcaatcaggaccttattaaaagttagtttaaagattattaactgaaagtattataagttaaaattgtttaaggttgaaatagatgcgtcagagatttttttaagagcatctctgaaactgtgccttgaaaaacagtataaacagctaagttgagttgtaacaactgacaaacagaaaatattctggtatcctgattacattcttctattagtacactgtaacagtttctctagaaatacaccgttctcagttctttcaaaatattttctttcttcaagagccccttactgatagttttgaatcttgatgatctgttaagactattatttatcagtggcctatagtcatatccatgatgtccaaggaggagacaggagctgtttggtccatcctg

SEQ ID NO: 526810 - DNA, 456 bp, Homo sapiens
tattattcatattaccaacctcctccagaaaatacctcggaagtgtgctcaaggttgccgtggcaatcaggaccttattaaaagttagtttaaagattattaactgaaagtattataagttaaaattgtttaaggttgaaatagatgcgtcagagatttttttaagagcatctctgaaactgtgccttgaaaaacagtataaacagctaagttgagttgtaacaactgacaaacagaaaatattctggtatcctgattacattcttctattagtacactgtaacagtttctctagaaatacacygttctcagttctttcaaaatattttctttcttcaagagccccttactgatagttttgaatcttgatgatctgttaagactattatttatcagtggcctatagtcatatccatgatgtccaaggaggagacaggagctgtttggtccatcctg

SEQ ID NO: 526811 - DNA, 553 bp, Homo sapiens
taaaaaaagaaaacaatcccccaaaaactcatcatgttttaagaaagtttacaaatttgtgtagggccacgttcaaagcygttctgggctacatgtggcttgtgggccacgagttggacaagcttgctctagaatacgttaatctttagtatttgggacttggcctttcctggcttaagcacccagtaccatcactgctaccaccgctaaagcctgtgagtctggaatggctactgggatttctttttaatgcatagactctaggagtatacttttatttttaacaaccccacaaaacctaataaagataaaagattcagttagtcaacagatattttattatttcaggaaactctttgaaatgccactctcatttatataaaggtcagatagatgatttatgtaggtaaaaggacatatcaatgatcatatagataaggatcatattaatgattcttatagtaacaaaaaaatgcacctgtgggcattgagctggttgcttcattactccttgccccatttttattatctctaaaaaattatctctaaaaat

SEQ ID NO: 526812 - DNA, 681 bp, Homo sapiens
ctccagactggtgttctggggcaaagagctattagccaaactgattctatgcaggtgaaggatgcactaaagttctcactttagtgagaacttttctagctattccaatacagagttctttcttatagggctattgatattgacaccaaatggagtggcttctcagcctcttaatgtcttaagtaagtgcttaatttggaatagagaaaccagtatattttaaaaaagaaaaatattctttgtagcaactgtaaattctcccattataacagtgaacagagctccaggtaataacgcataggcatgtcaggttgcatctgtatatttgactacattagtattagtgacatcaggtggatataaaagaaaacccttggaaagagaactgccttagccatgatttcgttagtagacctatttatgattcaattgcaattttcagataggatgtgaacatggaatttcattgaaaatagtttaattttttatataaaaggttttgtatataatgtgtgtcagtgactattttcaaaatcattttcatcaagacaccttttttctaaaataggcattgcatacacatatgcacacgtatgtgcaygtgccacacattttttgtataatgttgggtttgattataaaagtgttgtcaaatgttttatttatctgcatatagcagtg

SEQ ID NO: 526813 - DNA, 617 bp, Homo sapiens
agcagtaggtgaatatttcacagcaacttgtgttgtctctttgatgtcttggttaattcccctgatctgactgcctcttggaatgttggggagatyagtaggttggcattggccagagtcagacctaaatcccatctctgaggtcttcaagggaaatatatgcacaaaggacaaaagctagcaaatggacagtatttattattatgcttagaatccagtgccgatgtggatcaccctgtgacccaggcttggcttggagacatcctttcacccttgccagaggcagcctaggttagaaccaaaggagataaagaagcctgtgaggagaaacagcaaacgcaaaaggcaccgcaaccaggacagtcagggaaatgtgctctgtctgtgaaagcaagaactcctcaacaaagagagtttgcctcaattcttagagccacgaccctacgcgttcacaagacaggtagaaaggcagcctgcagcccccagtaggagccacaccaagtccctagcactgtgggtcgatgagtgtcattgaacttaactaagccagagcagccctttcctcctggaggaggaagtgaagggaaagggagaattctttttctttccctgaaagg

SEQ ID NO: 526814 - DNA, 538 bp, Homo sapiens
ttattttttaaagcttacctcttgattaaaatataagctacatacagaaaattataggaattaatttttttgtttcctgagctataaattacatacattaaattcattttagtatattcacaaaggtgtgcagccatcacaattatctagttccagaacattttcctcacccctcaaaataaccccatacctgttaacagtcactccccttctccctgtctcccagctcctgaaaatcactaatcaactctctgtctctaaggatttacctattctgggcatttcctttaaattgagtcgtatggtgtgtggcctttgtgtttggtttcttttacttagtacaatattttcagggtcatctgtgtagtagcttgaattagaaccttattcttttatttactgctgaataatattccattttacagatatcccacattttgtttatccgtgcatcaattaatgaccataattgctttttaatgttttcrttttaaagatctggggcttgatttgtgcatgaagaaagctacggtagcca

SEQ ID NO: 526815 - DNA, 622 bp, Homo sapiens
tatggaaaatagaggagaataaattaattgggaaaatgttggcagtgcccaatatatattaactgaatttagcaaaccaaaaaaacattcattttaacttcaattaattaataattaattcaagttaatttaaatctcctttaaaaatgtgtgcaacttgacgtatctagacctgagctgatcatcttctccaccttycctgtcccccaaccagcttctcctcttgattcttttttcagttagtggctcctgtgctctcgaggtgtctcaacccaagatctgggagttatctgaggttcctccttcttggttagcctcacatttggcacaaagtcttaatcagtgttacctcctaagtatttcttgaatccatttctttctttgaatccaccagcttcattaaatcactgcaaatgttcctgccttatctcttgccactccttcttctcacctagaaaacatcttggttttcaaacttgctccaaatattgcctttttcccattaagattggtttttaaaacattggttttcaaaacttgctccaaatattgcctttttcccattaagattgactccaattcctcattgtgcaggtaaaacagtgattcacagccttggctg

SEQ ID NO: 526816 - DNA, 622 bp, Homo sapiens
tatggaaaatagaggagaataaattaattgggaaaatgttggcagtgcccaatatatattaactgaatttagcaaaccaaaaaaacattcattttaacttcaattaattaataattaattcaagttaatttaaatctcctttaaaaatgtgtgcaacttgacgtatctagacctgagctgatcatcttctccaccttccctgtcccccaaccagcttctcctcttgattcttttttcagttagtggctcctgtgctctcgaggtgtctcaacccaagatctgggagttatctgaggttcctccttcttggttagcctcacatttggcacaaagtcttaatcagtgttacctcctaagtatttcttgaatccatttctttctttgaatccaccagcttcattaaatcactgcaaatgttcctgccttatctcttgccrctccttcttctcacctagaaaacatcttggttttcaaacttgctccaaatattgcctttttcccattaagattggtttttaaaacattggttttcaaaacttgctccaaatattgcctttttcccattaagattgactccaattcctcattgtgcaggtaaaacagtgattcacagccttggctg

SEQ ID NO: 526817 - DNA, 622 bp, Homo sapiens
tatggaaaatagaggagaataaattaattgggaaaatgttggcagtgcccaatatatattaactgaatttagcaaaccaaaaaaacattcattttaacttcaattaattaataattaattcaagttaatttaaatctcctttaaaaatgtgtgcaacttgacgtatctagacctgagctgatcatcttctccaccttccctgtcccccaaccagcttctcctcttgattcttttttcagttagtggctcctgtgctctcgaggtgtctcaacccaagatctgggagttatctgaggttcctccttcttggttagcctcacatttggcacaaagtcttaatcagtgttacctcctaagtatttcttgaatccatttctttctttgaatccaccagcttcattaaatcactgcaaatgttcctgccttatctcttgccactccttcttctcacctagaaaacatcttggttttcaaacttgctccaaatattgcctttttcccattaagattggttttyaaaacattggttttcaaaacttgctccaaatattgcctttttcccattaagattgactccaattcctcattgtgcaggtaaaacagtgattcacagccttggctg

SEQ ID NO: 526818 - DNA, 308 bp, Homo sapiens
cctcattggaatgtaagccctctggggaggggtttctcagtcttggtcattaccatgttcccagagtttagaacagtgcctggcaatccactaattgtgaataatgaatgtgtgaaataaatgagttaaggagcggaaaagggaaactcatcctggaagacccatattcactttatacgatggtgtctggatagccagattccaccacttttccccactttgaaatgttttgaggagcttggaaatcctgckggcatcatgggaaagcaaaccctagacttctccagccccaaaagtgtagacttgag

SEQ ID NO: 526819 - DNA, 569 bp, Homo sapiens
gaatggtaatgtcaagcaaataaagagaatgtaaatgaggaactggtgaggaggccaccctttgagaagatggaggtgagaggggaaagagaggagttagcacaygccaggcaacggagtgggggtaatcactcactctgtctctctccatcagtctggggttgccagggtctttgaatggcagagaaaagagagtggagagaactgggatggggggacacagggccctggccctcagtgactgctccccaaaggcattaattagatatcactgcaaaatagcaaaaccagagtaaaacctcccccaggacttcactcacacaatgaccaggctctttcaccaagccctcccaggtccctccctccctgcttttacatcttacataaggaggcttctattgtgctaatatccaaggaaaaaagtgactaagggtgagtgtgcgactaaggaaaataaagaaggaagagagcctccaaggcttgcccccacccccagtttcttggctcactccacgattccgtcagttcgcaggctctgacataaaaggcaggaagctacacacgctaaa

SEQ ID NO: 526820 - DNA, 524 bp, Homo sapiens
tgccagggtctttgaatggcagagaaaagagagtggagagaactgggatggggggacacagggccctggccctcagtgactgctccccaaaggcattaattagatatcactgcaaaatagcaaaaccagagtaaaacctcccccaggacttcactcacacaatgaccaggctctttcaccaagccctcccaggtccctccctccctgcttttacatcttacataaggaggcttctattgtgctaatatccaaggaaaaaagtgactaagggtgagtgtgcgactaaggaaaataaagaaggaagagagcctccaaggcttgcccccacccccagtttcttggctcactccacrattccgtcagttcgcaggctctgacataaaaggcaggaagctacacacgctaaacaaagctccttagatgtcaggaaattaacctgggaaatcggagccaagagagattaaaggcattgcaggccgagttcaaaaacctctatggcgttacatcaaaagctgttttctggg

SEQ ID NO: 526821 - DNA, 530 bp, Homo sapiens
tggggcaaatgcaaacagttctktggtctgcttatttgcttttcttagtgcaaaggtggaggcagaatgtggttagtgcagccaccatggctgccaggaacaaagtcagttctggggaaggggagcgccagagcctgccagcccagcagccagccctgccggaaggcccccaagccaggatcctgtcagtctccatctagaaaccagacagaaagcacttttgtaaatgttaaccaaaaaggtccccctgtgatggctgtgctgtaaatcaaagtagacaatgtggggtgggggcagggcacacgtcttgtctctggagccatcgcaaagcagggaggggatgctccttcaactctcaggtggggactggagctccccgctagtccacgctggagaaaggtttttagggcctggagtcacccaggacccatctctgtccagggggtgctgtgtaatattcaccattaatcctacacatctgggaagcattctcctgctaaagataagataaagcccaaatgatttgtgtt

SEQ ID NO: 526822 - DNA, 419 bp, Homo sapiens
aaacaggtgagccgatcaacacgctctccctaacagtgacataaactaacaaggggcagcgtgcaaagcacagyggatcaactcaaggaaaagggagctaaaactgtctatctacttctaggaatgtccccaaaagaactgaaagagggacttggagagattcttgtacagccatgttcatagaggcattatccactatagccaaggggcagaagcaacccaggtgtccaccaaccgtagaggatgaacgggtaaactaaacgtggcacatccacaccatggaacactattcgtcaatgaaaaagaaggacattctgacacatgcccccacatggatgaacctggagaacattatgcttaagcgaaataagccactcacaaaaagacagatactgtgtgattccacttgtgtgaggtac

SEQ ID NO: 526823 - DNA, 601 bp, Homo sapiens
aaacaggtgagccgatcaacacgctctccctaacagtgacataaactaacaaggggcagcgtgcaaagcacagtggatcaactcaaggaaaagggagctaaaactgtctatctacttctaggaatgtccccaaaagaactgaaagagggacttggagagattcttgtacagccatgttcatagaggcattatccactatagccaaggggcagaagcaacccaggtgtccaccaaccgtagaggatgaaygggtaaactaaacgtggcacatccacaccatggaacactattcgtcaatgaaaaagaaggacattctgacacatgcccccacatggatgaacctggagaacattatgcttaagcgaaataagccactcacaaaaagacagatactgtgtgattccacttgtgtgaggtacctggagtggtcccatttatagagacagaaaggaaacagtggctgccagcagctcaggggaggaaggaacggggagctggtgtttcctgggcacagagttctggtttgggattataagaacattccggaaatgatgacggttgcacaataataaatatatttaatgccgccaaattgtacact

SEQ ID NO: 526824 - DNA, 601 bp, Homo sapiens
aaacaggtgagccgatcaacacgctctccctaacagtgacataaactaacaaggggcagcgtgcaaagcacagtggatcaactcaaggaaaagggagctaaaactgtctatctacttctaggaatgtccccaaaagaactgaaagagggacttggagagattcttgtacagccatgttcatagaggcattatccactatagccaaggggcagaagcaacccaggtgtccaccaaccgtagaggatgaacgggtaaactaaacgtggcacatccacaccatggaacactattcgtcaatgaaaaagaaggacattctgacacatgcccccacatggatgaacctggagaacattatgcttaagcgaaataagccactcacaaaaagacagatactgtgtgattccacttgtgtgaggtacctggagtggtcccatttatagagacagaaaggaaacagtggctgccagcagctcaggggaggaaggaacrgggagctggtgtttcctgggcacagagttctggtttgggattataagaacattccggaaatgatgacggttgcacaataataaatatatttaatgccgccaaattgtacact

SEQ ID NO: 526825 - DNA, 601 bp, Homo sapiens
gctttctgaaaattcctatgaatcattcagtcttattgaartgcacaattactacttacataaatagaacattctcatatatatgtatatgtgtgtgatgatttgtgcatttttgtggcatcaatgtaactagagctttaaactttgttatattaaaaaataaatcatttgaggtctttgccagcttctattctgcctagagctgtgaaaggaaggggtggaggaggacaaaattagatatcccaggaatagaaggctcattggagtacaatataatctgaaaatccaagaaacttgaatcttatctgacaatgttctcaggagatactcaggatggaaagtagctattttgtgtctaaacaatttccaagactagagaaattgcaagctctccacagatgctaccagtaaaatgcttcagaagagagttcatttttgcctcagtaataatgccttagcacagtagggtttgtgtattcatgagtgggcgtgggcatagtacccgggaaagtgcttaattagtgtccgtagctaaggaaagagagaagaagccagcaagtgcatgcagggaatgccaatctatggtccgtagctgaagcag

SEQ ID NO: 526826 - DNA, 656 bp, Homo sapiens
tggtattttttccagtacaaggacttgagcatatttatagactaatggcaggaattgtgtcatattcatctgtccattcctagctccaaccccagtgtctgatatctaataagccattgtagaggttgttaaattatttaatataagagaaatgctagagacaagcaggatttctgagcccttgccagcaaaaaaaaaacaataaaataaaataaaataaatcagaaattatgaataagtataataattatattattctttatatgcatgtagcttatttcatatatctatgtgacttccctttgtatttttcctcaatttcatacytccccttaatgattagccggaccctaaaaatcaaagtggcctatatgcttgtttgcagtgatagcagaggtgactcctcagcaggccttagcagtagaagaacccaataaataaaatgaatagaggctgtcataaaggggagggaaagcctgaggaatccctagggcctggaagttcaagaagtgggagactaaagagccaccccagcctgtatacaggcctcagggttctgaaagcaactctgcagagcaagagattgtcaaggctcaccaaacaggaagccccgaggcagtaataaccagtggcatatagttaagtattaaaagggt

SEQ ID NO: 526827 - DNA, 522 bp, Homo sapiens
tggaaaccgagcttggaatccctgtatctcattcttcatctgagtctcacaagcatcttcactataggagccgggaagcagcacatcctgtcaccctgtcctatgtcagcactcccaaagctaagcatccaacacgtcatggtatctgttctctcctcggcagcaagagaggtatttaaaaacacagatatgctgggcgcggtggctcatgcctataatcccagcactttgggaggctgaggctggtgaatcaccaggtcaggagttcgagaccagcctgaccaacatggtggaaccctgtctctactaaaaatacaaaaaattaactgggtgtggtgacgggtgcctgtaatcccagctacttgggaggctgaggcaggagaatcgcttgaacccaggaggcggaagttgcagtgagccaagatcacaccactgcactccagcctcggcgacagtgtgagactctgtctcaaaaaaacaaamaaaaaaaaacacagatataaccaagtcctggctttagta

SEQ ID NO: 526828 - DNA, 579 bp, Homo sapiens
ctcactctatcacccaggctagagtgcagtggtgcaatcacagatcaccgcaacctcaagttatcctcctgcctcagcctgctaagaaggtgggactacaggtgtgtgcagcaccacgcccagctaactttaagattttttgtagagatggggtcttgccatgttgcctaggctggtttcaaactcctaagctcaagtgatcctcccacctcagcctctcacactgggattayaggcatgattcaccacaccctgtcttttggcaatattttaaagattagcttacaaaatacacattcttttattgatatggctgtgttcttcagcaatctctgaaatcagtaatttctgatgaggtgtaggtgggtttcttttataaattcaaaacccttggggagtcagcaataaaatgttaaaagaaaaataaagttcccaacaggcaaataacccttgagatgttgacccacgccaccccttgacctcctgccctggaataactgatgtaataggggactgcaacagatagagtaaaaaatgaggcatctattgtaattccagaaccgtatattagaagatccc

SEQ ID NO: 526829 - DNA, 579 bp, Homo sapiens
ctcactctatcacccaggctagagtgcagtggtgcaatcacagatcaccgcaacctcaagttatcctcctgcctcagcctgctaagaaggtgggactacaggtgtgtgcagcaccacgcccagctaactttaagattttttgtagagatggggtcttgccatgttgcctaggctggtttcaaactcctaagctcaagtgatcctcccacctcagcctctcacactgggattacaggcatgattcaccacaccctgtcttttggcaatattttaaagattagcttacaaaatacacattcttttattgatatggctgtgttcttcagcaatctctgaaatcagtaatttctgatgaggtgtaggtgggtttsttttataaattcaaaacccttggggagtcagcaataaaatgttaaaagaaaaataaagttcccaacaggcaaataacccttgagatgttgacccacgccaccccttgacctcctgccctggaataactgatgtaataggggactgcaacagatagagtaaaaaatgaggcatctattgtaattccagaaccgtatattagaagatccc

SEQ ID NO: 526830 - DNA, 520 bp, Homo sapiens
cagcagagggggatgaactggagcttgtgtgcaacctgttcattttcagaggtctggagacagaggctgcagtgccctgtgcagatggagcggcagaaaaggcaaggttgtcctggactcccgcrctgcctccaatccatgagcagtcaggtctggggctggagggaacttccttgggtgcacatctgctcttccagatgtggagccgtggtgggaacagaggacccagacccagcctttaggtctgggagacacaggagtgggactggtgcttgcggtacccatcgcaagagactgttcctatgtttcgattctctgaggcctcaggtgaagtgagctggggattggggctcgagtttcctaccctgggaatggaggtaagctgggtgggctgaggggaggaaagagcaagaagggcactagagagatgatgcggttggaaatatcctgtcctttccctctgaggaaacaaccaaagcccttactggtgtggtcagggaattacttcggtctgggctgg

SEQ ID NO: 526831 - DNA, 641 bp, Homo sapiens
tcttgaatgacagcataatagagaaaggacacttacttctacacttcacacctgtaaggtgaatttaaatttgttttgtaaccacttgttgtgggacttsgagtcttaatcatttcttctgagcttcaaccttgtcttccaaaggtactttagattttctacatctaatggtggcaaataaatccactagctgccaaatacatgggaaatgatctgtgaaaaccacaagtggcccaacaaactgtacgtcttcaatttgacagcacaaaggaattattggttagtatttcattggttgaatcttttgtttaatctggcctggaatattagtattaaaagacttaaaaatttatttggaaataattccaaacttactagaagttgctaaaataaaaatagtacaaggaatagtcatgtatccttcacccaaatttgcctattcttaacatttcactccatttgcttaatcttttgctctctctttctctttctttcttcatgatgttttttgaaccaattgagagtaagctacatatatcatggctctttctccctaaatgctttgagtatttcttaaggataagaatattctcttctattgttttatccacagaacagaagctgaaaaagcatactgcttg

SEQ ID NO: 526832 - DNA, 641 bp, Homo sapiens
tcttgaatgacagcataatagagaaaggacacttacttctacacttcacacctgtaaggtgaatttaaatttgttttgtaaccacttgttgtgggacttggagtcttaatcatttcttctgagcttcaaccttgtcttccaaaggtactttagattttctacatctaatggtggcaaataaatccactagctgccraatacatgggaaatgatctgtgaaaaccacaagtggcccaacaaactgtacgtcttcaatttgacagcacaaaggaattattggttagtatttcattggttgaatcttttgtttaatctggcctggaatattagtattaaaagacttaaaaatttatttggaaataattccaaacttactagaagttgctaaaataaaaatagtacaaggaatagtcatgtatccttcacccaaatttgcctattcttaacatttcactccatttgcttaatcttttgctctctctttctctttctttcttcatgatgttttttgaaccaattgagagtaagctacatatatcatggctctttctccctaaatgctttgagtatttcttaaggataagaatattctcttctattgttttatccacagaacagaagctgaaaaagcatactgcttg

SEQ ID NO: 526833 - DNA, 641 bp, Homo sapiens
tcttgaatgacagcataatagagaaaggacacttacttctacacttcacacctgtaaggtgaatttaaatttgttttgtaaccacttgttgtgggacttggagtcttaatcatttcttctgagcttcaaccttgtcttccaaaggtactttagattttctacatctaatggtggcaaataaatccactagctgccaaatacatgggaaatgayctgtgaaaaccacaagtggcccaacaaactgtacgtcttcaatttgacagcacaaaggaattattggttagtatttcattggttgaatcttttgtttaatctggcctggaatattagtattaaaagacttaaaaatttatttggaaataattccaaacttactagaagttgctaaaataaaaatagtacaaggaatagtcatgtatccttcacccaaatttgcctattcttaacatttcactccatttgcttaatcttttgctctctctttctctttctttcttcatgatgttttttgaaccaattgagagtaagctacatatatcatggctctttctccctaaatgctttgagtatttcttaaggataagaatattctcttctattgttttatccacagaacagaagctgaaaaagcatactgcttg

SEQ ID NO: 526834 - DNA, 637 bp, Homo sapiens
gctggaaagaaccttggcaattcacctgatatttgctttcttccagtgaaaaaatacagtggtccagaggagttatgtgacttgcttaaagtcacacagcaaagatagagccagatcttgaactctgtccagaggttttcctgctcatggttcctttcaaaattgggtttcttttaggtccaaacaccagcatcatattaatgcaaatctcaggctctgattctctgtgaggattgtycttagagactcaacacccacctgctgtacccttagctgacgggctgcaatttggtcttgggttgctctgattcaacacagtcctggccctgattgtggggcaagaatgacttatgggaggtgcagagcccattcctggaagcaactgccagctttttttgagaaagaagaggagagggccctggaaggataaacccactggctttctctgctgggaaaggatatagaaagaatttcaaaaggaatatttagaaaataaaatatttgtgctatgctatcctgctaggaccatgctctagaatcaagtttagatctttgccacttgaaaaataaggactctgggctctcctgatggaaggttttcttcctgagatgtctgggaatgcttagcttcccagtg

SEQ ID NO: 526835 - DNA, 540 bp, Homo sapiens
ttcaaatcataaaagcctaaaattagtatttatacgtgtgtaagtcaaaagtgtaatattttatatttctgtaatccataagatgtggataattgtgttaatttagaatcttgaaataaatatgatgaataattaacattagtaattttgcttcacaaaaaacacttcagagtgattgtttcctgccatgtggcgtctaacaggagtccacttgccaatctccgggaaatgtgagaagttgcaagcagacaggcatcatctcattccactggaagcctttttcaccaccagttggggagagcaccccgaggcctcmatctgcgcagaacctctgataggtctgcaaatcaaaaacaatgggcagcatagcattgctgtgtaagatcacacaactcccggctttgctgtcataatttgctgggatgagcagaaacatgcaccttgaatttgagtagaatctggacccccaaacaatgccatttttgtccttaaaactttatctgtcatgaatacacgatttaatataagatcatagattgg

SEQ ID NO: 526836 - DNA, 598 bp, Homo sapiens
catgcggtttcaccttgtgaatgacctatacccagctaacttcattctgggcaattggagtcctgcttcactttccaacaatagaaagatgcaacacatttttgtgcatacagtttcagtataatcaagcctttcttttgctggatgcttatttaaagcaaattttaggcacaatgccctattcattttacacttgttttattttcttgactcagtttaaaatttgayggtgtaatcgttgaatgctaagataactataattttgctttattgtagtattatatagtggaggacactaaatcatttaatgatgctttagaatatagtcaatatctttctttctgtccctcttactcagtatatttatggcatcggaaaggctgtagcagcggatggttgctaaatctttcaaatggaacaatgaacccaggcttgaagaaatgcaatgcctaatcaattaaacaggattattttatagtttaacatgaaaaaaggcatccaggtatggtattttttttaaaaaggaatattctcatttaccccactgattcatctagtgcctctatgttgttgaccttcaatatcattagggtctctc

SEQ ID NO: 526837 - DNA, 560 bp, Homo sapiens
ggttagtggcattgataactagaatccaggctcctgaccttaagtaatccatcttcccgccaaatttcatttaaaaaaaaacttttacaaatgattgtcttcctacaccctaagtatcataaaaaacatataaagtgaaatttgttaggaggttacttttgttacacttttctttaattgatggggaatctgatattcaggaaattgaagggaatcactcagggtcccatggctggttaccagcrtacagaggcctagaatccctacttcccctcttttccactacttcagaatctggaactttcatctgttaatcaagataccaataaccaaaaccacctatataatttcattctgatttttctgcaatctttgtttactaaaaacaaatgagaaataaacaaggtaatattagggattttaaaaatgaaaaagaaagaaagaaaatagagtccaggacataccattagatcagtagtaattgaaattcccgtcatttatttgatatctttcaaacccgtgaatccagataatgattataacttattctaagaacattg

SEQ ID NO: 526838 - DNA, 560 bp, Homo sapiens
ggttagtggcattgataactagaatccaggctcctgaccttaagtaatccatcttcccgccaaatttcatttaaaaaaaaacttttacaaatgattgtcttcctacaccctaagtatcataaaaaacatataaagtgaaatttgttaggaggttacttttgttacacttttctttaattgatggggaatctgatattcaggaaattgaagggaatcactcagggtcccatggctggttaccagcatacagaggcctagaatccctacttcccctcttttccactacttcagaatctggaactttcatctgttaatcaagataccaataaccaaaaccacctatataatttcattctgatttttctgcaatctttgtttactaaaaacaaatgagaaataaacaaggtaatattagggattttaaaaatgaaaaaraaagaaagaaaatagagtccaggacataccattagatcagtagtaattgaaattcccgtcatttatttgatatctttcaaacccgtgaatccagataatgattataacttattctaagaacattg

SEQ ID NO: 526839 - DNA, 560 bp, Homo sapiens
ggttagtggcattgataactagaatccaggctcctgaccttaagtaatccatcttcccgccaaatttcatttaaaaaaaaacttttacaaatgattgtcttcctacaccctaagtatcataaaaaacatataaagtgaaatttgttaggaggttacttttgttacacttttctttaattgatggggaatctgatattcaggaaattgaagggaatcactcagggtcccatggctggttaccagcatacagaggcctagaatccctacttcccctcttttccactacttcagaatctggaactttcatctgttaatcaagataccaataaccaaaaccacctatataatttcattctgatttttctgcaatctttgtttactaaaaacaaatgagaaataaacaaggtaatattagggattttaaaaatgaaaaagaaagaaagaaaatagagtccaggacataccattagwtcagtagtaattgaaattcccgtcatttatttgatatctttcaaacccgtgaatccagataatgattataacttattctaagaacattg

SEQ ID NO: 526840 - DNA, 616 bp, Homo sapiens
acctctagacatatttcctattgctaatatttattctgctgcctttacatctcgtttccttgacacacgtaatcttaccgtatgaaaatgattccctgttactatatgtattggaaatcattcgtagagctttgcattactctgtttatctctctgtgtgtactagggtctttgaaaggttgtactgtggaatttgtactgtgagttgaatattaataagataaggagaagaaataagttttccccttcctttataaccccacactggccctgtgagcaggaaaaccagctcacatgggtaggcctagacatcccagctctgccmtccgtatcccgttaatacctcatgacaaatggaggggctgctttatgacagttttggattttctaagtaaaacattcaagaagtcagcatcctctgctttagttgagtgctttatttattaggggaactatgaaattttagcctgttgctctcctttttaccttttttttttttaaagtatagttaaggattagcaaagacttttaccacaaggaacaaagcatttcaaactccttaaagagataacactaatattctactttatttctgtatttgcacatacaaaaacta

SEQ ID NO: 526841 - DNA, 616 bp, Homo sapiens
acctctagacatatttcctattgctaatatttattctgctgcctttacatctcgtttccttgacacacgtaatcttaccgtatgaaaatgattccctgttactatatgtattggaaatcattcgtagagctttgcattactctgtttatctctctgtgtgtactagggtctttgaaaggttgtactgtggaatttgtactgtgagttgaatattaataagataaggagaagaaataagttttccccttcctttataaccccacactggccctgtgagcaggaaaaccagctcacatgggtaggcctagacatcccagctctgccctccgtatcccgttaatacctcatgacaaatggaggggctgctttatgacagttttggattttctaagtaaaacattcaagaagtcagcatcctctgctttagttgagtgctttatttattaggggaactatgaaattttagcctgttgctctcctttttaccttttttttttttaaagtatagttaaggattrgcaaagacttttaccacaaggaacaaagcatttcaaactccttaaagagataacactaatattctactttatttctgtatttgcacatacaaaaacta

SEQ ID NO: 526842 - DNA, 186 bp, Homo sapiens
aagcctagaaagagccgaaaatcccrtgtcccaataagaatgttttcgtattcagttaacttcatctaatgtctctggccttactattctaatctgctaaatgggtataattatcctagacctgccttgctcagagttgtaaatttatgcaaacacaatttgaaattaagtgtataatgcgctatg

SEQ ID NO: 526843 - DNA, 506 bp, Homo sapiens
taacttttacatctaacattaaaaatgtatttagattcacagatccatatgatgactttcttcttgatactttgcctatgggtatattaaatcattactgggtaagaagaataccctgtaacaaccaagacaaatgacctcagcttgagatgaaaaatacaacaycttaaaaaaaaatctataataaagctctttatcaagtgactaaaccttaaccaatatgaaaatcactgtattttacataccatgccaatatagcttgtataaagaaaataaacatctcagtatattttgaaaactgtcttacaaatctttcactattaaaacctttcacgattaaaacctctggttgcaaatacagttttatggaaaacatgttgttatgttttatctcttaattgcagtattcagctattatatagtatatgattgtttttcaatatttttgtgtgggttatactgtaaactacttttaaaaaaattattatagaatctatgcatagagc

SEQ ID NO: 526844 - DNA, 591 bp, Homo sapiens
cctctcaaaaatcacctgaggctgggtgcagtggctcacgcctgtaatcccagcactttgggggcccgaggcaggcagatcacatgaggccaggagtttgagaccagcctggccaacatggccaaaccccgtctctactaaatctacaaaaattagccaggcatggtggtgtgcacctgtagtcccagctactcggggggctgaggcargagaattgcttgaacctgggaggtggaggttgcagtgagccgagatcacgccattgcactccagcctgggtgacagagcgagactctgtctcaagaaaataaaaaggcaccggacgccaatggggagcatcttggttaatagtgaactcctcaactgctgaggcatcaagaggcacctgattgtgtccccttccaaattcatacagtgaaccactaacccccagtgactctggaaatagggcctttaaagaggtgattaagttcaaccgaggccgttagagtgggccccaatccactctgactggtgagtgagtgagtgtagggacggcaagcctggcagcctgtcccagaagcacggtgtggaggggagggacagcatgga

SEQ ID NO: 526845 - DNA, 591 bp, Homo sapiens
cctctcaaaaatcacctgaggctgggtgcagtggctcacgcctgtaatcccagcactttgggggcccgaggcaggcagatcacatgaggccaggagtttgagaccagcctggccaacatggccaaaccccgtctctactaaatctacaaaaattagccaggcatggtggtgtgcacctgtagtcccagctactcggggggctgaggcaagagaattgcttgaacctgggaggtggaggttgcagtgagccgagatcacgccattgcactccagcctgggtgacagagcgagactctgtctcaagaaaataaaaaggcaccrgacgccaatggggagcatcttggttaatagtgaactcctcaactgctgaggcatcaagaggcacctgattgtgtccccttccaaattcatacagtgaaccactaacccccagtgactctggaaatagggcctttaaagaggtgattaagttcaaccgaggccgttagagtgggccccaatccactctgactggtgagtgagtgagtgtagggacggcaagcctggcagcctgtcccagaagcacggtgtggaggggagggacagcatgga

SEQ ID NO: 526846 - DNA, 638 bp, Homo sapiens
tgttgattacacgaaattatatatgtaaagtgcttagtatagtatctgaactatgatagatgtttgctaattgctagacataattattattccaatgcttctgctgtatcaatgtgtgacctttcccacactacttctctattatataygctacaaaaacaaaacagatataaagtatatctttgcatttttccactagaaaactatttttaaatttgttttcttagtttttatagtcataacaattcttttgctgaaagaatcctgagttatatacaacacgtaaagtattgcaacctctgctgttgaaacttcacctcattatcactcatttggctgctgccactgttgagttactgatttactcgcaagagcagccaaacatggtcctcttcagggccagtcagataatcagatgtacccatagtgtaatttaattcacaaacaagttacatttgaatagaagacacatgcattatttcatattattacaataatagttctatcagataggtatattattgatgtctctattttagagatgaagaaactgaaggctagtgaggttaagcaactttccccagcacacagaacacgtaagtgatggatcctagatttcagagctagaaatataaccc

SEQ ID NO: 526847 - DNA, 638 bp, Homo sapiens
tgttgattacacgaaattatatatgtaaagtgcttagtatagtatctgaactatgatagatgtttgctaattgctagacataattattattccaatgcttctgctgtatcaatgtgtgacctttcccacactacttctctattatatacgctacaaaaacaaaacagatataaagtatatctttgcatttttccactagaaaactatttttaaatttgttttcttagtttttatagtcataacaattcttttgctgaaagaatcctgagttatatacaacacgtaaagtattgcaacctctgctgttgaaacttcacctcattatcactcatttggctrctgccactgttgagttactgatttactcgcaagagcagccaaacatggtcctcttcagggccagtcagataatcagatgtacccatagtgtaatttaattcacaaacaagttacatttgaatagaagacacatgcattatttcatattattacaataatagttctatcagataggtatattattgatgtctctattttagagatgaagaaactgaaggctagtgaggttaagcaactttccccagcacacagaacacgtaagtgatggatcctagatttcagagctagaaatataaccc

SEQ ID NO: 526848 - DNA, 638 bp, Homo sapiens
tgttgattacacgaaattatatatgtaaagtgcttagtatagtatctgaactatgatagatgtttgctaattgctagacataattattattccaatgcttctgctgtatcaatgtgtgacctttcccacactacttctctattatatacgctacaaaaacaaaacagatataaagtatatctttgcatttttccactagaaaactatttttaaatttgttttcttagtttttatagtcataacaattcttttgctgaaagaatcctgagttatatacaacacgtaaagtattgcaacctctgctgttgaaacttcacctcattatcactcatttggctgctgccactgttgagttactgatttactcgcaagagcagccaaacatggtcctcttcagggccagtcagataatcagatgtacccatagtgtaatttaattcacaaacaagttacatttgaatagaagacacatgcattatttcatattattacaataatagttctatcagataggtatattattgatgtctctattttagagatgaagaaactgaaggctagtgaggttaagcaactttccccagcacacagaacacgtaagwgatggatcctagatttcagagctagaaatataaccc

SEQ ID NO: 526849 - DNA, 649 bp, Homo sapiens
ctttaaaaatgaacaataagtgaccaaattctatcagaattttacatactatctcacaaatgaacatttattgcttttgtacgattaatttcttagagtggtgtgtatccaaaatgccatcatctgagaaagcagatcaatattttattgtgattataggccccgccacacttagaatattctccaggctgtccctcttaatttcaactatataaagaaaaattgcgaagagacttgacctagtattttgattaaactattcttttcacaaatattgatctatcatatgtcaaatttcactagaattactgagtatttggattatagttcagtcttctccatttatacacatttaatttaattgtaaagatagctgcatctcatgcttttacaaatatttttaagaagaaatacattttccatgcccygatttgttcttcatttcttttaacacttctgtttctatcacatccaatgtttttactaatatttttgtgtccaatgtttttactagtattttttctgcaatatttttttctacaaagaaacctcttttctactaaaatcttggccctaaatccatttttgattccaaaaagaaataaaatgtgggtgtataatccatttgaaaattaacaaataatgattt

SEQ ID NO: 526850 - DNA, 560 bp, Homo sapiens
ctactcaacttttcttaattgtgcattggaggactggtgaataaccaactcactctgtttcttatcacttcataattaattgaaacagaatcgtgtgtgctgaaaaccttccaatgagcctaactttcccaggctgaacatattattattattgttattattattttgagacagagtctagcactgttgcccagggctggagtgcaatggcgtgatctcagctcactgcaacctctgcctcccgggttcaagcgattctcctgcctcagcctcctgagaagctgggactacaggtgcgtgccaccacrcccagctaatttttgtatttttagtagagacatagtttcactatgttagccaggctggccttgaactcctgacctcgtgattcgcccgcctcagcctcccaaactgctgggattacaggtgtgagccactgggcccggtcatgaacacattatttctttagagaacagtcttttggtagtaagcactgggatgcttctgtataaaccggaatggcaagtggccagtgtggtcagatgcagccattcctttta

SEQ ID NO: 526851 - DNA, 644 bp, Homo sapiens
ctgtgattttatgcagggagtaaatatatgtacattgattaataaatactggtgtctttttacgcatggaattttcctcatctaaaaatacaggggttggattagatgatcgctaagatcccttccagttgtgacattctgcaagtctctaagtttccactatgattcaggtcaaggtctcttgatttttgcctcctctcaccagcggcagaggttaccctgagcagcataatggaatcaacagcacacrtggtctccttctcaccctctgctagacagatgagcacgttccattacagagggtgagacggcttccttcgtgaccagccttgcaccaatccatccatcagccgattaacggtggctaaaagccacttatcggagggctcctgcccttatcactgtcactggctgcaaataaacatcgactttatgccgagtttccatatttaaccacatttaagtaactgctgatactttcattacatgacatttgcacttcagaattcaagattagacacatgcacagagctcttgcaccaaataggaaagcccagtttgtttgggggccttcctgccatttcttttcaaagaaaggaagcttcaaagtgaattccatagaacacaagaatctcttgtactct

SEQ ID NO: 526852 - DNA, 548 bp, Homo sapiens
caggaaggtaataaagtcacatgaggaaggtagaagggacaacttgaaggcctcatgaaactcatgctgagggtctctgaatgccaggaaatccttctcctggctgggtgcaagactgcgtctcttactctgcagaaatttgctggcatctttctgtcaagttcataatttcctagttgtgcyagctgcatagggctgcagaggacaatgccaaactcagtggagccaaaagtaatctcagaatgtaagaaaacatcaatagtaggctttacttatgctcagggatcatttatgattctcccactaccaaatcaacagactttctccccgttattcctgcccataaccttctatactcttcctggagaaacattgccagttgtttccgtatgcaaggctgtcctcattcctcatttacctcttttgagtcctgatttattgtatactcacgactgtggatgttttccaaaaataagtctctcaccctttgatcttttccctttatatacttaataaaatattactaaaattaacatatactccaataa

SEQ ID NO: 526853 - DNA, 633 bp, Homo sapiens
gccagctgggaaagtcaggaaggtaataaagtcacatgaggaaggtagaagggacaacttgaaggcctcatgaaactcatgctgagggtctctgaatgccaggaaatccttctcctggctgggtgcaagactgcgtctcttactctgcagaaatttgctggcatctttctgtcaagttcataatttcctagttgtgccagctgcatagggctgcagaggacaatgccaaactcagtggagccaaaagtaatctcagaatgtaagaaaacatcaatagtaggctttacttatgctcagggatcatttatgattctcccactaccaaatcaacagactttctccccgttattcctgcccataaccttctatactcttcctggagaaacattgccagttgtttccgtatgcaaggctgtcctcattcctcatttacctcttttgagtcctgatttattgtrtactcacgactgtggatgttttccaaaaataagtctctcaccctttgatcttttccctttatatacttaataaaatattactaaaattaacatatactccaataaaaatgtcatgaggcacacaggagatgcacaaaataaaaagggtaaataactaataagcataaaatagtca

SEQ ID NO: 526854 - DNA, 633 bp, Homo sapiens
gccagctgggaaagtcaggaaggtaataaagtcacatgaggaaggtagaagggacaacttgaaggcctcatgaaactcatgctgagggtctctgaatgccaggaaatccttctcctggctgggtgcaagactgcgtctcttactctgcagaaatttgctggcatctttctgtcaagttcataatttcctagttgtgccagctgcatagggctgcagaggacaatgccaaactcagtggagccaaaagtaatctcagaatgtaagaaaacatcaatagtaggctttacttatgctcagggatcatttatgattctcccactaccaaatcaacagactttctccccgttattcctgcccataaccttctatactcttcctggagaaacattgccagttgtttccgtatgcaaggctgtcctcattcctcatttacctcttttgagtcctgatttattgtatactcacgactgtggatgttttccaraaataagtctctcaccctttgatcttttccctttatatacttaataaaatattactaaaattaacatatactccaataaaaatgtcatgaggcacacaggagatgcacaaaataaaaagggtaaataactaataagcataaaatagtca

SEQ ID NO: 526855 - DNA, 573 bp, Homo sapiens
taaaacatggacaataaataagtaatatgggtaagtgcttacttagaacagcacatgacacacagtgagtgctatataaatgttggctacttgtaatagtagtggcagtaatgttccaaatttagttgggcaaataaatattaatcatgtaaattaaatatttaattgaatatttcaaattcaagcagacattggttctatgctatttccatgtcttatttcttagagttacctgtatttctgatgtagtaaggccactttttgggttgcttcttccaatactttttcatcttgtaaccatccctgaagaaaacacacagtggtaagtatgtgacaattcaccccaatttcttagaaggaatcatggccattgactgttaatgactctygtcactatcaggcaaaattatgactattgttactatatgggagctttgtttacataggtaatcatctttctaaggaattaactggcttctcacaagagccaaaaaaaaaaaacttgccccaccttctcaattccagggaaagtttcagctgagttatgtcaagttggtgacagtagttagccag

SEQ ID NO: 526856 - DNA, 550 bp, Homo sapiens
ctgaagcctcaagctcctgggctcargcggtcctcccacctcagcctcctgagtagatgggactacaggtgctcactaccgtgcctgggtaatttttttttttttttttagtttttgtaaaggtgggagtcttgctgtcttagccaagctggtctcgaactcctggcctcaagtgattctccagcctcagcctcccaaaatgctgggattataggtgtgagccactgcgactggcctgcgctgcacttttgaaagctccaaaggcttacaggtgtaaacgttgaggtttgtggtagacagtctgcagaaatgaccaccagctattccccctgcacacaaaagctgcagctcccataaggaggtgagtctatttcccgtcccttagaatcggacctggctgttgacttcctttgaataatagaatgcgatattgtgtcagctccaagccaaacctttaaaaggactgacagtctcctcttttgtcctcttgcaactcatccaccacataaataagctcaaagctagactcctggatgacaagagaggatgc

SEQ ID NO: 526857 - DNA, 537 bp, Homo sapiens
ctggtttactctccacgagcttagttaggagttaagcagatttcatgaaggcaccgtgataatattaccaatgctcatggcttggggtaattgtgtcaaggccaatttaacagtatttgccgcagaatcatccttaactttcaggctgtgaattggctgttgatctacataacaatctgagaacttggtgaggtgttttgggattctgatgggcctgtcggaacacagaaccatttttgaaatattttattttatccagtttctacaagtagaacttttaaaccatggatttaagattaagaagaggctgactgcaagctcataacaaatagaacatygaggctgggcagggtggctcacatccataatcccagcactttgggaggcagaggcgggaagattcctcgagtccaggagttcgagagcagcctgggcaacacggcgaaaccccagctctaccaaaaaaaaaaaaaggaaaaattagccaggcgtggtggagctgcagtgggaggatcacttgagcccaggaggcagaag

SEQ ID NO: 526858 - DNA, 537 bp, Homo sapiens
ctggtttactctccacgagcttagttaggagttaagcagatttcatgaaggcaccgtgataatattaccaatgctcatggcttggggtaattgtgtcaaggccaatttaacagtatttgccgcagaatcatccttaactttcaggctgtgaattggctgttgatctacataacaatctgagaacttggtgaggtgttttgggattctgatgggcctgtcggaacacagaaccatttttgaaatattttattttatccagtttctacaagtagaacttttaaaccatggatttaagattaagaagaggctgactgcaagctcataacaaatagaacattgaggctgggcagggtggctcacatccataatcccagcactttgggaggcagaggcgggaagattcctcgagtccaggagttcgagagcagcctgggcaacayggcgaaaccccagctctaccaaaaaaaaaaaaaggaaaaattagccaggcgtggtggagctgcagtgggaggatcacttgagcccaggaggcagaag

SEQ ID NO: 526859 - DNA, 450 bp, Homo sapiens
cctgcaccagggtgtgaggttgtagggaatggaatgtaaacattgtcattctgagatgagctgcccgaaagttcagcagtgaaaatagcaagaataagtttccttccagaacctggcaaagccattttgatttgtttgtgaacccaggtggggcttgtttattgacaaactgtgattcttcagatcaccaggtgatgtttacaaaatgwaatgttaaatccctccatacctctttaaaaatgtgtccccatatttgcaagtttctcagagaaagggccacatagttaagcagctgctggtttgaaatgtaaagtacttagaaagtacctaaggaaaagagctttataataaattttttaatcaaaattttgaactcaccttgtgcagctttgctcacggggcatgttcagctcatgactaatggtcactcttacttgactttgcctattt

SEQ ID NO: 526860 - DNA, 656 bp, Homo sapiens
gagaaagagcctcgtggacacagagcttgccaacagcagccccagaagaaaaggaaagcatcttcttccatcagttctggcctcacaagacagagaggaatgagcaggggtggaaggtagctttgtaagtgacacagtgatgtacctctgaccctattttgatactagttacattaaatcagtcctaaatggccttttggaatccccagttgatgaaatttatttctcctttgtttcatgtgccactcaggatctcttgaattcgtgaaatttttattaagaaagcctcatacaccaataaacaacgtgtgcacagactccatagcctctctgctaacacattgctcttgtatatcaggaaggtctccagcatcaaagtgagtcagttattgcacagagtcccaaccttgccagctttttgccaaatggtcaccatcctgtacatccttccttcctggaagtgatagaaatctctatggctatttttgctacaaggagattatggcacarcatatggagtccttactctccaggggcaaaagaaaagtcttgtctttgcttaagcaagtcacacagtagatgccacaggcttagggcaactgtgtgtctgcatgattcatgggggactgcacgggggagccgcagcacacggagca

SEQ ID NO: 526861 - DNA, 489 bp, Homo sapiens
attgaatttgtctagagtggggcctagacacataattttttgaagctccccaggtgatgctaacatcagcctggttgaggaaactgcatctgatggtctcttatttttctggtaaacctaaaattctctgaatttgcaatatggagtcactgagctaggagacaggcaatttcccaaggaattttagggtgattttcatctcaaaagacagaagtgcagaaggttgagtgaatatatatatatatatatatatatatatatgaacaatttaaacacttatctggtaccatttgtggattggaagatgtgtgccttaggtagtcttttccttctctctaaactgacataaacaagttagctaaaatccctaagatgttctaatctgatttcagcctcttgtggcaaactrtgaagtacattgttaagaacagagctaaggtttgaaagcacttaacagtgaaagctgtgaaacagcctgaacaagagagt

SEQ ID NO: 526862 - DNA, 646 bp, Homo sapiens
cacaaggttaattatcgttaatgactaattaaggagtcatgtgaagtatttatcttgaataatgtggatccatgtggtttgtgctattggattttagctctctgctgtgacagcgctcttcaaaacaccataytgaggttaaatctctttggtactatatgctagggttgtgaagcctgaggacatattttacagtgacactggccaggtttagcctggcttttagctaactgtggagctagaattattcttgttcatttgaggcttccagcttggaatttgaagataaatgagtcagttccatctattctctagcaattaactgataattgggatgtttaatcggaaaactgacttgaaggacgttagcctgattagatgcgttggcatgaaaaacaggttctactcctagttcatctacattcacatgctatattaacaccctaactccagatcaaacccaaatccagcttgttaatgaatatctaaaaaataaatgaatacttacaaaaatgctttctggaaacttaatagatttagaagccaatcttctacagactacttgagtcactaatatttattctacagttacttacagctcacctacttagggcaaggaaggtgcttataggtatgtaaacattaa

SEQ ID NO: 526863 - DNA, 424 bp, Homo sapiens
tcctaaagcctttcctaaaccttaaggacacaggacctcaggttgagaaacctcagttgaaagggttcaaaaataaggcttttattaattcctaacattcagggtgtggttccagtgttttcctttgtatttgaggacattttcacttcaattaattatagaaaatagttacttagtagaaaacaggagctaggagctataaattttagagaaaaagatgttcttaaaaatgtgttctcacttayggcttctggtgaaatatactagatgatgacccattttaggacctatttggttgtgttatttaggtgttttcaaaagcctctatttttttaaagagtttgtttgaggtttgcagtagatgaaaacttaaaaaaacaaaactaggacagtttgagtgaccctggcttggtatcttttgtta

SEQ ID NO: 526864 - DNA, 424 bp, Homo sapiens
tcctaaagcctttcctaaaccttaaggacacaggacctcaggttgagaaacctcagttgaaagggttcaaaaataaggcttttattaattcctaacattcagggtgtggttccagtgttttcctttgtatttgaggacattttcacttcaattaattatagaaaatagttacttagtagaaaacaggagctaggagctataaattttagagaaaaagatgttcttaaaaatgtgttctcacttatggcttctggtgaaatatactagatgatgacccattttaggacctatttggttgtgttatttaggtgttttcaaaagcctctatttttttaaagagtttstttgaggtttgcagtagatgaaaacttaaaaaaacaaaactaggacagtttgagtgaccctggcttggtatcttttgtta

SEQ ID NO: 526865 - DNA, 669 bp, Homo sapiens
tgggctaggactccttccacctccttcgaccctctatacccttgtcccacactgagggttgggggagctgctgcagttgctgtttcggctgctgtttcattcctgtccacttgtgagtgtgtgtgtacctccgccagtcttggaggtctgtgaaggaggcctcgagacccagtgcatgcagctcactgccacgtgtgccacagccacagccaaggggccttcctatgcctcatgcatcaggccctttggagccctgggagcagacggccatggcggctgaagctgcagtggatgcactcatgatgatgaggataataatagttgctaacatttcttgagcatttcacttrtggtatgccagacactattcaaagcccttagcttaaatcatttaatcctcacaaacctgtgagttgggttgtcttattatccccattttgcagaagtgagttttgtgagagagaagctaaatacagcacagcaggagttgctcttggacctcaagcatcctggcccagagcccaggtgtcgccactgccctgggcttcctcttagtcataccagggacttgggcactgggcacaaaatctcctctttatataatgtagtggtaccaatagcttctattgattgagattcttttctgggcttggcactgtatgaggcact

SEQ ID NO: 526866 - DNA, 669 bp, Homo sapiens
tgggctaggactccttccacctccttcgaccctctatacccttgtcccacactgagggttgggggagctgctgcagttgctgtttcggctgctgtttcattcctgtccacttgtgagtgtgtgtgtacctccgccagtcttggaggtctgtgaaggaggcctcgagacccagtgcatgcagctcactgccacgtgtgccacagccacagccaaggggccttcctatgcctcatgcatcaggccctttggagccctgggagcagacggccatggcggctgaagctgcagtggatgcactcatgatgatgaggataataatagttgctaacatttcttgagcatttcacttatggtatgccagacactattcaaagcccttagcttaaatcatttaatcctcacaaacctgtgagttgggttgtcttattatccccattttgcagawgtgagttttgtgagagagaagctaaatacagcacagcaggagttgctcttggacctcaagcatcctggcccagagcccaggtgtcgccactgccctgggcttcctcttagtcataccagggacttgggcactgggcacaaaatctcctctttatataatgtagtggtaccaatagcttctattgattgagattcttttctgggcttggcactgtatgaggcact

SEQ ID NO: 526867 - DNA, 678 bp, Homo sapiens
ttgcccgaagggacctgaggacatacttaatacaattttacttctgatgatgactcctcaccccaccacccaccacctgatgatgtgtgggtcttctttccttttcctttttttttttttttttttttttgagacagagtccccctctgtctcccaggctggagtgcatggcgcgatcttggctcactgcaacctctgcatcccgggttcaagtgattctcctgcctcagcctcccaagtagctggaattagaggtgcatgccaccatgcccagctaattttcttgtacttttagtagagacggggtttcaccacgttgcccaggctggttttgaacttctgacctcragtgatctgcccgcctcagcctcccaaagtgctgggatgacaggcatgagccaccacgcctggcctggatcttcttttctaaacactagagattttttgtcgtttatctccttctcttcaaaagtaatcttggagaaattgctgccaaatctttgcctctctgcagcaaacattttaaaatggggtgaacagaagtgcaggtcaacagagggtttcctcacagcaaaaacattttgcttgttgataaacatgtctttgttttttatacctggtgacgttatttgaggtctttgataggatggaccagtactctgcattaagtcgtcgtcg

SEQ ID NO: 526868 - DNA, 678 bp, Homo sapiens
ttgcccgaagggacctgaggacatacttaatacaattttacttctgatgatgactcctcaccccaccacccaccacctgatgatgtgtgggtcttctttccttttcctttttttttttttttttttttttgagacagagtccccctctgtctcccaggctggagtgcatggcgcgatcttggctcactgcaacctctgcatcccgggttcaagtgattctcctgcctcagcctcccaagtagctggaattagaggtgcatgccaccatgcccagctaattttcttgtacttttagtagagacggggtttcaccacgttgcccaggctggttttgaacttctgacctcgagtgatctgcccgcctcagcctcccaaagtgctgggatgacaggcatgagccaccacgcctggcctggatcttcttttctaaacactagagattttttgtcrtttatctccttctcttcaaaagtaatcttggagaaattgctgccaaatctttgcctctctgcagcaaacattttaaaatggggtgaacagaagtgcaggtcaacagagggtttcctcacagcaaaaacattttgcttgttgataaacatgtctttgttttttatacctggtgacgttatttgaggtctttgataggatggaccagtactctgcattaagtcgtcgtcg

SEQ ID NO: 526869 - DNA, 495 bp, Homo sapiens
gagaagggattcgagttaaatggaatcatccagagaatttgataaaatgatgatggctatccgtttatgctcttaaaagtatgcacttgagacctctaagtagatgtttatttgtttatcyctttccagggttcatgtgtttatcttgtttccttttgtatgcattttctgctttgcccctcacatagtaattcttggaagcaagtagatcattgtttccatttcagttgagatcactttaggggcatgtcttggacttgatgacagatcttccactatcttatgctccctacctcacatttattgagtacctactatgtaccaatccttaacatttgttattccagtttatcttccatcagtcctgttgaggtagatattgtgccccattttacagatgaggaaatcaaggttctgagagattagataatttctaggaacatacaaccaataaaagggaaaggaagagtctgagttcaaacccagttctttggt

SEQ ID NO: 526870 - DNA, 509 bp, Homo sapiens
ctgctggacccctatctgacggtgagcgtggaccaggtgcgcgtgggccagaccagcaccaagcagaagaccaacaaacccacgtacaacgaggagttttgcgctaacgtcaccgacggcggccacctcgagttggccgtcttccacgagacgcccctgggctacgaccacttcgtggccaactgcaccctgcagttccaggagctgctgcgcacgaccggcgcctcggacaccttcgagggttgggtgagtagcggtgaccccttccctttgtgtccacccaacccccgttccccttatgtttttcaaaactcacccgggtcccgctttcccatcgctttgtggctgagggaattccctccagactttggtcttcgtccasgtggccgcggcactggtgacgcgaccgcggtgggtgtgtgcaggcgcaggtgtgtctccaggaagccggcctggacacgatcccctttcaggacagcggcttggcctaacgggaagtcgggcagggg

SEQ ID NO: 526871 - DNA, 630 bp, Homo sapiens
tcactgtcaagatcaacgttaatgataatcttgctcttgctggtgaaagtcaggtcacacactcagcctgacttcaccctttaatgggggtgtgaagaaattggggcatgtcaggaggaaactgactagaatggtgaaggaggagaaaatcatgtcctacatgaagttgctgagagtttgagatacccaggtctattttatttactcatttgttccacaaaccattttctgtccccttatatgcaaggtagggtctcctttggggacagggcataatgactacaacatgatgtgggttccagcagtagtcttcataacaggtgtggagttgcccacctgtctgaaagaggtctggaaaggtccccctatacaggtgggtcttgaattgatggacaaataggagttggacaagtataaaaaggaagaaaggagtttccagccagaaagatcacataccccaaatcactaggcaataagctacagatgggtaatgtgtaattttcataattttgactrtattccccagtatgctgcttgatccataatgcgtttggttgctctctcagaataaatgaaataacatacctccctggagagtgtacaagaattaagagatggggatactggttg

SEQ ID NO: 526872 - DNA, 554 bp, Homo sapiens
ggacatcagagagaagcaatgtgacttcagagggacagatcaatggcttgacttcggagaagagtccggccagagatggctggactggaggggaagattacctgcctgttctatccccttttctagctcttcttcctgctaacagccactttcattgttcaataaaatcctcctcattcacttcatttttcctggacaccggacaagagctcagaacccacaagtgcatataactccccaaacaggctgtcatactagccttcagctaaagatggcctcaccagggaattttatgaaatgcttttaattaaatacaaccaatactgcacaaaatgagagtaagagggcatactttccaacacatttgtaaggtcaaaattattttatgccaagatcaaagatctttcaaatagaaatacaatatatcaacatccctcatgaacacaggtgaaatcattaacaatatcagcaaatctaattcagtatataaaaatgaaaacacactatgaccaagggagtattatactggsaatgaaaggcaggttcatacttaa

SEQ ID NO: 526873 - DNA, 551 bp, Homo sapiens
tgttacaacaataatagagaagaaatacatctttctttatgaaaatactgtctcccttgctttatatgtatgatcatatgagagcttctttccttatacwttactccatgtccctggtcacgtgactgtgacccatgctgaggcagccattctagtttaaaatgcgatatgtggtggtgcgctcttttcttattaatttgaaacaatgacatcattaaactaaactagctaatagctatagttttagcattgtagtttgaaaagatgagtctaaagcacagaaatgagcaaaagtgaaaaattacaaataaaaagtattgatgagattcaatccctgatcaaccatatccaagtttaaccccattcttgtccttcctgcaattggtatatatcagctaacacacttctcattggcctgttggttagttagatttgcatttatgtcacttgcaaccaaaacatgtataaatatagtaagtgaagaaatagtatctatcactggaaataaatactattgtaattctttatcaaattttccataccttacatga

SEQ ID NO: 526874 - DNA, 545 bp, Homo sapiens
taaaaagagtaaaaagtgaaactcccatatggttacacagacaatagtaaaaccatatcatgttatgaattctttataatggtttcaatctgatactaatcattaagagtcctaattatcaaawcacttttgcaattccaactgaatatcaaagtttaaagcaaaacatgtgcatatttccagtgctgtgttaattgttctccttagatttagtagtagaaactgaagagatggaatattatatcttaggagtaattttaattatatgtgttctgtgatctgctaaaataatatggttaatttattaaggatatatgagttattttaaggatttcataatgtctagctctagattataataattctacactacttaaaaaatatatccactgtaactcacttgagtctccaactttataaaattcagtctttaacctgatattcaaggttgattaacatttcatctcaccttcattctccaaacacagtttaaatattctgttccttaaatctggcagtgaaaaaaactacgaatattaaaaaaa

SEQ ID NO: 526875 - DNA, 545 bp, Homo sapiens
taaaaagagtaaaaagtgaaactcccatatggttacacagacaatagtaaaaccatatcatgttatgaattctttataatggtttcaatctgatactaatcattaagagtcctaattatcaaatcacttttgcaattccaactgaatatcaaagtttaaagcaaaacatgtgcatatttccagtgctgtgttaattgttctccttagatttagtagtagaaactgaagagatggaatattatatcttaggagtaattttaattatatgtgttctgtgatctgctaaaataatatggttaatttattaaggatatatgagttattttaaggatttcataatgtctagctctagattataataattctacactacttaaaaaatatatccactgtaactcacttgagtctccaactttataaaattcagtctttaacctgatattcaaggttgattaacatttcatctcaccttcattctccaaacacartttaaatattctgttccttaaatctggcagtgaaaaaaactacgaatattaaaaaaa

SEQ ID NO: 526876 - DNA, 576 bp, Homo sapiens
gcaagcttgcacgggtgaaggtcagcaggaaaaacctacggggactaggcatgttcaaaatggcagctccatctccctttccctttgccaaccacgtgtacaggaaggagcagacaagatggcaccggtcaagtggaaagcccaattgcataataatgttagggtggggcggccagccttctcctcatgctatgtaaacctcacacctgatataaccaatctgtgggtcctacataagtcggacactaccttctcaaacctgtctataaaacttggcgcactctgccattggccagtctttccctttcagaagcccttgtctctctcaccrgagagagagctattctcctttctcttttttctgcctattaaacctctactcctaaactcctccatgagtgtctgtgccctaaattttcttggcatgagacaatgaaccccaggtatttacaccagacaatgtcaccgcttcattattaagttggaaaaatgtaaaacttaaacattgtcccaaatattctttttttgcctttgttatgtttccaggacatggaagtagaaattctcttcccaata

SEQ ID NO: 526877 - DNA, 613 bp, Homo sapiens
caaccacttaaacacagattacagcaaattttgaaatgcctctcaaattattgcttgttcagttatttttaataaatgtatttaatacggattgtgtacagtgaaatgctcattcttgtgctagtaaaagtgaattttagtaaaatcattcttggtaagactctgtataactttggacatmaattactattcctgcctgggcatggtggctcgggcatggggtgcatgcctgtaatccagctacttgggaggctgaggtgggataatcgtttgaacccgggaggccgaggttgcagtgagccgagatcacaccactgccctccagcctggccaacagagtgaggattcatctctctctctctctctctatatatatatatatatataattattattattattattccttttagaaatcttatctaaacaaatttaggccaagacttgtttaaaagatgtctggacatttttctctaacagcaaaattggaaaacaaactaaaccttgataaataagagaaaagtaagatcaattatggtctgtcccgtatgaagctatttatttaaattttgctctttatgtattttcaatattcagtgcaattgctgccacc

SEQ ID NO: 526878 - DNA, 567 bp, Homo sapiens
aaattattgcttgttcagttatttttaataaatgtatttaatacggattgtgtacagtgaaatgctcattcttgtgctagtaaaagtgaattttagtaaaatcattcttggtaagactctgtataactttggacataaattactattcctgcctgggcatggtggctcgggcatggggtgcatgcctgtaatccagctacttgggaggctgaggtgggataatcgtttgaacccgggaggcygaggttgcagtgagccgagatcacaccactgccctccagcctggccaacagagtgaggattcatctctctctctctctctctatatatatatatatatataattattattattattattccttttagaaatcttatctaaacaaatttaggccaagacttgtttaaaagatgtctggacatttttctctaacagcaaaattggaaaacaaactaaaccttgataaataagagaaaagtaagatcaattatggtctgtcccgtatgaagctatttatttaaattttgctctttatgtattttcaatattcagtgcaattgctgcca

SEQ ID NO: 526879 - DNA, 567 bp, Homo sapiens
aaattattgcttgttcagttatttttaataaatgtatttaatacggattgtgtacagtgaaatgctcattcttgtgctagtaaaagtgaattttagtaaaatcattcttggtaagactctgtataactttggacataaattactattcctgcctgggcatggtggctcgggcatggggtgcatgcctgtaatccagctacttgggaggctgaggtgggataatcgtttgaacccgggaggccgaggttgcagtgagccgagatcacaccactgccctccagcctggccaacagagtgaggattcatctctctctctctctctctatatatatatatatatataattattattattattattccttttagaaatcttatctaaacaaatttaggccaagamttgtttaaaagatgtctggacatttttctctaacagcaaaattggaaaacaaactaaaccttgataaataagagaaaagtaagatcaattatggtctgtcccgtatgaagctatttatttaaattttgctctttatgtattttcaatattcagtgcaattgctgcca

SEQ ID NO: 526880 - DNA, 613 bp, Homo sapiens
caaccacttaaacacagattacagcaaattttgaaatgcctctcaaattattgcttgttcagttatttttaataaatgtatttaatacggattgtgtacagtgaaatgctcattcttgtgctagtaaaagtgaattttagtaaaatcattcttggtaagactctgtataactttggacataaattactattcctgcctgggcatggtggctcgggcatggggtgcatgcctgtaatccagctacttgggaggctgaggtgggataatcgtttgaacccgggaggccgaggttgcagtgagccgagatcacaccactgccctccagcctggccaacagagtgaggattcatctctctctctctctctctatatatatatatatatataattattattattattattccttttagaaatcttatctaaacaaatttaggccaagacttgtttaaaagatgtctggacatttttctctaacarcaaaattggaaaacaaactaaaccttgataaataagagaaaagtaagatcaattatggtctgtcccgtatgaagctatttatttaaattttgctctttatgtattttcaatattcagtgcaattgctgccacc

SEQ ID NO: 526881 - DNA, 613 bp, Homo sapiens
caaccacttaaacacagattacagcaaattttgaaatgcctctcaaattattgcttgttcagttatttttaataaatgtatttaatacggattgtgtacagtgaaatgctcattcttgtgctagtaaaagtgaattttagtaaaatcattcttggtaagactctgtataactttggacataaattactattcctgcctgggcatggtggctcgggcatggggtgcatgcctgtaatccagctacttgggaggctgaggtgggataatcgtttgaacccgggaggccgaggttgcagtgagccgagatcacaccactgccctccagcctggccaacagagtgaggattcatctctctctctctctctctatatatatatatatatataattattattattattattccttttagaaatcttatctaaacaaatttaggccaagacttgtttaaaagatgtctggacatttttctctaacagcaaaattggaaaacaaactaaaccttgataaataagagaaaagtaagatcaattatggtctgtcccgtatgaagcyatttatttaaattttgctctttatgtattttcaatattcagtgcaattgctgccacc

SEQ ID NO: 526882 - DNA, 569 bp, Homo sapiens
tgtttgcaacatggccccaaaatatgctttgcataggggaaggctgactttacataatatccactaaataaatgttagctctcacagtacaactttcattacacagcctgaggctctgttttcctgctggagaaatttctaccactgacatagatttgtaaatacttctagttcttgtttcttgtctgttctgcctcaagaagaacttacttgtgagaaagatactcaattctacttcctcacaaacatttaaatgaggtgcattgttctggattttgtaggggtggtggttgtttcagtttagttttaattatttcttgtcattttttgacaagcatactagccacttaataccaaaaccatttttttcttaggccctttgatgtctcccgctgaaagattctttccatttaaaatmaaaaaccattaaaagttgtatgctaggtagcttagtacatgaaagtacgtccctgctgctcctctaagttttctatctgtaggctgttaaggagtggaaggcctgataaagcatgtgcatgcatgcatggatatagatatgcatgggtgta

SEQ ID NO: 526883 - DNA, 607 bp, Homo sapiens
gttggttcctggaggctccaatccatgttgaggattggcataatgggaacggaatgatcttgggtcataggttttgctttttttttttttttttgcttctattcagaaaaaattatactttagaattctgattaaaaatctgagaaatgaaatgagcatgccttttaaaaaatgtttcacaagaacattgcagttttattctagaagttgtagcagggagattttggcttcatgtaatagaaagcccaatgagaataagattaaacactaagggaaatggrtttgctgcatgtaaggaaatctagaagtgggcatggcctggactggctaatccaggggattagccaactctcttacctggggaaagttgcggatattttccatgtaaattctcctgagtcctgcagcctcagtgagaaagtgtgcatgtgtgtactcacgtgtgtgtgtgtgtgtgtaatgtgatgtgggggctttggacaatccattctcttctgtgcagaggtgaactttcactttggagaaactgaacaactgtctgagtgagagcacactcttatcatcctgtgtgatcagtggcactttgctaatgatccaagaagtgaga

SEQ ID NO: 526884 - DNA, 451 bp, Homo sapiens
attgaaaacaattaggggaaaatcgcaccttgaacttagtagaacgtgtacaccatgttctcacaggaaatctcagacatgatattaaaaattccagttgtttcatttttttgcagaacagtctgtagttatgtactgagtgcactgtgcagggggcacacagggcataccaaaggcttcttttgtttatgatacagattcccactgtactcrgaaggttttctttcaaatgcctcatcacagtgtgtccaaacttcttgtagggagcaacagggcctctatttaagcctcttgttagccgatccaccagccaaggtcatgttgctttcccttaagaatcagagccccggggatcctgttctatctgttctttccgccgcctcctgtctttcagcagggcagatgcctcccagaagtaaaccagatgccaggactgtgggggactcttgag

SEQ ID NO: 526885 - DNA, 614 bp, Homo sapiens
tggctgttggccagccgctaacagtcaccagcccccaggggccacgagatctgacaagccccttcccagggccaccacgagctctcttggtctacagttctcaggactgcttctcctacgttcagtttctgttaaatatcccctctgtggggtctgccctgttcatctcatataaacatgtaaatagcaaccccttcatttccyctcaccttctaccccatgtcagttactgttatctgctttgtttattcattgcatcaagatacaacatacagtcatctgtcggtattcatgagaaattggttccaggacctcccccagataccagaatccctagacgctcaagtccctgatatgcaatggtgtagtattcagcgtagcctatgcacattctccctatactttaaatcatctctagattactggtaacacctactacaatgtaaatgctatgcaaatcgttgttacactgtgtcatttagagaataataaaaagaaaaactttgtacatgttcaatacagtttaaagggctttttttgcaaatatttttgactcctggctgcttgaatcggcagatgcacaactcacagatacaaaggactaacagtgcgtt

SEQ ID NO: 526886 - DNA, 614 bp, Homo sapiens
tggctgttggccagccgctaacagtcaccagcccccaggggccacgagatctgacaagccccttcccagggccaccacgagctctcttggtctacagttctcaggactgcttctcctacgttcagtttctgttaaatatcccctctgtggggtctgccctgttcatctcatataaacatgtaaatagcaaccccttcatttcccctcaccttctaccccatgtcagttactgttatctgctttgtttattcattgcatcaagayacaacatacagtcatctgtcggtattcatgagaaattggttccaggacctcccccagataccagaatccctagacgctcaagtccctgatatgcaatggtgtagtattcagcgtagcctatgcacattctccctatactttaaatcatctctagattactggtaacacctactacaatgtaaatgctatgcaaatcgttgttacactgtgtcatttagagaataataaaaagaaaaactttgtacatgttcaatacagtttaaagggctttttttgcaaatatttttgactcctggctgcttgaatcggcagatgcacaactcacagatacaaaggactaacagtgcgtt

SEQ ID NO: 526887 - DNA, 614 bp, Homo sapiens
tggctgttggccagccgctaacagtcaccagcccccaggggccacgagatctgacaagccccttcccagggccaccacgagctctcttggtctacagttctcaggactgcttctcctacgttcagtttctgttaaatatcccctctgtggggtctgccctgttcatctcatataaacatgtaaatagcaaccccttcatttcccctcaccttctaccccatgtcagttactgttatctgctttgtttattcattgcatcaagatacaacatacagtcatctgtcggtattcatgagaaattggttccaggacctcccccagataccagaatccctagacgctcaagtccctgatatgcaatgktgtagtattcagcgtagcctatgcacattctccctatactttaaatcatctctagattactggtaacacctactacaatgtaaatgctatgcaaatcgttgttacactgtgtcatttagagaataataaaaagaaaaactttgtacatgttcaatacagtttaaagggctttttttgcaaatatttttgactcctggctgcttgaatcggcagatgcacaactcacagatacaaaggactaacagtgcgtt

SEQ ID NO: 526888 - DNA, 643 bp, Homo sapiens
tgtcagtcagagtctactagactaayggggctgctgcaaatctcagctttgccgccggcttgggcacgtttcctcagcgtctctggctccccgtattcttgtcttcaacacaatgggtggaagtgtggttcagtgtctaagaaagtctccagcacagtgtgggatggggacaggctcctgttttccttttcttctcagaaacccatgagctggtgcaccatcttgttcatctcgactcacaggtacaggtttgggatcacagtgtgcatattagggacagaaagagaggccactgagataaaggcaggaagagagtaccactgagatacaggcagaaggctaccaaggacatctttatattcttttgcagaccactggggtcacttgaatttagaatttaccaggtgcaattttgcaaactatcttaattatcttgacattataaaagcctgtaatcttgtacttctgacatctgagtaattaggactttgaacaccagtgccttctaggtcacaggcttgcattttttccactgcagattggctgtcagccattaccacctttctgctccaatggaaacctttctaaatgagagcgggattggacaggatggctttgatttgaatcgctgtaaaaacaactt

SEQ ID NO: 526889 - DNA, 632 bp, Homo sapiens
tgatgtcagtcagagtctactagactaatggggctgctgcaaatctcagctttgccgccggcttgggcacgtttcctcagcgtctctggctccccgtattcttgtcttcaacacaatgggtggaagtgtggttcagtgtctaagaaagtctccagcacagtgtgggatggggacaggctcctgttttccttttcttctcagaaacccatgagctggtgcaccatcttgttcatctcgactcacaggtacaggtttgggatcacagtgtgcatattagggacagaaagagaggccactgagataaaggcaggaagagagtaccactgagatacaggcagaaggctaccaaggacatctttatattcttttgcagaccactggggtcacttgaatttagaatttaccaggtgcaattttgcaaactatcttaattatcttgacattataaaagcckgtaatcttgtacttctgacatctgagtaattaggactttgaacaccagtgccttctaggtcacaggcttgcattttttccactgcagattggctgtcagccattaccacctttctgctccaatggaaacctttctaaatgagagcgggattggacaggatggctttgatttgaatcgc

SEQ ID NO: 526890 - DNA, 643 bp, Homo sapiens
tgtcagtcagagtctactagactaatggggctgctgcaaatctcagctttgccgccggcttgggcacgtttcctcagcgtctctggctccccgtattcttgtcttcaacacaatgggtggaagtgtggttcagtgtctaagaaagtctccagcacagtgtgggatggggacaggctcctgttttccttttcttctcagaaacccatgagctggtgcaccatcttgttcatctcgactcacaggtacaggtttgggatcacagtgtgcatattagggacagaaagagaggccactgagataaaggcaggaagagagtaccactgagatacaggcagaaggctaccaaggacatctttatattcttttgcagaccactggggtcacttgaatttagaatttaccaggtgcaattttgcaaactatcttaattatcttgacattataaaagcctgtaatcttgtacttctgacatctgagtaattaggrctttgaacaccagtgccttctaggtcacaggcttgcattttttccactgcagattggctgtcagccattaccacctttctgctccaatggaaacctttctaaatgagagcgggattggacaggatggctttgatttgaatcgctgtaaaaacaactt

SEQ ID NO: 526891 - DNA, 283 bp, Homo sapiens
gtttcaggagtgataacaccagtcactacaaggttacaatatctcttctaaagggcaggggcttcccagaaaatttcattcatgctctcagttctgcctgtggggtaaagcgaactaattttactcagtcttctgtgtaaaagctgctacccttccaatgtttgtccctccaaaactcatgttgaaatttcactgtcattgtgatgatattgggaggtgggacctttaagaggkgcttagatcatgagggctctgccttcgtgaatgagctagtgctgttatg

SEQ ID NO: 526892 - DNA, 283 bp, Homo sapiens
gtttcaggagtgataacaccagtcactacaaggttacaatatctcttctaaagggcaggggcttcccagaaaatttcattcatgctctcagttctgcctgtggggtaaagcgaactaattttactcagtcttctgtgtaaaagctgctacccttccaatgtttgtccctccaaaactcatgttgaaatttcactgtcattgtgatgatattgggaggtgggacctttaagaggtgcttagatcatgagggctctgccttcstgaatgagctagtgctgttatg

SEQ ID NO: 526893 - DNA, 669 bp, Homo sapiens
tcattatccaataagcatactgctcatattttatataaattgttcattttctttttcaatatgtattgagtagtttctctttttttattatactttaagttctagggcacatgtgtacaacgtgcaggtttattacatatgtatacatgtgccatattggtgtgctgcacccattaactcatcatttacattaggtatatctcctaatgctatccctcccccctccccccaccccatgacaggccccagtgtgtgatgttccccttcctgtgttcaagtgttctatagtgaaggcattgataaaaatatatacattaaatggaacatgaacaatcacatagccctttgttatactactagattctccccaaagctaatattaattcatcaacacatcccgcatacagctgttccagtgaactaaaacctctgtaaatgtgttatatgccagcccatatttctacagctagttcataaagaaagactatgaggctttcacagggaccatatttgctatatctgatctgtgagaaccgtatcctatcwaaaaaggaaatagatttagtttaatgacttaatgcaaatataaacaggccccaattgattactgttttctattttagggtcttatatgatatttgttttaatattttatattttattatcttt

SEQ ID NO: 526894 - DNA, 598 bp, Homo sapiens
ttattagttgctatttataaattgctttccaagcacaaaaagcaacatgaatacaaagtactttaagagtcagaatagggcttctgtgaaatcaaaagtctttaaagccmcaaagaaatttaagacaatcccaattcagaagggaaacacatacttggcattcttcctgaccagtggtctacataatatcaaataaaaatcaatattttatcaaggatataacttgtatgtggaaggcaattttttcactgactgggaccacagtgggggttgagggggtggggatgatttggggaggattcaaaaacattacatttattgttaactttatttctattattattacatcctaataataggatgtaatccatctctctcattgtaatatataataaaataattatacagctcaccataatgtagaaccaatgggagacctgagtttgtttccctgcaactagatggtcctgtctgggggtgacgggagacagtgacaggtcatcaggcattagattctcataaggagggcacaacctagaaacccttgcatgcacaattcagagtagggtttgcactcctatgagaatctaatgctgca

SEQ ID NO: 526895 - DNA, 640 bp, Homo sapiens
caaaacaaggaaactaacttagaaaaataccataactttatgttattagttgctatttataaattgctttccaagcacaaaaagcaacatgaatacaaagtactttaagagtcagaatagggcttctgtgaaatcaaaagtctttaaagccacaaagaaatttaagayaatcccaattcagaagggaaacacatacttggcattcttcctgaccagtggtctacataatatcaaataaaaatcaatattttatcaaggatataacttgtatgtggaaggcaattttttcactgactgggaccacagtgggggttgagggggtggggatgatttggggaggattcaaaaacattacatttattgttaactttatttctattattattacatcctaataataggatgtaatccatctctctcattgtaatatataataaaataattatacagctcaccataatgtagaaccaatgggagacctgagtttgtttccctgcaactagatggtcctgtctgggggtgacgggagacagtgacaggtcatcaggcattagattctcataaggagggcacaacctagaaacccttgcatgcacaattcagagtagggtttgcactcctatgagaatctaatgctgca

SEQ ID NO: 526896 - DNA, 598 bp, Homo sapiens
ttattagttgctatttataaattgctttccaagcacaaaaagcaacatgaatacaaagtactttaagagtcagaatagggcttctgtgaaatcaaaagtctttaaagccacaaagaaatttaagacaatcccaattcagaagggaaacacatacttggcattcttcctgaccagtggtctacataatatcaaataaaaatcaatattttatcaaggatataacttgtrtgtggaaggcaattttttcactgactgggaccacagtgggggttgagggggtggggatgatttggggaggattcaaaaacattacatttattgttaactttatttctattattattacatcctaataataggatgtaatccatctctctcattgtaatatataataaaataattatacagctcaccataatgtagaaccaatgggagacctgagtttgtttccctgcaactagatggtcctgtctgggggtgacgggagacagtgacaggtcatcaggcattagattctcataaggagggcacaacctagaaacccttgcatgcacaattcagagtagggtttgcactcctatgagaatctaatgctgca

SEQ ID NO: 526897 - DNA, 598 bp, Homo sapiens
ttattagttgctatttataaattgctttccaagcacaaaaagcaacatgaatacaaagtactttaagagtcagaatagggcttctgtgaaatcaaaagtctttaaagccacaaagaaatttaagacaatcccaattcagaagggaaacacatacttggcattcttcctgaccagtggtctacataatatcaaataaaaatcaatattttatcaaggatataacttgtatgtggaaggcaattttttcactgactgggaccacagtgggggttgagggggtggggatgatttggggaggattcaaaaacattacatttattgttaactttatttctattattattacatcctaataataggatgtaatccatctctctcattgtaatatataataaaataattatacagctcaccataatgtagaaccaatgggagacctgagtttgtttccctgcaactagatggtccygtctgggggtgacgggagacagtgacaggtcatcaggcattagattctcataaggagggcacaacctagaaacccttgcatgcacaattcagagtagggtttgcactcctatgagaatctaatgctgca

SEQ ID NO: 526898 - DNA, 504 bp, Homo sapiens
caaaaatattattcagagatgaatgagaaataaagacattatcaaatgaaggaaaaataaaagaatttgtcaaaagcaaacctaccccaatagaatgactaaaggaaattctctaaacagaaaggaatagtgaaagaagaaaggagggaaaatcatgttaaccaaaaatatgggtaaatatgataagactttcattctcctcttgtgtcttccacattcygttgatggttgaaacaaaacttatgccactgtctgatgtggttctaaatgtaaacagaaaatatttaagttctaaatgtaaattgagaaaagactttatcttccataataaaaatggaggagaggaaagggaagtacaggaagataagtgttctgtacttcacacactagcaaaatgacaccagtaaactgcaatgtcatagaaatatggtgtcatgtctagagcaaccactaaaatagctatgcaacgagataccctcaaaaacactatagaaagagcaaaat

SEQ ID NO: 526899 - DNA, 637 bp, Homo sapiens
taattatttcttaaagacaagtttaaacaattgtgtatatgagtttctagttgtttaatttggtgttcctgaggggagataaccactggaggattctattctgcaatcttgttttgcctcatctcaataaacatttgaatctttattacgttatttattattactaaatctttaatgactattgaattatttgaatctttattaaaggttaaattacttgaatctttgttagatccaatgtggtaaccctggaagtcagatttccctcatttctccaggatttatttatttattttttcyttttgtttttgtatattgtttttgtgagttttgattgttgtgggctgtctctgtaccaaggatcagcctaaggtgcaaacttgatgtcttctcaggtcttttctgagtcgaaaacttttcctgggcatacacagtcattttctaattttcctcatataagcagttgcttttgaatgtcttagtctttatttttatcttcccaaaaggggaaaagataaaaatgaagagaagaaagaatgcaggccttttaaatctcctggaattcacttcagttggaagagaagaggctttcaataatgggtataaattcaagacaatgtctgtccacatatttttt

SEQ ID NO: 526900 - DNA, 637 bp, Homo sapiens
taattatttcttaaagacaagtttaaacaattgtgtatatgagtttctagttgtttaatttggtgttcctgaggggagataaccactggaggattctattctgcaatcttgttttgcctcatctcaataaacatttgaatctttattacgttatttattattactaaatctttaatgactattgaattatttgaatctttattaaaggttaaattacttgaatctttgttagatccaatgtggtaaccctggaagtcagatttccctcatttctccaggatttatttatttattttttccttttgtttttgtatattgtttttgtgagttttgattgttgtgggctgtctctgtaccaaggatcagcctaaggtgcaaacttgatgtcttctcaggtcttttctgagtcgaaaacttttcctgggcatacacagycattttctaattttcctcatataagcagttgcttttgaatgtcttagtctttatttttatcttcccaaaaggggaaaagataaaaatgaagagaagaaagaatgcaggccttttaaatctcctggaattcacttcagttggaagagaagaggctttcaataatgggtataaattcaagacaatgtctgtccacatatttttt

SEQ ID NO: 526901 - DNA, 654 bp, Homo sapiens
aagtattttctataaattaatagaaatattaattagttaaattgcagattgatttttgtaagaataacaacagagaaaataataatttttaaccttgaattatctgtggatcactgagcagactaaatttatgagcaaaagaaaacttatattaaatttaggtgagaaagtagaaagaggaaattaatatgttgtcaaataataacacagcataattcttctgcctaaaatatgtgttgaaaatatgtgcaaagggtatttatctcttgttctataacccttaccccagaaaatgacataaatattcacttagaagtctgtattttatctttgattactttttctacttcatctgcaccccacaagtaagctctattacccaatcatctaatccttacaggtctttctctcactttttccattctgytgcaatgactctcatacaatttttcactgtttcaaatatgcattaatgagaaagcttaaaattgtttttctggtcagcaagttttctataatcttatcttttgacctgctgaataatatccagagatattgtctgtttgtgaaatcgcttaacacttttcacagatatgttggttgcccttaagagaaacataaacccatcccatttggccactagttcccttcagg

SEQ ID NO: 526902 - DNA, 550 bp, Homo sapiens
aaagttagccattgcatctctcttgcccttttatagccacacccactttcctctgctccgccctttgcactccttgggccctggcaaccactaatgagttcttcatttcaatactgtgtcatttcaataacattttaaatggattcatatataagaggcagaaaaaaaaacccaggaattcaccactttgtcactgcttggatcccaagagccctagctggtctcttcatttttgttttatatataatgtccaaggtttttagttttacttaatggaagggataggaaaaatatgtttactccagttttttggaagtatcttgatgtacttttaaacatggattaatattttctataggatcaatgtaggcttaatatattatcattttcttctatttcattaattcatgccctatcaagatttaacatagakagaagtgtattatttttaacatcaagatgaaccatatgttttcaaagccccacaaaaaccccaagtgtattggcgctccatttgcatcaactttaaaatttgtattcaaatgaagct

SEQ ID NO: 526903 - DNA, 561 bp, Homo sapiens
aggaagtccaggcagatcagacatgtttcccaatgcttttcagcttcccactgcagcaactccagataaagtcccaccaattccacagcctgaagactgtagcttccaataagagctatgacattttgtgatttgtcaactttactgaactctatattcattaaactctagattaatggaatagattcacattgacatttctgggcctctgggcccttagtgtgccaacargagagtaggagaatttcacaaacccccagaaattgtgtatattgaattctcaaagagaattataaaaccccaccaaaaaaattagaaatcactggtttagatttaagcctctcatattaggatatattaaatatagccttcataactcatttaaattacttttttctgaatgatcatacctgactactctgaaattctaaatgcattaaaaaaactacgttgccacaattatttaggagaataaatggcttttaactggtcctggatttgatattttggtaaattaagccattagaataacttccactgatattacacactacagaccag

SEQ ID NO: 526904 - DNA, 561 bp, Homo sapiens
aggaagtccaggcagatcagacatgtttcccaatgcttttcagcttcccactgcagcaactccagataaagtcccaccaattccacagcctgaagactgtagcttccaataagagctatgacattttgtgatttgtcaactttactgaactctatattcattaaactctagattaatggaatagattcacattgacatttctgggcctctgggcccttagtgtgccaacaagagagtaggagaatttcacaaacccccagaaattgtgtatattgaattctcaaagagaattataaaaccccaccaaaaaaattagaaatcactggtttagatttaagcctctcatattaggatatattaaatatagccttcataactcatttaaattacttttttctgaatgatcatacctgactactctgaaattctaaatgcattaaaaaaactacgttgccacaattatttaggagaataaatggcttttaactggtcctggatttgatattttggtaaattaagccattagaataayttccactgatattacacactacagaccag

SEQ ID NO: 526905 - DNA, 631 bp, Homo sapiens
tgggactacctaattgtcccttgcagtctcaactccatccaagcttctaagacctatcttagccttgttgagaaagaatttcagaatctgatcyacacttgtggaactcaggcactcgtgttgtaatccaatatcagtgtttgacccagcactggaaactaggttttagccttattctgggaaacttcatttctgtttatggaaattagacttcagacttgttagtacttcacagggtcctattttccatctctccctgtaggatcacccctgctgttgtcaggctcatctccaactaaaatgtcctagaggctcatgcctaaatcccaccacacaggctgggactctcatttgtaaatacctccctatggctgatgattgtcttcctggtattgactttttgaggactggatccctcaactgtagccaattgttgctagtcctgtagcttcaccctgggttgcttctttggcttaaagcaatatccctccagagccatattgagcatgtgatatattttacagcatcctacatatttttataacttaaggaaatgcaattaatataacattaaatggaaattatgtgaaagcttagtttttctctgatgagttaaagcagtgagctttct

SEQ ID NO: 526906 - DNA, 621 bp, Homo sapiens
gttaaatacaattactaaaatgcaatgttgttaaaataggaaaagagccacaaaagaaagtaaaatgattatgcattggagtaaaatattgatgattatttctgaaagaaatgctgacagactatgggtgaaatctgattagaagactaatgtcagataaattagccagagataatctctccatattgatttaaatcacatcacccaaaagaatggcccctcctgagtctcaatgttctttctgcaataatgacctggattcagagcaatamctgatattccactctatcctcctcttcattgcccaggaagatatcctgaccctatttgtctttctttcaagtctagaatgttgttctctcaagatcattgttttctttaaattaaaaacataaagacttcatttttttcctactgataagtcatattctgatatgcgtcatttgtgttgctttggaaataaactatcacatcttaagttttgttactaagtgcagtaacactctacttgcagaagttacacaaagtgaatttatgagcaattttataacataaaacctcaattttattatcccctatttaatatttaagatcaatttcttgaaggaaataaactacact

SEQ ID NO: 526907 - DNA, 510 bp, Homo sapiens
gttaaattcaatttatctttctcttacaagcactttgttcattgccaagcgtgattatatgtgggatagaatttattaatttgtatttaaaacgtatttttgcctctcagataaaataaktatgcttggagttttagaaataaacatttcattggaaaatctttaatgacttagtgtaggaaaacatctcaaaaaaaataagcataatcatttcaaaatttgatattaaaacattcatcaggctctttcatgttccgacgtcgcaggcttataatgtgagtatagagacacagtatcttgggaaaatagaccaaggaaaacattgtgaggctgacactgttgatataagtgtgtttcatgagttgaataattgaatttccaaatttatgaggattaaaaaatgagctatagtgataatacttgtctatattaagtgtgtaatactttaaatatgatgttttggcttttaatgcaattgtgtatggcattcatagccatagtaactttgca

SEQ ID NO: 526908 - DNA, 624 bp, Homo sapiens
attccagcctgtattcctttctaaggacaagtctcagaggtgtcccccggccacagagctaacacggtagaagcctggctcctctctgctcccttggtctctcgagataccttctgcagtagcacagagctgtttaccaggcctctgtttttgagcttgaaaggttttcactcaggctggcatacacgtttttgacagattgaattgacacatgcagaaatcaccagtggcctttgggtctcactgtggccgtcgtgaacctgcttaaagtgcctgatgcctgcatttctctttacttatccggaagccatttcctaccagcagctcctccctccgcttccccaaaccaaagagtcaagtcttgggcatgggtggataactgggaaaggtgaaaagcaaaccattagtaaaacgagtyagttcttaaaatgcatcatttttggtatacccacaggacttccagttggcagtttccatgctgctttatagcttgctttaatttatctaactaatgacatgaaggatataaaatgggtaaaactataatgtttggcttgcttaaattaagtttatgagttttgcttaagcctgccaaacaagttaaatatttcatggctttcacag

SEQ ID NO: 526909 - DNA, 597 bp, Homo sapiens
gccatctgctcagtccacatgtccacatggagtctgtatactcgtgcgttgaaaaaatcagcaatgcttcttgttcccctgcagtctcaggttcagggtgcttggacgtcttgtcatattcacaaagatgtacaatcttctgagccactgggggtctgacaagttgggtctctcggagcctattaattccaaaaagtccttcatgtgaggtagcagctcaataaatatcttcaacaagtttctatgactcagtcatctgaatgcattaaaataaaagaagtctccatgctcttgttattctaaactcctcttctttcaaaggcacacaaactctttatgattaagggcatacaatgaagacaattcaatctgatcacttctacatcatgcaatgaacttgaattgtacagttcatagcacaatggtgtcttggaagcagaatgcgatcyttattttttgacttgaataaattagtcaaatctttcattttcatttcagatgcctaatggtggcagatgaacttagctatttctttttaaatcccttttctcaaatttcttacaagaaataagatcttattagcttttgaggttagct

SEQ ID NO: 526910 - DNA, 489 bp, Homo sapiens
attattaaatatgcaattatttaaggatggttcttcttcatttctggaaagatgtggcaagtatttcacacctcagagagactacaacagatagtgataactggagttactggagaaagaccagggcagactataattaaaataaaacttcgattacattttctcttcttttgactcagtttctaacctcttattgtttcttccccatgaagagtatggaatggtgaaaattagatcctccaaatacctatgctgggacttcctttatacctgctaataattatggtataaaaaggaagacttcagrgtcaaatattaatattttaaaatgtgatggaaactttcatcaaaatgcaacaaattataatttcctgaacttgaatttaaggtaaaggaggagaattgcaggactaagataccatctgaaacttagatggggggaaagaaaggcctaaacctggcttgcatagctttcttggttctccttgt

SEQ ID NO: 526911 - DNA, 459 bp, Homo sapiens
gaaaaacgtcctgttacttacagggctaggcaaaaggcaaggagtatgtcaaatgttaaaatgcagtggcctgttgccaaaagaaatgcaaaacagcattaagaatgcttggttgaccttgaagagtgaactgctggttctacaagtttctaatggcttaggacaaggtttttgtcatggggagaagctagtctttaacttctccctcatcacaaatttccactcagctttctgggaacttttttctatttkttttttccctgtgggaatgcatatttgatatatttggagtaaatggaataatatttatttggaaaaaagaagcttagcatttaatttgctagtttactcagtaaattgaagacttgatgcagtaaataccaacaatacaatgcaattatagatataatttcttgcatctcatggggagaagagtataaagcaaaatgtaactataac

SEQ ID NO: 526912 - DNA, 639 bp, Homo sapiens
ctataaaaatttctaggagaaatttttaaggaggaaggaaggacccatgattataataatatttgtacttaccaaggaaaataaattttagctcatcagaggtactggwtttgaaaagagactaaaggaaaggaaagaaatgaaactgatgagtaagactaaagaaattttacctccttttcaccctatcctaggaaagagagagtttgttcctttggttggttttaatgctaaaatttcaatgccagttaggttcagcaaaatgctgatcgtttaggaaaatcttcagtagtctcacagcaaaattacaataaatgtatttatagtcaccacaaatcaaggtgtatgtttgtatccatattctggacccatatatgaggatatttgcaggagaaagcaaattgtaacaaagatcttaaaagccaacatttaaaataactttaacattgtgaatattttatttcacttgtgaatctaactcatttgaagaatgagccaaaattcaattctttttgaaatgctaagctagttcctgaacttgattctgaacaagataaatccataaatcagactttttatactccttaccacatttccttttttcctttcttattttcaggaatttatagccacctgtta

SEQ ID NO: 526913 - DNA, 639 bp, Homo sapiens
ctataaaaatttctaggagaaatttttaaggaggaaggaaggacccatgattataataatatttgtacttaccaaggaaaataaattttagctcatcagaggtactggttttgaaaagagactaaaggaaagkaaagaaatgaaactgatgagtaagactaaagaaattttacctccttttcaccctatcctaggaaagagagagtttgttcctttggttggttttaatgctaaaatttcaatgccagttaggttcagcaaaatgctgatcgtttaggaaaatcttcagtagtctcacagcaaaattacaataaatgtatttatagtcaccacaaatcaaggtgtatgtttgtatccatattctggacccatatatgaggatatttgcaggagaaagcaaattgtaacaaagatcttaaaagccaacatttaaaataactttaacattgtgaatattttatttcacttgtgaatctaactcatttgaagaatgagccaaaattcaattctttttgaaatgctaagctagttcctgaacttgattctgaacaagataaatccataaatcagactttttatactccttaccacatttccttttttcctttcttattttcaggaatttatagccacctgtta

SEQ ID NO: 526914 - DNA, 639 bp, Homo sapiens
ctataaaaatttctaggagaaatttttaaggaggaaggaaggacccatgattataataatatttgtacttaccaaggaaaataaattttagctcatcagaggtactggttttgaaaagagactaaaggaaaggaaagaaatgaaactgatgagtaagactaaagaaattttacctccttttcaccctatcctaggaaagagagagtttgttcctttggttggttttaatgctaaaatttcaatgccagttaggttcagcaaartgctgatcgtttaggaaaatcttcagtagtctcacagcaaaattacaataaatgtatttatagtcaccacaaatcaaggtgtatgtttgtatccatattctggacccatatatgaggatatttgcaggagaaagcaaattgtaacaaagatcttaaaagccaacatttaaaataactttaacattgtgaatattttatttcacttgtgaatctaactcatttgaagaatgagccaaaattcaattctttttgaaatgctaagctagttcctgaacttgattctgaacaagataaatccataaatcagactttttatactccttaccacatttccttttttcctttcttattttcaggaatttatagccacctgtta

SEQ ID NO: 526915 - DNA, 639 bp, Homo sapiens
ctataaaaatttctaggagaaatttttaaggaggaaggaaggacccatgattataataatatttgtacttaccaaggaaaataaattttagctcatcagaggtactggttttgaaaagagactaaaggaaaggaaagaaatgaaactgatgagtaagactaaagaaattttacctccttttcaccctatcctaggaaagagagagtttgttcctttggttggttttaatgctaaaatttcaatgccagttaggttcagcaaaatgctgatcgtttaggaaaatcttcagtagtctcacagcaaaattacaataaatgtatttatagtcaccacaaatcaaggtgtatgtttgtatccatattctggacccatatatgaggatatttgcaggagaaagcaaattgtaacaaagatcttaaaagccaacatttaaaataactttaacattgtgaatattttatttcacttgtgaatctaactcatttgaagaatgagccaaaattyaattctttttgaaatgctaagctagttcctgaacttgattctgaacaagataaatccataaatcagactttttatactccttaccacatttccttttttcctttcttattttcaggaatttatagccacctgtta

SEQ ID NO: 526916 - DNA, 557 bp, Homo sapiens
attcacaggtgaggctccaaaaagggccatttctttctccccaaggtgcatagaacatttttaaatatcagagtacccagcaagacggaaggactgtcatgcaggaactctaacacaaaatgtgcctatgactaacacgacaaaccaaggtgtatggtttctttgcacacccagaaaggtgatggccaagatacagaggagaaacgaaaactggaattgaatgtgcattaggcatcttaactattcatattttgtctcatttgggaactaagcctatttggaaagagtggattagaaattgaattctttgtcaaacagttagctctgtcttgaacttgaagccttccaaatcagaattatgtatttaagtgtgtgtttgtgtttgtttggggtttttgtttcttacrttagagttcatattttctgggatttaagatacaggtgtattttcctattctcttgagaagtagactaaacaatatttgcagtgatgacagacgcacacagaagaaaacattagaagagatgcctttctatcctctcatgtggttgagcat

SEQ ID NO: 526917 - DNA, 548 bp, Homo sapiens
ctgatacgtggctcacttgagcaattttcagtcatgtcaggtgtatgatatgattcgtcaatrctttaatctgcatgtgtattgtaataaatatttcctgtgcagtcactctgccacacattttgctgggccctggggtgacagcaggaaacaaaaacctgttgcctgagctcatataggttacagtcaggtcagggaatagatacacaatttgtttttacagagtcttgtcaattcccagaaaaattccctgtccccagccaggaggctccttgagaaaagatttcctaaaactaacaaaaacaaaaactaacccaaccatggaccaccctaggtaaatcatttgggaaaacttcctgctccaaaactccttgctaaagtgtcttttctgctcaggaagacttttattttttaaggctccctcttgggatggaactttctaaaggtaatgtgtctgcagtctcttgcctgcctacatttctcaaagctatttgctcagactttctgtttgctctttggttttcccaagaaaaccaaggacactagat

SEQ ID NO: 526918 - DNA, 540 bp, Homo sapiens
ggcatgagagacatttctcccgttctcagtcctgtccccgagcttgtgaaggcagcgcacacttgcttccaatgcgatccttgcagcttttccacccatgacatctgtttgtttttttcaattttatgtatttttctatcacaaaccttgattttttccccctgcactgtgtaagaatctatgcattagccgataataaaacatctgggccaaaagactagtagttttctgttcctcataacttgctcccaaaacagtggccgagcatccttctacttcagaatattagggcgcattgmaaaggtgcttcagtagcattcaacattttaaaaacacatataacgtataacatttttaacctttttaacattttttaaacacacgtaacaacttaaaacattatttctgtttttcctttaataatattggaaatttcaaaagaagtcttttgttgatttgtttgttccattttgcaaatagtcactgatcttataacagtgaattttatcctgcaggaattctggcctattttggttgggg

SEQ ID NO: 526919 - DNA, 620 bp, Homo sapiens
aaattgggaaaataatgggtgtatattaaggaaatcttagactactgtctggtgtgtaattagcattcagtagttattaggtgaatacaaaacttataaatgttttggattgaaatagctttcctttaagcgttcagtttcatattagatttactgccgtatccctccatcttacctaaatgagaagactgtagctacttagagtgtatgcttgtaatttttctttagtcttaatgaaacatattccatgtatcataaagcctactctmgatggctgtagcactgcagtcattatgttgtaataaataaggctctgctagtagagcctagacactgggaattgtaattggtccttttctaatgtgtgtagctgtggtaaaattgagcccttattcaagttcttgtccttttaattgcatttcaggtggattcttttgtatgatgacttataaaagctgatcccaattatggatcagtggtttctaacgttggttttgtgaaatgttatgatctgttatctaaaaggaatttttttttttttttgctttaacattgtaattaccaaacgacctctgtttgagagaggaacatacagaggaccaagggtaagctgtaacttg

SEQ ID NO: 526920 - DNA, 575 bp, Homo sapiens
ggaccaagggtaagctgtaacttgaaacttacrtaaaactttttagttacctgtggtggttaaatacttcatggttttggacttactccacattttgaatgtgttaattcagcaaacatttattttaagagtacttaacctactctgtgctaagcagtgtgcaagatatagtaggtaacaagacatgaaatgactcacttcattttatttaccatttagcaggaaagataggtgttgaagtctgggaacatcaggaaacacttccctggtgtaatgtttatctcagcttggaaggatgaagaatactttgctggggcaaaaggatgggattggagacctgtgaaagcgttataggtttggtgaacagattgtatggaggtcctaaaaatggacaaaaaagatatgttggaggaattgaaagaaatagaaaaaagcaaaggagaagaatggcagtggaaagctccagagataggagccagatcacacaggactttgttgagtcatgtttaagactttggatgttattgaaggatagtgggaagccagtgaagggttttagggcaagagggttttca

SEQ ID NO: 526921 - DNA, 629 bp, Homo sapiens
ctcttttttttctgattaaacttagttttaacaggtctcaaaattctgtgacaggtttttggttgttttcattaaaaagtactgattttagggtgtctgtaatctcagctaatcgggagactgaggcaagagaattgcttgaaccctggaggygaggttgcagtgagccgagatcatgccactgcctgggagactgtgtgagactctgtctccaaaataaaataaaataaaataaaagcactgattttaaaaactaataacttaaaactaccacacattaaaaaaaaaaatggatccgcaaaacattctcctttccttctgaagcttttctgatgcattgttttcattaaccaatcttttactgttaaacttaaatgaccaattgaaacaaaaagttctgaggtcattcttttactgattaagattggggtggtaggtattagggataatattcatttagccttctgaggcttctgggtagacttggtgactttgccagcttcagaagctttcttgtccactgctttgatgacaccagtagtaactgtctatctcatatcatgaacagcaaaacgacccagaagagaattagtcagagaggctgtcaacacacatgggcttgtcaggaa

SEQ ID NO: 526922 - DNA, 629 bp, Homo sapiens
ctcttttttttctgattaaacttagttttaacaggtctcaaaattctgtgacaggtttttggttgttttcattaaaaagtactgattttagggtgtctgtaatctcagctaatcgggagactgaggcaagagaattgcttgaaccctggaggcgaggttgcagtgagmcgagatcatgccactgcctgggagactgtgtgagactctgtctccaaaataaaataaaataaaataaaagcactgattttaaaaactaataacttaaaactaccacacattaaaaaaaaaaatggatccgcaaaacattctcctttccttctgaagcttttctgatgcattgttttcattaaccaatcttttactgttaaacttaaatgaccaattgaaacaaaaagttctgaggtcattcttttactgattaagattggggtggtaggtattagggataatattcatttagccttctgaggcttctgggtagacttggtgactttgccagcttcagaagctttcttgtccactgctttgatgacaccagtagtaactgtctatctcatatcatgaacagcaaaacgacccagaagagaattagtcagagaggctgtcaacacacatgggcttgtcaggaa

SEQ ID NO: 526923 - DNA, 629 bp, Homo sapiens
ctcttttttttctgattaaacttagttttaacaggtctcaaaattctgtgacaggtttttggttgttttcattaaaaagtactgattttagggtgtctgtaatctcagctaatcgggagactgaggcaagagaattgcttgaaccctggaggcgaggttgcagtgagccgagatcatgccactgcctgggagactgtgtgagactctgtctccaaaataaaataaaataaaataaaagcactgattttaaaaactaataacttaaaactaccacacattaaaaaaaaaaatggatccgcaaaacattctcctttccttctgaagcttttctgatgcattgttttcattaaccaatcttttactgttaaacttaaatgaccaattgaaacaaaaagttctgaggtcattcttttactgattaagattggggtggtaggtattagggataatattcatttagccttctgaggcttctgggtagacttggtgactttgmcagcttcagaagctttcttgtccactgctttgatgacaccagtagtaactgtctatctcatatcatgaacagcaaaacgacccagaagagaattagtcagagaggctgtcaacacacatgggcttgtcaggaa

SEQ ID NO: 526924 - DNA, 582 bp, Homo sapiens
ctccagcccaggtctatattgcatttggctgtggtggtatttggattcgaatttgaatgtctccatactaggcaagccctctctactttggcacaatacctaccactttttrttttttgtatatcctgatccaaacaatgatactacctactgaattataaaagcagtcaattttgtacagaagatgcttccgatttcagagccctctgttaaaagtttaaagataattatatttagtttgtcaagtgtgcagaaaatgtacaagctatccttgtacattttagctaataaaaagtcttcttgtaaaggaatagaatttggttataatagctgtcaaatttttaaaatttgtactttgaagctgtaattctaattccagaaacttttttctaaaaaattactcatacagatccaaaaacttttgtgtgcaagaatatgtttggctgcatcacccaaaataaaaaaaccttgtaaacaatctagatgtgcatttatacaacagtggttatagaaatcatgatatagtcagtatatatgtaacaatatctcacacatcacatatatactatatatgaattcatg

SEQ ID NO: 526925 - DNA, 653 bp, Homo sapiens
gagttagtttattcatctggtgacagtttagacttatttttcactgctttgtaaatgattttcccttccaattgccactaaatagaaagttaaaatattattatgcacatatgatgaaatcttagcaggaaggcttcaggaaattaaacaaaagctgacataacaattttcgatgaaagactaaatgctcttactttaacattggatgaaataaaatatattataaaactaaaagcacaattattcaccaagcctttttattactgcattacaaaaaaaaattaaattgggaaaaattaaattaaaggctacaattttctatgtttactgaaaagccagcttttcagatgctataaatttattatcctcaacaaagagctttaagactgaaaactgattgttttaagatacrctttcattttttattaaagccctctgaagaacaatcaaaagaaaacatttgtaatctatgactgatgggttgtacattgtgaaaataaacccagaaagattcattacttattcaacactgtctagaatatataactctttatgtcttcttatgctttattttttggctaaaaatggaaataataaaattcactgcattgtgtatgctgcggaaaggaatatttaatattctcagagcatcg

SEQ ID NO: 526926 - DNA, 490 bp, Homo sapiens
cctgcaacccaggaagagaggaaccagaacctaacatgctggtaccctaatcttggacttccagccttcagaaccataaggcaataagtttctgttgtttaagccacctggcctgtggcgttctgttactgcagcctgagctgatgagacagcttccttttacaggtgagaaaattaaggctcacggcagagaaatggcttgtccaaagtcatccaaatagcaggtgaaataaggactggatgctagcatggatggaccagatcctgcagactccatcccaggatggaactctggagtctagaccctgcatctggcagtctccctgctggctcttctgctgtgcattcctgttacagcttctctgtcaactctgcactcccactccaaacatcctacactttgggttgcttctccscttctctccgctcagtgctcatcaggttttgtggttctgtggtgtggtgctgccatctgctggcaggaggcacc

SEQ ID NO: 526927 - DNA, 616 bp, Homo sapiens
  misc_feature (1)...(616): n = A,T,C or G
cttcatctcatactctctaggcagtttagtgtgaagctttagtggacaccttcatcagtcacatgtttctggcctctcctctggctggcatctagggtggttctgaggctgagatgtactgacacaggacagagagacaagtgagcagagttgggtgcccccagatcagcagaatttggggtgagtagaaaagctgagacaggctcatgtgggaggctgatgagggcacagttcagggtggctggtttttgtaggatgggaaaggaaactgaatatctcctttatagcccctctgggaagactgcctggaggacrgggatttgaaggttgcatagcaggctgtggatggatgtaggtctgctaggagatggtggagtggctggcatgtggacaagtaggttgctctctctttctgctaatacttgcctccttcatggaaatgagggcacagagctgccctggtgttcacatgctttggggtcccaggaacagtcatcagtgtgcatgccctaaagagaaagtttctccatgtgcccacaccacagacttgcaattggtcactaaaatcatgtcccccaccaatatcctgtaaatntctgagagtggtaagatgagt

SEQ ID NO: 526928 - DNA, 481 bp, Homo sapiens
tctaagaaaagataattcttcttcttaggaaaaaccattaagtaaaccataaggagaaataatataataggacatttataaaaatatacaccatttttataagcctttcagaactattaaataactatatatatgaataatgtacagatgtctttaaatactactcaagtaaaattatttctctaagcaatattcaatttagatgaattatagagawttttatttttaccaaggaagatttgaaaggacccaacttattaattttataaatatcttcaagatataatacatacttaaaagttacgttaatgttaaatgggcattaaaaacaaattagctaacctacactgcttcaagacaactagaaaagaaaaaaaaggaagtattcagtgattctttgctttccttaaagccttgatttaaatcctaggccttgagtcaatgctgctgacaccagccaaaatcagcttagtcatctcaa

SEQ ID NO: 526929 - DNA, 563 bp, Homo sapiens
ttccattggaaaatattgcccattcatctttttcagatattatcaacttttaaaggcatccaaaagcacatactagaaaatacgtatttatcattcagtaagtgaaaaaagtacagaagacggttttaagatatttcctaggtaactttaaaacagggtctggtacattattgcctaaaaagcaagggtaagaatgtggactgagktcatctacacttaaattactcagaggaatatttgatatactattttagcttgagctaaagagattaactcaaatatagtaaacaaacttctttctcctactaagcttctattattcaaaggcaactcaagatataatcacaccaaaaaccttaatcatgatttttatcaaggatttaatcacctcatcttctaagtacgacacataatttaaatatacaaagcagtctacgctggatgcagtggctcatgctgtactcctagcactttaggaggccaaggcaggaggattgcttgagctcaggaatttgaaaccaacctgggcaacatagtgagactgtctctacaaaaaatttaaa

SEQ ID NO: 526930 - DNA, 654 bp, Homo sapiens
tggaatgtttgtcaacaactgtggctgtcaaaatcagtataacctagtcttaagagtataaggtagggtgagaggatagaaacagtggcagggaagggtagtaagggaagacctgagactggtgcagagacctgaagaagtgagggatatatactgccttggggaaaaaggttacaggcagagaggacattaagtgcagacacctcagtgtatttgacctttttgggatgtaggaggccagygtggctggagtacagtaagcaagaggaaaagtaaaggggcttgagattagggaaatagctgggcagctgtaaggcttgtaggccatggtaagaactttggattctactgtgaatgagatgggaaaacactggagggttttgaatagaagagagacttgttctgaagtttgtgagcatcattgtagctgctgtgtggaaatcaacttggggtggaggggcaagagtggaagctggaagatcaattaggagattaataatcttcacttctaacctttttcagtgattgcaaaattgtgtatctttctgctgttgggcaagtagtttccttttcttcccatctattaaaataattaaatgaacatgtgcatatacaacattttctttcttttggaatatttccttgggattcatt

SEQ ID NO: 526931 - DNA, 610 bp, Homo sapiens
aggcttgtaggccatggtaagaactttggattctactgtgaatgagatgggaaaacactggagggttttgaatagaagagagacttgttctgaagtttgtgagcatcattgtagctgctgtgtggaaatcaacttggggtggaggggcaagagtggaagctggaagatcaattaggagattaataatcttcacttctaacctttttcagtgattgcaaaattgtgtatctttctgctgttgggcaagtagtttccttttcttcccatctattaaaataattaaaygaacatgtgcatatacaacattttctttcttttggaatatttccttgggattcattttcagaaggactacaggaacaacgtatatgaatatacctgtcttctggggtatattaagtgtagatactgtccttcttgaagccatacaaaaagtgaacaaaggcttttgagctgttttaatatggaactgtgtaacactgagggattccatccagttcacttctaagacataagttcatggttggcctcagagggtccctaaaactaatgcaaaattttgtgaataaatgcctattaactttattctggggagagagtttatatattt

SEQ ID NO: 526932 - DNA, 614 bp, Homo sapiens
gtaactcagctgggggctccaattattgcttggatgctcatttaacctgcataatttaaaatcaaaagctttaaaaatccgattcttaccacatacctacctgttataaattatgcctgaggatacgggaacagctaagccccttcccagtcctgcttagaagggggcayaggactgagagccaccttttcataggcatgtacttggaccttcctcactccatggggaggacaaaccccagaggaagtgatggagggcatcccagtgtgggaagtccagatccaggggtgacatcacctgaaaccatgatgatcgcaagttctcagacaccactttctattcttggccacccataagctagtattaggaacatctccacgttccagaagttctgattctcaagagctactattcattttttttaaaaaaaatcatttatttgttatctgagcacattttacttacttttttcaaaaatcagtttccacttttacattgtccacacttaatactttttaatttggcatcattttggctcactgtaacatatcaccagcccctgtgctgttcttctaaattttgttttgttttttactcatccaggaacaacccta

SEQ ID NO: 526933 - DNA, 630 bp, Homo sapiens
ctccaggcagaatcgggcactttccaagaccccatgaacatgcaccacccctaaagcaattatcctactgtattatgcttgctttttgacatgttatacattgtactagaccatgagctcttggaaggcaaagaccatgttccatctttatttcccagcctccagtgcactactgagcacttagtaggcacagctcccttccccaacctctctgcaaacaccatgcagaatccctattctrcaggatactgtgcaatccctgtagacacacacaaagccatccataaagtcactcccacctctttctcctacctcacttctcactgcactcctatcgccgacttcatgcttcactcgtgctcaaccacctggaattttctaaatgcacaaaccttcttcaagcattgcatttcctctgccttgttaacctttcctcccttctctttccttagagggctgcctttcacatttgtcatgtggtcctgggaagctttccttcatcattccagtgtgggtcagtcatgcctcctttatgtgctcagaacttctgtgtccaccttgcctatttctgtcccttgacaaactgcactgtaattatctattcatttttctctcccattagcctgtcag

SEQ ID NO: 526934 - DNA, 630 bp, Homo sapiens
ctccaggcagaatcgggcactttccaagaccccatgaacatgcaccacccctaaagcaattatcctactgtattatgcttgctttttgacatgttatacattgtactagaccatgagctcttggaaggcaaagaccatgttccatctttatttcccagcctccagtgcactactgagcacttagtaggcacagctcccttccccaacctctctgcaaacaccatgcagaatccctattctgcaggatactgtgcaatccctgtagacacacacaaagccatccataaagtcactcccacctctttctcctacctcacttctcactgcactcctatygccgacttcatgcttcactcgtgctcaaccacctggaattttctaaatgcacaaaccttcttcaagcattgcatttcctctgccttgttaacctttcctcccttctctttccttagagggctgcctttcacatttgtcatgtggtcctgggaagctttccttcatcattccagtgtgggtcagtcatgcctcctttatgtgctcagaacttctgtgtccaccttgcctatttctgtcccttgacaaactgcactgtaattatctattcatttttctctcccattagcctgtcag

SEQ ID NO: 526935 - DNA, 515 bp, Homo sapiens
atcacctgagcaaccttttaaaagcacaaattgccgggtcctttctgaggcacttagaatcagacccttcagggttgcagcctgggaacttctgttttcaaagctgctacttagtgtccatacagtcccaggytggagagcactggtagcagttaagttaggaaaagaggttctgaatagcactcatgaaaattacttgaaccttaggggcttaataacccttaacattccatcttagtaacccttaccattcagttttctgatacaagttacaaattacatcagtgctatactaaaaaaaaaaaaaagttgtgcttaaagtctgtttttcttgcctgagaaatgtcctgtgttcattttcaggtgtgactgccatgccttgggctccaccaatgggcagtgtgacatccgcaccggccagtgtgagtgccagcccggcatcactggtcagcactgtgagcgctgtgaggtcaaccactttgggtttggacctgaaggctgcaaacgtaaggggt

SEQ ID NO: 526936 - DNA, 515 bp, Homo sapiens
atcacctgagcaaccttttaaaagcacaaattgccgggtcctttctgaggcacttagaatcagacccttcagggttgcagcctgggaacttctgttttcaaagctgctacttagtgtccatacagtcccaggctggagagcactggtagcagttaarttaggaaaagaggttctgaatagcactcatgaaaattacttgaaccttaggggcttaataacccttaacattccatcttagtaacccttaccattcagttttctgatacaagttacaaattacatcagtgctatactaaaaaaaaaaaaaagttgtgcttaaagtctgtttttcttgcctgagaaatgtcctgtgttcattttcaggtgtgactgccatgccttgggctccaccaatgggcagtgtgacatccgcaccggccagtgtgagtgccagcccggcatcactggtcagcactgtgagcgctgtgaggtcaaccactttgggtttggacctgaaggctgcaaacgtaaggggt

SEQ ID NO: 526937 - DNA, 515 bp, Homo sapiens
atcacctgagcaaccttttaaaagcacaaattgccgggtcctttctgaggcacttagaatcagacccttcagggttgcagcctgggaacttctgttttcaaagctgctacttagtgtccatacagtcccaggctggagagcactggtagcagttaagttaggaaaagaggttctgaatagcactcatgaaaattacttgaaccttaggggcttaataacccttaacattccatcttagtaacccttaccattcagttttctgatacaagttacaaattacatcagtgctatactaaaaaaaaaaaaaagttgtgcttaaagtctgtttttcttgcctgagaartgtcctgtgttcattttcaggtgtgactgccatgccttgggctccaccaatgggcagtgtgacatccgcaccggccagtgtgagtgccagcccggcatcactggtcagcactgtgagcgctgtgaggtcaaccactttgggtttggacctgaaggctgcaaacgtaaggggt

SEQ ID NO: 526938 - DNA, 632 bp, Homo sapiens
cttagaagtgttgatttgttcactcacattttatgaagtaattatattcaaattatattcagttatattcatctcaccagatgacttgagatacagtactgtttgaatctgtttttgatgtggtcactggaaagtacatcattttcaaaacatttaaaagatagacaaattatcccttagtgtatattgtgatcttcacagcataatcactctgaaaggcttatatgcaacacctttcagcactcacaactatgaagaaatgcaccattatgagaattgtttagacagctgggcccctttcttactgataagtctccaatacattgattgaggtcattttagcttaatgtatcttccccaaacaatatttttacaataaagtaattgagaaagtaccctataatatgcaagattttgaaaggacttaagtatgatmtttttttttcctgagggataattttggaaaaattaaaacctctaccttatattcaagcatgtacagagatatagaattgggttggaggtgggctggaaattcccatatgggcttaaattctgggtgttctaaactgggggcagccacttgttcagcctcactggcccaagaagctgagaaagattgttgatttgtg

SEQ ID NO: 526939 - DNA, 642 bp, Homo sapiens
gcccaaagatctgaaaaaaagttcatcttcctagtcaattattaatatactagaaaaatcttcagccatgttcacctggagacttttataaataattgcatcctgacccacggatggctcagtgtcctacactcataataactaaaagcactgatggatggctaccgacattctaaatgaccaatacctttggcacaggatgtttatttccttttgcttagaaggaagaggggtaggagatgcagatgcattttctttatccatggactggatatactggccatcacaatgctactgttagtagccaaacttttccttcatagaaacaagagtactgagactgaggaggttctgctggtatcgatgagacaggggagggctacttgctctaccccagcatacatgggctcacacgatgtgcttatgccactgtacagtaacgtaggatgccacgtcctcacgcaaatcagaagggaaagtgtgggtaaggtagcaacgtgaatggaagagacactttattagataaaaccctttgttcccgattcaggatgtttaatttgcttctctttaaactctgtgacttttcctggttcaaaaggacagtsatggacagcagcagaggagtgggggtctgaaaaatgt

SEQ ID NO: 526940 - DNA, 620 bp, Homo sapiens
ccaatatgaccttccatatactttctctgtttcaaatattctttgtattattatttccttctccttcctaatctggmgacagaatggttgtcttttttaaggcaagaccacttgcctatacatacttgattccatcctctgtcttctctgagatttcataacattaattctctcttgcatttttaatcttcaataataaaaatgctcaaatatttcctcttataaatagcatcctctctttgattcccactttgttttgttcattgaactgatatctattatgttattatgtcatcgcctcccatgcctctttaaaaaattgtgttgtgaaatataacactcatgcacaaatgaataagatataattgtacagctaaagaaattattatgaagtaaaatctgtataaataccacctgttcaagaaatagaactttgctagcatctttacacttcccagtctcaaccccctgaattgaccactatttggatgtttatggcaatcatttcctggttctttttttaattttactacctaagtaagctaacagtataatttagttttttaaatttgtttttaaattctttatgataaagtctgatctcttctgctcagtcttgt

SEQ ID NO: 526941 - DNA, 620 bp, Homo sapiens
ccaatatgaccttccatatactttctctgtttcaaatattctttgtattattatttccttctccttcctaatctggagacagaatggttgtcttttttaaggcaagaccacttgcctatacatacttgattccatcctctgtcttctctgagatttcataacattaattctctcttgcatttttaatcttcaatwataaaaatgctcaaatatttcctcttataaatagcatcctctctttgattcccactttgttttgttcattgaactgatatctattatgttattatgtcatcgcctcccatgcctctttaaaaaattgtgttgtgaaatataacactcatgcacaaatgaataagatataattgtacagctaaagaaattattatgaagtaaaatctgtataaataccacctgttcaagaaatagaactttgctagcatctttacacttcccagtctcaaccccctgaattgaccactatttggatgtttatggcaatcatttcctggttctttttttaattttactacctaagtaagctaacagtataatttagttttttaaatttgtttttaaattctttatgataaagtctgatctcttctgctcagtcttgt

SEQ ID NO: 526942 - DNA, 620 bp, Homo sapiens
ccaatatgaccttccatatactttctctgtttcaaatattctttgtattattatttccttctccttcctaatctggagacagaatggttgtcttttttaaggcaagaccacttgcctatacatacttgattccatcctctgtcttctctgagatttcataacattaattctctcttgcatttttaatcttcaataataaaaatgctcaaatatttcctcttataaatagcatcctctctttgattcccactttgttttgttcattgaactgatatctattatgttattatgtcatcgcctcccatgcctctttaaaaaattgtgttgtgaaatataacactcatrcacaaatgaataagatataattgtacagctaaagaaattattatgaagtaaaatctgtataaataccacctgttcaagaaatagaactttgctagcatctttacacttcccagtctcaaccccctgaattgaccactatttggatgtttatggcaatcatttcctggttctttttttaattttactacctaagtaagctaacagtataatttagttttttaaatttgtttttaaattctttatgataaagtctgatctcttctgctcagtcttgt

SEQ ID NO: 526943 - DNA, 625 bp, Homo sapiens
cattttgttgtgtcttttgatgaacggaagttctttttttttagtaatatgactgtaaaaataaaattcatttttaggttacaatttgatgacttttgactcaagtacacatccgtaatcatcaaccactactccaattgttgggtcccccaatatcgtctctgctttcttcctgtgtcctgaccaaggaaaacagaatgccttgactactctgtgacctggccagctacatgtttttcctgcatccttgaatccaagctagggcgttgaacattccccactactgataaagctgtttaggttgttgctggaaacacagagattgattatgttactatacacgtagaaggmgtccaccttcggaaaaattctttaagctctcacataaactccataacctgacccctcattgcggacatactcaggaagaacatctccccctcactgtcgctcaggcggacctgctgcagcctcctcctgtgtaacttgtaagttcccctaataaatgcttcagattggtcactctggagtttagtgcttccttctctgaaacccaagcaggcccaatctcaggaaggtttgggacggtcccttgaaggagttcccctgccaccattcttggggt

SEQ ID NO: 526944 - DNA, 572 bp, Homo sapiens
atgaggaagcagtgctggtaggctctgggaagggagagagaaaaaacctgatgacgtttgactccccagatccaggcatttctgaaggcagayctgcccctggattccctatggcttgatggtgcaagccttgaccaaaactttttccttgggttggttttattttgtttttcctgtgtgtgtgtatgttttcagtcaagattatggactgagcagctagaatcaggatgtaagcccatatatggctgaccctagagccttgagcttctctccctttcctcttcagagacaaccactgctagtggtttgatattttcctcgtgactgacttttggtttttaaaatgactatgcaaatattgtggtatacatgaatatttaaatttgtcactaatttaaatttatgcttgccccaacactgtcacactgtatatcttctgttgcctctccaggtgcaccccatactcctttccatccttaccagctccagcctgttttgtgctctgggaggctggcctgggagtaaaggtcccttggcttctgctttatggtagtgctggattaatgagagat

SEQ ID NO: 526945 - DNA, 489 bp, Homo sapiens
ctgctctgggagttggacctgcagggggagacaccatcagccactgacaacccacctaggcaatgctcactcctctgccagccactctgttactctgttgggacaaatttctggcagaattgtcctcaggaaaaaatttaattagacatttattacatgagcatgtcagccctgtggtttttttttttttttttttttttttggktctagaggacacccggctcaaacccctgattaaatttgtgcctaaattggggccatcctagaatccaggcccagagtgaccacaggcctggtgggaggtgggcctaccaggcttatggagctggctggggaaaatgtgcctcaaaggcaggagtccagcacacccgtttggtccagacacaatggcccagtcagcaggagagggtgattttgacatcttcccttaggtgggcctctgaggccaggcagaggggctgcagtcaaaagagcaggcaagagcagcca

SEQ ID NO: 526946 - DNA, 601 bp, Homo sapiens
tgtgtggcctcagcggtctccaacagtgatgtttttccctttgttccttacctgacagctaactttcagtctgcctggggctcccatccttatgtcctgcttctcatctcattctagattggtctggtgctgggtcatttattcattaaacaaatttcttttgagtgctgactatgtgctaggcattgtgctaagtggtgcaaaagtcctgcttcttgacttcaataaactacagtgcagtggtgggggcacctaaggagtcaggcagtgacagcatgtgataaaggaaaccagcatagggttccactccagcagaggggagggaactagtagggcctgggtcacctgagacaggacctgtgacagcaaggggggaggggaaggccaccaaggtgaggcctcatcttgtttctgtgccaaaaatgccttgacgcctcrttgagtttgaactttcctcaaatattcagatgaatctcagtctagctctctgtatagtctaagaccaactactattagctttgtgtgttttttcctttttcttacaggttctaggaggttgtcttagtctggtctattttttgccactataacagaataccac

SEQ ID NO: 526947 - DNA, 572 bp, Homo sapiens
tcaattaatcatccattcaaccactattcactgagttatttatatgtgctatccatattatagttattatgatgtatataaaatcaattaatctttctcaaaaagattacagtctaatagacacataagcacatcagaagttataatacataaagataagtgcttgataggttttttttcaggaatataggaaaagaatattccaattagatttgggaggaacagaaaaagcttcctggacatgttgcatgtgatgtgtaggtattagctagatgcagaagggcataggaacatatatatccagacaaaaaatatggcatgtaagaagctgtgagatttgagtaagtatggcatggtttggcactctaaatagtttggctgaagtgatgcttttggaagagtgatggtggatatgactgtataactayagaattatacagagagggtttggtcataaagaacgttgtataaaaagttaaaaagtacaagccttaacatggaagttgtggaggtcactgaaggatttaagcaaaagagtgacatgatgagatctatactttaaaagattattc

SEQ ID NO: 526948 - DNA, 589 bp, Homo sapiens
acattaaagaaataggccggggattgcttgagcccaggagttcaatactggcctgggcagcatggcaaaacaccrtctctacaaaaaagacacaaaaattagcctggcatggtggtgtgcatttatagtcccagctcctcaggaggctgaggtgggaggaacacttgagcccaggaggcagaagttttggtgagccgaggttacaccactgcactccagcctgggccacagagcaagaccctgaaaaaaaagaaagaaatatccattaatattttcttgaatgttttaaatcagggatcattattatattttgtcaaatatatatacttgattaaaggttttatatttcctacatgtatggagataattatgtattttttctgtttggatctatgtgtatggtatattaatggattttttattgtctcaacttgcattcttgaaatatattctacttgattgtagtgatcctattatcctctacaagagtggcacatttgttacaattgatgaacctacattgacacatcataactatcacccaaggtccatagtttacattagtgttagtgttcactcttgaagttgt

SEQ ID NO: 526949 - DNA, 525 bp, Homo sapiens
tctcagatctctcttcctctatttttttttcctcccaggcccctgaccagatagccatgccattgattactgccgaggaatctatatatcctcacttcaggtcacttctcttgccacacaaaagatgatgagctggtacactgctcacagatctaccccttaggatgacttttttcttctctgttgttattcagagtaygcataagtgtaccttttttgctgttgctatccattttcagctagaactgcctaccaagctgacccaaccataaatcaagctgaagctttttctcctcctccagctagtcatatgggagctattttctcaccctaacacatattcctgtagttataagctaggagaaggtaactgcagtgagtgtgaaggtgacattggggtttgggctacctattaatgcagcttacttgttcccccggtcccacttgggttcaattctgtatataacatttctccagtataatggattgctgctagtgcccatctgaatttatgtcttggcagcc

SEQ ID NO: 526950 - DNA, 587 bp, Homo sapiens
tacctttagccatcatctgccctttcaaatatctggtctacatgaaaagagaaagaggaaaggccaaaacgaaaacaaaaggaaacaaaaacaaaacgcaaccctctcaaaaacaaaagaaaaaaaaacccaaaatcttttttactacacagagcataaggtcaaaaacttacagtaccagtgtccccttcaagccatggaagaaaaacatccacataaagccttagcaagaatttccactctgaggctttgtaacatgctgaagacagggccctgggggtgctgctgccattttggaggccaccaactrgggtggagaatcagtgaacagcacgtctcatgcacttggaagatcaccagccaaatatgcactggtggcctggtggagcatggctaggtgactgcctacccccaacactgaaccactcctatcctggatgacctacttcttaggtctgtctcacatttcacaaaagagctggaagtctgcatttctcattcatcacaaaacaggacaaagcacacacactctagtatctttggtcatcaaaggccatttccaacagaccctcaaacccacgtttgct

SEQ ID NO: 526951 - DNA, 587 bp, Homo sapiens
tacctttagccatcatctgccctttcaaatatctggtctacatgaaaagagaaagaggaaaggccaaaacgaaaacaaaaggaaacaaaaacaaaacgcaaccctctcaaaaacaaaagaaaaaaaaacccaaaatcttttttactacacagagcataaggtcaaaaacttacagtaccagtgtccccttcaagccatggaagaaaaacatccacataaagccttagcaagaatttccactctgaggctttgtaacatgctgaagacagggccctgggggtgctgctgccattttggaggccaccaactggggtggagaatcagtgaacagcacgtctcatgcacttggaagatcaccagccaaatatgcactggtggcctggtggagcatggctrggtgactgcctacccccaacactgaaccactcctatcctggatgacctacttcttaggtctgtctcacatttcacaaaagagctggaagtctgcatttctcattcatcacaaaacaggacaaagcacacacactctagtatctttggtcatcaaaggccatttccaacagaccctcaaacccacgtttgct

SEQ ID NO: 526952 - DNA, 587 bp, Homo sapiens
tacctttagccatcatctgccctttcaaatatctggtctacatgaaaagagaaagaggaaaggccaaaacgaaaacaaaaggaaacaaaaacaaaacgcaaccctctcaaaaacaaaagaaaaaaaaacccaaaatcttttttactacacagagcataaggtcaaaaacttacagtaccagtgtccccttcaagccatggaagaaaaacatccacataaagccttagcaagaatttccactctgaggctttgtaacatgctgaagacagggccctgggggtgctgctgccattttggaggccaccaactggggtggagaatcagtgaacagcacgtctcatgcacttggaagatcaccagccaaatatgcactggtggcctggtggagcatggctaggtgactgcctacycccaacactgaaccactcctatcctggatgacctacttcttaggtctgtctcacatttcacaaaagagctggaagtctgcatttctcattcatcacaaaacaggacaaagcacacacactctagtatctttggtcatcaaaggccatttccaacagaccctcaaacccacgtttgct

SEQ ID NO: 526953 - DNA, 552 bp, Homo sapiens
caactactaagggtatttctgaagataaacacaaaactttctagctaagaatacatcaaaatgtaccttctactatagctaacttctgaaactcccctaatctatgcatcctcctgagaagsacaaacctatggtggccatttatgttcttcacaagtgcccttggctaaatgcttttggatgccaggactaccacctagcttaagcagagtcccctctgcctcctatgtatttaaccaaggaagtaaatcctatcaataatcaacactgtacacttaattatgctatccattctatgaaaagacaggtggtcagcacgtagggttagaaaaacattttcagacggtttaaaacactatggactcttttgaagtacattatttaaattctctaatcttcatttttctcattaaaatagaaataccaatatttgttctcactgtaaatatcacaatgaaatttgtcatatgtaaaggcaccataaaaatgtataaaattttcaatactgttaaattatttatataagtatcagatttttcatgatcattatta

SEQ ID NO: 526954 - DNA, 552 bp, Homo sapiens
caactactaagggtatttctgaagataaacacaaaactttctagctaagaatacatcaaaatgtaccttctactatagctaacttctgaaactcccctaatctatgcatcctcctgagaagcacaaacctatggtggccatttatgttcttcacaagtgcccttggctaaatgcttttggatgccaggactaccacctagcttaagcagagtccyctctgcctcctatgtatttaaccaaggaagtaaatcctatcaataatcaacactgtacacttaattatgctatccattctatgaaaagacaggtggtcagcacgtagggttagaaaaacattttcagacggtttaaaacactatggactcttttgaagtacattatttaaattctctaatcttcatttttctcattaaaatagaaataccaatatttgttctcactgtaaatatcacaatgaaatttgtcatatgtaaaggcaccataaaaatgtataaaattttcaatactgttaaattatttatataagtatcagatttttcatgatcattatta

SEQ ID NO: 526955 - DNA, 647 bp, Homo sapiens
ctgaaattagaaccattgtttactttgacactgtcaacccctcaactttttgcttcctacctgcatgttggctgctagcctatgcttgctgacatagcagatcctactcttcagaccagggccatttgctgtggggagttagcctttccatggagttgcatttcctgcctctcacccaggtaaaatccctcctagtggccttgccccacgggaaaaaagcaagagtggtccttcctcwtcataactaacaccaggcaccagttggatgctcgaggcaggtaaactccatcctgatccacactcaacacttccctgccttcattcaggttgttcttcctcctctttcatgttatccaatcaaagagcagggagctacattttctccttctcttggcttctctgcaaactgagttgaaaccagcagatacacaagggtccttgctgtgtgtcaggcatcaaagcaccaagatgaaagaggtggtccctggcctcaggaactcataataaatgtcaaccgattggctgaggccagaagagctccgaagacccaaaatcagagaggttatggaaaggtcctccatttttcaaaccaatgagggatggaactttcccttattggaaatgaaccaggaatgatccagggataa

SEQ ID NO: 526956 - DNA, 526 bp, Homo sapiens
cataatggacttaaatacaaaatgttatgctataaaattttaaggaaataaacacaggagaatatcttcaggacataggactaaggaaagagttcttagacctgacaccaaaagcataattcataaaagggaaagttaataaattaaactttatcaaaatgataaagttttactttgccaaaactctgcagagatcatacactaaattcttatatgtattttggcctatttctgtaacattgatctgcttttctgttcatgtgccagtagcacagccttaaagactaatacaactttaaacaggcacaatgaatatagacaatgaataaatgaacctttaaaaattatgtattttgttttgtgaatatcataagtatatgtcattgcattttttacattcaaggtgttggtttagtcartgtatgtgtttaaaatacagcataattttggtaactgttataggatttcctagttttttaatgtgttccctaaaatatgtagaagtttcctagtcttcttggtccct

SEQ ID NO: 526957 - DNA, 564 bp, Homo sapiens
cctaaaatgtactgtaaccccaatttgaccccaaaggatattattgattttactactctctgcagatggagctgacacatctgactactcttccaaggacttggagcctatttttcctggaagagtggatgcatttgctgtgagtcttactcagctccttggtccagttgccttccagtgtggcataaggggtccagactgtgtccactgccctcagatacccatatctacctctggaggagccagaagaaattactctgcaccagatcctggggrcagaggatggagaggatgcttaagaagaatcaaaatgtacccacccaaaccctctggaggtgcttaagagagaagccattggaatcacacctattgcttcctggcttgtaatcttgggcaatttggctggcgcctcccagggtcttagcttccccatctatgacttgagatgattcctaaggttgttgtttttagtagcctttgagccccattgttctgtcttctgaccttgcattggctcttagatccccagggccctttcccttttctgtctgcaaaggtaggtag

SEQ ID NO: 526958 - DNA, 564 bp, Homo sapiens
cctaaaatgtactgtaaccccaatttgaccccaaaggatattattgattttactactctctgcagatggagctgacacatctgactactcttccaaggacttggagcctatttttcctggaagagtggatgcatttgctgtgagtcttactcagctccttggtccagttgccttccagtgtggcataaggggtccagactgtgtccactgccctcagatacccatatctacctctggaggagccagaagaaattactctgcaccagatcctgggggcagaggatggagaggatgcttaagaagaatcaaaatgtacccacccaaaccctctggaggtgcttaagagagaagccattggaatcacacctattgcttcctggcttgtaatcttgggcaatttggcyggcgcctcccagggtcttagcttccccatctatgacttgagatgattcctaaggttgttgtttttagtagcctttgagccccattgttctgtcttctgaccttgcattggctcttagatccccagggccctttcccttttctgtctgcaaaggtaggtag

SEQ ID NO: 526959 - DNA, 642 bp, Homo sapiens
tacccagtcttgggtatcttttatagcaatacaagaatagactaatacaacctgtttaccaggcaagggaaagaagcaagggggtaggaccaaagaagatttctccttttttacttccaggattttctttaatgaacatctcttatgttttaagttagaaagcatttctataagtgtctgtatatacacaagaacatacatataagtatttatatatataaaacacttgtaagtttataaacccttatatgtaagtatatatgtatacacgtttatatatgtatatgtgtttatatataacatatataagtatatatgtgtgtttgtagacatatatacacacacacacatatatatatacacatatatatatacacacacatacttattttatattagaaaagcctttgttcactgaccaytccagaaatgttttgggcttgctcttgagttttcatctgaagactgccagctaagcctgctttaaaatgatcgtctctctgaatagtcttgaagttacccagatcctctatggagatcccgctctcccctcattttcacattcaatttcctttcatttttctctagggcaactcctgcaatgagaagttttaattgttgttctccaccaggataggaaag

SEQ ID NO: 526960 - DNA, 642 bp, Homo sapiens
tacccagtcttgggtatcttttatagcaatacaagaatagactaatacaacctgtttaccaggcaagggaaagaagcaagggggtaggaccaaagaagatttctccttttttacttccaggattttctttaatgaacatctcttatgttttaagttagaaagcatttctataagtgtctgtatatacacaagaacatacatataagtatttatatatataaaacacttgtaagtttataaacccttatatgtaagtatatatgtatacacgtttatatatgtatatgtgtttatatataacatatataagtatatatgtgtgtttgtagacatatatacacacacacacatatatatatacacatatatatatacacacacatacttattttatattagaaaagcctttgttcactgaccattccagaaatgttttgggcttgctcttgagttttcatctgaagactgccagctaagcctgctttaaaatgatcgtctctctgaatagtcttgaagttacccagatcctctatggagatcccgctctcccctmattttcacattcaatttcctttcatttttctctagggcaactcctgcaatgagaagttttaattgttgttctccaccaggataggaaag

SEQ ID NO: 526961 - DNA, 589 bp, Homo sapiens
aacaaagtggtgccttcacctgctactaagtcttgctagggctagttccagagccaagactatgaagtggacaatgatctatgaagcgctaagtgaacagatgtcatgtaaatagcttggatctctacgtgcatgtgtgcattgtatatgtttaccaaagaccttgttacagtgtttttaggcatggctcactttataaaggtcrtcacagttggccaagctatctggtatttattactcatttgatactcacacctgctcaatgatgctggtatcattactctccataatgattttcctatcattttacagatggggttcagaaagatcaggtggtagatccatagtcacactctagttaattgataggactgagaattcaatgcatgcccactgccttctcttacaagtcttggggtatttgagtgtaattcaataatgacaaccccttcactgtccaaaaggggtgaatgaaacatcaagctgtcacaaaggctaggttggagggcatggcttatatccttgggtaagtaggcttactaaacttaaaccctaaagttgaactgacttaactaccccgtcccagcag

SEQ ID NO: 526962 - DNA, 591 bp, Homo sapiens
acaagggtgtgccaccacaccyggctaatttttgtatttttagtagagacagggtttcaccatgttggccaggctggtcttgaactcctgacctcaggtgatccacctgcctcggcctcccaaagtgttgggattacaggcgtgagccaccatgcctggcccacattagtatttctaaatggaggaaaaacactttgattgccaagtattcttttgtaagtcttcagtttgacaaattgagtccttagaatatattggtataatgtatggcctcaacaatagtgatagctgttattttgattaaaggaatcgttgtgagtttagtaactttctggtctttttttcttttaagccaaaagaatctctgagtatgttgaagcttccagatcttccacagaattctgttaagcttcaaacaaccaatacaacaagatctgtattgaaagatgctgagaagattttgagaggagtacaaaacaataaaaaagtacttgaagaaaacctggaagctattattcgtgcaaaagatggagctgccatgtattcgcttatcaatgctttatctaccaacaggtaagaggatgttggcat

SEQ ID NO: 526963 - DNA, 579 bp, Homo sapiens
aatgattttttttttaattttttttttagacaaggtctcaccctatcccccaggctggaatgcagtggcacaatcatggttcactgcagcctcgacctactgggctcaagygatcctcccctctcagcctcccaagtagctgggatgacaggtgcacactaccacgcctggctaatttttttgtatgttttatagagacagggtttcaccacattgcccacagtgggtgatgatgaatcttgagcatctaaattataatctaggaaagtagacattttcctgaagacctaggtgcattatgaacagaaagatcagccatttgctgtttattataaaagtgttgatgagcacttttgcagtttggttttcaaagagacttaggtagaaaggtgaaaacttttttgttgcttttgtgcacaactgaaaacatcttcatgtatcactgtgtattttgagtcacatctactgtttcactggtactgtgtatttaaatacaacttttggttatatactgagtctgttgactttggttatgtattatagtttctcagcttctgcttagcaatcagtaagctacag

SEQ ID NO: 526964 - DNA, 579 bp, Homo sapiens
aatgattttttttttaattttttttttagacaaggtctcaccctatcccccaggctggaatgcagtggcacaatcatggttcactgcagcctcgacctactgggctcaagtgatcctcccctctcagcctcccaagtagctgggatgacaggtgcacactaccacgcctggctaatttttttgtatgttttatagagacagggtttcaccacattgcccacagtgggtgatgatgaatcttgagcatctaaattataatctaggaaagtagacatttycctgaagacctaggtgcattatgaacagaaagatcagccatttgctgtttattataaaagtgttgatgagcacttttgcagtttggttttcaaagagacttaggtagaaaggtgaaaacttttttgttgcttttgtgcacaactgaaaacatcttcatgtatcactgtgtattttgagtcacatctactgtttcactggtactgtgtatttaaatacaacttttggttatatactgagtctgttgactttggttatgtattatagtttctcagcttctgcttagcaatcagtaagctacag

SEQ ID NO: 526965 - DNA, 640 bp, Homo sapiens
aaatgaattttatagtgacagttgggagtttatattttggaatgttaccttgttatcccactgttgacatgatacaaaaatatgcatttcttcctggcatttatttgcttttgaataatgaagttatggctttactacacagcaaaatagcactgtaacttaccccaggttttgtttattgtaagcaaacttggccaagggtacagttttaaaaggagagagaataccagcaatctttcatgatcataagtaatgaaatagaactgtccgtaagtgacatttgtgcttaattgaattttttcatcagtatttttttttaaccttctgtttattgaaacttctgtgataacaagcaataaatttttggactgtttatcattctgctgtcagtaagaggctattgcatgactacattttatataatgaggcctaatgattagatttgtaaaatgactattttgttttttttcctgaattatttgattctgtatccatcttcrtgtgagttcatatatgtttatacttagagatctacacatgtaaacactttcctttatcttaattctggaagagaagtctcaattatatcaacctgttgatcaattaagtgatattgctgatggagtcctttacagaaaaa

SEQ ID NO: 526966 - DNA, 483 bp, Homo sapiens
gtccatttgagtcctttcagagctcagtgaatgggagggggtagtgcattgtggggatgattttggtgttagattatacttagctccacccctttagtgcaggtccacgtgaaaccaagtgcaacttcattctagctgtttgagatttgcagggctctcccagaaagaaaacagacaattagaattttatttgtatcaacaagagggattgtgggtaattctggtgcacagctcttagctgggaggagggccaagaatcagggtgatttagtagacaggagtatcttgggctgctctggagaccaaagatgggcaattaatttgcatgtaaataaaccaccttaggtagtatatagcaaacaggagccgcagacacatgccaaatattgtctcttggcctttaagctccttaggtatagtcscagcccaacttatctttatgtagatgatcagagggaacaacagttagttcaaaaggactag

SEQ ID NO: 526967 - DNA, 628 bp, Homo sapiens
ctggcgaaggagtatggcatggacttctatgaaacaagtgcctgcaccaacctcaacattaaagaggtgagagccctggtgaccargcgcccgctctctcgggctgagtccagcagaggtgggaggaggagccataagatggaccttatccctcaggccgctgcagggttgccaggggagaggaggagacactggactaacctgtgccctttggtttccagtcattcacgcgtctgacagagctggtgctgcaggcccataggaaggagctggaaggcctccggatgcgtgccagcaatgagttggcactggcagagctggaggaggaggagggcaaacccgagggcccagcgaactcttcgaaaacctgctggtgctgagtcctgtgtggggcaccccacacgacacccctcttccctcaggaggcccgtgggcagacaggggagccggggctttgccctgctgctgtcctctcgtgtgatgaccctattgagtatcagtagccactactccccctgcctggccctgagagcggctctgctgtcatctcaagcagcccctgtccccagcccgtccaccctggagtggtcttcttcagcctgtttccccagccacaggcctgctacga

SEQ ID NO: 526968 - DNA, 468 bp, Homo sapiens
actactgaggctcaaaagggaggggatatctcatgaagaaaggaatgatcaggaaagtttgtgtgaaaaaggaggaatgtgcgatgagtggccctggcagaaggagaaaattttaattcaattttaattcaagtttaaatagctgcaggtggctaatggctactctactatgctgcacaggtatcaagtgtacaagaggagtgacaggtgggagaatctgacctcaatrcagggatgaaagaggaatgggaggaaagcaggagtactgccccagtttaaaaacaaacaaacaaacaaaaaaacaaggatctgggatgctgactaaggcatttctactcaatttactaggcaaagggaagtcctgaaggtttttgagatgaggaaagaaatgatcagaactgtgctttggagaaacagtaggtagtcagtatgtgtttacaaactgaagtatctgaaaatatcgcagtg

SEQ ID NO: 526969 - DNA, 532 bp, Homo sapiens
cctcatttgtataaggggataataatcacagtatttatctaaatagtttgttatgaggattaaatgacttagcatagtgtcggacaattggtaacccttcaaatgttgcattattattattttattattattattattttgagacagagtttcgtgctgttgcccargttgtagtgcaatggcgcgatttggctcgctgcaactccgcctcctggtttcaagctattctcctgcctcagcctcctgagtagctgggattacaggcgcctgccaccacgcccagctaattttttgtatctttagtagagatgggatttcaccatgttggccaggctggtctcaaactcctgacctaaggtgaaccgcccctcttggcctcccaaagtgctgggattacaggcgtgagccactgcacctggcccgcattattattattaaaggaggtcatgtagtaagtaagtgttgaggcatggattaaagtcaaagtaaatatttgcaaaaccatgtatgcttacaatgctgttatacacag

SEQ ID NO: 526970 - DNA, 606 bp, Homo sapiens
acacaaaattctacgaattcgctacaggattttataaagagaccaagttcatttagatagctagcttctggctgggcgtggtggcccatgcatatggtcccagcactttgggaggccaaggtgggagtgtggcttggggccaggagtttgagaccagtctgggcaacatagtgagattccatctctatttttttttttttaagtcagaagcctgtgattttggcactcagggaggctgaggtgggccatcacttgagcatggcaaagccccagctctaccaaaagaacataaagattggctgtgtgacatggtggcacgtgcctgtggtctcagctacttaagacgctgaggtgggagggtggcttgagcccgggggtgggaaattgccgtgggctgggatatcgggccactgccttycagttgtgcaacagaaccagaacctgtctgtctgtctctctaacacccacacccacacccacacccatgcacccacccaccatatatatatgtggtgtgtgtgtgtgtgtgtgtgtatatatatatcttaaatatgtagcttacatatatatagatataaatagacatgtagctttccaggacgtaga

SEQ ID NO: 526971 - DNA, 453 bp, Homo sapiens
ttccataaattaatattgggtttagtgttaatagttattaataagattggtacaattttactaataatttttttcaggcttgataacttgattttaaattagaagcccatagcaaagaaaacaagtatataacaatctcagattatttaycttttttattatactttacgttttagggtatttatcttaatttagatgttagcctctaatattcttctgaaaatcctgggaatttattgaggtttgtatatccacgagctttcgaaatatttagattaaaaatagtgttcttttgctaacattattatgggtacataataggtgtatatatttatggggtatatatgatgctttgataaagacatacgatgtgtaataatcacatcagcctaatagggatatgcatcacttcaagcatttatcatgactttgtgttaggaacatctcagttcc

SEQ ID NO: 526972 - DNA, 453 bp, Homo sapiens
ttccataaattaatattgggtttagtgttaatagttattaataagattggtacaattttactaataatttttttcaggcttgataacttgattttaaattagaagcccatagcaaagaaaacaagtatataacaatctcagattatttatcttttttattatactttacrttttagggtatttatcttaatttagatgttagcctctaatattcttctgaaaatcctgggaatttattgaggtttgtatatccacgagctttcgaaatatttagattaaaaatagtgttcttttgctaacattattatgggtacataataggtgtatatatttatggggtatatatgatgctttgataaagacatacgatgtgtaataatcacatcagcctaatagggatatgcatcacttcaagcatttatcatgactttgtgttaggaacatctcagttcc

SEQ ID NO: 526973 - DNA, 623 bp, Homo sapiens
cctctcagaacctttgtttcctcaattgtaaaatgcagattatacctgacaaatggtgatgattcaatgaggtgtttgcagattgctttacacttagtgttatataaatgtttgcttataaagttaataaaaatgaataagccatgctactatctaacgaaatttttctaactaggmaaattaaattcctctaacttcatttcatttctcctgttcattattcaatggacctatttactctccatttgcagtattcagacaacatgctcatcgacatgattacagttcacaattttccaaatttcacagcaatttccctcagcctcactgtaagtctagcgtactaatgcgccaacgtatgcactaagtgctcaaaaatatttgctaaatatccctagtttgtgctgggcaattagaaaaagaacataatcagaagctgctagccactttgctttttgtgaaagtaaaaatctctccacaacaattactgaaatgccatagacagaagtttatgtgggtgttaataaagtctctaaaatattagagatgtctcttaggctaatgcccaaacttacactagaaagactgtcctgtaagaagaaggcactatggttaagcaggtg

SEQ ID NO: 526974 - DNA, 637 bp, Homo sapiens
tgtttgttatgctcctaaattaggcttgtttatacgctaaggtcaaagttcactacctaaggactcaaggtgcccggggagcctcaggccacatttaagttaatttaacaaaagttttattggaacagagccatgcccacttttctagataatgtatatggctgctttcatgcaacagtaacagagttttgcagttgcagaatagtcactctctggcctttcacaggagaagtttactgacactagttcatctctcttggcactcttccagcccgacgttccaaaagccaggccctctgacaggttattttctacttcccagtccatggcagaagttaccccatgggctcacagcaaagtgactggtaaacctcccagtctccaaaccgctgtaatatttttgatattcagtccttgtcaatctttctaccagagggtaaattttagtaattcttaaaagaataagcaatattygcaagtgttgttgtgaaaatccaggcgtcataaggcagtgataaagttaaatggggacgcccttgtgcacatagatgcaaagcagggagaaaatgcagaatccacaaaaagaaagaaaactgaggctggaagagaatgagctccttcctgggcaggttggaaa

SEQ ID NO: 526975 - DNA, 531 bp, Homo sapiens
ctgagttgtttctttactttaactgaagattgtggcctttttttwaaaaaaataaatgccctgatcaggcatttgttaaatgagagtacctactgaagataagacacttttctacacacttggaatataccagtgaacaaggcaattctttttgtctgtcgttattaataaaatatactaatcttgtgaaatcacagttcacatgtctgaagcgtaaagtcagaatataatagaactcatcaaagctgtgcaattgagatctcatggttcatggacgtgacttttaatattcattggttgagcagcacagtaataagggcccagtccctctcagagtccttgtttggtcttgaattcaggtaatgggatttgggaagcacatttgtcgaaaataagttaaaggcaaacatcacctagagctctgtggcacacaagggctcaaatgtgtgcagtgtaaagtccctgtgtcccagtctcccaccctttcagcgtggttgagaaacagcacaggcagtgaaccacacccttact

SEQ ID NO: 526976 - DNA, 605 bp, Homo sapiens
gcagttccagctcctaatgccagcagcatatctccttgacactactggaacagtcttctctcatgaaaaaaaagcacagtggaaaaagaatctagaagtagttgggggaaagtatctctccctcccctctggggaaacatgagttctcccacacagcagcggagaagtccatctagtgagtaatgagcgccaccctgtaaggggaattgcgggaggcacctgggagggaaactgctctgcatcccaggcaggacttctcatggacaaggcagatctaagcaagatgggcaaaacacagccatgtgaacagcaggtcacttagcaacaagatgggaagctctctgtcagtcacttgactcaaatatttcgtaaagaaacaatagaacttattagcagtgggactgatatggtttggctttgtccccacccaaatctcaacttgaattgtatcttgcagaattcccaygtgttttgggaggcacctggggggaggtaatcgaatcataagggccggtctttcccctgctattccagtgatagtgaatgagtctcacaagatctgataggtttaccaggggtttctgcttttgcttcttcctcactta

SEQ ID NO: 526977 - DNA, 644 bp, Homo sapiens
tttaaaaagtctacaccacctagtctataaggtgataaaaagaagaaaacaaattactgtcaatattatttccccataaatgttcaatattttcaaaactggcaggatactttttaaaaatgtttgcttttgacttgtcccttttttcagaattttatatcttaatagataatttagagcagaaggaactgtggtatattactggtgagcttgggtgagttgttctaaacttgaaaccctttcatggaggcctgtgggttgttttcacatggggcagggatctcaaatcctaatgtgtcactggcttccgaggttggcagcagccagcttggcttaccaccatccagtctcaggaaagccttccwgcagccggccagccctcgactctccggagtctggcagcagctctaggaatccaccttaacaaagcaccctgtaggctgtttggctggtagacaatgaaggatgagctgatattgcttcctaccctggaggagttcttgcccagatgagaaggcaagaagatgccttataaggaaggcccaagcaaaagaggagaaaagacaaagagcgattctggaaaagcagatttaatgaactgttagaatctgattagaggctaatgtcccttttagtgctttgta

SEQ ID NO: 526978 - DNA, 546 bp, Homo sapiens
cactgggtaaacatattgaaatggctgggggaaagaaaaatgaagcaaagcaaggagccaggtccacaacaagccaccatattcacagagaggacaactgctgaaatacgckgaagtgtgtatccaccagattttatgctggtatttgtgagcaggaaataatggacaacaggaatctttttagaatttatttgtcgttttctaaaggcagatggtaaagggacaaatccaagtgcaatgaagctgagtaaaggaagtaacttaatgaagtaaagaaaaacttaatgcaaaagttgtgtttgttttttgtttgtttttgtttttgtttttaaggaaagggtggatgaagactgctcctgaaagtaaaactctcagtatggacacaacagaaattttataaatcccaagtaggctatttaaattttagaacctaagcagaaaggcacagcatgatattctgtggctcttggcaggattttgtcaccactggcaaactggaaacgtacaaaacagttgtaaaagccatattcaaatcccttttcaact

SEQ ID NO: 526979 - DNA, 585 bp, Homo sapiens
gaaaaaaatgaggagttgcttccatataattttttaaggggctaaaaggaaaaattacattttacagatagatatgcacatktaagtactgacctctgtctcgtattcacacaagaaggtactctaatgagaataaactgcccaaaagtaatgctcaaagtagcaatattttcaatgcaattttaacatctgactaaccaacctttattgtttttctcttcatatggatattcattcatccatttgttcttagagtcacattgatcctgcaagaaaaacacaaagacaaatgatgagagaaagttctacaacttgatgttattgctcctttggggaaaaaaatacatcttaattctacagttccttaagctcgtgatcatagagctgaggaatatcttttcttcagctatgtgttgttggcttgctcttcagcagccatcaaagggcaaaatgcagtagagggaaaaacaccagctatgacactaggacaagatcctgggcactaaataattaagacctagacaaaaatgagggaggaagggaggaggagaataaaaagaaagggatgcaacagagagagacagc

SEQ ID NO: 526980 - DNA, 585 bp, Homo sapiens
gaaaaaaatgaggagttgcttccatataattttttaaggggctaaaaggaaaaattacattttacagatagatatgcacatgtaagtactgacctctgtctcgtattcacacaagaaggtactctaatgagaataaactgcccaaaagtaatgctcaaagtagcaatattttcaatgcaattttaacatctgactaaccaacctttattgtttttctcttcatatggatattcattcatccatttgttcttagagtcacattgatcctgcaagaaaaacacaaagacaaatgatgagagaaagttctacaacttgatgttattgctcctttggggaaaaaaatacatcttaattctacagttccttaagctcgtgatcayagagctgaggaatatcttttcttcagctatgtgttgttggcttgctcttcagcagccatcaaagggcaaaatgcagtagagggaaaaacaccagctatgacactaggacaagatcctgggcactaaataattaagacctagacaaaaatgagggaggaagggaggaggagaataaaaagaaagggatgcaacagagagagacagc

SEQ ID NO: 526981 - DNA, 585 bp, Homo sapiens
gaaaaaaatgaggagttgcttccatataattttttaaggggctaaaaggaaaaattacattttacagatagatatgcacatgtaagtactgacctctgtctcgtattcacacaagaaggtactctaatgagaataaactgcccaaaagtaatgctcaaagtagcaatattttcaatgcaattttaacatctgactaaccaacctttattgtttttctcttcatatggatattcattcatccatttgttcttagagtcacattgatcctgcaagaaaaacacaaagacaaatgatgagagaaagttctacaacttgatgttattgctcctttggggaaaaaaatacatcttaattctacagttccttaagctcgtgatcatagagctgaggaatatcttttcttcagctatgtgttgttggcttgctcttcagcagccatcaaagggcaaaatgcagtagagggaaaaacaccagctatgacactagracaagatcctgggcactaaataattaagacctagacaaaaatgagggaggaagggaggaggagaataaaaagaaagggatgcaacagagagagacagc

SEQ ID NO: 526982 - DNA, 499 bp, Homo sapiens
cctcttggcatactgctgtgctgtgtgcttcagttcctttgtagaaattatgcctttttgatatccaggaacaktccaagcattatctgtcacttcctcatttgtctgtctttttcccctttctagtcaggaacatgccagctttagccaggcttaagccatcaggatgtagttggttaagacaggtaactttggtatcccttctccatgaatcctccataatctgtacataatctgtacaacaaacccccatgacatgagtttacctatataacaaactttcacatgtacccccaaacctaagataaaagttaaaaaataaaaaggaaattcatggccaatgtgatggtattaagaggtggggcctttaagaggtgattaggccataagggcctaatcattgatatccaggaacattccaagcattggaatggtacctggtacctgggatccactgaattatggagttttgggtaagatcagagtccagttagatgat

SEQ ID NO: 526983 - DNA, 355 bp, Homo sapiens
gtctggtcacattccaggtgcatcagtcagtatgatttacaaggggaatggagctcaytggttaatctggacagttggttaagcggaagttggttaaaaggattctaccatatttatcagattgctgctaaaaggatgttttatctctgttacatggcattttggtaactagaagagcttaatacaaacttgcctactttcctgtataccccttccctgacatcatttataaaaatgttaaataagaccattttgagcacctgtctcctggaagtgtgcatgcttatatatctgtttctctgtcatttatccactgctttcaccatggcaaaatgtaatttttaaaactaaaact

SEQ ID NO: 526984 - DNA, 548 bp, Homo sapiens
tgcggcacagaggaagctcggagagagaggtttttccgaagcaaaaaattttcctgctgactgacagcatcaccatttcacaccggctggggctctgacatctctgggaagcatgagggcttgtgtaatggcccacacagaaagtgggtgaagaggatctctagccttttcaggttatttcaagtggggtctcattgtcaagggaccaaccatccaacaaaataggttcctgtgggttaggaaaatggtgatggtgaaaagctggagatgaaatcttttgtttctagagctagatggattttttcrtttttcttttttaacacaaaagggtcagaaatgcaaaggatgccctttgctgacacagctctgtaagagattacaagcaaaacaaagacagatttatagataatttatcagcatattgaagacaaattgaatatcatgctgcacagtaaattacttcagaacaaccccaaagtggaagaaaatacttgtaaattgcatttttaagcccttaagaacaagttctatcacttgtttaaaaaaat

SEQ ID NO: 526985 - DNA, 562 bp, Homo sapiens
cggtctctgagtttctcccctgtaagtctgttttttagcaaacatgtaagtaatttttaacgttctcgaaaattctcaaaaacaaaaccaaacatctgtaggtgaagaacattcattttcaaccatcacttcagtttggcattttatgggaaagctattccatactaggatcccatccccagaggttctaatctggtgggttaagggtagggcctgggcatctgtatgttttaaaacttcccaagggaatcttggawtatgcagctagagcagagaatcactagtgcagagggaagagtaagaactagccaggtgcacattagaatcagtttgttggcttctgaaacttactgatgcgtgagccccaacaccagaggttagggatgcagcctgccatttggttagggatgcagagagttaggtcgaagagagttttgaagctcccggtgattttttttttttttccacagtggatggatggatgagatctcagcatgacaaaataccttcttctgtactgtgttctttctttttcataattcaaggccttcccagacatctt

SEQ ID NO: 526986 - DNA, 527 bp, Homo sapiens
atgcctgtactagccagatgcaaccctcctctggatctattatgctatgctgccaaacttttccctgttcccccttccacagcagtcattttacagaatcccctgcgtcacaaacgaacatcatgtcctatttgtagcctcttctactgaaagtttctcaaaaacatggaattacaatcaactgccaacttccaggacccttactgccctagactaacatagaattaatgaaatakgatttattatagtaaggcatcttttttttttcttgatgagaaaagtgggagtaatgctattgagtcaaatgcctgatcattcctgatgtgagtagcaattttatgaacttattaataacacatcaaactgatttttctcatgacaccaatcattctttttggtttaattcaaaatgcttttttcttttcttttgacgtctcctttttcttggcatggtctttaggtgaaaccaccttttcaccgtctttacatgaaaccaccttttctccaaggtagaatttgcttttggc

SEQ ID NO: 526987 - DNA, 527 bp, Homo sapiens
atgcctgtactagccagatgcaaccctcctctggatctattatgctatgctgccaaacttttccctgttcccccttccacagcagtcattttacagaatcccctgcgtcacaaacgaacatcatgtcctatttgtagcctcttctactgaaagtttctcaaaaacatggaattacaatcaactgccaacttccaggacccttactgccctagactaacatagaattaatgaaataggatttattatagtaaggcatcttttttttttcttgatgagaaaagtgggagtaatgctattgagtcaaatgcctgatcattcctgatgtgagtagcaattttatgaacttattaataacacatcaaactgatttttctcatgacaccaatcattctttttggtttaattcaaaatgcttttttcttttctttygacgtctcctttttcttggcatggtctttaggtgaaaccaccttttcaccgtctttacatgaaaccaccttttctccaaggtagaatttgcttttggc

SEQ ID NO: 526988 - DNA, 526 bp, Homo sapiens
cctgtttctgctgtgtgaggacacaacaagaaaacaccatctatgtatgaagtatgagctctcaccagacacaaaatctgctggtgccttgattgtagacttaagctccaggactgtgaaaaataaatttctgttgtttatcagacactctgtttgtggtgttttgtcataacagcctaaatgacctaagataacatgattctaaaatatatttcatgacaggaaatatttcagaggaacattataatgtgttctgagctgcgggcattcattatactataacaacaaccaggaggaattttagtgtgtcctctagtagtttgttcaatatacatcttcattctgagctccacatgtagtcaaaaataaaaccatagctacagaatatgttttccatctctggatttagctcaaatgcttaagatttatttattttttattattttcattttttttttgagcagcagcaagacatygtgaagagggaaagaacaaagcttccacagtgtggaaggggacctgagcg

SEQ ID NO: 526989 - DNA, 540 bp, Homo sapiens
gtttaataaattatcacaaatgttggtaatttgtttttaatcaattaaataattcccaggtccagtttgtttaaaatatagtaattaaaatctttattatgtcatcttctcttcaccaccattacatagatattcttgcattgctttactaagaatatttggccagttggaaacacgaatattgctacccactactctttacatttcccaccattattgctattttttggggacaaacagacattttccctttgcttgaatgataactgttttgaaaaacattattttctgagagacattacctcatctcaatactacccaaaattttcattgtctttttytccatttatacatttatcaaaaattacagacacatgaacttccactactttggaatttaaattaggaaaggattactaatgagataatattaaagatggtaagggactacaaatattacactgactttagcaaggctttggccaaaattatttccctcaattccttttgcttaatctaaactgaccgatcaacagatca

SEQ ID NO: 526990 - DNA, 576 bp, Homo sapiens
ttccagggtggtgtataaagtgatgcgtttcctaactaatacagyttgctttgtgtccccacccaaacctcatcttgaattgaaatcccttaactccataatcctcatttgtcatgggagggacatggtgggaggtaattgaataatggggtggtttcccccatgctgttcttgtgatagtgagtgagttctcacaagatctaatggttttataagcatctggcatttcctctgctggtactcattctgtctcctgctgccctgtgaagaggtgccttccaccatgattgtaagtttcctgaggcctccccagccatgtggaactgtgagtcaattaaacctcttttctttataaattatccagtctcaggtatttcttcatagcagcatgagaacagactaatacgtgaacatactctggttttgatctcagtgactgtgaaatatttgggaaattatttcaatcttgaatatgcaactgtgttaaatcacatgctctaatataacattttacccctcatttgaattatttatggaatctgtaattcaagctacaatgccaaaatattgttgtac

SEQ ID NO: 526991 - DNA, 576 bp, Homo sapiens
ttccagggtggtgtataaagtgatgcgtttcctaactaatacagcttgctttgtgtccccacccaaacctcatcttgaattgaaatcccttaactccataatcctcatttgtcatgggagggacatggtgggaggtaattgaatmatggggtggtttcccccatgctgttcttgtgatagtgagtgagttctcacaagatctaatggttttataagcatctggcatttcctctgctggtactcattctgtctcctgctgccctgtgaagaggtgccttccaccatgattgtaagtttcctgaggcctccccagccatgtggaactgtgagtcaattaaacctcttttctttataaattatccagtctcaggtatttcttcatagcagcatgagaacagactaatacgtgaacatactctggttttgatctcagtgactgtgaaatatttgggaaattatttcaatcttgaatatgcaactgtgttaaatcacatgctctaatataacattttacccctcatttgaattatttatggaatctgtaattcaagctacaatgccaaaatattgttgtac

SEQ ID NO: 526992 - DNA, 634 bp, Homo sapiens
tatgacagtgatataggccttcattaaaagaaatttatctaaccaaaaaatgtgttgattcaaagaaagcattaagtatataaatccayacagataaagatatgccaaaatcataaatttaaatatgaaagacccaaatgcttgaaacattttactgggttcttagctgcctatatgactgaaataaactagtaaagtaattgataaacacaatattttttaaaacctctgatgcttacataatttataactcagtcatcttacaaaaattgagcttattgcaataaaatttaatagttttattaggcttcttttaaatctatggcaatcccttaatagagcaagagttataaaactctgcagataaaaacaaatattcaaaatgtcatgaaacaaaattatatcacagacccctgggatgtcatcagcatatacctaaaataatcattatcagaacttgagtttattaagtacttgctatatggtaagttgagcatttaaaagtaattggaaatctttcttaacctaacttgaaaggctttttatgtgagacaatttgtcaagtaaaataataatagctgcacctacctcacaagactgttgtgaatatttaattacataaaatacatgcaga

SEQ ID NO: 526993 - DNA, 634 bp, Homo sapiens
tatgacagtgatataggccttcattaaaagaaatttatctaaccaaaaaatgtgttgattcaaagaaagcattaagtatataaatccatacagataaagatatgccaaaatcataaatttaaatatgaaagacccaaatgcttgaaacattttactgggttcttagctgcctatatgactgaaataaactagtaaagtaattgataracacaatattttttaaaacctctgatgcttacataatttataactcagtcatcttacaaaaattgagcttattgcaataaaatttaatagttttattaggcttcttttaaatctatggcaatcccttaatagagcaagagttataaaactctgcagataaaaacaaatattcaaaatgtcatgaaacaaaattatatcacagacccctgggatgtcatcagcatatacctaaaataatcattatcagaacttgagtttattaagtacttgctatatggtaagttgagcatttaaaagtaattggaaatctttcttaacctaacttgaaaggctttttatgtgagacaatttgtcaagtaaaataataatagctgcacctacctcacaagactgttgtgaatatttaattacataaaatacatgcaga

SEQ ID NO: 526994 - DNA, 655 bp, Homo sapiens
taaattttcatctagtataattatccttatgccagaaagatcttcttaaacattttagtaatgctggcatgctggcagtgaagtcaaatgactaagagaaaaattcatctgttcattccctaccctacaacttataatgggaacaggataatcaaaataaaaactgtcagacagaagagatgttgcattatatgaaatgctcaattaaatacaaaggacagaaaaagagtgggatacaaaataaaagcaaagaacaaggcaacaaatataaaaagtaataaataggtatgtatccaactgtatcaataaacattttgaacatcagtagtctaaatgcaccaataaaaacagattgtcagaggaaatcaaatagcatgagaaacctatatgttgtctataagaaactagggaagtactgaattgtccrtttgggggtgggtgtggtggcttctggttctgtgggtgggtacatgtgtgtcagcagcaaaagtttccatggtggtggttccaaccctgaggttgtgcagtggcagcgctgaccctggggagacacaacaaatatttcttgctccagggttgcaaggctcagaaatgtaaattctgggctgctccatcagccggagtcagcatcagcaaatactgtaggggttctcag

SEQ ID NO: 526995 - DNA, 520 bp, Homo sapiens
ctgcagcagcaggtgttgtagcttgtgcttctaagccatctrcttttacatttcctccaggaagagaggcccactggaaggctggaggagctgctccccagatgtagatgaagtagatttgagcagcacagtggtggacctagtagaggcggacatcaagatcctcttcaaggaaagattatcaatatagttttccctgacccaggtgccatgtgttttctgtcatattcacgtatgctaatacataattgtgcaagtggggtaatatctgggacacttcatggttcatatcaaaacacagagtgaagagaacatcctctgggccatctcagagtgtgagtttggggcgggggtggctcctggttaacatttctgtccactgcagcattccttttcccttttgcttttagattcttcccttgacatcacaccaggaaagtctgacaacttaactttattggatataggcaaccgttgaatccaagttttgcccactgaatccatcaaattgttacagcca

SEQ ID NO: 526996 - DNA, 455 bp, Homo sapiens
tcagcctcccaaagtgttgggattacaggtgtgagccactgtgcctggccgaatttgagttttttttaatgattgtaaagtgtccacggctacccaattagccatctttttttttttgagacagttgcaccttgtcacctgggctggaatatagtggygcagtttgggttcactgcagcctctccccgggttcaagtgattttcgtgcctcagcgttcccagtagctggggctacagctgcacaccttatttttgtattttttgaagagataggggtttcaccatattggccagggtggtttcgaactcctgacctcaaatgatgtgcctggccagaacattaccaataactttgaaacaaacctgtctgattcaatttctctttttcttcttcctacttggagaattaactgggtatatcatcctctggcttttcttaatagttttactgagtg

SEQ ID NO: 526997 - DNA, 670 bp, Homo sapiens
atagaatttacctcttgataggaggaatggcaaagtcacacggcaaaggggcaggcacatcagaataggagagactgatggctatattttgtaagccctcctatggcaacaaatatttctaggttgttggttaccagaacgtaatgaagcctaacctgactgaacattcaaatcactaaactktgggtgccttttaaagccatcaaactaatatgtaacagctgccttcaaaagaaagggcctttctttcatgagtttttcccagtatttgttgagctacatcaacttggcacagtgtggcagaattcattctctcttcctgcttaagtaataaaactcccaagttttctgggcccacagagtatgttcttaaggagaagtgtttactcctcaatgtataaaacttcttcccttcccaccagctggaatgtggacagaatggtggactctggaacagccacctagatcacaaaatggaagtcacatgtggatgatgataaagaaacaaaattaaagaggccctgctctccaatcctgtagagctaataggattgacctggaccacttatgctcagaccatttaagctgctgttattctagcttggttataacaaagccaaaccatgtctaactgatatacctagcaagaaatcaatgtgagagccaaagg

SEQ ID NO: 526998 - DNA, 534 bp, Homo sapiens
gctgccccaggtggcttctctgtgaccccagtttcctctaagggtcctgtgagcctgatttattcagttctgtttatccagtgagcacctacagtatgcctagccctgcaccaggccctgaggacacagatatgaaagacaatgtcactaaccctgttggtcccaccctgggggagtggggcaggccccagtgagggcagmggggtcagcccccccctttttttttttttgagacggagtctcgctctgtcgaccaggctggagtgcagtggtgcgatgtcagctcactgcaaactccgcctcccgggttcacgccattctcctgcctcagcctccggagtagctggcactacaggcgcccgccaccatgcccggctaattttttgtatttttagtagagatggggtttcaccgtgttagccagcatggtctcgatctcctgacctcgtgatccgcccgcctcagcctcccaaagtgctgggattacaggcgtgagccactgcgcccggccggggtcagccccttgagaagatg

SEQ ID NO: 526999 - DNA, 534 bp, Homo sapiens
gctgccccaggtggcttctctgtgaccccagtttcctctaagggtcctgtgagcctgatttattcagttctgtttatccagtgagcacctacagtatgcctagccctgcaccaggccctgaggacacagatatgaaagacaatgtcactaaccctgttggtcccaccctgggggagtggggcaggccccagtgagggcagaggggtcagcccccccctttttttttttttgagacggagtctcgctctgtcgmccaggctggagtgcagtggtgcgatgtcagctcactgcaaactccgcctcccgggttcacgccattctcctgcctcagcctccggagtagctggcactacaggcgcccgccaccatgcccggctaattttttgtatttttagtagagatggggtttcaccgtgttagccagcatggtctcgatctcctgacctcgtgatccgcccgcctcagcctcccaaagtgctgggattacaggcgtgagccactgcgcccggccggggtcagccccttgagaagatg

SEQ ID NO: 527000 - DNA, 534 bp, Homo sapiens
gctgccccaggtggcttctctgtgaccccagtttcctctaagggtcctgtgagcctgatttattcagttctgtttatccagtgagcacctacagtatgcctagccctgcaccaggccctgaggacacagatatgaaagacaatgtcactaaccctgttggtcccaccctgggggagtggggcaggccccagtgagggcagaggggtcagcccccccctttttttttttttgagacggagtctcgctctgtcgaccaggctggagtgcagtggtgcgatgtcagctcactgcaaactccgcctcccgggttcacgccattctcctgcctcagcctccggagtagctggcactacaggcgcccgccaccatgcccggctaattttttgtatttttagtagagatggggtttcaccgtgttagccagcatggtctcgatctcctgacctcgtgatccgcccgcctcagcctcccaaagtgctgggattacaggcgtgagccacygcgcccggccggggtcagccccttgagaagatg

SEQ ID NO: 527001 - DNA, 617 bp, Homo sapiens
ccctgggggttatagctaagctcaatattacaggttggtctaattctggtgcttagagtacaaactagaatttttgtcttggctcatgttggccatattagtcatactggttgaatggcatgctcatggaaaaaaatctgccagaagccaggaccctatagaaacaagagaatgatgctattgcagggcratcctcaaaggcgtttctacatatcttgtgatgacttatgtcctggaccagcttactaaggactcttgtatggcaaaccagcagggagggtagagatgctgtctctctggggcagaggacagactagcttcctgaccagaataataaagataacggcttaccactgtcacttggctgtccaatagtcacttcaaacttaacgtctaaatctgaactcgatctttccaaaaaaactgcaactcttagttttcaactaatgttcacttttttctgttgcttgggccagaaatctaacatgtcattccttcattttgaaatcctgttggctgtatctcaatatatgcagaaacttgtcacttctcaccatctctattcccatgctggtgtcagtctaggccatctctggtctaggcttgcagcagaagca

SEQ ID NO: 527002 - DNA, 617 bp, Homo sapiens
ccctgggggttatagctaagctcaatattacaggttggtctaattctggtgcttagagtacaaactagaatttttgtcttggctcatgttggccatattagtcatactggttgaatggcatgctcatggaaaaaaatctgccagaagccaggaccctatagaaacaagagaatgatgctattgcagggcaatcctcaaaggcgtttctacatatcttrtgatgacttatgtcctggaccagcttactaaggactcttgtatggcaaaccagcagggagggtagagatgctgtctctctggggcagaggacagactagcttcctgaccagaataataaagataacggcttaccactgtcacttggctgtccaatagtcacttcaaacttaacgtctaaatctgaactcgatctttccaaaaaaactgcaactcttagttttcaactaatgttcacttttttctgttgcttgggccagaaatctaacatgtcattccttcattttgaaatcctgttggctgtatctcaatatatgcagaaacttgtcacttctcaccatctctattcccatgctggtgtcagtctaggccatctctggtctaggcttgcagcagaagca

SEQ ID NO: 527003 - DNA, 348 bp, Homo sapiens
tccccactaaaaagtctgcacaaacttmtaccttcagcaatagcatataagtctggtttgcaaattcccaaaccaaaaagaatattactgtcttttaggaagggggaaagtttaaatgatattttattatttatatttttaaattagaactattatatatctctacacactaaccagaatgacaaaaacacacaaaaacctcacaacatgaaatattagaagaatgtggagcaaccagaattgtcatacattgttgatagaatgtaaaatgatacaaccactgatttatatattagtgaatgaaaaagccaaaagcaaggcacatcacacttaaatttagaagactca

SEQ ID NO: 527004 - DNA, 582 bp, Homo sapiens
gaggtcacactgtgaggatgctgctcttctatgacctgggaccaaaatgcccagtgtccagtgagaaggccgctctgttctagctgggtggactgggaagaactctcaggaaaatccagttccatctagagcycagagatcccacctctgaccaaaatggagcaagagcgacctgattaattgttatgcctgaaacaactaaaaaacaggtaaaagagataaaatagtttctcaaggcactggacatctgacaatggaagcagtcacccctaagaagcaggacacaaatgggggaagggtgtcactgccagctcactgcctggagaaagtctgcagtcagtatagcaaaaaggggatcccagcagagtccagtggtctcccaagctgaggagacagagtagggtgtctcactttcaaaagggagcacaaaataaagacatttcatacatacaaaggaatttataaccagccaatctgcacttcaagaaatatgaaaggaagttatttaagggagaaggaaaatgacaccagatgaaagtctggagctacataaaggaatgaagagcatcagaaatgtcaact

SEQ ID NO: 527005 - DNA, 489 bp, Homo sapiens
aataaagttaaaagtcttctactaagactgttgacatgtctatttttccttggaattctattttttctttatatgttttggggcaataatactaatatcaacaacagcaacaataataacaccartgtttgtgatgccagacactgttgtgaacactgtgctagttcatttgatcctcaagcgactggaagaagtaggcattattaatatcctaattttcaatatgaggaaattgaaacagagagagatttaataacttgcctaaggtctgcagctagtcagtgctggaattaggtttcaagcccaagcagtctggctatatgacacggcactgcctctcaggctttgttgtttggcacactgaggttcagcattattataacctcctggtaaattgttgaatttacccttatgtccttatcctctttatcattattgatgcagtttgtctgattctaatataatattattattgctataactggttta

SEQ ID NO: 527006 - DNA, 592 bp, Homo sapiens
aacaaggactcttaacacagatcccactgccaccatgcrggggattcatggatagaagcggggcccatgaacagagatggagaaaatgttacatctttatttttcccaacctctaaccaaaatacagcatttccttcagtgaggaaatatttgtggcacctgtaagtctgtcaccaataaatataacagatgttttcacatcacctcagagttgttaaatcacaaaatatcgtttatattcgtcgctgccttgaagtagtggtactaattacacccaccagtgcagctcgctactttacgtattagtaaagaggcacatacataactgtcactactaatttgttttctccaatattttgataactcgctccaagccactggttccctttgtcttgttatgtgctttattttatgagtttacaatcaccattctgaaaagcagtccataagccctgctagacccaggcacaagcctggccccaagatgctaaaagcccccagtgagcctctgcctccagcccctcagggcttcgggtggatgggatgcatgtccccacacttccgccctgctgtgggactggggacgttgttc

SEQ ID NO: 527007 - DNA, 572 bp, Homo sapiens
gtgggtgtgcatatgtttgtgtgtttcctcttctgattttagaaggaatacatgctcattagagaaaaaatggaatactgtgaaaaatataaaaaaggaaactcccacccttaatccacgtgtgtgatcaatatttgctaatgtttcaaagttttcttcagtctattttaaaaagacaaaatcacactatgtatactttcctatcagtttttccctaaacttatttatgaatyctttctaaacatgaatgactgcatattatttcatatgggccatattaggctatgctatgttacaatgtgatcacatgaaccctaaaatctctgtgtttgctccttgagcatacaacatgtcatcacaggtcagtgggcccgtctcgcactatcagtatttaggaacccatgttctcaagacctccaccaactggaatgtcattgactgctgaaccaagggcaggagatgtggacaactgtatagtagctctcgaaggccacagcctaggaatgatacacatcacttctgctcacatttctttggtcatattaagtcacaaggccacaaataactgcaag

SEQ ID NO: 527008 - DNA, 656 bp, Homo sapiens
tgtgtcttgcctgtgcagaattctctaatgatctatttaagaaaaatcttctaaattcagatcttgggcttgttttccatatcccttgagtgagaacatttaccatgatgacttctttaaaaatttggcaggaggcacctcagctatgtattctgagagctgtctatgtaattgacaaataattaaatgttttcttatttgcagatcaaggattttcttttttggtgagggatggagtcttgctctgtcacccaggctaaactgcagtggcacaatctcagctcactataacctctgcctcccacgttcaagtgtttctcctgcagcctcccaagtagctggggttacaggcatatgccaccacatctggctaattttttgtrtttttagcggagatgggatttcaccatgttggccaggctggtcttgaactcctgacctcaagtgatccacctgcctcagcctcccaaagtgctgggattacaggcgtgagccaccgtgcctggccaggattttcttagtaatggctttaccatttcattcacaatattccttaattattttgctaattgttgcttattgttatataacattgcttgatgttaccaatgaagaaatcattttgatgaagtcctttgagatacttagataaatgt

SEQ ID NO: 527009 - DNA, 509 bp, Homo sapiens
cccctgggcacatcctcacccttggctaaataagcctcgaaaaatttgagacacctgcctatcactttttggttcagtttgcatctttctgcaaatgaatgtgttatactgatgtcagtaaaattaatcccgaggtcctgagagaaaaatgggatcctggtgtttcttcaagactcaagaagcataaggttaatttgggggaggggattagaattaatactcstggaaagaagacttttcttcttcagttgctgctttcattgttttctcctttccttcacgtccctcaccacatctctgaagggaatattcaagccttttttgttaaaacaaacagaaacaatctcaatacttaacagctagactttgcacagtggacatttctttcagaagtgacgaatatacaattatacactgcataatgatgtttaggtcaaagacagactgcgtataccacagtggtcccatagcttataacagagctgaaaaattcctattgcctactgatg

SEQ ID NO: 527010 - DNA, 452 bp, Homo sapiens
gcacaggattccccacacccccaagacagcacgggacgggatcccccacacccccctagacagcacaggatcccctgcatcccccagccacagcatagaatccctcacaccctccaggaagcaagggatctcctgtacctctccacccaatggaagtttaaccactacctggcctttagaaagagattgggaaagcaggactactgatcctaggcacccctacttcctcccgacaatgctcccagcctctccagtgccttgttttgcctccatttctgtggaaaggggtgggcatccygtatcacgtggtgaggtcagaaaagccaagaaaacccacagaagcagcaggggctgcttcaggtagcacaggagccctcatacaagggttccctcagacaccacacagccacctctacacagtggctgcagggtagggggatgtccagggccac

SEQ ID NO: 527011 - DNA, 532 bp, Homo sapiens
ggtgaaaaagcagccaccctccctgtgctggttggaattccctactcagagaattcatgtgcctaataaaatggtttttgtttaaggccaccacgtttggagttgtttgttatgaagcagtagayggtcagatacctggaatactactttgagagctgttgtgcgggttaaatgacacaatgtattatctacctggctcacaattgcattaagaaatactggtttcaaggtgcatgcaagacattcaggtagatgtcttaaattgtagcagcagcagtagcagccatagccactaacattcctgagcacatctgatatgcccagtgctattccaagtgttttccatgcatttaacacacacattcctcgaaataacctcaagcactatcagcctcaccattttactgatgaggacactgaggcccatagacaggctaagtcacttgtacaagtcacacagtctgcaagttgatggatggagttttgaacccagacagtatgactgcagggccctccacttagccacactgtt

SEQ ID NO: 527012 - DNA, 607 bp, Homo sapiens
tttttttgagttatgaaagtgaacaggagagaagcctgatctctgggctcatgggagtttatagtctaatggaattgaattttatgtgaaagaggattatttgtgccatccatttgatattttagaacaagatgaataaaaataygtgatttaaaatcagaaattacatgattttaaaataattgttcttatgaccgagtcatatgttcattatcagatatttagataaaaaagaaaataatatcagctatattcccaccatccagagacagctactaataacagtttagactttaccatccaagcatttttttctatatatatggatacattcttactggtgagattttgtgataataaatatgccatcatttaatgcttttgatatattttgccaaattctctatctgaaagagggtatagatttatactaccaatagcagtgtttgggagtgctcatttctccgtgacatttaccaacactgaggataatttgttttaatctttgtcagtttgagtggagaagatagtgttttgttcttctttagtgagtgtgataaatttttcctttattgctcatttttattggtttgtgaattcgctgtac

SEQ ID NO: 527013 - DNA, 558 bp, Homo sapiens
gtaaacctatgggacagaaccagtcttgggtctttttaaaagggtctgtgcccaagatcaccttctaagagggatgagaaggcccagcagaggaagccggtgattgagggtaaaaagtatcagcagccacccagagggggaaatatagaggaaaaatctcccatcrttggggagacggtctccagagaacccctaagcagcccacaaataattagaatttggacactgccacattcagaaaacaccagtaccagatcacagccatatcagttaaggggagaaaaaatatctttctctcctatcttaggttcatggctgaggcccgtataaacaaaagacagattaacaggagaaaagcatacaaatttatttaatgtaagttttacatgacaccagagccttcataaggcaatgaagacctaaagaaataggtcatagaaacaattaagtgtttttatgccaagttggatgaggagtagagagtcacgtagaaatatgatagggcaaaaaagggtgtgagcgaagggtaataaacgggaaatttagcaggacctgtgt

SEQ ID NO: 527014 - DNA, 558 bp, Homo sapiens
gtaaacctatgggacagaaccagtcttgggtctttttaaaagggtctgtgcccaagatcaccttctaagagggatgagaaggcccagcagaggaagccggtgattgagggtaaaaagtatcagcagccacccagagggggaaatatagaggaaaaatctcccatcattggggagacggtctccagagaacccctaagcagcccacaaataattagaatttggacactgccacattcagaaaacaccagtaccagatcacagccatatcagttaaggggagaaaaaatatctttctctcctatcttaggttcatggctgaggcccgtataaacaaaagacagattaacaggagaaaagcatacaratttatttaatgtaagttttacatgacaccagagccttcataaggcaatgaagacctaaagaaataggtcatagaaacaattaagtgtttttatgccaagttggatgaggagtagagagtcacgtagaaatatgatagggcaaaaaagggtgtgagcgaagggtaataaacgggaaatttagcaggacctgtgt

SEQ ID NO: 527015 - DNA, 558 bp, Homo sapiens
gtaaacctatgggacagaaccagtcttgggtctttttaaaagggtctgtgcccaagatcaccttctaagagggatgagaaggcccagcagaggaagccggtgattgagggtaaaaagtatcagcagccacccagagggggaaatatagaggaaaaatctcccatcattggggagacggtctccagagaacccctaagcagcccacaaataattagaatttggacactgccacattcagaaaacaccagtaccagatcacagccatatcagttaaggggagaaaaaatatctttctctcctatcttaggttcatggctgaggcccgtataaacaaaagacagattaacaggagaaaagcatacaaatttatttaatgtaagttttacatgacaccagagccttcataaggcaatgaagacctaaagaaataggtcatagaaacaattaagtgtttttatgccaagttggatgaggagtagagagtcacgtagaaatatgatagggcaraaaagggtgtgagcgaagggtaataaacgggaaatttagcaggacctgtgt

SEQ ID NO: 527016 - DNA, 317 bp, Homo sapiens
gctagcagtttggtaataaaaggaagtggcatatctctcctgcctctagactgggtttctaggagtgcacatggccaaaaggaaactgctgcactctggcaagtgattacatgttgtgctcatggacaccttggcygggtgtccagtgtgcactgggtgagggtgtgcatgggctgtgtgcaaagatctgcagtgctgcacacagtgtgttgagtgagagggtgccaagtgctgggacggttgtagataaacaaaagcaaataggtgcagtactgtgcagcctgcccaagttcccaaagcttgctgccaggctgaag

SEQ ID NO: 527017 - DNA, 317 bp, Homo sapiens
gctagcagtttggtaataaaaggaagtggcatatctctcctgcctctagactgggtttctaggagtgcacatggccaaaaggaaactgctgcactctggcaagtgattacatgttgtgctcatggacaccttggccgggtgtccagtgtgcactgggtgagggtgtgcatgggctgtgtgcaaagatctgcagtgctgcacrcagtgtgttgagtgagagggtgccaagtgctgggacggttgtagataaacaaaagcaaataggtgcagtactgtgcagcctgcccaagttcccaaagcttgctgccaggctgaag

SEQ ID NO: 527018 - DNA, 592 bp, Homo sapiens
tacagtcatgcatcgcttaacgacagggggataagtactcagaaatgcattgtaaggtgattttgttgtgtgagcatcgtagagtgtgcttacacaaacctagatgttatagcctattacacacctaggctatatagtgtagcctrttgcttctaggctacaaactggtacagcgtgttactgtactgaatttcttaggcaattggaatacaatggtaagtagttgtatatttaaacatagaaaacgtacagtaaaaatatggtattatagtcttctgggaccattgtcgtatatgccatccattgttgactgaaatgtggttatgcagcatgtgactgtgtatattaatgtgtcctagctctcttttagtgaccacttactaagtccatgtgttctcagatggaaaacggttgacacctgggcctgccatgtggcatcaccctgacacaggttctcactgggtcgattgcgtctgctgatacaacctaaaacttgcttgttagattttgaagcactcatcctgagtttccatgcaggggaatgtctagcgatcaagaggggatcttggtgttttgtgttccactctgggac

SEQ ID NO: 527019 - DNA, 378 bp, Homo sapiens
tcaagggagaaggtatagtggaatgagtgtgagcatcgggctttgcagtcccatagaacagaaatgggatgctagcgtgccactacctacttgtgtgattgtgggaaattacttaacctcttcaagccccaatttcctcaaccataaaatgaagataataatgcctacctcagagggatgctgaccacagacctttatagcagcccrtatgatattattcacattatgatatgtgtttattattatgtgactctttttacatttcctaaaggtttgagaattaaatatatttaattatgatttagtaatgtgtgcagtttttcaatatgacctgattctgagtagtttgaagatcattccaatgatcttcaccaacta

SEQ ID NO: 527020 - DNA, 548 bp, Homo sapiens
ctgaggagaggcttcactcaggagttcatgctgagatgatcatgagttcatgcgacgtatattttcctttggaaacagaatgaagcagaggaaactcttaatacttaaaatcgttcttgattagtatcgtgagtttgaaaagtctagaactcctgtaagtttttgaactcaagggagaaggtatagtggaatgagtgtgagcatcgggctttgcagtcccatagaacagaaatgggatgctagcgtgccactacctacttgtgtgattgtgggaaattacttaacctcttcaagccccaatttcctcaaccataaaatgaagataataatgcctacctcagagggatgctgaccacagacctttatagcagcccgtatgatattattcacattatgatatgtgtttattattatgtgactctttttacatttcctaaaggtttgagaattaaatatatttaattatgatttagtaaygtgtgcagtttttcaatatgacctgattctgagtagtttgaagatcattccaatgatcttcaccaactacc

SEQ ID NO: 527021 - DNA, 513 bp, Homo sapiens
acaaaagagcctgggttggagggtcagccctgggaagcttggggtggtctgcagatcttgtcagaagatggcagtcctgtagatgaggaaggaagaggccagaggtgaggagcagttaatggtaaatatcagaaactagagagtgatgtggaacgaataggaggaggcatggcgcacacgtgctgggtcctgtcgtgtgtgaacctcatctaatagtgtgcacttcagtgagatgagaatatttcactaaagaaacaggcttcgctcaacacctctcaaagagacgtgagccagccaaatacagggaacggtgctaaagtgaagagtagggggaaaatacatttagggtcattaacaagcagttgctgaaatctggaatatatacatcktttaaagatttaacagtttttaaatcttaacatgtaaaacctgtggtatagaaccaaccctccacctcacacatacgctgtatttacatttagatatctttcatctccagtggtctctggcagt

SEQ ID NO: 527022 - DNA, 597 bp, Homo sapiens
acgtccccactaagaaaggctgaactataaaagtgcacaagcctaaggacattcctgctttataaaggtgcgaaacaccggatatagtatctttcattctcagaacaaacttgcaaaacaggtattgttattccattttagaaattaggaaagtgaggttttgccaggttaagtgacttacccgagaatacagggcaaaagtgtatcaaagctgagctatgacccgtgtctgaccaagaaactctgtctcatttcagttatctgtggccacaargaaagttatttgtctctgtcttggcaaggctgggaggaaagttttagctaagtgagttcttttacactttagtcatcagttttctgactttgttagtctttatgagacgtgtgtgataaatttacattactctaattccaggaaactcagcccattggagaccatggataagtacgatgtgattaaggccatcgggcaaggtgccttcgggaaagcatacttagctaaagggaaatcagatagcaagcactgtgtcataaaagagatcaattttgaaaaggtaaagttaagttcaaatttctgttaattttcagtgggatatt

SEQ ID NO: 527023 - DNA, 597 bp, Homo sapiens
acgtccccactaagaaaggctgaactataaaagtgcacaagcctaaggacattcctgctttataaaggtgcgaaacaccggatatagtatctttcattctcagaacaaacttgcaaaacaggtattgttattccattttagaaattaggaaagtgaggttttgccaggttaagtgacttacccgagaatacagggcaaaagtgtatcaaagctgagctatgacccgtgtctgaccaagaaactctgtctcatttcagttatctgtggccacaaagaaagttatttgtctctgtcttggcaaggctgggaggaaagttttagctaagtgagttcttttacactttagtcatcagttttctgactttgttagtctttatgagacgtgtgtgataaatttacattactctaattccaggaamctcagcccattggagaccatggataagtacgatgtgattaaggccatcgggcaaggtgccttcgggaaagcatacttagctaaagggaaatcagatagcaagcactgtgtcataaaagagatcaattttgaaaaggtaaagttaagttcaaatttctgttaattttcagtgggatatt

SEQ ID NO: 527024 - DNA, 604 bp, Homo sapiens
gatagtagcacccaaatagttaaaacagtgagaagagaaagttagaaacagatcctagtatgtatcataattcagcacaaatgaaaagtaacatcacaagtcagcgtgaaaagaaaggattattcagataaatgctgctgggccaattggttaacagtttggggaagattgtgaaatcagaccctatataatatgatacaacaaaataaattttttaaaaaagagttatatgtaaaaagttatacattagaaaatgaaataaaagaacataggtcatttttttttttttttgagacagcgtctcactctgtcaccaaggctggagtgcaaaggcgtkatctcggctcactgcaaactccgccttctgggttcaagcgattctcctgcctcagcctcccgagtagctgggactacaggcacccgctaccacgcccagctaatttttatatttttgatagagacggggtttcaccatgttggccaggatggtttcgatctcttgaccttgtgatccgcccgcctcggcctcccaaagtgctgagattacaggcgtgagccactgcacccggccgagttaattttttttgaacagggaagagctatc

SEQ ID NO: 527025 - DNA, 642 bp, Homo sapiens
aatgaaataaaagaacataggtcatttttttttttttttgagacagcgtctcactctgtcaccaaggctggagtgcaaaggcgtgatctcggctcactgcaaactccgccttctgggttcaagcgattctcctgcctcagcctcccgagtagctgggactacaggcacccgctaccacgcccagctaatttttatatttttgatagagacrgggtttcaccatgttggccaggatggtttcgatctcttgaccttgtgatccgcccgcctcggcctcccaaagtgctgagattacaggcgtgagccactgcacccggccgagttaattttttttgaacagggaagagctatctgttcaaaatacatagaaaaaaaaaccacagaataaattagtaataattcaactttaacaacaaaaagctgtaataaagcaaatcatactaacccctagaattgtcattttcaataatgtatctagtttaaataatcataaatgtccacaaaaatttagctacaaatgaggtcattatataatggtattatttttaatagtgaaaaatcactagcaacctaaaaatctggcaggaaatgattagttatattacattcataaagcagaatattatgattgctttaaaacag

SEQ ID NO: 527026 - DNA, 642 bp, Homo sapiens
aatgaaataaaagaacataggtcatttttttttttttttgagacagcgtctcactctgtcaccaaggctggagtgcaaaggcgtgatctcggctcactgcaaactccgccttctgggttcaagcgattctcctgcctcagcctcccgagtagctgggactacaggcacccgctaccacgcccagctaatttttatatttttgatagagacggggtttcaccatgttggccaggatggtttcgatctcttgaccttgtgatccgcccgcctcggcctcccaaagtgctgagattacaggcgtgagccactgcacccggccgagttaattttttttgaacagggaagagctatctgttcaaaatacatagaaaaaaaaamcacagaataaattagtaataattcaactttaacaacaaaaagctgtaataaagcaaatcatactaacccctagaattgtcattttcaataatgtatctagtttaaataatcataaatgtccacaaaaatttagctacaaatgaggtcattatataatggtattatttttaatagtgaaaaatcactagcaacctaaaaatctggcaggaaatgattagttatattacattcataaagcagaatattatgattgctttaaaacag

SEQ ID NO: 527027 - DNA, 625 bp, Homo sapiens
agtaatgatttccttatagaaaagataaagttttatcatagagataatcatgtagacttcttttttaataggaaagctgtcagacctcattggagcttcagtttattatggtttatgagagactacacaagataataaggatatctgagattctcaggaatggctattattaaaagtacttattgattgtttccttcatgaatcactcaatacatatttattgagtggcaactttagacmagagctggattagatgcagaaagtccaaaatgagtgtaagttcatgcccagaaggtgggaaaaaaacaaacccaacacactagcattttttcaactctctgcagggtaaggttctaaaggctatttaaggcaaaatctgagtgcagttgaactgattcttaaaaatctcttaaaggcgccacattggaaattcatccttccatctcccaagaaggtctctagagttggcacagatcactgcttcttcagaagagcttcacatgaaatagccagcctgtgtttggaaaccatgttgtaagaaagacacatggctattgaaacactaagaacacactcagtgcccctggatgctctcctaggagaagcttgcagcactgagacagct

SEQ ID NO: 527028 - DNA, 612 bp, Homo sapiens
ttcagctctgaggcttctttttcagggatattcctccccagtcccactgccactgactgaactcaggtttcaggatttctgtctacataaagtrttgcttcacttttgattagacacctcatccaataaataccttttgagtaatatccccaatatatgtttatcagtttataattgatatgcatgcactattcattataaaacaacaaaataatcaaaaccaaggatgaggttaaaatagaaatagaaacttagtatctttcccccctccattgagaccccctaatactactgcaactttgaatatgctcttccatccaccctgtctgttcatgcctggtgaatggatgagcctcttctaaggtctttcctgcccttcccagccctcaagaagagttcatcccttccttcttctgttagtctgttcctggtgccctcatatgcaatgattatgaggatctgagctctctggggtcagtttcttgttgtggatccttagtactttgcactgcactcaacctatgatgatggcagcaaaatgaatacacgaacgagtaagaatatcagggaaatattgaaactgcttacaaacacaaatcatttcaaacactc

SEQ ID NO: 527029 - DNA, 462 bp, Homo sapiens
gaatattgaatttcgtcggctccccttctcctccttccccaggctactgaaaattggttgctatcctcaactgcttgccccaccccctgttcttctcctggtcatggtgaatttggacctgcaaaagccttgtatcagtttcaattattttttaatataagataatattggtcttggcaccaaggcttctcagaagcgctcctctttgctctctcaaagtgaacccattgctcccaattacagaccttgcttctgttgctttctcagcccaagttcaatccggtgtgaayatctcttccttgccttttctggtttatgttctggggattattcagagtgaccacaagccttgtcttttcttctcatcaaattctgacaatatccttaaaatattggttttggtaaatctgtagagtcctgctcttcagtaacctatattattagaacagggctcccaggtgg

SEQ ID NO: 527030 - DNA, 528 bp, Homo sapiens
tcattgaggggtattgcttttctcagaaatcacttctcgcggcctgtcttttccaagaagccagaagaaagtgtgcttgctgtggctgtgcattcagggrgcaccagcgaagcattctccctgtgaaaggatgtagggacgctagattcgctttgtccttcctcattgcagttatcgtgaaacacacagccacatcctaagagcctcagctttgtcacccgttgaatgggtgagtgattattgtaagtggagcatgcttaacccatgctttttgcctttgcaaaaataagcatccacaatatttaaacggctgttttagtcacttgtagaggcacaaacaaaagaacccataggggcataagctgtaattttatgatgaaacagttcaaactctatgatcgtttgggctctggattaagtgtttccttctccagattcttgaagaggacccaatatatgaaatcgtttttgggtttttttttttttgttgttgttgttgtgtgtatttttttttcctttccaagatat

SEQ ID NO: 527031 - DNA, 376 bp, Homo sapiens
gaccccatctctccactctcgagagagggggtgtccctctgctgaaagctcagggatgaaggcctgtggcccctccacagagcctggctttgctgggttctcagcaaggtctccaaatgtccaygccagccccacccctgatctccttcccccactcttgctgctcagccccttttggctactggatctgacaattcatgacgaccccgagaacactgatcttcgtggaggccttcatctgccggacacatctggaaagtactccgaggggtctacctggttttcctgattaatgtagatgtaaagattttatcaaggctcctggcggccggacttcaagatgtaatcacaaaatcaatccacatagactaaccgg

SEQ ID NO: 527032 - DNA, 643 bp, Homo sapiens
tgtaaaaatgaaacggtgccgaatgccaggtcccagagctagctaaggaggaagcagggctgggaggatggctcttgagggagcattagagacctcaggcccttctgaaatactgtggattccaattgctccttcacagcaatagcagagggccacctccttgtgcaaacagaggagctagccatgggttaatcctttcctaatgcatagaacctcctgctcacaaagcttattagctcgccactcacggggaaaaccttgttctctcctatgttgttctgagacgagagagacagagaggagagagaaatccactgaccctgaaaatatttctctccctccttcttcctggacaaatccacattgtcacctttcccttacagcagggcgataatttatggtccacccgagacaggttttgttattccatcagaattacctattaatttgctggattcctctgattaagcagtgaacttgtcagcgtggctggctcatcgttcagaatatgaaatatcctttcattttcaacaagtaaatccaagtccaaaccaacccagacgtttgcaatttcttctcttgacatggtgtcctctsttcctactgtctcaggtgttccatttttaaataacattttctaagt

SEQ ID NO: 527033 - DNA, 509 bp, Homo sapiens
ttcaaacttctggaaagttgggggaaaactataatttccaatccttcttggttctaaaagtatcctcacagtcatatgctatctgtaggctggagctaggctgtcttgttatctcctgcctagaatgccctgctaactccaaatttttgattcatttccaggtggccaacccattcccttggtcttacttcttacactgggtggaattccaagatcccattctgtagctccaacaactcaaaacccaaacaattttgaataaacaaagcttaaaacctgaaactaaaactccacaatcctaaacctgactccatcccaggttattctgagatcaaagatgctaacactrgagcttgagtcccagaccttagagattatgtacgacaggctcctcattttacaggtaagaaaactgaagcccaggagggtggtgatctgcagagattgagaggcagatgcaggatcaaaattaggtccctggtctcttggcccacccgtgccaccagcca

SEQ ID NO: 527034 - DNA, 585 bp, Homo sapiens
gctcagtgttttgactttcatcactgagcctgtggatcagtattttttcaaagcaccccaagtgtttcccaggagcatccagagtggggaaccactgtgttcatttgaaggcacctaagagaaacggccttcctcctcctgtttcaaatgaaatgctatgaattacaagtgattccgataatctgttttgccattttagatgatgaacaaagcaaattggaaggttctggttccggtttagatagctacctgccggaacttgccaaggtaacatcgtcttatatcttctgctcttcgttgaatgctgttgaagtatgtctcatttcactggtttgtccagaatggaatctgttgaaatcataaaaattacattgtgattacctctctctttttctgacctgattacgaggtgaygtgtactcatgcagtatgatttcaggtctgtcttctaaaaagtaccctacaaagcattctccttttattattattttaagtgtttttttccctgataatgcttaacactgcatcacaggtactgaagaaataactgaaatatgcaggcagatgttctcataatagcatcgt

SEQ ID NO: 527035 - DNA, 610 bp, Homo sapiens
aacaaatcatattcctatcttttcatgtgtttccttccaatatttttcttaaacatgttttcacacaattgtgaccacacgcatttctgcttactgcgttttttttgctcaacattgtaattttcctgtgttataaattctccgcaagcagcactttaaagggttatatggtatttctttagcttgcccccataaataaccacagcttgcacttagtgagtatttactgtgtgccaggcccyattctaagtgctttatatgcaattgctcgcttaagtacaaagatctatggggtaagtgctattaaaatgtccactctctgggtgaagaaactgagaaggcagaactagtagatgaagagctggggctgaagcctcctgaacccaagttctcatgcactatatcctactgccatccatggcaagaactatccccctagtaacagaaacttggttatacaactgcatttctatgtttagaactgagggaataaacatttgatatttaacttattcttgaaacaaaagagaatggcttactttagaatctgtaagatcataaacttttttccgtgaacaaaatattgcttatttttttcataaaaaagtaa

SEQ ID NO: 527036 - DNA, 481 bp, Homo sapiens
gcaggcatgcatcatcagagaagccagacagggcagcaaggtccgggcacccagacacccacagcgcacatgtctcaattcactaaatgaagtggaagcccctgaaggtaggacccaccctaccctcaagatgcaaactctgctcaccctctgggtatccactaagactgattatttgtctaggcatagagacaaatgggaaacacctggcaccaattatgtgtggagcactcgaaaatcctttttaacctcggatgcacttacagcactcatggccttggtttccatctgaatsatccgggcagagtctcacaccaagcttccaaaacccttttaagaatttccgaaccaagagacttggtgaaatccatgaatgaggaagtcttgtggtacaggaagcatggtccaggtcagcccctaccctacccacctggcctcttccaatccatcacccacccaggcacagaggagcaacattctc

SEQ ID NO: 527037 - DNA, 377 bp, Homo sapiens
ccacccccaaaccacagacacacaagcaggatgggggctttcaggggccagaaagcgtatcatcttcaactctgctgtctttgcacagtgcacacattcaacaaatgactgttaaataagtacatgatcaattaaaggatttttttcatagcyggtaggtttttctcattagaaaagactgtttagtccttcgggactgtttggggagattaaagtggtctgataaaagtttatatagtactaaagtatgaagacatgttgaagacagttaggaaatcttgtaatgacagagacatgaaaaactttaaggttttaaggccataaggtaaaaaaaaaaaaagagagagaaatattaatttacaatgggtaaaattaca

SEQ ID NO: 527038 - DNA, 536 bp, Homo sapiens
tgcaaaattgacttacaggatcatgtcaatcgccagatgctgcagagcagagcagcgggtccagcttctgcaggtaaacgaactgcctgaaagggaatgagcagtgatttctcagggagtcccttctgcaatgtcgttataatgtcagcttttgacagcacaatggtttcagtgaaagactctggagcatcccctgaaagtgcctgagccttattaaaatgatgtcagggcatgctacgtttcacatctcacacacatgaaaaccccacagtgggaggactcggttgctcaagctaccatgatgcctagaccctcgtgtgcatgtggcctatggtatcccccatgaccccttcagaaatttcagaataaagacagtcagtcttgagctcagagagttggagtctgtcagtccagaggggcgtcttctcagcattagctccaaaccccagcatttgtgtctccatgaagttgtacttttcatttcctccgcattcttctcyagtcaataggtcatggcacatggtgcctctgggcct

SEQ ID NO: 527039 - DNA, 638 bp, Homo sapiens
agtgcagaaaggggaagtacggcaaaatgcctctagaaatcattcccagaaccactcagggagatgtgtgccagagtctgatcaaagctgtctactatattctggacccagaycacacagggcttcgtcagctaatataagcagccagcactaaatacggagttggataagtgaacagcatggatgccacagtgttggttcagcatgttctgtatgactcccaccttcaagcagataatcaaatacatctgcacttaatgacacctctgaaggaacaaaatgagctagcttgagccaatcatttttaaaaaaacattttacataaaaacttgctgtagaattaacaaactgccactggcttataccttttctcctacttcaaaactgggcacccttcccaacttcaccaacagtccatcacccagatttacaaccatgatactttttttgccttaggaagtttataatttgaagatatcaagcatatgcaaaagtaggggaaaaaagtataatgcattcttgtgtactcataacctaacctcaacaacaatcatctcatggccagtcttctctcaccaataacccaccctccccaccatcttcttccctatataggattatttttaatcaaatcccag

SEQ ID NO: 527040 - DNA, 638 bp, Homo sapiens
agtgcagaaaggggaagtacggcaaaatgcctctagaaatcattcccagaaccactcagggagatgtgtgccagagtctgatcaaagctgtctactatattctggacccagaccacacagggcttcgtcagctaatataagcagccagcactaaatacggagttggataagtgaacagcatsgatgccacagtgttggttcagcatgttctgtatgactcccaccttcaagcagataatcaaatacatctgcacttaatgacacctctgaaggaacaaaatgagctagcttgagccaatcatttttaaaaaaacattttacataaaaacttgctgtagaattaacaaactgccactggcttataccttttctcctacttcaaaactgggcacccttcccaacttcaccaacagtccatcacccagatttacaaccatgatactttttttgccttaggaagtttataatttgaagatatcaagcatatgcaaaagtaggggaaaaaagtataatgcattcttgtgtactcataacctaacctcaacaacaatcatctcatggccagtcttctctcaccaataacccaccctccccaccatcttcttccctatataggattatttttaatcaaatcccag

SEQ ID NO: 527041 - DNA, 400 bp, Homo sapiens
ctacatggtcctgagagtgtgtggtgagggctctaacctagccatgggagccagggaagactggaagatttcagtggaggcatcatttgacctgagttccagtaggtgaagacatgaaggaaggaaaccaggaaagccttcacaatggaagttgttctggtcctacagtttaatacaacctggatagactcagagtgcccagtgttcagcaagctgcctcacttaggccaaatgtctgacatgcccaggaccagtgaggtctcttctgtcatttcayatgttctgagaatttattcttggtcagatgctgtgttggccctttgtgcacattatcacatccattccttacagcatccctggcgagtcagcagtatcactatcaccattccataaagaaaaa

SEQ ID NO: 527042 - DNA, 616 bp, Homo sapiens
ggggaaaatgcacattctcagccaacaaaatgtttcgattgaagtgcttctctagagaaagataacagactatttcctaaaatagaaatctattcaacaaaaaacagaaacagaaaaatctgagtacagagaaattttgtactatgggaataatagggaagtctcaaaacttttatagaaatctctctgcaaaaagtaaatcagtgtgtatgtaagaattaccatgacatttagcacactaaattgttccctagggttattaaaacaagtgtcttagacgggattcattcattccccaccatgacttkctgggtgctttagcagtatttccactcttggcaatggcaaggagcagcaggagggaaggaagtacaaaccatattccattgtctccaggcctccttttggaagcctcagcctcaggagcagcaattctcagcaggagctacatgttaagacctcctggggggctgtaaaagggcaggatactccagcagtgttctggagtccagagactcaaatcaaaatgccaaccctctccaagtgactccaacacacagccaagcgtgagaagcgctcctggtgaggtaaggaaggtcattaggaatcctgccca

SEQ ID NO: 527043 - DNA, 532 bp, Homo sapiens
ctggttctctatgcttggtctatctcaagatgagcccctagaacttgtaagtaagcycataattaaataccagcacacagttagataaatgtgcatggggctagggggcgcgtggtgagaaagggagaccatggtgttgcaaagaaagtacatttcaaggctatattttaagactaaggagaacaaaagttttttgcagtaagctttctgcatcgtgagactaggggaagaagagaaaaaggaaaaaaaaagttttaaaactcattttcaggctacactgtttgattacgtggggactgcccagtcctacagacgtaaagccttaagccagctcctctgagatgaaagggatattctgggcacaaaatcagtcaagaaaggaagtgctgatgggattctggcttgctccagagagggtgtctgtcctgcttcgtggtgaggatttggcacctcatcaaaagaagatgaattttcgctcctcagagacaaatgagaggtcacaatggataccactgatagttgggaaggtttt

SEQ ID NO: 527044 - DNA, 532 bp, Homo sapiens
ctggttctctatgcttggtctatctcaagatgagcccctagaacttgtaagtaagctcataattaaataccagcacacagttagataaatgtgcatggggctagggggcgcgtggtgagaaagggagaccatggtgttgcaaagaaagtacatttcaaggctatattttaagactaaggagaacaaaagttttttgcagtaagctttctgcatcgtgagactaggggaagaagagaaaaaggaaaaaaaaagttttaaaactcattttcaggctacactgtttgattaygtggggactgcccagtcctacagacgtaaagccttaagccagctcctctgagatgaaagggatattctgggcacaaaatcagtcaagaaaggaagtgctgatgggattctggcttgctccagagagggtgtctgtcctgcttcgtggtgaggatttggcacctcatcaaaagaagatgaattttcgctcctcagagacaaatgagaggtcacaatggataccactgatagttgggaaggtttt

SEQ ID NO: 527045 - DNA, 532 bp, Homo sapiens
ctggttctctatgcttggtctatctcaagatgagcccctagaacttgtaagtaagctcataattaaataccagcacacagttagataaatgtgcatggggctagggggcgcgtggtgagaaagggagaccatggtgttgcaaagaaagtacatttcaaggctatattttaagactaaggagaacaaaagttttttgcagtaagctttctgcatcgtgagactaggggaagaagagaaaaaggaaaaaaaaagttttaaaactcattttcaggctacactgtttgattacgtggggactgcccagtcctacagacgtaaagcyttaagccagctcctctgagatgaaagggatattctgggcacaaaatcagtcaagaaaggaagtgctgatgggattctggcttgctccagagagggtgtctgtcctgcttcgtggtgaggatttggcacctcatcaaaagaagatgaattttcgctcctcagagacaaatgagaggtcacaatggataccactgatagttgggaaggtttt

SEQ ID NO: 527046 - DNA, 532 bp, Homo sapiens
ctggttctctatgcttggtctatctcaagatgagcccctagaacttgtaagtaagctcataattaaataccagcacacagttagataaatgtgcatggggctagggggcgcgtggtgagaaagggagaccatggtgttgcaaagaaagtacatttcaaggctatattttaagactaaggagaacaaaagttttttgcagtaagctttctgcatcgtgagactaggggaagaagagaaaaaggaaaaaaaaagttttaaaactcattttcaggctacactgtttgattacgtggggactgcccagtcctacagacgtaaagccttaagccagctcctctgagatgaaagggatattctgggcacaaaatcagtcaagaaagraagtgctgatgggattctggcttgctccagagagggtgtctgtcctgcttcgtggtgaggatttggcacctcatcaaaagaagatgaattttcgctcctcagagacaaatgagaggtcacaatggataccactgatagttgggaaggtttt

SEQ ID NO: 527047 - DNA, 576 bp, Homo sapiens
gcacgacagccccttcttcctgatgggaagctcagcacccagacccctctctaattaaaaagaagctgctgcctgcactggattctaaccggaggtgaagtgaccctctctaattaaagagaagcctgcggcctgcactggattctaaccggaacctgatgcaccactaggcccacacaacagtctctgaggaaaaaaaaaaatgacaattctacccagaagcgaaatcccctgggagctccaccaccagcctggactatcccccatctgaagtgtgacacaggaaacaggtgcagagaaagtgtctccctcagctctgctcgtgtagctgcttctagagccctccatccggttctccccacctgctcccagacacacaacccgcacagtgaagcccacggggccrgtaacccacacacaggactgcacagtcccctccgctctgatgccagtcaactgggcttttattcacaaacaggaagaacccatcaaggccacacctgataggaaataacagcatagcacaaagagaactgacctatgactcccaaaaagatggagaagacacatctcccc

SEQ ID NO: 527048 - DNA, 619 bp, Homo sapiens
ctgtaagtcctacagaaaatgaaaccgcacaactgtgtttaacctagcccctctgaacatcggtgtatagaacactatgactgtggctggaccgaacactttttggcatcccccaaagccagtgttctaatggtagaaacggataccaatgatacagagaccatgggtcaccactgtgctaagaatggaaaaataaaatcctgttgttgagatgagctccagcagtctgtcaacacatcaagggcaaatccagtgtaagcaccagccacacaggcagagactcaagcctgccacaagtgacaacctcttctctccttaggttagagaaggcccctgcctccagccactggaatgagattctggggatataaaatcggaagccagatagtgctgaccagaaaggacagagatttaggtttatcaaggtcatttaacacagaagtagctgctagtttgggggaaactgtagtgggcactatcctagccacagatcacctctcttcagcagtggcctaacaaactacagcctyactttcctgagtctgttcctacatatgtgattcaccaattctaaagcacgtgtgttggtgtaagcgtatggccacaagtcctctctggg

SEQ ID NO: 527049 - DNA, 621 bp, Homo sapiens
catgataaaatataggggctcattcatagaatctaaattgacgctgatcactatgctttcacaatttgatttaatgtacttgctgtgtgttcatcctctgagacaacattgcagctagcgtcttagcatagctgtggatgctacaggctttgagttctaatttggggtattacccttttttagtttgaggaaatccacagtctttcgattttctatctatgaaattaaaatgaacctaatttctggcttcattggagttatttattttaagtgtaatgcctacatctcgtaggtttcaccagtttggggaatacaaatgatgtcacatttagcagtcatattcaaaattggctgtctttgtctggcaaactgtagtaggtgaacgccctccctcctagattcttcagggttacctacattatctaatacctttccaggacggtgtctccatgaacttatgatgctaccctgggcactgtctggccctccattccgcttcagagagctgacctcgagctctcctggggtgaggccctcattgttgccatgaaccaagcctctatcccaagtgtctaagttggcccctgggttcctgytgttgtaccactgccctctgtgcta

SEQ ID NO: 527050 - DNA, 599 bp, Homo sapiens
attatgtaaagctaataagcttcataacctcatttcagggttatattgttcgcactgcctctatttgtgttttttgaatccagctcgtaaagyctataattaggaggaagcatcaaagtgcctacttacacactttttatttgttttctaaggttgtaattgtctataagtgcttgcatggctgacaattcagcaaacagaatggtttccaaatactctcattgcagctttcttgatgtttctttctgtttcattcctcaccttgaagcaattcagtttttcccagctttaattccactcaaaagtaggaaaatgtttattttcaattagagtcttacatagcttgatggtttccctttgccattttaaagggactagaggaaattaaaatccgagacagtaagtcatttgactttttttagtaaaatgattgctactttcttctctttattgaaagggttttgagatttatctctggagtcaactgcttctgtgttcctggtgctctatgcagttagctgatgagagctcttctgaagttggtccctgttctccatgtgtcttttaaagaatttcttttgcttgtttccttaaatagt

SEQ ID NO: 527051 - DNA, 604 bp, Homo sapiens
actcctgcatcaccctgggctgaggcaggcaaagctcctctggtgcccgcaccagatcaggtgcctcttctggttttcagtgaagaaagactgatgaacctctctgggaataatattttatcttgacaatatcaataaaaagattgtgagactgcattttaaagtttctttttagagcattaaatcttgtccagatttttcttttcttttcttttctttttttttttttgctttctcgcccaggctggagtgcaatggtgcgatctcagctcactgcaacctccgcctcctgggttgaagcaattctcctgtctcagcaccccaagtagctgggattacaggcacacgccaccatgcccggctaatttttttagtagagacagggtttcaccatgttagccaggctggtctcgaactcctgacctcaggtgatctaccagcttctgccttccraagtactgggattacaggcgtgagtcactgtgcccggcttgtctggatttttcttacccattttaattgtgttattttaaattatataccatcaagtacagcttgactgcgttcagaccaaaacatttatccaggcatcttccagacatgg

SEQ ID NO: 527052 - DNA, 589 bp, Homo sapiens
aaaatgttagacttccatttggaggccaaagctaactggcaagcctaatttgagtcacactgtgaaaccccattttcctaacttaatttatcttgaattgtttgtgtgatggtgttgtttggtttgcttttatggtgcaatgcactggtatcttcagcactgcagtttatatgaaaatccaatgttcctcacttccataaaaaacagtgcaaggtgataaaactaaattagggaagagttatgttgttatgacaatgaaactttcgaagagactatcaaactttgaaaacaggtcactgagaagaattaagaaatactttctttggattttttttaagtagataagatwcccatctctgtgggatggctcgtatagggggagcccacaaacagtataatggactttgaatcgcccaagttattttccaaacttaaaatggtgccatgacaggtcctcaaacgaactaagagagcaactttctcaataagtaaaagcaggatacagttccagatcatgaaaactctgcaatgctggttttgtgaccttgactcagcgtcactgggatgctaccaagaaaccacaattctt

SEQ ID NO: 527053 - DNA, 588 bp, Homo sapiens
atgtagtgctgtgttgaaaaaagagataaaaatcaaaaagcatgtgaatcttattcccccagaaaattcccattactagcaagtttggacatgattaacactttgttttattattgaacttaaaatagtttaaggcagggtactatggagcttattttgccaaaggaaaatatttgtagctctcatatggttctggtgagagtataacttagtttgagctttttggaaaaaatttggcattatgcagcagaagccttaaaatattcataccctttaacaaaataattctgtttttaggaaaatacccaatagaataatcacaaaagtaggcaaatatttatatgcaagatataaatatatgaacrcataaatataatagtaacacattctttataatgggcaagaaaaaatgaagaaaaaacccccaaagcccccaaattgtggattggttaaatcaggggttagcaaacattttctgtaaagacccaaatagcaaatattgtaggctatgctgtcaattttacaactactattctgtcattgtcctgtgaaagcagccacagaaaattgtaaataagtggatatcac

SEQ ID NO: 527054 - DNA, 530 bp, Homo sapiens
gtcttatgtaaaattgtggtgaaataattgataaaaagccttgcttgtaataacttgcaaaggcaaataatgtatcaaatgaacttatagctagaggtaaagaactgagaaaacagaatgtaaatatatattatgaattgactgttattggaagtatttgacaaggtactattttaaaaaatatatgcgctcacaaaataattggccaggttgcaagtagtaattaaaagaaatagaccaagtgtaaaaacactgggattgggagatacaattgtttttctcatctctaatgtaatggtgaatgcttttaaaaaataaaagtccagtaaaactcagcctctgggagggatgaaatcaaagatgtggctataaacaccatccttaaaaatctctgagtccattaaggggaggttcaataaatcctgtcaagctggacagtgtgaygcatgaaaagtaaacaaagagtgtagtggatgcctgattaatttaggtcacccattattaagtgtagagaaggagatgtgattgaa

SEQ ID NO: 527055 - DNA, 519 bp, Homo sapiens
ttcatagagaccacatgtgtaaacacgtatatgaaaatgacagactcttcctttaatagaaacagtgcaggagggacataccttttcaaataaagggtttttctagaaatggcatttacagacacatttctccatccaaatacagatactccagtttaaggaggtatcaaaaagtcaaaacaaaacttctgtaggtataatttgaacataccacaattgctttatttttaagaaacagttttgtttgtgaagaaccctgacatgaattaatctaattttatccttgcagctgcaaagacatttttatagccccacttacagatgaaactatattttcttttccaaatttattacttaaactatgtttctcttgggaaacatgaaattaatgtytcctagaaatgtagaattctatcctgaacccaggggaacatttttctaaatattcttatgaaatagattaagtccaattctgcattttaatacatatacatatgcataatttcactaatgaactga

SEQ ID NO: 527056 - DNA, 125 bp, Homo sapiens
ctggtggatttgccagagacaagagtggagggggacgagtcttcygttctggctctatcccgtggcccaccatctactggaggaaaagcaacggtgggcctgctcggagccaggaggatgtagag

SEQ ID NO: 527057 - DNA, 603 bp, Homo sapiens
tttagagtttagaaatctgtttagtttgaatttttttatcgtttgatctaatataacttgttctagttgaatttatttgtgaatatattaccaaagtatttttattttatattttgttttctgataaatatgtcctgtcaagttttcgacatggttgtggtttggcttgttttgtaggcctttgagtttcttttttctaaaagtaatttagaacgtttatagatagcatattttttctagtttacttatagaaattatgaaaatrtaagtgcatttatttttacttttgtacttagaaactttagatagaatctactgacttttctctttaccagataaaaaaattagcgtttttaaattcatttatgcctgaggtcgcaattttttaagtttttgcaatgacactttggcaatgaccttgagcagtagaacataaataactcccacgattaacgttcaataatggaacatttatactaggcataaatgaggtcttatctcacttgttcatcctcatgtccatctgattttcataaggttatattttaatattactttgtggttgtatacaaaacttatgtcctctaatcgcagactcaacag

SEQ ID NO: 527058 - DNA, 600 bp, Homo sapiens
tgaaaagccatgaggctttttaagggtctgtgagcagtcatgaccctgccctctacacatcacctccaaggcatgtccatctcgatgagctcaggcccgacagtctggagcccagaaggctgctgcttttcaagggtgatcattcatcamgacccgaagtctcctagccaactaattgaaaaataaataggagcatttttactgcaacaataaaggctgacctttgcaccccagaccttcgcatcagtttggagaaaaaaaacaagatttaaaaaaaaaaaatcatctgtatgctttatggctcacatcccctaccgtgatccaactgagggcttctcaagaaggtcgccccgttggtcaatcctttcaccagagaaggcattaagccataaactggaagacctaggcagagttgagtcctaggcaaaattatgaattgaatcccaatgcccttcctgctgaattttcaggtcctgaagacctcattaccctctcttgcccatcgctccccatgttatacaactccaacacttcgtgcctttccctgggtatcaggcaaatcccccatcataagattcttccagtgccagtacacccttt

SEQ ID NO: 527059 - DNA, 600 bp, Homo sapiens
tgaaaagccatgaggctttttaagggtctgtgagcagtcatgaccctgccctctacacatcacctccaaggcatgtccatctcgatgagctcaggcccgacagtctggagcccagaaggctgctgcttttcaagggtgatcattcatcaagacccgaagtctcctagccaactaattgaaaaataaataggagcatttttactgcaacaataaaggctgacctttgcaccccagaccttcgcatcagtttggagraaaaaaacaagatttaaaaaaaaaaaatcatctgtatgctttatggctcacatcccctaccgtgatccaactgagggcttctcaagaaggtcgccccgttggtcaatcctttcaccagagaaggcattaagccataaactggaagacctaggcagagttgagtcctaggcaaaattatgaattgaatcccaatgcccttcctgctgaattttcaggtcctgaagacctcattaccctctcttgcccatcgctccccatgttatacaactccaacacttcgtgcctttccctgggtatcaggcaaatcccccatcataagattcttccagtgccagtacacccttt

SEQ ID NO: 527060 - DNA, 600 bp, Homo sapiens
tgaaaagccatgaggctttttaagggtctgtgagcagtcatgaccctgccctctacacatcacctccaaggcatgtccatctcgatgagctcaggcccgacagtctggagcccagaaggctgctgcttttcaagggtgatcattcatcaagacccgaagtctcctagccaactaattgaaaaataaataggagcatttttactgcaacaataaaggctgacctttgcaccccagaccttcgcatcagtttggagaaaaaaaacaagatttaaaaaaaaaaaatcatctgtatgctttatggctcacatcccctacygtgatccaactgagggcttctcaagaaggtcgccccgttggtcaatcctttcaccagagaaggcattaagccataaactggaagacctaggcagagttgagtcctaggcaaaattatgaattgaatcccaatgcccttcctgctgaattttcaggtcctgaagacctcattaccctctcttgcccatcgctccccatgttatacaactccaacacttcgtgcctttccctgggtatcaggcaaatcccccatcataagattcttccagtgccagtacacccttt

SEQ ID NO: 527061 - DNA, 637 bp, Homo sapiens
gatcaccttaacttgcaatgacattactgatactatatatgagaggcaaagtaatttctagtcggaacttcaaaatgaagattttattttagtttttttccatttttctccttccacttgtctctgttccctgcaggtgtgcctacctttaggctcctgccagcccctaactgtgaaacttcagctagttctccctacaggcgggactctccagcacgcccgactattccataactccaagttacttgcctccccactctttatagccaacaactcattgagtcccatgattctctcccactcttcaattccttctttccaagaatagtaccggaaatctagcagtgttgaatctcaggctctgagtcagccactagagatgacattcgttttgaaaaacagaaggccttttaaggcctgggcaactggaattgcgttgagtagtgtgtgtatatgaatatgtatatagcaagyccttgaataacttatttcattcaacatggctttactcaatgttgcttcataataatattgataagaaatgaaatcaattttcccagacagggctcctgtttgtatatagtttgcatgttctccctatggctatgtcggtttcctcccacatcccaaagacatg

SEQ ID NO: 527062 - DNA, 628 bp, Homo sapiens
gttcccaccctcattctgggaggtctttaagacaaaaagaacccaaaacaaaaaaccccacaggcgtttaaggatcstttccctcctattaagagtactgttctcagagtctcagttaactgaaacgttgcaggataattcaccagatttttcatatccagccttcctatcgaagaaagtcaaagtactaaaccaataaatgtgaaaaaggatgttgggcttaaaaaggaaaaccttcaagacttaaatctgacatttcaaaagggaagactgagaagatatgcttactaaataggattatactcaatgtacggtctttgcaataggcgatttgagttcctttcaatgtacattttatttatataccacctcccaaaatgaaaaaatctatactattcgacatactgttctatagagcactgatgagcgatataaaaggtaaagagttctcaccagagatgttccaataggagacagatcttctctggaagtatgaagccagtgattgtacacaaataagcttttgccaccactgtgcttggctcaggacagcaataggttgatatgaaattattaggctcattatttctgtcaccaaaaaaataaaagagagagagataacacatgt

SEQ ID NO: 527063 - DNA, 680 bp, Homo sapiens
tatgtatacccaaaatagtaacataattttgaaaaatctgagctaatagacttgcaaagaaatagaaatatctttgatcatattctgaaaacaaaaaaatatagacttagtaaatataaaaggacaaaaattttacacatcccatttccgggccataatgcaataaagttagaaagaacagaaacagaattggccgggtgctgtggctcatgcctgtaatcccagcactttgggaagccaaagcgggtggatcacgaggtcaagagatcgagaccatcctggccaacatggtgaaaccctgtctctactaaaaatacaaaaactagctgggtgtggtggcatgcgcctgtagtcccagctacttgggaggctgaggcaggagaatcacttgaacccgggaggtggaggttacagtgagccaagatcttgccactgcactccagcctggcaacagagtgagactctgtctcaaaaaaacaaacaacaacaacaacaamaaaaaaaaacaaagagaaagaaacaatttaaagatgctcaactctttgacaatgttaaaatattcttttaaataaattaatgcctgggtcagggtgcaaatccaaaacacaatgacagtgtccataaacttctgtgcttgtaaatgtatcataaccatatacaggccgtattggtgaaaggag

SEQ ID NO: 527064 - DNA, 565 bp, Homo sapiens
aagtatcacattacccccaaaatatgtacacctactacgtatcagtaaaaacctgactatataaaacctaattaatagaaggattatctttactgcttctccatttgacaatccaattttgtcaaaatttggggaaacagaaaaaaaaaaatggtgcctgatggtggattaccgcaactctaatctgtggttccatgcataaagagccccatatgcgrgaccaaaattcagacttgaccatgttctttgaatagcttcttaagaagttacagttagctgggcatggtggtggcccgtgcctgtagtcccagctaattgagaggctgaggcagggattcacttgaacccaggaggtggaggttgcagtgagtggagatcactccactgcactccagcctgggtgacagagtgagactcgtctcaaaaaaaaaaaagttacacctaggtgtgtattttggcacaaaggagtgacaaacttaaaagctcaataacttcagtgtggtgtaaatgtggtttataggctatgtttgtgattgctaaaaataattctagtttacctcaaaat

SEQ ID NO: 527065 - DNA, 472 bp, Homo sapiens
tgtaagccaaggaacaaatatctgtaatcatatccatggtaaaaactggcttgcatgaaaaacattgtttagtaaaaactgtattggtagcttcaggtttgatagcaaagaaagaatccaattatttttgcatgtggcttcaaacatgttttaagatattttttctcaaacttagtgttacaaagtacaggtataatgcaaaaaaaaggtgaatcacagttttrtagacaatagtactctaagtaagtcacattatatctatttcaggcaagaccataaaaagaatttcaaagttctagtgtcttccaacatctctcagaaaaaatgatgatgtggcaattctgtggataaaaaacatgggaagggaagcgtgttttcacccaggagaaacagttaaggaccatgcatttgcagtcttttccatgtctttaagttctcactggctgctaagatttattgcaaaatattaaag

SEQ ID NO: 527066 - DNA, 348 bp, Homo sapiens
taaatacaatataatgcttcaggctgggtgtagtagctgacgcctataatcccagcactttggcaggttgaagcaggcagatcatttgaactcaggagtttgagatcagcctgggcaacatggtgaaactctatctctacaaaaaatacaaaaattagccaggcatggtggtgcatacctgtagtcccagctactcgggaggctgaggcaygagaatcgcttgaacctgggaggcagaggttgcagtgaaccgagatgacaccactgcactctagcctgagcagcagagagagactctgccaaccaatcaatcaattatgcttcaatcagtaggagcttttaaaaata

SEQ ID NO: 527067 - DNA, 609 bp, Homo sapiens
taacataggggttaaaaaatgtgctttattcagtgtgcgtggacaatacagacaagattagatagatactcaataaagagtatccattagctattactatttcttgttttgacagagggaacaatgtaaacagaaaagagacacaacacccaaaatgtgaggtyattaccaagaaagagaagtgatacaagttgaagacagactccacttaagccacaaatttatcctagagccaaacctattttctggctgctgttcaagatgaaagaaaaaggctcaatgcagcagtatggaagtgtattgcaactgtgaatgacaatggagaagggcccttttgctgagcttttgacacactgcaacattagtttacctaatttatacctatttctcatattaatagcacagccaacttcattaaaaacatgctacattcttagacattctcttcactgaatcagtgacattaaaaacacaattaaaaaacaaaaaacaaaaaaaacagcaccctcaggccaggtgcagggctcaggcttgtaatcccagcattttgggaggccgaggtgggcggaccatctgaggtcaggagttcgagaccagcctggccaacat

SEQ ID NO: 527068 - DNA, 518 bp, Homo sapiens
actgttgctaaaacctccttgcctttgcaattagatagcagttgctccaccacatagcgttctaagaatgtctttgagggaagacctatcacacaaataaacttgctttctgggattctagggagtgcaaagtgctggaatgtgctggtggctggcttagaaattagaagaaaacatttggagatragaaggagggttgagctgaactttttaagctgagggggtgagcagaaagggcccagggtccatcctgtctggtgagcagtcaatgcacagcaggcctgcttgcaggccaagaggggttggaaagctctaattagattagcaatgttttgctagaaggcagaaagcttaaaacattaactttttaaacaagtacatcagttctgagtaaacattattcttttatttagtcgtatggtctgagtcagcctatttccaggacagtggtaatgcatgcgtttgattcttgaatgcaaatatgctttcaattttactatgcaaattccctgattttg

SEQ ID NO: 527069 - DNA, 518 bp, Homo sapiens
actgttgctaaaacctccttgcctttgcaattagatagcagttgctccaccacatagcgttctaagaatgtctttgagggaagacctatcacacaaataaacttgctttctgggattctagggagtgcaaagtgctggaatgtgctggtggctggcttagaaattagaagaaaacatttggagatgagaaggagggttgagctgaactttttaagctgagggggtgagcagaaagggcccrgggtccatcctgtctggtgagcagtcaatgcacagcaggcctgcttgcaggccaagaggggttggaaagctctaattagattagcaatgttttgctagaaggcagaaagcttaaaacattaactttttaaacaagtacatcagttctgagtaaacattattcttttatttagtcgtatggtctgagtcagcctatttccaggacagtggtaatgcatgcgtttgattcttgaatgcaaatatgctttcaattttactatgcaaattccctgattttg

SEQ ID NO: 527070 - DNA, 201 bp, Homo sapiens
atttaacttatactattatttttgtttttgtttcacagaattaaatttccatcagctttgttctaaaaagcagcggaggggggatggcaacacaaattcatctgcataaaggggtccaaattatctaggawttaagctgccattctgcgggaaataacttaccaaataccatggtgccctgggagagagagttcactgact

SEQ ID NO: 527071 - DNA, 201 bp, Homo sapiens
atttaacttatactattatttttgtttttgtttcacagaattaaatttccatcagctttgttctaaaaagcagcggaggggggatggcaacacaaattcatctgcataaaggggtccaaattatctaggaattaagctgccattctgcgggaaataacttaccaaataccayggtgccctgggagagagagttcactgact

SEQ ID NO: 527072 - DNA, 661 bp, Homo sapiens
tatgattgttggaatactgaaatgagtgactgctcaagacaacttggttgtactgactgatgtgctgaatgcatcacagggatgagaacttagataagaattttctaatcttaccatgttagtactacttagacccttataccatttaatgtcacactttacatgtttcattagcatataaaaaaccatcacgtggaaaaaaaatccattaaatgattcaatgtggaaaaatmaaccattgtagtttatctccagaaggacaatactaaacctctctatttacatttagccagggacatatagttttattgcttatagaacaaaggcaaagagtccaactgacaatgaggctgcttaagttttcctttggatgggtttatagtcggactacatgaagttcacagcaatagagggacataacaacccagaggagaggagaagagatgcagataaaaactgacagcagctttctccataaattaagcatccaattgtgataaaagaagatgggcaatcataggtaatactgtaagtaacaaggaaaatgtcatataaatacaatgcatgtgcatactcttatgaatctaacatgaacactataatagtatgaccctatagctaaatatgtgtcttggtatagatagacattttgggtgagata

SEQ ID NO: 527073 - DNA, 625 bp, Homo sapiens
ttccccttcgccttctgccatgattgtaagtttcctgaggcttccccagccttgttgaactgtgaatcaattaaacctatttcctttgtaaattacccagtcttgggcagttcgttatagcagtgtgaaaacagactaatacacccatgcagctatattattttactacttatatgaaaataggaggtattgtaaaaattaaaaattacctaatagttcactgtcaagtgccttattttaaagtttttggaggaatgtattcttcttttcaaattgtcagtttatctcctaactatatgtataattttatttggaaatgatatcaaaatttaacatttgagacatttcttgaacaggtggcccagtccaaatggcctttctgataatggcctttccctcctgcctcacyctgtcccctggtctctgggagggaaaaagccagactccaagcaagaagctggagttcttctttggccactgacttgctactcacttttgctttgaaaaattccctctccctcttttcttttattctaattttctgaagtgtaatgtacctacagaagaaggaacatcttctaagtgtgtagtttgaagggtttttgcaaattgaatacacctattt

SEQ ID NO: 527074 - DNA, 552 bp, Homo sapiens
tgaggccacccctctattttcctctctccttggtagccagccacagttctccaggtctttactctctgtgcagcaaacagatagagtcttctctgagaacttgactggtccaaaaagaaaaattaagcatcccaaacagatcaccctacaataacattcacagtccatatgctatattgttctactgctgacttgggtaggttggggagtacatttttctttctctttgtggttctgagtgagaactagtcatgtatatayacatacatacatatatatgtacatacacatacatatatatgtgtgtgtctatatatatgtgtgtgtgtgtctatatatatgaagggcatagatactcttttttccacaatgcacagataatattttaaaaataataaaaccattgcttttgttgaagagatccacaatattgatgatgtatagcagagattgaatgatgtgtcaatgaacacatcattgacatcaattgttatatcaagccttgtgcctctcttttaaccagtatcttagccaaagtattctgattcctgc

SEQ ID NO: 527075 - DNA, 572 bp, Homo sapiens
gggtgtggtggcgcatgcctgtaatcccagctcctccagaggctgaggcaggagaatcacttgaacctgggaggcggaggttgcagtgagctgaaatcgtgccattgcactccagcctgggcaacaagagcaaaactccatctcaaaaaaaaaaaaacagacagagggccaggcgtggtggctcacgcctataatcccagcaccttgggaggcttaggcaggaggatcgctggagcctaggagatcgagacaagcctgggcaacacagcgagaccctatctcyaaaaaaaaaaaaaaaaaaaattaggcatggtggtgcatgcctatagtcccagctacccaggaggctgaggttgaggctgcagtgagccgtgatcatgacactgtactctaaactgagatgacagagcaagacccattataaaaacaaacaaacaccagacagagcaactagataacaacacagaaagtccatgaataacatttaaaacaaaatagaatatgaagtatcttcataaatccccatagacaagtgggtggggaaaaaacaacagccacaagacataagtgct

SEQ ID NO: 527076 - DNA, 584 bp, Homo sapiens
tttttcagattatttgagcccaagaaagaggggagctgagagaaaggagaagctgaggttaaggcaattcttyccattcttggctgacatgcacacgatgggaactattttcccttacttcagcataaaagacttaaaattttccacttactatacaaagtgttattcatgtgaaaaatgaaccaagctgtttattattttaaccaacaaaagctctgcaagtgctagatttagtgctgtacaagatgactttactaataaagggaggatgcccaaagagatttaccattagctaagaaaaaataatctcacgcagaggatatgctgaagagataatgagctagagaaacagaactggaatgtttcatttcttttataatacacagagaacacagagaggaggaaaaagggaacacacttttaactgaaagagttgacaattttattttcacatttcccaatacaaaggaaaactgcatcttttttgtcccacttctcccctccaaaactattctctttcataggacaggggagcaagtcttccttatgctgtttagaaaactcagtatcacagcagcatgatc

SEQ ID NO: 527077 - DNA, 566 bp, Homo sapiens
aatacaagtggcacatcttttgaagtgtcctcgagagagctttaggtccacagaagaacacgccaatactgctgctgcagtaggggtaagaaaaggaaataaaatgtcaccaggaggcaaggccagccagaagccaagacaatgataagattaatgaagtggttgtggctttacttatttatttttctccctccatgtcgttttttcttagattctttttttctacctactttcagcaccatgctctctcctaggttcccagcatcctcccctaaattaatcagggaggtggagccaagaagactgaggctggaaaggggccatgaaactgttgaggggttttgatacaacaccctgcaatgttggcactttacaatggcagagttcagtagttgagagtgggaccatacagtccatagagcctaaaatgattactatttggccccttatgggaagagtttcccaatccttgacctatatgattgcagccacttacacaatgcctggacttgacctcctttttggccaggtgaccttgattcaygtcttcttggatacgtgaccag

SEQ ID NO: 527078 - DNA, 616 bp, Homo sapiens
tggcccctaaaataatctgctgtcatttcatatgctaaagggacacttcggaccttgtgaaagagagaattacaatgaagccatgtgaggaggttttagaaaatgagaaatatgtgcctctcacgccgagcctctttaaacagcggactatggatagattatcgtagatggaaatcttttacaaatacactttcctgccttcttaagcagactatcactgggcttaactaaacagcttcttggctctttctggatctgcaacaaggctgtggtccttcagagcccatcgaggtgggcgacctctagaccaccaggccctgtcaggttttcccagtgattcctgagagcctcttggcagcagcagctttctgtgagatggaaacgtgcttacgtgaggacttcgtgatatgattttggctgctcagaagtcatatttgcttcctagttctcaagtgtgtccttaaagaagagatagggcaactcggtagaaagcaagcatttaaaaaacccattattatctgtcttgagtcctcactggggaaccacgagctccctggtacagagcctctgtgagctgtgcagtcaccaaytccaggctgcgcttatgtttaagcca

SEQ ID NO: 527079 - DNA, 313 bp, Homo sapiens
aatcagatcagagtttggttcttattaaaagtgttaaatttttgtaacttatagcaaagacaagtgcaggaaaaaagttttgcaatttaaaacattttgagaatcaaaaagcaaggctttgaatgactctggtrataaagttaatccataaataatcaatacagaggacccttggactaaaaagggaagaattagtttaagaggaaaccaaggattgatactgcattggcaagtgtccatgaataataatcttgtgccctgtctccaattccagggcctgtgagggcatgagaggaagagtgatgagctgatg

SEQ ID NO: 527080 - DNA, 596 bp, Homo sapiens
agtttggttcttattaaaagtgttaaatttttgtaacttatagcaaagacaagtgcaggaaaaaagttttgcaatttaaaacattttgagaatcaaaaagcaaggctttgaatgactctggtaataaagttaatccataaataatcaatacagaggacccttggactaaaaagggaagaattagtttaagaggaaaccaaggattgatactgcattggcaagtgtccatgaataataatcttgtgccctgtctccaattccagggcctgtgagggcatgagaggaagagtgatgagctgatgggggagataggattaaatacctcatacactcatacaactattgtatattttagagtatagaatgatggttatcatactttagcatgcatcagaatcacctagarggcttgttaacccacatattgttgagtccacattagggattctgatttaataagtcaatggtggagcctaataatttgaatttctagcaagtctcaggtgatgtcaatgatactgattagggaacacattttgaaaccactggcatagaagacttgtcttttatttccctgttgtgctgaatactgtccc

SEQ ID NO: 527081 - DNA, 404 bp, Homo sapiens
aggcagtgttgaaaggtgtccacagccacatacacacaaaaaaagatcgcacgtcacccacattctggcggcccaagacactgcgactccagaggcagcaaaaatatcctcagaaaagcattcccaggagaaacaagcttgatcactatgctatcatcaagtttctgctgaccacygagtctgccacggagaagacagacgacaacaacacacttgtgttcactgtggatgctaaagccaacaagcaccagatcaaacaggctgtgaagaagctctatgacattgatgtggccgaggtcaacaccctgtcagcctgatggagagaagaaggcatacgttcaactgcctcctgattacaatgctttggatgttgccaacaaaattgggatcatctaaactgaatg

SEQ ID NO: 527082 - DNA, 450 bp, Homo sapiens
gaagaagactgaggttgtggccagtctcagcagccgcagttctgtgttkttccacctggggggatgtgaggggctcaaatccaccttttccaggagaagcagtgaggccatggcaaggacctccctttgctggatgtgcagcaggcagttcccaaggacacaggctgcttgcccatttcctagacttctaaaatcctcattatagaactatgaagccatctcatagaagctgctcttcttgttcaaacatgcagcagagctctcctcgactgatcaaaccagaggctgttgccatcttgggtttgccctgaggcagccttcccagaggcctctggaagggggtttggggtagaactgtagaatgtcaggggttgaggagtagaagcaagacaagccactctaattggcattcttccaaataaaatggatccagctttggtttgacattga

SEQ ID NO: 527083 - DNA, 497 bp, Homo sapiens
ccttaccttaaatgcagtggttcccaaacttgctggaagataagaatcactgggtgagattattaaaaacacatgctcctggcctttgtaaatatccaacataagatcatagctttatctccttcaccaagcaactgagttcaatgaaaaccatcctttcttctaaccaagtaattctcaarcctgactgtacattaaaatcatcatgaagaaactggtaaaaaccctgatggctcctccttaccccaaatcaattcgatcagaatgtcccatgtaccatatgttttcaaatgtccacagtgattctgctgtgcagcagagttgggaatcaccgtgtctgaccctgatgtgatacttcaagcctgatgactgttttttaatcattcattaatttacttattcatactttcatttattcactcattcataccttcatttatcattcacctcaagtgctttgtatgcagactcttttaaaaatgtatctgtgagacctc

SEQ ID NO: 527084 - DNA, 534 bp, Homo sapiens
tctctatgccaactgcaccacatattgtttatgtctttaagttgaaaagagatagaaaaataggtgaatggaaaactggagattcaggatctccaattctcaatcaacactcaatcagccaccagtgtttcctaagatgcatatgccaagtggatatgcctgattgttccagccttggctactttcccacatgcttttaagaaccatctaatcatactgcgctggctggtgtgggtgtgcaccaggaggactccattgcagctctggcctatgatctggatgaaaatcacaatttttcacaggccttagctgcgccccaggactcccatatcatccagtcatgtaggaaaaaccaagtgagataatctaatcaaagagataagaggttgtcctgccatgactatgccaaatgtcatgcccagtgttaggttccaggccawgctgagttccgaagagagtgggtggatgggtggcagatagctgaaagaacactcaggttgtgtgggggggtgcggcataggcaggtgaaagatg

SEQ ID NO: 527085 - DNA, 534 bp, Homo sapiens
tctctatgccaactgcaccacatattgtttatgtctttaagttgaaaagagatagaaaaataggtgaatggaaaactggagattcaggatctccaattctcaatcaacactcaatcagccaccagtgtttcctaagatgcatatgccaagtggatatgcctgattgttccagccttggctactttcccacatgcttttaagaaccatctaatcatactgcgctggctggtgtgggtgtgcaccaggaggactccattgcagctctggcctatgatctggatgaaaatcacaatttttcacaggccttagctgcgccccaggactcccatatcatccagtcatgtaggaaaaaccaagtgagataatctaatcaaagagataagaggttgtcctgccatgactatgccaaatgtcatgcccagtgttaggttccaggccatgctgagttccgaagrgagtgggtggatgggtggcagatagctgaaagaacactcaggttgtgtgggggggtgcggcataggcaggtgaaagatg

SEQ ID NO: 527086 - DNA, 155 bp, Homo sapiens
ctgttggctgatttttaaaacgtgcataatgcagctatggtacaaagaacaaaaataaagacgccacatatctagcayctcctttgagaaataggaggtggctcatgtttggaagtcccctctgccccctcagtctgcgatcctctccattcccc

SEQ ID NO: 527087 - DNA, 552 bp, Homo sapiens
gtttggggaaagtagcaagcacattttctgcaggcccattggttgctgttttgctttcatattctctcaccattaactatacagcarctagagcagaggagttgttaacaaaatatactttcactgctagccaaactatatacatgacttagtggtaatatttgattttatatcatttacttatgtctctgtatgtcttacaccaagggactaacacccaatgggagaaagaaaaaaagggaaaattaactaagtatctgtgaaccatcaaataggctcagataaaataatgagccttcaacaagctggaatataataacattaggactttggagttcagtgggcagttagatgcactaatggcactgctgtgctgggaaaacatatattttatttggaatttttgtgtggaggtgattgcacattatatgaatagctgtgctaaatgcatgaaggttttctgccagcataggaggcgattaaggccccctctgccagataacagctcactggagggaagtaatggtggcaaagtaaaatctgaaaacagat

SEQ ID NO: 527088 - DNA, 578 bp, Homo sapiens
gttggatttgcaccctgccctgagttctagcccagaggcttctcacttggttcaaattgttacaaagttcagctagagatttgcatcttcctgtgtagttttaccccctgctcctctctggttggatccctgtggtgccaggcaggaatgggctgcttggggacccagcgagctcccagagcctttctgctgtttctcctacctgtgtatttcacttggctctctaaattgactcagctcctggtaaagtcggaaacttctccctcaaacagaccttcagcgtctccrctgggggtgtgtgtttgggaggggagggtctcccttttccacttccgcagttgggatactcacagtttcagtgggggaggtctactgggtcctgcaggagcaggagcaggagggtctgtgggtcctctcgggattgctggtctcaattttagtgagataattattcactggttgtaccagtgcatatttagtaccagtgtacttatgagggaaaaatgaataattcagcaaaaagcacttgcctctcattttctgtactaattactgaagctgcatttgattttcaaaat

SEQ ID NO: 527089 - DNA, 578 bp, Homo sapiens
gttggatttgcaccctgccctgagttctagcccagaggcttctcacttggttcaaattgttacaaagttcagctagagatttgcatcttcctgtgtagttttaccccctgctcctctctggttggatccctgtggtgccaggcaggaatgggctgcttggggacccagcgagctcccagagcctttctgctgtttctcctacctgtgtatttcacttggctctctaaattgactcagctcctggtaaagtcggaaacttctccctcaaacagaccttcagcgtctccactgggggtgtgtgtttgggagrggagggtctcccttttccacttccgcagttgggatactcacagtttcagtgggggaggtctactgggtcctgcaggagcaggagcaggagggtctgtgggtcctctcgggattgctggtctcaattttagtgagataattattcactggttgtaccagtgcatatttagtaccagtgtacttatgagggaaaaatgaataattcagcaaaaagcacttgcctctcattttctgtactaattactgaagctgcatttgattttcaaaat

SEQ ID NO: 527090 - DNA, 566 bp, Homo sapiens
ttcaaaaatcacatggaaaatgaaaaacatttcttagaaaatagactgagtttccaaaaggtacagaggaatatagaatataaatgtgtcagaaaataataatgagatagttttacttctaggggaataattatccaaattataaatragtctcaatatatttcagaaaaatattctgaaaattataggacaaacatctcacccattttaggactggtgtggtgaggctgcagcatttctctatttattcttctgatctcaggccacttcactgattaaactttcttcaagaaagaaaaatttctctactttcttggtcaataactatttaccaagtcttttgagggaacaggcaaatcaactttgatgtaaagagagcttgttccatctttggaaaggggcaaataaagatgatggaatcattgtcaagcttcttatggctgctagtgataatgtcagaagttcttaatatgaacagcatattaaattttcaatatgccattgagtgtgttagatgtaacataaattatcttgccaactttatctcatttaaagttctttgacac

SEQ ID NO: 527091 - DNA, 616 bp, Homo sapiens
tgccaagcgctagaaattcagtggcaagtgaaactagatggtgcttgccttcaaagagcttagatagcctgatatcagagaaacgtgaatcagatgtccacagaactcgatgtaaaatcaccactgtgggatgacctgttagacagagaaggaggcatatggtgctgtgagagtctagcaggggagagtgcactgatctatggggtgggaaatcctctgagggccacctatggcagaaccatgtggcctacttaaaaatccagattccagagctcacccattcccaccccagcaaatgagtaccaggcatggggccaggaactgcatgttctcatgtttctcaggtgcttcttataaaygctgagaagagtgagggctaaactctatgcacagaatgaaaatgggtaaccagcatggggagtttgcagcaacctctctgggatgggccgaatgtgaaaggcagcaagtgtggctctgatgcagaagctgagggaagcccacctaagggagtgctatcaaaagctgctgtgcatccccgcggagcccacacacatgtgatgggtaatctggagaggcagaaggctgaggacacagagctgggggatggaggcccatc

SEQ ID NO: 527092 - DNA, 670 bp, Homo sapiens
agaatcttgcaatcacagaatttagagctagaaggaaccttaaagttcatttattctgacttcctccacactgcctcctaccccatcatttacaaaaggaactaaggcctcatattagttttctattgctgttgtaaaacattgccacaaacttagtgatttaaaacaaaactcaccaggtggatggctcatgtctgtaattctaacaatttgggaggccaagacaggaggatcgcttgagcccaggagctcaagaccagcctgggcaacacagtgagaccctgtctctacaaaaaaaattwaaaaatagctaggtatggtggtgtgcgcctgtagtcccagctactcagaaggctgaggtggaagggtcacctgagcccaggaagtcaaggctgcagtgagcagagatcacgccactgcactccagcctaggtgccagagcaagactctatctcaaaaacaaacgaacaaacaaacaaacaacaaaaaaaccccaaaatactcacttattatttcccaattttgtagctcagaaatccattcaggcttaggctcacacaaggccaaaggcaagatactggccatcctgggctcttatatggaggctttgggggagaatacatttctaggctcattcaggctattgacgaaattcagttctgtgagattc

SEQ ID NO: 527093 - DNA, 651 bp, Homo sapiens
ctggcctttgccctcagcctgctcttcttgccctgttctgctctctctcctctatattccttctttgctcatggaacttggttataaatcctaaacacccaaacacccataaattctcaattcattctgcagatatttcctgtgttggggttttcagcagcatctgctggtttgaagttccctctttatttgtcctgggggcaccattactctcaactttagcagttttcctgctctgtagttcttgccagactccatcggaggaagagaaaattggtgaaagaataattattattattgttataaatatatatttcattttggtttctttttttatccctctaggctctgatgagtatcccaggcaggggctggcaagaggatggcttctttatggacctcagggcagtgggcttgtcctgttggatcctggcactttgccttccaggtaaagacatctgccaaaaggccattccttgctattctgcccaacgktacccagttctccagcaactttcttcccaccaaatatcctggctcaagttcccaagtctccaggaaacttccttaagcaagtagtaaagcacctactgcatatgaggcactatccaatacttgggcttgattatttctcaccatatctttataagg

SEQ ID NO: 527094 - DNA, 520 bp, Homo sapiens
aatcttatcactattattattgcctggagctgggagtatcccctatcctgattacttccctgatgagtagatattgttataaaccattatgtcggtggttctcaaggtgtggcctccaaaccagcagcatcagcattcacctgaatagctgctggaaatgcaaattcttggccgcatcccacacctattcaatcagaaatcctggagtaggccttagccatctgtgttttaacaattcctccagatgatactgatgcctgcttgagttttgaaaaccattgcattatgggtccgacccctattccttcttccagttgtattttgtaaagtggcaagcatcctgaccagttcattaccagatacaaaattgctgtctggcagtamagtagcttatgtctaaccaggactttcaaatgttgtagcaaaatctgatctctgaacaggctttcaggtgtcttacacaggtgtcacgttgtttttcttttgtgtcagtgatgctgtgttgccaccatcacttgcc

SEQ ID NO: 527095 - DNA, 581 bp, Homo sapiens
tgctccttagcacatatgcaaacttggctcctatctgyccatctgggcccttgccactgatgtcaaaaatatccagtggccagataggactctcttccaaatatcaaaaaggaaagtgggagaccaggggcatctccttcatagcattatgtgcatgaactcaaaagcccatatacccattctacctgcctctgttatgcccagagggtccccaacatatttttttaaagttctttaagtctcaattcagggattctttggataatgataagaatatttttcaccttttgatttctgcccattgaagcagttcccataacaaccaactctgaaactctctcttgggcagaatgtatccaagcaaaacatgcctgccagcatacttgtgatgttgtggatgctctctgattccaggtaaggttcactgggcaagacaactagcaaaacacaagtatgttgcccaggtgatatttattttattctagaggaaaaaaaaaaaaaaggaattctaagggtttggtgggctgatttattttcaaataggttatttgcatggtcagtgattttactgaatgcttgag

SEQ ID NO: 527096 - DNA, 581 bp, Homo sapiens
tgctccttagcacatatgcaaacttggctcctatctgcccatctgggcccttgccactgatgtcaaaaatatccagtggccagataggactctcttccaaatatcaaaaaggaaagtgggagaccaggggcatctccttcatagcattatgtgcatgaactcaaaagcccatatacccattctacctgcctctgttatgcccagagggtccccaacatatttttttaaagttctttaagtctcaattcagggattctttggataatgataagaatatttttcaccttttgatttctgcccattgaagcagttcccataacaaccaactctgaaactctctcttgggcagaatgtatccaagcaaaacatgcctgccagcatacttgtgatgttgtggatgctctctgattccaggtaaggttcactgggcaagacaastagcaaaacacaagtatgttgcccaggtgatatttattttattctagaggaaaaaaaaaaaaaaggaattctaagggtttggtgggctgatttattttcaaataggttatttgcatggtcagtgattttactgaatgcttgag

SEQ ID NO: 527097 - DNA, 581 bp, Homo sapiens
tgctccttagcacatatgcaaacttggctcctatctgcccatctgggcccttgccactgatgtcaaaaatatccagtggccagataggactctcttccaaatatcaaaaaggaaagtgggagaccaggggcatctccttcatagcattatgtgcatgaactcaaaagcccatatacccattctacctgcctctgttatgcccagagggtccccaacatatttttttaaagttctttaagtctcaattcagggattctttggataatgataagaatatttttcaccttttgatttctgcccattgaagcagttcccataacaaccaactctgaaactctctcttgggcagaatgtatccaagcaaaacatgcctgccagcatacttgtgatgttgtggatgctctctgattccaggtaaggttcactgggcaagacaactagcaaaacacaagtatgttgcccaggtsatatttattttattctagaggaaaaaaaaaaaaaaggaattctaagggtttggtgggctgatttattttcaaataggttatttgcatggtcagtgattttactgaatgcttgag

SEQ ID NO: 527098 - DNA, 609 bp, Homo sapiens
cttgtgtggatatgccacatattgttttccattcatctattgatggacatttaggttgccttgacgttttggctattgtgagtaatgttgctatgaacatagatgtacaaacatctctttgagactctgctttcaatgcttttgatatatacccagaaatggaattcctggatcacacagtaattctgtttttatttttattttttggaattgccatcctgttttcctcaatggctgcacaatttcacattcccaccaacagtgcacaagagtttcaatttctccacatcctcacctatacttcttattttctgttttttaaataatagccatcccaatgggtgtgagatgatctcattgtggttttgctttacatttccctgatgatcagtaatgttgagcatcttttcatgtgcctgttggccatttgatttgacttcttttagactgattagctttaccawtccatttgtctttctcttctagtttaggtgctatacatcttgtttctgttcttttagtgattatgctagaaattacaacacaaatcctgggtcttgaaggttaccaaggtagcttcagtgtccaacagggcgtgatgcccacaga

SEQ ID NO: 527099 - DNA, 644 bp, Homo sapiens
ccccaaaagtccaagtgttgaagccttggtctggcctcagttgcaccatcccccctagaacttttagaagaaggttgtgagagaggtcaagttgttccacactacatgggagccctgccagaaacatttggaagcagaagccctggcagaaaacactcggcctggccatcagggttggggagagagaagagtatcttgggagctagtgaaagagtagggtggagttggggaggaagagatgaaccccataccctcaaaacaaaagatcttgagcaccaagatctgtgtaatgtaatgccaaatacattacctcactccaagaagtaggggtggttgttcctgtcttactagataatgagagaagctcaaaaaagtgaagtgacctgcccagcgtacaggattttaacccaagtctggctgactcaaagcccatgctctttcartttatcttacctccttgagtgtatctttttctacttcaaaaaccccttgttccctatggcaacaggaaatttgtttctatccatgaatgaatcaggcggtcttacggtacaatgcaatcaatatgatcctcgaatgttagagctggaagagaccttagagagcatttctctctgacaaccctctcattttataactagcac

SEQ ID NO: 527100 - DNA, 569 bp, Homo sapiens
tctccagggtataaccccgggaaaacattttcagcttccctgcagttatatcttattcatgtgacctagacatacttgtgtgagactttgattttgagatgagaaaatggaggaaggtgatttcatgtgaaatccattttgttgaaaaatgttgaggtataactgtctgatttgggggggactgacaattgcaaagtttagtttctggctcaacatttgcctgggcaggggacagtggaagcaatggcagtgrtttcctctagtgctcatcggaaaagcaactgtggctgtttctccttttcttttcttttctttctttctttctttctttctttccccttccttctttccttccttccttccttccttccttccttccctttcttttctttctttctttctttccttctttctttcttttctttctttctttctttctttctttctttctttctttcttttctttcttttcttttcctttctttctttctttctttctttctttctttctttctttctttctttctttctttctttctttctttctttttttctttcttttctttcta

SEQ ID NO: 527101 - DNA, 393 bp, Homo sapiens
ttctcccttaggcagccagtttgggggacataacagtactaggcattcgtaattgagagggttcatggtcctatacatggcccacyagatggaccttactgctggaaattgaatcaaggtattggggcaaatggtaatggaattgcacattacacaatttatctataccaacaatgctcttaatagctggggccataacaatggaggtttatggggccagaagacactctcccacctgggcattgtcaaggatcccagtagtggtagccttagatcctaaatcagcatcagttgtttccactttattgttatgccaggggttgcaggaatcatagttacctgtgcataggtatccaaaagacccaagaggtgcaattttaccctccctcccca

SEQ ID NO: 527102 - DNA, 517 bp, Homo sapiens
ttcacatctgcaactagctaactatgtgacactagacaaatcaatttgcctttataaacctgagttttcaaatttttataaagacatgatggactgaatgatctccagtagcgtgtctggagccaacattttctaacctgtatacattggattttaagtttttattcctacacctttgatgtcccaagtgaaaatttacatgtactagggcaaattgattctgaccagaagattcaatggatcctaactttccaagataactttttttctatgttttccaaaatttgatggtctgaaaccttatttccccstgccttccttgtttattcatttgtactatagtacgtggtcatttattgtgtttctggcagggttgcagagtcctaggttcttgtcttattggaaaaaaaaaaattcatccaagagacgcacagcaagagttaagtagcagagttcattgaaggacgataaagtatgttccaagggaggagcaggctgacacaaaaaacagcaccag

SEQ ID NO: 527103 - DNA, 570 bp, Homo sapiens
ttcttgctaactgcatatctgatggtcattgccagttgtattgctttctgttaagttgagatgtaccaatatctcctgagaatcttagaaagaaacttaaaaaagaacaagtatacacatttcatgtcacactagtaatacttgaacatcattctgtcccaggaaattaaaataatatggatgacactacaggcataccttggagatactgcaggttgttttataccactgcaataaagaaagttgcgctaattttttggtttcctagtgcatataaaagttacaatgtggatatcttaattaaagatactttattgataagaaatgctaaaaattaatatgtgagcattcagtgtgagcaattctgtggattgtttgttttttgggggagtacaggttcttgctttgtcacccaggttagagtccagtggcgygatcacagcacactgcagccttgacctcccgggctcagtgagtcctcccaccctagcctcccaaagagctgggactacagacatgcattgccatgtctggctgacttttgtattttgtttagagacggggtatcac

SEQ ID NO: 527104 - DNA, 658 bp, Homo sapiens
tgaactctatagcaaagtctgagggctttgctactcccactcccaccctaccctatccccaaagctcccacatcattctagacaaatcatgtattaaggcacattttgtttcctccatcaggaagaggcataatgctgtgaacttctaatcaaagacgtgtggcaactcccaactccattcttgctgacaaatgcctactccttaaaactttccaattcaggaagaaactctccccaccacctcyagccccaccaatttaatcctgggcctctgggaggaggaggcctgtggatgttttctttcaaaagaagtatgctggttttcccaagaggtagcaagctaccgagcctttagtgaacaccagttggctgattctctgcatccctaaaattcttccttttcaggttggctaactctcactactcaccagatctgataatacagactgacttagactcttgaaggtaactggagtcccttattcttcaagttacaaaagtgctccatttgccactttatgttataaatatgtccattgaggtgctgaacaatagtcttgagtacacgtggttatggagaagaaaaccaaatacgtgaatatggaatcactttcagatgccagtgagaggcagcagataagactccaaaacaggatga

SEQ ID NO: 527105 - DNA, 463 bp, Homo sapiens
tcccttctaaattaattaattaattaattaatgtgacgtatattttgtagcagatctactggggctaatgtaaccctgattagtttgagccaatcaatgcatggcatttccctgacaactgttatgggtctaggaatgggcaaaacatttaagtagtttcagtcaagctaaatagaaggatttgcttggagaagagaacttgctagaaatgcaaattttcaggtcctgcttcagacctactatgatgggtagttttatgtgtcaacttgactaggccatggtacccagacatttggtcaaactccagtctagatattgctgtgaaggtatttttttaatgattaacatttaaacagaagactttgatgaaaacagatkgccctccataatgtaggtgggcctgacccaatcagttgatggccttaagagaaaaacactgagctcccccaaggaagaaaaagtt

SEQ ID NO: 527106 - DNA, 612 bp, Homo sapiens
taaataatttccctttaataaaaaggctttgtattggaaaagtgtttgcctatttatgtcaaatattcacctcttttttaatatttacattttacatgaactattttaatctacttttcttatcaatataataaacaaaataaatatctaacttgattttcttctatattgttaccatcaacgcaggagcagcatcaaaaacttatctctaatgttactgtagatatatatatattttttctatttcctgtctcattgcattaggtagaacttctaaaacaatgttcatagtagcggttatccatgctggcctcatcttaattttaataaaaattactgaaatgtttcacttttaactacagtggtagctgttgacttaaatatgcagtttttactgaagttaaagaaaaattctgttctaagctcgagtatatttttaccaaaaacaggtattagattttcctaaatgtctttttaagcatttactaagaactccacaatacctcttacttttacttattgatagaatatattaatcattttcctaaaattaaattyccatttgcatatactaaatgaattatttattaaaatttatgtagttcaatatgc

SEQ ID NO: 527107 - DNA, 491 bp, Homo sapiens
ttaccacacacctaatatcaagcatcacacaggggaaatgtggctgcttcctttaaccaattccagactgacagtgtccaaccttatcatccagatctgtctttactgcactgggcagtctgtaatgggagatgaagagataagacaaacaggtcctgctttcagctcctttttttttttttttttttttttagcttgcctgatctcacagaacacatagatttggctcggkggaaatctctcatgaacaatctttgccttttctcagattgctatcttctgcccttttcctggattctttcttcatgttccaatggcactgagatgactcagtaagcaaccagttagaaaactacaggcagacatgttcagtttcatggtttcatgaactgttatcttgaagctcttccaaatttggaaggagcagattaagcgtattgacctctacacctgtaagttgaaagacgaaaggaaaaagaaaaaatagtttt

SEQ ID NO: 527108 - DNA, 670 bp, Homo sapiens
tggaatgctctgagcaacacgtatccctgagtgcacccataatgtctccttyatggtgtgatgggaaaggaggaggcgtggagcattgtgctaagacacacccccccggtgtggggatgtaagaagggccagagctccaaacaagatgagctttgaagacatctttttccttagtctgaaattcagtgatgacaagcttcctctgagttacatgtttgcaatatatagttccaagcttatattcattaaaggtaatgaccaagaagattaacagcaaaaaaaatacattggagcaatcacagcattctaataaccttgtttatttttgttttttaacacgttgtttgtcagttgggctttctgaaaacataagataatgctttaaatcaaagcagcttggggacagatggattaactcttctgagtcagcaggggactattaaaaacatcactcttggacctgcctgtatctcgctgccagacagaccttcccaggacacggttttcatcatgtctctgtgattgtttattgagctgttcttgttcaggagtctcagtactttaagtgggtgtgtatgcattattaatagttgtagtttcttaacttcagtgacagaaaagttaagaatttgaaaatattttagtttttcatatgcctttttaatatttc

SEQ ID NO: 527109 - DNA, 670 bp, Homo sapiens
tggaatgctctgagcaacacgtatccctgagtgcacccataatgtctccttcatggtgtgatgggaaaggaggaggcgtggagcattgtgctaagacacacccccccggtgtggggatgtaagaagggccagagctccaaacaagatgagctttgaagacatctttttccttagtctgaaattcagtgatgacaagcttcctctgagttacatgtttgcaatatrtagttccaagcttatattcattaaaggtaatgaccaagaagattaacagcaaaaaaaatacattggagcaatcacagcattctaataaccttgtttatttttgttttttaacacgttgtttgtcagttgggctttctgaaaacataagataatgctttaaatcaaagcagcttggggacagatggattaactcttctgagtcagcaggggactattaaaaacatcactcttggacctgcctgtatctcgctgccagacagaccttcccaggacacggttttcatcatgtctctgtgattgtttattgagctgttcttgttcaggagtctcagtactttaagtgggtgtgtatgcattattaatagttgtagtttcttaacttcagtgacagaaaagttaagaatttgaaaatattttagtttttcatatgcctttttaatatttc

SEQ ID NO: 527110 - DNA, 584 bp, Homo sapiens
agaaggtaatgaattatattttgaaacaaattttaggaaactacaagcttcttctttggataaacgggctttccacatcttggcagaccactgctgagtacagtgtcagcatgacttccagccgcgtctcagcctccctcacctactgcgggacttgtccggggctctgttgcataccccgccattgtatacagactcaaccaaaaacyggtattctaaagctcatcatttttgtcatttagagcacttattttctcatttcagaaagtggatgtcaccagcagggctgtgatggaaataatgactaaaacaattgaataccttcaacccaatccaggtaaggcatcatcttatatgtttaaaggatccctcgaggtaacttttagtttctctttgatagacattttaagtttggtgtgtttcttcttttggtgttgcttcctcggtccacttttctgagaggttagcgacttcatggatagcacattttaactggggagaagggctttttaaagctcacattgaagtaactggaagatctgtggtattttatctgactgtggtatatttaacaaataatgtat

SEQ ID NO: 527111 - DNA, 622 bp, Homo sapiens
acagctatatcgtctagactgaaatgtctcatctccattttgccaaattctgccttgtccattacagttaatctcataatccacatagacaccacacaattccataaacaacagagcagcccctgctaaccagccctccctctgaggaaagcctgaacatgtataaacgatctcaagccatgccagggaaataagaacagatatcatggaaaccatgttagcatgtcagtgcatagcctactgatgacaaactcagcagttatgccagacgaatttaggagtcaaaatgtttccttacactgtcattgttttcaattttctgattatatttttgagrtacattcaatacctctggctttacagaacagaggtatgaccagtgactgatcattcaataatgcttctaatcagagtgattatatgtgagtgtacaagtgtgtgtatgtttgtgtgtgtcagtattattttgttttagtatgacaggtgacctctttgccatgtacacttgttacgggtatgtgcacatgtaaagccagcatagagaaatgcaatcaaatgtaactctgcaggaggaggaagagtagcagaggaatggctctctgcaggggatgtcacgtctgag

SEQ ID NO: 527112 - DNA, 623 bp, Homo sapiens
ggtgtctactcctctcaacagccactgaaacacctctgagaactttcaggtttcgcttgatcaatcggacaactccccagacccctaatgctgactgcacttgtcagtggctaaatccctgcccctgccctttcttttgccttccgcctgccataatcctccagcctccaggcgacttctccctacagtgctgttaggaagtgactcttgtctctcctttgctccaaagctctgaatctgtagcccttcctttgtatctaaacagtccgatttgttggttattctcacagctcacccccaacttctggcccatctataatcagggcccacccacccatctgttagccctgtgggcccatcaaagcaggcttcaaacacaagctgccacctctggtggaggttcrgcctaccccttccccttctctcctgacccttccctaatctggctttgtttctgccatccctgccgcactcatttggaacccttgcttttctcagcaaatatttatgggtttgacttgttcttattgagttctatactcttcccccagcactgcctccccctggccttttatcttttgtttgtttgtttttttctctttcacttttccccttttgagctc

SEQ ID NO: 527113 - DNA, 623 bp, Homo sapiens
ggtgtctactcctctcaacagccactgaaacacctctgagaactttcaggtttcgcttgatcaatcggacaactccccagacccctaatgctgactgcacttgtcagtggctaaatccctgcccctgccctttcttttgccttccgcctgccataatcctccagcctccaggcgacttctccctacagtgctgttaggaagtgactcttgtctctcctttgctccaaagctctgaatctgtagcccttcctttgtatctaaacagtccgatttgttggttattctcacagctcacccccaacttctggcccatctataatcagggcccacccacccatctgttagccctgtgggcccatcaaagcaggcttcaaacacaagctgccacctctggtggaggttcagcctaccccttccccttctctcctgacccttccctaatctggctttgtttctgccatccctgccgcactcatttggaacccttgcttttctcagcaaatatttatgggtttgacttgttcttmttgagttctatactcttcccccagcactgcctccccctggccttttatcttttgtttgtttgtttttttctctttcacttttccccttttgagctc

SEQ ID NO: 527114 - DNA, 593 bp, Homo sapiens
attttttaatggcataatccaggtcatcataccctagaatagtcaccatgatgcatgtgcctgctgattagaaccttcgtatcattcctgttgcaagacacatagctacttcctgttctggaagttttggaggggtgagaaaaagaagggcaagaagggaagagacattcatgacaaaatctggaaaggctctttgaggagctatagcctctccttctcaggcagtagcaaatagtctcatcaaaacaaactttgaaatctagaatgaagattttgaaaagaaatccactgttatatatgaaatgttaaaacatgcgtactttttccctcagcaaacccacctttaacaatctatcaaaacacaaatgtattgggttatggtgcyaggcagatttctaaggtggctcctagtgatctctgtctcctggcatccatgcttttgtataatgctctgattgagtgaaggctggacccagagactgacttctagtgaacagaatacagcaaaagggatggggcactcttctgagattagcttataaaacactgtgacctctcttgctcacacactcttgctctcgctttgatgatgc

SEQ ID NO: 527115 - DNA, 593 bp, Homo sapiens
attttttaatggcataatccaggtcatcataccctagaatagtcaccatgatgcatgtgcctgctgattagaaccttcgtatcattcctgttgcaagacacatagctacttcctgttctggaagttttggaggggtgagaaaaagaagggcaagaagggaagagacattcatgacaaaatctggaaaggctctttgaggagctatagcctctccttctcaggcagtagcaaatagtctcatcaaaacaaactttgaaatctagaatgaagattttgaaaagaaatccactgttatatatgaaatgttaaaacatgcgtactttttccctcagcaaacccacctttaacaatctatcaaaacacaaatgtattgggttatggtgccaggcagatttctaaggtggctcctagtgatctctgtctcctggcatccatgcttttgtataatgctctgattgagtgaaggctggayccagagactgacttctagtgaacagaatacagcaaaagggatggggcactcttctgagattagcttataaaacactgtgacctctcttgctcacacactcttgctctcgctttgatgatgc

SEQ ID NO: 527116 - DNA, 490 bp, Homo sapiens
atgacccagtgttttttttttttaatgtgaggtargattcctaataagtgagagatgtcctaagtcccacagtgttcagacatgaagctgatcttttcaccttacatcttaaattctaatgtggctgagtacagaattcgggatgagctccaggattcctgcagtctgtaactttttctgacactttaccattccacccgtgatgacggattgttcctgacttacctttggaacataaaggctcttacaccacgtgtctggatctggtaaaagagattacacgagattgagagccttacatgtctcaggcaatactcatcctcaaaccaaccctgagatatgggtcattatcttcttctataaggaggaaaatgggaaagaggtgttacatgatcaaggtcaaccatcagtaaattccaccctcatgtcttacattaacacctgttcatttcctccagggatcactcttgcccaaagcatggagacagaa

SEQ ID NO: 527117 - DNA, 514 bp, Homo sapiens
gtgttcaggtcttggctcctgttcacacacctgttgtctaatggcaactggtacttaggacatttgaaatatctctggtggctgcatgctgcactttggttggcaatggctgtacgtctctgaaaaccttctgtgatgattgcaaaacggtacactttcatctcctttcttatgggttccrgggagccgaatgcacttgatttcaccagtaatatatgtctatagacaatttctcagatcggcgtgaagaaggtaaattatatctttcatttagaaaaatataaatctcacttttacaaaacgtgactaagaattgtcaaggcttagagagcaggaataatcagggactatatgggtgttcatgtctaataaatgcaactctgatccttaaccatatttaaaagcgctttcagagttccgaaaccttttcatctgctccagattcactgggttctgaagccaaagctttctgaaactgttcctcctctcagcccctaagtggtgaacgcttggt

SEQ ID NO: 527118 - DNA, 179 bp, Homo sapiens
tacaaaacgtgactaagaattgtcaaggcttagagagcaggaataatcagggactatatgggtgttcatgtctaataaatgcaactctgatccttaaccrtatttaaaagcgctttcagagttccgaaaccttttcatctgctccagattcactgggttctgaagccaaagctttctga

SEQ ID NO: 527119 - DNA, 527 bp, Homo sapiens
gagtggggagagccagtcacaagaccaaacagtgatgaaagtccattcatatgtaagtccagtataggggaatctatagagacagaaagtggattagtggttccttagggctggggggagaggcacatgatggggcgatagagggtgatagctaaaagacacagggttgctttttgagatgatgaaaatgttctaaaattgactgtagtaatgcctgcacatatctgtgaacatatttaaaaccactgaattgtataccttaactgggtgaattgtatggtatgtgaattatacatcaataaagctgttaaaaaaaataagaagacaccaaagcgtttctcctccccttcaaggaaatctgctattgtgtttcaaaggactggctttccctatccttgaamaatgatagcatgactttgtattgctgaaggctgaggaggttttctgctgagctttctcagggtttgaggagtgatggcctaaataagaaggaagggtttggggttccttgtaagggactgagcctt

SEQ ID NO: 527120 - DNA, 527 bp, Homo sapiens
gagtggggagagccagtcacaagaccaaacagtgatgaaagtccattcatatgtaagtccagtataggggaatctatagagacagaaagtggattagtggttccttagggctggggggagaggcacatgatggggcgatagagggtgatagctaaaagacacagggttgctttttgagatgatgaaaatgttctaaaattgactgtagtaatgcctgcacatatctgtgaacatatttaaaaccactgaattgtataccttaactgggtgaattgtatggtatgtgaattatacatcaataaagctgttaaaaaaaataagaagacaccaaagcgtttctcctccccttcaaggaaatctgctattgtgtttcaaaggactggctttccctatccttgaacaatgatagcatgactttgtattgctgaaggctgaggaggttttctgctgagctttctcagggtttgaggagtgatggsctaaataagaaggaagggtttggggttccttgtaagggactgagcctt

SEQ ID NO: 527121 - DNA, 396 bp, Homo sapiens
ttctttttttcactgctgtatctgcagtgtctagaacagtgtttggcattataagttctcaatgaacagttcttgattgaataagtgaatttctcaattctatgtcttcaccaaaaacttggctagaatcctctggttttttggccctgactacattggattcatctgaaccacaggcgacattctactgtcacctgtatttgctgaaaactagatatataaatcatatgaaatggcataaaatctttacaaagtattcagaatagctgtagccaaatgtggatttaattgctagtaaccaaacttggccatttctgataaatccaccaacagtttaacaacatttcattatcatttgctgatkggcttagagtcaaaggacttaatctgatctat

SEQ ID NO: 527122 - DNA, 642 bp, Homo sapiens
agatgatcaggacgatggggaggcgctatcagtcaatgtattgtttgggtgagtggtgataagtgcctaatacacaaagcgagtacaggcctgaagcctgaagagatatctctggtctgagataactgacaggtgatccctggtgtctgggtgttgactgagactggaggggtcaggtggggagctgtggtgggcaggaacaccagcttttcagagtttacctcaacactgtccaactcagttggcctagagtcaggcaacctggttttaagcccatgttcmccacctttgattggaggaacccaggcaaactgcacttctctgggcctcagaatccttctataaaatgaaagggtctcctctgattatttccaaggccctccatcagctcaaacatgctatcattttcatggcatcacaaagaggcgaatgaatggggcttccttcctcatttccaactgattatattccagactcaaaagagaaacgaataaataaaacataggattcagatgtgcaggataatatatgagaagactgtttacatttgcttcctttttgagaaagcgcatgttgaattttaagccaaatgtatgtgtcaaggtttgaaaataggttactcagataatttcattccatatg

SEQ ID NO: 527123 - DNA, 549 bp, Homo sapiens
tgaagagatatctctggtctgagataactgacaggtgatccctggtgtctgggtgttgactgagactggaggggtcaggtggggagctgtggtgggcaggaacaccagcttttcagagtttacctcaacactgtccaactcagttggcctagagtcaggcaacctggttttaagcccatgttcaccacctttgattggaggaacccaggcaaactgcacttctctgggcctcagaatccttctataaaatgaaagggtctcctctgattatttccaaggccctccatcagctcaaacatgctatcaytttcatggcatcacaaagaggcgaatgaatggggcttccttcctcatttccaactgattatattccagactcaaaagagaaacgaataaataaaacataggattcagatgtgcaggataatatatgagaagactgtttacatttgcttcctttttgagaaagcgcatgttgaattttaagccaaatgtatgtgtcaaggtttgaaaataggttactcagataatttcattccatatgtgcag

SEQ ID NO: 527124 - DNA, 631 bp, Homo sapiens
gagagtgcaggctgggcctacaatggaaacagtgtaaaggctggtgaagggggccagtgaaaaggacaggtgaatgatgtgaggaaacacacatatttcagtaagaatgtaggtctggaaaataaagtctaaaagcagagaagctgactcggaatccagagaagtacaggcctcatttgttcattcactgcacaaatagtcattgcactgaaatgaaacattttacttggtccctgggctaatagcatgtccaatctcatggtagagactgactcatgaaagaatcacaactaatagctgatcttagctaggagaaggggtgtggtggtctargaaggcttccctgagaacataaactgaagttaacaaccaggtaaaaagaggctggtagctaggagagtgtgtcccagacagagggactagcacatacaaagggcctgaggcagagaggagtttggacctgtgaggtgttcatgcagaatctaaagacatctcaaggttcaggggtgctgtgagaatgggcatttaaatgagggactaaggggagtgtacttaggtctttctcaaagaccaaagtaccagagagaactcatcaaaggtgaaggacgatgggtaaaaggctgaaagacag

SEQ ID NO: 527125 - DNA, 483 bp, Homo sapiens
gctgtgggaaaataaaatgcgtcatttctcagagacaagttctcagtgtcaagttcagtgtcattcaagtggccctaatagaagactgtgcttcctgtccagggagtattgccctcccatgttggacaactgcaggtgccactgtccagaggacacagggacaacctgagagacctggttctgattttctataaagaaaattcatcacctgaatttccactattttaagacaatctccattgttaaaaaaaataagctttgatgcactgaaatttcggagtttatttaagcagtaattcatgaattgggcagctccaaactagagtggtttggaactccccagaggtagatgaaaagctttaaaagggtgaatatggaagcagagcaaataaattaattggttaaaatttgaacaatggcctcatttggactatgyaggtgggaagttcaaagtgatataactaataatgtccagttggctgg

SEQ ID NO: 527126 - DNA, 394 bp, Homo sapiens
tctatcttggggccaacaggtctgaagcaggagttgtaaaccctagtctcactgtacttcattgcaaaagaaagttggagaaagtagaagttaatggatgagagaggacttcaggtagctttttttctccctaatcaattgcttcataaaatgcatacatgattggaatttcctgcaggagagaagggggagggsagagagagagagagagagagagagagagagagagagagagagagagagagagagagagggagaacatcaccctgtagtccccgccccatttttctgctgcccttacaacaaaactcctgagtgagtggcctgcatctgctgtctctctgttgtgtggcgtaggaaatccttccctccccaccaccgttggggtgtagaa

SEQ ID NO: 527127 - DNA, 381 bp, Homo sapiens
tgggaattctgggagcaggctggacattgctgtcacctctttgaatagcatcactagaattcttaacaaaacaaaaacaaaaaagaaaacaaaatcaactttccatattccctctactattttgwctaaaacattggtgaaagaagggaggtcatatacttgttcagaaaaaatgatctagggaggtgggaataggtgggcaggagctagacagagagggatgggtaggttgggagcatgaatataggctggtggggactggccaaggatgagaattggaaggtggctacagctcagctcctccaggacaggagggaaggtccaggcaagacatgaatatcatttagcaaaatagttgccatattccaggtcgagaaggag

SEQ ID NO: 527128 - DNA, 639 bp, Homo sapiens
atgctggccttttgtacaagtcatgttaagctccttcaaagaatacatgaacaatctgcattattttaaaggtgaagatgggctttttaagggggagaggttacagctaccagcaaaccagagatttcctccattctgtgaccctccttcctctgcattcttaaggacttggctagaacytgagttttccatttctcctggtgagaatgtgtcttcaggagcttattgataattctgtctttcagcacaactttgtaaagttgaagtccctgccaattgatagtcaccttgtggcgtgatcttgtcagtccaaaagaataaagatctacctttacattcatttagagtgagggatgatgtacagccaggatgcctaagtgtcacctcctgcagttcactgacacatggagtccctttgacaggtgcccgagtttctttttcctatgtattacaacatctacttttaggattttttttttaacctctttccccctttccttcctgttctttcttccctcttttttcttctttttccatctccttggctttttaactctctcctcttttctctctttccctttccacttttcttgtcagcagtttattcaaccaccgtataataaatccagtaagtgatca

SEQ ID NO: 527129 - DNA, 639 bp, Homo sapiens
atgctggccttttgtacaagtcatgttaagctccttcaaagaatacatgaacaatctgcattattttaaaggtgaagatgggctttttaagggggagaggttacagctaccagcaaaccagagatttcctccattctgtgaccctccttcctctgcattcttaaggacttggctagaacctgagttttccatttctcctggtgagaatgtgtcttcaggagcttattgataattctgtctttcagcacaactttgtaaagttgaagtccctgccaattgatagtcaccttgtggcktgatcttgtcagtccaaaagaataaagatctacctttacattcatttagagtgagggatgatgtacagccaggatgcctaagtgtcacctcctgcagttcactgacacatggagtccctttgacaggtgcccgagtttctttttcctatgtattacaacatctacttttaggattttttttttaacctctttccccctttccttcctgttctttcttccctcttttttcttctttttccatctccttggctttttaactctctcctcttttctctctttccctttccacttttcttgtcagcagtttattcaaccaccgtataataaatccagtaagtgatca

SEQ ID NO: 527130 - DNA, 506 bp, Homo sapiens
ctgaaacagcaggtctgccaagcagggggatgcagcagggtcctcagagacccagccccgcattaaatgggagtaatttccggaccaaccccaagtctctctgggggtggttcctggaatattactgagtctctggtttgactgccttggtctggaacatcacacatgtgcttccactttcatgtgcattgtgaaacatgtaggatttggggggcccagtgtaccccaaagatctgcagctttctccagcactctagggctctggttggacataactgctgggttcaccatccacagtaatggaaaggcagtgatatcaggtcacaaccagtgtttactaaggtctcattgtaccctatgatatcgttgtttccttgctgcagccccgcaaggtggccgtcatcatgctctttcayagattcacaaggcctggcaagggccaatcacatacccaaaatctcaaatacaagagatacactgcacaatcactctctcgattttaagct

SEQ ID NO: 527131 - DNA, 491 bp, Homo sapiens
caggagccacctgtgggggactgcacccaaatagctggaggtctgaggcactagtgtgcttataagggtaattctccaactgtgtccacacttaacagcttataaaccctgggrttccatatctcctttgaatctcacagtgaccctgaacaaggcttgtgatcctccttttgcagatggtgaaaggcaaacacaaagcattttggttttgcccctgagtagaaaaacaaaacacagaaaagcatttggaaagcagagaaaagtgaaaaaaagaaaaccgtagttaccaccagatgacagttagtgttttgggttctttccttttagacttttttcagtgaccgtacacacccatgctcacgagcagacccacgcttgcacatacaaaaaggcacacacaaacgcacatgcacacacacacacacatgcaaacacacacgtgtgtgcacacacacaaatgcacactcacatacccactgagtgctcagtgt

SEQ ID NO: 527132 - DNA, 624 bp, Homo sapiens
cacctgtgggggactgcacccaaatagctggaggtctgaggcactagtgtgcttataagggtaattctccaactgtgtccacacttaacagcttataaaccctggggttccatatctcctttgaatctcacagtgaccctgaacaaggcttgtgatcctccttttgcagatggtgaaaggcaaacacaaagcattttggttttgcccctgagtagaaaaacaaaacacagaaaagcatttggaaagcagagaaaagtgaaaaaaagaaaaccgtagttaccaccagatgacagttagtgttttgggttctttccttttagacttttttcagtgaccgtacacacccatgctcacgagcagacccacgcttgcacatacaaaaaggcacacacaaacgcacatgcacacacacrcacacatgcaaacacacacgtgtgtgcacacacacaaatgcacactcacatacccactgagtgctcagtgtgccagggactgtcataagtgctttttacatactcattcatttacgtttcaaaacaactgtgttaggtagacactattactacctacattttacagaaaactggcacagagaagttttcacttgccccaagacacacagat

SEQ ID NO: 527133 - DNA, 606 bp, Homo sapiens
ctgcaggagccacctgtgggggactgcacccaaatagctggaggtctgaggcactagtgtgcttataagggtaattctccaactgtgtccacacttaacagcttataaaccctggggttccatatctcctttgaatctcacagtgaccctgaacaaggcttgtgatcctccttttgcagatggtgaaaggcaaacacaaagcattttggttttgcccctgagtagaaaaacaaaacacagaaaagcatttggaaagcagagaaaagtgaaaaaaagaaaaccgtagttaccaccagatgacagttagtgttttgggttctttccttttagacttttttcagtgaccgtacacacccatgctcacgagcagacccacgcttgcacatacaaaaaggcacacacaaacgcacatgcacacacacacacacatgcaaacacacacgtgtgtgcrcacacacaaatgcacactcacatacccactgagtgctcagtgtgccagggactgtcataagtgctttttacatactcattcatttacgtttcaaaacaactgtgttaggtagacactattactacctacattttacagaaaactggcacagagaa

SEQ ID NO: 527134 - DNA, 578 bp, Homo sapiens
aagtaccccaggacaagaagtgagctgtgtggttrgggacccttgtctgcaagaacttcttaaagagtctgatcttgtattttgagaagacatcgtcataggatttctgtaccacccatctagttggagtaggggactctgtctgaaggagactccattaagtacagagaatcttagggggttcaaattatttttggaatgaggccaagtatgagtaataatgtacagacaacgaactaattaactagctgtcccagtgtaaattgtattgtcagtgttggtagcttttgaatcaatcaagggtcaatcaagtaaggtcaatgctaaaagcacaggtttgggaccagatgttccttgattataatcttgcttcattgttctcggcggtgtgttcttgatcaagtcacttaaccactctgagcccttgtgtgcatgtctgtgcagtaaaggataatgccaacctggcagggctgtcagagagggtagataggaggcagcctaggcttcctgaactgcccagtggagacccagtctctgctggtcccacctggccctcagatccctggttcttcgttctc

SEQ ID NO: 527135 - DNA, 645 bp, Homo sapiens
tgaccctaaccaatcctcactgtgttttgttggcaaagtaagtttagaaacaaggagaataccactagatcctgtaacatggcccctaggtaagaatcacctaacattgtctaacacatggcaaaggttcaaacatatttatttaatgaatacaaaagagtcatcccttaaagaaaaaatcaaattcaaacattttcccaatcctttagctaaagttacttgactaaaatttatccctttgaaaataaactaccttccaaaagacactacagatttattaaagtgacactgagatagtaaaacatcttcaagttcaacattttttcaagtagacttacctactagtgaagaagatttgactgaaatggatgtggtttgcttaataacagcctttcttgacttccaaattccaacctgtacaagggatattggagtacgactcattgtgtctatatcctatctcatttcccctttatttacttatcatgcctaaatgcattgagaaaagagtcttagcatccgagcaagcccaacatcctgtgttctcatcccttgcaacatctaccatatgcttcrgtcttggttctttgtgttagtccttcagtttaaataacaataaaatagctaatgtttagtaaatattta

SEQ ID NO: 527136 - DNA, 595 bp, Homo sapiens
ctaaagagacatcacaacaaacaacaaccaaaacacaacgagacaggtagccaataaaaagaataatttcaaatctaaaaagaaatgattgatattacattaaataaaagtaaaatgaatattctaatctgaacrctctggaagtttggtgaatagagaataaaaagaataatcaactatgatatgtgtataagaagcataccttaaataaaaaatacataaataggttgaaagtaaaggaatgaaaagatacttaaatcactaaccataaaaaatttgtaatgattattttagtggcaaacaaaatagactttatttgagttctataagagataacgagagttcataaaaatgaaagttacaagtgtattgcttaattttctaatacatttgtcttttctagacatcttagagttattaatcagtcaattactttgcagtcagataacctacttggtaaattttagtgttttcaaatatattgagacttcttttatgacctagcaaaaggtatataatagtaaactcaatacccttagaaaagaatgtatattttacatgttaggtaatgtaataataaaatctacttgtcaat

SEQ ID NO: 527137 - DNA, 595 bp, Homo sapiens
ctaaagagacatcacaacaaacaacaaccaaaacacaacgagacaggtagccaataaaaagaataatttcaaatctaaaaagaaatgattgatattacattaaataaaagtaaaatgaatattctaatctgaacgctctggaagtttggtgaatagagaataaaaagaataatcaactatkatatgtgtataagaagcataccttaaataaaaaatacataaataggttgaaagtaaaggaatgaaaagatacttaaatcactaaccataaaaaatttgtaatgattattttagtggcaaacaaaatagactttatttgagttctataagagataacgagagttcataaaaatgaaagttacaagtgtattgcttaattttctaatacatttgtcttttctagacatcttagagttattaatcagtcaattactttgcagtcagataacctacttggtaaattttagtgttttcaaatatattgagacttcttttatgacctagcaaaaggtatataatagtaaactcaatacccttagaaaagaatgtatattttacatgttaggtaatgtaataataaaatctacttgtcaat

SEQ ID NO: 527138 - DNA, 595 bp, Homo sapiens
ctaaagagacatcacaacaaacaacaaccaaaacacaacgagacaggtagccaataaaaagaataatttcaaatctaaaaagaaatgattgatattacattaaataaaagtaaaatgaatattctaatctgaacgctctggaagtttggtgaatagagaataaaaagaataatcaactatgatatgtgtataagaagcataccttaaataaaaaatacataaataggttgaaagtaaaggaatgaaaagatacttaaatcactaaccataaaaaatttgtaatgattattttagtggcaaacaaaatagactttatttgagttctataagagataacgagagttcataaaaatgaaagttacaagtgtattgcttaattttctaatacatttgtcttttctagacatcttagagttattaatcagtcaattactttgcagtcagataacctacttggtaaattttagtgttttcaaatatattgagacttcttttatgacctagcaaaaggtatataatagtaaactcaatacccytagaaaagaatgtatattttacatgttaggtaatgtaataataaaatctacttgtcaat

SEQ ID NO: 527139 - DNA, 552 bp, Homo sapiens
aaagacacgccccaacactattgccacaggaaaaaggtgcacctgagccacatgcctgcctgtcccccccaagactgcctgcctggtgtcctgcaggagatgattcacagcatagcctctattgccctacctgagtgttttgttctcagggttggagcaatttaccactgtaccacaggcagtgcttggcaccaaagggccaaaggacaaatccactggcctgattccaggtccacaggagttgaacacgtcacccaggtatatggagataaaatytgtggcctgatcttgatctggggaggagccagcagtgacagaatacagagaaatgtgtgatgcagattctgggggatgtggtgcaggagctggtgcccctttgagaggctggaccaggaagaatgtggcataatagctgctttctgccccagggattatcacagcctggaatgtgtggaatagcttagcaatctgggcacaggtggcttgggactagttttgctggttgggcttgctgccaggcccagacaccagagagaggcctgccatgttgtg

SEQ ID NO: 527140 - DNA, 492 bp, Homo sapiens
cagtgagctatgattatgccactgtactccatcccaggcagcagggtgagaccccatctcttaaaaaaaaattttccagaaaatctgcagatagactagtagaactaatatccagcaagattgttgaatataagatgaacacacaaaaatagatagactcttacttactggtaacagtcaattagaagaacaaaactccattcacatggttgcagcgtgaggatgtaagttactatctagtgttctgtatttcatcagcatttcttgtaaggcaagtcttctagcgacagattttctgtttttgtttatctggggatgtcttaatttctctatcattataatttcaatgtcgtttggttttgttggatattgaggaaaggcatatgtggccacatggttttgaagtagagtaacaggtgctgacagtctttcttctggcacttggagtatgtcatctsgctgcctctcactccatgatgtctgatgagaaat

SEQ ID NO: 527141 - DNA, 406 bp, Homo sapiens
tgttcatacgaagctggcttttgtagagaacagtccccgggcatcctcctgccccaaggaaaatgcccccgcttcagagtcagacagacgtgagttcccatctcatctccaccgaccatctccacctgaccttgatgagtccttagacttcttggagcctctggttcccatctgtgtggtggggaggtygcccttggggtttgcccttagcccacagtgtgactcctcagtgtcagtgccctccctcctggtacacagcccctccaccccaaagcaggccttcggttctggaaaagcaaagctcacaaaacctgatgacccaggtgacaaggacgaaagggatgaggtgtaactggccagaatgtgggtgtattagggttctctagagggacagaataggataagt

SEQ ID NO: 527142 - DNA, 487 bp, Homo sapiens
ccctggcatccatcctggccttcagccccacctccctggctccagagtcatccctggccacaggacggtctctgctctccagcccaacccgcctcctgctgggattacctggaggagctcaccccgtgcagaactgtttctccctggcaaattaatttgtcagcaccacaggtactaaaacagattagctaataggcaaaacctgcatagatttcactaaactgggtcttgatgcacccatgaygagcgtgaaatgggattatccctttaaagtgcttcatctttgtattcttgtcaaaagaggaggaaaaagacattttcttacaccctgaggaaacagactgggcattgatgtgtctgtatgtccattagataaattttcaatttgttctttaattataatctgttattgcttttggggggatataggggctaaaaatgtcaaaacgtacctttaataatttcacaaagtaagtttgtaatggtt

SEQ ID NO: 527143 - DNA, 588 bp, Homo sapiens
gcgtgaacccaaaacccctgtaggttcccttatcaggacccacctttgagcacccaccggtctgagtgggggctccggtccccaagcccctgcccaggaccaaagggtactcaagcatcttcccggggctggttcaacaagggcccctccaggtggaggcgatctggctggcccaggggctgcccggtctgccgcacaccatgcttgtcccaccctggatggcacccggggcatgttttccacttggaatcagtcgtttggagctccggctctgaataaatgagccacagagtcacaacacamcagggtggcgaggggcccctgcacagtgttccctccagtggcagagggggagcttgcccgagcccccattgctcaaagatgcctgctgtctccatgatcgccactggatgatttccctgtggatggagatccaacataggaggtgcaaacgcatgagcccaggtgctgcacctgacattgcaaaggaagcccgggcagtgggctggcaaggagcacaagctggggcttgtctctcaggggtaaacctgggatagtgctgagagaaggagccccggagtcctaggg

SEQ ID NO: 527144 - DNA, 588 bp, Homo sapiens
gcgtgaacccaaaacccctgtaggttcccttatcaggacccacctttgagcacccaccggtctgagtgggggctccggtccccaagcccctgcccaggaccaaagggtactcaagcatcttcccggggctggttcaacaagggcccctccaggtggaggcgatctggctggcccaggggctgcccggtctgccgcacaccatgcttgtcccaccctggatggcacccggggcatgttttccacttggaatcagtcgtttggagctccggctctgaataaatgagccacagagtcacaacacaacagggtggcgaggggcccctgcacrgtgttccctccagtggcagagggggagcttgcccgagcccccattgctcaaagatgcctgctgtctccatgatcgccactggatgatttccctgtggatggagatccaacataggaggtgcaaacgcatgagcccaggtgctgcacctgacattgcaaaggaagcccgggcagtgggctggcaaggagcacaagctggggcttgtctctcaggggtaaacctgggatagtgctgagagaaggagccccggagtcctaggg

SEQ ID NO: 527145 - DNA, 696 bp, Homo sapiens
ggattggggtgccttcagcccagcagggactgggggctgggggcatggatcccaggcctactgatgctggctgctgaamttcccagcactcccttagggagggggcatccaggctcagatgactcccaccccagctcctcatgttccctgctgatgagtgcactcagcccatggaaagggagaatggcaggggacaggtcccctcctggggcatcctcactaagataccaagagaatggagcttccagacctcccactgctgatttcagaattagcttccccaggctggccagtttcttatcccaaaccctgcacattgctgtgtgatttgccacgtccctaaatggttcatgcccagtagctctctggggacagcaaattggtagtcacccactgtgctttcctcagagtcatccacagtacccttggggaaggccattgccccaaggagaagagcgcatgagacgtcgggagccttcctagaggcagaggtcagcctccccacctgcagcgtatgaatgagaaacaggcccagggcatcttctgacttgcagggcatgagtgtgaattttatgggtccacttggctgtgccacaggatacccagatagctagtgaaatattatttctgggtgtgtctgtgagaatgtttctggaaaaggccttgaaatcaggagactgcatgaaacactcatga

SEQ ID NO: 527146 - DNA, 666 bp, Homo sapiens
acccctggaatgcattattaatgagcgccgcatctccaacagccggtacagccctctcagggcagtgtgtatctcctgggccacagggtacagaatcagaagcccagaaggacccaggaggcagcagtctgcagtcgcttccagcaccgctgtcatcaggccctgaccccaaatcccctgggcatgcatttagcacgcacatgtagggccccagcccaggaggtgcagatacagtagctggggatggggcccaggaacctgcattttcaacaagcccctactaaaccaggtggcccctgagttggagtccccacctttgggggcactgctgcatgtcagctttctctctggttttctttttcaaattcacctgggtaaaacattaaccaatatttttgaaatatgtgcactatataccgagggccagtgacgataggactgttaaacgaacacactacatactgacggccagtgacgataggactgttacatggatacactatataccattggctatggccaatggtgataggactattaaatgaacacagccagatccacccctctcaccctcctagggctctccaaggctggccacaggcctggaaacctgcgtctttaaaactcttcaggtgattctgacaytcacacaggttgggaacccat

SEQ ID NO: 527147 - DNA, 627 bp, Homo sapiens
ggaaaactggctcaggcccagaaacgtggcccacgactgtgaccgtgtcctgctggtgacccccagcctcctcatttctcgtggccatagagactgagcaatgcccagcgggcggcccgctctctcctgcggccacatgtccccctttcaaatctccccacagtgcccccygggtcagggcctcgctgccacccattgcaaaaccgtgtcctttctctgtgtacctatcacagtgacatcctgccccgcccaccccaaatggtgagccctgctctatgatggcactgctttggcctgcagaagaggccagcgctgggctccccaggggcgctggagccctcaccagcaggctccccgcagagcatacacgtgacctcctgtggacatccatgtctctgagcctctggccccctcttctctggaccctctggcgcttcttccctcagccaggccatcgcccctgagcctgcaggagccttccgagcactggggcctgccagggcatgaacctcataccccgaagctcccatggcaacagattctcctctcccaccttcctatatgccacccccaagttccagtcccatgtggcctctcccagctcctggcagcacaagctggctggtc

SEQ ID NO: 527148 - DNA, 654 bp, Homo sapiens
ttaaaacattactcctgggcatggctgtgagggtgttttgggaagagactggcatttgaatcagtagactgagtaaggaagatccattctcacccaatatgggcgggggggggggggggsggggggggcggcggccaccatccaataggttgaaggcctgaaaagaactaggaaaaaaaaatgcagaggaaaagcaaaaaagcaaatcctgtctttctccctctttctctctctccctccctctcctccgcacacccccatcccccacccctcctgccccatccctccctcctggagccgagatatccatcttctcctgtctttggacatcacagctctagattctccagccgttagactgcaggacttgcaccagcggcccccaggttctcaggccttcagacttggactgagctatgccaccagcttccctagttctccagcatgtggagggcagatggtgagacttctcagcctcctaaatcccctctcatctatctgtacctatcctattagttagttctgtttctctagagaaccctaactaacacaggagataacttgggtaacttgcccaaagatacatggctaataaatggcagagctgagaaacaatcaaagtttgtttgactataaaacctgtgcttttttcac

SEQ ID NO: 527149 - DNA, 654 bp, Homo sapiens
ttaaaacattactcctgggcatggctgtgagggtgttttgggaagagactggcatttgaatcagtagactgagtaaggaagatccattctcacccaatatgggcggggggggggggggggrgggggggcggcggccaccatccaataggttgaaggcctgaaaagaactaggaaaaaaaaatgcagaggaaaagcaaaaaagcaaatcctgtctttctccctctttctctctctccctccctctcctccgcacacccccatcccccacccctcctgccccatccctccctcctggagccgagatatccatcttctcctgtctttggacatcacagctctagattctccagccgttagactgcaggacttgcaccagcggcccccaggttctcaggccttcagacttggactgagctatgccaccagcttccctagttctccagcatgtggagggcagatggtgagacttctcagcctcctaaatcccctctcatctatctgtacctatcctattagttagttctgtttctctagagaaccctaactaacacaggagataacttgggtaacttgcccaaagatacatggctaataaatggcagagctgagaaacaatcaaagtttgtttgactataaaacctgtgcttttttcac

SEQ ID NO: 527150 - DNA, 654 bp, Homo sapiens
ttaaaacattactcctgggcatggctgtgagggtgttttgggaagagactggcatttgaatcagtagactgagtaaggaagatccattctcacccaatatgggcggggggggggggggggggggggggcggcggccaccatccaataggttgaaggcctgaaaagaactaggaaaaaaaaatgcagaggaaaagcaaaaaagcaaatcctgtctttctccctctttctctctctccctccctctcctccgcacacccccatcccccacccctcctgccccatccctccctcctggagccgagatatccatcttctcctgtctttggacatcacagctctagattctccagccgttagactgcaggacttgcaccagcggcccccaggttctcaggccttcagacttggactgagctatgccaccagcttccctagttctccagcaygtggagggcagatggtgagacttctcagcctcctaaatcccctctcatctatctgtacctatcctattagttagttctgtttctctagagaaccctaactaacacaggagataacttgggtaacttgcccaaagatacatggctaataaatggcagagctgagaaacaatcaaagtttgtttgactataaaacctgtgcttttttcac

SEQ ID NO: 527151 - DNA, 528 bp, Homo sapiens
tctcagtggacgcttgggtatttggttggatggacacacttgcttatcaacaagtagtttgtttacagagtgcctcagtgctcgctccctgcatgccaggggcaatccaggtgaactgggggtcctgctacccactgtaagctccaggtgtagcgcagaagaccttagagtgcccttggcaggcagcctttcctctgctgtgtgcagctcatgggaggaaatctctggaaccttctgagacaaggtgtgagcaggtcagttcggtgttaggtgatgtttagttctgtggccgccaatgcagtgggttgattgttgtgaaggaggtagttcctacgtccagatttttgtgcccctgtcatcacaggaatctggaaggattgctcttagaagaatgcagctctgtccatcattcggagggttcttttagcaaactgatacccacaggggtaaaatgtagccagcctccatagtaaattgctcagtttaccaaygtcctccgttaacaacaacagcaaaaatcttagaacc

SEQ ID NO: 527152 - DNA, 464 bp, Homo sapiens
gtgctccagcgaggatggtctttttgttcattattttctctttaaagtaatatcctgtcacttaggggctttccggttgtctcctcttattcgaccccctttcaaaattgctgacttgagctggttctggagtttattttttaatatgcgtgcgtgggtatgtgtatgtgtgtgtatgttttgcagaaatccgccaaaatgcaactgtaggaactgcgagatgtatttattgattttgaccaggggcggtgggaaggggctggagggagctgggggatcctggagggtgggaagtggctgattctcggtggccggacactcatccagagcctgatccgtactcgtgttttcttggaagcgccacaactgcggggaaggagtctttagaaaccgtgccagtttcaatatggcgggstaaggtggcttttaaaaactgaaaataaaggttttgaggtgggaaaaaa

SEQ ID NO: 527153 - DNA, 629 bp, Homo sapiens
ctgttcatatttgggtttcctccagtctcttcctaacatgctttaagtgcatcatcaaagtgaaatggcataaagattgaaattcgtttagtgaatttctttgtataacaaaacagcttgtatatttcacaccattttgtaggcagcagcattgcatggtaagaaacacaaagggaccacgcacgatggctcacgcctgtaatcccagcactttgggaggccgaggtgggtggatcacctgaggtcaggagttcgagactagcctggccaacatggtgaaaccctgtctctactaaaaatacaaaaaattagccaggcgtgrtgacaagcacctgtaatcccagctacttgggaggctgaggcaggaaaatcacttgaacccaggaggtggaggttgcagtgacaggagaatcgcttgaacccaggaggtggaggttgcagtatgccaagatcatgccattgcactccagactgggcaagaagagtgagactccgtctcaaaaaaaaaaaaaggaaaaaaagaaaaacaaatacacaaaggaagaatttctcacatgctgttataaaatttagattatcatttctacttaaagctgtcattttgatgagaagatagactattccaggat

SEQ ID NO: 527154 - DNA, 556 bp, Homo sapiens
tagcatccttaattccatctagattagtgtttgattgactaaccagggagaagactcttgggaaaacttcattagaatgctgcctaacacactggagtcccagcacttctttcttgatggaacccgaagagttctgttcctgaatgaatttgccgaagcttaccctagcaattgctaggtaagcaattgctaytagggtaagcttttaccaatgtagcaattacaaagtagtagtttcaggcaagtatctagaaagctcaaagagttttgctccttaagtttgtggggcaaggttttttgactgaagagaagaatttgtttcaaatttgacattctccaacgtttcacacatatctgaattgcaactgtctttcaaagaccacagcttactctactgccaccaccttctctttttacttctgtactatgaccagtttggtcttatcatcagttactcttcatcttctgtctgattgtcaggttattgccaaaaactggtgcattcccatcttagcttctggcaccttcagaatcttcttcattggcttcttctcct

SEQ ID NO: 527155 - DNA, 539 bp, Homo sapiens
agtcccgcttctaaaattctcccaagaagagacttccatcaaaattcttgaggagcaaaattctggaggtccatctaaattctgaatacatatggaacccaagtgacataaagtgtgaactgtggtagacatagctaagtgccaccaagatcacctttcaaggagggacttgctccccagctataggaaatgtggtcagcagacagcctcctgatggctgctcttttttttctttcttttctatttatttatttatttttgagatagaatctcaccctgtcgcccaggctggagtgcagtggtgcgatcttggctcactgcaacyttcgcctcccagattcaagcaattgtcatggctgagctaccaggtagctggaatttcaggtgtgtgccaccatgtccaactaattttttttgtatttttagtagagatgaggtttcgatatgttggccaggctggtcttgaactcctggcctcgctcaagtgatcctcccacttcagcttcccaaagtgctgggattacaggtgtgagtcactg

SEQ ID NO: 527156 - DNA, 579 bp, Homo sapiens
gatgtatctaaatgacattatattaagtgaaataagccaggcacagaaagataaacactgcmtgatctcattcatgagtggaatctaaaaaagtcaatctcatagaagtagagagtacagtagtgggttatgagaggctggtggtgaggaggggggttagtccaagtatacataattacaggtagataggaggaatacattcaagagatctattgtacagcagggtaaccaaagtaatgatgataaattgtattcttgaaaaagacaaagagagtgaatgttgaatgttctcaccgcaaaattggtaactgtgtgaggtaatgtatttgttaattagcaagagttaagcattccaggatgcatatataccttgaaacatcatgttgtacatgataaatacatacagtgttatttgtcaaattaaaaatcaacaagaagagcattagggagtgttacaaaacttactgggaagaaaaacctttggatgagaggccagtttgccaggatgttgtagtttgtggactatggaaaattggactgctttggcttcataaagcttcagaggcaatagttctgaga

SEQ ID NO: 527157 - DNA, 612 bp, Homo sapiens
acagaattagcattgtgcaagaaagagtcaaagaaatctcccagaatatagaaaaatggggacccaacaagtgagataaaagtgagaagctgtggagaacacattgagcagatccagtaaccattagcaaaagtcttagtaaaaacaaggraaaaaattgtatatatgtatatataatattttatatatatatataatgaggttattgaattgtgggatgagaagtgataattgtgactgaattaataatttgttgaagaatttctatgaactgagtaatagaacaaatcttgagactaaagtggccctttgagcaacaacaaaaaaagtagacacttacttaaatgtttcttaagtttctgaactcaaaggatgtacaaaaaaatcagaagtgttagcctcaaatttgtccgttgaaaatatagatgttaacaaaagatattgacttcttttctaattctgtggaaaaaaaatattaggagcgagacatttgtccacaaaaattatcatttaagttgagggcaaaggtatcatttatcataaagcatgaaaggactcaaaattgttgtcaccaacaaagctttgttatcaaaaatgcactggagataaatg

SEQ ID NO: 527158 - DNA, 612 bp, Homo sapiens
acagaattagcattgtgcaagaaagagtcaaagaaatctcccagaatatagaaaaatggggacccaacaagtgagataaaagtgagaagctgtggagaacacattgagcagatccagtaaccattagcaaaagtcttagtaaaaacaagggaaaaaattgtatatatgtatatataatattttatatatatatataatgaggttattgaattgtgggatgagaagtgataattgtgactgaattaataatttgttgaagaatttctatgaactgagtaatagaacaaatcttgagactaaagtggccctttgagcaacaacaaaaaaagtagacacttacttaaatgtttcttaagtttctgaactcaaaggatgtacaaaaaaatcagaagtgttagcctcaaatttgtccgttgaaaatatagatgytaacaaaagatattgacttcttttctaattctgtggaaaaaaaatattaggagcgagacatttgtccacaaaaattatcatttaagttgagggcaaaggtatcatttatcataaagcatgaaaggactcaaaattgttgtcaccaacaaagctttgttatcaaaaatgcactggagataaatg

SEQ ID NO: 527159 - DNA, 164 bp, Homo sapiens
aaataccagggtagcttgaagatgtgattggcagccaaggcatctttacctgcagaagatctgtrgtgatagctaatacatcactgcatttttaggcatgagacaaatggacaataagctagaatgatacttaatttgtatattttaaaaaatcaagatctggt

SEQ ID NO: 527160 - DNA, 610 bp, Homo sapiens
ctgccacaatagaatattgccatctttctatcaggatccacatctaattccactcacagatctgaagccctttaattaaaaagtaggccagttgctaccttgaaggtccctgcaaatactgtctttaaatatccctctgatctttcactaatagggtctgtgttatttatagaataaccaagggaaaatgagaattgtcagacttctgaggaatattaaatwtgggaactgagctggattgaaagcaagggaacaaacatatctttaagtttttttttgcaagagtgggggtaggtttagggaggtaataaggagagtttaaaccaaagtctgtctcaaaatggtcctacagacccacctgtggctatagacccacctgtggctgcttccttctgatccaaatgttgtggttctctgacctacaagagcaagagccattattttaatagggccaagtggaagtccatgaagaaaaatctctcctagtctagtcaaagttgtaaattagaagcaacattatacctcagaaaacctaaggatgtttatgtggtttggctgtttctccacccaaatctcatcttgaattgtagttcccataatcattatgtgt

SEQ ID NO: 527161 - DNA, 610 bp, Homo sapiens
ctgccacaatagaatattgccatctttctatcaggatccacatctaattccactcacagatctgaagccctttaattaaaaagtaggccagttgctaccttgaaggtccctgcaaatactgtctttaaatatccctctgatctttcactaatagggtctgtgttatttatagaataaccaagggaaaatgagaattgtcagacttctgaggaatattaaatatgggaactgagctggattgaaagcaagggaacaaacatatctttaagtttttttttgcaagagtkggggtaggtttagggaggtaataaggagagtttaaaccaaagtctgtctcaaaatggtcctacagacccacctgtggctatagacccacctgtggctgcttccttctgatccaaatgttgtggttctctgacctacaagagcaagagccattattttaatagggccaagtggaagtccatgaagaaaaatctctcctagtctagtcaaagttgtaaattagaagcaacattatacctcagaaaacctaaggatgtttatgtggtttggctgtttctccacccaaatctcatcttgaattgtagttcccataatcattatgtgt

SEQ ID NO: 527162 - DNA, 548 bp, Homo sapiens
ctgatagatgaattggtggttggtggacagtttgcctgtggcaactttttccaggtagcttctggtacccagaagcttggagttcagtcccttcaaatccaggacctggtttgtgatacactgggaaagagtgcccactgtagtgtctttgatgtcttgtaacaagtgtttaactccaatttccttagcttcctctgctscagtttcactggtcacatgctcaaatgttttcaaggctgaagttccatcttcatagacttctactgaaatatatgcttctgtaggcagccctaagtcctttggcttcatgtcactagtgaccaatactgagttacggcagtatcttttcatgatttcattgaaggcagtgtcattcttgtgtagtttagggcctatgtggtaccactcaactattctttccctggcattcaccctcttaaacattctgtatgtgtttttcaaataatcgtgggctaaaaaacaattatctttgtcatcttcattaaaagggactgtaaaactgctggatacatcaagtactttcattt

SEQ ID NO: 527163 - DNA, 488 bp, Homo sapiens
cacttaataccaaggtgatgggttgataggtgcagcaaaccaccaaggtgcacgtttacctgtgtaacaaacctccatgtcctgcacatgtattctgaaacttaaaattaaaattttgagggctaggcatggtggcttacscctgtaatcccagcactttgggaagccgagatgggtggatcatgaggtcaggagatggagaccgtcctggctaacacagtgaaatcccatctctactaaaaatacaaaaaattagctgggcgtggtggcacgtgcctatagtcccagctacttgggagggtgaggcaggagaattgcttgaaccctggaggcggaggttgcagtgagctgagatcgtgccactgcactccagcctgggcgacagagcgagactgtgtctcaaaaaatatttaaattttgaaaaaaaaatgcaaggcagtgcagcctgagtggatagggaaatgggacaagctgaacctgggatggga

SEQ ID NO: 527164 - DNA, 600 bp, Homo sapiens
cagctgtttatctatctatcgatcgatcgatctatctatctatctatttatctatctatatctgtttatctgtwtctattctctctctctctctctctctctctgtcatctatatatccatcaatttgagacaagatctcactctgttgcccaggctagagtgcagtggcacaatcatagctcactgcagccttaaacttctgtgctcaagccatcctcccaccacagcctcctgagtagctaggatgacagatgcttgccaccatgcccaaataatacttaactttctttttacaggcaggttcttgctatgttgctcagactagtctcaaactcctggccctatgttgctcagagtagtctcgaactcctggaccttcatctccctttcacagccaaacttcttaaaatgagttgaaaatatttaatatcacaggcttgatatttctcaactcacagaaatctgctttctgtctcatgtatactctaaaacagctatcagttatattactttgaaacaactcaacaaccatcttcatgttgctaaatgaacatttcacagccttccccatttcttagtcacatgaatgctattggcca

SEQ ID NO: 527165 - DNA, 559 bp, Homo sapiens
atgagttgaaagttgcttggtactcaccaaggtagggcaatgggaatcagttacctggttcagacatttcataattttcaatggagataatttaaaacacccatttccacgttgtattttaccatggatagaatagattaaacctctgacattctctcccctggatattgttggcacaaacacctcactctttcttatgaatgtccctcaaatctgcaaatctrcattattctggaagttaattattttgctgatcaggccaatggtgaacaaaattttctctggtcaccaaattcaccaggcaatgctttttttttttttttttttcctatgggttagggttgacacaaacccagtactgagagttcaactgtcttctcagccttagcctaggaaggtcaggatgaaatactccagattcaaatgtgtgcctagaccagtcctctaaaccaagggtaatgtagaggagactgtagaaactgggcttcacatacaaacaaataatttatttggactgttgtaaaagcattaagctaatccttaggaaatagggaggtat

SEQ ID NO: 527166 - DNA, 468 bp, Homo sapiens
ctggatatgttttgcctcttttgggtcgtccaagtttaccacatgtcagttcagcaatttaggatggattggagacaatccagtagaaagaaagggaaagttgtgttggttgcagtctgcagaagttctctttcttgtgttcttaattcatctctttctcagatgtttgtggtttgtttgtcttttcagttgtggcagtggttaatactgctgatgggaaaataatttgtacaacctgggcagatcttttaaagttgtaagtttactkaacgttaatctgcaggtgcccaaatattacctatttgaaaatccatgtcatcattgcataaactcctaaaatttgcatccatcaatgagatttgccagttttctttttaatcctttaccacccacttgaagtggctaaatttagatgtgttccactgtctgcttcactcatttaaataactgcaattacaagctgacctg

SEQ ID NO: 527167 - DNA, 482 bp, Homo sapiens
taccatttttagatctgccgtcttagtggagtgagaagcagcatgggttttggattcagatgaagcgtgcmagcagtgttacaggagagtctttctacatgttggttgtctaaaatttcatgtagtaaagttttaggataaaattaactaactctgtgatgatagtcattgataaacagactttttttttttttttttttttgcttgtcgtctaggttggagtgcagtggcgcaatcatctcactgcagccttgaactcctgggctcaagccatcctcctgccatagcctccctactagctaggactacaagtgcatgccatgatgtctgctaatttttatttatttatttattttagtatttgtaaagacagggtctcattttggtgcccaggctggtctcaaactcctggcctcaggcgatcctcctgcctcaggctcccaaagcgctgggattacaggtgtgaggcacggcccacaacc

SEQ ID NO: 527168 - DNA, 508 bp, Homo sapiens
atattttgccactaactgtggacaagtcacttaataattctgtgtctcagttttcacaactagagatagatgttctgggtttacttttaaaatctgtaaggtgaagtttggggtagatttcctaccccagagatacagaaatgttgtaatatttagctagctagatctatctatctatctgtctgtctatctatctatctatctatctatctatctatctatctatctatcttacatttaacagaaagccagaagaattcccaattaaattaaaagaaactcaaagccagaatagtggtaagcaggagttgataccacagtggcccatgaatgtttagagatttagaatctccgggctgggagctgagcctgggagccatggctttgaggctagrctagcgataatctgtatctgccccaaacaagtcctgcccaatactatcaaaaaggaaagagaaaaatggtttcttctgcatgggaagcagcaaaggagaatctgtttatttca

SEQ ID NO: 527169 - DNA, 519 bp, Homo sapiens
aaaaatgtattgatatataaaaaacaactatgagtagaatgtctgaataacttaacatgacctaaccatcaccatttttatttcattcatctacatgttcctttgactggttatttattaaacattcaaccattcycctgcctcttgtttattggtggcagtgagttgaaaaggaccaaattcacactgtcttaccttctacatgagcatcttctgcaattcatcttcctcaattttcctgaattcacctttcttccatcttatatagaaagtctctaccacaaaattagtgctttaagtaattgtcttttaactttttggtacatgctactttaaatatttatctgaactagcatgcaatgttagagggaaggaactatatgctgtgagctttctgtatgcattaataactgaacccctcaaagatttacatagtaactgcctgtatggagagactgactcaatgctgcaccctaatacttttctaggttgtcacttgctgctgctgctgctccaaac

SEQ ID NO: 527170 - DNA, 519 bp, Homo sapiens
aaaaatgtattgatatataaaaaacaactatgagtagaatgtctgaataacttaacatgacctaaccatcaccatttttatttcattcatctacatgttcctttgactggttatttattaaacattcaaccattctcctgcctcttgtttattggtggcagtgrgttgaaaaggaccaaattcacactgtcttaccttctacatgagcatcttctgcaattcatcttcctcaattttcctgaattcacctttcttccatcttatatagaaagtctctaccacaaaattagtgctttaagtaattgtcttttaactttttggtacatgctactttaaatatttatctgaactagcatgcaatgttagagggaaggaactatatgctgtgagctttctgtatgcattaataactgaacccctcaaagatttacatagtaactgcctgtatggagagactgactcaatgctgcaccctaatacttttctaggttgtcacttgctgctgctgctgctccaaac

SEQ ID NO: 527171 - DNA, 519 bp, Homo sapiens
aaaaatgtattgatatataaaaaacaactatgagtagaatgtctgaataacttaacatgacctaaccatcaccatttttatttcattcatctacatgttcctttgactggttatttattaaacattcaaccattctcctgcctcttgtttattggtggcagtgagttgaaaaggaccaaattcacactgtcttaccttctacatgagcatcttctgcaattcatcttcctcaattttcctgaattcacctttcttccatcttatatagaaagtctctaccacaaaattagtgctttaagwaattgtcttttaactttttggtacatgctactttaaatatttatctgaactagcatgcaatgttagagggaaggaactatatgctgtgagctttctgtatgcattaataactgaacccctcaaagatttacatagtaactgcctgtatggagagactgactcaatgctgcaccctaatacttttctaggttgtcacttgctgctgctgctgctccaaac

SEQ ID NO: 527172 - DNA, 201 bp, Homo sapiens
cttgctgttaccactcagaattttagttagttctttgataatctaccctgtcttaacagtgctaacatggatatttggttctgagctctgagcatttggttcagagatctgtgctggagccagtgtggagggggaagctaaggaggaagcaagagaacttcaagggcatstcagactcgggaacaaaagctgagcctcttg

SEQ ID NO: 527173 - DNA, 535 bp, Homo sapiens
agctgactgccctctttcaacttgtccctgctcctcccacccttctccctccacacacacatttaatgcagcttctaacatgtactgataacattattaccttctcttcagggaaattctgagaatgctcttgttatttaaaaagttgataaattctgtccatttgcagtcatagtgttgtatagtaccttatttagagttgtgagtatttatctgttatagaagaactgccgtatacatccttaagtcacggtaggaaatattccaaattagaacatccactccagaagcttaaagtttccccaaataaatcttataatagcatcacgttgccaaggtccccagaaatctctgtggaaggttagcaccctgtatcccagcaaatcaacaatgtggctttcctgtctctgactttaggcctcatttgatgacttgcaggttcccaaaaggcctcacccctgatattaagccaaagaccacagacaacaaggtcttcttgaktctatagtcttgtatcttcattctactctaaata

SEQ ID NO: 527174 - DNA, 575 bp, Homo sapiens
agcttaggcaaaatatgaatatacatgttgataccgttgtgttctaaatcaatatgcagggcaaatgttcaggaattatgcactaatgtggctattctggattttgtacaccagcatccattctgattggtcagtactattgtctcattgcttggtatttacatagtagcagttggtaaaatttcagatatcaccctaattcataagtatcataaacatttttcttttgctggtatttataccctatattaagtgagaatggtttaaaatatgattatcaaaaactcttcttctattaaaaataatttatatggaaaacacaataaactttcattcaaataaaattttctgcatattattgattaattactgtttggccttttttctatggataatgtttaatcatgtaaacattttaagccaaaaagcttttmacttaacagagtcacataatgtagtttaatagtcaagttattttaatttgattgtttaattttacaacttaggttgtgtaaatgcacacatctgcaatgcaaatataaatactccagtttcggaggtggttccaagatggc

SEQ ID NO: 527175 - DNA, 641 bp, Homo sapiens
gtaaattagagccaaagaaagagcttctccctttactggtgtgttcttacagcccacatgagtgtggcagtaatatttaacttgtcagtcaagatgtttgagaaaataatcayattaatgagtcttaggcaggaatgaaaggatatgcctggcatacttgtttatgaaatttgccagactcattaaaagtcagttacatcgtattagtaataatggacatgttgctataaacacaagagcttggccatttctagttgtaattaccagtgataaatttgactaaatataaagctatataaacaatacaatcaaaacttttttaagaaacagtaacagaaaacattttgtttaaaaatctccttaaaatgccagaaatatattttcctacctatcagacataatatatattgataaaaaactagaaataacactccttgtccataatacaaagacatgcaaaattaacatctttaatgaaataataatttatggccctttaatctgtattaacaaaaagcacgtattaaggttattttctttcactggccgttcaaaaaatgtggtacattcatcatgactctaaacatgccttatcagctatacaatgtaagcctcagaagcattccttattgttcccccat

SEQ ID NO: 527176 - DNA, 548 bp, Homo sapiens
taaattttattgaggatttcttgtatgtggtgagtcacttctctactgacactttctggattgtccctttgtctttaaatagcttgactatgaagtatttaggtgtggatctctttgaattggtattgcatagacttcattgaggtcctcagacatgtagattaawatttttcatcaaatttgagaaattttaggctatgatttctcaacatccctttaaccctttctctctctctttcccttccgagactcctgttatgcatatattggtactcttggtagttttccacatgtctttgaagctctgttcatgctgggtgttggggcatgccttcaaagctcaggcaggcaatttccaattctgcctattcaattacttgcacagaacctcagaatcagccagaggtaagagcttaagttcttccaagatctttcctaggtacacatatcatccatatatccacagggtattaaaaatactctctagacatccctttcttgagcttgttttccagttgtttggttagcttcttctttgctccagcttg

SEQ ID NO: 527177 - DNA, 641 bp, Homo sapiens
ggaaacctgagcgcttcagcccacagatattgttactaaagactactgtacggttctgttaagggaaaatgtggagaacaataattgggcaccactctacccacaacttctaaatttcagattttttgtgtgtatagtaaaggattgaactagaaaacatctaaaatttcactcatctctaaaagtgcatcttctaaacttgtgtctttagtataacatttatctttgagataatagtgaagaagagaagtgaggagatgtaattttaaatgactgcaattgaagccatttgctttagtactgctttctgcacttctgtggataacactcctccatggatttccattaactttttcatttcctaarttttgttatttctaataattgtgtcacattttttttaaaatcccagtttcagcatctcatttgttgaccaccacctccaaacttttcagcagacataatctaataatgtttctccaataattattttacttcaatcagcacttttaaatccactgacctcatcaaattattgttgcttctttctcatgaggcctcttttctcattaccaaagcccaacattattataatttgattgcattcacccttaagttaatttaccttacctctctcactt

SEQ ID NO: 527178 - DNA, 540 bp, Homo sapiens
ctacataaaataattcctatattaaaattattaatattgttaatgtaattcactcttgacattgaagtataaattagtaactcactgttatatttttaaaagcctttctgggtctcccagttcccatcctacattggcaaacacagaaataactactattaacatcttaggtacttatttttatgtttatcttcatattcataagtacacatttcttgatttataaatttgagtacctattaatttttctctaataaaatttgagaacctgtctcttattccctgttccctaatacagcaaggtaaaactatatactaaataaaattagattattgtgaagttatcttcaaaggctgcktgtcagtattttatctgagctccattttattctgtagtttctaacccatggttttaaaacctacaattttgagagttattacaacttcaggtgattcctgggatttgtgtatggctcaaatagttctatcaatgtgctattagaagtgcttttcaccttttcttcttctttttattttttt

SEQ ID NO: 527179 - DNA, 593 bp, Homo sapiens
caatggattatttccagagaggcttaggaatgaaatttatgcattattatgatttttaatatatctcattcatagaataaatatggaaratgtagtaatcaaaaaccttattaatcagtttactcttatttctttggggaaaacaagaaggaagaaaagataagaaagctttcctagcttgcaacacaggctaagaattccctccacttatcactaggcaatgtcttcttttatcattggaagttttctttatatagactttagtctatattgtgtaattaacctaggcagtacagctctcttttgattactattgataagatacaccttctgttttcaaccttttactggtaacaatctgtctttatatctaaagtaaagttcctgtagacattttatagtaggattctgctattgttaaatcaaatctaaagatccctgattttttactgtggtcttgagactctttacatttaatgtaattgtaatgtagttggaatgaaatctaccattctgaaaattattttctattagatgtatgttttctttattattttgtgttgctcttttcctggcattaaaattaagtgagt

SEQ ID NO: 527180 - DNA, 590 bp, Homo sapiens
ttttctaccctagtatgctgctcaacttcagagtgataatcattattgacataatgtttgtgtttgtttgttttaagaataagtatctttcaagttctatatattgtacckggagtagaaaactttgtaagaacaagaaaatacttaaaacatagattagatcttatactatcaggacgtgtatgacttagcaagagttcactgtgaaagaaaattagggcatcagaaagaatgataacgtaaaaaatgtgaaatataatccaaaacatcaacattatacttattcagttccttaatgcacctggactcaatgtaatgtcaccattacaaaaggagtataaacaaactaagcaaaaatgtctgcatattgatggctattttaaatttaaaatatctgaaagactctgctgtcagatatctcatgggaatgttcaaatatttgcagattctcacaggaaataataataaatgattttcaggttatacagcatttttcttctacatgtcccaatgctattattatgtaagatacagcaactctactttcagagtatattaaccatggaaacagtaattttcttccattgttg

SEQ ID NO: 527181 - DNA, 521 bp, Homo sapiens
acatgtataaatgttttggaaaaatgcagaatgcttcctaaactgtgcctgtcagtgggcttctacagccacccccttatactctttaaaaatatgtattctcttctgccatggggggcacttttttggatagaaaagtttgagaaatacacatttttattactcaatgaaaggtagaaaaggttttgggggaacattaaaaaagagttttccaatttgaatctttatcattttcctccctgataagagttagaatttgggcaagcagaattattttgaatatctatttaaatatatgtgagttccttcactattaaataagtttcctaacagtaatctagattatcagttaawaaggcctatattcatggagagcccgtaagtttatagttctagatgaggctcttggattgacacactaaattcaatcagactgcatgaataaataaaatgtgtttaaagtaatataggcacagaaaaaaaggagtacagacttagtgagggggagggacactcaggga

SEQ ID NO: 527182 - DNA, 611 bp, Homo sapiens
ctgcggcatacagcaatggtcasacagttgtaattggtcagaaatcagatacaagggagtcttctagtataaacaagcttcccatgtgagggacactggttgtgggttgaaaaactagccattaggaggttcctcgtcatctccaggagtctcaagtatgctgatcttctcagtgttcctttgtgtacagattttgtccatgtttccttgttccatggtgatgctgaaggtttttaattggattattttgccctcttagtatttcattcattgatatctgtctaattaattgttactttgcagggggacagaatgaaggctctgtcttctactccatcatcttgttggcatcactcctggaaaaggtacattaaaaaataagttgaaatatatagaattgtgtaattacttagctatagagttgtatgaaaacataaatagttttccaaaagtgtttagataaattcagtgcaattataactacaagtgcatgttaaaggaatcaaggagcatttctagtttttgagattaattttatgaaagcaaatatatcattttggtatatcagccagcttcttagtaactagagatttctttggccacataacatg

SEQ ID NO: 527183 - DNA, 611 bp, Homo sapiens
ctgcggcatacagcaatggtcacacagttgtaattggtcagaaatcagatacaagggagtcttctagtataaacaagcttcccatgtgagggacactggttgtgggttgaaaaactagccattaggaggttcctcgtcatctccagragtctcaagtatgctgatcttctcagtgttcctttgtgtacagattttgtccatgtttccttgttccatggtgatgctgaaggtttttaattggattattttgccctcttagtatttcattcattgatatctgtctaattaattgttactttgcagggggacagaatgaaggctctgtcttctactccatcatcttgttggcatcactcctggaaaaggtacattaaaaaataagttgaaatatatagaattgtgtaattacttagctatagagttgtatgaaaacataaatagttttccaaaagtgtttagataaattcagtgcaattataactacaagtgcatgttaaaggaatcaaggagcatttctagtttttgagattaattttatgaaagcaaatatatcattttggtatatcagccagcttcttagtaactagagatttctttggccacataacatg

SEQ ID NO: 527184 - DNA, 642 bp, Homo sapiens
aaatatatctagcttggtgtcactaggatgaaatatattttgtgtatgatacaaaaagaagaaaatacaaatcttggagtggagctatattatatttccttggagtgtgactaattatagtgcaatttgtgaaagatttctattatttatttttagaaaaacgggtctttgttttgtttctacaaacacatgtttacattaagtaataaaatacaattctattggataacaatataagcatattgtttaattataagcaaaattactatttttaagaacaatttgctataattttagattgacctacatgattgaacttggcatatctctttctcccttcccacaaatgagttagtcctataaactataggactgaagacagtcctataaaaaagagtagagaagatcaaaacgaaatgaaaatggtctaatgctccacgggatgagtgcatcatctgtctgcaaagtttcccagcaggtgctatttaattttttgaatttgcccaaagtctgtctctcaggtttgcagaatttgatatcaccattatttcattaaaccaagaactgctgatttgtgcattatgtatcagtcrgggtcctgtttggagagagaaatcacacagtgatttggacagagaatat

SEQ ID NO: 527185 - DNA, 550 bp, Homo sapiens
ttcatccattattgattacattacctggaaggtgaataggccatgatctgtacctatgacatctacagctttggctgagcttatcaactaaacaaatgagaatcaatttaaaagcacatggtagggacagtgtgaaagagttgrtggaaaacctataggaatctccaagttaattttttcattgcttaccctttattactgcatgaagtccaaaacatgataacagagtttaggtctgcctactaaagacaaatacttgaacttaataacaataataataccaataattcaaaagctgaagacacaaagtgttaatgatttataatcttttatgagttctcatctaacaattaaagactatttttctgcataatactaacacttttctcctcaagcagtagactctttccatgtattggctcaaattcctaagaattttcctacatgacactgttaaattgtgagatatttaatacataattaccagaaccttgaatctgaagcatgcttctcagttcacagtttttcctgatgcctattgtcaagctca

SEQ ID NO: 527186 - DNA, 550 bp, Homo sapiens
ttcatccattattgattacattacctggaaggtgaataggccatgatctgtacctatgacatctacagctttggctgagcttatcaactaaacaaatgagaatcaatttaaaagcacatggtagggacagtgtgaaagagttggtggaaaacctataggaatctccaagttaattttttcattgyttaccctttattactgcatgaagtccaaaacatgataacagagtttaggtctgcctactaaagacaaatacttgaacttaataacaataataataccaataattcaaaagctgaagacacaaagtgttaatgatttataatcttttatgagttctcatctaacaattaaagactatttttctgcataatactaacacttttctcctcaagcagtagactctttccatgtattggctcaaattcctaagaattttcctacatgacactgttaaattgtgagatatttaatacataattaccagaaccttgaatctgaagcatgcttctcagttcacagtttttcctgatgcctattgtcaagctca

SEQ ID NO: 527187 - DNA, 550 bp, Homo sapiens
ttcatccattattgattacattacctggaaggtgaataggccatgatctgtacctatgacatctacagctttggctgagcttatcaactaaacaaatgagaatcaatttaaaagcacatggtagggacagtgtgaaagagttggtggaaaacctataggaatctccaagttaattttttcattgcttaccctttattactgcatgaagtccaaaacatgataacagagtttaggtctgcctactaaagacaaatacttgaacttaataacaataataataccaataattcaaaagctgaagacacaaagtgttaatgatttataatcttttatgagttctcatctaacaattaaagactatttttctgcataatactaacacttttctcctcaagcartagactctttccatgtattggctcaaattcctaagaattttcctacatgacactgttaaattgtgagatatttaatacataattaccagaaccttgaatctgaagcatgcttctcagttcacagtttttcctgatgcctattgtcaagctca

SEQ ID NO: 527188 - DNA, 514 bp, Homo sapiens
acagaagtgattatgcagtgatgcataacaattgaattgctataggttacacctcctgtgtcaatctgcagaaccggtttgactgaattcagtgaaaagaacacctgaattcaggaagacaacacattttctgaagtgtcagcatgacaccaaggaccctgcctaaacgtttcaactttcttcctttcttttttttttaaaaacaaaacamaaacaaacaaacaaaaaacagctctattgttacccagacaaataagaatagtttggtagcatgccaggctaccgaggccagctcacttgctatcttaacataggtcagttagctccccatagacttccccctgtgtgtcagtacaataagtgtgcactgagggcctataagtgcctggcaagtgctagtgctggggctactgaaatggatacaataggattccagcctcagggtgctgaaatcattgggggcaagtgtgcctcgtgggggcagaaagtcctaatttcaaatcccaattctgcc

SEQ ID NO: 527189 - DNA, 614 bp, Homo sapiens
aacaaagcaggaggaagaaggataagctggcttgctgaggcttctggcattcctcttyctcttgtgctggatgcatctgtctgttcctcctgcccttggacatcagactccaggttcttcagcctttggactcttggacatacactagtggtttttcgagggttctcgggccttcgaccacagactgacgtctgcactgtcggcttccccacttttgaggcttttggtctcagactgagccattactggcttcttcttcctctgcttgcaggcagcctatcatgggactttgccttgtgaccgtgtgagctaattctcctcaataagctccctttcatatatacatgtatcctattagttgtgtccctctggagaaccctaacacatattgctaggcactattctcagtgcttttagtggactcattcatttaatcctgatagctaccccatgaggtaggtactattttattcccattttacagatgaagaaatggaggcacatcagggttatagaaatgctgagtgacacagctatttaacggtggagccagcagaacacatcggggagggttagctttgcctgggagtttgggagtccagtttcaatcaatt

SEQ ID NO: 527190 - DNA, 614 bp, Homo sapiens
aacaaagcaggaggaagaaggataagctggcttgctgaggcttctggcattcctcttcctcttgtgctggatgcatctgtctgttcctcctgcccttggacatcagactccaggttcttcagcctttggactcttggacatacactagtggtttttcgagggttctcrggccttcgaccacagactgacgtctgcactgtcggcttccccacttttgaggcttttggtctcagactgagccattactggcttcttcttcctctgcttgcaggcagcctatcatgggactttgccttgtgaccgtgtgagctaattctcctcaataagctccctttcatatatacatgtatcctattagttgtgtccctctggagaaccctaacacatattgctaggcactattctcagtgcttttagtggactcattcatttaatcctgatagctaccccatgaggtaggtactattttattcccattttacagatgaagaaatggaggcacatcagggttatagaaatgctgagtgacacagctatttaacggtggagccagcagaacacatcggggagggttagctttgcctgggagtttgggagtccagtttcaatcaatt

SEQ ID NO: 527191 - DNA, 595 bp, Homo sapiens
acacttccctatttcaccggacagtctctttgaagcttccacagttgcccattacattttgctaggaacagggagtcacttctctctggctgggaggagacctctgagtctagtcaggctccagggtccctggatgactggcttttgcctcagtggccttactcttcctatggcacactcactgtccgcctctactaacctacaccaccttcttagactgctgtttgcatcttcccaagacagagttttccctgtgaccacttgtgcctacggaygagtcttaagcctccaagtcttcccaagaaactgaccttaactcaaggatcactttgttacacaccaggctacttcaatcctctggccttgtttccattcttgatccctttgatctctgctgagccttgaggcttatgatcctgtttcagggcttcagtgattccccttgctcccagctctggggactggtctgcttatcctgtctccagtccccatggttggagctgcgaagcaagagcttctgggcaagatgccactagaaagcctgtctccctaagaacaacagaccgcttttctctctagttgttctgaaacttac

SEQ ID NO: 527192 - DNA, 595 bp, Homo sapiens
acacttccctatttcaccggacagtctctttgaagcttccacagttgcccattacattttgctaggaacagggagtcacttctctctggctgggaggagacctctgagtctagtcaggctccagggtccctggatgactggcttttgcctcagtggccttactcttcctatggcacactcactgtccgcctctactaacctacaccaccttcttagactgctgtttgcatcttcccaagacagagttttccctgtgaccacttgtgcctacggatgagtcttaagcctccaagtcttcccaagaaactgaccttaactcaaggatcactttgttacacaccaggctacttcaatcctctggccttgtttccattcttgatccctttgatctctgctgagccttraggcttatgatcctgtttcagggcttcagtgattccccttgctcccagctctggggactggtctgcttatcctgtctccagtccccatggttggagctgcgaagcaagagcttctgggcaagatgccactagaaagcctgtctccctaagaacaacagaccgcttttctctctagttgttctgaaacttac

SEQ ID NO: 527193 - DNA, 598 bp, Homo sapiens
tgggtgcagctcccagtgtgactgcagactccagcaatggaggcctgtccctgcacaggtggctctgtgctgtcggcagccctgctccctgggcgtcttccttcctctctctttccaggacctgttttctctccagattgaggaattggatccaattccctttcccagctgcaatttgcctctgagcccccagaacccctcctgaattggaatcgccctttcccccagcagcgctctccagccctctcctttcctctcagggcccagctccatcccttaaaagcactgtctgggctacattttaaaagtcactgttaaataaacttaggacccaccccctcagagagagagccgtggttacaggggagcagagctgaaggcaaacacttgtatccttgtattagacccaggctggggagcagcacaagctatttcttttggatgcgcctcctaggagtggaggaacttttctttgtaaagaaagagaggatctttataaacctyggacttttttcaaggaggctttatgggtggcaaggataaagctatagaggcaggaaaaagagttgctaactatatgccagtacagcatactttt

SEQ ID NO: 527194 - DNA, 613 bp, Homo sapiens
tccaaggcatataaccagagacagggtgaagctgttagaggccaagagaatgccttgggtaacaggggtggtcagaccaaaggcggctgatgggtacagaggaatggcctttggaattatggagttctggctctggcaccttttgtgtgctatttggcaaagttctgatgaactgaggactaggctggacttagtgacagggtcaaagccagatctgatccatcaggcacccacttgagtcaggccccatctcccagtgacctccaggattcagcttcccctgcctgtaagaggttggcttatgtaggctgggcttggcttggctaattccctcttcccccatgtgtctcttatcctcctgggagcagctatgttgtctcacaatgatggcagagatgcaagaggccaagcctaatctggcaagtgcttttatgcctttgaacacatcaaggcctccaaatttcccatggccaaagcaagtcacaaggccaaacccaaagtcaaggagtgggggaatgtactccacctctgtaatggagggagctaaaaaatcacattgcaaatggtgagaatacaatgagtagygacaatttgggcccatattctgatctac

SEQ ID NO: 527195 - DNA, 653 bp, Homo sapiens
caatttttgcttcatgtattttgagactgtgttattagagcatcaaagttaaaactcagaattatatatcttcctggtaaattgaactgtttcaaaaataattatgtagtaactctctttatctgtagtaatgtttttaaccttaaaggctttttccctccatccattgcatcagttttctcttggtctttgtctaataaatattttctattctcttactgttaacttttcgacttccttgtgctttatatgtgttttgtgtatagctggattttcaaaaatcccctctgaccatttgtcttttaactaaagaatttagaccttgtgaattatacaatcatttctattctttgaaatttgtcctaaaatactctagaaatagcaatatgcctacttaataaagcctagcattaaacaataattttgtgttcttcctgaaaagccaaggatcttaggacactatgactttaatcattccttccaattcatactctrtggtgtgtgtatattatgttaccttaattttttctcaagttattattgttattgtttgataaagccactgtccacttaggtttactcatatattgaccacttatttgtttaccactccttcttgtatatcagtccttctctttggaatatctttcagt

SEQ ID NO: 527196 - DNA, 593 bp, Homo sapiens
actctattagttcttgtttgtctttttaaaaaataatttcaatttttattttagattcgggggtacatgtgcaggtttgttacatgggtatattgcatgatgctgaggttggggtacggatcctgtcacccagtctgtaagcatagaacctaatgtgtaattttttctttgtcttaaaatgtctgcttacccttgttcttgaaagaacgctagtattcactggacatttgattatcagttgatagttccattctctctgcacatggaaatattgttctggtgtcttctgggtttcactgttgctgtcagtttattgtcattgctttgtatagcatccttctggctgctcttactgtcttttcttgttctttaatgttatgtagtttcacccttatgtgtctaggtgtgaatattttttgtattcatcctgtttaattaagtttcttgaatctatggattgtatctttcatcagcttgggaaaatgtttacccattaycttttcaaatgcttcttttttcttcttctagaagactgacaagatatgttcatctttctcactccatcatcagtatttcttaacctctctcatact

SEQ ID NO: 527197 - DNA, 594 bp, Homo sapiens
cagtaagtggcagaactgggatttaaaccccgtctttctagctccaaagcccatgcacttacatagctgggctgtgctgctggatggaacaagatctcagagtagatgaaaggggctgggcttcacctcagtgggatgagcctggaaggacgaggatcactctatctcctgaactaaagcaatascaggaagatctgagtttttggaaaattactctagcagcaatggagaagtttagaggtggatactggaaggagaaagaccagttaggaggatgaagcagttacctaagtaggaaaaatggggacatccaccaaggctttggaaatgtggaggggaaaacagatgagagagatttaggagatagagtgggacttggtagctgattggatgtgggagctgagggaggaagagaggtcttattcaatattgtatcccaagtgaccaacgtggttccaggcacatagtaggtactcggcctatatttattccatgaacagatgaatgatgacttagtgctttctggcttggtccagtggtagagttaaaaaggaaatacagatggaggaacatgctttgcaggggtcaggagag

SEQ ID NO: 527198 - DNA, 328 bp, Homo sapiens
aaaaatcaaacaacaaaaaagaattcttgtcataactctcagcaattgggcaaatcacccattttccctaagcctttcttacctcyaaatgttgctaatagtatgtatcctacccttcttctgtttaatgtggagattgaatggagttgtgaatgtgtaagcagtttatgaattgaaaagtgctagaagaaaaaaaatatcctcatgccagtagaacatgagctctatagggcaaggacttctgttttgttcactgcctaaaatggggcgtggcatgtagcaggtactcagtaacaggtgttgaatggatgacggaatgaatgactca

SEQ ID NO: 527199 - DNA, 404 bp, Homo sapiens
gttgaagtgggcggggtaaaggcgagagtgagcagtgtggactgtggcaagctgcagagcatctgctccctctatagaagccaaatgatactcagccctatctattgccacatacaggaatgagggctgagtgctggcagaccttattttttcatgaaaacttcaaaatctgcatttttaaaatgcaaaacatttgtttctacttggcaactaattttaaaattttaaaagaaaacaagtgactcttaaacaaattaagagtcaaagatccagtccacgtgcctaccatttgtgacttttgtctgaaacccatgaggaatacaaagtgatgtgtttccctctatctaaaaatgattacagagraactcatcaagaaaaggggcctgtgggcacaagaacactag

SEQ ID NO: 527200 - DNA, 527 bp, Homo sapiens
aacataccaagggcgttaatgctgctaaattttaagaggtcattaaccttttataacaaattctagtaatattttttacttttttccatttaataagtttaaagagatatacaaaaaatcaaaagtgtaggaccttgacatatatccaaagaatttctttttgtcatgctgtacattagatggaatgaaaagttttaataaatatatgtcatagtaattatttaatatcatatttttcccattcttgattttaaacaatccaatgtgtaatttgttttcctctaaatttatttgttttttgtttttatttatgaatctttgcattgtttccarggtactgtggccttgagttttaaaaatgcttctcatccctgatatggatttttaaaaatcatgttttttacctttcttcattatgatttttatgtatagaaaatatgcttttgatttttgcttactattattttatattatgtatagtcttcaaattaattttaatgatttgtttaaacaaatattgaacttca

SEQ ID NO: 527201 - DNA, 479 bp, Homo sapiens
ctggcacatgatcagcatctcatccawatctgtaattctctttgaatctctgcactcctagtccccagtaaaacgtgcttggcacatgttaggctctttggaggtaattgctggatgaatgaagaaataagcaactggaataggacaagggcagaggttctagaagccttaagttttgtatattccaggtttctgacttgttttgagataattttaggactcatcctcccactcccaacaagacttctgcttttttgtttttatttctgaggatggggaccccaagcctcttctctccttctgatctgtccaggcagatggatgcacaacccctcccatcatatgaaagcccctgctcccagaccccagaagtgaggccttcctggccctagatggttgaggggtagggcgctgcagcactgggagttcaggtttcagcaccaggtatatctggctttatatcctgactctccccttaa

SEQ ID NO: 527202 - DNA, 474 bp, Homo sapiens
gttaaagctaggtcagaccaggtcagcttctgctcagaacctgcccatgggtcctgataaactcagtagaagccaagttcttcccataatgtaaaggctgtgtgtgacctggtcccttgtctccaactttatctcttcctaccactcgtctccctcactctgctccaggagcactggttgcatctctgttctccagatatgccaggggaactctcaccttgagaggtcagaagtgctgctggctcagagcctgggaattccccagtaggccatggtgtggaatccacagtygctctagtgtgatcttttcctggagcctaggcaagcgaccactgtgccctaagcgctcagctctccagcagttgtcacagttgtctgattttttatctgtctcctccactagaccatgattgcccaagggcaagggctggtgctacccatgtgggtttttccaggccttgttcagaagaggta

SEQ ID NO: 527203 - DNA, 474 bp, Homo sapiens
gttaaagctaggtcagaccaggtcagcttctgctcagaacctgcccatgggtcctgataaactcagtagaagccaagttcttcccataatgtaaaggctgtgtgtgacctggtcccttgtctccaactttatctcttcctaccactcgtctccctcactctgctccaggagcactggttgcatctctgttctccagatatgccaggggaactctcaccttgagaggtcagaagtgctgctggctcagagcctgggaattccccagtaggccatggtgtggaatccacagtcgctctagtgtgatcttttcctggagcctaggcaagcgaccactgtgycctaagcgctcagctctccagcagttgtcacagttgtctgattttttatctgtctcctccactagaccatgattgcccaagggcaagggctggtgctacccatgtgggtttttccaggccttgttcagaagaggta

SEQ ID NO: 527204 - DNA, 558 bp, Homo sapiens
ctgtctgccagctgagatgcaaggaagccagttcaagccccaaaatctcaaaagcagggaagccgacagtgcagccttcagtctgtggccaaaggcctgagagcccctggcaaacgactggtgtaagtccaagagtccaaaaactaaagaasttggagtctgatgttcgaggcaggaagcatctagcacgggagaaagatgaaagctggaaaactccgcaagtcagcttcttccaacttctgcctgctttttctagccacactgacagctgattggatagtgcccacccacactgtgggttggtcttcctgatggtgggtcttcctctccgagtccgctgactcaaatgttaatttcttctggcaacacccagaaacacacaaataaacccacttaattgacacttaatattaactatcacagcgtggataaaaaaataggtgttaagagttagaaaagaacttagataatctttctagtccagtgtgactatttcttaaactaacatccacgaactatagatggacttctgtgaaccacttgaaaatataggtaaaa

SEQ ID NO: 527205 - DNA, 617 bp, Homo sapiens
caaggcttaatcgagtgtaaaataaggttaataatactgcccacttcataggatatttgtaagaattaaggaatgcatataaggtgcttagtactttgtaagtaaatttatgtaaggtctaaaagaggtgcttagtaaatgatagctattattaatcaggataacaataaaatatcaaagtcatcctttaagctcattgatgactttgagaacttatcatggtgatgaatttggtagtggcagctgtgaacacgagtgctgtgtgtcacatacattaattcattcatgctcccaacaacctgtgagatcagtactattgatatccccactttacagatgagaaagttgagacattgagggatttattatctcactcgaagcatcacagctagtaactgaagttgctgggatttaaactcagaaagttcwgtttctaattgagaactcttaaccactatattacactagttttgatgaaagccattgactctctttctagaaaaaaaagttcactagctcattcaaaatattttacatacaatttctgaatgctcacatgaaataaactctttgaaggatatcgatggatgctcaaagggcccataatcccagcccaa

SEQ ID NO: 527206 - DNA, 612 bp, Homo sapiens
tcactttatcaatgattatctttcttgtacaattatacttatttttttactaaggagtttctacaaatatgtgaataatagtataaataagcataacagtataagaaaaaaaaaatctatccctttgccctctgaaggagattttgttttagtggcagcagtctacagcagtaaatgtactttttattgttttagaaaaaaaaatcttacagtgtgaatcactcatattaattatgtcaaaaaatttttcctcaaagactggggagaatgtcctttctaaacagaatgaaggtgatatttccttctgacttatgtctgtctaaaggacagcctctaactgcccatggaccttggagctgtagcttgaaatagcagccagcacagaagaggtgcagagctgtgcctgccagccaagctgcctktcccaatgtgggcaacagagacagagggcagatggactggcctcagtgtgttttgcccaactgaaactcctttccactttgtaacctatttgaagcccatctttatttcattattttttaaacacagcacagggagaatcaaaatgagtttccaaagaggaatgacaaatgacagcacatatcataacca

SEQ ID NO: 527207 - DNA, 612 bp, Homo sapiens
tcactttatcaatgattatctttcttgtacaattatacttatttttttactaaggagtttctacaaatatgtgaataatagtataaataagcataacagtataagaaaaaaaaaatctatccctttgccctctgaaggagattttgttttagtggcagcagtctacagcagtaaatgtactttttattgttttagaaaaaaaaatcttacagtgtgaatcactcatattaattatgtcaaaaaatttttcctcaaagactggggagaatgtcctttctaaacagaatgaaggtgatatttccttctgacttatgtctgtctaaaggacagcctctaactgcccatggaccttggagctgtagcttgaaatagcagccagcacagaagaggtgcagagctgtgcctgccagccaagctgcctgtcccaatgtgggcaacagagacagagggcagatggactggcctcagtgtgttttgcccaactgaaactcctttccactttgtaacctatttgargcccatctttatttcattattttttaaacacagcacagggagaatcaaaatgagtttccaaagaggaatgacaaatgacagcacatatcataacca

SEQ ID NO: 527208 - DNA, 568 bp, Homo sapiens
tttttggaaataatttcctgcagttttccacacggtgtggtcaacatactagagtttttctgctattgggaaatgtgtagtgtcacagacctttattctcactgtctaagactacaggtggaaggggtaaagaagtaggctgcctgtgtcctggtcatatcattctccaaagtttatgacactacccaattccagaggacaccattcatactaaaaactttgttctagggtgccagtcacgttgtgaatgcaaccccccaaaatgacaatattgcgtgaaaccttactgttactgttctcaacaaatgtctgatgtttgcttcttttgttgtttcactattcatccaaaaacagagagctgagaggtggtcaacggggatggatgtgatgaatccagttggtttaaatcagtggttctcaagcagggaccattcagcccaggagatactgggtaatgtctggagatatttgggatgttctaactragggagtgctagtaacatctagtgactagaagccagagatgatgctaaacttcctaccatgcacacaataaccccctacaaca

SEQ ID NO: 527209 - DNA, 610 bp, Homo sapiens
agctgtaaaagagaatgaaatcctgtcatttgcagcaccataggtggaacttatattaggaggtaattatattaggaggtaattatattaagtgaaataagccaggcacagaaagacaaatatctcgttctcatttacatatgggaactaaaaatttgatctcatggaggtagagaaggatggttaccaggcgttgggaaaaataggggtgaggaagagataagagagattggataatggggacacaaatatagtcagatagaaagagtaagttaaagtgtttgataccatcatagggcgagtatagttaacaataatttattgtatatttcaaaatagttagaagatttggaacttttccaacacaagaaatgataaataattgaggcgacgaatatcctaaatgtcctattttgatcattactgattgtataaatgtatcaaaatattacakacaccccataaatatgtacaattataatgtattaataaaaaatgaagtgatatatttttgtcccaccaaaaataaatgtcattcaaagcaaatcttataacatagtataatacattaaagtacaacttggacaagaaagatgaaaatatttatcac

SEQ ID NO: 527210 - DNA, 462 bp, Homo sapiens
cccatagtcctagttactcaggacactgaggtgagaagattgcttgagcccaggagtttgaggttacagtgaactatgatcgcaccrctgcactctagcctgggcaatagagcgagactcagtctctaaaaacaatttttttaaaaaaagttagatcaaggggagacagtctttgtcagcagatattttaaaatttaataacatagataaggaatgtgatgctctttaaaaatagtgtgtttataactattaattgatttaattcaatttccaagccttctttgttcttcagcactaccatgatttgttaacctgagaatagtatgaaaactttcgtattatttaaagaagaatgctgaaagtttctaacaaaaaggagtataaaatataaaactcactaaacaaacaattcattttgagtaagtaattttaaaattgagcaaatggtaatcccaaggcctt

SEQ ID NO: 527211 - DNA, 462 bp, Homo sapiens
cccatagtcctagttactcaggacactgaggtgagaagattgcttgagcccaggagtttgaggttacagtgaactatgatcgcaccgctgcactctagcctgggcaatagagcgagactcagtctctaaaaacaatttttttaaaaaaagttagatcaaggggagacagtctttgtcagcagatattttaaaatttaataacatagataaggaatgtgatgctctttaaaaatagtgtgtttataactattaattgatttaattcaatttccaagccttctttgttcttcagcactaccatgatttgttaacctgagaatagkatgaaaactttcgtattatttaaagaagaatgctgaaagtttctaacaaaaaggagtataaaatataaaactcactaaacaaacaattcattttgagtaagtaattttaaaattgagcaaatggtaatcccaaggcctt

SEQ ID NO: 527212 - DNA, 462 bp, Homo sapiens
cccatagtcctagttactcaggacactgaggtgagaagattgcttgagcccaggagtttgaggttacagtgaactatgatcgcaccgctgcactctagcctgggcaatagagcgagactcagtctctaaaaacaatttttttaaaaaaagttagatcaaggggagacagtctttgtcagcagatattttaaaatttaataacatagataaggaatgtgatgctctttaaaaatagtgtgtttataactattaattgatttaattcaatttccaagccttctttgttcttcagcactaccatgatttgttaacctgagaatagtatgaaaactttcgtattatttaaagaagaatgctgaaagtttctaacaaaaaggagtataaaatataaaactcactaaacaaacaattcattttgagtaagtaattttaaaattgagsaaatggtaatcccaaggcctt

SEQ ID NO: 527213 - DNA, 516 bp, Homo sapiens
attttttttagacagggcctcacattctcacagaggctggagtgcagtggtgccatcgtagctaactgcagacaacatcctgggcttaagcaaatctcccacctcagcctctcaagtatttgggaccacaggcacacaccaccatgcctgatttgtttttttaatgtttttgtagaataggatctttctatgttggctaggctggtctcaaactctcggcctcaagctatcttctcacctctgtcttaaaagtgttgcaattactggcatgaggtgccaccctagtccttgttaagaatttttgtgtattttttatgatgygtacttatctttagtttcattttctgtcatgtcttttgtctagatttggtctcagaataatactgacctcctaaaataagttggaaagtagtcccccctcttcaaaacttttgaagaccaattgtgtattgtttattctttaaatattttataaaatttacacatgaaactacctgaacctgggcttatttgaag

SEQ ID NO: 527214 - DNA, 592 bp, Homo sapiens
atggactaaattaaagcaattatttctatagtgcttaaggaaatgcttagtacacaggatgcactcaataaatggcagacagcacttcccaagaaggttagataactcaaaatttctaaaaagtttggtgaaacatacaactggcattctgggagattaactgttcatgctctaacacctcaatttaacaaggaatggtgacaaaatcatcctgtaactacactaaaataactacagtccaagaaagaatgtccccctgcctgagtatgggctcagtgctgcagtgactaagcttaagacagtaccacattcactctgctgtagcttgaaacaaagcagggaggcaggattggaaagggggaagaggagggagaggagaagagaggcaatgcagtacagcagaagaacacaggatttaggtccaaacactagcagataagcaggtgagcygagtatttaaagagcatggcccccacagctaacatcatactcaatggtgaaaaactgaaagcttttgctccaagatgaggaacaaagcaaggatgcccactcttatcactgctattcgacatagtattggaagtcccagcca

SEQ ID NO: 527215 - DNA, 658 bp, Homo sapiens
gctgaaataggccacagacctcattgtctgtctgtacgaaactggggcaaaaatgaactcagaaagacaagtaataacctggtagcaatccatggaaagttaaccttgctgacattcctcttcacttccctctgttggatgttcctggaatttgcatttgtggaaagttgcatacttgcagtgaacaagttccactggtcctgttgtagtggattccacctaaccttttattcctctcatccctgtccagctaacgttctctcactgttcagcatatgtamgtcaaagacagaagtgcatgaagacatgtgtaaagatgcaaaattcccccaggaaactcattatctagagcagccagggccaatcctctcctcctcccagggattcctagcaatatctggagacatctgcatcagtcatgacttgggggaggggggtactattggcatctaccgggcagaggccaggaatgctgctgcacacgctacaatgcacaggccagctctccacaacagagaagtatccggtccaaaatgtcagtggtgctaaggttgagaaatcctgacctagagggtgagatgagacatataatacagggttaagtgtggcagagctgtaatagagctaaaactggagtgctatcagattgataacattt

SEQ ID NO: 527216 - DNA, 658 bp, Homo sapiens
gctgaaataggccacagacctcattgtctgtctgtacgaaactggggcaaaaatgaactcagaaagacaagtaataacctggtagcaatccatggaaagttaaccttgctgacattcctcttcacttccctctgttggatgttcctggaatttgcatttgtggaaagttgcatacttgcagtgaacaagttccactggtcctgttgtagtggattccacctaaccttttattcctctcatccctgtccagctaacgttctctcactgttcagcatatgtacgtcaaagacagaagtgcatgaagacatgtgtaaagatgcaaaattcccccaggaaactcattatctagagcagccagggccaatcctctcctcctcccagggattcctagcaatatctggagacatctgcatcagtcatgacttgggggaggggggtactattggcatctacygggcagaggccaggaatgctgctgcacacgctacaatgcacaggccagctctccacaacagagaagtatccggtccaaaatgtcagtggtgctaaggttgagaaatcctgacctagagggtgagatgagacatataatacagggttaagtgtggcagagctgtaatagagctaaaactggagtgctatcagattgataacattt

SEQ ID NO: 527217 - DNA, 603 bp, Homo sapiens
taaaaggggagaccaggggcttgccttaaagctgcatttataaagcaaatacactgcttttatttagaccgcatgtttgcttggaaggcctttggaccaaatagtgcacttatggaggggctaatgtgccctccaacccagccctgccacctgccaagccatcccttgataactggtcaatctgcacatgggtgagtcaaggccagggctagtagaagctcmagcttaatgtcccagggaacaatgtagacacaggactagctgatgagtaattagaggggttgatgaacatcctcaggaaggggtggggcaggctgtgctgggcaggttgctttccacagtgacacccagtctggcccagcctgaggtgtacaaatgattcacatctgaagaggggtgacagaatcatgggagtagggcagtatcaggggtcatgggcaagggaggagttcaaggttgtagatacacaggacaagaggccagccaaggaagaggaataaagaggaggacataagactgggggtgatgaagagaggggtgggtataacccaggatgtcagaaccttcccctcaatggtactaaatcccctcccccaccctcca

SEQ ID NO: 527218 - DNA, 603 bp, Homo sapiens
taaaaggggagaccaggggcttgccttaaagctgcatttataaagcaaatacactgcttttatttagaccgcatgtttgcttggaaggcctttggaccaaatagtgcacttatggaggggctaatgtgccctccaacccagccctgccacctgccaagccatcccttgataactggtcaatctgcacatgggtgagtcaaggccagggctagtagaagctccagcttaatgtcccagggaacaatgtagacacaggactagctgatragtaattagaggggttgatgaacatcctcaggaaggggtggggcaggctgtgctgggcaggttgctttccacagtgacacccagtctggcccagcctgaggtgtacaaatgattcacatctgaagaggggtgacagaatcatgggagtagggcagtatcaggggtcatgggcaagggaggagttcaaggttgtagatacacaggacaagaggccagccaaggaagaggaataaagaggaggacataagactgggggtgatgaagagaggggtgggtataacccaggatgtcagaaccttcccctcaatggtactaaatcccctcccccaccctcca

SEQ ID NO: 527219 - DNA, 603 bp, Homo sapiens
taaaaggggagaccaggggcttgccttaaagctgcatttataaagcaaatacactgcttttatttagaccgcatgtttgcttggaaggcctttggaccaaatagtgcacttatggaggggctaatgtgccctccaacccagccctgccacctgccaagccatcccttgataactggtcaatctgcacatgggtgagtcaaggccagggctagtagaagctccagcttaatgtcccagggaacaatgtagacacaggactagctgatgagtaattagaggggttgatgaacatcctcaggaaggggtggggcaggctgtgctgggcaggttgctttccacagtgacacccagtctggcccagcctgaggtgtacaaatgattcacatctgargaggggtgacagaatcatgggagtagggcagtatcaggggtcatgggcaagggaggagttcaaggttgtagatacacaggacaagaggccagccaaggaagaggaataaagaggaggacataagactgggggtgatgaagagaggggtgggtataacccaggatgtcagaaccttcccctcaatggtactaaatcccctcccccaccctcca

SEQ ID NO: 527220 - DNA, 575 bp, Homo sapiens
aagctgcatttataaagcaaatacactgcttttatttagaccgcatgtttgcttggaaggcctttggaccaaatagtgcacttatggaggggctaatgtgccctccaacccagccctgccacctgccaagccatcccttgataactggtcaatctgcacatgggtgagtcaaggccagggctagtagaagctccagcttaatgtcccagggaacaatgtagacacaggactagctgatgagtaattagaggggttgatgaacatcctcaggaaggggtggggcaggctgtgctgggcaggttgctttccacagtgacacccagtctggcccagcctgaggtgtacaaatgattcacatctgaagaggggtgacagaatcatgggagtagggcagtatcaggggtcatgggcaagggaggagttcaaggttgtagatacacaggacaagaggccagccaaggaagaggaataaagaggaggacayaagactgggggtgatgaagagaggggtgggtataacccaggatgtcagaaccttcccctcaatggtactaaatcccctcccccaccctcca

SEQ ID NO: 527221 - DNA, 512 bp, Homo sapiens
agtggggctaggagctctacattgtagggctgttgcaaagcttgtcattacaaagccacattttgtgcaggcgttattgtcagatgtccttgggtaacagggcaggcaccagagtcactctgactggagactggatgccagtgctgttgtagctgacgccactgaccatgtcacgtgccctctgagcctcagtttcctcatccataagatggatatcataatccctaccctacattggttatgatgakatttaataaggcagcagatatgagagcccagggaacacaaatccctgtccctccataaaatataatttattatgtattttatctgttctagtttccaaaacttccaaggacatccaacacccacaggtaactctcattccagagttttgctgaggctaagattgaatcagaaaggtatctttctccctctcttttcccaactcagtgagagcaggatgaggagctgaaataaccgcccaggcactgctgggatagaaaccacag

SEQ ID NO: 527222 - DNA, 602 bp, Homo sapiens
aaggtagcctaaattttatgattatatggaagtgcacattttcctaaggagaagatccatagttttcaccagattctcagagagatcagtattaatcagggtaggctagtgttatgctatagtaacaaacagccccaaatctcactggctaggagtttctctctatttctttatctctcacaaactgcactgaaaatcaggtgattctccaacgctgctgtcttccatgtgttaacccagttatcygggttgctttgatcttatgtcccaactgtgtcaacatgctgcctccatgatctctaacaaagaataagggaaagctggaagatcctgcaggggcttttcactgcttcagctcagaagtttcacatgtcaagtctactcactgtccattagtcagaactagtcataatgtctgcctaaccacaagggaagctggaaagtataggctgccatgtacccaggaaggagaggagagctggatattgatgaacactggatatgactgggacctcctctccttaaaaaaataagttaggaacactaaggttagagtagtgagtcccaaagtctgaatcatagactaccttaatctacattat

SEQ ID NO: 527223 - DNA, 447 bp, Homo sapiens
ctgtttgtactgcccagatgagccactcaccctgcttgctccagctgcaaacctcctactcaccttcaaacccagctcagatgtcagctttcctaagatgctgtaacagatgtggttggtgtccccctccccttggcactctgagttctgcagttacagacagttctgagcatgctgacagcttcccacctcaaatgcctgyatctctttctctttctctggcacctggagaacttgcttgtctgtgtggcaggtgtcagctaggagtacaggggacaggaggagttaatgcctcgagaggtggtgaacagtgcccactaccccttgagtcatgagagtgggctctgggggcatcttccacgcaggcctcagaggctccccagcaggactgagccccgaagctgccgtcgctgtaacccactgcctagtgcttagttcatgcttcac

SEQ ID NO: 527224 - DNA, 667 bp, Homo sapiens
atgcacctcactccctcacagggaaagcagtgctctgagtatcgcatcacacgaaaggaacaaaagtgaaacacacaaaccaacctcaatttacacttggttactcaaaagaacaagagtcaatggtacatgtcctagcgttttggaagaggaaaacaggaacccatcaaaccaaccaatcaaccaaacaaagaaaaaattccacaatgaaagaaggtgttttgtcttttttgcattttggtgtataagccatcaatattcagcaaaatgatttctttctttaaaaaaaatgtggaggaaagtagaaatttaccaaggttgctggcccagggcattaaatttacagatttttttaatgggaaaaacacacagaaaaagctgcctcaggtgttttttacctcagcaccttgctcttgtgtttcccttagagattttgtaaaactgatagttggagcattttttaattttttttaataaaaattagttggaaaaaaataagatatcaactgccagcctggagaaggtgacagtccaartgtgcaacagctgttctgaattgtcttctgctagccaagaacctatatggccttcttttggacaaaccttgaaaatgtttatttaaaaaaaaaaagatgacaaagaaaaacagacagagataatattggag

SEQ ID NO: 527225 - DNA, 84 bp, Homo sapiens
gggtccaatgtgctgagagtgggctcaggttgccayaggcatggctggagactaggaatagagccttgctcactgacccatttc

SEQ ID NO: 527226 - DNA, 434 bp, Homo sapiens
gtccttgggacagcaaggcccccagcccgtaggaaagacctagcctcctctccagcacttgtagagggagtcggatgcacgtctcttaaccacaggaagacagagaccctgaggcgggagcttcccttgctgcttctcttggcacagcgggtccagggggctggttcagggcccaggactcctcgctcctcctggagggcctgggtcgcgtggcctaggagctggccacatgggcatctccmgcactgctcctcagggaacgggaggcattatcctgcaggaccccctcttacccatgagagacaccgggaaatgctcctgcggaagctggagctctgcgcgcttgaccacttcggggtgaagcttccgtccgcccatccttccttcgaggggccttggggagaggagaaatgctccaggacgatgccctttgc

SEQ ID NO: 527227 - DNA, 434 bp, Homo sapiens
gtccttgggacagcaaggcccccagcccgtaggaaagacctagcctcctctccagcacttgtagagggagtcggatgcacgtctcttaaccacaggaagacagagaccctgaggcgggagcttcccttgctgcttctcttggcacagcgggtccagggggctggttcagggcccaggactcctcgctcctcctggagggcctgggtcgcgtggcctaggagctggccacatgggcatctcccgcactgctcctcagggaacgggaggcattatcctgcaggacccmctcttacccatgagagacaccgggaaatgctcctgcggaagctggagctctgcgcgcttgaccacttcggggtgaagcttccgtccgcccatccttccttcgaggggccttggggagaggagaaatgctccaggacgatgccctttgc

SEQ ID NO: 527228 - DNA, 132 bp, Homo sapiens
tatgtatgtaaacaggaagaggcatgtttctgaagcccagggccttgattcatatagcagaggttgaaaccttagtaggcttactgggcaggagccaaaaacatgatgsaggatatgtagctgctgctagtg

SEQ ID NO: 527229 - DNA, 633 bp, Homo sapiens
tcactaccattagaattgatttacattcataatcacaaggtagcctatagaacatattgaaggagtgatctctctttaaggagcaaacttctatatataattttcttttctgttccagaaaatttctttacgggtggaagccaatttacatggattaaccctctatgacactgcaccttgccctattaacaatgaacgaacacggctactttccagagatatttgatgaaaggataaaatatttctgtaatgattatgattctcagggattggggaaaggttcacagaagttgcttattcttctctgaaatttttcaaccacttaatcaaggctgacagtaaccctgatgaatgctgataatcaggaaacatgaaagaagccatttgatagattattctaaaggatatcatcaagaagactattaaaacacctatgcctatacttttttatctcagaaaataaagtcraaagactatgatatcatagttttttataccttatttaagagaaacaacctgacgtgcaccaatcagtctgcacatcccaacccttcacattttataaattattgtagatcatgttttgttaggagcacttttatgagagacattttccatgactaaataatcagc

SEQ ID NO: 527230 - DNA, 482 bp, Homo sapiens
gctgcatccacaactctttgttccttactggttgcttaagaagtccactacagtcctcaaggaatatytggttagacttaacaacttccatttgaatgaatagtagaataatccgacacatatttttttaaaggtttattcccataagtccgcatttctagaaaagtgtttttcttttaaaaggagcataattatgatcaattatttagtgataacatactctcaagtataactagaaagtaaaacaagtaacactccagtgttgaaagaagaaaatactgtagcaatttggctattatcatgttaaaatcactttcattacttacataaaactgccgcaatatttagcattgccccaaataagcatttttctggagctactgtaccagtgtcactgaaagaaaaaaaggaaggtatgtggatttctcatactagataaacacatatatttcttctaagggataagaatatcaggagttaat

SEQ ID NO: 527231 - DNA, 482 bp, Homo sapiens
gctgcatccacaactctttgttccttactggttgcttaagaagtccactacagtcctcaaggaatatctggttagacttaacaacttccatttgaatgaatagtagaataatccgacacatwtttttttaaaggtttattcccataagtccgcatttctagaaaagtgtttttcttttaaaaggagcataattatgatcaattatttagtgataacatactctcaagtataactagaaagtaaaacaagtaacactccagtgttgaaagaagaaaatactgtagcaatttggctattatcatgttaaaatcactttcattacttacataaaactgccgcaatatttagcattgccccaaataagcatttttctggagctactgtaccagtgtcactgaaagaaaaaaaggaaggtatgtggatttctcatactagataaacacatatatttcttctaagggataagaatatcaggagttaat

SEQ ID NO: 527232 - DNA, 561 bp, Homo sapiens
atgcagtacactttgggaaggcgagggccagggccggcaggctggggagggacagagaggctccttcagtgctgcagcctccccaagggcttctcccaactgggtatgaaggagcacaaggctgagggctggggagggggatttatggggaatggtgggtgcagcagggaggtcagaatggccaccagcatcaaaagaagaaatccttgagggtactgggtgagttggtgggcaagcgctgccacctkcagtgccagcacaatctggggtcagcaaagaggggtagcaagtgtgccttagagatgaagaaatggctaaggaggaaagcactgtaaaggtgacttggggaatcctcctgagacctaagatttgaaactaattgtccaagtcccagcctctgctctgggaggctccaggggccaaggtaagcaggcctggatagagcaggcagggagaggagttagttgtattgaaagccagagagagcacagaccagagcctgaccagcagggggagaaggggcatcaggtcctcgtgcttgtggggctgcagagggagcac

SEQ ID NO: 527233 - DNA, 374 bp, Homo sapiens
attattttagagagatagtcaacaaccgcctgaccatcacctcatggtcacctggcattcctggtttgggggcccactcctgccctgctcatgtctgcgtaactacctactgtaacatcatgttttatttaaagagatagaygcacaaagtgtatatatgtgtaggtgcccacatgtctatttaactgtatgtactaaattaacatctgtccccaaactgatctctgctgaacagagccaatcaaacttggttcccttgttgagcttgcactcttggtattacatacggactaggggagagggccagcctcagcactgatgttacagtctcaccaatgcaccacaaagtagcagtctctcactgtgagttatca

SEQ ID NO: 527234 - DNA, 374 bp, Homo sapiens
attattttagagagatagtcaacaaccgcctgaccatcacctcatggtcacctggcattcctggtttgggggcccactcctgccctgctcatgtctgcgtaactacctactgtaacatcatgttttatttaaagagatagatgcacaaagtgtatatatgtgtaggtgcccacatgtctatttaactgtatgtactaaattaacatctgtccccaaactgatctctgctgaacagagccaatcaaacttggttcccttgttgagcttgcactcttggtattacatacggactaggggasagggccagcctcagcactgatgttacagtctcaccaatgcaccacaaagtagcagtctctcactgtgagttatca

SEQ ID NO: 527235 - DNA, 561 bp, Homo sapiens
gcagtggtagcaacagcagcagcaggagcagcgtgactactagaaagagaaggagagtggatgcttggggacccacgatttcagcagtaactttgcagccatggcacctgtcatggtgggagatgctatcctggcattagtggtgtttgaaagggagcctgggaacaaggtggacctgacagaactatgccagggaaagaagggtgtgctgtttagaatccctggggctttcaccccaactgtcaaagacccacctgcttgggtttggggagtaggctggggttctgaaggtaaaggggggccagatccatgtttaagtgccactgtctttgtgtctttgtgactggtgagtggggacaggccacagtgcagaaggccaaggccagctcatgggtggcagccctggggcctctgggaaggagactgatttgttactagatgatttgctgttgccactctttgaggatgagagcttgagaggttcttcctggtgatagaggatggtgtggtgaaggccttgcatgaacctgaccayacaggcctcacctgcagcctggtccc

SEQ ID NO: 527236 - DNA, 602 bp, Homo sapiens
ccagtcagagttgaggcaccaagaagcagagccacaccagacccagagggtgcagacagcagagtatttctgctctgccaggctcagtgagtcacgcatttggcctcctccactaagatcatgtattctaccagatttcgattcatggagtccaaagatgaatgaatcaaacactgcttaagggcaatgtatacattgggattcctccccacctcttccctaaggtgttagacattkttcacagtctagacagcaacagaaaaagacatcaatgtttagatgagattaattaatctatcatgacccaaagcacacttcagtgcctactcaagatggttcatctctccacagtttatactccacttaggaactctcccatcatttccaaaaacaattaaaacaattaaaatgttctatcagtttaaggtctggaaatgttgcaggcctaatagagtatgacaccggccagcgaattgccaagaatcccttcttcttcgtcatctgttaaataatttcatccagtaatcagctttaaagacattcttgttcagcataggacagtagaaacatcaaagaccttaattttctttttctgtacccag

SEQ ID NO: 527237 - DNA, 602 bp, Homo sapiens
ccagtcagagttgaggcaccaagaagcagagccacaccagacccagagggtgcagacagcagagtatttctgctctgccaggctcagtgagtcacgcatttggcctcctccactaagatcatgtattctaccagatttcgattcatggagtccaaagatgaatgaatcaaacactgcttaagggcaatgtatacattgggattcctccccacctcttccctaaggtgttagacattgttcacagtctagacagcaacagaaaaagacatcaatgtttagatgagattaattaatctatcatgacccaaagcacacttcagtgcctactcaagatggttcatctctccacagtttatactccacttaggaactctcccatcatttccaaaaacaattaaaacaattaaaatgttctatcagtttaaggtctggaaatgttgyaggcctaatagagtatgacaccggccagcgaattgccaagaatcccttcttcttcgtcatctgttaaataatttcatccagtaatcagctttaaagacattcttgttcagcataggacagtagaaacatcaaagaccttaattttctttttctgtacccag

SEQ ID NO: 527238 - DNA, 248 bp, Homo sapiens
tgccttcctgagctgcaaaaatgtgagcgccccgaggtacctcagacaggcccccgcccctagcagacagctcygtttgacctgcatcattcactaacctgtctcggggagcctgtctacatgcacacatctgtgtatgttggccaatgtaaatgctgcttcttgtgagtgtctgtggtatgcatatgtgtccttgtgtgtggatgcacacgtgctgcttgtgtctctacaagcagatacaaggatgc

SEQ ID NO: 527239 - DNA, 602 bp, Homo sapiens
ggaataggggttttggggatagcaggggctggccacccagactgtggaatgaaaagagggaaggtctgagagaaccacagagttggaggagaacttcggtcaatgcggtcccaatagaagactctcaggcccctctgtgttcccgagccctctatcctccctccayacaggtactgacaggggaagactggacctcaatgatgtacaatgggatcatggcctacggcgggccgtcctaccctggcatgcttgtgtgcatttacttcatcatccttttcgtctgtggcaactgtatcctctcgggagcagggtgcagaaaagagcttagggagggggtgggggaaagggcttaaaatgggggtcaagggtgtccagtttctaggtagccaggccctctggctggaggggagctcccaggcccatgcggtagggggtaggacatagcaaatgcaggtacagctgtaggataattctttgtgccaaaaagattagagactcacagggttgtttggctacagctgggaggaattaaaagcccagtaaggtcagtgagcctagagcagtggggaggaaggacagagctttgctgaggaacatgaaga

SEQ ID NO: 527240 - DNA, 504 bp, Homo sapiens
gtagtgagtaggaggcagggtagggttatggtaaggccctggggccagaaatcataagttccggcttctagtttgaacttactcctgtcaaagcactagtccattgggcctcagtttccccctgaaaagatttgtttagaagagcagtttttaaactttcaggtcttgtgtccttttacattcttaaaaattattgaggttaggccaggcatgttggctcacgcctgtaatcccagcactttgggaggctgaggcaggcggatcacctgaggtcgggagttcaagaccagcctgaccaatatggagaaaccctgtctctactaaaaatacaaaattagccaggcatggtggcacatgcctgtaatcccaggtactcaggaggctgaggcaagagaatcgcttgaacccaggaggcagaggttgtggtgagccgagatcgcrccattgcacttcagcctaggcaacaagagtgaaaatctgtctcaaaaaaaaaatattgaggtt

SEQ ID NO: 527241 - DNA, 592 bp, Homo sapiens
ttctgccatttatagcatcatttgtactcgctgttttcctaatgattttctttatatatgctcactccccgrcccctttttacttgtcgttagcattaatatccacaaaattgtgagatgtatgtgccaattatgtttttttctaatacacattaacgtaattacataactactacagtaaaaagtgtacttctgggtaccacctaaaatcgcctcgcgtgtgtacaccgtgctttgcgagaccacgggctagtttaatgtgctctattcggagaggatatctggagaggctgaggctcagagaggaggcctgccctgcccgaggtcacacagcgaatagcagcggagccagggtcaggggtcccgactcccagcctggagccttggcctccgtgtccacctggaggcaggaatcagaggagcccccaaaccttcaagagctcaggcgccctcagagccagcactgcctgcagccttggctccatgctcagttccacgcctcagggcaggggagccggaggagaagtcgccccacctggaagtgtggagttggacctcaacaagggtgggatctagctgaggggtcagggtt

SEQ ID NO: 527242 - DNA, 592 bp, Homo sapiens
ttctgccatttatagcatcatttgtactcgctgttttcctaatgattttctttatatatgctcactccccgacccctttttacttgtcgttagcattaatatccacaaaattgtgagatgtatgtgccaattatgtttttttctaatacacattaacgtaattacataactactacagtaaaaagtgtacttctgggtaccacctaaaatcgcctcgcrtgtgtacaccgtgctttgcgagaccacgggctagtttaatgtgctctattcggagaggatatctggagaggctgaggctcagagaggaggcctgccctgcccgaggtcacacagcgaatagcagcggagccagggtcaggggtcccgactcccagcctggagccttggcctccgtgtccacctggaggcaggaatcagaggagcccccaaaccttcaagagctcaggcgccctcagagccagcactgcctgcagccttggctccatgctcagttccacgcctcagggcaggggagccggaggagaagtcgccccacctggaagtgtggagttggacctcaacaagggtgggatctagctgaggggtcagggtt

SEQ ID NO: 527243 - DNA, 461 bp, Homo sapiens
ctgccatgatttcataatcttttgtcataaccttccacatcatccctccatcatccggtctcagctcacacagagggctaggaggtgaaaaagtccacttcctgcttctctgctggatgaccccttctccatgcccaactgagaactcttcttacaaatctccatagaagggggttcttcatgtttcttgtcaatgtttctcagtgttgacaacttataaggccggggtatttggtgaaatggaatttctgggggcaggctttcagggatttgttggggcatatataaggatttaaagtattcagataatctagctcaggggtctgcaaactttcctgtaaaggcctagacagtgaatattttaggcaggttatacaagttctgtggcaacgactcagttctgctgttggaacacaaaagcagccacaggtrctatgtaaataaatgagtgtggctttttc

SEQ ID NO: 527244 - DNA, 418 bp, Homo sapiens
agtgaatattttaggcaggttatacaagttctgtggcaacgactcagttctgctgttggaacacaaaagcagccacaggtactatgtaaataaatgagtgtggctttttccaataaattgttatttacaaaactaggctgtagaccaggttaggcttgtgggccatagttttgctggcctctgatagaagtggtttaaggttggggcctgggtgggcaccccaggggagagcagtgggtaatttctgtgtaatgccattggctgcctaaggtgcaccctggacctgcacaaggatggggtacctccctcacccatcctaccagaggtcatcagtggacagagggcgttggggagcactamccaagggtcaagattgctcttctgtaatggagctgtgggatgctgtgtcaagagggtg

SEQ ID NO: 527245 - DNA, 547 bp, Homo sapiens
atctgccctatggcacaagaataacaattggaaaaacttggcttccctccgagagcaatgccagctttgcccaggccagccatctctggcataactctgttcatttgagctttcctcatgtgtgatcatccttgtatgaccccgaggccagaatccccacttattaaagctaggaaagacatttttgaggctctagttagtttgttctttcatagtgaaagaaccrtttgtgggctcaaagggggatgtggcaataggttatttcgggctttcgaaaggcctgttttccatctggaatggatgtattacctaataggccatcctttataggaactgaacaaagactcgctgacacaatctcaacggttggccgttcttgggacagctagacaattattttgcttctgggtacaacaagcacaaaagaaggggccaaggtacacgcagaccttagtttgagttggagaaggcctgagggataaaccatcaggaaagctcatgagttttcagaagcttctggggccatcaggttgataccagcgtggat

SEQ ID NO: 527246 - DNA, 585 bp, Homo sapiens
cttgttattaagatgggaaatggccaggtacagtggctcatgcctgtaatcccagcactttgggaggccaagacaggagaatcacttgaagccaggtgtttgagaccagactgracaacaaagtgagacccccatctctacaaaaaaaattttttaattagccaggcaaaatagcatgtgtccgtagtcccagctacttgggaagctcaagtggaaggaacgcctgaccccaggatttggatgctgcagtgagccatgattgtgccactgcattccagcctggatgacagagcgagaccctcatctcttttggaaaaaaaaaaaaaaaaaaaaaaagcaggggacatataataaatctgtttttaatttaactgcttctttttaacttaaaacacatgttaagaaaaccaagaaataatctttgtattacttagtcccctatttttttttttttaattcttcctcaagttgacttttttctctttttccccaaggaagcatagtattattttctgtgattcttttccttctgttctgtattcctcagttggcattacatgtatctctgctggcaaattcaaatta

SEQ ID NO: 527247 - DNA, 585 bp, Homo sapiens
cttgttattaagatgggaaatggccaggtacagtggctcatgcctgtaatcccagcactttgggaggccaagacaggagaatcacttgaagccaggtgtttgagaccagactggacaacaaagtgagacccccatctctacaaaaaaaattttttaattagccaggcaaaatagcatgtgtcygtagtcccagctacttgggaagctcaagtggaaggaacgcctgaccccaggatttggatgctgcagtgagccatgattgtgccactgcattccagcctggatgacagagcgagaccctcatctcttttggaaaaaaaaaaaaaaaaaaaaaaagcaggggacatataataaatctgtttttaatttaactgcttctttttaacttaaaacacatgttaagaaaaccaagaaataatctttgtattacttagtcccctatttttttttttttaattcttcctcaagttgacttttttctctttttccccaaggaagcatagtattattttctgtgattcttttccttctgttctgtattcctcagttggcattacatgtatctctgctggcaaattcaaatta

SEQ ID NO: 527248 - DNA, 585 bp, Homo sapiens
cttgttattaagatgggaaatggccaggtacagtggctcatgcctgtaatcccagcactttgggaggccaagacaggagaatcacttgaagccaggtgtttgagaccagactggacaacaaagtgagacccccatctctacaaaaaaaattttttaattagccaggcaaaatagcatgtgtccgtagtcccagctacttgggaagctcaagtggaaggaacgcctgaccccaggatttggatgctgcagtgagccatgattgtgccactgcattccagcctggatgacagagcgagaccctcatctcttttggaaaaaaaaaaaaaaaaaaaaaaagcaggggacatataataaatctgtttttaatttaactgcttctttttaacttaaaacacatgttaagaaaamcaagaaataatctttgtattacttagtcccctatttttttttttttaattcttcctcaagttgacttttttctctttttccccaaggaagcatagtattattttctgtgattcttttccttctgttctgtattcctcagttggcattacatgtatctctgctggcaaattcaaatta

SEQ ID NO: 527249 - DNA, 460 bp, Homo sapiens
accttgcctggcaaattttgtatttttagcagagacagggtttctctatgtgggtcaggctggtcttgaactcctgacctcaggtgatccacccgcctcggcctcccaaagtgctgggattacaagcataagcaaatgcgcctggccttatctcaygtttttagaacagattttgcatattttggtggaccctcagccagagactctccagactttgggtttatttgggtttatcttcattaagcttcacatttttcacttgcaaacacttacagtattgatacccttgaaacactcagtttcaaaaagatggttataggctgtaaccaaatggtccttgttagctgtcttgcctgcatttttaatgtttcctaataatttatgttctgcaagaaacgaatctgaattgtggtcctgcagaaacttgataaagtccctcttgggcaggtgcttactgcgc

SEQ ID NO: 527250 - DNA, 648 bp, Homo sapiens
tgggctataggtccagggactcaggacctggataaccaccaccacagccccactcatagtcctgtgtccgtggcagtgaaggtaactggccagaaaaggcaagcaagcacgctgtccatgccataaagttctgggaggcggtggcctgaagccaaggtgtgcctggtctgtgtcccaggctggccaggtgtgagaggggtcactggaatacatggtcaggtgttcaccgcatcacctcccacctttgactttggcaagcatgtggcccaagaagctggtcctgcctgctcctggcctcgtgctggcccttggaatgtgggccccccagacttcagtgagcttcttcccacgtgatcagaagccaaccataattgcttctctggatttccatagacctcggagctccctggatgtgtytgcagccttctccagccctcctgagagctccgctgcatggtcctgtttggctcacctggcgcctatgatccttcctcaggtgtatgcatgtgtgtttgcgcgcgcgcgtgtgtgtgcatgtgtgtgcgtttgtgtatgtgtgtgcatgtttgtgcatgtgcaccccacaaggcaggagctcagctcccacccaggatgtccctaccttggtcctcacaaggcattcctcat

SEQ ID NO: 527251 - DNA, 648 bp, Homo sapiens
taatttaatataggctctaacttcccaaatctaagttatttcatatagtaagcacaaattgagctgattgcttgacacttggcatttctgcaacagcctgactggtttattgtcacttgtcttgggggaaccacttcttccccacctctagacattagtggagtttracatctgagtgcggtcatggcaagagtgactgtgggcataccctgaggtgtgctccctgaagagcaacatcagaatttgaacactggggcatggaagggaaagaattcactaaaataatctagccagtccaaatgaagaagaaaataacaacaacaaaacccagagaagggagacaagtacgtatcttatgtgatcctccttcttagacatgatggttgatctggagatgggcaaaataccaaagcagggcccaaaaaagccttccctgacatgttttatgatgggatatgttgggtaagatttctctcctctctttttgagaggatctggggatgtgagcttagggctgctggcagccatgtcgcccaccctacacagaaacttcctgcagtgggaaagaacaaagccgacatgcaggagagaaatagagcaagaggcaaagggtgaggagcaagaccaagagagaaagcatgcaagaaa

SEQ ID NO: 527252 - DNA, 614 bp, Homo sapiens
atagggtatggaaatacagaggaggggcatctaaccaaaaaaaaaaaaaaaaaaaaaaaaaagcaaacccatgggagaaatagttgggttggaaagaaagtcagaaacaaaatcagatttgttttgcttcagaactttgagtgatcttaaagaatttatttacaagcaggaagcagcagaaaatttagaaagattagtcttgatacctctcagggtcattggtctctgtgcttctgataatctaaggaaattcaccgaaaacctccagtagccacctgctctttgccctgacagttctcaaggaagtggtcctcctgctgccccaagcctgtmagcctccatgaaaccaagccttccacactataatacagaaaagtaaagtctttgctttccgggctaccttgtagcaatttgaggctctgtcatcagtttctgctacgtttcaaagatccaggagaagcttagtgttgtgtcaagacgccgatggacccatcacagtttaatccaacctacaacccagggtctccacaaatgctcaccgaagaaaattcccgggacgattcaggggcctctcaaatctcctccgagacgttgataaagaaccttagtaactt

SEQ ID NO: 527253 - DNA, 330 bp, Homo sapiens
tattagttttgatcaagaagccatgagctggagatatgatctggttcaacagcatgcaaaatcacatggcgtcccagtggcacttgtcagacacacccccggtttccagtctgcctttcattaagtgtgaagcccaaagcctctctgagcatgtgcaaggcaacagatttatgctgccctctgctggtgagcagctctactgcaaatcttttacaaggaggactgagcctgggctggttgacttcttcccttctcccagccccacctcctagtagactcaaagataaataaccctgctrgacttagaagttgagttctgagtggggctga

SEQ ID NO: 527254 - DNA, 438 bp, Homo sapiens
gcaggtggttctgcctggaaaggcatcttcaacctgacacagcatctccagatacccctaaatggtccctttttaattaaacacyggaatcccaggaaaacacaccttgttcattcatttcagagggtctctacgaggcaagtgatgttggacttagggccagaagattcaggctcaaattgggcgagttttctgcactataaaccgggggtggtgactgctgtagggggtcaccttgaggattataagggataaacaagatgaaagcacattgctggccattccgcagggcttgacagggatacgcagcttcggaacccagtttctggcttttgtgcccaggagagcattcagcgctttattatttctgaatcaaaaagtttattctctaaactgtatccagggtcagattggtttgcaatcctcagagttcccatt

SEQ ID NO: 527255 - DNA, 545 bp, Homo sapiens
actacacgggtaccccagagactatgacgaatcactttaagcatcgaaggtcatcaacagagaatcctaaatgtcggtagcattcatcagtttcaaaaagaktgttgtttgtatatggtccaaaaaaatgccaaaccagatgatgggtcagtaaagtcagcccaatatccctcagcacaaagagtacagcaaatttccttagcaacattgatgaacttttctaagagcacttctctttcagtttctacttcttcactctaaacagtcatattattcttagttttctgtgttacagtcagaatgattaatttgctattagctacttctggaaacagtgattcaaaatcttttcgccacaattctggacacgtttgtattgcacactccactctggcactttcaaagttaagtttctgcactgttaatttcttgttcaacaggtgcatcattaccctgaaattcattcacatattgtgtcatcacaaacttgtgtctttcacttgataaagtttctgctagaacatcaggcaaagttttataaagca

SEQ ID NO: 527256 - DNA, 545 bp, Homo sapiens
actacacgggtaccccagagactatgacgaatcactttaagcatcgaaggtcatcaacagagaatcctaaatgtcggtagcattcatcagtttcaaaaagattgttgtttgtatatggtccaaaaaaatgccaaaccagatgatgggtcagtaaagtcagcccaatatccctcagcacaaagagtacagcaaatttccttagcaacattgatgaacttttctaagagcacttctctttcagtttctacttcttcactctaaacagtcatattattcttagttttctgtgttacagtcagaatgattaayttgctattagctacttctggaaacagtgattcaaaatcttttcgccacaattctggacacgtttgtattgcacactccactctggcactttcaaagttaagtttctgcactgttaatttcttgttcaacaggtgcatcattaccctgaaattcattcacatattgtgtcatcacaaacttgtgtctttcacttgataaagtttctgctagaacatcaggcaaagttttataaagca

SEQ ID NO: 527257 - DNA, 608 bp, Homo sapiens
ctgcatgtttactttgtttttaaagcttctgattggcacataaataaggtttattttagattacattcagagttagaagaataaatatttaatatacattatagaattatgagaacacatttgagagtctcactataacatagtctttgaggattacatcatgggatttcctaagaaagatgtactgtacattttgtgcttctgaaaataagccattcaaaagatgcaatccaaaatacatttacagtactttatagtaacytcaaggtattaaaagacgtctatttttattataattattattcacgacaagttatatcagtacataacaataaaagttgactcacttctgtgggaaagtaatgaagatcattaaatgataaattaagatatatcaactggaaagccaaaggtgttaagtctggacaatttaggataaaaaagccctaaaagaaagtgacaagagataaggtgttaatcactaacaaggcacaaaatagtttatacaagagtaaaacaaaatcagcacataatttgaatgagaatgttttacacaatatactaacaagcctatactcctcgtccattcatttttttttagtctgtca

SEQ ID NO: 527258 - DNA, 649 bp, Homo sapiens
ctatgatgatcgacaatttgaaagtggattatcttacaaaggtaagatcaggtttaaattttgtgttctatatgctttattgtcttcaaacggcaggtaaataagaattaaatacacacattatctgaacttgaaatgatacatttatatttcttgacaagtacagcctttaaataattttggtgttcatagaagtagagaatagaatggtggttaccaagggctggcrtggttaggggtgaaggagggttggggagatgttggtcaaaggatacataattacagttgaataggaggaatacattcaagagatctattggacagcatggtggctatagttaatgacattgtaatcttggaaaacattgtgtttttgaaaaacacagcagatgttaagtgttctcattactaaaataactatgtgaggtaaaacattttttaattagctagagttaaccatttcacaatgtacgtatacttcaaaacattatgttgtacatgacatatacacacagttttatctgtcagttgggatcacctgaggtcaggagtttgagaccaacctggccaacattgtgaaaccccagctctacttaaaaaaaaaaaaaaaaaaaaattagccagccatgatggtgggtgcctgtaatcc

SEQ ID NO: 527259 - DNA, 440 bp, Homo sapiens
atttttaaattcaaaatacgaaagtaataatttcgtttaaggggaaattgtccaattgaaaaattgtaaataaagtgctggtcgaatatgtgcattcttatactgcacttagacttgcttctgtttatacttgcatatggtgtttatatttaaaggraatttataaatatatacatatatatacactatgtatataacattaataatatactctgtatatttattcttccatggaactactctctgaatatcctaaaatactctgcatatttcagagtcagatgatctttacctttttagatctttgcagttgcactcacagaaaacactgcttctttggaactcatcatctggataccccaacttacagtattcttcatttgcagaccactgggacattcctctttgtttaatgaaagccttgctctagatttagtctt

SEQ ID NO: 527260 - DNA, 477 bp, Homo sapiens
aggcgggcagatcacctgaggtcaggagttcgagattagcctgggtaacatggtaaaaccccgtctctactaaaaatacaaaaattagccaggagtgctggtgcatgcctgtaatcccagctactcgggaggctgagcaggagaatcacttgaacctgggaggtggaggttgcagtgagtcaagatcacgctattgtactccagcttgggcaacaggaatgaatgtccgtcacacacacacacacacacacacacacacacacacacacactctctctctctctctatatatatatatatgtatacatagtgttagatatcctgcagaatgcaaaccaacaaagaactattaaatayctaaaacaaacacaggttcttctttcccttgaagcttcttttttgattctttgattgaaaacttgggccagataaaaaggaagcacagaactacaagtcatcacccacaaaatgtttcat

SEQ ID NO: 527261 - DNA, 477 bp, Homo sapiens
aggcgggcagatcacctgaggtcaggagttcgagattagcctgggtaacatggtaaaaccccgtctctactaaaaatacaaaaattagccaggagtgctggtgcatgcctgtaatcccagctactcgggaggctgagcaggagaatcacttgaacctgggaggtggaggttgcagtgagtcaagatcacgctattgtactccagcttgggcaacaggaatgaatgtccgtcacacacacacacacacacacacacacacacacacacacactctctctctctctctatatatatatatatgtatacatagtgttagatatcctgcagaatgcaaaccaacaaagaactattaaatacctaaaacaaacacaggttcttctttcccttgaagcttcttttttgatyctttgattgaaaacttgggccagataaaaaggaagcacagaactacaagtcatcacccacaaaatgtttcat

SEQ ID NO: 527262 - DNA, 587 bp, Homo sapiens
cattaagtagatcaaatagtgagatggtatgagctgggatcactatgagactgcctcccctcaaggatactcatggatccccctattacccccaggtctactctgctactatcatttaagttcactaggacagatccactgcgatctgggaattcatgcctacttggtcattgtgaatttgacctttctgaatcaaaatcccagttcatagttagacattttgtgttcctattttgagtttacatagtttgacgattaattttaggtattaacttgactgagccaaaggatgcccasagagctggtaaacattatttctgggtatatgtgtgagggtatttccagaagagtttcatatttgaactgatgaaccaagtaaagcagatccaaaccactgagggcctgaatcatcagaaaggtggaaggaggaaaaaaatcaccctctgcttgagctgagacatccatcttctcctgtcagtgctcctggttctcaagtttttggattcaggttaggacttacatcatcaccccacttcacactggttctcaggcctttgaacccagactgaattacacactggctttcc

SEQ ID NO: 527263 - DNA, 567 bp, Homo sapiens
aatgcagggaaagtgtcctttcatcccccacataaagccctgggttcgcagtaacaggacagggccaaatgcaccgcacagtccatcttgcacgtgctgttttcttctctccctgcctcttcctctctcctaagctcccagcacgaggcacaaaccaacactgggagaagacaatgctcatctaaaaataccaagatgaagtagcccatagtcggtctcaagcagttcagcaactgggctatttatttttattttttattttttgagaccgagtctcactctgttgcccaggctggagtgcaatggcacgaccttggctcactgcaacctccacctcccaggattaartgattgtcctgcttcagcctcctgagtagctgggattacacgtgcatgccaccacactcgggtaatctttgtatttttagtagagacgggatttcaccatattggcttggctggtcttgaacctctgacctcaagcgatccacctgccttggcctcccaaagtgctgagattacaggcgtgagccactgagcctggcctgagctatttaaaaacagcat

SEQ ID NO: 527264 - DNA, 427 bp, Homo sapiens
tctggtgcctgctgtgtctcccgtggcttcctctgggatggctcacctccacccatcttccacacagctctcagagggagctttctaagatgcacytctgtgtgtgtcccctctgttaaaatccttaatgaatactcatgcgttccccatctgacccaagcctttcatgatctgacccacactcactgtgacagcctcctcctaggtccccattcacaggcaccctgggttctggccaggccatacgcccagcaggttcctcaccaggccaagtgccttctcctctccatgcttctgcacctgcagggtgcgctaggacagaaattcagcttcaagactgcaaggacagaaactcacactcaaacaaaaagagaaacgatcaacatgaatacagtagtatatgcccaactagaaggtaaccctcagt

SEQ ID NO: 527265 - DNA, 559 bp, Homo sapiens
gtaagttcctggggaatagggagtggtgcttggcactgcaccccctgatgccatggaaggcgcacagtctgtgccccagcaggatttattcagtgagcaagtctggaaagggctgctccagaaggagggwgaaggctgggctgcacagagcctgcaccttctttgtatttttacattgggcttctctgactgcccctaaaataaaaatggggataatccattttcctgtgagagaaatgaaaacccacgaagactaaatgtcctgcccgctgtccaggtgcagtgaggggcgtggccgggaccagaatccctgcttccctgttctctagtcagtgctgctgctggaaaccagagtcttcttttgttttccctctcacctctggctgcctctctctcccctcaaaggtcagagcagtgccaaggacagaagagagagtagatccagccttggccctgctaggctgggcagcctggcaggtagagtcagcagggatagagcttgctttcctgttcacgatcttcagccaagttcagggaggtctgaatactgaggccttca

SEQ ID NO: 527266 - DNA, 559 bp, Homo sapiens
gtaagttcctggggaatagggagtggtgcttggcactgcaccccctgatgccatggaaggcgcacagtctgtgccccagcaggatttattcagtgagcaagtctggaaagggctgctccagaaggagggtgaaggctgggctgcacagagcctgcaccttctttgtatttttacattgggcttctctgactgcccctaaaataaaaatggggwtaatccattttcctgtgagagaaatgaaaacccacgaagactaaatgtcctgcccgctgtccaggtgcagtgaggggcgtggccgggaccagaatccctgcttccctgttctctagtcagtgctgctgctggaaaccagagtcttcttttgttttccctctcacctctggctgcctctctctcccctcaaaggtcagagcagtgccaaggacagaagagagagtagatccagccttggccctgctaggctgggcagcctggcaggtagagtcagcagggatagagcttgctttcctgttcacgatcttcagccaagttcagggaggtctgaatactgaggccttca

SEQ ID NO: 527267 - DNA, 425 bp, Homo sapiens
gatgcaagagcttaatttgtgtaagaacatcctcctacatattctgccaaaagtttaagagctattagtaaaagcagctcatttgaagtagtatgagatttgaacatttaactccaagatagctagaattttattaaaacggatttaaagaattagcccacaatttaaatacttttctcattttaaatgtggcttaagatgtatttgtctttatgaaggaatttkgattaaaaactgtactgtagttgaatttaggaaagggaagccggagatgggtaggcggtgggtacttatagatcttgaatgcctggttataaagattgggggcttaccctgtaggtaccctgtaatcattaacagacttgtaattgcatgggtgacaggcaggaaatgttttaagaaaattagcctgaaagcgcagggtg

SEQ ID NO: 527268 - DNA, 580 bp, Homo sapiens
gtctaactctgcatcgtacattattaagtgtattcgtaatttaggggaaaacctatatctaaataatgtagttacttttttaaaatttctyaatgtaaagaatattacaaaaatagctttatataatgtactgattaggaatataagctttaaagttagattctctgagtttaaataccggctttagcacttgttgcatttatgatcttgggataattgtgaagcataaatatctttctaaagcacttggaataacatctggcatattagtaagcactcaataaatgttagttgctatcattaatattttaatcaatgtttacatatccaaagtaaacataatgtttcaataactatatttttatcttagtaactaataacttttttggtaatgaaacctataatatttgacataaaatatgtaacttaagaatataaatgttcaaaatgtttactgtttgtttctgcatatcatttagagtaaagggtagtatggtagagcagaaacaacaaagttgagtcttcagtctcagctctgtcagttactagcagtgtaacttgaggttatttaacctctcta

SEQ ID NO: 527269 - DNA, 558 bp, Homo sapiens
gggagacgcgtcccacccgatttaggtggcctactctgtctgggcagtacaagctccccacaaaagccatagatcaactggagactgttactcaggagacactggaggtgacacagggagaaaagcaggcaccgtggcaacgaaggcaacctcttgcatcagccaaggtaggaaagttggactgcaagtactgccttggtggttgggcattttcagagatctcgggatatgcaagaaaatyccagtaagtgggggttgagtacacacgggtgtgcaagaaacctccagtaagaggggctgagtacacagggaaaaacttggacacagagactggctgaaaatgggagacaggaactttaggtctaggggacaaaggaaagagggagccaaagagagtccctctggcattaccctggatagtcctttggggagaatgttgcaggtttggaaggggacaagccttgaaccagggacaaggaaaagcaaaacatgataaagtattgctgttttatctggcccaaagactccatttgtaagccttcagtcttttggtctaag

SEQ ID NO: 527270 - DNA, 558 bp, Homo sapiens
gggagacgcgtcccacccgatttaggtggcctactctgtctgggcagtacaagctccccacaaaagccatagatcaactggagactgttactcaggagacactggaggtgacacagggagaaaagcaggcaccgtggcaacgaaggcaacctcttgcatcagccaaggtaggaaagttggactgcaagtactgccttggtggttgggcattttcagagatctcgggatatgcaagaaaatcccagtaagtgggggttgagtacacacgggtgtgcaagaaacctccagtaagaggggctgagtacacagggaaaaacttggacacagagactggctgaaaatgggagacaggaactttaggtctaggggacaaaggaaagagggagccaaagagagtccctctggcattaccctggatagtcctttggggagaatgttgcaggtttggaaggggacaagccttgaaccagggacaaggaaaagcaaaacatgataaagtattgctgttttrtctggcccaaagactccatttgtaagccttcagtcttttggtctaag

SEQ ID NO: 527271 - DNA, 566 bp, Homo sapiens
caagaaagaagagccttgaatattggctagggcctaaatacggtaagcaaagaagtcttaaatatttagtggacataagagaatcaatctctaaagatgtagggaggtgaaataggaggttataaagtggcccaggagagaggtttgatgccagaatcacactggtcgcagtggtaagagaaggaagatgatggggaggaatgtcttgggtgcattctcccatagctgctgtctcctatagtagcatgtattatgtatttcttctctgagacaaggtctcaccctgttgccgaggctggagtccagtagtacgaacatggctcactgcaaccttgacttcttgggctcaagcaattctcctgccttagyctcccaagtacctacaagtgcatgccaccacggccagctacgttttaaatttattgtagagttagagtcttgctatgttgcccaggttggtctctaactcctgggctcaagcaattctcccactttggcctctcgaagtgctgggattacctatgtgagccactacacccagctttgtagcatatatttttaaaggg

SEQ ID NO: 527272 - DNA, 497 bp, Homo sapiens
tttgtctttgattacatatttctttgaagtactgtaataagacagactttgaacctggaaagagatcaaataatgaattgttctgctttgtgaagcttaagaagggattttattgtcgaaacatatagtgcgacatattttttcttctaacagttaaataatggttgaaagtactatgagatcattacagatggactagattaaaagtcttggggccaagtgttagtgatcgttaccaaaaattggtgctttggtttaaaaagtcaggttttacaattaccaaacatttcattggtttagttttgagttaaaatagaacacagtattaatgctagaatatattctcagacttgtaatatttatatctaaagacaatataaaacttacattcacagatctcaaaagacttatgccaaatttgttatccacttcaggtttaggcagattagattaaasagattctgtaaattaaactaaatgtcattagataaaagaac

SEQ ID NO: 527273 - DNA, 634 bp, Homo sapiens
ttctatgagttcaactttttagattccacctacatacattccacaagtgagatcatgtggtattcgtgtttctgtaacttcattaacttaaaaactatattcagtgcctcctttattccaggccttatgctagaccctaaaaacacaagtttatgtaatacatagccatttcatacaggacctcatgatcaattgaaagtgctaatgatgttaatacataaatcaaatatactatttcatatgctataagagtgtttttggttaaatatatctttagcaattttgtcaaatataatsgccaaaagtgtgtatcaatgattttttaaaatcttataagaagaaaatgtgatattttttcttattcattgtcccacatgaattatatacacagatttgaaagattaggccaaattcagttatcacaggctcatcagaaatagatgaaggagaaacaagtcttcccaaggaaagaagtaagtaccccaaggtatgttgaaaccgatgggaatgaatcattgcccagcctatgagggacaggatgggctcacagaggcctatagctctttgggcttggcagaagtagctaacaactcagggaaactggatcaaagagatgctggaaaccaggtaagca

SEQ ID NO: 527274 - DNA, 633 bp, Homo sapiens
tggaacaacttttgaaatatttggaaaccacttgactccatcttataagtatgaagatgtgcaaaccccattatcaagtccaatactaggtatataccctagtatcttagtctgttctggctgccataacaaaataccagcaacttaatcaacagaaattgatttctcacagttctgaaggaagggaagttcaagaccaaggtgcctgccaattaggtttctaatgagggctctcttcctgactgcagatggttgtctcattgtattctcacatggccttccttggtgcttgctagagagacatagagaaatagagacagaaaatctcttcctcttgttatgaatccaccaattgtattggattaggaccctatccttatgarcatatttaactttacttcctaaaagccctatttctcaatacagtcacattgagggttaatgtttcagcataagaatttggggcagggaccataactcagtccatagcacctaagaatgtgttgcatatgtccaccggttaacatatgcaagattcacaaccaacacaactgcctggtgaaaccccagccccattgtgatggcagtctcctaatgaccagacaaatcatgaagcaatcacagaaaacacaa

SEQ ID NO: 527275 - DNA, 558 bp, Homo sapiens
gtcatcccagacctcacacaaaagaataagctaaatcaaatgtgatttttttaagcygctaaattctggattgtacgtttatgcagaaagagctaactgatataataggctagatatttgaaatatctctgaatttacacatgcttcaaatttatccaaattgaatccagtgaacaagtgcttattatatgcatatatgtctttttctgtaattatataggacaaaatcccctactctctagctggtgagataaaaaaaaaatgagatacaaactaattcaaaatgtaaatgactaaagatggaaacagtagttcaaggcaatattttaatagattttacaagacaatggattactcatagctacataatggataaaataaatgataaaagagaagtgtttagactgagattatcaggaaagttcttaaagatgaggtagaatataattatttaaatcatttatactttgatattttattcatttaaaatttatctggtcattcaggtgaagtttaactgtttcccaaaaagcaaagttcaatgtgaggattgtcata

SEQ ID NO: 527276 - DNA, 558 bp, Homo sapiens
gtcatcccagacctcacacaaaagaataagctaaatcaaatgtgatttttttaagctgctaaattctggattgtacgtttatgcagaaagagctaactgatataataggctagatatttgaaatatctctgaatttacacatgcttcaaatttatccaaattgaatccagtgaacaagtgcttattatatgcatatatgtctttttctgtaattatataggacaaaatcccctactctctagctggtgagataaaaaaaaaatgagatacaaactaattcaaaatgtaaatgactaaagatggaaacagtagttcaaggcaayattttaatagattttacaagacaatggattactcatagctacataatggataaaataaatgataaaagagaagtgtttagactgagattatcaggaaagttcttaaagatgaggtagaatataattatttaaatcatttatactttgatattttattcatttaaaatttatctggtcattcaggtgaagtttaactgtttcccaaaaagcaaagttcaatgtgaggattgtcata

SEQ ID NO: 527277 - DNA, 558 bp, Homo sapiens
tatctttttttctcttgcccttttctaatagttgataacaattattatcacacaaagagtaattctccatgtgcataaatgcataccctgaagtgtctcttccataaactcaaatatttagcccaataccaccaataaaaacctagtccagaccattgtgaagtttgctctgtgggaagaaaattcagagaggattaatatgccagtttgtaaaacaaaaactcttaccaaaaaagaattcatccttttattggatggttttgcagagtttgtggagtggtgcatagtgtggttatggttttgaaatgctgtgatatgcttttctgtttgcatttccttgtactgaccttcatgcattcctcccagaagcatccatgtacatatggaagcggtggtgtgaatggaggggattggagccagcttagatttgttatagcaggaatgcaaaaataaagagttactattccrtttctgacactcataacaggattttgcagcaatacaataattttaaaagacaaattttgttcagaaaaaaacaaatttttggaatccttt

SEQ ID NO: 527278 - DNA, 530 bp, Homo sapiens
cattgtgccttgggactgccggacctatgaaagggttgcaggtgctggctcagcagtttgtagggatagcaaaagctgacacagggcttcctccccaccaggcactattccttgtccttaactccatgtcacagttgcataaattgaagggcttggcacttgcccaaagccacacagaaatagcagaggcagkacttgaatctgggtaatctggcactggactgatcctcctcacctttcagagatattcagagacaaactggagtctgggtgagcctctagcccttggcctgacacctgcaagggtctcatgtttcctcagcaatacactcaattcactgtgtatattgtttttataagaggcatggttcttgccatctgtactaaagtccacaatttatttattgtcttcatggcaattgtgtttaatcctgtagattttggtgggctgacacaaggaagaatgtgaaaagtccacaaataggtgatgatggtgatgaaggctttttcatgcctggttagccatacac

SEQ ID NO: 527279 - DNA, 530 bp, Homo sapiens
cattgtgccttgggactgccggacctatgaaagggttgcaggtgctggctcagcagtttgtagggatagcaaaagctgacacagggcttcctccccaccaggcactattccttgtccttaactccatgtcacagttgcataaattgaagggcttggcacttgcccaaagccacacagaaatagcagaggcagtacttgaatcygggtaatctggcactggactgatcctcctcacctttcagagatattcagagacaaactggagtctgggtgagcctctagcccttggcctgacacctgcaagggtctcatgtttcctcagcaatacactcaattcactgtgtatattgtttttataagaggcatggttcttgccatctgtactaaagtccacaatttatttattgtcttcatggcaattgtgtttaatcctgtagattttggtgggctgacacaaggaagaatgtgaaaagtccacaaataggtgatgatggtgatgaaggctttttcatgcctggttagccatacac

SEQ ID NO: 527280 - DNA, 530 bp, Homo sapiens
cattgtgccttgggactgccggacctatgaaagggttgcaggtgctggctcagcagtttgtagggatagcaaaagctgacacagggcttcctccccaccaggcactattccttgtccttaactccatgtcacagttgcataaattgaagggcttggcacttgcccaaagccacacagaaatagcagaggcagtacttgaatctgggtaatctggyactggactgatcctcctcacctttcagagatattcagagacaaactggagtctgggtgagcctctagcccttggcctgacacctgcaagggtctcatgtttcctcagcaatacactcaattcactgtgtatattgtttttataagaggcatggttcttgccatctgtactaaagtccacaatttatttattgtcttcatggcaattgtgtttaatcctgtagattttggtgggctgacacaaggaagaatgtgaaaagtccacaaataggtgatgatggtgatgaaggctttttcatgcctggttagccatacac

SEQ ID NO: 527281 - DNA, 643 bp, Homo sapiens
ccaccaccacactcagctaatttttgtatgtttttgtagagacagggcctcgccatgttggccaggctggtctcaatctcccaacctcaggtgatccgcccacctcagcctcccaaagtgctgggactacagacatgagccaccgtgctcgaccatgtatttcttttatgcctgtccccttttgctgctccctctggtagttctttgagaagtaagtaacttacatccaaccccttcaaggcattcatgatgctaaactcagttcttggtctgggtagacaaaacggagttttcacagtaaattctggatttcatctgaatcttttcattttaccccaagatgttggtatcattttaaagcacctgatgagtactcaaatgacarcatgaatacttagcagccaggacgttttcaaggcccctgatggcagaatgacgtcctgagcccctcaaggcagcagcccgagctgtctgcaggttcactggtcatcggggcccaagggcagccctgtccaccaaaactaattgctgtgatttggaaacaaactttcccacttcctttctgatttctttccccacagaggtcactccccagaatggtacagcaaaggctttggacatctgtgtgcagcagaagttgcca

SEQ ID NO: 527282 - DNA, 634 bp, Homo sapiens
ttctacgactagtaagtgatgagccagaatgtagactctcatcttgagatcttcggtctcatgtctttatttcctatggtacttgagctggccttgccacctgcctgtagagagaggacttggagtggggagtgggtattcttgctttcctggaattctgggcatccaccacacccatctaataagcagaagtcactgggatggacattgtgctcctgcagttttctttactcattaggatccaggggcagggcttacatgagcagagtgaagatttcggtaaggcctgggtgggaactggactctaacctcccagatcgagacttgtaaataacaactgaaaaactagagtacagggtgtgtgtgtgtgtgtgtgtgtgtgtgttgtgtgtgtgtgtgggggggggggttctgggtgtggtgtgggagggaagtaagatcktatcccacaacaataagcaaacagctaattacttgtaattttggagataattgttttctcctcctgcaaacatgccaaacaggaaattaatttaaaccccagaaagttcgaatcatctgcagattgtcaggaaagaaacactcattatccccttagagcccccatcatatctaacaggcaggctgaaaagtg

SEQ ID NO: 527283 - DNA, 643 bp, Homo sapiens
ccagtacagagaatcaccacgcaccctgttctgtgaacacaggtgtgtggtggcccctagaatctcgaaatatggcagccttgggagccacgccattcaactgtgctcttccgctgcattgtgggaatcagaatgtgtgccttactgtagcacgaggtggttgggaggcccatatgacataatgtgcatgaaaatgctttgaaaactttcaggccatttaaagtcactaattgaacttcgacaacttctttgctgctggaatattcctttcttccctttcttaataaattctgcccgtcattcaaaggcttctcttagctcttttttgatctcaaaggtttctttggagcccccagaggtccctctcagaaagaggaagtgagcgaattttgccacccgtgtccctcctgccccacccaccagatgacttcactattacactccatgttttcacacctccacgctctgcccagttctgtccctgtgctctgctaaatgttttctctaccacttgccaacatcctcctcctcctccaaagctaccttaarcatcacttgcctttgaaaccttctccaccaccattctttcacagagctagagccttcttcattcatggttccaaacttctaatcaaggttttat

SEQ ID NO: 527284 - DNA, 402 bp, Homo sapiens
ctttaaaaaaatattttcacagcsgggccaggtggctcatgtctgtaatcccagcactttgggaggctgaggtgggtggataaaacctgaggtcaggagttcgagaccagcctggccaacatggtgaaaccccatctctactaaaaataaaaaaacttagccgggcatagtggtgggcacctgtaatcctagtgacttgggaggctgaggcaggagaatcacttgaacccaggaggtagaggttacagtgagccaagatcacaccactgcactccagcctgggaaacaagagtgaaactccgtctcaaaaaatatatatatatactttcacatctccattggaaatttttaaaagaaactttttttttctgtttaattgatgccaggtactcaactcccaat

SEQ ID NO: 527285 - DNA, 402 bp, Homo sapiens
ctttaaaaaaatattttcacagccgggccaggtggctcatgtctgtaatcccagcactttgggaggctgaggtgggtggataaaacctgaggtcaggagttcgagaccagcctggccaacatggtgaaaccccatctctactaaaaataamaaaacttagccgggcatagtggtgggcacctgtaatcctagtgacttgggaggctgaggcaggagaatcacttgaacccaggaggtagaggttacagtgagccaagatcacaccactgcactccagcctgggaaacaagagtgaaactccgtctcaaaaaatatatatatatactttcacatctccattggaaatttttaaaagaaactttttttttctgtttaattgatgccaggtactcaactcccaat

SEQ ID NO: 527286 - DNA, 402 bp, Homo sapiens
ctttaaaaaaatattttcacagccgggccaggtggctcatgtctgtaatcccagcactttgggaggctgaggtgggtggataaaacctgaggtcaggagttcgagaccagcctggccaacatggtgaaaccccatctctactaaaaataaaaaaacttagccgggcatagtggtgggcacctgtaatcctagtgacttgggaggctgaggcaggagaatcacttgaacccaggaggtagaggttrcagtgagccaagatcacaccactgcactccagcctgggaaacaagagtgaaactccgtctcaaaaaatatatatatatactttcacatctccattggaaatttttaaaagaaactttttttttctgtttaattgatgccaggtactcaactcccaat

SEQ ID NO: 527287 - DNA, 402 bp, Homo sapiens
ctttaaaaaaatattttcacagccgggccaggtggctcatgtctgtaatcccagcactttgggaggctgaggtgggtggataaaacctgaggtcaggagttcgagaccagcctggccaacatggtgaaaccccatctctactaaaaataaaaaaacttagccgggcatagtggtgggcacctgtaatcctagtgacttgggaggctgaggcaggagaatcacttgaacccaggaggtagaggttacagtgagccaagatcacaccactgcactccagcctgggmaacaagagtgaaactccgtctcaaaaaatatatatatatactttcacatctccattggaaatttttaaaagaaactttttttttctgtttaattgatgccaggtactcaactcccaat

SEQ ID NO: 527288 - DNA, 484 bp, Homo sapiens
gtgccatggagggggctagaggacgctgtgctgcaaccaagagctcagggcatcctgctgtccttggagcagagggaggttttgctgggacaacagaagaccagagaaagtgaaaatcacactttgttcttgcccagatatctcaacccctctgccatccaaaaatcacatttctgtttggtatactaaatgtttattgaaacttttgctatatgtagactctatgttaaactctagggataccaaaataaacaggacattttctctaccggcaaagatctctcagtatggtaagaaaaagaatgattttttaactaaaaggttatacctccatgtgttacattttggactaagctgaagcaatattttatttttttaaatcaggtagatgaatcagtttgaattgccattctgtgtgtctctctatttcctaaatmttttgcgctgaaatagcacaagaacagcggcacattcccacagacgg

SEQ ID NO: 527289 - DNA, 592 bp, Homo sapiens
gtaaaatatgagtgtacccagaacatcagtcaatccaagtctgttgtccaaagccttccacaagttaatgtcacgctcaagtgaaagatacctcctctctggagaagtttaataagtccccagatattcacatcccaaaaaaatgtatcactatttatggccatttttgaaaatgtrcatttaatccacatttatgagaaaggtaaacttggagtaattttcatctattgcgattactgatgtattgatttattttcacattttttcttgtgatttattctgtttttccccttttaccccatttcttctttcaaattaattgagggtgtgttgtttatttgtttagttttcacatttcatttttcacctattagtatgaaggttatactctccttgttattttttaactagttaccataggtggtataacatgcctatttaattaaaattatgaaaattaacctccgtagaaataacagacaacattaactcctttcaccttttctcacattcttgttaattttgtccggtatcttggttctatattgcctattttttaatcacaaattagaaattactatgattgctttag

SEQ ID NO: 527290 - DNA, 632 bp, Homo sapiens
catatctaactgacgtgggatcctttccacaggcagcctttgcttggaaactcctcatttgcctgtgaaatttcctcaggactccaccatggtcacacactcttctttctaatttgctctcccgctcctttcacagtcatctgcatcatgatctgaagacttttcctgmctgttcccaactgagtcctccccttttatccttcacagacatttctcctaataaactttttccatatctaatcccatcatggcatctacttcttggagaacccagagtgacacactatcatacattatattcttggcatttgttaaagctaattttcacaagttagtgttactcttccacagtttacagtgataaaactacttcaaccttgaaatatggagccagaacatgaacttgattctgcttcctcatttgtttgttctcaaatttcatgctttctctactatacaacactgcccccaaagacaagcacagtccctttcaaataaataaaacgatgcatgaagactgaatcatatcattaggcaaatgaacatcatatatatttgtatatctccccaaaagtcctatagcaattcagatgtgatcaattatatatgtatgatctgtcccaatctatttt

SEQ ID NO: 527291 - DNA, 632 bp, Homo sapiens
catatctaactgacgtgggatcctttccacaggcagcctttgcttggaaactcctcatttgcctgtgaaatttcctcaggactccaccatggtcacacactcttctttctaatttgctctcccgctcctttcacagtcatctgcatcatgatctgaagacttttcctgcctgttcccaactgagtcctccccttttatccttcacagacatttctcctaataaactttttccatatctaatcccatcatggcatctacttcttggagaacccagagtracacactatcatacattatattcttggcatttgttaaagctaattttcacaagttagtgttactcttccacagtttacagtgataaaactacttcaaccttgaaatatggagccagaacatgaacttgattctgcttcctcatttgtttgttctcaaatttcatgctttctctactatacaacactgcccccaaagacaagcacagtccctttcaaataaataaaacgatgcatgaagactgaatcatatcattaggcaaatgaacatcatatatatttgtatatctccccaaaagtcctatagcaattcagatgtgatcaattatatatgtatgatctgtcccaatctatttt

SEQ ID NO: 527292 - DNA, 632 bp, Homo sapiens
catatctaactgacgtgggatcctttccacaggcagcctttgcttggaaactcctcatttgcctgtgaaatttcctcaggactccaccatggtcacacactcttctttctaatttgctctcccgctcctttcacagtcatctgcatcatgatctgaagacttttcctgcctgttcccaactgagtcctccccttttatccttcacagacatttctcctaataaactttttccatatctaatcccatcatggcatctacttcttggagaacccagagtgacacactatcatacattatattcttggcatttgttaaagctaattttcacaagttagtgttactcttccacagtttacagtgataaaactacttcaaccttgaaatatggagccagaacatgaacttgattctgcttcctcatttgyttgttctcaaatttcatgctttctctactatacaacactgcccccaaagacaagcacagtccctttcaaataaataaaacgatgcatgaagactgaatcatatcattaggcaaatgaacatcatatatatttgtatatctccccaaaagtcctatagcaattcagatgtgatcaattatatatgtatgatctgtcccaatctatttt

SEQ ID NO: 527293 - DNA, 632 bp, Homo sapiens
catatctaactgacgtgggatcctttccacaggcagcctttgcttggaaactcctcatttgcctgtgaaatttcctcaggactccaccatggtcacacactcttctttctaatttgctctcccgctcctttcacagtcatctgcatcatgatctgaagacttttcctgcctgttcccaactgagtcctccccttttatccttcacagacatttctcctaataaactttttccatatctaatcccatcatggcatctacttcttggagaacccagagtgacacactatcatacattatattcttggcatttgttaaagctaattttcacaagttagtgttactcttccacagtttacagtgataaaactacttcaaccttgaaatatggagccagaacatgaacttgattctgcttcctcatttgtttgttctcaaatttcatgctttctctactatacaacactgcccccaaagacaagcacagtccctttcaaataaataaaacgatgcatgaagactgaatcatatcattaggcaaatgaacatcatatatattwgtatatctccccaaaagtcctatagcaattcagatgtgatcaattatatatgtatgatctgtcccaatctatttt

SEQ ID NO: 527294 - DNA, 638 bp, Homo sapiens
aggttatgtagctgttgtgaataaagctgttttaattttctgagttagggctcctttagtttcagatgacatattcacaaagtaaagcaaatttcatgacatgtagctggcagtccaggagctccgtgggacccagaagttgaaccagtcttgttctccagaaggctgccctcaagtggtggccaagatggagacaagaagttcctgctctcttcattcttctggctracaagcccaaggaaatcacaatcacattcctcttgatggttccagcaatgacttcggagcattttgattggccctgcttgggtcagtgctaatccactggctacttactgtaccccaggcaaacttttgtgagcttttcccagtttttccccactctggtgcaagagagagaaaagagtcagaactttctaagccatgggaaaacagttctacacaaaggcttgtttgttaccagaaggggtatggagtcttcataagacacaacctgtggtctacctgagtgtagccaccaccaaccactacatcgttattacctctggggaggctgctggagctcacagcctttgacacagactcctgaagaatagggacaatcaagagaaggcagatacgttatgttcaagcccatt

SEQ ID NO: 527295 - DNA, 638 bp, Homo sapiens
aggttatgtagctgttgtgaataaagctgttttaattttctgagttagggctcctttagtttcagatgacatattcacaaagtaaagcaaatttcatgacatgtagctggcagtccaggagctccgtgggacccagaagttgaaccagtcttgttctccagaaggctgccctcaagtggtggccaagatggagacaagaagttcctgctctcttcattcttctggctgacaagcccaaggaaatcacaatcacattcctcttgatggttccagcaatgacytcggagcattttgattggccctgcttgggtcagtgctaatccactggctacttactgtaccccaggcaaacttttgtgagcttttcccagtttttccccactctggtgcaagagagagaaaagagtcagaactttctaagccatgggaaaacagttctacacaaaggcttgtttgttaccagaaggggtatggagtcttcataagacacaacctgtggtctacctgagtgtagccaccaccaaccactacatcgttattacctctggggaggctgctggagctcacagcctttgacacagactcctgaagaatagggacaatcaagagaaggcagatacgttatgttcaagcccatt

SEQ ID NO: 527296 - DNA, 638 bp, Homo sapiens
aggttatgtagctgttgtgaataaagctgttttaattttctgagttagggctcctttagtttcagatgacatattcacaaagtaaagcaaatttcatgacatgtagctggcagtccaggagctccgtgggacccagaagttgaaccagtcttgttctccagaaggctgccctcaagtggtggccaagatggagacaagaagttcctgctctcttcattcttctggctgacaagcccaaggaaatcacaatcacattcctcttgatggttccagcaatgacttcggagcattttgattggccctgcttgggtcagtgctaatccactggctacttactgtaccccaggcaaacttttgtgagcttttcccagtttttcccmactctggtgcaagagagagaaaagagtcagaactttctaagccatgggaaaacagttctacacaaaggcttgtttgttaccagaaggggtatggagtcttcataagacacaacctgtggtctacctgagtgtagccaccaccaaccactacatcgttattacctctggggaggctgctggagctcacagcctttgacacagactcctgaagaatagggacaatcaagagaaggcagatacgttatgttcaagcccatt

SEQ ID NO: 527297 - DNA, 638 bp, Homo sapiens
aggttatgtagctgttgtgaataaagctgttttaattttctgagttagggctcctttagtttcagatgacatattcacaaagtaaagcaaatttcatgacatgtagctggcagtccaggagctccgtgggacccagaagttgaaccagtcttgttctccagaaggctgccctcaagtggtggccaagatggagacaagaagttcctgctctcttcattcttctggctgacaagcccaaggaaatcacaatcacattcctcttgatggttccagcaatgacttcggagcattttgattggccctgcttgggtcagtgctaatccactggctacttactgtaccccaggcaaacttttgtgagcttttcccagtttttccccactctggtgcaagagagagaaaagagtcagaactttctaagccatgggaaaacagttctacacaaaggcttgtttgttaccagaaggggtatggagtcttcataagacacaacctgtggtctacctgagtgtagccaccaccraccactacatcgttattacctctggggaggctgctggagctcacagcctttgacacagactcctgaagaatagggacaatcaagagaaggcagatacgttatgttcaagcccatt

SEQ ID NO: 527298 - DNA, 376 bp, Homo sapiens
cagtgggcacagaatattttgaggattattggatcaatggcataatgagccagaaatggcaagttgatagtctcagtggaaacgtttttatgcctctgatgaatcatctctcctttgtaccctgacttctgaccaagcagaggctaaatgtacggtgtcaggaagcaaacatttgcatatggctcgcaggtcttagagcggcaggtgcygctcctcctttcacccctgggttcgccaatccaaagttctagttatggaaaaaacagaattttttcttcactgatctttcagtatatacactacatcctataggacaaccccccaaactctcaaggtattttccctcagttgatgctgtaacagaactgtcagtgag

SEQ ID NO: 527299 - DNA, 520 bp, Homo sapiens
ttttaaggggcaatttgaatcactgtagagtcagcataattgcttgtaagaaatgtacaagcattccagaaaacagaaaaatcctgctacagattatctgaaggttgccatggaccactgcctctgcggggattcgtgtgtatctcctgcagccagatgtctgtgttttcacaatgtcatggaagaggaagtggcgatggctgaatcaggtgggrcgcagccctaagtattcacaatccaccacacattttgatggttcacagggactttgtgaatcaaacgtgatttgaaaaacatttgtaaagctgaattagagccctcaaattttatttttctaggaaaggacaaataattaaacaacatctttggagtttgctgtgacttctgtacatctaacaagctgtactttcacagaagctttctggaggttgcacagttattaaaaccagttaggggccttatcttttgggaaacaaaaacttacattccttagagccaaggagatgccccgactaagaac

SEQ ID NO: 527300 - DNA, 520 bp, Homo sapiens
ttttaaggggcaatttgaatcactgtagagtcagcataattgcttgtaagaaatgtacaagcattccagaaaacagaaaaatcctgctacagattatctgaaggttgccatggaccactgcctctgcggggattcgtgtgtatctcctgcagccagatgtctgtgttttcacaatgtcatggaagaggaagtggcgatggctgaatcaggtggggmgcagccctaagtattcacaatccaccacacattttgatggttcacagggactttgtgaatcaaacgtgatttgaaaaacatttgtaaagctgaattagagccctcaaattttatttttctaggaaaggacaaataattaaacaacatctttggagtttgctgtgacttctgtacatctaacaagctgtactttcacagaagctttctggaggttgcacagttattaaaaccagttaggggccttatcttttgggaaacaaaaacttacattccttagagccaaggagatgccccgactaagaac

SEQ ID NO: 527301 - DNA, 579 bp, Homo sapiens
aagggtaatctgaggtcagactgcagacagcctctgatgccaggtgaaggggcttcgatgtatacatgaacaatggagtgataggatgggaatcagcctcagcgtgcaaaatgaagcagagggagaaggatgggtgtcgggagatggttatgaagccattgcaataacccaatgtgagtcgaccgaagcaagaataaagttcgtgccatggggttgagaggaaatgaggaggtaagagacctacagagcctgggcgtgatgggtcacacctgtaatcccaacactttggaaggccgaggagggaagatcatctgaggttgggggttcaagaccagcctgaccaacatggagaaaccccgtctctactaaaaaatacaaaattagctaggcatggtggtgcatgcctgtaatcccagctactcaggagtctgaggcaggagaatcgcttgaacytgggaggcagcagttgccgtgagccaagatcgtgccattgcactccagcccgggcaacaagagagaaactccatctaaaaaaaaaaaaaagagagagagagagaccttaagaagaaagaacctgtc

SEQ ID NO: 527302 - DNA, 375 bp, Homo sapiens
tcatgcacagtgctgcttccccagcstcgttttccttctccatcgtgtccttgtgccatgctgctcctggaacactgtaggcacatttctgtctcctggaaagtccttccctgacacctgatgtccacctgcctctcttcctcacctccttcaaatgtttgccaaatcccttcttctcactgaagcctgtctttgtcaccagatctaaaatgttaccattcaccacctcaatactctctgtctcctctccttatttttcccctactctctaatgtattcacgtgtgcaatccattttcacctatttcacttagtcactgtgcatctccatcctagattatgaaccacacgtaggccagaacttcaatttgtttac

SEQ ID NO: 527303 - DNA, 542 bp, Homo sapiens
ggccatgagcttgaattatatttactcttgtcttattcattcatcacattacatctatgcactagacattgagctgggcattgtatggctggcatttgtcagaccaaattgtgctgtgatatcatgatatctgctctattttttctaagtataaaatcatgtagattttgttctaattgtcattcagttgaatcataattgaatttttgtggtctgaattatgccacagtgatatttctacagaaataagatgctgttctttcactcagtgagcttttagactggtagaaaagactaagatattaaaagaaaagaaaagaaacaagtacataaagtgctacygggacagattaaaagtagctgtcaattttttgatgcttttaaaggtgtgggcttattttctaccccattgttttctgcataagcttcatgatgcctgcctaacagagaacagtgaaagacaggttgtgtcagttttcaagctgagacattaagggaatggtaacctccacttctctcctttgggacacttgctgtgtaac

SEQ ID NO: 527304 - DNA, 390 bp, Homo sapiens
ctgacattgatcgagtctcttgtctgtgcttatcttgtcatgggaacaaattttccggcttatatatggcagcagtcctaatcaatcatggacccaggctccttggcttcccagtgtttgatagtggtggaaaatccattcatagaaacttggaaaggtggaagaagatgacattaaatagaggaaagactttactcagtatcccaratttttgataaagtaatctaactcttgttacacagaagaaggcacagagatttggcacttcttggagaaataagtcactaaaaatttggaggaaatcagaaatgcaaagcctgtttatgatggctagaccaaggtcaacgcacttcaaataaatcttgtactgacttcttggtgcaagtttca

SEQ ID NO: 527305 - DNA, 655 bp, Homo sapiens
agtgatccccaatactccagctaatatcaagccaacctccagacatctgagtgaggtgttcttaggcatgtgagacccaacagagctgctggttgactacagaaaccaaacaactgatctcagaccaggggaacaattcgcccaatccagaagattatgatgaatgctaaatgttgttttaagccactgtgtttccataacaagacactaatggatacaacaaccaacatatgagacaaacaaatcagacacagttgaagaaaaggttagtgatatagaaaatcagaagaacgtattcagaaygcaccataaagaaacaacgagatgaaaaactgagagaataatccatggaggatagagtgaggaagtccaacatatgtctaatcagagttccagaatgagacaatagagaaggtaggggcaagaaaatatttggagatgtaatggccaaaaattttccagaattatttaagaacactgatccttaatgaagctccaatttaggaagtccagtgaattctaaggagaaaaaaaactgaatgacatcagcacctaaatccatcatggttaaagtgcagaacacctaaagaaaaggtcacaacaaatcccaaattgaggaaaggctgcaaaatcactgagttttactcttcaaaag

SEQ ID NO: 527306 - DNA, 655 bp, Homo sapiens
agtgatccccaatactccagctaatatcaagccaacctccagacatctgagtgaggtgttcttaggcatgtgagacccaacagagctgctggttgactacagaaaccaaacaactgatctcagaccaggggaacaattcgcccaatccagaagattatgatgaatgctaaatgttgttttaagccactgtgtttccataacaagacactaatggatacaacaaccaacatatgagacaaacaaatcagacacagttgaagaaaaggttagtgatatagaaaatcagaagaacgtattcagaacgcaccataaagaaacaacgagatgaaaaamtgagagaataatccatggaggatagagtgaggaagtccaacatatgtctaatcagagttccagaatgagacaatagagaaggtaggggcaagaaaatatttggagatgtaatggccaaaaattttccagaattatttaagaacactgatccttaatgaagctccaatttaggaagtccagtgaattctaaggagaaaaaaaactgaatgacatcagcacctaaatccatcatggttaaagtgcagaacacctaaagaaaaggtcacaacaaatcccaaattgaggaaaggctgcaaaatcactgagttttactcttcaaaag

SEQ ID NO: 527307 - DNA, 573 bp, Homo sapiens
ctcaggtgtgtttcttaactttcatgggccaaaacttcctcatctgtaaatttgcaggtgggaacgaaatcaatgactttcataccaagctgtttcatggaagtgcttaaggaattttacaaacctttccatttcaacaaagtttgactagtttcagaaatgaaaataataaaaaagtatacacaggacagtgttgtttgttacaatttagcaaactagaggccactaacacataaacttgcactggccaattaactcattttttataggattcaggaattgtttttccaaatgtttccctgtgatatattcaaaatcctcatgaatgtatcattgttagaaagcctgtagccctgcacaagtcctttttttctcttcrttattatacctatgtaaaaaatgcacaaaagtgcgctatctacccccacgggtgccaggccctgctggatgctgggctcaggtcacaccatggcacaatggcaacttttcataacagcagatacagcacataggccctgttcagaatttcagaacttagaatcaagaaggaaacttcaaatatgagttttagtc

SEQ ID NO: 527308 - DNA, 520 bp, Homo sapiens
ttttaaggggcaatttgaatcactgtagagtcagcataattgcttgtaagaaatgtacaagcattccagaaaacagaaaaatcctgctacagaytatctgaaggttgccatggaccactgcctctgcggggattcgtgtgtatctcctgcagccagatgtctgtgttttcacaatgtcatggaagaggaagtggcgatggctgaatcaggtggggcgcagccctaagtattcacaatccaccacacattttgatggttcacagggactttgtgaatcaaacgtgatttgaaaaacatttgtaaagctgaattagagccctcaaattttatttttctaggaaaggacaaataattaaacaacatctttggagtttgctgtgacttctgtacatctaacaagctgtactttcacagaagctttctggaggttgcacagttattaaaaccagttaggggccttatcttttgggaaacaaaaacttacattccttagagccaaggagatgccccgactaagaac

SEQ ID NO: 527309 - DNA, 526 bp, Homo sapiens
aattgaagtcttgtacaatatatcagatcagcagagcctggggcacatgcttaggcccttcctgcaagagatgctgggaaaacaagctattgcctttactcatgggaaccaggagtcacaaaatgggacattctccacctgaggaatgttgttgaaaagattcccatcagccacaaacatgcaaatgcccattatatcactcagagggtttatttcccagacctaaaatccaaccaattaaaaccctagtttggcaaaagactgccaaccctctccaaggaacaattctcaccttcttcttcttcttcttagaagtgtaactcccyccaagttgaaccaggcacatgaccaccagttagagactacatttcccagcctcctcagcaggcattgtatgtgactactttctcaccaatggcatgtaagaaaaaatgtattgtagctcctgggtctttttcttaaagatgaaagtttcttagcctatacttccacgtttcttcttcgtgctggcttagaaatggcaaca

SEQ ID NO: 527310 - DNA, 647 bp, Homo sapiens
ctggagtacagtggtgatcttggctgactgcaacctctggcctcccgggttcaagtgattctcctgcctcagcctcccaagtagctgggattacaggtgcctgcccccacgcccacctaattttgtattttagtagagacagggttttgccatgttggtcaggctagtctygaactcctgacctcaggtgatccacttgtcttggcctcccaaagtactgggattgcaggcatgagccaccacacccggccagtttttcttttctttaaaagtatttcatcagcatctcatatggtgtgtttgtgagtttggcagagcacagcaaggcatttcaagatctcagcattcgtttcttgcttggagagacaggaaaaggtgcacttgttctcatccctggggaaatggtccctcatgagtcaaaaatgctttgtttctggtcaaggcagcttcagagataccgacactgcctttctcttcctagtccaatcacccccttccttttgggtctcagcaggtatagaagttgagaagactgaattcactgttgaattcattcacctatcaattcacctcaacaatgatttctcattgtcatgtgccaagcactttgaggaatacaaggtaatccatggagagaataaattata

SEQ ID NO: 527311 - DNA, 506 bp, Homo sapiens
taatttttgtatttttagtggagacagggtttcaccatgttggccaggctggtcttgaactcctgacctcaggtgatctccctgcctcggtctcccaaagtgctgggattacaggtgtgagccactgcacccggctccctttctttcattctaaattagattctgaatggctgaaactggaacagggccaacactggtgacaatagaatggtgagtaccaacgtcctactaactcaaagggcctttgattccctgagagtggcctgtaattttttggttttctgcagggaagcggagagaatggtgccatcttgcatccctgggaactttgcctagtggaagagtgaatgatattctgctgagggagatttcccctatgaccrccctctccctcagtgaacacttgtgtgatcactgctgttgatcataaagagaatcgaactaatacaaaggaaaaaacagtcccataatatattgtgagcaaaacaaattgctgaataaagtac

SEQ ID NO: 527312 - DNA, 559 bp, Homo sapiens
ctccttcaaagaccaagtccaaatgttaattcttctaagaaacctaatgaattcacccaagtagttaactacaatacttccgccttcctcctctcctttctccttctcccccagtayagaccttcattatactgcctttcacagggtgatataattatttgttgtgttaaagaaaaaattattcaatgatacttgttaaggcagagtaaggactttgttcaggtccgtcacgataggcagagggaccactgcaactgggtcttgcagtgggagggaaggagtggctagactccaagtacagcctaaacaggtgaagctttacagccaagaaggagggtgggggtcagtgggtggaaaatcactaagaggaaacatgaggagtaggaaagattctggctaaaccgatctaacaggattcttgctgaagacgggccagggtgatcagatagcaactgggggatggtagtggctgaggaacccaatcagacactgaggatgatcaggtattagagaatgggggattctggctaaaatgacttcacagattcttttgctaaaa

SEQ ID NO: 527313 - DNA, 639 bp, Homo sapiens
ctgaagaataggctgggatgaaaaagtatagatctttgctgaaagcgcctttcactcaaaaaatagtctaataatttgatattattattccccttctccctatcagattttamtataccattactttttaaatctatttttctttctctttatatatttaattttttagtacatgctaaaactattttctaaatcaaagtcttggttaaaatccaagctctagctcattctagatgaaagacactagacaaattccttcacttatctgataatttccttatgagtagaagggaaacaatgataactctatcccatgtgtttttgtcttaagttagtgttcttgaacttattgattttaatatcctttacacatttgaaaattattgagactaagaaatattgtttatatgaaatatatatatatatatatatatatatatatatttaccacattggtatttggactgagaaaatttaaaaaatatgtatgtcttaatttatctaaaacaataataagcctgctatgtattaatataagatatatttcatttaaaaaactgtattttccaaagaaatagtgagaagattggcattaagttacatttttggaagtatctttaacatccagcttaatagaag

SEQ ID NO: 527314 - DNA, 639 bp, Homo sapiens
ctgaagaataggctgggatgaaaaagtatagatctttgctgaaagcgcctttcactcaaaaaatagtctaataatttgatattattattccccttctccctatcagattttaatataccattactttttaaatctatttttctttctctttatatatttaattttttagtacatgctaaaactattttctaaatcaaagtcttggttaaaatccaagctctagctcattctagatgaaagacactagacaaattccttcacttatctgataatttccttatgagtagaagggaaacaatgataactctatcccatgtgtttttgtcttaagttagtgttcttgaacttattgattttaatatcctttacacatttgaaaattattgagactaagaaatattgtttatatgaaatatatatatatatatatatatatatatatatttaccacattggtatttggactgagaaaatttaaaaaatatgtatgtcttaatttatctaaaacaataataagcctgctatgtattaatataagatatatttyatttaaaaaactgtattttccaaagaaatagtgagaagattggcattaagttacatttttggaagtatctttaacatccagcttaatagaag

SEQ ID NO: 527315 - DNA, 551 bp, Homo sapiens
cccaaatattatgaaggtgacaagatctgtcttcactgtcccatttctgaatctgtaactcagagataccataagaataataaaatggtttagaccattcaattttagagtggcttgttacacagtgacaggtactgcaaacaccagaaaatagcaaattgagtgatagcaaccaaaatttgttggttatattatttcaaaataatatagcaytatctatcatagaagaatatatatacaacttagaattgtatgcaatcaatacatttgcaaataaatacttgtaaaaaattatgaaagagtattccaaaaacattatttgcccttttaaagtaaaataaaaacaccataagccttcccttaactctgtaatagtgttgatttaaacatattacaaaaaatttcagccaatcacttgaaaaatggttggtctataaagtcacatgaaattattttgtttcacaatttgcttttgattctccccgttgcaatgattttgaaaatcttgcagaggacagactttagatataaagtaaactgaagcatttact

SEQ ID NO: 527316 - DNA, 609 bp, Homo sapiens
ctctttaatcataagattaagagagagaatcagtccttgctttggctaaaataatagaatgatgcttgagtgataaaataaaattatagttatgagaatatttttttcccacaaatgaaagtccacaggggcctaacttattgagggcgaatttctctgtctttggaagacaaaattcactgtgatcaggaagaacaatatctgaataaagaatatagaactggaatatgagtaaagattactccatttagacatagaaagtttgaaatcagaagcaggtcacagttttcaattaatttctcatgttttcttttatatgtctttctcatctgtaagaacaataatattgtggttacaccatggaagtaagagacayataaaacctttacaatggaaatctatatatatcttgagggcataagataaacagatgattattaaatattcaatgtttcaagaattattacattctaacatgtgcgctttaagaatcaataagggtttacagaaaatgatatcatcaaccacacatatattaaaaaaaaacttgtaaagcatgtcaatgcccctgctattgtgaccacgacttaaacttaatgattaagccac

SEQ ID NO: 527317 - DNA, 609 bp, Homo sapiens
ctctttaatcataagattaagagagagaatcagtccttgctttggctaaaataatagaatgatgcttgagtgataaaataaaattatagttatgagaatatttttttcccacaaatgaaagtccacaggggcctaacttattgagggcgaatttctctgtctttggaagacaaaattcactgtgatcaggaagaacaatatctgaataaagaatatagaactggaatatgagtaaagattactccatttagacatagaaagtttgaaatcagaagcaggtcacagttttcaattaatttctcatgttttcttttatatgtctttctcatctgtaagaacaataatattgtggttacaccatggaagtaagagacatataaaacmtttacaatggaaatctatatatatcttgagggcataagataaacagatgattattaaatattcaatgtttcaagaattattacattctaacatgtgcgctttaagaatcaataagggtttacagaaaatgatatcatcaaccacacatatattaaaaaaaaacttgtaaagcatgtcaatgcccctgctattgtgaccacgacttaaacttaatgattaagccac

SEQ ID NO: 527318 - DNA, 564 bp, Homo sapiens
aaccacccccatgatccaatcaccttccacgaggtccctcccccaacacgtggggatcacaatttggattacaattcaagatgagatttgggtgaggacacagagccggaccatatcagagagaaagctattactgaagacctttctaactcacttctgtaaagatcaattcaataaaagcagcaaacacacatactttgctttccttgtgattaatgccttgacttttttgtggaaagtaacaccccaagaaagccagctactcatgttggcaataaaggtaaaagtatctatggaataaggaccatttttaggacaatactttccctactacttagttctagtcccttttttgtagaattctgaggactttctacatacacaatcatgtcatcagcaaataaagattattgtacttgttctttgccaacccatatgtcttgccttactgccctggttaggaccttcagaacaatactggatataagtggygaaagcacatatcctccccttgttcctaattttagagggaaagtactcagtctttcgccattaagtacaatg

SEQ ID NO: 527319 - DNA, 504 bp, Homo sapiens
tgtggctttcttctagccaaacccctttccacaggatgaggactcccagaagacatgtctacctgaagttcatgcagccccttctagaacatattctgggtagtcagtaccctggaattccttccccaaatgcccacttccagacctagtacaggactcctccctcatcagatccagtgtgcacacacctaagtctaagggacagataaccaagggatagcttcagttttaccacatagtcgcttaccttcaccattttttctctccaccaataaattcctttacgtttgctattccatattaacagctctcaatgagattcctttgatgttgaggaaatgacccttcaacctatagttaattttctataattacatctgatgatgaggctgcagtgttttaattgcaataaattttgttagagcaaaggaaagctgcagctttycaaacagttgggaagttgtggttcttctgccatactcctcctttataacagccaggaag

SEQ ID NO: 527320 - DNA, 614 bp, Homo sapiens
ttagagaaaacacccaaattatacttgcactatggaaagacgacatgaatatgttgactgggtactttctactctcatttttgttagcctatgaaaaaaaaaacattttgttaacctatggaaaaagccttggaagagaaaagtagaattcagtatgtatggaggcacagttttgcacagtatgttgcatgcggcaaaaaaaaaaatatgaaatagagtagaagagataaaagtagttttctgtcaaaaactaggagttaagccttcaggtacgttgtggactaggctttccagcaaggtttttgtagctatttgcttgcctgagaaatgaaattgaaaacatacccctgcgtgtctgtccttaacaccaggctaaattctggtggttaaataacttayctgtggttacaagctagtaagtagcagagccaagattttttttaatatagagacaggtgtctcactgtgttgtccaggctggtcttgaactcctggcctcaagtggtcctcctgcctcagcctcccaaagtgtggggattacaggtgcgagctactgctcccagcaagagccaagattttaacctagatctccctaacaccaaagcttttgaaag

SEQ ID NO: 527321 - DNA, 511 bp, Homo sapiens
agctgccagtttttacttttttaaatagttgggaaaaaaattccaaagactgatattttgtgtcacatgaaaattatatgaaattcaaattgcagtgtccataagtaaagttttattggggcacacccatgctcacccttttaaatattgtgtatggccgctttgtgctacagtagcagagttgagtcattgcaagggagaccatatggcccaggtagcctaaaatatttatctgatcctttacagaaaaagtttgctaacccttgataacagatactctaaaatgcaggtttttcttcttcaatttagctcagtggtaggtcaaattgtttgcttttgctattaagcttatgatttggaaacgtaaaatttcatggtggatmttataatcagaactattcaaaagggaaaacatgccagccattttatatgatgaagtctcttattccatagaaaactgtagaaagatatctgtatctttggagaaggagaaagaaaggaaagaactcca

SEQ ID NO: 527322 - DNA, 489 bp, Homo sapiens
aaaaaattccaaagactgatattttgtgtcacatgaaaattatatgaaattcaaattgcagtgtccataagtaaagttttattggggcacacccatgctcacccttttaaatattgtgtatggccgctttgtgctacagtagcagagttgagtcattgcaagggagaccatatggcccaggtagcctaaaatatttatctgatcctttacagaaaaagtttgctaacccttgataacagatactctaaaatgcaggtttttcttcttcaatttagctcagtggtaggtcaaattgtttgcttttgctattaagcttatgatttggaaacgtaaaatttcatggtggatattataatcagaactattcaaaagggaaaacatgccagccattttatatgatgaagtctcttattccatagaaaactgtagaaagrtatctgtatctttggagaaggagaaagaaaggaaagaactccagaatcccatcac

SEQ ID NO: 527323 - DNA, 636 bp, Homo sapiens
ctgctttgggagggtgctgcatctgcctcccatacacttctgccaagtttatrttagtttgggaggactgaagcagaattcagttcaaagtactgtgctggattttggtttctaaatattttccaatagaaaagaacccaggcttcttgagaaaatagctaggttctaaggctagagccaaaaaaatgcaagataagcctggagcatcttgtagtaccagaaactaagcaagtgctcaaaaacaaaaggatagaagcatgtcagacagacacaggagccaatctgaaagagctccctggccgggcacggtggctcacgcctgtaatcccagcactttgggagactgaggtgggaggatgacttgagcccaggagtttgagaccagcctgggcaacatagggagaccccatctctacaaaaaagtaaacaattagccgggcatggtggcacacgcctatagtcccagctactcaggagggtgaagatcacctgagaccaggcggtcaaggcttcagtgagccatgattgtggcactgcactccagcctaggcaatagagtgagactgtctcaaaaaataaaattttaaaataactgaagagtataactggattgtttgtaacacaaaggataagtgc

SEQ ID NO: 527324 - DNA, 470 bp, Homo sapiens
ctggggagtggtgcaccacccctttttttggccgcctctgaagtccctgtacccccaagctcctscgttagcggctcgggccgaggctccggaatgtttgccgggcgtcatggcgacggtggagccctggctcaacaagcggccgcgcggttggctggcggcacgaggccgaggaggagggcggaggcggaggggagggcagagggttggtggagctggaggaagctccggacgacgactggaagaaggaggcgggcggcccgggcctcaggcccctcccaggctctgagtctcccggctgcaggcggatggatggggcttcttcaggcggtggcggcagcagcgaaggtggcggcggcagcagcggcagcggctgtaagtgcagcctccacaagccatctctccccttctattccagtttgggatgaggggctcctgaggtgtcctcagtcccctttctctccttcccc

SEQ ID NO: 527325 - DNA, 647 bp, Homo sapiens
gctgctgccttaactatatacaggttttgttataagtatgctcttaattttctgattaaggtatttatatactttttgttcttagaaatgttgagacttagataataaaatcatgaacatttaagtaggttgttttttcacctaaaaagtttcatctgggccacgtatggtggctcatccctgtaatcccagcattttgggaggcctagagagagggatcacttgagccctgctcaactgagcagcatggcaaaaccttgtctctacaaaaacaaacaaacaaaaaaaccagtttcatctgtgtgaaccatacaaaactataaaatgcatttttctgccattgatctctcctaattatgtaatagtttattgttagaactattattaaaatattagctattaattgtgagtactgcagacattttaagcgtgtcattatatttatacccccaaataatactataaagtaggtgctaacattcccacttgagagaaggctcagaaaagtttaatgccttggccaatrttacacagccagtaaataagtgatctggctaagactgaaagcaggcctatctgattctaaagtccatgcccctatgcaccgcactgtaatgcctctctcaccgtggaatgctcaccctcat

SEQ ID NO: 527326 - DNA, 653 bp, Homo sapiens
aacatccaaatgctaatccaggtgacccaacattcacaggagaccagagctgtatcagcaagcctacagtattggccttgccagttatagtatgtcctgtgtgagggaagaaagaattatcatgcactcagcatagagtttcaaaaagrgtatccaaagaaaaagattaagttgacctatcatcagcactgtccaggattccgtactgcctagcaatgtaagtatccccagcccagagtcatgtatatccctaaagtggtgaagatagcttcgtcttaatggtagtaaccttaagacatgcaacctccttccccgaccctactgcgatttcaccaagcaacctacttggtatggttggtctgcccatataaatttcctgcagggtgaaaaatgaacttctcatctaccacatgtgttttggtttaccattgattacacatttctaattgtaaaataatatattgccaatctgacttttcaaaaagtgtctcttgtaagtttggtgagcatgatatagccctgaaaaactgaacaactctacatacattgaacacaaactaaacataaaaaggtttctgggacttacaaagctaaggacccagcctctggagtgtggggcttcataaaggttgtatcatccctgcccaagaagt

SEQ ID NO: 527327 - DNA, 588 bp, Homo sapiens
gcaagcctacagtattggccttgccagttatagtatgtcctgtgtgagggaagaaagaattatcatgcactcagcatagagtttcaaaaagggtatccaaagaaaaagattaagttgacctatcatcagcactgtccaggattccgtactgcctagcaatgtaagtatccccagcccagagtcatgtatatccctaaagtggtgaagatagcttcgtcttaatggtagtaaccttaagacatgcaacctccttccccgaccctactgcratttcaccaagcaacctacttggtatggttggtctgcccatataaatttcctgcagggtgaaaaatgaacttctcatctaccacatgtgttttggtttaccattgattacacatttctaattgtaaaataatatattgccaatctgacttttcaaaaagtgtctcttgtaagtttggtgagcatgatatagccctgaaaaactgaacaactctacatacattgaacacaaactaaacataaaaaggtttctgggacttacaaagctaaggacccagcctctggagtgtggggcttcataaaggttgtatcatccctgcc

SEQ ID NO: 527328 - DNA, 466 bp, Homo sapiens
cagcactgtccaggattccgtactgcctagcaatgtaagtatccccagcccagagtcatgtatatccctaaagtggtgaagatagcttcgtcttaatggtagtaaccttaagacatgcaacctccttccccgaccctactgcgatttcaccaagcaacctacttggtatggttggtctgcccatataaatttcctgcagggtgaaaaatgaacttctcatctaccacatgtgytttggtttaccattgattacacatttctaattgtaaaataatatattgccaatctgacttttcaaaaagtgtctcttgtaagtttggtgagcatgatatagccctgaaaaactgaacaactctacatacattgaacacaaactaaacataaaaaggtttctgggacttacaaagctaaggacccagcctctggagtgtggggcttcataaaggttgtatcatccctgcccaag

SEQ ID NO: 527329 - DNA, 507 bp, Homo sapiens
tataagaataatggatgacaagtacatttattttgcttcgggaaattctataagaaggcctacgttttatcaaatttctataacaattgtatatagttttgtgatagaaactacattagccttcacagtaatctgttgggatgctttctgtgtatatgtatgtttccctgttcattgtattgtagaaatagagcygaggtcaaaggctggaaagtcatcaggagaaaaaattggttgtggaagggcaacacttcgcctgagatcaaaaggtcctgccaccgtggaagaaatggtatgttatgttcatttacttcctgttctgcttggaaatgttgagttagataaaattccattcattctaaccaaaacttggacttttaattcactgtctatttaaacaatctggaaattactgaaggtatttaaaaaggaaatatagaaattaaggacatgagaagagattgtgatctatagaaattctcagttacctgtaggtgacgtttctag

SEQ ID NO: 527330 - DNA, 637 bp, Homo sapiens
ataaataataaaaattattaatttagtggtagtttcattaaaataaattacaaaatatagatgagatargttatgttctattaaaagtacaagttacagtataataaaaatataataagtaatgttctagaaaaatataactcaccaaatatgactcaggaataaataggaaacctgaactataaacacatttaaaaagttatattagcagccaaaattattcccacaacgcaaattcaacaacagatgattttaggcaagtctcatccagtattcaaggaaatagtactttcaatcacaaaatattcaaggtatatgaagaaaatgactgctctcaaatttaccttatgagactagtttacttttgatactaagaattgaagagaattaatcaagaaaagaaaatgacaggatatttataaaaatagatgcaaaaactctaaacaaaatagtaacaaaatgaatgcagcaaaatataaggaaaatgcatcatggtcactttgggtttaactgaacaattgaagattgatttaacattataaaaattaatgtaaagtttcacatcaatagatagaaggaaaaaaactcacataattatatccacagatgcattaaaattatttgacaaagtttaaca

SEQ ID NO: 527331 - DNA, 637 bp, Homo sapiens
ataaataataaaaattattaatttagtggtagtttcattaaaataaattacaaaatatagatgagataagttatgttctattaaaagtacaagttacagtataataaaaatataataagtaatgttctagaaaaatataactcaccaaatatgactcaggaataaataggaaacctgaactataaacacatttaaaaagttatattagcagccaaaattattcccacaacgcaaattcaacaacagatgattttaggcaagtctcatccagtattcaaggaaatagtactttcaatcacaaaatattcaaggtatatgaagaaaatgactgctctcaaatttaccttatgagactagtttacttttgatactaagaattgaagagaattaatcaagaaaagaaaatgacaggatatttataaaaatagatgcaaaaactctaaacaaaatagtaacaaaatgaatgcagcaaaatataaggaaaatgcatcatggtcactttgggtttaactgaacaattgaagattgatttaacattataaaaattaatgtaaagtttcamatcaatagatagaaggaaaaaaactcacataattatatccacagatgcattaaaattatttgacaaagtttaaca

SEQ ID NO: 527332 - DNA, 505 bp, Homo sapiens
tttgcctgctagcttttccctgagcaaatgtctgccattcaaggaaagtggtggaggaagctcacactggaaattccagtttgactgcagagaaaataatctcctgttcagaaaatacctttgttcacttccagggaaaagaggctaaacaggaaaggaaacatggacaggtagctggctgagcacatcacctgtataatgagcaaactgaaaaggctggcatatggcgtgacaaggtggatggagtagagagaaggaaaataacttctctgtttttaagattagagaaattgagggacascagacaatgtgaattgcagtcagggcagaagaacccttagggaaagggctattgattcttccattggattgctccacacagatagtaagatgggtgaagactttcttggtcgatgtaatctgagagacaaagtttctaagtagcctagtgtgagctagtgtggacaccattcccagcaaccaatgtgtatatagaagcctggtg

SEQ ID NO: 527333 - DNA, 613 bp, Homo sapiens
agagagaatatgttgtttccagaagggcaggcttcttcataaatagctcactagatttttctggcaaccccaaacctgagacaagatggtatgctaagagcagaccagcagacttgccaaccaaagaggaatgcaaggggtgccatcagaaattcctgtggatatcagtcaaattggaagcaggtaatgaccagaatattgcatgtagtcttccatgtctactaactaatcagtttagcgagtaactaatatggtcrgcgagaccaagaagagagatgtgaccagaaagttcatggactttgccattcatgaatgaggttccttaaagtgtcctggtgacttcaaggatcacaggaaaaataaagggaaataaaagatacacaaatctgaaaaaaaaaaaaaaaaaagcatcaagccaagaagtcagagagaaaaaagaaatgcagtagcagtaacagaacagcagtgagtgtggcaatcgtgctctaacactgtccctttcatcacaaccagctcactcatcatgcacacaaaagctggtaatgggtgatggggtctacttgaggaattacctgagccttccctcccatttatctcgttggcctaataccag

SEQ ID NO: 527334 - DNA, 641 bp, Homo sapiens
caatagctctttgccattttgtaagctttattctaagacacaatgcttataaataaagcactataatgccataaaaactctcaacaaacgtacaactgtgcatttacactttcttctaaaaatagatgaagattatgggttttaaaatgaatgagaaactacagaaaaaaaatcatgggaactcaggaaaataagtgaagcaaaaaatgtaccatatgtaacagaaatgggtatttactcagtaacagtgacaacaaagctaaacacaaggaaattagtactttgtagattaggtaacaaaaagctataaaattgcctcgttttgatctttttgaagtttcttagaaatagctctcacttcataggcaaatatgtgaacttggtagttgactgtttattcatcaagatgttcttcacctttatggaaggaagtgagcttctatttttctgaagtcttcaaggcgtgaacaaaaagagatgtatctgtggagaaagaagaggttttctactcaaaaaaaagtgcctattctgaaaagaaacaaacaagtagttaactgaaaaaaaaaaagaaaaaaactaaatgagattttctgcactgttacaaygcccaaggacagttctgattcgatgccttagcaatt

SEQ ID NO: 527335 - DNA, 568 bp, Homo sapiens
aaacaaacatatgactgtatcagctaacaagtgccggtgctgaaaacatgtccttgaatttgaattcatggactttctgaaaattgactacaaaaacagtgttcaaagtattacagttcctggatttcctgccgtgtaattctcagcacatattgattttgaagctcaaatctttgcaattccctgataatgctattcctcagaataatgaagcaggaaggtctcctatgcccacaattgtgctagttgtgtaggaactgtgattttctttaaccacaggtatctgcatttgctcaggccctcattactgtatatgggatgttatttaacctccaatgaatctttygctagcatttttcctcctcctcatgagacccagttgagtcccttgcagttgcagcattagtcactatcataggtctcaggataattaacagagttaagccacctgctttttgctgcccctcaaacaagacaggcatattaagttcacgatccctagatgtgggcagtgccaagtcagaccgcctataaaggtttcacacagtgcttcaggcttgagtcaatt

SEQ ID NO: 527336 - DNA, 568 bp, Homo sapiens
aaacaaacatatgactgtatcagctaacaagtgccggtgctgaaaacatgtccttgaatttgaattcatggactttctgaaaattgactacaaaaacagtgttcaaagtattacagttcctggatttcctgccgtgtaattctcagcacatattgattttgaagctcaaatctttgcaattccctgataatgctattcctcagaataatgaagcaggaaggtctcctatgcccacaattgtgctagttgtgtaggaactgtgattttctttaaccacaggtatctgcatttgctcaggccctcattactgtatatgggatgttatttaacctccaatgaatctttcgctagcatttttcctcctcctcatgagayccagttgagtcccttgcagttgcagcattagtcactatcataggtctcaggataattaacagagttaagccacctgctttttgctgcccctcaaacaagacaggcatattaagttcacgatccctagatgtgggcagtgccaagtcagaccgcctataaaggtttcacacagtgcttcaggcttgagtcaatt

SEQ ID NO: 527337 - DNA, 638 bp, Homo sapiens
ccttgcgcttaaaaatttttcatccatcactgactaattatcagcgcaaatctggcccacagcctatattctcccatttgattctgtagcaggtggatgaaatttcagctacagtaaacccagtccctataatctaagtcctgcattagcaactcgtagcttaccctgaagaagtctagatgargtcagggccctgagtctatttgattccattgataataacaataaacctcaggactatttcaaggagactgtaaatgcactgagtttatttccatgaaaattaaacaaaataatcagtttggtgatctcctttaacacagattaaatgtaaggtttattgtcctcttaaaaaaaggtttgtttatgtacccaacaaacagttaatttgtacctactatgtgccaaatatgaagtctcttgttctagttggacaaacagagaaatagaccaacaatgaaaatatgctgtgatcagtaatacaacagatgtaaaataaatatagatgatttggtcactgagaagggcacccaacccaggaaaacgggggcatgtattacaggcaaagattcagagctgagagagaacaggctccctgtaaggccctgtcgacagctgggatggctggagtacagtta

SEQ ID NO: 527338 - DNA, 628 bp, Homo sapiens
ctgctgcataacagccaaaagggtgaatatacaaatatacagtgtaattgagggaaggagaagaacagagataaaactgagaaacacactgctatatgctggtatgacctttttcagtttgtcccttccttatcagtgtctttctaattgagacattatgaccttagtataaaacacccaggtttcattctatcaaatctaaagcctaccaaccagggcaaaaaatagaccatcagcctcattagcaaatagggcctagaattgatcacgttgctatagactcaatatctgttgggcttagagtggagtctggacatygaaataataattgagttggcactcttcagtgcatttggtcagcatatatcactgtaccactgccaccaaggtttgcagttgtacattgctcctcatctggaatgggaatgccacccactgatatggagtctagcccttctgagtctagcctttgccagatcttgtccttggaataaggacctcacttcccttactctgagctcttggctgagatcttccatggaagggaagctttggggttaattcctctaacctgctgggcttcaaacacttatcgttcatatgtctactgctaggccccatccacata

SEQ ID NO: 527339 - DNA, 582 bp, Homo sapiens
gcctgatatttaagtaagtgacctcctgttagccattggtgtccttttgtctctaagattccctatacttggtggtgggtcatgacatctaattgttgtcccaaggtaaacttactggcttcttctaccaatagagcagtggtggccacagcttgcaagcatcctggccatgtggctgccacctggtctagctgttagaaaagtaagccactggcctgggactattcccgggcctttgagttaggatgcccaaagccatcccttgtttttcagccacataaagggtgaaagtttttttctaarttagggagtcccaaagcaggagctgttcccagcttttcttttagtgttaagaatgcctgttagcaggttccatcccaattcaaaggctcatgatcactcccctttagagcttcacggagtggcttgctctaagctcaaacccaggaatccagatcaggattcccaaaaaggctattacttgcttcttagtctgagggactggagtgccaggatggtctctttttgcttttgggcaaaagtccttgttccaggagtgagcacatacccccaatatttagc

SEQ ID NO: 527340 - DNA, 561 bp, Homo sapiens
aggataatagaagtataagaataatttatgtaagtctcttcctacaagtttattttaaaatgttgtgagataaacaacgatatattaatctaatgacttctgacttattagacaattttgtttaaccatatcaarcacataaattgccttggacccagcatctaactaagcagttttcccagaggtggtaaacgtggtcctaaaagaaatctagatggatcctgcaaaaatatgaacattaaggcagttcattagcttagcctctaagtccaaaagctggacctccaaagcctatcatgtaatgtagatatatttcaaggttgttatctcacaactgtcaaacccagcctcttcttgctttctgctgcgtaatttatccttgagagtggcatgagagttttttattaatttgtttgtcaagcaacactctcagctctctcgtaattatgtttcctgttagtagcattaagtacaaacatagctcttgattttcacttgttaatttgtccctctcctacatttagatatagcaatagatatagtcataagatcagaaaattg

SEQ ID NO: 527341 - DNA, 610 bp, Homo sapiens
ctgcctctcctgagttgacaggaggcatgcaagagaccccagaagtgggctcagagctacctagagaagcttccgtggtcacagggcctccacctcagggccaggagacctggagtggccctacccagctctcccacaactccctgcaaaagcacattgcaggctttgtttgttttcaataaaagcttctctttcccacactccctttatatagtttctagagaaatagcacgtctggttaatactgaccttcctaaggtctttttgaatgtaagacacaaatgtatcaagkatgatcaaggttcctacctctaccagcaagctgattttttgcatttggtgggcctccatcagaccaccaaggaaacagtcatagattgtactgtggaggaaattcaggcgtcccgcggaggcctaagctgagtgacctttattcttgtgttcactggacaaatgtttattgatctccgcctatagactgactccatcctgggccttggggatttaagacagataaaacaactcctgctcccagtgggctcacaacctgagtcaggtgcctcctttgcaaagtaaggaattctgggattgccaccccttgccccttgga

SEQ ID NO: 527342 - DNA, 504 bp, Homo sapiens
tggccctgacactctgggatcccatcagcctgattgccttcaaggtgcccacttaaaaggcagcatttctaactgtcattgcagcgaatatctrcactgaattcttcacagattctgggcatctcctccccaaatttattttcttacagctttggagatgggaattttctggggtccttttggggacacataattagaggtaaactgtctgtcatatgtgataaatccaccctactcttccaatcttcctaagccatttgatgcatttctccgtaccaagaaaattcaagcatcctaacttcatttagtgagagtaatcctttaatgaaacaagcaagcaagcaagcaatcagagtcactcttagatacttaacatttcaaattcaatttagaatctgtggtctagaatattcataccaacaaattcaagaaaaatattaacattatattccttccaatctgatccaacattcatgaggatctatttctcacatgttcttcagg

SEQ ID NO: 527343 - DNA, 640 bp, Homo sapiens
ctgcactgcattatttacccagaaatgtgaggtgagatctagatgcacttccaaaggggtgctgaccaccttgaactattttttcagctttgcttggcctttgaggcccatcctggaagaagagattaggaggaacagatttgatgaactgaaagaaggaaatggctgggcttccattttctgtctctgtagatttaaaaattaaaaaaattggagacccagggccrggactgtaagaacattataaaactgcatcttttgtcatccatgttacttatttttatcatcttcaactgtgtcctccaagttagcctttggtagctgagggattatgagcttatttgggagaaagcaaagagaggggatctggggaggatatatccatgtgccagccaaggactagaaagtgtcatgactccttacaaaggacaggagaggaagggtcttgaagctcaagtttctactgtaaaagagaagagttagccgggtgtggtggtgggcacctgtaatcccaactactcgggaggctgaggcaggggaatcgcttgaacccgggaggtggaggttgcagtgagccgagattgtgccactgcattccagcctgggtgacagagcaagactccatctcaaaaaaagaaaa

SEQ ID NO: 527344 - DNA, 594 bp, Homo sapiens
aggattttctttaaaattaacaaatgtaccttgcagtatgttcagcacaatattaagttgaatctgaatctccatttcctcgagtagaaacaggttgaggtggggtggagaaaggcatyaaatttttaaacctacagatgctttctaaagtgtctcacagttctaaaattgtataattgccacttacagcaccttaaatttcaaatgaaaagtggagctaaaaatattttatttgagctgtggttggatcagttgaaatggttttccaagtgagagacagttactggtgttttgttttacaaacactgacagatttaccagaaacattcaatgtcagatgttcctgtactaaaaatgttaactatgggataagaggaaactgcttcagattcagggccaaaggtgggggggggggggcggtgcagggggagcaagaggaaattacaagttgaaacaatgcaaacttttggaagattttctgaagaatttcatcatgtaatttccaatgtcaacaaaacttttctctgtaattttggctccggttggtcttaggccaatacttttaaatcagttcttattagaagaaaggaacaa

SEQ ID NO: 527345 - DNA, 594 bp, Homo sapiens
aggattttctttaaaattaacaaatgtaccttgcagtatgttcagcacaatattaagttgaatctgaatctccatttcctcgagtagaaacaggttgaggtggggtggagaaaggcattaaatttttaaacctacagatgctttctaaagtgtctcacagttctaaaattgtataattgccacttacagcaccttaaatttcaaatgaaaagtggagctaaaaatattttatttgagctgtggttggatcagttgaaatggttttccaagtgagagacagttactggtgttttgttttacaaacactgacagatttaccagaaacattcaatgtcagatgttcctgtactaaaaatgttaactatgggataagaggaaactgcttcagattcagggycaaaggtgggggggggggggcggtgcagggggagcaagaggaaattacaagttgaaacaatgcaaacttttggaagattttctgaagaatttcatcatgtaatttccaatgtcaacaaaacttttctctgtaattttggctccggttggtcttaggccaatacttttaaatcagttcttattagaagaaaggaacaa

SEQ ID NO: 527346 - DNA, 594 bp, Homo sapiens
aggattttctttaaaattaacaaatgtaccttgcagtatgttcagcacaatattaagttgaatctgaatctccatttcctcgagtagaaacaggttgaggtggggtggagaaaggcattaaatttttaaacctacagatgctttctaaagtgtctcacagttctaaaattgtataattgccacttacagcaccttaaatttcaaatgaaaagtggagctaaaaatattttatttgagctgtggttggatcagttgaaatggttttccaagtgagagacagttactggtgttttgttttacaaacactgacagatttaccagaaacattcaatgtcagatgttcctgtactaaaaatgttaactatgggataagaggaaactgcttcagattcagggccaaaggtggggggsggggggcggtgcagggggagcaagaggaaattacaagttgaaacaatgcaaacttttggaagattttctgaagaatttcatcatgtaatttccaatgtcaacaaaacttttctctgtaattttggctccggttggtcttaggccaatacttttaaatcagttcttattagaagaaaggaacaa

SEQ ID NO: 527347 - DNA, 609 bp, Homo sapiens
tattttcccagtcctagtcctggaatcaactccaaggagtcctyaatccttttattaaataatggtttttagaaaccaaaatctgggcacctggtttgctcactgctactaggatgttgttgattctaggccttctcagcaaacggagatagcaaacatgaataacataatccacatatatatacacatatctatatttctgtatctttccatctgtgtatatttaaaaacatgagtttatacagatacttctgtttctgatctaataccacagcattcatttaatcccctttccttatctgtaacttctttctccaacagtaagaaacctggttctcattatctacaatatagtttacttattcatgtataccagtatacacataatatagtttcagaattgctaacacatacttctaactagatgacagcatttatgttcagctctctttatctttagtttagttggttttttgttttgtttttgttttttgtgacaagctctctccctgtcatccaagctggagtgcagtggcacaagcttggctcactgcaacctcctcctcccagcttcaaacaatgctcctgcctcagcctccaaaacagctg

SEQ ID NO: 527348 - DNA, 452 bp, Homo sapiens
ctggagagccaagagaacccttctgatgcattctagacttttacaacrtaaagtggagaccctccaaaggccagaggagggaaagcaggactaacaaggcacagaggaaaggaagcagactcaaaaagcacagagaatgccccagcaacccaaacacctggttggtggtttgtaaagcagggagagcttacccagagttggagaattggcagtttgggtgtgaacaagaaacagatttctggaatcttgccagttctcagttctaagcctggatgaaaggacaatcgtgatccttcaaaaaaacatttgaagcccaaagtgaactgaaccaaaccaaattcacaactaagcccatttcaaatacaaagcataatgacttggtcctcactctctagagtaaggcctagtgtaagaagagaaatgccatttcctggacatatatattattttag

SEQ ID NO: 527349 - DNA, 440 bp, Homo sapiens
cgctgggaccagacaatgcagtgttccagttctgccatttgccaattgggtgatgttgggtattcatttctttatctacttaactattcagcaaacatttattgggtgcctaccatgggatgggccccaggtagagttctgggtatctagccatggacaagacaaaccaagtgttttatctgaaatttctcttatgcgtttgtttgtctcttctcacattctggtggaagagacagaggaacaaacacrtaagagaatgctaagtgctgtgaagaaaaattaagcagggtcaaagaggtgtctattttagcaaggaatgccctttgagggggtgatgtttgggcagagacccagatgtagtgagaaaacgagacatactgaagtctggaggacaagcattccaggtggggggaacagcagttgcaaaggccctgaggcct

SEQ ID NO: 527350 - DNA, 401 bp, Homo sapiens
gagtcaaggggatctggagaaggctgaacttcaggaccggtgagatggcctggggtcccaagaagggttcgctgagagagagctgactcctttagagggttagggacaggcagggggaggtgccaggaacattcctaccatggagggggagaagatgtgcccaaggaaatctactttgaaacctgatgccacagttggggcttgtactgacctctgccctcagcctgtcttttagcccagtttctttcctgttgatttatggagctagctatgactccatcctccatcaacaccaaagtgcttgccattcccagaacagccaagctcttccccctccctgtctttgtacctgctgaatttagtcyggaatgcctccctcccttctctctctgccttatcct

SEQ ID NO: 527351 - DNA, 619 bp, Homo sapiens
ggtctgggaggaggctccactgatgtgcttcaattaatcagtgactcttacctatttatgaagtgggctcctgggtaagatttagtttgaacaaagggacttcccaacacaagagtggtagaacagtgttgggagccactgggctggtacgattcctggactagcccacggtagacagtggctcctcatcctgaaggctgcagacctgactgccccaggtatagccattgtctgaggcccgaactgactcaccttcctggttgtcaggatgccctggttgctctcagggtgggtggtgatggtaaaatggtccccgtcgtcaccgcccatgataaggtaggtggcacgccacgctggtgagttgggggcgtccagatcagtgaccgtcagcctctgcacctcatggcccactgcattctcaggcacatgggcctcgtactgtcagtgtgagaagcacagcactrtcagagcagagaatgactgtcctactccagaggctgagaagcctccatccaacctcaggggatccccatgcctttaccctttcctggaccacctacccactttgcggggtttcagggtatacacagcggcaggatgtccccagcagcagcctcac

SEQ ID NO: 527352 - DNA, 619 bp, Homo sapiens
ggtctgggaggaggctccactgatgtgcttcaattaatcagtgactcttacctatttatgaagtgggctcctgggtaagatttagtttgaacaaagggacttcccaacacaagagtggtagaacagtgttgggagccactgggctggtacgattcctggactagcccacggtagacagtggctcctcatcctgaaggctgcagacctgactgccccaggtatagccattgtctgaggcccgaactgactcaccttcctggttgtcaggatgccctggttgctctcagggtgggtggtgatggtaaaatggtccccgtcgtcaccgcccatgataaggtaggtggcacgccacgctggtgagttgggggcgtccagatcagtgaccgtcagcctctgcacctcatggcccactgcattctcaggcacatgggcctcgtactgtcagtgtgagaagcacagcactatcagagcagagaatgactgtcctactccagaggctgagaagcctccatccaacctcaggggatccccatgcctttaccctttcctggaccacctacccactttgcggggtttyagggtatacacagcggcaggatgtccccagcagcagcctcac

SEQ ID NO: 527353 - DNA, 334 bp, Homo sapiens
ttttgaagaactttctctaacgttttgaagatagcattaaaaaaaaaaattaagttgcaccaggaggcctaagaaggttccattccagagagaaagtccactgtaggtcagtcacagcaggcccaggcccaggacacagggttgagcattttacggcaggtaagaggcttctggaaacttggcctctgaggcaaccctggcccaggtggagaggttttcagtgctgaagtcaaactgcccacattcctccatcctgaaaggctaaggaagcmaccactctaacgtcagactcatagcctgtctccgccaagttgctacggccacttcctgacaa

SEQ ID NO: 527354 - DNA, 554 bp, Homo sapiens
gcagcagggaggtgagagcaccctgcactgggtaacctaggaacacagtggcatatgaggaaatgggaagggagactagaggtttgagacctgctccccaggcacaagctactggtgatgcaggacagagttttcagcaagttaaccctactctgctgctaagccaggaaagcggcctgctaggcttgaaggtccagttcccattcactcctcggagccacatttatggatatctccctgggctgtggaggcaaaacaccagggtttaattcctggccttctgtttgttgcaccagtgacctctcactgacttcctcaacctcattttacagctaagtggaaattatcaacaactgctttgcagggcagcccataagcacagaaaattactaaattagggcccrttggtcacctctagtcggtcctgtcctgccaccgcacctgccagccgtattctccatgcaattcaacaagggcccctcatactggctctccgccgaggtcaagaaccggctcctgtccagatatgacccccagaaggaggcagagctcca

SEQ ID NO: 527355 - DNA, 557 bp, Homo sapiens
cggggcccagcctggagttttaaatgacagattctttgaccttccagggctaacctggtaatctatccgtcctcctccccgccaggcctgtggctaagccatggattgcttgcgttgcgagggtgggggtcttgctctctcaggcctagcatgggcccttaaggccggccccacctgggttcaaatccaggtcccaccccttagtagcgctgaagcctcggggaagtaaaataaaccccctgggcctcagttctgcatctgtcaaatggggctgttatgatcttagtattttaccctctcatagatgagtattaaataaattagaaggtttaaaacgctaaacatcatatctggcacacagcaagtgcccaaatgctgcctggtattattgctctcagatgtctggcgagccgtctctctttctagcatccccacatcccctgaattaagagaatgagaagcgttgtaatcctccaatttcatggctgagggtacaacgakcaactggcatctggtatctcgggagcattcccttagccggcgggtgagcccagcag

SEQ ID NO: 527356 - DNA, 328 bp, Homo sapiens
ctggctataggcataggcaggatagggaccagtacttaagagctrtggggtcccagttctggctttgacttctggcgtcaaagttaattgaacaatggtgtcaggattatatcttaattggaaatattgagtatgactgagttgaaatactgtcctcttcttttctatttggccaatatgtcccagagctcttaaagcacaaaggtcctacatgtaagtaaggctgattccatacgtggctacaatggagagttctaggctgtattcctatgaaagctcccacccccttcctggcctaggtctctttttggggtaatttctgtctgtc

SEQ ID NO: 527357 - DNA, 541 bp, Homo sapiens
caatgattttgccaaactggtgtagtcctcagtattagctctaagttctctctttctaaataagctggcggtattttcattgtatttattaaagtccacgttatcactatgcagccaattataaaacttcccaggagtaaccattattgcttcaaaagttaagtatttcctgactctgcaatcaggaaatacacagattgtttgggactaaagagcaaagctttagctttctttaaaaagaaacattttaattttgawgactgtagtctttattatactgtttaaataatcacaagtgtcccatgcttactaattatggatataagagaagattaatctacagtacaatgtcttttttattcacacggttcactgataacagatgaacttcaataaatgtttaaaaatagatatgacggatatcagcgtgagaataagcttcctaaaacatatttaaacaaaaaagaactgtatcaattattttacaattgatataagcttcactgcttgatattattaatcttttataataactatagta

SEQ ID NO: 527358 - DNA, 581 bp, Homo sapiens
ctttcaaatgttaggacatcctgttcaaaagagctaggcaatgtaatgttgccaaagggatttcatgtttgctttcaaagactcctattcatgagtttcattgtggatattcattaatccattcctttaaatctgtctacatgaaggacgctcttctagatcagtgcataaaggaatgaagaaatcaggctatatccaggtatccaagaacttgcagggataaagaacacagggaatagcactgaaaaacaccctaaagcagcagagaacagggtattattcatttgagaagtaccaagaggagacaatgtgaagacagaagaaggagaaggccctctgcaagcccaggagagaggctcagaacagatccttccctcacagccctcaggaggaaccagccctacccacaccttgatcttggatttctagcctccagaactgtgagacaacacatttcaattgtgtaattcacccagtttgtggtacgttattayggcagccctagcaaaatacagattctggatctgtatgattgactggatctggtgtctgatgcaagaaatatggacgagatttgtacc

SEQ ID NO: 527359 - DNA, 571 bp, Homo sapiens
ctaaatatgtgatcaaaatttttcagaggtatattttgtggtatttacagcaagatgagaatgtattttaaattgatctttgatcatatttttatcttttaaacatgttctgcctcattttctctgtaataataactataattatatccattcctcattataaagctgctcttttttcttttctgacattctgccttcatcgactaatggtggtgaggctactacctcctgaggttacttataaaattaaagcgattgggaaggaatgttacatgcagtccacattgtatgtgatacsgagaggagacaggagggcagagtccctgatgagagctccacccttaagcctggacccgtggccctgaatgagaacaggcattgctgctttcctgcccaaaggctgctttttccaaaaccaccgtggcccaccatgtcccctatcctgtacctataaaaaccccaaactccactggcagaggaatagagtggcacagcagagaaggaaagaatagaagtgtctgaatgtcaaagagggagctggacagtcagagaggagtttggctggggacag

SEQ ID NO: 527360 - DNA, 571 bp, Homo sapiens
ctaaatatgtgatcaaaatttttcagaggtatattttgtggtatttacagcaagatgagaatgtattttaaattgatctttgatcatatttttatcttttaaacatgttctgcctcattttctctgtaataataactataattatatccattcctcattataaagctgctcttttttcttttctgacattctgccttcatcgactaatggtggtgaggctactacctcctgaggttacttataaaattaaagcgattgggaaggaatgttacatgcagtccacattgtatgtgataccgagaggagacaggagggcagagtccctgatgagagctccacccttaagcctggacccgtggccctgaatgagaacaggcattgctgctttcctgcccaaaggctgctttttccaaaaccaccstggcccaccatgtcccctatcctgtacctataaaaaccccaaactccactggcagaggaatagagtggcacagcagagaaggaaagaatagaagtgtctgaatgtcaaagagggagctggacagtcagagaggagtttggctggggacag

SEQ ID NO: 527361 - DNA, 461 bp, Homo sapiens
aaaataaataaataagtgaaccaaaaggattttacaaagtgcaatgataaatctctctgggctctagttgttgcgtttatttgaaagacacgaagcaccttttgggtgctccttaaaccattttatctttacctgtgcacagtttgacratcgcttttttacttcagggaaagagtaaaggacagaaaagaaaaattgaaacaaaaaaaggacaataaaagaatagacagagctcacaaacttgagttattgctaacgtcctaataatatccctttcagttcactctttcaccagcataggatccaggaatgaggaatcttgcgggaattttgtatccatagcttcctcagcatttgaagatggaacagtcaagctgagttactgtctagataggaagaaaaatgaactattaaaactgcagaaaatggtaaagctgataaattatattgtatccctgtca

SEQ ID NO: 527362 - DNA, 362 bp, Homo sapiens
agagttttacatttttatctcacttagtttgcaaaatgactatattgggtaggtatgttctatcccctttttaacgatgaggaaacgagagcaagtatttgagttagctgaaatcacctaatgagaaaatggcaagatgagattcaaaaccagtaagtctgtctcaggagcctgagctcctgaacaatgagctgtacttcaaaataaagggatttggcattggaggyagaggaaaaaaagcataacaattgcaaatgggctttcccctaaaatacatttttttttaatttcttaaggctaagtataactggatttcatggaatccttgaaaaatctcatctaggaaattcttctgattaaat

SEQ ID NO: 527363 - DNA, 362 bp, Homo sapiens
agagttttacatttttatctcacttagtttgcaaaatgactatattgggtaggtatgttctatcccctttttaacgatgaggaaacgagagcaagtatttgagttagctgaaatcacctaatgagaaaatggcaagatgagattcaaaaccagtaagtctgtctcaggagcctgagctcctgaacaatgagctgtacttcaaaataaagggatttggcattggaggcagaggaaaaaaagcataacaattgcaaatgggctttcccctaaaatacattttttttwaatttcttaaggctaagtataactggatttcatggaatccttgaaaaatctcatctaggaaattcttctgattaaat

SEQ ID NO: 527364 - DNA, 487 bp, Homo sapiens
cttatgactgcatgaatatatggtcagggcccttcccaggccttgaaaggagtctgtgtaaggggccctgaagcataagcttcattagcttcatctaaaattcctgcttctcatttcttttcattgtttgtcttcctttcccactcaaactccsgtcacttctctgcttccactccctacattctgactattagctccatcacgatattgaaattgctctcttgaatgcattgacattcaactgcttttcctcaattctggtccaacttgatcttatcacatactaggccattgatcacatgctccttgaaactcctccttccttttgttttctggtgactccttagttccctatttgtcttgtagccttgcagccttccttctttgccctttcctggcttgtctttctctttcacctcccaccttatatggatccctacagttctcttctctgccttctatactcatcatcctgtgaactccagag

SEQ ID NO: 527365 - DNA, 650 bp, Homo sapiens
ggtatcctcctgtgcctctgctcagcagaggtaaactagatttgggtcataattaaagatccttaccaaggaagagctgagtgctgttagatcacagcaccagccttctaaatgactctgacctctccggaaataaagattctcatcagagtaaagcagtttaaccagcattatgagaagatacaaatttgattggccatggagccaactaaatgatggaattagttaccaagagaaaacatcagatttcttttcagagaagaaagtatctcctgtgactaaaatgattcagatgtaaatatgcttgaaagtgaaaaacagtctcctccatttctgtaactcagtttttgaaaagagttgtaaaaacagagtaggagaatttttaaaggtaacccagattctttaagtggaagttctctttctactagtacttcttgtatttaaaaaagacttggtggtgggrgggaactactaattttgcagaatccagaaagttctgacagattcaaatctattcatatcaggcaagaaataatcataagagataatattttcttcttagaaataaattacctgggacaatttttcaaaatctgtgaacctcttaggtaaaaactaattgttttacatgataaatgagatttattaaa

SEQ ID NO: 527366 - DNA, 563 bp, Homo sapiens
gtgtcttctagctcttctattgagttactcatttctactcatatttttaacttctataaatcctttgatttcttttcctttgttttagcatcctattcttattagcttatcttttaaakaatgactggtaatgttttcttctcactgtataacttctgtgtccctcaggtttgttgtttttcatttgttatggtgtctttaatattaaatgctttctttgaatgtttcctaatcttttactatctgctcatatttcagggtgggactgtaaagctaattggaaactgtgcatgtgggtgtggcttgtcaacggttatattcactatatggctggaacatttctttgggaaaagtccaatgccaagagtccctagagtgaacaatctcctaccttgtacccagcatttcagaagccatgtggggaagaaggctgggcctagcttctggtatatctgtaagcgtcacttaattttttctttctttttttttttttcttagaatgttatattagtttgctaggactgcagtaacaaactactacagactgagtgtctttggcagag

SEQ ID NO: 527367 - DNA, 608 bp, Homo sapiens
agccacatgcggagagtaaacgttcagtatagaaatattgtacgtgtaaacaagaaaaaggagtggtatgtcatgataatttagcacagataaacaacttttcaaagaggccgcccacagaaaccagtttggtgagaagtaaaagcctttcttctagaagtttaaaaatgagaaaaaaaataatgagaataaacaaaaagggcccttttcccccaaaatgccaactatacttgtaataagtatatttaatttgatagtccgcrtgataacaagcctaaatatgcggtttaattcctgttctttagagaagagtgtggtgactcttaggtaagttaaataaatcttatagcccagaccactaatagctggcacagcactgctgggatttgaaccatttctagttattccaaattaataatcttctggctctgcagcatcagttatccttattcaagctgacaacgaataacatattttacttacatactttccaatggaaaggaatcatattctactttactctttaaaaagtcaaccatcctttcatttacttactcagagcagcagagtgtgaaaaaaccatcagagagattttaacagtagcatgc

SEQ ID NO: 527368 - DNA, 546 bp, Homo sapiens
actttcatgaagcatattagagaatctcactctgccagcatgaatgccttctctgttgtctattatatattatcaccatcacttaaaaatttcaccatctttattccactttttcacttgaaaatttttgtatgaagactcttacgttacactgctgctttgcccgtgaatatggtgctctcactcaattgcaagcctaagcagtgtgtcaaaaaacttggttaaaagcataagcagatagcgacagaccagaagataaaatattgaatactgagacttgatttgtaatgaatctatatcccagatgccaaaatcatttggctacccatagtttaagagatccaagagaacacttcaaagaaatagatacaagggacgaygagtctttgaactaagaggttctttcaggaatggaaacacaaattgccaaaaaaccacagatgttcaccacgtgaacaggtgaaaaaatactactctttcaaatatatttatcaaagtcttttctgccttcctgtaatttcattttaaatgggccttccttttcag

SEQ ID NO: 527369 - DNA, 505 bp, Homo sapiens
tgaaattaagttgatgttgagccaaataagaagacttataaagcttaattcttgaatgctgctctattttgtgacattactggtaacaagtcacatcttgttggagattttagattaaaaatgatctattttgtaattcagagtattactgcaagtccataaatttggttttgtctcctttttatacataatgaactgagttgcagaaagttaattgacatttgtacccatttatgccattagttagtgtggtggattcaaactcaagtttttcagctcccaaattgttattttaactttaattaattagagattatcttacaaaagccattaaagtctatagcactttatttgtgtaacarcggtccccaacctttttggcaccagggaccggtttcttaaaaaacaatttttccatggacctgggggtggggcagggtggtgatcttgggatgaaactgttctacctcagatcatcaggcattattagttgaattctcatgtg

SEQ ID NO: 527370 - DNA, 677 bp, Homo sapiens
accagttttctacttctagttgacaacaatggtaactaccatgcgtcaggcttatttactatctgccaggctacagactcatcatctgccttcatcttgcaccaactctcaaaggcacatgttacagatgttatcattctcacttggcagtggtggaaatgcacccttctgctgggcrgcatgcagtttcaagctatcatctctttcctcaccttgtctttctgcacatccacggcactctttagaaggtaattttttttaaaatctctcaaatctcagtttaatttcacactgctccttccttatcaagctggcccacccatcctccctctcactgtcttcccccaggggctcaagttcatcattttctcctgcattgctgtctcttttgtactgtctcattccagttggtccaatgagtgtcccaaatccttgctttttggctctgctgacttattttgtgtgtctcgagaagtgagaaacgtctttcttacttaaaaaggaggaggaaagggggaaagagatggagttttaggaataggtgggacaccgattttctccacagagcacagaaaggagggacagaggttagttcaaacaactgcctggcattaatgaaggtgaagccatacaacaaaattgcactgtttgccttattgcactgtttaataaggcag

SEQ ID NO: 527371 - DNA, 677 bp, Homo sapiens
accagttttctacttctagttgacaacaatggtaactaccatgcgtcaggcttatttactatctgccaggctacagactcatcatctgccttcatcttgcaccaactctcaaaggcacatgttacagatgttatcattctcacttggcagtggtggaaatgcacccttctgctgggcagcatgcagtttcaagctatcatctctttcctcaccttgtctttctgcacatccmcggcactctttagaaggtaattttttttaaaatctctcaaatctcagtttaatttcacactgctccttccttatcaagctggcccacccatcctccctctcactgtcttcccccaggggctcaagttcatcattttctcctgcattgctgtctcttttgtactgtctcattccagttggtccaatgagtgtcccaaatccttgctttttggctctgctgacttattttgtgtgtctcgagaagtgagaaacgtctttcttacttaaaaaggaggaggaaagggggaaagagatggagttttaggaataggtgggacaccgattttctccacagagcacagaaaggagggacagaggttagttcaaacaactgcctggcattaatgaaggtgaagccatacaacaaaattgcactgtttgccttattgcactgtttaataaggcag

SEQ ID NO: 527372 - DNA, 656 bp, Homo sapiens
taaaatctctcaaatctcagtttaatttcacactgctccttccttatcaagctggcccacccatcctccctctcactgtcttcccccaggggctcaagttcatcattttctcctgcattgctgtctcttttgtactgtctcattccagttggtccaatgagtgtcccaaatccttgctttttggctctgctgacttattttgtgtgtctcgagaagtgagaaacgtctttcttacttaaaaaggaggaggaaagggggaaagagatggagttttaggaataggtgggacaccgattttctccacagagcacagaaaggagggacagaggttagttcaaacaactgcctggcattaatgaaggtgaagccatacaacaaaattgcactgtttgccttattgcactgtttaataaggcagcatgtttgcatgctggcttgactgtgcgacagtagataagatgcttcrtttttctgagtctcagtttgttcattgtaaaatgagttcaaagacaggtataggtcgcagaggtgtggcagggattaagtgtaataatataggtgacagagatccagtgtggagaaggcactgagtgaggaataagtgcttttcttggacaaggcactgtgctaagccatttttacatagatgatcttat

SEQ ID NO: 527373 - DNA, 600 bp, Homo sapiens
gttggctaatccatgaaccataccagcaaaggttggaactaaaagcagttaaaggactgaagtgagacagcactcaactgcaggctttgtaaagactgtggtgtgagtataacayagttaattgactactaaaataaaagcagcaacacatgtctaaacaatgtaactgaatcacaaatttacacattagcatacacattgtctagaataaagtgaaaattatgagaaaatgaacacattgtaactcatggtgactagatgtaggacagacaatgactataaaggagctatgagaacaatactcagtgaagctgaaaaagacactcttaataatgaaaagttataaattcagcatggaaaaatagaaaacataaaaagatccaatggattttcaggatttaaaaatatctgaaatacttctttcacaagccattcacttgttgccttagtagcaaaacagagatgattaaagagtgaatgaacttgaagatagattaacagaaattacccaagaaaaaggtgacgcataaaaattcacaaaatgaatggagcctagggaagctatggcatgctattgaaatgtctgacatatggattatt

SEQ ID NO: 527374 - DNA, 488 bp, Homo sapiens
atttggatatttttgagcatttaccatgcattagacactcttctgtgttcttgcagatacaatggaaaacaagaaatgaaacctctgctgtcaagaaattttcactcaaattaattagtatgggactggaattaacatttcattttgtacataattttacaacagtccatttttagttcagtgttgtatttaaagaaatgggagtcaaaagatttacactaatggagctatcaactgaaacagttatttctaaggcttttctaccattaagtcttgaaaaatccatataatccttttatctccttacagaaaaaaaaatgcatattkttggttttgcctttatacactgtattgaagtattgtggggaacttaagagtgggattatttttcagcttattgaggacaaataacaagccaccatttagcatttggaagccaaaaaaagaaagatgattgaggtcagaacagattaacacaaacactgaac

SEQ ID NO: 527375 - DNA, 511 bp, Homo sapiens
tgaaggggtgtattgtgaaacacaggctagttttatcaataacatttttctacttcattagctttatttagccaggagrctgcaaagagggaccacagacctcttcaccattactttgcttctgtcaagctgtgaggaaaatggcagtaaaacctcattgagccctaaagggcaaccatgaatagatctacttcctttccctgcctttacttccagaactctctgatgatgtttaatgcacattaattaaagcatgcactttaattaatagaaatattcacttgctctcctattacatctctaggaatcatgcaaattgcctcttggaatcaagtagaagaaaattagggtttgtgtctaatcagaggcaactagatcaggttatttttaatataaagaatatctagtttatatcacctggaccctcaatgaatccatagattcagagaattttggtgctttagacacaaaaatactaacacaaactttacttgatcttcttagaacgatg

SEQ ID NO: 527376 - DNA, 647 bp, Homo sapiens
catgcctgccaaatttgggaggggggatttattgaaacaatctcatcaggggccctgactgccaagttgaatgtttgggaaaggaaatctcagccaggctctcagaaatccagstcccaagttcccaggatcgcaagatgctaaggttcgcagactaagagatgactagggagatgatgctaagatttcaggctgtacactggattttttttctctctttctctctgcttctttcagtccctctctcctctctgcatgcaagtaatctttagggatctatttgtcaccaagactgcctgcaaggagggtccacccaaagctggagccccaggaaaaaagctttctctctctctcgctctctctcgcacacggcccaggcaagcactccctccttctcggcagctcagctctcttcaggaattcaggacaagtctcagccacactttggaaaggacattaagatgtgggaccagccagacatccacagcagccgtgagctgcccagggtgggtagacctggaggccaagccagggggccaggcatgtcctcaaggagactgtgaccccctgaggtggcagccaccgcaggctgccctgtgtgtctctgcacccttgccctggccagggcatggtcccagagccaaccc

SEQ ID NO: 527377 - DNA, 308 bp, Homo sapiens
tgtgatgaactcacctattagaaaagacattattgtgataaaaacaaaaaacacagattaattttataaggttgcagttataccagagtgaacattttttaaaaggaaagatttttaagtagaaaaatccttcagttataattaaccacagcataaaagactttaaaaagacttttttctttaaaaaaaaaaaacaaaaaaaacaaaccctattttgttccctcgttcttctttctgaagtgsttgcacattgtttatactgcttttataactttgcaaatgataccactagtttcttttaaccatta

SEQ ID NO: 527378 - DNA, 560 bp, Homo sapiens
  misc_feature (1)...(560): n = A,T,C or G
catgaaatgcacgcagagactcccagaaatattgaacaggggacctgcgtgaatacatggaggcaagccatggaaaatgtaagacactgggatgaatggagcattttcaaggtagctctttctgtgtttatagcaaggtgaggcaggggtatatttgttacacagtttagccttttctggacttggggatactattggcatcagttagttccttttataactctagcrgcatatgtgtaaaccaaaaagaaaagttaatcttccaaaaacaatgttgcttccccaggcatgatctctcatatcataaggtctccttctgtctccttgattcatttcttcatttccttcatgtctacaggaataaatcacagcaggctagttctgggatcatcacttaggggttatttggaacccatgtatgggagaagtttgatttaagctaancaaagctcttgttagccttgtctgtacacatcattgtggatcccctcatcaggtgtttgtgcgtaaggaccaaactccaaaatccatggtagccaataatcctgacatttttggag

SEQ ID NO: 527379 - DNA, 597 bp, Homo sapiens
aagcatagtttaagaaggcacctacttttgttgtttgcaaattctattttgtattaaataaacacaatgaaaaattttccaagataccaataatatattttaccccaaataaaacatttaggcaacagagacacagagaatatgtttttccctggatttgtgtgtgtgtgtgtgtgtgtgtgtgtgaggtgtagaagcttaagaaaatgagtaccatcgagtataagtccccaggcctgtaaactgcacaaacgagaagaatagatatttctttttttcccttggattgcttcttcagcctacactagggaagaattggtcttcttggagccataaaaacagtatggtgcctagttatcatcccagaagggagtcagggattattaaccaaggagcatatctgaacaatttttaacatccccaagtttgtaattccttatatatctgtctgtttccccataaaraaaaatcctgagtgtttggttccatggccatcaagggagggacgagaaacactgtctctatatacagctaaacatgaagaataactcacaagggatatgagggcggtgagaacaacaaagtgaagaggaaagg

SEQ ID NO: 527380 - DNA, 510 bp, Homo sapiens
atgcatgattttgtttttgtattatttcagtttagcatgagctaaacatttattagacaaaataacataaatctaagttataaagaaactgataattatgattatattaaaatataaatgctacatatatcacaccaataaaaatraacacacattattgtctaaaatatttaaaacacatgtaaacaacaaatgattactatatagaagagtccacaaaatcgagagcaagacaacgcaatggaaaaacaagcaaatgacattcagataagagtaaatttgaatagtcagtaaagataattcaaaatgctaaaattagactagaataaaaatatttaaaagcacacaatgaaaatcatttcacacaataatatttacaaaaatattaaactctgaaaatgccatgtattggtttttggtgaagatgtggtgtgaagtcttaaatatagctgttagaagtgaaaattatactaccacattaaaaaataatttgttaatatataggaaagt

SEQ ID NO: 527381 - DNA, 510 bp, Homo sapiens
atgcatgattttgtttttgtattatttcagtttagcatgagctaaacatttattagacaaaataacataaatctaagttataaagaaactgataattatgattatattaaaatataaatgctacatatatcacaccaataaaaataaacacacattattgtctaaaatatttaaaacacatgtaaacaacaaatgattactatatagaagagtcyacaaaatcgagagcaagacaacgcaatggaaaaacaagcaaatgacattcagataagagtaaatttgaatagtcagtaaagataattcaaaatgctaaaattagactagaataaaaatatttaaaagcacacaatgaaaatcatttcacacaataatatttacaaaaatattaaactctgaaaatgccatgtattggtttttggtgaagatgtggtgtgaagtcttaaatatagctgttagaagtgaaaattatactaccacattaaaaaataatttgttaatatataggaaagt

SEQ ID NO: 527382 - DNA, 546 bp, Homo sapiens
ctgggccatttgcaccaaagaattttctaatgttcttggacacccagatcccgtgggaccttccctctgctaacccaagacgcggaggagggtgtgcattgtgtgggaggttgttacctctcagcatttctgctgtctcttgtaaaattttataaatgaaaaagctcccataccaatccctatttgagagtttcactgaggtayacagaatcctctgttcttcacctcccaccttgtgtcccttcagggatgtctgtggtttgggggaaaaataataagtttctttctttatttccttcttctttctttctttctttttttttttttttttttgaaacagggtcttgctctgttgcccaggctggtgagcagtggcacgatctccactcactgcagccttgacctcttgggctcaaacaatacacccacctcagactcccaagtagctgggacagcaggcacttgacactgcacctggctaatttttttgtatttttgtagagatggagtctccccgtgttgcccaggctggtcttgaactcctgg

SEQ ID NO: 527383 - DNA, 575 bp, Homo sapiens
cacttcctgcccttccaaacttttaccctgtctaatagtaaagatgataaaaagtgtatagcatgcctagcaccgggcactttccctgtattaatttatttaatcctcatgaaaacctgtgataggtgctatatcagcatacttttcatagatgagcaaactgaaggcccagagaggttaagtaaattgctcaaggtcacacagctagaaggctgcaggggcaatttgaaacccagcaatctggctccagaatttgtactctgccacctgtctttctaagatgacgctaggacatgccttctaaatccttaaagtggtgatcattaaaattgtggtcagctttcatgacacctgctgccatggaaccctgggtatgtaaatgaaccataaaacatgttctggaaccttgatatagactagttcattttccccccgatgtcacgtgttattgttttttcttcttttaaattggaaacactggatgcaaacctaatatgaggaaggagctagaggakgcaaagtcaatagttactggttgcagtttatacatggccttagctgcaggacacgcaggt

SEQ ID NO: 527384 - DNA, 618 bp, Homo sapiens
ctgtcagagctcaacagttggtgcagatagctgccactcacctggattacggcagccggtgagaatctcagtagataatgaggatcactgcagatggcatgatatttagcagactacggatctcagcagtcatccaggatctcaacagtggctgtgactctcagtaactggctaggctctgcggaattcagagaaggcacacaattctggcacttctccctcaggagaaagggaaggagagaagaagagtttcacctgatgttctggcctctcagttcacaatcctaggagaaaagagagagtgactctcagtacctggtgtggatcaacgggattgggaaaagatgcactattctgatttttcagttttcaggaaggagggaaaaaagtgaaacttgtgccagcatctcagctttttagtatactatcctagggaaaaggagtggatgacttttagcacccagctcagttttgcagatctggaagaaggctcatgattctgagayttctcccaaaagagagggagagtacagaaacatgcacattcataaaacagatttgagagacttcaagaatctctagctgggttgagtgaagggaaaaactcagctagaaatt

SEQ ID NO: 527385 - DNA, 494 bp, Homo sapiens
aaaaagtatcattctctctttgtagaagtgtttctttggttatttagtttttttccttcacctccccaaaccttctccactgtaagaagcctgccatagaagcataaatgttagagtaatacatctggctgmaaattcttccaggaaataaaagataaatttgccatcaggacaaagaaagaaagggaactggattcagagtcatcaagcaccagagaacaagtcttcgtagctccgccctctacttgatttcattacctccctaatgggaatttgaatgacagagcaagggagtaaccatttaggtatctggcattgataacgaataaacttacgggagagggagttgcatgctcacatttaaaaagctcctgacaaaaaatatgacttttttacattttaagagataaaaaaatgtataagcaaatactttactatttgtcttgaacattaaatcatcacagtataaaagcacataatgtgtttgctatact

SEQ ID NO: 527386 - DNA, 432 bp, Homo sapiens
tgcaaaataaagcaaaataaatttgaaacaggtgtcataaaaccaccccccttactttgttttaattayagaaaaatcaggagttcatctatacaataacttgccaggaaaagatagcgaaacttaaacactaggagacctttcaagaagcagtcactataactgaagtcttcaagggaattggagtattaacagaagataaaccttaatgaactaaagaggcttcaattattctgatttttaaaaattttctcaaacttaaatgttgtacagtgaaaaataaattagaagggtccaagcaaagctattttttttcctgtaaacttcactcttaccgtaaaaccaaagttcagatctctatatttttttaatgtttgaaagagttaatttttttctttaggaaaatccaatggcctcagctcttgcctaaag

SEQ ID NO: 527387 - DNA, 671 bp, Homo sapiens
gctttctctgcccaactgtttccatatatgaaagtatcctctgtcccttggttaccaggaaggtcttgttactgacaaagctggtcccctaaaaaatargatctttcccttttggtgtcatgaaagcaatatacaataccaaaagtgtcaagcagtgcaggctttattcgatggccatggaattcagaagaagcatcaggctcataaatcaacttctcaggtcatgagagccaggagcccacaaataaatggcatcttcaatgaagggtctaggcattaacagcaaagggaggaatattcatttatgacttttctgggaacaggcagaggacttcttggaactggagtgctgcctttctttttgtccttttgtagtttcttccagtctttgtcactgtgattttcaactgttacggcaatagtggaagtgttgtttagcatagaaattagattataatgacgtcagaggttcttcatatgtcaaatgagctgccatcttggattccacgatttcagccaatttgatcacgaggaggatcatctgactacaagcattctgttacttaaagataagcagagttaaggcagggtagaaattcagctaggtcatatagtccttacactggataacaaactcatcttttgggaatttagttcttttagatttcttt

SEQ ID NO: 527388 - DNA, 537 bp, Homo sapiens
ttcgcttctgctaatataggtgtccaatgtttggctttcatatttggtttttacataagagtacaaaaaaatctgttggaatcaatatttattcttaccacctctgaccactgtgctggtttaacccatctaatcatctagttcctaaatcaatcttgaccaaagtgagsagagatcagcaggctttgatttaccacctggtgccaactgaaactactcactgctaggaaatccagcatccaggaaggccagggcaaacccaggttgtctatctgcccatcgcacctcgaccatcagatgacttttgctcttctgtccaagtctatctaacaagggttctgcctaaattcttagggggacccacccaaaactccagtcagcttgactacatccctaaacccctgcttggccactgggttcttgactcagctacaagcaggaatcctcccaaattgcatgggatctgtcccttccccatgccacacacacatcctcaactaacactttctgatacccttcccgagactggagcaccag

SEQ ID NO: 527389 - DNA, 537 bp, Homo sapiens
ttcgcttctgctaatataggtgtccaatgtttggctttcatatttggtttttacataagagtacaaaaaaatctgttggaatcaatatttattcttaccacctctgaccactgtgctggtttaacccatctaatcatctagttcctaaatcaatcttgaccaaagtgagcagagatcagyaggctttgatttaccacctggtgccaactgaaactactcactgctaggaaatccagcatccaggaaggccagggcaaacccaggttgtctatctgcccatcgcacctcgaccatcagatgacttttgctcttctgtccaagtctatctaacaagggttctgcctaaattcttagggggacccacccaaaactccagtcagcttgactacatccctaaacccctgcttggccactgggttcttgactcagctacaagcaggaatcctcccaaattgcatgggatctgtcccttccccatgccacacacacatcctcaactaacactttctgatacccttcccgagactggagcaccag

SEQ ID NO: 527390 - DNA, 584 bp, Homo sapiens
aataatttctgagttcattttttctcaactaaaggctaagcacttttatagtggcataattctacctgtagtagaagttctgctcaaaacacacatgttgaacaggaaatttcccagacaaatggcatacaacgaaccaagtaaagatagtcctgcataataaccatttacctataccattgtccattcattccttcttttgaaattcaaaagctttttccaacattctcattttgaggcgagggaggcccatttattctcattttcttcccattctcttttctcctytttctctatttctcattcatttatccattccacaaatatgtaatgcctatgatttgtcaaacaagtgctaagaacaacgtatgtctggatttttcttaaaaactgatgtgatgcctatctcatggacaaaatagacatagagaggtcaataaacaagaaatgcccagcagcaaaactgcagagctgatgtgaaataaaggaacaaaatgcagtggtagagaatcacagaagggaaaacatacccagacacagcagccagacacggaggctaagacctgaatgataggaaggagcca

SEQ ID NO: 527391 - DNA, 640 bp, Homo sapiens
tgggcatggccatcattcatgccgtttgttatattttcttcttttccctccctctcggtgcatggcaggactgctcttctcagtcccctygtggttgggtatagctatgtggctatttctggagaataagttatgggtcgaaatgatgcttcacctccagaccagagcttttaattgccagggtgggattctctacagtgttttgccttctggcacagtgactgaaatctcgtagatattgatggccccatcaggctggattcagtgaggaacagagcccctctgatagcctgaaatgaacacgcagcatgagcaagatagaaatctttgttgtcttaagccactgacatttagaggttgtttgttactacagcataacttagtctatgctgactgacaccctggatgttctactgcctgcttttcagagactaaatggacaatctgtgtatttagttcttcaaggacaaatagatactctcattttccctgattccagactttgtatagtttgccaaattaggttttaacgttggagatgctgacacccaaagtcttaaccagaggagctgaggttgcttcttccagacttttattctcaaatgaatttcatgcactaaggagggagtattgggataca

SEQ ID NO: 527392 - DNA, 542 bp, Homo sapiens
ccttaatagctaagcgggggacatatgacccaattttgggtgtttggatggaatcagaagtcactaggggtggggcttaaagcaaaaaaatctttttggtgatctgacaatgctcgcttgtgcctttggcctctgtccttcctctgccgtccatcttcttcctcccatcttggcccctggaaatgctgggagcacagcagccatcctgtgatcccagcacaggagcctcactctgaggacggyggggcaggactactcatggggcctggtcttggtgacggtgttgagcctctagatcagccgtgggctgcttccccaacatcgctgcagacaaataagccagcactgttaggttctctgttacttgcagacaaacccaatctaaatgatgcaaataaaatatttttattaccacataccagaaataatgatgtattcatacagtataattctgggcattttagaaatatttacaaaattgtcacattaacatcacctttcaggtagttaaatggcatgtaactttctataatgaatttaga

SEQ ID NO: 527393 - DNA, 487 bp, Homo sapiens
ccaccatagttactaccgtcaaaatttcctccttcattgtaaccatcatatcctccaacaccgccaccatatccaccaccttggtttccatatcctggtccaccaccaccatacccgcctctactactataaccaggaccactgccatagttgccaccatcacctcctaatccattatatccacatcacctcctccataactacctctgctgccaccacctccaccaccatagcctcctcttccaccaaagtttccatcacggccaaaattacctccaccacctccaaagtttcctctgygacccatacaattgccagatccacctccacgacccctctgtgatccagccggctgcatcacttgtttagcaagggcctttttcacttcacagttatgcccattaatagtgtggtatttctgaacaacaattttatcaactgtatcatgatcatcaaaagttacagaagcaaatcctctcttttttcc

SEQ ID NO: 527394 - DNA, 487 bp, Homo sapiens
ccaccatagttactaccgtcaaaatttcctccttcattgtaaccatcatatcctccaacaccgccaccatatccaccaccttggtttccatatcctggtccaccaccaccatacccgcctctactactataaccaggaccactgccatagttgccaccatcacctcctaatccattatatccacatcacctcctccataactacctctgctgccaccacctccaccaccatagcctcctcttccaccaaagtttccatcacggccaaaattacctccaccacctccaaagtttcctctgtgacccatacaattgccagatccacctccacsacccctctgtgatccagccggctgcatcacttgtttagcaagggcctttttcacttcacagttatgcccattaatagtgtggtatttctgaacaacaattttatcaactgtatcatgatcatcaaaagttacagaagcaaatcctctcttttttcc

SEQ ID NO: 527395 - DNA, 643 bp, Homo sapiens
gtggtattttgttatggcagcctgagttgctaagacacttggcaattgtcatgaggtttaaatatgattccataagctgtactctgtgggatgaccctggcaatccataacccacacaccaatggaactggcacatactgggggtctcaaattattactgctgttattctcattattattttargcaattgcatgaatctattttctctcctatcttgctagctctttgaagataggacctagtcttatccatttttctataacccagaactagtctagagtttggcacataatagttgcctaatgaatatctgctacatgaataaataagcttatattttaatataatatgctgttcattacagaaaggtcatcaacgtaatgaagtagcttacaggtagtacaaataatgagcaataattaattatgtgctttgggccacttttcatgcagtactgaattctcacaggaagtctcagacgaagacactgctaactccactttcagagagaaacactgaggctcagagctaaactaactcgcctcagagcccacatcctggacttgagcctcagggtgttgcatgccaaagcctgtcctcttcaccccagcttcctgggcattggagcggatccatagtgtt

SEQ ID NO: 527396 - DNA, 352 bp, Homo sapiens
aagtatgtttttcaaaggaaggatattcatggagacaattgtcattctttaaacatttgatatgcatttgagctagtcacagatagctgttaatgtgtaaatcttgataacaggcttctaatgtcaccatttcagtttcctgtgcagcaaaacaaaaataacattaatttgtgttatatggcaactaatgcacaataatgaataaatatcttaagtattagggagaatcctggttagaragttgataaagtgaatacaaactcccttttcaagcacttgaaagggagggatggttttccaagatgaagacttaggtttgagtatctccctttgcctgaatttgcttttatgt

SEQ ID NO: 527397 - DNA, 352 bp, Homo sapiens
aagtatgtttttcaaaggaaggatattcatggagacaattgtcattctttaaacatttgatatgcatttgagctagtcacagatagctgttaatgtgtaaatcttgataacaggcttctaatgtcaccatttcagtttcctgtgcagcaaaacaaaaataacattaatttgtgttatatggcaactaatgcacaataatgaataaatatcttaagtattagggagaatcctggttagagagttgataaagtgaatwcaaactcccttttcaagcacttgaaagggagggatggttttccaagatgaagacttaggtttgagtatctccctttgcctgaatttgcttttatgt

SEQ ID NO: 527398 - DNA, 585 bp, Homo sapiens
atccaggctggagtgcagtggtgtgatctagactcactgcaacctccgcctcccaggttaaagtgattctcctgcctcagcctcctgaatagctgggattacaggcgcccaccaccacgcccagctagttttttgtatttttagtagagacagggttttgccatgttggccaggctggtctcgaactcctgacctcaagtaatccacctgccttggcctcccaaaatgctgggattacaggtgtgagccagtgcacttggcccacaatacaatattgttaactctaggcactatgttgtgcagcagatctctagaacttattcatcttgcataactgaaattttatrcctattgaatagcaactccccattctcttaattatctaggatcatattttcaggaacgtcatcgcatgtgtgtgtgtgtgtgtgtgtgtgtatatatatatatatgtgtgtgcaaatttatttcactcatgatgttatactaaagtatggatttctatatacaaccttgattattccacacttaggaataaaagtttgactaagtgtcatttttcctaaaatatgttttggttccata

SEQ ID NO: 527399 - DNA, 678 bp, Homo sapiens
aagataagtagttatcatattcatgaaaaaaacaagttgataggctaacacatctgggaagatgactcaagggctaactagaaataagtgcactattaagtgaaaagctgaagcgtcaggtatattgtacctgattttgccaaagcacacgtgcatagagggagatgactctaaaattccatccaactgactgtgttacttttgttgtgttgattagctgacgagtgtgtgtgcagaaggtaaatgcacccataaacatatcaaatcagtttccttctagaggaggccagagtatttgattgattgctagcatcatccttttagaattttctacctttttaaagtctttgtgggattcagcaacttagagatcttctccaagccacctctcaatagaaatttctactgataagagagtaygtaagagtttatatagagtacaagtaaccctcatttggctcatgccaattatctgtgtgacttcatacgtattaggtgtctaagtatttattctcgaaagagcactggtcagtgggtaaagccatgtcatatgcattatctaaaactaaggcagatattcactggtcccaacctttcattggagccacttcatatctgacagtgataacctccccatttaaacctggtaggtcctctattacctgcctgttcgtgcca

SEQ ID NO: 527400 - DNA, 579 bp, Homo sapiens
gaactatccaaggtcacactgctatattcgtttattcttctgatcctgagacattttgcttttctctactgatgagtgtatgctgcactgcrttggacaactttatatggagcccaaccttttcttttcactggagtttcccatccactcttatttcttcagttttgtggtttgtcattgtttgtttgttgttgttgttattttgttttgttatttaatgtaatggcacaggcagataaattaaattttgtctttatggcaacaattttatggattgactcagaagctacagaatagatttggagagtacctatcatccacagcttgcatgacttccagtatttaacatttctcaaccaaaaaatttagggtttgacaatcagtctttattaaaaaaaaaaatctagaaggtagtacttgagagtggatggcatctggcaaactaggaagtaaagactttaggcaaatagtcaatgaaatcgagcagacattttgaaaatagaatgtagttatgtcaaacagcatgtgcaatgagaattttccaggccaagaaggaagtcagagataactgatacaaca

SEQ ID NO: 527401 - DNA, 647 bp, Homo sapiens
ttgtttatcaatttctcactaatagcctattgmtgtaaatactcaatcacacgaagtaaatacaatgcaactcagtagtaatgtgaaaatacaaaccctcaaaagaatgcaggatttcatgaagtctatgaaaataatattaaagaaaatgctcatctcacagcaacatcctttgattctggcagaatcaaaccactcaacaactaaagatagaacaattcactcaacaactaaagaaggacgatgatagaataagaattgagaaagggttaagaaaatatcttgagaaactggtgaaaccctcaagagttttgataagactgatacacaagtctattttatataacaaatgctagataaatgaaacacaaaatgaaggatgctatcagactattatacaattctactggaaaaattatgccaggaagatatcacatcattctttgttgattctgagaattagcacagctgcagttacaatttaaattttgttaaacatatagaaaaatgatatacatatagtaaaatgttttcatttctgaatactgtccctaacaagtcgttttcattaataactaataaatcttgtctccatttttaataggtttacttttaagaggtattttccaaatactaattttctcaat

SEQ ID NO: 527402 - DNA, 618 bp, Homo sapiens
tcatcctgcaaataagtgcctggagtctggccagtggggcaaggtgacctcagtagagatgaaagtggagccctgttgaccaaagcccccaagctagaggccaaatggcccctccccgtgttgttttccagtgtgttttctctgttaaaatttaggctgcatcagtcccctgttggaaattgtgctattgcatatgttatgaaagctgtggccatgtttgtgtgccccaaacactcgtatgctgacccaakggatctctttagcgaaaaggctgaaagccctgagtaatccccaattttgaaagacgcccttttaagtaagctaccaaagctaaacccaagcatccgcagatgcatcttctgtccgagagagcaaagagcaagaagtaatgacatccccaaacgatttattctaaaagaagagaacatgtccattagcctcccaggcccaccatggagctgcccccaggctgccgtatcccataatgtgttccatggaatattatgaggatgttagtaaatactccaccaggggcaagaggacataggaggagggagctccactgttggataagttcgggaaactctaaagaaagataaacaaatgtccttccttctt

SEQ ID NO: 527403 - DNA, 475 bp, Homo sapiens
ctgcaacatattttttgaaagtcaaatgcaagtctgtttggcctggtgcagtggctcacacttgtaatcccagcactttgggagggcgaggtgggtgggtcatttgaggtcagaagtttgagaccagcctggccaacatggtgaaacccggcctctactaaaaatacaaaaattacctgggcatggtgacaggtgcctgtagtcccagctactcaggaggctgaggcaggagaatcgcttgaacccaggagacagaggattcagtgaactgagatcacaccactgcactccagcctgggtgacagagtgagactctgtctcaaaaaaaataaaaaatagaaaaagtcaaatgcaagtctgtttgagactctagcaaggactgtggtcaggatctctggtgcagtcagtgtagctgctggcrgaaaatcactaattttgaaatgtctcaaagcggtttccacttgaggagcaagat

SEQ ID NO: 527404 - DNA, 428 bp, Homo sapiens
aggagtttaacagtcttagatagagggaaaggaacagtgagagcaaaggcttggaggctgggagacgaaggctatagtctggtgtgagcaaaagctctcgggggcctatagtgggcaggaaggccaataagagggrctctccctgcatctaactcttggttcccgctgccgtccccccaccttccagcagcgttcatggaagggagcttccctggcccagaccccagggtcctacagcagaagccctcccatgccctcaggttggtcccttggagaggaaggagctgctggcctgggactgtccacagcctgtaacaagacctcctcagtgtgtcagggacttcagccaggagccaaacagcagacctgcccagcctaccctgggccccatcagagcatgtcggataggggggctgtctagtgccacc

SEQ ID NO: 527405 - DNA, 600 bp, Homo sapiens
gtaggttgtgtctgcctgcctgtctgcctgtctgccttctacacacgcttgttgagggacccaacaccattgcctggccccagcctttggaagaaagtcctgttcctcctccaattgctttaaaggatgtgtagctcttggtgcaattctcattgctccatgtgtgtctgaacaggtaattcatttgcatggttcaaaaatcagaaagtccacaaagatatcgagtcctgggtccagaccccgtccccagtcccctggtgccctttctaggagaaccagtgccatcagtcccccttctggagagtctcatctagaagcaaatatctacacacactatttcttgccacatttttaaaaacataaaataataacattctatacacattatttggatgttgctttcttttcccccctcttgatgatacatctcaaagtttattccacatcaagacacaaagaactttttttttttgagatggagtttcactttgtcgcccaggctggagtgcagtggcgcaatcttggctcactgtaacctctgcctcccaggttcaagcsattctccagcctcagcatcccgagtagctggggccacaggtg

SEQ ID NO: 527406 - DNA, 413 bp, Homo sapiens
  misc_feature (1)...(413): n = A,T,C or G
tttaatgctattgaccactcctgtgcagctagtccagtgagactgaggctggctcttgggtggccagtggaggcactgggctgaaatcatttgaggaacaatggacccatgaatgatgggaggagggtcagtttttggagaatctagtggaggttggccaccttgagcttgcctcctgctctcctgctttagagctgtgtgactttaaggaactgacttaacctntctgatcctcagctgttgcatcaggaaayggggctaactgtaaccctcgtttggtgctgtctgcgttgaggattaaatgggaggatataagggaaaactgtgccctgcatgtagtgaaaactcagtgtcttatttgctacatcccaatgactgagacagaataggtgagtgggtggtacccctgcacc

SEQ ID NO: 527407 - DNA, 552 bp, Homo sapiens
ggtaaagcatcctccctccccttgctctcccgagcaagccaccactgccttcccggctgcagcgccgtgatttatcggcggctcctcctcgccagggcccacggcaggaggagttcaaacacccgcgagaaaagccacccgctattgatccycgcgtcaggcctcccaagcgctggcgggcattcatcaaggagccgcagcgcgggggctgcaagctcgccctttcttcttcctttcttctctctcccaagtcattcccccggggctatgccccccttgccgaggtcactcagagagctcaccaagtgcctgtgagctgaggtggagagcgcctttgtctgcggcctctttgctgtagatccttatcaagggggtggagcgggctgctttgggccccaggcttttgagcaaatctttggaagttggagaagtggagttggaactcggaacaagtggagaaggccctctgaagcagagactggttggagtgcccgtatttctgtagaccggaggcgtgtaactagaaagagtttgctaaccaagtgggccaga

SEQ ID NO: 527408 - DNA, 552 bp, Homo sapiens
ggtaaagcatcctccctccccttgctctcccgagcaagccaccactgccttcccggctgcagcgccgtgatttatcggcggctcctcctcgccagggcccacggcaggaggagttcaaacacccgcgagaaaagccacccgctattgatccccgcgtcaggcctcccaagcgctggcgggcattcatcaaggagccgcagcgcgggggctgcaagctcgccctttcttcttcctttcttctctctcccaagtcattccccyggggctatgccccccttgccgaggtcactcagagagctcaccaagtgcctgtgagctgaggtggagagcgcctttgtctgcggcctctttgctgtagatccttatcaagggggtggagcgggctgctttgggccccaggcttttgagcaaatctttggaagttggagaagtggagttggaactcggaacaagtggagaaggccctctgaagcagagactggttggagtgcccgtatttctgtagaccggaggcgtgtaactagaaagagtttgctaaccaagtgggccaga

SEQ ID NO: 527409 - DNA, 417 bp, Homo sapiens
ccttgctgtgccctgtggagggtggtgccatctgggggcttatccctccttccagcatggccactgtaacaggagagcctgagaaggtcaggggacagaggggcacaagtgtgcttgccacttgtctgtcccagagagaagctgcctggctgtccctccggcagccatcagggaggtcctagcgtgtgtcagctctggaggaagtaagcgtggcyggcacccacgtgcccactttcatttccctcttggggaatgagaggtgagagtctgcaccctggacttctgaagcccgccagtgatttgcacaaggacttcttccttgaggtctacccatagtttgtcagggtctgtgagcccctgcatttctgggcagagggtctgtgagtcgagccatgttgaggtggcccttggggtcca

SEQ ID NO: 527410 - DNA, 535 bp, Homo sapiens
catggggaatactttgtcaaaagttaataaaacaggtatttatcaccttaacatgtgtgttaaacataactaaacatgttatgtttaaaacgtgtgttaacatgtgtgcatacacacacacacacacacacacacctgccttcctacctgtcttcactccacctgtagactgctgtaaaggggatgctttgtagccccacattctctcctccagctccacacaattaggrctggggaaacctggtccctctccacagaggctaccgtaactcagagacaaaacagaccacctaagggtaaatataggagatgggattatgagaaagagagagatgaattctgacttgggaatctgaaaagtctcagggctgaaggccgtggagctggagctggaaggatgtgccatacttctaggaaaggctgtaggaaaggcaacttccagcaacaggatgagatcactaagggtttggaagtacagaagttcaaggctcattttgtttgggaggtggcaaatcatctcatgtgactggaatac

SEQ ID NO: 527411 - DNA, 535 bp, Homo sapiens
catggggaatactttgtcaaaagttaataaaacaggtatttatcaccttaacatgtgtgttaaacataactaaacatgttatgtttaaaacgtgtgttaacatgtgtgcatacacacacacacacacacacacacctgccttcctacctgtcttcactccacctgtagactgctgtaaaggggatgctttgtagccccacattctctcctccagctccacacaattaggactggggaaacctggtccctctccacagaggctaccgtaactcagagacaaaacagaccacctaagggtaaatataggagatgggattatgagaaagagagagatgaattctgacttgggaatctgaaaagtctcagggctgaaggccgtggagctggagctggaaggatgtgccatacttctaggaaaggctgtaggaaaggcaacttccagcaacaggatgagatcactaarggtttggaagtacagaagttcaaggctcattttgtttgggaggtggcaaatcatctcatgtgactggaatac

SEQ ID NO: 527412 - DNA, 535 bp, Homo sapiens
catggggaatactttgtcaaaagttaataaaacaggtatttatcaccttaacatgtgtgttaaacataactaaacatgttatgtttaaaacgtgtgttaacatgtgtgcatacacacacacacacacacacacacctgccttcctacctgtcttcactccacctgtagactgctgtaaaggggatgctttgtagccccacattctctcctccagctccacacaattaggactggggaaacctggtccctctccacagaggctaccgtaactcagagacaaaacagaccacctaagggtaaatataggagatgggattatgagaaagagagagatgaattctgacttgggaatctgaaaagtctcagggctgaaggccgtggagctggagctggaaggatgtgccatacttctaggaaaggctgtaggaaaggcaacttccagcaacaggatgagatcactaagggtttggaagtacagaagttcaaggstcattttgtttgggaggtggcaaatcatctcatgtgactggaatac

SEQ ID NO: 527413 - DNA, 616 bp, Homo sapiens
tgggagcacttccagagcctgctgtggacctacagccgcctgcgggagcaggagcagtgcttcgccgtggaggtgactactgggcgcgggagtcctcaggacttgaagctgtcaggtcagagggggcgtccasctttaagaccatgttttaaccctaatgaatgaaggcacaagcagcccctgaaactcgtgtattcagagagagttgttctttctggccatatggagggttgggtaccctgatgggctttcccatggtaaaacagctcgatcctggataacacatacttttaatgcaatttttgggttcactgtaaattacaggaatctttgaagacagttccttcaaccctcccctccttttcccacaaaattatattgagctggaactggaggggaaagcagtggagaaaaacacagcgctaaaggcaagattccctgagtgcaaatgataccagcactacagccagtaaatagccttaggccagcagcagcataggagagctgagcctgcaactctaggttaagcccagccccaaaaagttaaagtggctactggtccttttataaagccctagtaaataaaaaactaaaaaattaaaaataaaaactaaag

SEQ ID NO: 527414 - DNA, 582 bp, Homo sapiens
ttgtctctcttcctacctgcagagacactgctaccttcagaactcagacagaggatgactctgtgctgatggcagccaggtgccttcgtaaattctcagagaggacttattccacgtcctgtgtatctccagcatgcagaggtgggtgtgtgtgcacgcacgtgtgcatgtatcatctgtttacatgtgggcaggctgacctgaagatgcatctcagccctgagrgtccttgcctgagccaggacagggaggtaatggtaaatggcagaaaccctgtggatagaagttatgagcctttgctcttaggctgtgggaggcactacttagagatgagtgcaagatgatgatgcgttttggtgagggtgttgtcagcagttcttctgagactggattctagatcacttcctgccccctccccctccagggagactgccaggaagcaagggccctcccttccgccctgttggctttgtgttgattgatggtggctagaggaaactaagtttttcttatgttggattaaaagaacctaaattagttttgtgtccatacagtgagaactttggttccaagatgcaccaa

SEQ ID NO: 527415 - DNA, 582 bp, Homo sapiens
ttgtctctcttcctacctgcagagacactgctaccttcagaactcagacagaggatgactctgtgctgatggcagccaggtgccttcgtaaattctcagagaggacttattccacgtcctgtgtatctccagcatgcagaggtgggtgtgtgtgcacgcacgtgtgcatgtatcatctgtttacatgtgggcaggctgacctgaagatgcatctcagccctgagggtccttgcctgagccaggacagggaggtaatggtaaatggcagaaaccctgtggatagaagttatgagcctttgctcttaggctgtgggaggcactacttagagatgagtgcaagatgatgatgcgttttggtgagggtgttgtcagcagttcttctgagactggattctagatcacttcctgccccctccccctccagggagactgccaggaagcaagggccctcccttcygccctgttggctttgtgttgattgatggtggctagaggaaactaagtttttcttatgttggattaaaagaacctaaattagttttgtgtccatacagtgagaactttggttccaagatgcaccaa

SEQ ID NO: 527416 - DNA, 502 bp, Homo sapiens
ttataattggtgacctctcacatgttatgaatggagtgtttgcgtaccccccaaattcatatgttgaagccctaacctccaatgtgatgttattaggaggagtggcctttaagaagtaagtaggtttagatgcgtcatgatggtgtggtccccatgatggggctggagcccttataagaggaagagcattttgtgggggcctaggtgggcggatcatttgaggtcaagagttcaagaccagcctcaccaaygtggtgaaacctcatttctactgaaatacaaaaattagccaggtgtggtggcaggcacctgtaatctcagctacttggaaggctgagacaagagaattgcttgaacccaggaggtggaggttgcagtgagccaagattgtgccgctgcactccagcctgggagacagggcgagactccctctcaataaaaataaaaataaaaataaagagaagaggaagagactagagttctccctctctttgccatactg

SEQ ID NO: 527417 - DNA, 641 bp, Homo sapiens
ctgcacgtggcacctgtactaggccgcaggatggccttcttgctgcaggcatttcaatgagaaaatatgctgcatggatcatgagtgattctgtctccctcgtgcttaaccttggaagcacaaggccctgctggcctcacctcaaggtctcacctgcccatactcatgcgaccttgtccaccatctctccactacgaggtgccatctggtaaatggcctaacttgggttcttcctcccacgcctcctgtgtaggttcagggcagggagaccaaggtaaatcctgtcagttctatctgaaggcagagcctggatccaatcacttcccacccctccaatgctatcacctagaacacagccacagcctcccatctggactccctgcttcgatctctgccctcccccctccccttccaaaagctcccagaggcttyccatctcactcaaaataaaagccaatgtctctgagcagtgaaagccacccaccatggtcatccaggtcctatcactgacctgctgagccccaactggcccgcatggccacctggctggcctcagtgcctcctctttcccctagctgatactaactccagccacactggcctccttcctaccctgcttttcctcttagccatgaacacca

SEQ ID NO: 527418 - DNA, 482 bp, Homo sapiens
cagggtggccccaagcaggctatgtgcaggctcccctgtcctctacctctcagtgaaggatgtccaggagatcccactcctttccccatgaacccagttcccttccatctgcccactttggtctccctgcacataaactcatctccccctacacactccacgtggtctggccccagccttcattccacccattttagtagactgcttccacaatgggctgttcagatccagggggtccaatgttcatatcaggrcttcaaatgacctaacattaccagaggcaaaggtgcttaggttaaccaaaaagcaggaccagactgttggcaacccagtgtgctaatgcaggccacccaggccaatcagaagtactgaccagagaaaggcacatttcagactaaataaatatttatcttttttgaaattacttaaagattgcaatttgtttagaggtgtaactggaccccccgcaggcccaagggaag

SEQ ID NO: 527419 - DNA, 607 bp, Homo sapiens
tagaggtgatgatgccttatccatctgaaattaagggccaggtcaaacaaaccctcaaggtttctccaggactggagtctgggatttgattttatacaccccacagtgcccagcacaatgacgaacatgcatttaaagcttagaaaatgttcactgtgttaatttacaatgaataccatttaaagctaaaaaaaaaaaaacccctgcatattctaaagtatattatctagcatatgtgctagccccagaagaataaaatgcagaagtgaacaggagttgcttcatggaactgaaattaattatacacaattatctctgagatctttaaacagtaagtgaacaatgaaaatgtagatkcagaattctcctggtaatgaataagatgatgaacatgtttccacagagggtgggatcaggttgatctgctgaaataaccagatagcaggataatttcactatctacgtgaaacattatccaagaatctgtgcgttactcgacaattaaatcagttcaaatgtcttatcaatgatttcatagaacaaccttcaatgagttaacaggaacccgtagataaaagacaagaatagggctacgtcaagaagctca

SEQ ID NO: 527420 - DNA, 484 bp, Homo sapiens
tagagtttagtttactcaggagaacagaataaggtgagacttaaatggtgagtcacactaagcctgctgaagatacagcaggagggactaagattaaattacagctgaagtgattcatgttggtcactacaaagatcatttaacccttaaaaagttgtgtggcatcatgatacattgcaaagccaagttacaaagcctcatttttggagctgttctctttaaaggtaagaggatggactcgaatcaccttctgaattatcggacagccctgtgacatgattataccttggtgcctgagatgttagatgggaaataaacagcagcatctagtaaactctcctggggtaaaaaamaaaacaaaaaaaaaaaaaccatcttgttttcacccagtcttactgattttttttagtgtgaagacagaatgttttgtcaaaaacaagttctccaaatttataaacctgattggagacatctttagtttctt

SEQ ID NO: 527421 - DNA, 557 bp, Homo sapiens
ggtgagcccccatttggccggatgtgggcacttctgggggctgggtgtctctgggcgtctctgggcggggccctcgagcaggtgacccaactccccggcagccctgaccttggtgacaggtgataagatcagtgtgcagcagggggctggacccaggtgggtggggtggggayactctccatgctcatgtggcactcctgcctgtccagccactatccccatcaggggcccccgactgcccatcagccagcccaggaacgaggccacggcagagccaccctccccgatgtggccctgatcagcctgtcacccactgtctggcttgtgagcctctggggcccatccctggctgcccctgctggctcttcaggggtcagcaggtccaacctaggccagcaggggggccggcaggttgtctgcccagtgggctcaatgctcccaggtgtggggtgtggggtccctggcgagggcagagttccagttcccagggctccgcgctgccaggcagcgtcatcagggctggaggaggggcggtccccaccctatcccgggctcca

SEQ ID NO: 527422 - DNA, 335 bp, Homo sapiens
gcgggctttcccaccacccacccctgcgcaccgggggaaccaaccccrcaggtgtccccatggtccccatagcagcctggttttacactagggaaactgaggcccggaaagctgggcagggggagcctgaggttgcgcccatgccctctggggtgtggactccagtcccttggtgaaggtggggcctggaatggtgcacaaagctggggcctcaagcctggcctgggacttgggaaggctgcagtctgtggggggtgccctcagggctacaggagccccctcggcttcaggaacccccaccccatctccacagatgcccaggtgccctaggagca

SEQ ID NO: 527423 - DNA, 531 bp, Homo sapiens
gcccccttccagaggccggtgaaacccaggttcaggttctaaggaataatccatcctcagggccagccccgcccgccactcagccaggagatgatttccgtcacygcggcctgcgattaaaggcggtgattaaaagccgcccgctgcacatgttaatttgcttaagattctgatctcctaaatctcttttctgggcatttaagcagaattctgtctttgagagcatttggcccggcgggtggcaggtggcgggcggcaggcggcgggcagcaggtgaggaggcaccatggtggcaggggagccaggccccagggagtttaattttctcctcgtttgaagaaggcgactggaaggaacaagcacatccagggacgcagagccagctgtgagcccgccagagcccctgcccatgggccggcacagctgggaggaccagacccagcttctgccttggccggagggtggagggcagagggcagagggtccccaccctgtaggcccagagctgtgtctcctcagccccgctttctg

SEQ ID NO: 527424 - DNA, 531 bp, Homo sapiens
gcccccttccagaggccggtgaaacccaggttcaggttctaaggaataatccatcctcagggccagccccgcccgccactcagccaggagatgatttccgtcaccgcggcctgcgattaaaggcggtgattaaaagccgcccrctgcacatgttaatttgcttaagattctgatctcctaaatctcttttctgggcatttaagcagaattctgtctttgagagcatttggcccggcgggtggcaggtggcgggcggcaggcggcgggcagcaggtgaggaggcaccatggtggcaggggagccaggccccagggagtttaattttctcctcgtttgaagaaggcgactggaaggaacaagcacatccagggacgcagagccagctgtgagcccgccagagcccctgcccatgggccggcacagctgggaggaccagacccagcttctgccttggccggagggtggagggcagagggcagagggtccccaccctgtaggcccagagctgtgtctcctcagccccgctttctg

SEQ ID NO: 527425 - DNA, 616 bp, Homo sapiens
tgagggattctgttctcctagttatgcaatcctattatcagatctgattcctgctctcaggaagcttttacctgaaggataaagtaagtcaacagtgtggtcagagcagtgaattcaaaaggcattctttgaaagcctacaacgttcttgaatcatgtatgtccaaatatagggatatagaggtgaataataagtagcccatgacctcaaggactgtagaatttttgtagcctttttgaagatgactgcagacaaacataggtccaaagaagatgacgtttggggcctgaacctcctgagtcactatttcccagtgtgattagaacatgttagttcattccactgtcttcatggtgatatcaccctcagcttcctcatactctttgacaaagatatttgtaacaatgtggtaagtgaggaagtaggggaggyaagtctgtgtctgtgtgtgtgtgtatgtgggtgtgtgctctgtatgtgtgtatgttgtatttatacaaaaattcaggtaaaatgaacatgcacatacatgagcgtctgtattgagtggttgaataagcgatggaagaattaatgggacccgatcccctgggaaaccagaactgggagataagca

SEQ ID NO: 527426 - DNA, 466 bp, Homo sapiens
gcttcctttcaacccccacatcctcaccacctgtttctttgatcacaaataaatagcatgggctcccagagctcggggcctttgcagtctccatactagcattggccccctggtcccactttatttcttaactggtcttttctcattcctttgactccaccggacttcgtagcycccccccagcctggtgttgggtctgatcaccccaacactcatcaaatgtttgtgcaatctcagtctctatgcaccctgaaatgcacacaattcctgtgaattttaggccaactagcttcatcaatgcttgtggctttgcatgtacaacttagctgaatgtgggactcaggtgttcccataaggagcttgcccatccttttccttttttctccattatgtgttttaattctgacttttaaaaagtacttcccaagcatgtcttaagtgtaccagagcaagaagcctattacat

SEQ ID NO: 527427 - DNA, 466 bp, Homo sapiens
gcttcctttcaacccccacatcctcaccacctgtttctttgatcacaaataaatagcatgggctcccagagctcggggcctttgcagtctccatactagcattggccccctggtcccactttatttcttaactggtcttttctcattcctttgactccaccggacttcgtagcccccccccagcctggtgttgggtctgatcaccccaacactcatcaaatgtttgtgcaatctcagtctctatgcaccctgaaatgcacacaattcctgtgaattttaggccaactagcttcatcaatgcttgtggctttgcatgtacaacttagctgaatgtgggactcaggtgttcccataaggagcttgcccatccttttccttktttctccattatgtgttttaattctgacttttaaaaagtacttcccaagcatgtcttaagtgtaccagagcaagaagcctattacat

SEQ ID NO: 527428 - DNA, 466 bp, Homo sapiens
tattaataagaggctccatctctgtcaaaatccgtctttgctgaatccattatcttcatgtcgacacctgtcagmctgaacctaagaagcactagcccttgtttcccctgctgtgtccctgcttccctccccttcctctagtaatacttaagatgccccacccatcctggcgcttctcccccctcacattctgagggtggcttggcaaaaaagataagtattgaaggaggaaaggtctattctttcatacagcgttttgtattctttgtattcttatgttccttatattctttgtatcttctaagcaacacttccatgttttttcacttaatatctccatcactcatcactcccctgcccagcacgtgagccaagtggcaggacagcatcctgggactcagatctaacactgtgaggaactgaagccaggtgtccaaggcagcaagtcaaaaggctgatcttaacc

SEQ ID NO: 527429 - DNA, 466 bp, Homo sapiens
tattaataagaggctccatctctgtcaaaatccgtctttgctgaatccattatcttcatgtcgacacctgtcagcctgaacctaagaagcactagcccttgtttcccctgctgtgtccctgcttccctccccttcctctagtaatacttaagatgccccacccatcctggcgcttctcccccctcacattctgagggtggcttggcaaaaaagataagtattgaaggaggaaaggtctattctttcatacagcgttttgtattctttgtattcttatgttccttatattctttgtatyttctaagcaacacttccatgttttttcacttaatatctccatcactcatcactcccctgcccagcacgtgagccaagtggcaggacagcatcctgggactcagatctaacactgtgaggaactgaagccaggtgtccaaggcagcaagtcaaaaggctgatcttaacc

SEQ ID NO: 527430 - DNA, 466 bp, Homo sapiens
tattaataagaggctccatctctgtcaaaatccgtctttgctgaatccattatcttcatgtcgacacctgtcagcctgaacctaagaagcactagcccttgtttcccctgctgtgtccctgcttccctccccttcctctagtaatacttaagatgccccacccatcctggcgcttctcccccctcacattctgagggtggcttggcaaaaaagataagtattgaaggaggaaaggtctattctttcatacagcgttttgtattctttgtattcttatgttccttatattctttgtatcttctaagcaacacttccatgttttttcacttaatatctccatcactcatcactcccctgcccagcacgtgrgccaagtggcaggacagcatcctgggactcagatctaacactgtgaggaactgaagccaggtgtccaaggcagcaagtcaaaaggctgatcttaacc

SEQ ID NO: 527431 - DNA, 225 bp, Homo sapiens
ctgagacccctcccccacgacctccaaaagattctcctccaatttagcgaggggcagagatggttaaaaagagaaaggaaactgacctcaatcctgtgcagtccaatcgcagtcctccrggaagggagcacaagtgacaggggcagcccccttctactgggaagggtcccgtctgtcagttgaagtagcaggcaggagcccagagggtgagtacgctggctcccc

SEQ ID NO: 527432 - DNA, 609 bp, Homo sapiens
cctcccccacgacctccaaaagattctcctccaatttagcgaggggcagagatggttaaaaagagaaaggaaactgacctcaatcctgtgcagtccaatcgcagtcctccaggaagggagcacaagtgacaggggcagcccccttctactgggaagggtcccgtctgtcagttgaagtagcaggcaggagcccagagggtgagtacgctggctccccgggctgggcccacacagagcccaggtgtgtgagtcactcacttgcccgacctgctgggcgggcaagggcggtaagcaggaggacaggaggcarccctggcagtccacgaggaaaagctagactgagtcaagccagccggggctgagccatccatcaaccagcctgggaggaccaggaagctggcctgggtgaggaagggaggggcaagaaccaagatggggaatccagaggggggtgccaagtagtagggctgagctccgaccactgcccgctggcctgggaaggcacacagggcctgggtacagggcagggttggagggtcacccatgggctgcaccccttttagccagagaaggtggaaaggaatatgctttgaagtcagaaagatccaa

SEQ ID NO: 527433 - DNA, 553 bp, Homo sapiens
gttgggaggctgcattctcattcccagagctccacctgggaagggmtgccttctcatctcacccaccgggaaggctgacccgggccttccactcccacggcagcagcagcagcagaggtcaggggacagggacggggagtgtggagctgccagagctggcctttgtgtgttcacttgaaaccctggaccagcccccatctgttgaagggtggaaatgtctctggaatctcctctctggccctgtagaggggagggatcttctctactcttgcccctcttcaccccacccacacccccagcgggccctgcaaaggcccgaggagggcaaaggaggggctgaatattagggaaggaaccacgagttcagagaaaaacaaatcagtaaatccacttccactttttttcccccaaactgtcggtcactccaagaggtgaggggaggcttgcttttccccactggtagcataatgagtttcctaagccatactccactcagcaaggctgccgggcaaccggctcccccagcacactggaagcagcccttgccagcagc

SEQ ID NO: 527434 - DNA, 638 bp, Homo sapiens
gggcaggaatagaggctatggccccacccctgccatgctgctctgtgaccctggataaggcactttccctctttgaactgagtatccactccctgaaggttctgaaaactggcatcagaccctctgtatggtgcagatccagagacaccctgggacatgaagaggggctaaaggaaggtgggtagagttcaattccagggcagaccccaccccagcctcaaggacaccagccagccctacagggccctcctcaccaatcatggtaggcagcattgcagggtcagaggtctgagtccggaataggagcaggggcaggtccctgcggagaggcacttctggcctgaagacagctccattgagcccctgcagtacaggygtagtgccttggaccaagcccacagcctggtaaggggcgcctgccagggccacggccaggaggcattccccgaagccttgctcccctggtgcagcagggctgtgggaggtggtgacctgtgtggagaaggcaaggtgactgttacacctcctggctgcaccacgtccaccctcctctcttggccaaatcacccattggtaggatgtagggctccagcctggataatgtgctcagtaattcaggaccagaagggagagggcaa

SEQ ID NO: 527435 - DNA, 596 bp, Homo sapiens
catctctctgtcctctgtgtgggcctgcagagcccaagcccggggaggtgtccatcacagggctcccaagtaaaaggaggattctcagtcttccctggtggacaggtgggagaattccagggaggagtcaggcactttgggacaccaacctgaccctaatgttattctgtgtctgaggttagaacagaattgaactggggaaaatgcagggaagaattaggaaaatatatttcttatgtgacaaaaatgtctctttttccaaatggctactctaagactatttgctgatgtgggtgaacagttcaatttgctaagggtagttattttgaccaagaggtttcacctcctaagatggggacactgtgtggtccatttgatggaactctgtgtcctgcagcagatacacccagcagggcagagcccatacacctctcaccccctcctccccatctctctgcaaggtccccctccctcccccaccccctcgctctgccagagcttatattmaggagtccctttcaggaaaagctctggaatgtcactgctacctaatggtaatggcaataaattgcaaggctgcgatggggaaggcagac

SEQ ID NO: 527436 - DNA, 502 bp, Homo sapiens
cacttagactctccggaatgatgaggtccaggcagctccggaggggctgaggtgggagacggaatgatccaagccatgtttcaggggtttacaaagagcatgttctggaagcaagacagttaagaatgaccctccagagacatctggacagaagaaatgcaaagtgaaggcactggcaccctccacaccrtgctgggaatgggaataaaacattcagtgggtgacctgctctgaggcacagattaacactgaaatgagcaggccgtagacatctctttcaatcaaacacatgcacgagaggtgtcagccatttcctgacactgatgctcaaggtcccaggtacccatgcacctcttggaagcatcccagggtagagagttgggcagtgccagatggacagacaagcttacctagcacctcaatcattcaggaatgaggtggggcttttcatctggttgaagtcgctgccgaagtctccatgatgaagaatattgccaggaat

SEQ ID NO: 527437 - DNA, 449 bp, Homo sapiens
cctctccaggtttcaatgctttggaatcctcatcaggccagactggagaggactctaatgtgggcgagggtcctcacaataattaaatggttgctggcctgacttactagaggaggagatggtaaagcaggcaaaaatggtgaaacctacatttgttgattctctccttccttcctttctgtgtgctgttcttctgcacctcaggagcccccgccatctgctcaaagtccctactgtgaggcccagccacgcctgctctccacccacattgcccaatcctgtagagtctacatatagcacccacactctcctaccgtcctccctgctaggaacagtctgatgaaacgaacrcattccttcccaatagggtgtgcgtgtttcctagttttcatgcacctttgatgagtgaggtcatggtgagcagttgacaatggggagcttcttttaaa

SEQ ID NO: 527438 - DNA, 449 bp, Homo sapiens
cctctccaggtttcaatgctttggaatcctcatcaggccagactggagaggactctaatgtgggcgagggtcctcacaataattaaatggttgctggcctgacttactagaggaggagatggtaaagcaggcaaaaatggtgaaacctacatttgttgattctctccttccttcctttctgtgtgctgttcttctgcacctcaggagcccccgccatctgctcaaagtccctactgtgaggcccagccacgcctgctctccacccacattgcccaatcctgtagagtctacatatagcacccacactctcctaccgtcctccctgctaggaacagtctgatgaaacgaacgcattccttcccaatagggtgtgcgtgtttcctagttttsatgcacctttgatgagtgaggtcatggtgagcagttgacaatggggagcttcttttaaa

SEQ ID NO: 527439 - DNA, 472 bp, Homo sapiens
ctgtctcaaaaaaaaaaaaggggaaagaaaagaaaagaaataaacatgatgctcacacacacagaagaaaaagacaaaagaagaccagagaagttacccagccacacagagggcagagatgctgatttcagggccctggggtggagggtcagatggctcagggaggcacagtggtgcagggaggctgcctggaagaggccagagagtttaaaataggggtttaatgggaatctgggtttaatgggagcgcaagggggaggagttcctggtggaaggggagtcccctggggaacccagcactgagaccagcccccaagggcatgtggtcaggtgagagtgcccatatctcactcccgagagcaaggcctgctgtggaaaygctccctgagtctactcctcaggagcctctgggaagccccctctgagcaccccagggcccactgggcccacagtgccacttttctggggtgct

SEQ ID NO: 527440 - DNA, 581 bp, Homo sapiens
cagatgaaaaaactgaggctcggacaggtgacgtgactttaggagtacacwtcatctaacagcagcaaagctatacataagacagcaaactcatcgtgcactgagcacatgctacacatacgtggactgagcttctccccaaaacagccctatggggaggtgctattattatccccatctgacagatgaagaactcattttaaaggggctaagtgactttcttaaggcacacacttgggaagcggccgagccaggatttgaacccaggcatctggcttcagagtctgagttctttgccacccctacaaaacaaccaggaccaatagactgagactgcagtaagcaggagttaagctagacgcgagtcaggaagtatgccccttcggcttgccaccattctttagaatcccagtcaccttccaccttacctctctttggctgccactgtgctgtgtgatcttggctgggccacttaacctctctgggctcttatctccgcatctgaaacaaggaggctgatccctaggctaacaattagcagggtcattgtgaggacacattaagataacgacttgtaaact

SEQ ID NO: 527441 - DNA, 425 bp, Homo sapiens
ctgactgtgccctggtcctggggaactgccctgaggtgcatcctggagctggaccttgcaggactttctcaagggactgctcttccagcaaggggaaccttaggagcaagggccacctgagtccaggttctgttctaacttmtgaccccaagtcagggaactgggtcttattccttgggccttggaaaggtccttcttttagcatcctgggcagcagccagggctttggagtcagagaagccaaggccaaatcccccctctcccactttctagctgtgcaatcttaatcctcaagacaacaataataatgcatggatggaaacatggattaattaattaattaaggggagggctggtagatccagagctcctggctgcaaccaggtcagttccagaacctggaccaaggtcaagcaatcattcat

SEQ ID NO: 527442 - DNA, 605 bp, Homo sapiens
actgtgccctggtcctggggaactgccctgaggtgcatcctggagctggaccttgcaggactttctcaagggactgctcttccagcaaggggaaccttaggagcaagggccacctgagtccaggttctgttctaacttctgaccccaagtcagggaactgggtcttattccttgggccttggaaaggtccttcttttagcatcctgggcagcagccagggctttggagtcagagaagccaaggccaaatcccccctctcccactttctagctgtgcaatcttaatcctcaagacaacaataataatgcatggatggaaacatggattaattaattaattaaggggagggctggtagatccagagctcctggctgsaaccaggtcagttccagaacctggaccaaggtcaagcaatcattcattcatgcctgcaggcaacacatatttgttgagcacctactatgtgcgtgccaagcactattctaggtgctgaggataccacagagaacaaaatatatgtctaatgcccatagttgctacagagaaaaatgaactaggataaggaaggtaggggggccccagagtgaggaaggctttacttttag

SEQ ID NO: 527443 - DNA, 605 bp, Homo sapiens
actgtgccctggtcctggggaactgccctgaggtgcatcctggagctggaccttgcaggactttctcaagggactgctcttccagcaaggggaaccttaggagcaagggccacctgagtccaggttctgttctaacttctgaccccaagtcagggaactgggtcttattccttgggccttggaaaggtccttcttttagcatcctgggcagcagccagggctttggagtcagagaagccaaggccaaatcccccctctcccactttctagctgtgcaatcttaatcctcaagacaacaataataatgcatggatggaaacatggattaattaattaattaaggggagggctggtagatccagagctcctggctgcaaccaggtcagttccagaacctggaccaaggtcaagcaatcattcattcatgcctgcaggcaacacatatttgttgagcacctactatgtgcgtgccaagcactattctaggtgctgrggataccacagagaacaaaatatatgtctaatgcccatagttgctacagagaaaaatgaactaggataaggaaggtaggggggccccagagtgaggaaggctttacttttag

SEQ ID NO: 527444 - DNA, 605 bp, Homo sapiens
actgtgccctggtcctggggaactgccctgaggtgcatcctggagctggaccttgcaggactttctcaagggactgctcttccagcaaggggaaccttaggagcaagggccacctgagtccaggttctgttctaacttctgaccccaagtcagggaactgggtcttattccttgggccttggaaaggtccttcttttagcatcctgggcagcagccagggctttggagtcagagaagccaaggccaaatcccccctctcccactttctagctgtgcaatcttaatcctcaagacaacaataataatgcatggatggaaacatggattaattaattaattaaggggagggctggtagatccagagctcctggctgcaaccaggtcagttccagaacctggaccaaggtcaagcaatcattcattcatgcctgcaggcaacacatatttgttgagcacctactatgtgcgtgccaagcactattctaggtgctgaggataccacagagaacaaaatatatgtctaatgcccatagttgctacagagaaaaaygaactaggataaggaaggtaggggggccccagagtgaggaaggctttacttttag

SEQ ID NO: 527445 - DNA, 627 bp, Homo sapiens
gcaatgtgagttttgactctgctatcctccactgttgtgaccttgggccccaagagcctcggtttcttcactgtgcagtggcactaatgagaaacactacgtcggtgttgtggtgagtcaataagacaatccatggtgatacctacaaggatacactttgcttcttttatgaatgatactttaggtctgtgtttattcacatgctaagatgttagtaagaaagtgaagaggttatgctattgtcaggaatagcaatagcctaaattgtatgcaaaattgtatacacaggcttccaatgatgcaaggagctgcctgcgcaacagtgagctcctcatcactggaggtgagcaagcccctggtgggggtgaggcagggaggactcgggcatctgccagagaaatggcccagcaccccgatgcccataatgcccactctcccccttctcaattatctggctcccrctcactgggggcccctgttttccaaagcagcaagcagcctgcgtggtaattacttttggacttattaagcataattatcccctaatcgcatacaaccagtaattactgtggctgttaccaggggcctacccatgcagggccgccctcagcactggcgtccaacacc

SEQ ID NO: 527446 - DNA, 404 bp, Homo sapiens
gaggaacccttgcttttcatgtctctgaagagcaggtgaaagcccaccagaatcgagtcttggaagcagctagtccattcatcagccacagcaagtggcagtgagtggcagctcaggtcagtgaaggctaggggatgccattcattttgcccgcagagaagggactggctggggaaacatgggtgccggctggaaaccgaggccgcttatggacaagtccagtgtaagtctgccaaaggatggggcccagttatcctggcatctggagttggtctcgagctgaggggcctgagacagggttctgcatctgcgtgtggtgggaggttgggccctcggggcactctgttgcasggacattcctgctccacctggacaaggaggccccccagcaccaactcccctct

SEQ ID NO: 527447 - DNA, 633 bp, Homo sapiens
gtggggacttggcaaaattactttatacattttgattgcaaattggggataatattatctatctcacagtgttgtaaagatgaaatgagataatacgcagatagtgcttagtccattgctaagtgcttagtaaagccctggactacgggccctgtctcaaaaaaaaaaaaaaaaaaaagtcaggaatgtgggcatgaatcagagaacaatttcaagggagggatttgtagccaggcatggtggcttatgcctgtgatcccagcattttgggaggccaaggtgatgaaccatttgaggtcaggagttcgygaccagcctggccaatatggtgaaaccccaactctactaaaaatataaaatgagcggggcatggtggcaggtgcctgtagtctcagctactcgggaggctgaggcaggagaatcgcttgaacccaggaggtggacgttgcagtgagccgagatcgtgccactgcactccagcctgggggacagagtgagactccatctaaataaataaataaataaataaataaataaataaataaataaaataaaggatttgtgattttgatggaagccataggccaccaaaagctaagcttcggagaaaggaaggtacagaccagcaatttc

SEQ ID NO: 527448 - DNA, 418 bp, Homo sapiens
tttgctgatgactttgaaccaactttgtctctgtgtgcctcagtttcaggccctttaaaatgaggtggtaatgagctgtctgtcaactctttggtaggaaggttgagagaaaccactggagacactgcctcttctacctcatttcccatgccttctgcaaatgtctgcagtctggcctctgtccccttgatgccaaacaaaacygccctgcccaaggtcactgttgtaaatctaaatgacacccctcagcagcagtgggagcattctgtcctggtgtgttctctgactctgtggcctctgattcccttcctccccatctggccactttctcattctcctctaagggatcctttccttccttcagtccttaaatgctgcaatttctccaaggttcggtccccaatctcctttctcctca

SEQ ID NO: 527449 - DNA, 418 bp, Homo sapiens
tttgctgatgactttgaaccaactttgtctctgtgtgcctcagtttcaggccctttaaaatgaggtggtaatgagctgtctgtcaactctttggtaggaaggttgagagaaaccactggagacactgcctcttctacctcatttcccatgccttctgcaaatgtctgcagtctggcctctgtccccttgatgccaaacaaaaccgccctgcccaaggtcactgttgtaaatctaaatgacacccctcagcagcagtgggagcattctgtcctggtgtgttctctgactctgtggcctctgattcccttcctccccatctggccactttctcattctcctctaagggatcctttccttccttcagtccttaaatgctgcaatttctccaaggttcggkccccaatctcctttctcctca

SEQ ID NO: 527450 - DNA, 663 bp, Homo sapiens
ggttcgggtgggatgacattgctttcctggacatgactcagctttccctgggggtcactgaacccagccatcagccttcacactgagtcatgggctgaggtgaacttcagacctgaggagggagcagggctgccctgccaggtgggtgtgcccagggatccctcagtccagctgagcacaccacctgggaaatccttcatggggtgaagatggggcggggacaaggatgtcacaccagatccacacccatctcccacaaragcgtctaaagagcaacacctatcccgtcactgtgactggtgggctctgactcagaggtgccccttctccatccccaatgtcacgtcctcagcattgactccaatcatcttttgttctgcctggactcctagcctccactctatcaaccttcttttcaaagaagttaagtgatttgccataaccacacattatgaatatcatgtacttatgttcagaaattcttgactggctccctactacctggaaaataaaatctaaacccctggctcagcactcaaggtcctcttgctgaagcctcagcctacttttcctgtttttttcctctgtacacccttgaatccttcattttagatcagtctgtgtgttgccattctacagagttgccctttactttcccttctc

SEQ ID NO: 527451 - DNA, 663 bp, Homo sapiens
ggttcgggtgggatgacattgctttcctggacatgactcagctttccctgggggtcactgaacccagccatcagccttcacactgagtcatgggctgaggtgaacttcagacctgaggagggagcagggctgccctgccaggtgggtgtgcccagggatccctcagtccagctgagcacaccacctgggaaatccttcatggggtgaagatggggcggggacaaggatgtcacaccagatccacacccatctcccacaagagcgtctaaagagcaacacctatcccgtcactgtgactggtgggctctgactcagaggtgccccttctccatccccaatgtcacgtcctcagcattgactccaatcatcttttgttctgcctggactcctagcctccactcyatcaaccttcttttcaaagaagttaagtgatttgccataaccacacattatgaatatcatgtacttatgttcagaaattcttgactggctccctactacctggaaaataaaatctaaacccctggctcagcactcaaggtcctcttgctgaagcctcagcctacttttcctgtttttttcctctgtacacccttgaatccttcattttagatcagtctgtgtgttgccattctacagagttgccctttactttcccttctc

SEQ ID NO: 527452 - DNA, 607 bp, Homo sapiens
gacgaggggacagaggtttgcctgtgtggcaaaatgactgaaattttacaaagatttttaaaattaatgataaggatatcctggctggcgtggtggctcatacctgtaatcccagcactttgagagaccgagacagtgggatagcttgactccaggagtttgagaccagcctgggcaacacagtgacccccaccttttaaaaatwaaaagaaagaaagaaaggaaaagagggataccctgagtactcaaagtgtcaatgcgggccatcaggtgggtgataaatggcctttggagcacacaactcgggcaattatgaactgtgatattgaggacaaggtgtagcacctcacttagccttagttttcaatatgtagatgtagttactacctgtttgttaaaaaaattaaagataactgtaccatatctcatagaacttaaattattgatttcagcatctctgaaattaagatatgtcacattttagagtctatgaaacaacagtatgtaaagctcattacacaaactggacactcaatacttatggacaattattatctagtaagagccagaagttgtgccctgtaagacatcctgcagcacacttaag

SEQ ID NO: 527453 - DNA, 464 bp, Homo sapiens
cttccaaacatttcaaatctgaaaatgttaaggtcattgatgttcaggcagaacactggtgaaactggaggtggaatggtgtggaaagtgttgtgatctgtattttatagaagagaaaactgagtcctagagaggtgatatgagcatggctgcaatatgattttcacaggccctaggcaattttgcctatgtggactmctttctccagaaaagtgtgcatgtatgtgtgtgtgcgtaaaattatactttacaactacattgacatgaagacaaagatcttactattctataagaaaacattttcttatagacccaaggtgctgtgtctgctgtgctgaacaagtaagtcatccgggatgtcagttgctctcttttcagatgttgtagccaggactcctggacctttctggaatgggtgggaagtcctgtttctcctcaaagggaatgctagctagtcccaaagg

SEQ ID NO: 527454 - DNA, 572 bp, Homo sapiens
tgtaccctttttggctgttcaggattcttaataatgaacaggcttgaaagacaataggttctttgtccccagaggtatcgaaacaggcatgtgttagagaggattcttgcaggccttgggagccaaagcctgacaagtgatgatcctacatcccacccaactagttacaagcttgttaacctctagcctctgtttcctcagctatagaaaggggatcatagtagtgacttctttacagggttcttgagaatactaaacaagacaatgatggcacttggcccaatgccaggcactaagacctgcccagaaaaagctggcaattatcaaaactggtacaatcctctacctctgagttcatggtagccagtggttgagcttcatgcttccaggggcaaaccagtcatttattttttagtgtgaccgctaactgggaacattacacaagcaaagtcctagaggcacagaattaatacactgaatattaccctttgaagtcatctagcagcgggagccaaacttatcattttgcagaaggggaaacagattcagasagagggaggaacaggcccaat

SEQ ID NO: 527455 - DNA, 557 bp, Homo sapiens
tcttttaaggcatacattaagtgctttcagtctttttgctatgctgccttcagtttccattacctttctgaaaagaaaagtgacgatgaaagcaaagcatatgctatacttgcatactaaagaaatgtatttaccctggatttgcaaagtggggtacaggtattgggtaaatacagcagttccaaatgggagaaatcatccaaaacaaaggggttacatggcccatgcaagtctgaaatccagcaggtcagtcatttttttttattttttttgagacggagttttgctcttgtcgcccaggctggagtgcaatggygcagtcctggctcggtgcaatcttggctcactgcaacctccaccacccaggttgaagcgattctcctgtctcaacctcctgagtagcagggattacaggtgcctgccaccacgtctggctaatttttgtatttttagtggagagcggggtttcgccatgttggccaggttggtcttgaattcctgacctcaggtgatctacctgccttggcatcccaaagtgctgggattacaggcgtgag

SEQ ID NO: 527456 - DNA, 581 bp, Homo sapiens
ataagagtaatgagaatgcccacagctatatgccaggaagacaatcagggctaaaaatttaaaaaataataaataaagtgatgattgaatgaaggaatagagatggagaacttattagggtatttaaagccagcagctgcaacagaaaaccctaaactctcaggtggtttaacctaataaaagtttgtttttcactcacagcaagaccagttctggtcatgagacccttctctacctcgaggtttgtccttataaagcaagagtttgcattgatgccaaagaaggggaggagagaacaggggatggaggttttgacaagggtctgacttggcagtggcctgcatcccttctcctcacacgtcattggccaaaatctaggcacgtggcctcaacctaagagggagggtggagaaaaaayctgtgcctgagtgcccaggaaagaggaaaataacacaagagtgggcaaacccatagcattatctctgccacatggaacatgccaccacagtgttttgcaattaggaatgcattataaacccacataaaggttaatatatacatggggatggggtggagcattt

SEQ ID NO: 527457 - DNA, 601 bp, Homo sapiens
tctgactgcaaggggcttgaacttttcaccgtaacgcaggtgggagtctgtggagttgggggtggggtgatgtttcccagctaccctccacacaaaaaatggaaagtcactgtcctgattrtttatctaccctaaatgtcccggggtaaaatcccatttcttccaagagaccctgccttgtttatccagcccagactgatcttgttttctgatctcccattcatttctcaaccacatactgaccctccactctgtaccagtcttaggtacacattgtgatgggccccagagatacaaaatccagtaggccctggtccttcccccaggttcctgtggtgtacaggggagagggagctgagtgacccgagcaagtttgatgtcctgctgggggcctgggcctactccaaaacacgcacatctgtcatgtatgtcccctctgtggccctaaattggattttcagtactatgttttattttctcatggattccactgcaactcacatttgttatcaggaatagggattaagccctactggcctatgcgtgcctcagttctgtcatctgtgaagtggtatattggccccaacagttcagtcctcat

SEQ ID NO: 527458 - DNA, 590 bp, Homo sapiens
aaaattgttttaaaatcacatcaaggaaccgccgatcagcaggagtctcctgggactataaaaaygaaaaagaaatgtctttgggtatgtgactgacagttggccaaggtgggtgaaacatttccttcccagtcagaagtttgagggtcacccttgcccccatcctgggcccagcatctggagctcaagttctctctgccctggaaagtagaaggtgctctactcactgctaattacactgcctgccattccctgaggcctttaaaatatttctctgatggtatggaatctgagctcctgactgataaaagctttgagtttcacaagagcttggttctccaggtactttttcagcacaggctaatatctatgtgtcatctattcagcctcgtttaggatgaagctctatcaggaggcctaactttgggtgtaagggggacttctgccctaggagtgggcatgggcccctcctcggaggtcctacactccgtgggattctctgatccagctccaatgcagatgtaattgtctctctattcaactgtctctgccactggcttatctctgtcttgctcactgtgtccccttaa

SEQ ID NO: 527459 - DNA, 590 bp, Homo sapiens
aaaattgttttaaaatcacatcaaggaaccgccgatcagcaggagtctcctgggactataaaaacgaaaaagaaatgtctttgggtatgtgactgacagttggccaaggtgggtgaaacatttccttcccagtcagaagtttgagggtcacccttgcccccatcctgggcccagcatctggagctcaagttctctctgccctggaaagtagaaggtgctctactcactgctaattacactgcctgccattccctgaggcctttaaaatatttctctgatgrtatggaatctgagctcctgactgataaaagctttgagtttcacaagagcttggttctccaggtactttttcagcacaggctaatatctatgtgtcatctattcagcctcgtttaggatgaagctctatcaggaggcctaactttgggtgtaagggggacttctgccctaggagtgggcatgggcccctcctcggaggtcctacactccgtgggattctctgatccagctccaatgcagatgtaattgtctctctattcaactgtctctgccactggcttatctctgtcttgctcactgtgtccccttaa

SEQ ID NO: 527460 - DNA, 631 bp, Homo sapiens
gaagcctaccacaattatgagctctgcctttactgcctcacttctcagcccagggcccaccatcaactccagcgcctcttgttttgggttctaaaacctaggatagtaatttgacttcattcatcttttcatgccaggcagcaaattaaaggccactytatgtagggaactcttcaaggtcagggcttcgctcccagaccattgggtcatggagttttgtcctgtttctccaagggctgagtggggatttcccccaggaggggctgagtggggcaggcagctctggtgcactgtacttttcatctcaggatggcagtcatccagtggttggcatcgatggcttgctggttcaggagctgtaccgctaaggatagggagtgtgcctatgcctttcccggcttctgcagtgattcaggccctgtttgtgacgaaagcccaaagatcctttgttaactggtgaaccttggaggaagctgactgagcacggacagcaggctgcccagggtgctccatggagccacatctgagcctgtgggtgctcctgtgacagctcgatgatgacaaaccaaagaaaacagcaggtttgaaaaaaaaatgtttttgttttcctccagactcctggaggcaccaa

SEQ ID NO: 527461 - DNA, 631 bp, Homo sapiens
gaagcctaccacaattatgagctctgcctttactgcctcacttctcagcccagggcccaccatcaactccagcgcctcttgttttgggttctaaaacctaggatagtaatttgacttcattcatcttttcatgccaggcagcaaattaaaggccactttatgtagggaactcttcaaggtcagggcttcgctcccagaccattgggtcatggagttttgtcctgtttctccaagggctgagtggggatttcccccaggaggggctgagtggggcaggcagctctggtgcactgtacttttcatctcaggatggcagtcatccagtggttggcatcgatggcttgctggttcaggagctgtaccgctaaggatagggagtgtgcctatgcctttcccggcttctgcagtgattcaggccctgtttgtgacgaaagcccaaagatcctttgttaactggtgaaccttggaggaagctgactgagcacggacagcaggctgcccagggtgctccatggagccacatctgagcctgtgggtgctcctgtgacagytcgatgatgacaaaccaaagaaaacagcaggtttgaaaaaaaaatgtttttgttttcctccagactcctggaggcaccaa

SEQ ID NO: 527462 - DNA, 370 bp, Homo sapiens
tccaagaatgttggctcttacagatattaataggtcttctgagaaaaaaaaaaagctctattgtcaagttaacaaatgatgatacttggcagaaatctttataacagcagttttcgaattggtatactatttgagggctttccaaaggattttaaagaatcaattacagatcctcaactatgataagtatactttccaaaagtaaatatgtgtgaygactcctccttatggtcctcctctccctcctgttccctcattaggtccattctcccacctcacagaagaaaatcacatctcactgctggccagacttaccctggggcactgctccaaggtggagaaatctctgtgctacaaaggaacaacccca

SEQ ID NO: 527463 - DNA, 623 bp, Homo sapiens
tggtagacactttaaaaaatctatttgttgattctaaaaatagtattgaagatttttgcttcaaaaattgaagagtaatgttgatcacacttgaatatttttaatatgagacattttagattgtgagtgaaacttgaagctgttatgtttctgttgctatctatatstacactaccagaattgtcagacctaagataattttgcagtaatttccatctttgttctactttgtcatcaccatgagaaagaaatacagccaatgaaagtagtttttctgcttttttattctaagaaaacactaggggaaaaaaacctcctgtgacaaaacacatccttctggatttagaagttcatttttcatgagtgatatagtttggatatttgtcccctccaaatcttatgttgaaatgtgatcacccaatgttgaatgtaggccctaatgggatgtgcttggatcataggggtgaatcccttatgaatggcttgctgtcatccctgtggtagtgagtgagccctcacaatattagctcaggggagagctggttgtttaagagcatggcattcctcccagcgccctcttgctccctctcttgccatgtgacatacctgctcccttttcacct

SEQ ID NO: 527464 - DNA, 598 bp, Homo sapiens
tgaaagagaccttctctgtacaccactgtccaatgtaggaatgctctggttatgtagataaaattgggagctcaaactgtaaggagggtgagtgtattggaggtgagaaatattctcaagttatgccaactcttcattcttttattcttccctatagtggttacttttctcaggtgagcatagaataaacaatccttagtttagatagkaatttggaaaggagaggtgaaagggtcatactccaaagaattttaccaggatacatcatctcttaatttgtagtcaggacacatcttatttgccagtcctacctctatttttctgatgagaaaaaatatataattaagaatatgataaacacaagttatttgaagatagaaattaaagtaagaagatggtgctactaataacttggcacatagatgaacagtggcaaatcccaattaacacacattttttatttgaaaaattcactttaaatattatttggacaactggaggggcgtctctgttttttccaattatgtagcagatccttccctacttctgcacactcaagttttttgtatttctacaattactatatttttaggttgtt

SEQ ID NO: 527465 - DNA, 582 bp, Homo sapiens
aacttcttgggcaataatccttcaagtcagcctccttagttttccgagcagcatatctcctgtcttgtctctagtttacccatctgtcaaaaccaaacacctgcactttggaaactccagagctactttagtctctcatagtgttccagcttctatcaggggcctgccagagaaaactgtatttaaaggagatagtataatagatatattaattattcatcattttatatttagttaaaaaacaggatagctaatttctacttttaaggtaaattgatatgggcaaacagggaatgagttagttagcgaagctggtgaaacctaaaatctccaaaatayaatagtttaaataaaatccatgttaatttgtatctcatgtaatagcttcaaagtgatcaaaacagactgtgctccatgtggtcacttaagaacccaggaactttctcttatggggattttggatctctttgggtgttgtacacgactgcatagttgaacctgagaacatgatcatgtcctcattccagtccaggggaagggctaaaagagaacaagtaggcacacacccagtgttttctggtt

SEQ ID NO: 527466 - DNA, 547 bp, Homo sapiens
ctggtccacatagcagttaagagtggatcctgtcactcccttcctttaaactktttaattatgtgccaaccaaatttgcatgactctccctaatctggccatgaccacctttccagcttcctttcctgccaaattacatctccagccatacttgaattttcagttcctcaatacattgttttcttgctcctgggccttcccattttatctgaaacactcaacccctaggtatcaggtctttgccttcctttaggaagccttccctgatgtcctaggtttgcttaggtgttcttccagtgtgctactgcaacccattatccagtattcctgcttgataccctctgtctagttccttgcatatcttttatgcttgactgtaaatttgttgagaacagggaccttgtctgtcttgttcagcattgtatagtctttgcaatgtgctcagcgtatagttggcacctaatatttactgggtaatggaacataatttcagccattcaaatttaatacgtcaattgttgctttttctgctttttgatttgcagtg

SEQ ID NO: 527467 - DNA, 574 bp, Homo sapiens
acccgacttcaaattctagtaatcactataatctcttttgcctaagaaacattatttctttctggcattttgtaactggtcacaaaaactggatctttctggttcattcacccactatctgcctgagctcatagccaagaatcatgacccatacagtatgttagtgtgtaagttagggtaacactagctgttataatagataaagcccataatctcaaaagcttaacagcagagacatctatgtactgctcatcagtccaatgcaagtgtttctggtcagcagatgagccttccactgtgtgatccaggaatccagattccttccgtgtcaaggctctgcattttcaacagtgtttctgtgctcatctgcagtgatctagtagaagggaaaagaacatggaggatcatgcctgagatgattacatgggctacgcctagaaatggaatatgtcacctccactcacattccattggtagaactcacatagccatccctaattgcaagagtggctggaaatattatctctatgcmaaaggagaagaaagcttattctgcctctgccacaacgggtgt

SEQ ID NO: 527468 - DNA, 574 bp, Homo sapiens
acccgacttcaaattctagtaatcactataatctcttttgcctaagaaacattatttctttctggcattttgtaactggtcacaaaaactggatctttctggttcattcacccactatctgcctgagctcatagccaagaatcatgacccatacagtatgttagtgtgtaagttagggtaacactagctgttataatagataaagcccataatctcaaaagcttaacagcagagacatctatgtactgctcatcagtccaatgcaagtgtttctggtcagcagatgagccttccactgtgtgatccaggaatccagattccttccgtgtcaaggctctgcattttcaacagtgtttctgtgctcatctgcagtgatctagtagaagggaaaagaacatggaggatcatgcctgagatgattacatgggctacgcctagaaatggaatatgtcacctccactcacattccattggtagaactcacatagccatccctaattgcaagagtggctggaaatattatctctatgcamaaggagaagaaagcttattctgcctctgccacaacgggtgt

SEQ ID NO: 527469 - DNA, 302 bp, Homo sapiens
ctggggcggaggctggggagtgcagtcgctcattcaacacagatatgatgcatggggacagtgctgggtcctcaacacggagcactgtagctctcctctgccgccctccatgagcaccctcccccacatcgatggggttgctctgggggctctggragcccagaggcggggaaagagtgaaattctcctaggctggaggttggtgggagctggagatgggaggttggaaggggtggtttccagaggctgtgatatctgagctgcagcttggaggacaggttagtgttagccaggtggatgaa

SEQ ID NO: 527470 - DNA, 656 bp, Homo sapiens
gtgaggagtcagcagtgtggaacacagcagagagctcagggaggtaaggaatgggagttctcattagacatggcagttgaaagataatgactttgaggggcaccttcagtgttatagctaggttgggagacagtatagtgagtatagattctgttcatggaagggaattaaacagaacaaaatcattaataagtaaagaggcttgtggaatgggggatgtactcatttcctaggactgttgtaacaggttaccacaaatcacatggcttaaaacaactgaagttcattctctcacagttctgggaaccagagtccaaaactaagatgtcttcagggttggttccttctggactttttgaaagagaaaccatcccatgcccctcctgctttgggtgacttctggcaatccttggcactctagctagtgacaccataattccagctctgcctgcatcttcacatggccttctcctctgtgtttctttgagtatcttctcattttttggcttctataagaatacccagcatcaaatttagggcccagtttaatccaggatgatctcattttgagattcttaacataattacatctgcaaagaccctgtttccaaataagstcacattcacagataccaagagttaggacttggacgtat

SEQ ID NO: 527471 - DNA, 642 bp, Homo sapiens
atctctttaattacagccacagagatgttcctcttccctttcatctggggcctctaaggagctcagctcctgcccattctctcgtgaaaggttatccgtgccacatcaccattcagtttgtgcatccaaacagaagccttggagcattttctcctggctttggttggcacggccggcctgtggggtgcgactctactactctccscgtctgccttttgctctcctcttgaggacttatcagattagtggcctgctctgtgccacatgtgtccttcacgagagcattcacttcaggccacttccttgaaggggctgtgactgcgctcctctctctcagaagatgcgaaccaggaaaatatttgctcctctctctctatagagttggcttattttaaagttgacttgattgagttgcagagactgctatagagtatttaaaaatgatttgcaacaattactgaaagtcagttaatctgtacaaatttccacagaggatcatagactacattttgttgataaagtaacaagccagtaatcttaactggagccagcttaaggtctcagtttgtgaattattacactggtctcttgatcttaggatatatttgcatataagtaatttaagaattaacatgggataga

SEQ ID NO: 527472 - DNA, 642 bp, Homo sapiens
atctctttaattacagccacagagatgttcctcttccctttcatctggggcctctaaggagctcagctcctgcccattctctcgtgaaaggttatccgtgccacatcaccattcagtttgtgcatccaaacagaagccttggagcattttctcctggctttggttggcacggccggcctgtggggtgcgactctactactctccgcgtctgccttttgctctcctcttgaggacttatcagattagtggcctgctctgtgccacatgtgtccttcacgagagcattcacttcaggccacttcctygaaggggctgtgactgcgctcctctctctcagaagatgcgaaccaggaaaatatttgctcctctctctctatagagttggcttattttaaagttgacttgattgagttgcagagactgctatagagtatttaaaaatgatttgcaacaattactgaaagtcagttaatctgtacaaatttccacagaggatcatagactacattttgttgataaagtaacaagccagtaatcttaactggagccagcttaaggtctcagtttgtgaattattacactggtctcttgatcttaggatatatttgcatataagtaatttaagaattaacatgggataga

SEQ ID NO: 527473 - DNA, 642 bp, Homo sapiens
atctctttaattacagccacagagatgttcctcttccctttcatctggggcctctaaggagctcagctcctgcccattctctcgtgaaaggttatccgtgccacatcaccattcagtttgtgcatccaaacagaagccttggagcattttctcctggctttggttggcacggccggcctgtggggtgcgactctactactctccgcgtctgccttttgctctcctcttgaggacttatcagattagtggcctgctctgtgccacatgtgtccttcacgagagcattcacttcaggccacttccttgaaggggctgtgactgcgctcctctctctcagaagatgcgaaccaggaaaatatttgctcctctctctctatagagttggcttattttaaagttgacttgattgagttgcagagactgctatagagyatttaaaaatgatttgcaacaattactgaaagtcagttaatctgtacaaatttccacagaggatcatagactacattttgttgataaagtaacaagccagtaatcttaactggagccagcttaaggtctcagtttgtgaattattacactggtctcttgatcttaggatatatttgcatataagtaatttaagaattaacatgggataga

SEQ ID NO: 527474 - DNA, 558 bp, Homo sapiens
actacatggagcagaggggaagcacccagccaagcccttcccaaattcctaaccctcaaaagggtaaacaaaataacatggttgttttaagccccagtgttttggggtagtttgctacacagcagaggatgactggaaacagagscctgaaggaaaagtacaagtaccaatgatttagaagatggttgccagagagagaagccaacattgtatatcatggcttactgttgtgcttccagtatgctgtggcctgggaaaactcagattatactagaaaagatgaaaagttaaagacaggaagaaggttccacactgtactgtcttggcattcctctgtgtatccttttcctctgctaccctcaacgtgtatgtttcaaaggatcttgaaacatcttgaaacaaaggatcaaagcccttgaactttcccttctctcacttgcatattatttactctcttcaccttctcgcccctccatacagatggcaatacatgcaggtctaagcctctagtttcaaggtatatcctgagtacaggttcctacctatctggactgccca

SEQ ID NO: 527475 - DNA, 561 bp, Homo sapiens
acccagccaagcccttcccaaattcctaaccctcaaaagggtaaacaaaataacatggttgttttaagccccagtgttttggggtagtttgctacacagcagaggatgactggaaacagagccctgaaggaaaagtacaagtaccaatgatttagaagatggttgccagagagagaagccaacattgtatatcatggcttactgttgtgcttccagtatgctgtggcctgggaaaactcagattatactagaaaagatgaaaagttaaagacaggaagaaggttccacactgtactgtcttggcattcctctgtgtatccttttcctctgctaccctcaacgtgtatgtttcaaaggatcttgaaacatcttgaaacaaaggatcaaagccsttgaactttcccttctctcacttgcatattatttactctcttcaccttctcgcccctccatacagatggcaatacatgcaggtctaagcctctagtttcaaggtatatcctgagtacaggttcctacctatctggactgcccactgatacctcttggaacctgaaactc

SEQ ID NO: 527476 - DNA, 482 bp, Homo sapiens
tttaaacacaacaaatttccattaaaataaaaacaggactttattccatttggctactagagtgtattctagagtcaaacagtggtaaatgtgaaaaggcccatggaaatatgagggctgtaaaaatcattgcagaaaaagatgccaagcattgtttgcaggaattaaatgtccttttgcaccagcagtgagcttccttggatagcacagcagacaaggttcccaaattacatgaaaagaaagcaagccagatattcatgtcaaccatagctctcattcgttctttccatctgactgcaygttttctatgtgggatgtgcttccaggctccatagatctgtctccttcatgcccctccaccccacaatcaagcccagttcctgcctcattcagattctagcagaattgctcaatggatagcccttgcgtgccggcctctgctataccagcaacgtgccagggcgggtggagcttccacacat

SEQ ID NO: 527477 - DNA, 690 bp, Homo sapiens
tgtgtgatttttacacagaaaaccttcactttataaaagagttcaaagtagggagttttctttcctggaaagcagtaccaaactaatatctttagaaaaagctgcatgaaacatgaagttgcatttggttatctgattacaattgactgcatccaagtcaagaaaccaaaatgagaaaaggtaaaaacttgaatgtcaagttattaaatcaattataacaccagaattagaatatgctattaattgatattaggaactgtagatgggcccaaacattaaaagaatctgactagtaattacaaatcctggtaatgaaaatcaggcaactccatgtacagggaatatacagagatgatagaaatgagctattgccataccaggacttcaaactttttacatatcagcttctttatttgcagagtgcctgggaattcctgctctttctatatggtataatcctctttaatatgggtacttattctgttatcgtcccatcatagtccaaactgcactacttctttgggttctggaacccatctgccaggaggaatttcatggytaagttttaaacaaagaattatgcttgcatatattgacatggtaccacatcaacattactagaagcactctctctggatttaaagaaacatgcagcaattatttttatacattatcctcgttgaattgaac

SEQ ID NO: 527478 - DNA, 579 bp, Homo sapiens
gggatcaggtttttggatgttgctatgactagggatgtggtactggcatttagtgcccatgagcttcaatgctaagttttctgaagtgatcaggaccgtcccaacaaatgaaagcgtaattcctctaagtaccttttcagaaacattgaacagaaagaaaaatagtatatatagaagatttttttttttagtccttctactcttttcatattgagatagttaagctccagaaatatactttatttggaacaggtccaggtaaatgatattcaacaatatttaagtataatttatactgaccatgagagrtcaagaaactttctactttcttagcagaaattacaagcaattgcataaacagttagtaaaacaacttttgctaggttaaagagggtagcaaattcagcataattatcctgattaaagaaaagatttgacattttgatataataaattctgtacttttaagaaagcatttatatgcaaggacctaggtttagatgttataggagataaaagatacgggcaactagtgggatataaattagtaagataatatttaaatatcacttcaaaatg

SEQ ID NO: 527479 - DNA, 655 bp, Homo sapiens
tcaaaaggcagtgtattaactaacaaattgttttgctttatttttatttttttgagacagggtctccactctgtcacccaggtgggagtgcagtgacacagtcacggctcactgcatccttgaccaactgggcttaagcgatcctcttgcctcagcctgagtagctgggaccacaggtgcacatcaacatgcctaactttaaaattttttgtggagacaagatctccctacattgcccaggttggtctcaaactcctgtgctcaagcagtcctcccaccttggtctcccaaagtgctgggactataggcgtgagccactgcacccagcctggttttgcttttttgttgtttgttttgttttgttttaaattgaaaatgtactaattgaaatggttttttaaaattcaccctgagaaagggcatacaatgaaaacttgatctttttcccattctagagttccagtctcatttccacaaagacaaatcccctaatggtttccagaactagtttgctctttttaagaaaataaagataactacactgtatcttgctttccctccccccaaaagcatcttctagctcattccatagctgctcatgtaagtttttggctttccstattatagtatatagtaattctagtctatggctggg

SEQ ID NO: 527480 - DNA, 483 bp, Homo sapiens
tgtgtccagtcttttgttatagttgttcctgtattccagaacttaaagtttctctgaacgcrtgaactaaaaatttttcctccaactactcacgttacattagcagcaagggttcatgggataaatgaggagggtaagactagagcctttggtgtgtatgattttctcagttcaggactatagttgtatatcattctggtcttttttagttattaatattatatgagctagtaaattaattttttcctcacttcagtgacattgcgtttaatttctaatcttaagacaaacagtaatccaaagttttagaaaaaagaaattcctgcagtaactagaaaaagttgtcagtcttctctgatttaaatgtatattaagtactattaattatgggtccaggtcaatcatgataaatatcagtaaagtttaaaagaaaatcttgttcagtaactcactttactaaatctctgtactcatgataaatat

SEQ ID NO: 527481 - DNA, 609 bp, Homo sapiens
gatgaagtaaacacatggcagcctctctctcccactgacgatacaaccttgatagagggcatggtggagctaattgaatgatccgaacagtaaataccagcaagtagatgggtgaaaacarccaggattccaagtaccacaaaactggtgttgagttgtgcacactttttcctctggaatctcttgagcagaactcagcatgacctgaaacccaggagtgagccgcacagtgccgacaatgagatgcagaagaaaacctctggttctggctgaagcagtggacaaggagactcttgaaactcagagcctgggggcacccctgatagtgttctttactttctctcccttctcacattccagccaccagagaatgcaagagaggagtagcagtggcagtaaatgtggcatcaacaacaacaacaaaaagcagggactaggactctgaggaagggaagcctatattctggcctcagggtgctctttcttcctgcctaggggtcatataccacctgtgggcacctcaggactcctgacaacctcacttttacctgttgcctttttagcccaggatcagtaggtatgggggtgcacatgctcttgaggacacag

SEQ ID NO: 527482 - DNA, 518 bp, Homo sapiens
gctcccaaagtctgagtctgtctcccacaaagatttaatatcttcattttctgcttaagctagccagagtagatttgcaaacaccctgactggtatagcactccctgaagtaagcatggggtctttgtcaatagctaargggtgtttgtgagttagtgtggttgtatatgtgtgcacacacagaggtaaatgagagaagactcctgccctcagggagcttacaagcttctaaaaggtaacggtaataaagatgatgaaaataataataacaataacaatcatgaaactgtatctcaattagaaggaagagtgggcagagcaggaggtggtagatggacatgacttatcatcaacaagaaagaactcagcagaaccctgccccaggccacctgcagggttccagtagggaaatgaaaaggaggagaagtgagcatggcagagatgcagccacgagagggacagaagacagtcaggtctgccgcctgctcttcccgtcctgagtcaggtctggaccctgc

SEQ ID NO: 527483 - DNA, 568 bp, Homo sapiens
aagtgcctctcaggacaggctttcccagggtgtagttccaacaatgaccacgaggtggagragtgactctaaccccgtccaggggctgggcgttggttgactatctcaagcccccagccctagatcctgtcaaggttgagagtcgtctcaggccatctgcagccataggaatcccatgtagttgggttgccagcttgactgtgtgcgggggctttggctctttgccaccagtgaggtgcgaggaaggggagggagagccacaaggaacatctggagaagccgagccagggaagggcacacagccccctgcacagggtccaggggtcctggggctgcggtgggcgtggccaccaagagagcggctccaggccaggcttgttctgtcggtgactgaagggtctttaaggcattcttctgccttcagctacgggaagcaggtgaggaagcagaattggagaaggagtgagggggttgaatagccaggctggagtgaggaacagcctatcttcgtgtgttttacgccttgctggcactcctataaatttgtcttaatgttgggagagggcag

SEQ ID NO: 527484 - DNA, 586 bp, Homo sapiens
gctgcctgccccctctggagagaaggggaccctctcgggctgccgcccctgttatcccctggaagctggctacaggaccagcgtccaggagataacagcccagaccccctgtttggggtcttttctgaaaagggccaagcctggcttgctctgcttcgcagcctcatcttgaagattgattatcttccctggctccttccagcaaggcggaatggtggggtttctaatttcgctggcgttttgctccttgatatcatgtgaacagatgctgtaaggttttctctgaagactcttaggtagggagggagggagagcctcctggtgaggttctttgactctgtccgggaggaggaaatccatttctcattgctctgtgatttcacactaatctgcgaatgcatgcactgatgacttagggtgtggttctacccctgccccgactttcctcttctgcaaatggggygaataatgcttaccttgtggagtcatctgcatgactcagtagcttagcacttgtaacacagcacctgggaccaaatcagggctctataaatcgtaactactttcatgtgtaggaagtgcaggt

SEQ ID NO: 527485 - DNA, 458 bp, Homo sapiens
atataataaaactaaattgctctcacacatctgttcctagcaacccatttcttcttccaggaggcaactcctattaatggtttcttatgtacccttccagagacacttcatacatttacatttaattatgtataagtgtcctttttcaactttagtttttatttttgcacaaataatatcacaccatacacacttccctgcaccttatggatagtttcatatcagcaatagtcatcktagtttcttatatggatcttagcatattagctctggtctcttttgcacttctcacctcctcacgatccagttaatggttagcttctctgtctaatgcctaaggccaaccaatgcgaaatgaaaccctacaataagtggctttttgtgtctggctcaatgtgaagtgagtttatactgtgctgcatctctggtgttgtgctgtggtacatgtggccccacac

SEQ ID NO: 527486 - DNA, 713 bp, Homo sapiens
ctgctgttttatctttatttcctctcgctttctctcatctgtgattctttgttgtaagttgtctcctctttgcaacaattcttttacagtaccctcattgtcttcattctgatcaaaaacaacaagtacagtcttcattttggtttttaaaaagctgtacattgttaacagagataataagacatgttatttaaacacacacaaaaatccaatttaaaactttcatggaatgctattataagatactgtgctcatagcctttcttttacatttggtacttgaggtttcaaaataagtttcctcccatctagttgtaaagaacacatttttaggggcacctgtagaaagatgggggagtgtggtacttcatcatgtcagacaagtcatgaattactgtgaaagtattcttttggcttttttagtgtagttctagaaattaaaacattagagaaatgagctaaagttatcatttataatgttaactgatccataaaggaatacagatgtgtatttgtgactgagataacagcaaatctgaaaatattaacacacaactacatgaaaatatttygatttaaatgtacactaattcctatctaataactcctgcttcatttctgaaacctaaatgctcaatattaataggagaaatatcaggatattaataaaaatcatgtgctaagttaccatcaaataatttctaaaatatgtca

SEQ ID NO: 527487 - DNA, 610 bp, Homo sapiens
gagtcagtcaaggtacaagtaacctaaacagccagaaatgcctgttgttttcagtcagcaagttctagggtgatttgtgtcacagcattattgcggtcatagctaatactaccatacatgtaccatttaagaaaaataccaatatagcccttcttactagctcaaatttattttgatttaacccaaattggcttactaaaaaaytcagcagatttttgttgagaacaccacatgaaggctgtactgaacatttgtgtattcaggaatgcatagcttctaaatctctccaaggattcaagaatctaccattgtatgggacttagtaggacacgaggtgttgactgccactacaatgaagaacaaattcagctatttattttccctgatctctggcaataagaacctagttctgtggcctaaacctgtattgtaacagcagtcatcaatctatggcccatcagcaattccagcctgccatctgccttggtaaataaagttttatttaaacacaacatgtccatccatttatatattatatatggtttttttcaccctaaaacagcagagttgagtagttgtgacagagactacatgacctgcagggacaaaa

SEQ ID NO: 527488 - DNA, 597 bp, Homo sapiens
tacaagtaacctaaacagccagaaatgcctgttgttttcagtcagcaagttctagggtgatttgtgtcacagcattattgcggtcatagctaatactaccatacatgtaccatttaagaaaaataccaatatagcccttcttactagctcaaatttattttgatttaacccaaattggcttactaaaaaactcagcagatttttgttgagaacaccacatgaaggctgtactgaacatttgtgtattcaggaatgcatagcttctaaatctctccaaggattcaagaatctaccattgtatgggacttagtaggacacgaggtgttgactgccactacaatgaagaacaaattcagctatttattttccctgatctctggcaataagaacctagttctgtggcctaaacctgtattgtaacagcagtcatcaatctatggcccatcagcaattccagcctgccatctgccttggtaaataaagttttatttaaacacaacatgtccatccatttatatattatayatggtttttttcaccctaaaacagcagagttgagtagttgtgacagagactacatgacctgcagggacaaaa

SEQ ID NO: 527489 - DNA, 425 bp, Homo sapiens
cccggtcaagaatcaaaagagttcctaatatatgacctagcaacttttaactttctataagttctcttttstttttagagcctgaaagattaaacattcatcgtggtattatgtgatgggagctgcagggaagtagaaagatgatgagtttcatttggggcaaattgaatttgagtttccagcagcatagcatccgggaatattcagcaggcgtttgaaaattggcgtctaatccaaatgagagattagtgctagaggtaaagattggcaacctgtcttcccagggacaagaactgaagctccagccatgatccagcctgcctgtggggagggtggtgtccatgtctccagagactacaggacatcccggggtgggtgaaatcgcagccagggagaatgcacaccctgaggagtgtgaagctcac

SEQ ID NO: 527490 - DNA, 589 bp, Homo sapiens
agagcgacctggcacacagcaacccaccaccttcttggctgtgtcccatttgcctttccaggccattttttcccctgggaaaagccctgaggaggcatgtgtgatgtgtgggtgttttcagatcgggactttaaacctacgtctttgatggctccattagttatgctcatgttgatccctcatttgaagtgtgaaggccaccctgcactgtcagcacgggactgccacaatgcagctattgtcgccagcattctctagaccaacagggcctcgagctgctggtagaatgccagcaacgacactggaaagtacctcctctcatctgggcacctaagagacaggagggataaagttacaagcagmtaggagccatcctccatcggtatgatgacttatttgcagatgaggaatcaaatctgagcagctttggtgcccagaacactgctgccatttaaacaaggtgctttcatgcagctcttgttgctctgagcccttgagcgctgtgcattttccctccccactaacccagacgcagccagtgtggcatgtacgcctgctttctgcccggactgaatcaccttatttgtca

SEQ ID NO: 527491 - DNA, 464 bp, Homo sapiens
tttattccttatcagatgcacccagctgtagacacaatacctggagactggcttaggtagatttttttttttctccaacaaaagtttgcagacggaaagacgtgtatgaaaatgctctgcagtggaggggctatcgagagatgatttttaatcgtctaaagcgaagagcagcacttggaagaaggcgtctctcttgcacatttccctttgcactggctgcatgggaagccacaggactagtgatgtcgagaaactcaccttcagcaagtgtgaaactcgtatgtgctctaagggacctgaggaaatgaacatttcttcaaataaaccataactcaacggatcagaatgatccattagcctgatttttgcctgcttgttgcatatttaggaagcagagctcaacctcagggaaaacaggtcgtgttaggggctgmtgtaagaaatcatgtcgaatgtatttcccc

SEQ ID NO: 527492 - DNA, 494 bp, Homo sapiens
tctgtggctgccgacgctggctacgcacagcaagggaggaggctgagacatgaggaaacctggccctctaggcgggcactttggaagctcgctggcatgctgctggagacccaccggcaaccacgaggacaagtggggacctggtgacattccagctctgccagccctcccagaataaaggggaatggcagcaaatcaagaggcggaggcgtttcaatgccattttgctgtgctgacttttccttttggacattgcgaacaagagaagaaagcagctcccttaactgtagtacaaaaaaaattcagaaaagagggcattttaagggtaacatttttcttgctgcaatgactcatggaagacagaaagtgagaggctygctgaaaggcgaaagacagagccaaaaaagcaaaactcaagtcctatttacaaaacgacgggccacaacggactctccagtaacatgatattgtacattgtcctttaaatcctgaac

SEQ ID NO: 527493 - DNA, 568 bp, Homo sapiens
actgcagcctctgcctcccaggttcaagcaattcaagcaattgaggtttcctctctcagcctcccgagtagctgggaccacatgcatgcaccaccacacccagctatttttttgtattttagtagacacggggtttcgccatgttggtcttgaactcctgagctcaggcaatccgcccacctctgcctcccaaaatgctacgattacaggtgtgagccactgcgcctggccaagagagttctttttctaaacagactcgctccatggagctgttccccaagtccctccttctcggcgccctcagacacacactctcttagtgtccagaacagagccacacgagccctcagcatccttcaaacccgttcttcctccagatgctgccgaggtcaggcctgaggccggcgcgtggagtggcctcggcaccctgtgtcctcagcttggcaactcagagaaacatgttagaggtgctaacattggatacatgtgagcayaaagctggcaactctcaaagagggaggaagacaagggtcgaaaacaatctgttgctatgttcactatttggagg

SEQ ID NO: 527494 - DNA, 634 bp, Homo sapiens
tataagaacatgctgcttttcacacacctcaccttcctggtaacacaaagggatggtcagagcagacgctggggtagcacttgccacacgccaggcactgttgtaagcattgactcctttggttctcacaatgcacccatgaagtaggtattattacgatcccccttttacagatgaggacacggaggccaggagaggtgacccacgctgctctaggctgcatggacagtagcaagtgtggggctcacgtttgctgcagaaggtaaccccagtctgctgtgtcacaggcctctgcacctgatygtaaggtgtcagggtgacatctcttcctcactccctctgggcatctgcccatcattcccatgtggcttgctcttggggtgagggttctcatcctgggaggtctgggtagcaaggccggtctcctgggcagcactcaagagcacagatgctcttgctcaaagacaggcagaagtgttttcacaacaagactaggaccatctaatttcaatgtcattaaattaataaaactctaggggctggccagcgacaatctaattaaacgttacagaatgcagcccaattatgtaacacagtgggctgactttcagatagattggtttttgatatacat

SEQ ID NO: 527495 - DNA, 634 bp, Homo sapiens
tataagaacatgctgcttttcacacacctcaccttcctggtaacacaaagggatggtcagagcagacgctggggtagcacttgccacacgccaggcactgttgtaagcattgactcctttggttctcacaatgcacccatgaagtaggtattattacgatcccccttttacagatgaggacacggaggccaggagaggtgacccacgctgctctaggctgcatggacagtagcaagtgtggggctcacgtttgctgcagaaggtaaccccagtctgctgtgtcacaggcctctgcacctgatcgtaaggtgtcagggtgacatctcttcctcactccctctgggcatctgcccatcattcccatgtggcttgctcttggggtgagggttctcatcctgggaggtctgggtagcaaggccggtctcctgggcagcactcaagagcayagatgctcttgctcaaagacaggcagaagtgttttcacaacaagactaggaccatctaatttcaatgtcattaaattaataaaactctaggggctggccagcgacaatctaattaaacgttacagaatgcagcccaattatgtaacacagtgggctgactttcagatagattggtttttgatatacat

SEQ ID NO: 527496 - DNA, 487 bp, Homo sapiens
ctgcggcaggcggccaacgtgcgcgagcggcggcgcatgcagtccatcaacgacgcttcgaggggctgcgctcgcacatccccacgctgccctacgagaagcgcctctccaaggtggaaacaatgcgcctggccatcggctacatcaacttcctcagcgagctcgtgcaggccgacctgcccttgcgcggcggtggcgcgggcggctgcggggggccgggcggcggcgggcgcctgggcggggacagcccgggcagccaggcccagaaggtcatcatctgccatcggggcacccgtaagtgcttccgcttcccagctcarggagaaggggtcgggcactcgaaggctccggaggggctgggggagctgactgccaagcagacagtcggaccgacggattgtcggtgggcacggaaaaacttgaatgcgagctcgcgtttctcgtttttttttttttttttatttttctgccacgttgaccgcggctc

SEQ ID NO: 527497 - DNA, 487 bp, Homo sapiens
ctgcggcaggcggccaacgtgcgcgagcggcggcgcatgcagtccatcaacgacgcttcgaggggctgcgctcgcacatccccacgctgccctacgagaagcgcctctccaaggtggaaacaatgcgcctggccatcggctacatcaacttcctcagcgagctcgtgcaggccgacctgcccttgcgcggcggtggcgcgggcggctgcggggggccgggcggcggcgggcgcctgggcggggacagcccgggcagccaggcccagaaggtcatcatctgccatcggggcacccgtaagtgcttccgcttcccagctcagggagaaggggtcgggcactcgaaggctccggaggggctgggggagctgactgccaagcagacagtcggaccgacggattgtcggtgggcacggraaaacttgaatgcgagctcgcgtttctcgtttttttttttttttttatttttctgccacgttgaccgcggctc

SEQ ID NO: 527498 - DNA, 612 bp, Homo sapiens
ctgtgttgttgggagaactctggccagaaaacgtcctgcttatttattgccagatatggtttatttctaagcgttgtcaataaatgctatttacaccttttcctgaaggtttttgagtacatgatttgatagatactctttaaaaagaattaacttagtaaaaattaaccaaaccagagactcaaagtgtagctttttagtaagaaactacatttcagacttagcctaaaggtgggtaggttagaggattagacctcaactttctatgacagcacttcatctaggtcgcctgccctacacagcaacttttgtctgtattttgggccaccttccaaacaccctatgcaaatacatcctggagtatttattgttcccattttgcagatggtaaagttaaggctcagagatgacatttgacttacccaaggtcacccctacgttgtctattcctggtgtataaaagtgagcgcgcggtgcactgtgggagcagggagctagtgggctaagcgaatgggcctttctgcttccactggctgggaaaggggctactcttgarctgccctgtgaccaacctcttcggcagcaacagcatcaggtacctggaactcaggc

SEQ ID NO: 527499 - DNA, 542 bp, Homo sapiens
tcagaaggaaggtggctttctattttcagaagctacaaagcggaggcaccattcccattcctgttctcccctccacccccttctaaagagaactttagattaggaggtgaggtgcgagtggtggggtgactccagaagagcagaggaggagagaggcaaaaaaaggagaagcagccacttctgcacctggagctgggcagcctctggaatggagccctcttgtgatgcctcctccttcccatgaaggaggcactgtgggttagttaacactctcataaaaagttgcattctggagcctggaagtcctgtaaggcagaaaaagtgggtgggaaagaagggggtccccccaccccaggctgggagcagagcgcataaaaggccttgttggaactcctgtgaaatcggctgagaatgcttcccaggaccgctcatctgccagcccyaggattaacgcccctccgtggagagggtgtgaagcctcttaaatccataaactcatcccatttccattaatgggcctttgcggtggcaccgagtaccag

SEQ ID NO: 527500 - DNA, 542 bp, Homo sapiens
tcagaaggaaggtggctttctattttcagaagctacaaagcggaggcaccattcccattcctgttctcccctccacccccttctaaagagaactttagattaggaggtgaggtgcgagtggtggggtgactccagaagagcagaggaggagagaggcaaaaaaaggagaagcagccacttctgcacctggagctgggcagcctctggaatggagccctcttgtgatgcctcctccttcccatgaaggaggcactgtgggttagttaacactctcataaaaagttgcattctggagcctggaagtcctgtaaggcagaaaaagtgggtgggaaagaagggggtccccccaccccaggctgggagcagagcgcataaaaggccttgttggaactcctgtgaaatcggctgagaatgcttcccaggaccgctcatctgccagccccrggattaacgcccctccgtggagagggtgtgaagcctcttaaatccataaactcatcccatttccattaatgggcctttgcggtggcaccgagtaccag

SEQ ID NO: 527501 - DNA, 614 bp, Homo sapiens
tgtgggctatacataagctacggctaaatggaagtcttaaggatttacaatccagctccttgaatggctcccaaattcacatgcagaagtaagaacataaaacacctgtggggcccctttgggactctacctctccctacttctccttggtttattttccttgtaaatttctagactccccaacagaagcttcatgttgactctgtcatcttctaatcctagagtttgtcagtcctttgttgatatcagatttggaatattattgtcttcagttcttttgctcttcctagcctactggagccttgcaacactgatggctcatttgcttatggagaaatcaagggttgaggaagggaagagactgtgctaaaatcatgctgtgagactaaatgatgtagacaaaagtgagaagcaggggtctgggcattgggtttgctgccacttcaatctccagacttcctctgcctgcagtgctatggttgcacacaaaaccagacacggcctgagagtcatttcaaccagagcttayggtcaaatctgtctacagcatctgcctccttggcaggctggcaaaatgacagaaccttggaaatactactggtttccttttattt

SEQ ID NO: 527502 - DNA, 459 bp, Homo sapiens
tccagctaccacttccctcaattccttcagatcttctgggctctgcttggccatctccttttcccccctctgcacccmctcccatgcctcaggatggtcttttttggttgtctccatcagctcccctggagcccctttagctccttcctctgcatttaatgcaggatttgtgccgaagcaggtgctccacaagtcatcacggaaagtctgaatatctccagggcccagggcagggctgcccccaccctcaaggagggctgcacaccccaattccagggcaactttgttggaaggacagatccttcctggaagaggttgcagggagccactccccaggtgtgacttcttaaccctttctcttccatgggaccactcaggcattgggtggagcctgtggaccccttctgagaataatttttttaaaaaggcattaggattactatgaaaagtcattttact

SEQ ID NO: 527503 - DNA, 439 bp, Homo sapiens
cggcgcccgcatccggggccatccgtcctgccgtckctgcggaggccgcatctggcgcgcatctggaaccgcccggccggccgcgctggagcccgcgcccaccctggcccggccgcgccgggagccctgcccggagctggagccgcacctggagccgcgggcccggggccctgagccgcgcagccggcgcatggtgaactcgctgctgttcggggagatggccttggccttcggctgcccgccgggcggcggcggcgggggctgccctggcgggggcggcggcggcggcggggcagggccgggtccgtcgccggtgacggcggcgctgcgggacgacctgggctccaacatccactcttgaaggggctcaacgtgcgcttccgctgcttcctggctaaggtgcacaagctggagcggcgcagggtaccgagccgaattc

SEQ ID NO: 527504 - DNA, 531 bp, Homo sapiens
tgaggtggaaggatcacttgagcccagaagttcgagattacagtgaacgatgattgcaccactgcattcaatccaggtgaaagagtgagaccctatctcaaaaagaaagtgccatagtctgaaagtttatgttcccamaaaattcatatgttgaaacctaattatcaatgtgattttattagaaggtggggccattggaagacaattaggtcatgagggcagagccctcatgaatgaaattaatgccttataaaagaggccccagccagctaccctgccctgcccatcatgtgaggacaccagggagaaagcgtcatatatgaaccagaaagcaggccttcaccagacactaaatctgctggcaccttgatcttgaactttacagccccagaactgtgtctatggtattttgttatagcagcctgaatggactatgacaatgtttaacatgttaagtttaataattgtattactcacttactctatgttgtctccatagcttttcttttttgtcaaaatcatttcatttct

SEQ ID NO: 527505 - DNA, 531 bp, Homo sapiens
tgaggtggaaggatcacttgagcccagaagttcgagattacagtgaacgatgattgcaccactgcattcaatccaggtgaaagagtgagaccctatctcaaaaagaaagtgccatagtctgaaagtttatgttcccacaaaattcatatgttgaaacctaattatcaatgtgattttattagaaggtggggccattggaagacaattaggtcatgagggcagagccctcatgaatgaaattaatgccttataaaagaggccccagccagctaccctgccctgcccatcatgtgaggacaycagggagaaagcgtcatatatgaaccagaaagcaggccttcaccagacactaaatctgctggcaccttgatcttgaactttacagccccagaactgtgtctatggtattttgttatagcagcctgaatggactatgacaatgtttaacatgttaagtttaataattgtattactcacttactctatgttgtctccatagcttttcttttttgtcaaaatcatttcatttct

SEQ ID NO: 527506 - DNA, 640 bp, Homo sapiens
ctgatcttatacttgactttaagtgaagaggagatacctggtctctaaactacatcaactttctgtgctatttgtacagaatggtacaatttagaacctttttctaggtcccagccaaagaagatggtctagatcttctacaaagtgatgtaaggggataccacttatgatgcctagataataatataaaactttagcattatgaaaatcacctgctccttttgcagaccctacaggtatatgcccatggttatcaccaatttttcctttcaaagttccataatgtcactcgtcctcatagatcacactcatgaatttgacctactattgtggtcactgcttataacaccactaccactcccatacagtaacaatctttccctaagaaatctcaagactcctggagaacccttctcaaacacttcaagttgcttttctctaaatatcaccacatacttaatagctagatgtgagcacccttatgtcacataaaacaatctaccttgtttccacgacaaaatacagtgcatgggtaggacattgaatgccaarccgatgacaattttcaagtagggataggcttccttatgaagtgctggctttcaaaaagaccttagtgatcactgaaactcatttacat

SEQ ID NO: 527507 - DNA, 620 bp, Homo sapiens
ctcattgggagttaaaatataaagtgactgtcttgctgcaaaataaaagatatgattagtcttgttctgaaatggcaaagtggtrtccagttgtgtctgtgagccttttaaaggaataattaaaactgggatacacattttagaagagagagatttgagtggtgaataagctgaaaatcacgtaacatgaaaaccggttgaaggagctaatgatgcttatcacagaaaagagataattagggtgagtccaacaggtttttgtttgtttgtttgtttttgagagagagtctcgctctgtctccaggctggagtgcagtggcgcaatctcagctcactgcaacctctgcctcccaggttcaagcgattctcctgcctcagcctccccagtagctgggactacaggtgcgtgccaccactcccagctaatttttgtatttttattagagacggggtttcaccatgttgaccagatggtgtcgatctgttgaccaggatggtgtcgatctcttgacctcatgatccgctcacctcaggctcccaaagtgctgggattacaggtgtgagccaccacacccagccaagtccaacaggtgttttaaacatctgaaaaactatcacat

SEQ ID NO: 527508 - DNA, 620 bp, Homo sapiens
ctcattgggagttaaaatataaagtgactgtcttgctgcaaaataaaagatatgattagtcttgttctgaaatggcaaagtggtatccagttgtgtctgtgagccttttaaaggaataattaaaactgggatacacattttagaagagagagatttgagtggtgaataagctgaaaatcacgtaacatgaaaaccggttgaaggagctaatgatgcttatcacagaaaagagataattagggtgagtccaacaggtttttgtttgtttgtttgtttttgagagagagtctcgctctgtctccaggctggagtgcagtggcgcaatctcagctcactgcaacctctgcctcccaggttcaagcgattctcctgcctcagcctccccagtagctgggactacaggtgcgtgccaccactcccagctaatttttgtatttttattagagacggggtttcaccatgttgaccagatggtgtcgatctgttgaccaggatggtgtcgatctcttgacctcatgatccgctcacctcaggctcccaaagtgctgggattacaggygtgagccaccacacccagccaagtccaacaggtgttttaaacatctgaaaaactatcacat

SEQ ID NO: 527509 - DNA, 437 bp, Homo sapiens
gcgatggggaagagagtgcggtggggtcccttggttcccgtccccaggaagccggcgagatggaactggcatctatcgggccctgaccgtgctgggggctgcaccggctcggaaagaaaccgatcagtgcaggcaccrgtgcttgacggtcagcttgggcctgggatcctgaccctgcacccgggctctgagagggagaactgtggcgtttgctcagccaagcccggacagcttagccgccagccccctccaccttcccgcagcccttctcttccccagaggtcagaagccaggcaggaagacctaagaggggctatctgttgaggccccagggagggaggaagcctgtccctgccctgagggcctgaccccaggctaggtctcaagagaggctggaagccagaggcctgaggccagtcccgttgctgacgcggatg

SEQ ID NO: 527510 - DNA, 437 bp, Homo sapiens
gcgatggggaagagagtgcggtggggtcccttggttcccgtccccaggaagccggcgagatggaactggcatctatcgggccctgaccgtgctgggggctgcaccggctcggaaagaaaccgatcagtgcaggcaccagtgcttgacggtcagcttgggcctgggatcctgaccctgcacccgggctctgagagggagaactgtggcgttygctcagccaagcccggacagcttagccgccagccccctccaccttcccgcagcccttctcttccccagaggtcagaagccaggcaggaagacctaagaggggctatctgttgaggccccagggagggaggaagcctgtccctgccctgagggcctgaccccaggctaggtctcaagagaggctggaagccagaggcctgaggccagtcccgttgctgacgcggatg

SEQ ID NO: 527511 - DNA, 595 bp, Homo sapiens
tggcacagtcactgcccacccccacaccaaccatgccctccgcccgttctacacagtttctggaaggctggggcctcagggtgagcccaccccacctcactcttgcgtccagcaccgtggggacaccaggaggcgtcagcgcgaggatgcgggtcccagaccagactgggcgccgacccgggagagcacgtgcagggtgggggtatgcacyggcttatgaacccaccaggctctgtccgagcggcattgaaatggccagagtgggacaggctggtgccctcagagcgcttggagcggccagagactcgctggagctcccggggtgttgccgggcagggaggcaggggctggaggggagatgggccagctctggagggtgcctggttctgggtgtgggtcagggaagaagtgaaggttaaatcagcgagtgacaggtgaaattccatttctgacaaagattatgggtttgtctgtgtctcactcgaatctctgggtattgcttttatatttcttgaaactatattaggtacctatgtattttggaacatttaattttctgattgaacttgtcaaaatgaagtatgtttatcttttt

SEQ ID NO: 527512 - DNA, 595 bp, Homo sapiens
tggcacagtcactgcccacccccacaccaaccatgccctccgcccgttctacacagtttctggaaggctggggcctcagggtgagcccaccccacctcactcttgcgtccagcaccgtggggacaccaggaggcgtcagcgcgaggatgcgggtcccagaccagactgggcgccgacccgggagagcacgtgcagggtgggggtatgcaccggcttaygaacccaccaggctctgtccgagcggcattgaaatggccagagtgggacaggctggtgccctcagagcgcttggagcggccagagactcgctggagctcccggggtgttgccgggcagggaggcaggggctggaggggagatgggccagctctggagggtgcctggttctgggtgtgggtcagggaagaagtgaaggttaaatcagcgagtgacaggtgaaattccatttctgacaaagattatgggtttgtctgtgtctcactcgaatctctgggtattgcttttatatttcttgaaactatattaggtacctatgtattttggaacatttaattttctgattgaacttgtcaaaatgaagtatgtttatcttttt

SEQ ID NO: 527513 - DNA, 366 bp, Homo sapiens
agcggggggcattgggaatcccgggtgcacagggmctgttttcccggtggctggcgaagcaatgtccttcccccgggtaaagcagcccatgcgttccggagccgacgtcttggctggcgtctgtggcacccgctgcccctgcccgccccttcacccggtttggaagggtgcgacgacggcgcccgatgggtgaattgaatcgcctgggcgttccgggagcgggaaggcaccgcgaacggcagggaacccagcggctgcgcctttggggtccggccccctgccctcccaggctggagccgggctcctggcggggcggcggcgaggcggaagcggtgggatgctgctgcccggccggcgtgcagtagg

SEQ ID NO: 527514 - DNA, 366 bp, Homo sapiens
agcggggggcattgggaatcccgggtgcacagggactgttttcccggtggctggcgaagcaatgtccttcccccgggtaaagcagcccatgcgttccggagccgacgtcttggctggcgtctgtggcacccgctgcccctgcccgccccttcmcccggtttggaagggtgcgacgacggcgcccgatgggtgaattgaatcgcctgggcgttccgggagcgggaaggcaccgcgaacggcagggaacccagcggctgcgcctttggggtccggccccctgccctcccaggctggagccgggctcctggcggggcggcggcgaggcggaagcggtgggatgctgctgcccggccggcgtgcagtagg

SEQ ID NO: 527515 - DNA, 366 bp, Homo sapiens
agcggggggcattgggaatcccgggtgcacagggactgttttcccggtggctggcgaagcaatgtccttcccccgggtaaagcagcccatgcgttccggagccgacgtcttggctggcgtctgtggcacccgctgcccctgcccgccccttcacccggtttggaagggtgcgacgacggcgcccgatgggtgaattgaatcgcctgggcgttccgggagcgggaaggcaccgcgaacggcagggaacccagcggctgcgcctttggggyccggccccctgccctcccaggctggagccgggctcctggcggggcggcggcgaggcggaagcggtgggatgctgctgcccggccggcgtgcagtagg

SEQ ID NO: 527516 - DNA, 575 bp, Homo sapiens
ggggatacaggggtgcggggcgcagggataacgggcgcaggggacggtcacgggtgctttctagtgggttgtgcaggctcaggttcccagcgctgggtggttgcgactctgcataaaacgctaagcttttgaggcccttattcaagctcggggacgtctcccagttggtcagttcaaaacctctgggccaggttgcgttggtrgcagattccgcccgctaagtctccgcacgctgccgcgggtctgctcctcccccggggtcagaacctctgacgctctcctgcttttacacgcgttaagtcactggtttcttgcagcatcacgtgttccctagatacatgggctgaggcttattcttcctgaaagtgagggttttttcctttgggctttccagagccagcccgcgtggagagtgacgagtgacaggcgcctttgttccgggcttgcatgggtgggacgcgccccctcctcagcactcagcccggcgagcctggccctcccgtcgccccttcttaagtgcatttgtcccgggctctcgattttgtttactctttcctgcttacacaggtacacac

SEQ ID NO: 527517 - DNA, 619 bp, Homo sapiens
tgaaaatttggcaatctgctggcacctttatcttgacttttccagccaccagaactgtaagatatatacgtgtgttgttttaacatacaatgctcagacagaggcagtggctcataccagtaatcccagcactttgggaggccgaggcgggtggatcacttgaggtcaggagttcragaccagcctagccaacatggtgaaaccccatctttactaaaactacaaaaattagctgggtgtggcagtgggcgcctataatcccagctactcaggagcctgaggcaggagatttgcttgaacccgaaaggtggaggttagagtgagcccagatcatgccactgcatctcagcctgggcaacataatgaaactctgtctcaaaaaaaaaaaaaaacaacaatgacacagtgctcttaggcctatgtttggtactggtacaatagcacttcccctctgccttagtaagctcaggctgctgtaacaaaatagcatagaccagatagcttaaacaatacatatttgtatcttatggttctggtggctgggaaagtctagataaaagtgctggtcataatcaggcctctcacaaaagactacatacaaatacccaataaacttatg

SEQ ID NO: 527518 - DNA, 619 bp, Homo sapiens
tgaaaatttggcaatctgctggcacctttatcttgacttttccagccaccagaactgtaagatatatacgtgtgttgttttaacatacaatgctcagacagaggcagtggctcataccagtaatcccagcactttgggaggccgaggcgggtggatcacttgaggtcaggagttcaagaccagcctagccaacatggtgaaaccccatctttactaaaactacaaaaattagctgggtgtggcagtgggcgcctataatcccagctactcaggagcctgaggcaggagatttgcttgaacccgaaaggtggaggttagagtgagcccagatcatgccactgcayctcagcctgggcaacataatgaaactctgtctcaaaaaaaaaaaaaaacaacaatgacacagtgctcttaggcctatgtttggtactggtacaatagcacttcccctctgccttagtaagctcaggctgctgtaacaaaatagcatagaccagatagcttaaacaatacatatttgtatcttatggttctggtggctgggaaagtctagataaaagtgctggtcataatcaggcctctcacaaaagactacatacaaatacccaataaacttatg

SEQ ID NO: 527519 - DNA, 671 bp, Homo sapiens
aaatttggcaatctgctggcacctttatcttgacttttccagccaccagaactgtaagatatatacgtgtgttgttttaacatacaatgctcagacagaggcagtggctcataccagtaatcccagcactttgggaggccgaggcgggtggatcacttgaggtcaggagttcaagaccagcctagccaacatggtgaaaccccatctttactaaaactacaaaaattagctgggtgtggcagtgggcgcctataatcccagctactcaggagcctgaggcaggagatttgcttgaacccgaaaggtggaggttagagtgagcccagatcatgccactgcatctcagcctgggcaacataatgaaactctgtctcaaaaaaaaaaaaaaacaacaatgacacagtgctcttaggcctatgtttggtactggtacaatagcacttcccctctgccttagtaagctcaggctgctgtaacaaaatagcatagaccrgatagcttaaacaatacatatttgtatcttatggttctggtggctgggaaagtctagataaaagtgctggtcataatcaggcctctcacaaaagactacatacaaatacccaataaacttatgactaggtgcttaacctcacagtcatcatgaaaattcaaatgcaaaccacagtgac

SEQ ID NO: 527520 - DNA, 566 bp, Homo sapiens
aaaaaacaatcatagtgcggggagagaaagctatgggagactagagaagggaaaaatggttgggaacactggtgggggggtgaggatcatttcccaatcaccttatatgaccatgactcagaacagtgcttggcatcatgtgtaatatatattgttagaaccgaacatctagttcaggcaacaattcataaaacgttgcagggaataaactgtgggaaagggtctttgacaaagaataaatttcagttgaccaaagactgaattgggagktgtacttctaaggcaggggcaataagatgaggcccaataacaaaatccaaaaagaacatggtctgagcaattgtacgccaggcatttcaggggccacataaatcatgtataggagatttgtgaaaacctaggctgggaaaccagatggtggtcatattgagaacactcctacctctgtgcaaggaaagaagagcaattgctgctgtttatgcaagaaagttagagcatcagagtttgtaaagatgaaactgatgacactgcaaagcaggagccaataagactacaaaaccaaagca

SEQ ID NO: 527521 - DNA, 549 bp, Homo sapiens
atattaacattctagttatataataaacatgatgactttaaaaaatgactagcttctagtttccaaatattgtgtcattcagctttccatttttatagtcctaaatataacyctatttttgcattcttaatcttggctgagtaacacagctttcatagatttccttagactagctcccagatttttgataattttattttgggggtgttcacaatagttaataatgaatatacaggttttcaatgcattatgagaattggaatatctgaaataattgggacttaaaacagtttgggttctgaaggcaaacgctgacggagaatcctttaatgaacattaatctttttagaagcgctccatggggagccgtcgctgaccttcagaactgtttatcttgcaaagaaatgctgggatgtaaactacccccactccatcagcctccacaccttacctccccctcacctcccaacactctaattctgttagagggatgggggaagagagaaacgaatttaaataaaaactcaaaaaaggaaagggctaaccgaa

SEQ ID NO: 527522 - DNA, 549 bp, Homo sapiens
atattaacattctagttatataataaacatgatgactttaaaaaatgactagcttctagtttccaaatattgtgtcattcagctttccatttttatagtcctaaatataaccctatttttgcrttcttaatcttggctgagtaacacagctttcatagatttccttagactagctcccagatttttgataattttattttgggggtgttcacaatagttaataatgaatatacaggttttcaatgcattatgagaattggaatatctgaaataattgggacttaaaacagtttgggttctgaaggcaaacgctgacggagaatcctttaatgaacattaatctttttagaagcgctccatggggagccgtcgctgaccttcagaactgtttatcttgcaaagaaatgctgggatgtaaactacccccactccatcagcctccacaccttacctccccctcacctcccaacactctaattctgttagagggatgggggaagagagaaacgaatttaaataaaaactcaaaaaaggaaagggctaaccgaa

SEQ ID NO: 527523 - DNA, 549 bp, Homo sapiens
atattaacattctagttatataataaacatgatgactttaaaaaatgactagcttctagtttccaaatattgtgtcattcagctttccatttttatagtcctaaatataaccctatttttgcattcttaatcttggctgagtaacacagctttcatagatttccttagactagctcccagatttttgataattttattttgggggtgttcacaatagttaataatgaatatacaggttttcaatgcattatkagaattggaatatctgaaataattgggacttaaaacagtttgggttctgaaggcaaacgctgacggagaatcctttaatgaacattaatctttttagaagcgctccatggggagccgtcgctgaccttcagaactgtttatcttgcaaagaaatgctgggatgtaaactacccccactccatcagcctccacaccttacctccccctcacctcccaacactctaattctgttagagggatgggggaagagagaaacgaatttaaataaaaactcaaaaaaggaaagggctaaccgaa

SEQ ID NO: 527524 - DNA, 497 bp, Homo sapiens
gtcagatggactatgtaattttatttttatgttcaagtcattttatattgcagaagtaaaaataaaggagcagtgaaatttcatcagaaagttttggttttgaatgtatatgtattcaatgtcttctaaatgcaactaacgcttcatcaattgtcatgtatgaaccagagacacatccatcttgtacatattgattccagatgtcaaatacatctctaattggatctaacttatcattattctygttcttcttgaactgacatcatcaaaatacagcacacctgatgaattttttttaaacctttagcttatagttttgatgaagagaaaatggccatcttctttgttcgataattgcaaaagtttcatttttacacttataacaccacttataattaccaattaataattttttcatttctacattatctgtttccttctagtcacctatgcatatatatatatatatttaccttcagtatttgtccacttaggaa

SEQ ID NO: 527525 - DNA, 524 bp, Homo sapiens
acgttacaaagggatgacacatttttaaatgtataaaagttgaccayatatgacagaatcctgctatactctaatggctttaggctttttgtcactaacatgacttcttatctcagatattgtgcctattgtgcctacagtccaaaaggtcactgcacttagtaaaatatccttcttttgtgttctaaggtatttgaattctgaagctacacaacaataattaatttccattccacttagtgctccctcgtgggacttactcagtgcatagtccaggtaacaaaggccgccatggggctttctgagcagcccaatcaaggtgaaacatgcactatatccccaagtgcttagtacacaatgcatgattttgtgaacctctcacctatagcgtatgaacaagtctctgaaaacagagtgtgaaattcaaacacctttgtccttaaaacaagctctgtctgccaaaaatgctctcttctgtgaacttttggcaccgatagggcagaacacaatatcctttgcattca

SEQ ID NO: 527526 - DNA, 660 bp, Homo sapiens
ggccctcttcatctccactccatcctaaaatttcttccttgctcctattctctttaagttttaatcatttccttatctcatttcaagaatctccatttagcctctgacttatctctaaagatcaggtgtggagattaatagactcctggaccaggtaagcaacaaatgagttgatggagcccactagacaagaccgtgagtgaaaacgtcaggacgttagcagaagcaggggactaactggacccacatgttaaaatgaggcacaacagacacaaacatttacttagctccttgggarttattttgcaataaatgttgttgaattaatgaatgaatgcattcatgaataatctatggtactattttcaaaatcattccaggaataagttatttggcacacatgcatctcacattagaagtaaatagctaccacagtgataaccgtaccaaggctcttccacctgtaatgtgagatactgcagcttttcaagttctgtattagaaacctgtataagcagttcagtagtcctgtgattcttttggttaggggcatgctgatgtgcagtgtataggataagtcatagatggctaaacggcatctgcacctcaaaggcaaaggaagagactactgtccaaaatgaggacagagtactccagggc

SEQ ID NO: 527527 - DNA, 525 bp, Homo sapiens
gctgccattattcatttgcaatctatctttgggtctcacaggcatttcaatttgggttcctcactctaattattaggttttaaaatgatttttttgcagttcaaaaagagttaaatactggcaattttgtgcgattcaacctgctattttgggcattttggatatttcattcccagggtagaatactttgtattctgacattacataatgcaagatcccaactatttttctgaactgttccttccccccaatgttttcttgattgcctatgygctccgagttatgctaaaaagctctctacccctatgctttccaaattccagggtgaaaaggtgataggaatcacctgaagatcttgttaaattgcagaatctgattcagtatgtctaagatgctgcatgtctaacaagctcccgggtaacatcaatgaggttgattcatggaccacactttgaggaagaaggttctagccagtattgttctggcagagaaaagttgtattggcagcttcattagcgattagct

SEQ ID NO: 527528 - DNA, 525 bp, Homo sapiens
gctgccattattcatttgcaatctatctttgggtctcacaggcatttcaatttgggttcctcactctaattattaggttttaaaatgatttttttgcagttcaaaaagagttaaatactggcaattttgtgcgattcaacctgctattttgggcattttggatatttcattcccagggtagaatactttgtattctgacattacataatgcaagatcccaactatttttctgaactgttccttccccccaatgttttcttgattgcctatgtgctccgagttatgctaaaaagctctctacccctatgctttccaaattccagggtgaaaaggtgatakgaatcacctgaagatcttgttaaattgcagaatctgattcagtatgtctaagatgctgcatgtctaacaagctcccgggtaacatcaatgaggttgattcatggaccacactttgaggaagaaggttctagccagtattgttctggcagagaaaagttgtattggcagcttcattagcgattagct

SEQ ID NO: 527529 - DNA, 539 bp, Homo sapiens
tctcaaactggctgacctgagatatctgcagacaggacatcgtccattctaggatggcctgtcaaataactcatggttgtgatatgtgcttaacaggctaaagccacaaagttattttaaaaaacaaaaaagaaaaccaaagctgttctttaattacgatcttccagagggaaaacatgtaatctagccaccttatcaatggtcctcattcctcttctggtgaattctaaaaacctatgtaattaagctttttaaatactagagcagaattttgaagtaggaagtcccttccatctctcccttttccacttaatgctctcttcttccctctctccctccwtctccctctctcttacacacacacacctttataactcaaatgccttattcatactacactgttaataactataaatatcatcaccaccaggtggaatttatctttcctcttctattctctcagagtattttgtggaagtcctttgtggtacacggtgttggggtgcctttctactaccccttccttttatagggtcaat

SEQ ID NO: 527530 - DNA, 464 bp, Homo sapiens
atctcacacattacatttacaaaagctttttgttttcactgtctagaatgcaaaaaatgcttctaagattctaggacacctaagtaaatcaatagccttagttttcagaaaatcagagttmaccaggcatagtatatctagacagacacttcatgcagagcttcactattgtgaaatactagaaaatgaattaaaatgtctcaaccagaagcactcttaaaagaagagaaaataaatagagctatggtaaactctaatatgccagtggtccaagggaattctgctgaggttagcctcatgctaagacttatttaacatcttcattagtggtctggagagggaggaaacacatcaattatattcacaaatggcaattaattgggaagtgttgtaattattagtataaaaatgaaaaagaacacaaagaaggctgcagaggccaaacctacagaaaaaggttttaa

SEQ ID NO: 527531 - DNA, 429 bp, Homo sapiens
cagggagggacatggtgacctgcagccctcagaaagccagcatggcagtgctaggcactcttcgtgaacctggaccctagctctcctgcccgkgaggaacacgccaccaacaacctagatgcatcagcgcctggggccaatcttggcttcaatcgccacactgggcggccccagcacctgtatatgtgcaggggttcccacagcccaggccctggactcaacaatggtgctcacattcattggtagcaggtgaggatctgatcatggatgaggatggggaaggctccccacctacagtgagctcctcggggtagccctggcctctttccagaaggggcaactctctctgcttcaccatcagcacggaggactagaggttgacggtcagtacctaggacagcgccaagcatcaagctggccacgccccac

SEQ ID NO: 527532 - DNA, 508 bp, Homo sapiens
tgggatacatgaagtgatttaagcttattctaccaacaagaagaacacaatccaaggtctctttgccccaagtgtccctctgcttcaggaaccctaccactctgcatgcacgcacacacacacacacacccttgtgctcacacacatacaccctatgttcatacatatgcaccactgtgctcacacacacccctatgttcatacatacacacaccactgtgctcacgcacacacacccccactgtgttcatacatacacaccactatgttcacacacacccacacaccccactgtgttcatacatatacacccagactccagcctgggtgacagagcgagactctractcaaaaaaaaaaaaaaaaaaaaaaattaatgaaatgaaagcaaaggccagagaagcaaagggcatcatctttggtcactttacctcccctggttttatcatgtgaaattcagccaggtggggaaagcttacagtgatgaagaaagttaagaaaaaaaaaa

SEQ ID NO: 527533 - DNA, 591 bp, Homo sapiens
cctacaaatatttaggaaacagagcaataggtcaaatttctcaccataacaggcttgctgacaatccctgaaagaagcaaggccatgtctgtaatataacttcaggaggttcttccagttttctaaagtgtytttcactaaactagtgcaatgtattccgagctgattctgatcaatggcttagtcatgccgtaccaaaaaaaaaggccttgggatttaactaatgcaaagaatcaaagctctaactgcccttttacagaacacctgaaatagtatatctcaaattttttgttctcacatttttaaaaaacatcatttttgtaagtattccttttcaaacgcttaatatgtaaattcttaattcatttaaataataaaacagtaacaggcagcaacaattctaatacaaatatacctagaaatgacctacaaatgttaagttataaaaccatccactccatcacgcattaatttcactacttttacgctttattttaattttcttaaggaaaagggtacacccaattttacatggaaaaagcattccaggacggaggctgcttcaagtttagttggagcaacgccagccta

SEQ ID NO: 527534 - DNA, 595 bp, Homo sapiens
aaattgtccactgggggggaaaaactattattttcactgtatacgaaaacttcgcctcaacaaaaaatgaactaaaaaagaaaaaaaaggggaggggggmtggcgacgttgaaaagtaacgctaaactatgtaaggatttgataattggggtaagccttttctttaaaacgtctagtaaagaaaacattccaagaaggtctgctagattctgtgactaaacaaggacattaaaaagccctgaatccagcttggtcaacgtagtgaggccctgtctctacggaatttttttaaagttagccaggcgtagtggtgcgcgcctatagtcccagctactcgggaggctgaggtgggaggatggtttgaacacagcagctcaaggctgcagtgagcagtggtcggtgcccactatactccagcctaagggacagagaccttgtctcaaaaaaaagaaaaaagaaaaaaaaaaaaagccttgcgagctctgggggagatttcccgcagcccagctttgccagggacccagcctcacccctcgggctccaccgccaactcccgcccttcacctgacgtgagcgccccgactgctccactcct

SEQ ID NO: 527535 - DNA, 562 bp, Homo sapiens
ttgagtgcagacctgtgggatgagaagggctctgctggtctctcttccttgctttgcatagtgttggttattggtgtcatttttttctctagaggacctagatggaatttaccagaaagagctgtctttgacgatttatttagggtcacggtgtttccaaatcccttcacagaagttgctctgagcaccacaacatattttgttttagagaagcagatttaagcacatctgctccgggtctaaggtctctgtgcactcctagccatgtcacaaaaagattcccacgcttcagctctcttgctggttatctgtgatctcgttccttcccttttgtcctcccctgaggatgtgctcatgtgctggtgtctgtttctggcccatctctctctcctcatcctmaatgtaaggagtgtctttaatggacattgggcttcccatgggtcttctccatgacatcctgtttgggaagcttcagtgtgttataccactttatcttagacttctgtaaaactttttttgttgctttctcatttttgttcctccactgctttttaaaaataca

SEQ ID NO: 527536 - DNA, 562 bp, Homo sapiens
ttgagtgcagacctgtgggatgagaagggctctgctggtctctcttccttgctttgcatagtgttggttattggtgtcatttttttctctagaggacctagatggaatttaccagaaagagctgtctttgacgatttatttagggtcacggtgtttccaaatcccttcacagaagttgctctgagcaccacaacatattttgttttagagaagcagatttaagcacatctgctccgggtctaaggtctctgtgcactcctagccatgtcacaaaaagattcccacgcttcagctctcttgctggttatctgtgatctcgttccttcccttttgtcctcccctgaggatgtgctcatgtgctggtgtctgtttctggcccatctctctctcctcatcctaaatgtaaggagtgtctttaatggacattgggcttcccatgggtcttctccatgacatcctgtttgggaagcttcagtgtgttwtaccactttatcttagacttctgtaaaactttttttgttgctttctcatttttgttcctccactgctttttaaaaataca

SEQ ID NO: 527537 - DNA, 527 bp, Homo sapiens
ctagccatttccgtatgatgtaaaaattttaagatttcctgcttcctggactagcatactctcaagaatttctatgcataccggtcttcacctatggtttccaggcaacaaaacctcctcagcttcccaaattctaactctctaagacttatagaaacattcagcgttatcgcttctaatattgatatgggatgactctgattgccactactcatgtagagtacagtataaggatttgttggagaatttaaattttaattaatttttttttwctttaaggtaaacaaggctacaaaaattaagtaaaagctaggttgtggcatctctggccactgacgtatttgctaaaattatgggtctgtgtgtactcatgagggacagaagggagaaggagacgggtgtgtgcacagtgcaatggtgaaagctctagcttggaagcgggatgagcctgggcttacagctcagctctaccagttaccagggattagctcccaggcaagtgatttagccactctgggtttctcttc

SEQ ID NO: 527538 - DNA, 655 bp, Homo sapiens
gacagcagccaagggcatttacttttaacaccatgagcatctatctttacgtctgtgttcattccagtattatcaacataccatgctttgatggtaaatcactaagtcgtcacttagtttgcctggtacgttcgagtagctgttgaagaatagatttcagtttaagatttcctttgtggctgtttttaaaatgatttctttggactgagttgtattccattttcrgccatcagtgtgtttataggcagacttcttatgtttatctctgggtgctttgttttgtaactatatttaaagacattaatagtgaaataattcacctttaaacaagatattgtaaaagtgtgttaaataaaagggaaatttttatgccttagccttgtaaattgtaaacaatgaataggctttattttctctcaaagttcttagagctactcgtggtttataaacatagtgaaattataaacttaccagtttatcattttaaatttagcttaattagagatgaagacaaaagcagattatgagaaaacagaattctaggcatctcagataaatattatagtgtaactttggccagagcttgcctagggaaatctacaatttacttgacgtttttggttgatttttctgtgattcctcttctgtattttaa

SEQ ID NO: 527539 - DNA, 655 bp, Homo sapiens
gacagcagccaagggcatttacttttaacaccatgagcatctatctttacgtctgtgttcattccagtattatcaacataccatgctttgatggtaaatcactaagtcgtcacttagtttgcctggtacgttcgagtagctgttgaagaatagatttcagtttaagatttcctttgtggctgtttttaaaatgatttctttggactgagttgtattccattttcggccatcagtgtgtttataggcagacttcttatgtttatctctgggtgctttgttttgtaactatatttaaagrcattaatagtgaaataattcacctttaaacaagatattgtaaaagtgtgttaaataaaagggaaatttttatgccttagccttgtaaattgtaaacaatgaataggctttattttctctcaaagttcttagagctactcgtggtttataaacatagtgaaattataaacttaccagtttatcattttaaatttagcttaattagagatgaagacaaaagcagattatgagaaaacagaattctaggcatctcagataaatattatagtgtaactttggccagagcttgcctagggaaatctacaatttacttgacgtttttggttgatttttctgtgattcctcttctgtattttaa

SEQ ID NO: 527540 - DNA, 655 bp, Homo sapiens
gacagcagccaagggcatttacttttaacaccatgagcatctatctttacgtctgtgttcattccagtattatcaacataccatgctttgatggtaaatcactaagtcgtcacttagtttgcctggtacgttcgagtagctgttgaagaatagatttcagtttaagatttcctttgtggctgtttttaaaatgatttctttggactgagttgtattccattttcggccatcagtgtgtttataggcagacttcttatgtttatctctgggtgctttgttttgtaactatatttaaagacattaatagtgaaataattcacctttaaacaagatattgtaaaagtgtgttaaataaaagggaaatttttatgccttagccttgtaaattgtaaacaatgaataggctttattttctctcaaagttcttagagctactcgtggtttataaacatagtgaaattataaactwaccagtttatcattttaaatttagcttaattagagatgaagacaaaagcagattatgagaaaacagaattctaggcatctcagataaatattatagtgtaactttggccagagcttgcctagggaaatctacaatttacttgacgtttttggttgatttttctgtgattcctcttctgtattttaa

SEQ ID NO: 527541 - DNA, 489 bp, Homo sapiens
tggtgaacttgtgattacacccagcaggcatctggccagtccttcgcttgcttggcctctttgtagctttctgaccccctcctctcctttcttggttcacccctttccctcagcttctaggtacctcattctccttgtgtcctcctttttttcttcattttcctcagtcatctttataaatctttctcgtctactagcccttcaacgtgtggctgtcctttcctctcctcgctgcactctctccgaaatctgtatctccagaccacatcygctcatgcagacaaatcctctgacttccagccactgtgagcctgccaccccaggtccccacctttctgtgactcagtgaggcttcccaagtcaggctcattgcaaggaaaacctggtttaactagtaaagaggtgggttataaaatattgttagaaacaccgtggtggtttaaataatgtctgccaaaatgatgtgctcgagacctaagccctgggacc

SEQ ID NO: 527542 - DNA, 489 bp, Homo sapiens
tggtgaacttgtgattacacccagcaggcatctggccagtccttcgcttgcttggcctctttgtagctttctgaccccctcctctcctttcttggttcacccctttccctcagcttctaggtacctcattctccttgtgtcctcctttttttcttcattttcctcagtcatctttataaatctttctcgtctactagcccttcaacgtgtggctgtcctttcctctcctcgctgcactctctccgaaatctgtatctccagaccacatctgctcatgcagacaaatcctctgacttccagccactgtgagcctgccaccccaggtccccacctttctgtgactcagtgaggcttcccaagtcaggctcattgcaaggaaaacctggtttaactagtaaagaggtgggttataaaatattgttagaaacaccrtggtggtttaaataatgtctgccaaaatgatgtgctcgagacctaagccctgggacc

SEQ ID NO: 527543 - DNA, 587 bp, Homo sapiens
aaagataatattacctccagattagacaccatagtcctactgccaagtgcaggctatttctagattttctactaatcctctaacatcagtcattatcttatttaatgtcagagtctagatttggccgaaagtccgtttgtagaagctacattttagaaaaacaaatgtacctagcttgagaatgtaagccatstggtcatctgttatcctggtttccatgggagcatattttccttttcggccatggaggaagaccgggaggataccaacagccattctacataatcagagttgaaagagagtgagtatggcacaaaagtggggagaagagaaaatggcaaacatgatgggacatcactttgtgagtttgtataaaaaactttggtttccatcttgctagccaacactattgtcttctcagcttgaacaatttgataaagcaagctgccttgttgaagagacccacgtggcaagaaattgagagcagtcttcaaccaacagccagcaaggaactaaggccctcagtccagcaatccacaaggaaccaaatcttggaaacatccatgtgagcttggaagtgaattatc

SEQ ID NO: 527544 - DNA, 465 bp, Homo sapiens
gataatgatcttaccatagctcgaacatcctacctcaaccttgccaaggagatgcaggactgtgacaagaaaaaacagcatatgcaaataaatagctggaggacatgctttctttccagcattgtccttgggtcaagataactcatagcccaggcaggctttaggcattgtgagagtcaataaatgataataccctayataatgcacttctgttcaaagcaacttcatttcttcaataattaacagggagagctcaggagatctaatagcttgatctcaggcagaattgtaaggtcaggaaatatatatggtgggacaagcataagtttgggtcaaaccttttttccatatccatatcttaggtaatttatataagttctttgagctctggttttctcacctagaaataaagtgtaacaaaatctgtctcatgggtacatcattaaaatgtatatcaacataggg

SEQ ID NO: 527545 - DNA, 465 bp, Homo sapiens
gataatgatcttaccatagctcgaacatcctacctcaaccttgccaaggagatgcaggactgtgacaagaaaaaacagcatatgcaaataaatagctggaggacatgctttctttccagcattgtccttgggtcaagataactcatagcccaggcaggctttaggcattgtgagagtcaataaatgataataccctacataatgcacttctgttcaaagcaacttcatttcttcaataattaacagggagagctcaggagayctaatagcttgatctcaggcagaattgtaaggtcaggaaatatatatggtgggacaagcataagtttgggtcaaaccttttttccatatccatatcttaggtaatttatataagttctttgagctctggttttctcacctagaaataaagtgtaacaaaatctgtctcatgggtacatcattaaaatgtatatcaacataggg

SEQ ID NO: 527546 - DNA, 443 bp, Homo sapiens
gacagaacccggctaagacctctaattccattgcctcatttagtcgttacaagaataattattggtaggtactattttttatctccatcttaacaatagtaaaagaagtctcaatcatgttgagcctcatcttttttctttcattctcaagaatataaaataaaaaataaattttaaaaaaaagaaagctccgaaaggttaagcaacttattcaagcttatacagtaggtggcaaagctgtaatccaaacccagaccattatgattccaatctctaatcttggttactaatrtataaacccaaataactaacaagtcaatcaaccttattttttcctgatctccatttatattggaaagataaaagcaaacaataagataacagagatctaactttaaaacaaattaaaacacgtccacactgctctcagagcagtacaaagt

SEQ ID NO: 527547 - DNA, 553 bp, Homo sapiens
gatttcagggaaatggccatacttcagctttgttagtaacttagcataaagattctacaagccagaagagagtcgttgtagaaaaataacaatgtcaggcaaaggagggtgctggtaatacacacaaataaagtgtttaaaatatcctctccaaaaagtgttcctggattaactgcaactcagattgactcctgtagcacctcgtctgtacctatacactggtctgtaaagctgtaatgatggcaaaatactgaaacatatgctttatttctttctattggaaaaggtaaggttttgacatgagatagaagtgagtttgaatcctggtttggcccctaataagttgagtgatcttgaaagactgacttttttggaggttcagtyttcccttttgtaaacaaggataataatattaatacttgccttaggggtttgttttatgagttatttcagataacagagataacctaacagttggtggagaatagatactacatacatgacagtttcctttctttttccttcaggctagggatcaagatttctaaaatgt

SEQ ID NO: 527548 - DNA, 488 bp, Homo sapiens
aagtcctgcagtactttggggaacatgatatcttttccttcaatttatatgatggaaaatttcaaacatacacaaaaagagagagaatagtctaataaatgtccatgtacccatcactcagctycaccaagtatcaaatcaaggccacacttgtttcaccaggcctcaacctgattccacaaccactcccctaccgctaggttatcttaaagcaaagtgacattgtgtcatcttatccacaaatatataaatatgtgcctctttaacagaatcacaataccattatcaccctttaacatttaacaattatccctcaatatctgcgaatactgagcccatgttcaaatttccccaattctcatttctttttaacgatcgttttgtttcagccagagagacaatcttcttgatccaactaagggtccaaagaggaatcatggatgctttctacctgtccatatttggccatgatggcttttaacccatgg

SEQ ID NO: 527549 - DNA, 605 bp, Homo sapiens
tgaactgcacaacaaggcatctaggctgtgcrctccatatgagaatctaactcatgcttgatgatctgaggtggaacagtttcatcccaaaaccatgcccccaacaccgccatctgtggaaaaactgtcttccatgaaaccagtccctggtgccaaaaaggttggggaccactgcccaagcacaccaatgcatgatgccaaaacatctgtgtccagggtaatatctttgtataattttcatgcactaaaatatgcataggtagtaaatagcctatttaagtggaagctgcatccagagactaatttcacagaaataaccatcagctcaaaagtgaccacagtagggggtaactaaagggacagttgttaaaagtagctaacaacagtcaggaccccacaaaaaatctgcttttgcaagttgcttcctcctgtgaacattcaagatataggtaggtagttctacaaggacttcatcagttaattttaaaatgtacagttgacattgtttcattggaagagaaaggtaggattaaattctttaatctattacattaaatatcacgaacaaatagctataggcattaggctctttggatcttgcaaaa

SEQ ID NO: 527550 - DNA, 605 bp, Homo sapiens
tgaactgcacaacaaggcatctaggctgtgcgctccatatgagaatctaactcatgcttgatgatctgaggtggaacagtttcatcccaaaaccatgcccccaacaccgccatctgtggaaaaactgtcttccatgaaaccagtccctggtgccaaaaaggttggggaccactgcccaagcacaccaatgcatgatgccaaaacatctgtgtccagggtaatatctttgtataattttcatgcactaaaatatgcataggtagtaaatagcctatttaagtggaagctgcatccagagactaatttcacagaaataaccatcagctcaaaagtgaccacagtagggggtaactaaagggasagttgttaaaagtagctaacaacagtcaggaccccacaaaaaatctgcttttgcaagttgcttcctcctgtgaacattcaagatataggtaggtagttctacaaggacttcatcagttaattttaaaatgtacagttgacattgtttcattggaagagaaaggtaggattaaattctttaatctattacattaaatatcacgaacaaatagctataggcattaggctctttggatcttgcaaaa

SEQ ID NO: 527551 - DNA, 512 bp, Homo sapiens
acctgtaatcccagcactttgagaggccgaggcgggcggaccacctgaggtggggagttcgagaccagcctgaccaacatggagaaaccctgtctctactaaaaatacaaaattaaccaagcatggtggcacatgcctgtaatcccagctactcaagaggctgaggcaggagaatcgcttgaacctgggaggtggaggttgcagtgaaccgagattgcaccactgcacyccagcctggggaagaagagcgaaaccccatctcaaaaaaaaaagaagtatccactctcccaataaaaagcattccgcaaaatgcttctgcctagatttgcctggttaaacctcatgaatgtcatttattcctgcacttttgcatcaaccattgagaggcaggcctagagaacacatgtgacctctgtcctcggagctcacaacatacaaggtgcatccttgggctggagactgctaaggcacaaagtgtgtcttcattagaccatgcatgctcaacctgggca

SEQ ID NO: 527552 - DNA, 447 bp, Homo sapiens
tctattgagtttatttcaacaactgtttttatatccaagatagctaactggctttttttcaaaattgtgtgttatttcatggatgagatttccttctttagctcagtctctttcatagtgtagccttcttcagatatttgaggactctcagttgtgcattaatctcctctgagaggattcctgcccatcgttttgctgttgtgattgtggttgccatcatctctatagcttcccatctgtttcctttccccagaagggccttactgacttggcccttagagagttccctttttgttttcagcatggctatatatatatattttaaatctcctaacatttccatggtttggtgtggargtggcagaagaatttacagtatcttgactaacatcttgagaattaaaattgttgatctatttttgacctattattctacctccagatatg

SEQ ID NO: 527553 - DNA, 432 bp, Homo sapiens
ctgcatatcctgtcagatagtatcgcttttaatttgggagtcaccaacttttgtttttttttttttttgktttttttttttctgaaatggagttttgttctcatcgcctaggctggagtgcaatggtgcgatctcggctcaccgcaacctccacctcccagattcaagcgattctcctgcctcagcctcccgagtagcggggattacaggcatgcaccaccacgcctggctaattttgtatttttagtagagacggggtttctccatgtttgtcaggctgctcttgaactcccgacctcaggtgatccgcctgcctcggcctcccaaagtgctgggattataggtgtgagccactacgcccagccccactggctttttttaagcctgtactttacaagttttaatgtctgttttgagtgtcctttaataaga

SEQ ID NO: 527554 - DNA, 620 bp, Homo sapiens
tcctatgcacccccatatttacctatgttacccagcatgtttctgagtaactaaatctatttctgaaggttcagtatattttgagttgaataaatggtattggttctttttttatrtatattttttgataatataatttttaacactaagagttgttttcctcattagtatcctgattcctaaagcactgttgttgaatttgatacagaaatgtaaaatattgtatctgagcactttgaaaaatgtctcttaaaagcttcagtcatcctgtaaaaaaatgttcaaatagaggtgcctaagaatataaagtgatttgttagtttgagaacagaattgaaattatacgaaaaaatatacattttatttaagtttataattgaagcacatttactaaagcctcttagggaactgattgaggtgacctaattcttaactaattgaagtaccagaaaagaatttgtccttcattttgtttaagatataacttcttaagtaattttattttattatccaatgctgagatttatttgaactagaaattagtactgtgccagagtgagagtgctcctgaaagccaggtctttctatatctactgttgcaaggtggttataggccagcg

SEQ ID NO: 527555 - DNA, 500 bp, Homo sapiens
ccaccagcaaatcttctccaggtggacagcatatctgaaatggcatacaggaagggaaaggatgacaaaggrtctggaagctctcactaacgtcacagtctgcctttcctcagcttccttgtttttaaaataagggctggagagacatggcaaataagggcccttttagtattagcatttcagtctttttctgaaggtattaggagagaattaatgatttatcaccacctccttcattacttctgtcaaactctgctagaagtaagggaaagcatcctttctttgtttcagcacattcacacagactggctaatgagaccccacactgaagaagcctagaacttccacagactccctgaaatctaagtcctcatttttaacatacagcttttaatactagcttcagaagtcccggatccctgcaaaggtaaatgttttattttctatatattcagagaaaccattctctgaatctgtgcattgctcctggcaggaagcaa

SEQ ID NO: 527556 - DNA, 580 bp, Homo sapiens
tgaaatggtattgagctgtctggtctatayggaagaataggtgtctatattcttactctctattctaacacaataatgacattttccttttattttctcagttgtgagttaatcactttttttaaaaaaaggtttgagatagtgttactctctgtcacccaggctggagtgcagtggcacaatcatagtagctcactgcagcctcaacctcctggtgcaagataattctttattattatgaatagtttacaattgtttaaaaggaactttataatgaaataaatagttcggaagaatggtccaagaatctaagtcaagatgagctgaactggggtaaataaacctaggaattatgatgagctaattgaatcgggcttgtgaaaattaatttacatgacaggtaaaacatgttaaaacatttagatatttacttccatatagcagtcactttaataaaatatcagtttactgttacttgtggcttctctagttagtaagaactttaacagactgtattgggacaagtctacgtctcttttaggaactaatctcacaagttgttgtgatgctgtagctggat

SEQ ID NO: 527557 - DNA, 574 bp, Homo sapiens
tgctactttttcttttatctttgacttgcaaagagcctcccctttttttggacccaggcacgttttctggaccttggtgccatttgtatacccatgwtcctgtgatcccaaatgatagtagatggtgccttgaacctagcaccttcaattaaaggctgcctcgtgctctcaggaaagcttgctgctctacacactttaaaaggcagaaaagcaacaaatctgtttggtgcttatttgtaattttaaggatcagttatagataaatatatttgtaatgagagtaaatatactcatgggatcaatttggggatttttaaacatcccaaaggagaatttttatatctagtcttttgttatttcgtgaatgtttgcaagctgttacctccgggaggtggaggttgcagtgagttgtgatcacaccactgcattctagccagggcatcagaacaagaccctgtttaaaaaaaagaagagaaaaaggtgatcgtggatttccttttcttattcctaattgacagggaaatcattcaatatttcaccattaaacaacatgatgattttctagttttttttg

SEQ ID NO: 527558 - DNA, 574 bp, Homo sapiens
tgctactttttcttttatctttgacttgcaaagagcctcccctttttttggacccaggcacgttttctggaccttggtgccatttgtatacccatgttcctgtgatcccaaatgatagtagatggtgccttgaacctagcaccttcaattaaaggctgcctcgtgctctcaggaaagcttgctgctctacayactttaaaaggcagaaaagcaacaaatctgtttggtgcttatttgtaattttaaggatcagttatagataaatatatttgtaatgagagtaaatatactcatgggatcaatttggggatttttaaacatcccaaaggagaatttttatatctagtcttttgttatttcgtgaatgtttgcaagctgttacctccgggaggtggaggttgcagtgagttgtgatcacaccactgcattctagccagggcatcagaacaagaccctgtttaaaaaaaagaagagaaaaaggtgatcgtggatttccttttcttattcctaattgacagggaaatcattcaatatttcaccattaaacaacatgatgattttctagttttttttg

SEQ ID NO: 527559 - DNA, 712 bp, Homo sapiens
tgtcggagatgatgctactttttcttttatctttgacttgcaaagagcctcccctttttttggacccaggcacgttttctggaccttggtgccatttgtatacccatgttcctgtgatcccaaatgatagtagatggtgccttgaacctagcaccttcaattaaaggctgcctcgtgctctcaggaaagcttgctgctctacacactttaaaaggcagaaaagcaacaaatctgtttggtgcttatttgtaattttaaggatcagttatagataaatatatttgtaatgagagtaaatatactcatgggatcaatttggggatttttaaacatcccaaaggagaatttttatatctagtcttttgttatttcgtgaatgtttgcaagctgttacctccgggaggtggaggttgcagtgagttgtgatcacaccactgcattctagccagggcatcagarcaagaccctgtttaaaaaaaagaagagaaaaaggtgatcgtggatttccttttcttattcctaattgacagggaaatcattcaatatttcaccattaaacaacatgatgattttctagttttttttgtaaatatgcttcatttattcccagtgtactgagtttttgcttatttatgaccagatctcaaattatataaattactttttcagtattacctagaagatcatatggttcttctcttttattaatatg

SEQ ID NO: 527560 - DNA, 526 bp, Homo sapiens
ctgagcttggaacttcatttgcgttgtgggttttgctctttcaaggcaggcatttttggacccatttaaaatagaaggagtccagcactcagagaagtgcggtgataagcctcatgtctcacggccagtcaggctcaagatccaaaagccactgctatgacatatattttggaacattcgccctttgatcattaaatcctcactacctgaatgactatattttttgatcattcataatggtaagtgaatttcttaaaaacaataactgtratgcaattttctttttggttgagatctgaagtcacgtatttctaaaatcagataccaattgcattctgaagatgtgttcttccaactggaatgttgtcattgtcaataatactttttccaggggttcctgggaagtaaatgagaaaatttaaatttggttattcatgattttaaaacatgtaaagatgtgtgtgttttaaagtactgtgtttaataaatcgctatagcattagatttgtttaaagcaaaatacact

SEQ ID NO: 527561 - DNA, 298 bp, Homo sapiens
gtggaagtggcaagacagctctctggggcctcttttctgagggcaccaaccctgttcrtcaggcttctgtcctcatgatctaatcacttcccaaggcctcacttctgataccatcacgttgggggttagatttcagcatagaattttagggggacacaaactttccgcccatggcaataatgtagagaataatacagaaaagagtagataggtatgtggagaagcaagacagcaaactcaggaactgggacgttactctgtgggtcagagggatgagttcagagtggggcatgttgag

SEQ ID NO: 527562 - DNA, 558 bp, Homo sapiens
ctgcactcccttctccctggggactcctccagctccagatcactgctgatatcatgaagggaagagctgaggtccgcgggtgaggagaagcgcacttgcagctaatccaggggatacttagtacccaggctggcttcctcgtccctgtgtgtctcttctcccatccgtctcagcgtatggaccgctggctgttgtcctctcttcagtcaccatctagggttgtgaccagcacttttctcctttgccctgctgttgccctcaacacagtcttatattcttatgttgcctgtgtawccttctgtcctggaaatgaacactcaggcagtcttttaggactttccaatgatttacgactactatcaataatgaagaaagacagccttctcttcctcttcttcagcccagtccctcttatatttccttcagaccctgatgaaattcctccaggaagataaggcttgaaaccccacagccagactcacactggggcagacacaaccagagctaggatttcctgaaccactctcaccggactggaggaagaccctgagctgaaaa

SEQ ID NO: 527563 - DNA, 563 bp, Homo sapiens
atctgcttaaacatcattagccatgtaacaccagaaaaactgtgatgaaattgtttttgttayaattctgttttagtagtttttaatttctattatatttttctttgattcataaatttagatgtttttataatttttaatttccaaacatatagccataagcaaactcttctctaacatggagtcaggactgttaaaatttatgggctaatacacttaatcttttttaaatccacaagttaccctattattattatcttctacttaggcttgttcagatacacacacatacttaccattttctttgctcatcattcctttttgcatttgagctaatttattttcttccatagtacactcttccaaaagtcttttagagaggatatcttgttggtatactgctcccaacttatctgaatgtatcagttcatgtgcaggtgtctatattttgccatcattcttgaaacagttttgctgggtacataattctgggttggttgttagtttctcctagtactttacagataatattctcctgactcccttggttgcagttgtgatgt

SEQ ID NO: 527564 - DNA, 563 bp, Homo sapiens
atctgcttaaacatcattagccatgtaacaccagaaaaactgtgatgaaattgtttttgttataattctgttttagtagtttttaatttctattatatttttctttgaytcataaatttagatgtttttataatttttaatttccaaacatatagccataagcaaactcttctctaacatggagtcaggactgttaaaatttatgggctaatacacttaatcttttttaaatccacaagttaccctattattattatcttctacttaggcttgttcagatacacacacatacttaccattttctttgctcatcattcctttttgcatttgagctaatttattttcttccatagtacactcttccaaaagtcttttagagaggatatcttgttggtatactgctcccaacttatctgaatgtatcagttcatgtgcaggtgtctatattttgccatcattcttgaaacagttttgctgggtacataattctgggttggttgttagtttctcctagtactttacagataatattctcctgactcccttggttgcagttgtgatgt

SEQ ID NO: 527565 - DNA, 563 bp, Homo sapiens
atctgcttaaacatcattagccatgtaacaccagaaaaactgtgatgaaattgtttttgttataattctgttttagtagtttttaatttctattatatttttctttgattcataaatktagatgtttttataatttttaatttccaaacatatagccataagcaaactcttctctaacatggagtcaggactgttaaaatttatgggctaatacacttaatcttttttaaatccacaagttaccctattattattatcttctacttaggcttgttcagatacacacacatacttaccattttctttgctcatcattcctttttgcatttgagctaatttattttcttccatagtacactcttccaaaagtcttttagagaggatatcttgttggtatactgctcccaacttatctgaatgtatcagttcatgtgcaggtgtctatattttgccatcattcttgaaacagttttgctgggtacataattctgggttggttgttagtttctcctagtactttacagataatattctcctgactcccttggttgcagttgtgatgt

SEQ ID NO: 527566 - DNA, 563 bp, Homo sapiens
atctgcttaaacatcattagccatgtaacaccagaaaaactgtgatgaaattgtttttgttataattctgttttagtagtttttaatttctattatatttttctttgattcataaatttagatgtttttataatttttaatttccaaacatatagccataagcaaactcttctctaacatggagtcaggactgttaaaatttatgggctaatacacttaatcttttttaaatccacaagttaccctattattattatcttctacttaggcttgttcagatacacacacatacttaccattttctttgctcatcattcctttttgcatttgagctaatttattttcttccatagtacactcttccaaaagtcttttagagaggatatcttgttggtatactgctcccaacttatctgaatgtatcagttcatgtgcagrtgtctatattttgccatcattcttgaaacagttttgctgggtacataattctgggttggttgttagtttctcctagtactttacagataatattctcctgactcccttggttgcagttgtgatgt

SEQ ID NO: 527567 - DNA, 603 bp, Homo sapiens
gaaatcaatttcgttctttataaataacccagtttgtgatatcgtactatagcagcacaaatggactaagataagaactaagcataataattaaaattgtgagaagcaccagaatagtgcgagtgagcatcttccataacaggacttaaaaattaccacctagatttaacgtgccgatagagcagtacacatcttattagagttctgtgagagttcccaccaaagtctaaaacagaaagaggagaagaggctgctctgggatctgggaactcccatttctttcttaccaagtctatagtttcaataaaaactgaaaatgcagggaagaaaagctgacgtaggcgctgtcattgggctgttctatttcctatgtggaattcacagacatataaatataagagtgytaagagttggcatggaggtacctttggtgaggaggtgatttttctctatgaatgtccataaactcagaattgacactatttgcttttcatatcttctgagagaaacagctgaagtcgaaagcaagtacatttgcttttattccttcctagggccttgggtatttctttttaacatttggcaaccatttttcgggctcct

SEQ ID NO: 527568 - DNA, 640 bp, Homo sapiens
tgctgaccgacgctacctgggcagtgatttaacctgcaaactttgccgatttctgtatgttaggggtttggaccggtgcttgttttagtgtgcctggcacaggatttttgtctgacttggccccagcctgcgcactgactgcccatcccgcaccccatgaccaagttttccctggatacatgattttttttaactggcaggcccccaagtgatacttttctctgtctttgtaccagttgattctaacaacagactttttctytggagactgacatccctcacagaatggtggcaactaccctaatggcttttaaagggtcaacccttgcctaccattttagaaagcaaattttgttcttgaaagatgttcagaaacaaatgggggaaaaagcaagcagtaaacaaatgtataagaatatgctaacaactcagaacaaaactgaaaccaaaagttcatttaccaggatcagaaacacaaacaaagactttttatctattctggcaagtcatttctagtaaaaagacagtttgcgtgacttgccagaatacataaaaagtcttttatagtcccagaagggatacgagagcctttactacagtgacttaacccactcaggtcctaaataagctcaacagacag

SEQ ID NO: 527569 - DNA, 616 bp, Homo sapiens
gagcaagcgaatgaacttaaatgctagttgctccagagcaactatcattaaataaaaggtatctttggctgtactaccagcttgatccttccctcccccttctccttgctactgcgggattggcacctggccagcacaagcgacatgataccctagtgccatctacaggctattatcgatattcaaattttgtggcaacagacaagcaccagtgaaataaattagacagcgctgcatttaaatctttattaacaaggaattattagacctaagaaaactaattctggatttggttgaatatgagtttctcagcctcttaatcccctctcatatggcatatttcacagtttaaaatgagttatgacagatcacttatgaattacccaagagagagaatatttacaatggattcattcttttctttttaaatcagttatattaggcagcaagcattctttttttttttttttttgaaagagtatttggccactgcggacactaaaaatctttctattaagtaycgaatttaatatattacaataaaataatttgaaatcaaagagaagacttcctatatggcttagttgcaatctatcaacgatcatgtgcttcacag

SEQ ID NO: 527570 - DNA, 610 bp, Homo sapiens
aagtaactgaatttaaacactgtataatgtttgcagagatatgcgatcacttgtaacttatattgaggcttccraaatgtacagttctttaaagaataatcagtaactcaaatggttaattcttttcttatacatgatcaggaaaactaactgtcaataaatgtaatccagattctttattagtgatctgaaaccaagccattacaatagaaagaagcataatgacatcctataggaattttaaagtaaaagataatgggggtctcttaagtttatgaagggaatacatggcatgagtttccctttattttattgtaaaaattaattagttaaaagtttaaaggacttagttcttaaaaagttaccaatccactctaacaaaatcatgtgttttgacatcttctagttattactaaatgtgtgtgcaccttcacataatgcaatcataatgcatcttcaagttttctgttgttctaatttcatccataaacatttttattttcagcttttcttccttcttaaaataacacaaatatatatttcaggtaaatatttgaaaatacatattatatctactataggaaaattcagaaattagcagaagtattaa

SEQ ID NO: 527571 - DNA, 610 bp, Homo sapiens
aagtaactgaatttaaacactgtataatgtttgcagagatatgcgatcacttgtaacttatattgaggcttccaaaatgtacagttctttaaagaataatcagtaactcaaatggttaattcttttcttatacatgatcaggaaaactaactgtcaataaatgtaatccagattctttattagtgatctgaaaccaagccattacaatagaaagaagcataatgacatcctataggaattttaaagtaaaagataatgggggtctcttaagtttatgaagggaatacatggcatgagtttccctttattttattgtaaaaattaattagttaaaagtttaaaggacttagttcttaaaaagttaccaatccactctaacaaaatcatgtgttttgacatcttctagttattactaaatgygtgtgcaccttcacataatgcaatcataatgcatcttcaagttttctgttgttctaatttcatccataaacatttttattttcagcttttcttccttcttaaaataacacaaatatatatttcaggtaaatatttgaaaatacatattatatctactataggaaaattcagaaattagcagaagtattaa

SEQ ID NO: 527572 - DNA, 401 bp, Homo sapiens
tgcccttgattctttagggaggtcagcagcgggaggaagagccctgctggctaggcaggtaggagggaggagaaaaggctgtcacatggggcattaacagcataggctccttccataaataagctcccctggaacatcctctggctagcttttaattaagtggggactgcccaattctctcatgggccccataccccaggggccagaggtagtgctggcatctgctagctccccatcatctccccttacagatgatttcttttccaactcctgttaaaactctcctcttttctcattcattacataatcatactatgttgtattttagtttattttcctgtstttctgcttaagcaagaagctttcttgaagactatctataggtatgccttatgcaacct

SEQ ID NO: 527573 - DNA, 401 bp, Homo sapiens
tgcccttgattctttagggaggtcagcagcgggaggaagagccctgctggctaggcaggtaggagggaggagaaaaggctgtcacatggggcattaacagcataggctccttccataaataagctcccctggaacatcctctggctagcttttaattaagtggggactgcccaattctctcatgggccccataccccaggggccagaggtagtgctggcatctgctagctccccatcatctccccttacagatgatttcttttccaactcctgttaaaactctcctcttttctcattcattacataatcatactatgttgtattttagtttattttcctgtctttctgcttaagcaagaagctttsttgaagactatctataggtatgccttatgcaacct

SEQ ID NO: 527574 - DNA, 596 bp, Homo sapiens
agtattttggaggaaaatatttttatttcctccccacaatgacttactaatgaatcgtgtgtacccattgggcattgcacaacttcccaaatcttggaatcaatgggacgtggccaccctcatttcctgttccatactaattttggggtggtgcttgatttttatctcaacaactgccacatgcccagctttgcaaaatatgccataattgaaaggaatgtagcataatctaaagttagtygatgtccaacagatgtcaagtatcactgtttccctcaaaaatttaaactatactgtggcgtccctgtgagttctctgcagtgcccagggagccttggcgcacagattggtgatgccattcaggggtggcggtggggttggcagaagaggcacaccgtaagcaagggctgctttggtttgatttgctgttggacattcaatgaaagctactgaccaaggaactttaaggaagaaacataccacaaaactaaattcatccaatgttagtaaagaaaaaaatctattttccagcattactaagaaatatgtttttctctgcccaacttcctggataactaaccagaaaacatttttcc

SEQ ID NO: 527575 - DNA, 520 bp, Homo sapiens
aagcctttgtagcagagtacatatccccatgatgttttttgttatcctrtatataaacaagcattgatctagggtgggcacgttactcctcttacttttgggaacaccctactgtctacggagtacctactctttcaccactttacttttttaacaaacttgcttttgctttatactgtggactcgcctgtattctttcttggatgagatccaagaaccctctcttggggtctggatcaggacccctttccagtagcaagagcattggtactttcttaccctgctttactacaaccctcctcaattaaaacattgttttttacatggtatattatttgaactatgaaaagctataaaatgaaaagtaattatattttctacctccaaactagtccttctttcagaggcaactactattaaagtttccttcccaaaattgtttatgtgtttactagcacatgtggactttaaaaatgttacccaaatgagattgtactataccccttgctatttcacttct

SEQ ID NO: 527576 - DNA, 520 bp, Homo sapiens
aagcctttgtagcagagtacatatccccatgatgttttttgttatcctatatataaacaagcattgatctagggtgggcacgttactcctcttacttttgggaacaccctactgtctacggagtacctactctttcaccactttacttttttaacaaacttgcttttgctttatactgtggactcgcctgtattctttcttggatgagatccaagaaccctctcttggggtctggatcaggacccctttccagtagcaagagcattggtactttcttaccctgctttactrcaaccctcctcaattaaaacattgttttttacatggtatattatttgaactatgaaaagctataaaatgaaaagtaattatattttctacctccaaactagtccttctttcagaggcaactactattaaagtttccttcccaaaattgtttatgtgtttactagcacatgtggactttaaaaatgttacccaaatgagattgtactataccccttgctatttcacttct

SEQ ID NO: 527577 - DNA, 553 bp, Homo sapiens
acttccaagattagagaaaaaaacaaaaataatttaaaaattttaaaatcacaaagtacataacacacatgctttacagaaccaaaacatattctccgtggtggacaagagagagcactagggaacgaaatagagcaaactgttttaagargaatcatcatgaggttacactggctctcgggtgagttaaatcaaatccactatcagataggcacaggaattggggaactaaaaacctgctatccttgaacatcctatatttggggttcctctaaactgtaacacatagaaaataatttgagtgaccatttttttaattgccccaaaacattagagagaagttaactgatcacataaatgaatggcttaaggcatcagagcataaatctcttagaaatgtttaagataaagtttacataaatttgtaagtaattaagggacatgagggatgtgtatggtatatccttaactgcttaagatcaattatcttaaaaattaactactctgatcttttagaaatcatctcttactaattcagagacaaatcattagg

SEQ ID NO: 527578 - DNA, 553 bp, Homo sapiens
acttccaagattagagaaaaaaacaaaaataatttaaaaattttaaaatcacaaagtacataacacacatgctttacagaaccaaaacatattctccgtggtggacaagagagagcactagggaacgaaatagagcaaactgttttaagaagaatcatcatgaggttacactggctctcgggtgagttaaatcaaatccactatcagataggcacaggaattggggaactaaaaacctgctatccttgaacatcctatatttggggttcctctaaactgtaacacatagaaaataatttgagtgaccrtttttttaattgccccaaaacattagagagaagttaactgatcacataaatgaatggcttaaggcatcagagcataaatctcttagaaatgtttaagataaagtttacataaatttgtaagtaattaagggacatgagggatgtgtatggtatatccttaactgcttaagatcaattatcttaaaaattaactactctgatcttttagaaatcatctcttactaattcagagacaaatcattagg

SEQ ID NO: 527579 - DNA, 622 bp, Homo sapiens
aaatggagcaatttgttcacgaagtatcaaaaggtgcttaattaagaaaagttgtccatcaatctgagtctaaattataagacagaaaaatggatatgatcacatattaaatcaaaataaaagcatatacagcatacattattaatcaacattaatctacctaggtttacagcctatggtgtcaattctctttagttgtgcaatgaactctccccatgctagaattaagttaaaaaatcttgcttcaaactcttatttgcactgtcacttgctctactttaaaaatccaagaaagtcagacacaaggctgtaaagcaacacatttacaaagagaagtccaatctactttcacctggtgcagaggtagaagagatgatgcagcctaacwgtggcccagagcagaggaggtaaagaaaggctcaaataacaagcaggatcctgacctggcctggcattctagtttctcctcaggaacatggctttcactatttggtcaaagtggtttcaatatctagaacatcagacatacttatatttatacaaatgtaaaatgatttgaggttgccattttggatcctcctgccaccaacagagctctgactacccacatccctgaaggtcc

SEQ ID NO: 527580 - DNA, 607 bp, Homo sapiens
accacatctaactcctcttcatgtatagatgttcaatttgattgataaatgtttgtggagtaattcttttttttttttttttttttttttgagacaaggtctcgctctgttgcccaggctggagtgcactggcacaatcatggcttactgcagccttgaccacctgggctcaattgatctcccccatcaatctagtagctaggactacaggtgtgcaccaccactcctggctagtcttttttgtctgttttttttttcttttttttttttgtaaaacttggggtttaccatgttgcccagggtggtctcatactcctgggctycagcattccttctgccttggcctcccaaaagtgccaagattacaggcgtgagccaccacacccagcccaagttttagggattttgtgtgaaaccatttaattagaagcttgggtgcagacgatggtagtgaggataacaatttaggttgacgtttatgtttcctacttgggaagatggatggcattcgctgagaaaagaaatacaggaggagcaggcttggaaggaaagatgtttcacttaagagatgcctatgggacatcaaagcggtcatacccagtacgca

SEQ ID NO: 527581 - DNA, 629 bp, Homo sapiens
gacagagataaaaaaggattccatagatttttaggaggtagaattcatgggacttgctaactcattgtgaggagtgaccgtgagggagggtttagatgactccattattcatgtttggagttgaaatcatttcacaagtccaaaatactaagatttaccatttatggagtaattataacaggccaggtatatcatctcatttcatccacataattcaaagagtggcaagcagtcctttgctgggaggaccctaaggcttagaaaggtttgcaacttgtccaaggtcacgatgtgtaggtaagatttgaaactatatctgccttcctccctagccatctacgagagaatgaaggattggcaaagaatttactgacattatcctgaaaggacaggcagaaaagactgcacgtgctgctcactttttctccccttaagaacaatattgagggctgctgcacagttgcatctcagccttataccttactatgcatttttaaatggtgagcaagaaaggaaatgygaaagtgctggctagtaataataatagtaataatgacttcattcactcacataggcaagtctatgtaagccaggcaccttccgagaacaaaatatttacaagatatata

SEQ ID NO: 527582 - DNA, 582 bp, Homo sapiens
aaatgaataaaaaacttttttgagtattgctcattttttttgaagtatagaaatgttaggataaaacaagtaaaaaatatatgaagatcagtatggaagaacacttttaatggctgctcaattatgaatggcacaggtagatctataaatccagaccccactgcaacaaaaaatatgaaataaaaaatctttgtataaaaaattaggcttaaaaatcagagggagacatattgaagtgctattttgaagaatgaaatatagtaatacttcattttkcagtatccttggaaagtgagagggatcacaagtataaagactagaaacttctctttcattcattgaaactgcaaatgcaacagattagggaagagcattaccatatttgtcatcaatacacaaagtgatcataagcagtatataagttaacattcacagcctttaaatgtagctatgatttactatctccatattattgatgatgacattgaggctcagagagacgtggtaggcatacagagccagtaaatcgtagagccaggatcggaatccatgtctatttaactccaaagcctgttgtgccat

SEQ ID NO: 527583 - DNA, 582 bp, Homo sapiens
aaatgaataaaaaacttttttgagtattgctcattttttttgaagtatagaaatgttaggataaaacaagtaaaaaatatatgaagatcagtatggaagaacacttttaatggctgctcaattatgaatggcacaggtagatctataaatccagaccccactgcaacaaaaaatatgaaataaaaaatctttgtataaaaaattaggcttaaaaatcagagggagacatattgaagtgctattttgaagaatgaaatatagtaatacttcatttttcagtatccttggaaagtgagagggatcacaagtataaagactagaaacttctctttcattcattgaaactgcaaatgcaacagattagggaagagcattaccatatttgtcatcaatacacaaagtgatcataagcagtatataagttaacattcacagcctttaaatgtagctatgatttactatctccatattattgatgatgacattgaggctcagagagacgtggtaggcatacagagcyagtaaatcgtagagccaggatcggaatccatgtctatttaactccaaagcctgttgtgccat

SEQ ID NO: 527584 - DNA, 477 bp, Homo sapiens
acagcagtcacactggattaagggcccaccctactccagtataayctcatctcagcgttacaactgcaacaaccctatctccaaataagatccccttctgaggtcccgggggttaggcttcaacatatccttttggaggacacaattcagcccaaacacttggtcatcttttcacttggtgggcccgtccttttaaagcctgactgccccattgaccgtctctccagtaagcttcctctcttcctgcagtgccttcacctccaagtcctcccccgacccttctgatgtatcaggagcatgcaccccaccccagaaggcaggggcctggcagcctcactgcccacctccagcactcccagaggcctggcttcccaggaggccggttccagagtcaccccgcaccctacttgcccccaaacaactgtattttctcaattatgtttgaaggaagaagaaatcctttttgctttccaaaat

SEQ ID NO: 527585 - DNA, 525 bp, Homo sapiens
gatacatgaaactggaaaaagaagacttttttcaacaactacgacccgtaggtcatcaagtgaattttaaaattttgttcttctttgtagttatctctaaaatttccacaataatacatgacttatgcattttatttttgggttatttttatatctgggcttgtggcttgccattggttactaccgtgacgtcagccacaatgagcccaattctgaagtaatggcttaggaagatctaagtctgatcatcacatttttggggagggagaagtaaacagtggtgggaaaatgcaagtggatcaaaagcacatcacagctttgctttcaggttatcagggagggctggacgggcaaagcattgttcgaacaaccagaagaaaatgctcctagacccaggataagggggaacttgttctgagcccggggaacaggaggcctcggagcgcagaggggtgaccrggtcacctccaggcggggacctgggtttaccagattcctcataagtagagggaggactgcgcagca

SEQ ID NO: 527586 - DNA, 586 bp, Homo sapiens
cctaatattctttctgatcttgagcaaatcacttggtcctttggtarctcattgttgtcatctctgaaatggctaatactagcagtgaggagtaaattataagatgcaggtgaaaaaaagaaactttataaggcactcttacttgcaattgtaacaccacatacacacacacacacacacacacacacacacacgcacgcatccctctgattgagttggtcattttggatctctaagtaggactggatttagttgtgtgcccaccctcacccctgcacccataccccagtaagaagagaaaaatccaggtgaattgtctatctttaacctctgcctctgaaataggttagatctgaagttataccagcctctctggatgctgtctttgacatttgggaatctttgtcctgggagaaaatactgcatagtcagaggccctcaggggatgctgccagatgtagagggaatttgtcatctatactgtttgctcattgacttgtataaatgcctatggtacttggggtaaagaaaccagcacaggagtgtgtagattcctgagttacagtcctgcctctaacctcccttt

SEQ ID NO: 527587 - DNA, 586 bp, Homo sapiens
cctaatattctttctgatcttgagcaaatcacttggtcctttggtaactcattgttgtcatctctgaaatggctaatactagcagtgaggagtaaattataagatgcaggtgaaaaaaagaaactttataaggcactcttacttgcaattgtaacaccacatacacacacacacacacacacacacacacacacrcacgcatccctctgattgagttggtcattttggatctctaagtaggactggatttagttgtgtgcccaccctcacccctgcacccataccccagtaagaagagaaaaatccaggtgaattgtctatctttaacctctgcctctgaaataggttagatctgaagttataccagcctctctggatgctgtctttgacatttgggaatctttgtcctgggagaaaatactgcatagtcagaggccctcaggggatgctgccagatgtagagggaatttgtcatctatactgtttgctcattgacttgtataaatgcctatggtacttggggtaaagaaaccagcacaggagtgtgtagattcctgagttacagtcctgcctctaacctcccttt

SEQ ID NO: 527588 - DNA, 586 bp, Homo sapiens
cctaatattctttctgatcttgagcaaatcacttggtcctttggtaactcattgttgtcatctctgaaatggctaatactagcagtgaggagtaaattataagatgcaggtgaaaaaaagaaactttataaggcactcttacttgcaattgtaacaccacatacacacacacacacacacacacacacacacacgcacgcatccctctgattgagttggtcattttggatctctaagtaggactggatttagttgtgtgcccaccctcacccctgcacccataccccagtaagaagagaaaaatccaggtgaattgtctatctttaacctctgcctctgaaataggttagatctgaagttataccagcctctcyggatgctgtctttgacatttgggaatctttgtcctgggagaaaatactgcatagtcagaggccctcaggggatgctgccagatgtagagggaatttgtcatctatactgtttgctcattgacttgtataaatgcctatggtacttggggtaaagaaaccagcacaggagtgtgtagattcctgagttacagtcctgcctctaacctcccttt

SEQ ID NO: 527589 - DNA, 586 bp, Homo sapiens
cctaatattctttctgatcttgagcaaatcacttggtcctttggtaactcattgttgtcatctctgaaatggctaatactagcagtgaggagtaaattataagatgcaggtgaaaaaaagaaactttataaggcactcttacttgcaattgtaacaccacatacacacacacacacacacacacacacacacacgcacgcatccctctgattgagttggtcattttggatctctaagtaggactggatttagttgtgtgcccaccctcacccctgcacccataccccagtaagaagagaaaaatccaggtgaattgtctatctttaacctctgcctctgaaataggttagatctgaagttataccagcctctctggatgctgtctttgacatttgggaatcttygtcctgggagaaaatactgcatagtcagaggccctcaggggatgctgccagatgtagagggaatttgtcatctatactgtttgctcattgacttgtataaatgcctatggtacttggggtaaagaaaccagcacaggagtgtgtagattcctgagttacagtcctgcctctaacctcccttt

SEQ ID NO: 527590 - DNA, 596 bp, Homo sapiens
gttcagaccagcctgtccctctgcaggctcagcctgtcttccaaccaggagacaccataattgttcaattactcaacaaagcacatgttccaaggcccatgtcttagcatcctcaaaggtgtcccagagaggctttgctatgaaacttcagacaagccacttctctctgagcctcagtctyctctctgaagagtgtacaaccatccttaccctgcctaccctcatggaattgttgtcaagattaaggagctcaatggacatgaacttgccttataaagaaatgccttataagatgcctcccacagacctatggggtcagtatcatctccagcatcagcttcccactgtctcttcccttagctctgtaatgctttgatttaattcaggagtctgcaaactgtggctcacagacaaaatcctgcctggttttgtatggtctgttagctaagtggttttcacagatgaacattggtggtcactttgataatagggagcgttaactttgaaccccaaccaagcaaaatgttatcccctttccccaaatttcattcttcttattagtaaacctgtagtacaaacaaaagttctcaattatt

SEQ ID NO: 527591 - DNA, 482 bp, Homo sapiens
cttccagaccatgttcagaccagcctgtccctctgcaggctcagcctgtcttccaaccaggagacaccataattgttcaattactcaacaaagcacatgttccaaggcccatgtcttagcatcctcaaaggtgtcccagagaggctttgctatgaaacttcagacaagccacttctctctgagcctcagtctcctctctgaagagtgtacaaccatccttaccctgcctaccctcatggaattgttgtcargattaaggagctcaatggacatgaacttgccttataaagaaatgccttataagatgcctcccacagacctatggggtcagtatcatctccagcatcagcttcccactgtctcttcccttagctctgtaatgctttgatttaattcaggagtctgcaaactgtggctcacagacaaaatcctgcctggttttgtatggtctgttagctaagtggttttcacagatgaacatt

SEQ ID NO: 527592 - DNA, 484 bp, Homo sapiens
gttcagaccagcctgtccctctgcaggctcagcctgtcttccaaccaggagacaccataattgttcaattactcaacaaagcacatgttccaaggcccatgtcttagcatcctcaaaggtgtcccagagaggctttgctatgaaacttcagacaagccacttctctctgagcctcagtctcctctctgaagagtgtacaaccatccttaccctgcctaccctcatggaattgttgtcaagattaaggagctcmatggacatgaacttgccttataaagaaatgccttataagatgcctcccacagacctatggggtcagtatcatctccagcatcagcttcccactgtctcttcccttagctctgtaatgctttgatttaattcaggagtctgcaaactgtggctcacagacaaaatcctgcctggttttgtatggtctgttagctaagtggttttcacagatgaacattggtggtcactttga

SEQ ID NO: 527593 - DNA, 596 bp, Homo sapiens
gttcagaccagcctgtccctctgcaggctcagcctgtcttccaaccaggagacaccataattgttcaattactcaacaaagcacatgttccaaggcccatgtcttagcatcctcaaaggtgtcccagagaggctttgctatgaaacttcagacaagccacttctctctgagcctcagtctcctctctgaagagtgtacaaccatccttaccctgcctaccctcatggaattgttgtcaagattaaggagctcaatggacatgaacttgccttataaagaaatgccttataagatgcctcccacagacctatggggtcagtatcatctccagcatcagcktcccactgtctcttcccttagctctgtaatgctttgatttaattcaggagtctgcaaactgtggctcacagacaaaatcctgcctggttttgtatggtctgttagctaagtggttttcacagatgaacattggtggtcactttgataatagggagcgttaactttgaaccccaaccaagcaaaatgttatcccctttccccaaatttcattcttcttattagtaaacctgtagtacaaacaaaagttctcaattatt

SEQ ID NO: 527594 - DNA, 421 bp, Homo sapiens
tgtgtatatgcttggtacacagtggtcactctctttgcttgttgagcgatgatgggtggtgcagccatatcccaccttaaaaggttttgccttgaaggtgcttgtggtggggtaggagaataggggcccatacagaaaaaacaagtgtatgtgtggacagatgtgagagagagccacaggcgggcgcatttcgtctaataagtgcgcagggcacgaggctatgttggggagaggctggaggaggtgaagtggagaattgtggagagattaatgagagccgaagggagtgaatacttcccgaatgccaactggatgccaaacattggtcctttaatccccctagtaatttggagatgggtagtttcccagttttgcagrtaaggagactgaagtgcagagaactggaataacttgcccaagg

SEQ ID NO: 527595 - DNA, 602 bp, Homo sapiens
tggggtagaatttccaccccactggccctcagggctctgcatagatttctctctctgtccttcttggtagggaagtggctgatcatgaggaagaccctgagctcagagctggaagatatccagggacccatccacccagtagtttgcagaggacaaaatgactcaaaagtataccgaaatccaaaatataawacagctaagagttaaagctccagttgaaggcaaaggtctagaccctgcctcctctgctctcccacttggcccataagtggtccaaagcttctctgtggacctccaaagctcaggagaacacgaatagaatccactgagccagtctagtgatccattttatagacaaagaaactgagtcagagcatgatgggatggatgtgagtccttaggggcctccacccttccatgatcacttctggctcatgttcattccctggactcataatgtacccttctttctaacttgacctgcacaattctacggactcttcaggctcagctcaaatgtcaccctccaccatggagcgttcctcaattctctcctccagttctggccctactcccacccagttcggtgttcctggagctca

SEQ ID NO: 527596 - DNA, 602 bp, Homo sapiens
tggggtagaatttccaccccactggccctcagggctctgcatagatttctctctctgtccttcttggtagggaagtggctgatcatgaggaagaccctgagctcagagctggaagatatccagggacccatccacccagtagtttgcagaggacaaaatgactcaaaagtataccgaaatccaaaatataaaacagctaagagttaaagctccagttgaaggcaaaggtctagaccctgcctcctctgctctcccacttggcccataagtggtccaaagcttctctgtggacctccaaagctcaggagaacacgaatagaatccactgagccagtctagtgatccattttatrgacaaagaaactgagtcagagcatgatgggatggatgtgagtccttaggggcctccacccttccatgatcacttctggctcatgttcattccctggactcataatgtacccttctttctaacttgacctgcacaattctacggactcttcaggctcagctcaaatgtcaccctccaccatggagcgttcctcaattctctcctccagttctggccctactcccacccagttcggtgttcctggagctca

SEQ ID NO: 527597 - DNA, 463 bp, Homo sapiens
tggaggggtgggcaaaggactggggcctggaggaccagttaggaagctgttgtggtgacctggtgatagatgagagtggcctggactacaggggctgtgatggggcttggagaactgtttagaaaggaaagttgccaggatgttcagatgttggctgatcaggcaaagagattagaaagcagaaggaagaaagagtgacccacctycagctccagtgcctgtagacaaggggccctaaacttagggccctcctttggccctcctcacagggtaggagtctgttcagaaggagggagccacccccactcctgaaccatgctccagatgcccagggccctagaaatccctgccctaagggcctgtaccctgcatccaagacctctgcaggccacctccccaggttcaacctccagagggtagcctgtgtcttggctgtgagttgagtgtggggcatgcagtcagc

SEQ ID NO: 527598 - DNA, 463 bp, Homo sapiens
tggaggggtgggcaaaggactggggcctggaggaccagttaggaagctgttgtggtgacctggtgatagatgagagtggcctggactacaggggctgtgatggggcttggagaactgtttagaaaggaaagttgccaggatgttcagatgttggctgatcaggcaaagagattagaaagcagaaggaagaaagagtgacccacctccagctccagtgcctgtagacaaggggccctamacttagggccctcctttggccctcctcacagggtaggagtctgttcagaaggagggagccacccccactcctgaaccatgctccagatgcccagggccctagaaatccctgccctaagggcctgtaccctgcatccaagacctctgcaggccacctccccaggttcaacctccagagggtagcctgtgtcttggctgtgagttgagtgtggggcatgcagtcagc

SEQ ID NO: 527599 - DNA, 613 bp, Homo sapiens
tgtgtgtgcggattggagtatctacacacatgctcgaagccctagtttaaggtgaaggtggggatgggaagggaagaggcaggctgagggcagggctgggggagagcagagggagtttctccccactccgtgtccctgtgtagaactccaagaaacctgagaactctaaattcaaatccagccttccagatctttagaaggtgtatgaatagaacatattttattaaacagtttgttaacttgatttttaacttttaaatatttagacatatggaatgtgggtctccatttgtacttttgcttggtctaagaggggtgagtggaaaactcccaagggccaggattatgtcttatttgtcttgttcaccctcccccatccccccaaccttggacccctggaccttggtaatttccatcgaactggaaaaagaatgagatcccagcctgatagtgagamatacagatttgacaagaccccagtaggcaaaagaaaggttggtcaggcaactgactgcagagggctttggaggtgtggccagtggctggcgaggaagctgacccagtgtccagggggttaagagcaggcagaccacctgggttcaaagcccagttc

SEQ ID NO: 527600 - DNA, 490 bp, Homo sapiens
gacttttatcttgctccctctctccagtctcctgccagagcctcctactggctaaacctggctagcagccagtctctaacaagcgcwggtaaaagcagcctaccagggcagcctcctgagatacagaccagagcaggagagaggaaaactggattagaaaatggacctttcaacaatgagatatcttctcatactcactagcatggctaaaataaaaaagactgatcctaccaaatgttggcaagaagagagagaaactggaactctcttccattgctggcttatgtgtaagatagtaaaatcatgttagaaaactgtttggcagcagcctgggcaacatagcaagactccatctctacaaaaaaatcaaaaaattagccaggcattgtgacttatgcctgtagtcccagctactcaggaggctgagaaaggaagatcatgtgagcctaggagttcgaggctgcagtgagctgtaattgtaccactatgt

SEQ ID NO: 527601 - DNA, 630 bp, Homo sapiens
tctaggaaggatttaacagctcatagaaattgcrattagacctacaaatgacacaggacagggctctcgggtcagagagacagtgttctgcagtagctgcaaactttgaagccagtcaactggggttcaaaccctgattctgccattaaccagttgcatggctattgagcctgtctgtgctaagtgctgcggaagtagtcatggttcctgatttcatggcatcagcagtctagctggagagtcagagactcagaaaaggttggcagaccccttgggtggcgggtaacacacccattcacatcagagagtcagtacttgagctggagccaaggaggatgttagtgcaggttctcagagaggtctccattgaccaggacatgccaggctgggtttggagagattaaggggaaagcatttagagagaggagagtctggagacaggaacacaaatagcctgtctcaccagagcagggagtggggttatggggtgggagttaaggtagaggggccttagggagccaagaaccttgaataaagatggagaagtttgaagctcccagctacatccactccctctgggcagaggcaggagtaaaggacacaaagatcactaaggaggacaatgggact

SEQ ID NO: 527602 - DNA, 643 bp, Homo sapiens
ctaacagaatattcaagaactggtaccatgttggacaaattagctttctcaactgcttgttcttccttccttcccaaatcttgtgggtatttgatatatcggtratttgaaaatctaaattggataacagttgaagtttgctaacaagttctaattaattgagccatattctttcttcccttaaggccctccctcacagtaaattatgaggcactttgacttgcaaaccactggagtgctgtggagtggctaaccgctgccaggctttatcccacagtaccccaaggcattcatgcatcgtgtgctcactggacctagaatcctcaaggagctgaagcgtgtccctaacttctaaacaggaagatgcttccagtacataagtaattgcggtaattcaaaggttaagtataagtacattgttttttctcatatttaaaagttccccaaaagtcaaatcaaagtggggtttctttcctgctagtttgaagcttgacaacattaccttacatgtaaataagttaatgtgtagagtttggaaagttgcctttcaaattatgaagtacctgatcttagacatcaatcacccctccaatctttccaattttgccttcattcatttaacaattcatgtccttcatggatc

SEQ ID NO: 527603 - DNA, 618 bp, Homo sapiens
ggtaaaacatgcaatagaatactattcagtaataaaagacataaatcttaaaggtgaaggaatacagaytcaaagcctacaaaatgtttaattccatatatgccttgctggaaaaggcaaaacatagagccagaaaatatatcagtggttacaagtgctagggcaaagggataagttggctacaaaggaatgaaagggaatccagcatgaatgaggaggaaagtaatcgaattctttcatattttgatcatagttgtagttacctgaatgtatgcacttgtcaaaattcacaaaattgtatactagaaaggatgaatttgactgtatgctagttacagcttcatcttaagaaagagaaacctaatgtatataaattgctcaggaaagagtagactaaacttttttctaattttcatcaaagaaataaatgtttatgacaagaaataaaatacaacaaaatggttaatctaaatctgcccccaccctgttttttacccaccccaattcataactcatagaggtgaatagttttcatctattatgatttttgtttgatgtgacggttaattctattactgtaattaatataattaatgcagtggtgtgtatcttatcatt

SEQ ID NO: 527604 - DNA, 618 bp, Homo sapiens
ggtaaaacatgcaatagaatactattcagtaataaaagacataaatcttaaaggtgaaggaatacagattcaaagcctacaaaatgtttaattccatatatgccttgctggaaaaggcaaaacatagagccagaaaatatatcagtggttacaagtgctagggcaaagggataagttggctacaaaggaatgaaagggaatccagcatgaatgaggaggaaagtaatcgaattctttcatattttgatcatagttgtagttacctgaatgtatgcacttgtcaaaattcacaaaattgtatactagaaaggatgaatttgactgtatgctagttacagcttcatcttaagaaagagaaacctaatgtatataaattgctcaggaaagagtagactaaacttttttctaattttcatcaaagaaataaatgtttatgayaagaaataaaatacaacaaaatggttaatctaaatctgcccccaccctgttttttacccaccccaattcataactcatagaggtgaatagttttcatctattatgatttttgtttgatgtgacggttaattctattactgtaattaatataattaatgcagtggtgtgtatcttatcatt

SEQ ID NO: 527605 - DNA, 651 bp, Homo sapiens
gatgttcgatatagagaataatatttataccagtgtggtagaaatcaaagactgagttttctgaatttttttctgagtgactttatacgccacagatgataatgagacaatatgaagagtcagaaaaagttttcrtgagagttttggagtgctgaggttttactgtatgaaaagcaaaagtgttgctcacacctgtaatctcagcactttgggaggctgaggcgggcagattactgaggtcgggagtttgagaccagcctggccaacatggtgaaaccctgtctctactaaaaatacaaaaattagctgggcgtggtggcacacgcctgtaatcccagctactcgggaggctgaggcaggagaattgcttgagaccaggaggcagaagttgcagtgagccgagatcatgccactgcactccagcctatctgacagcaagaccgtctcaaaaaaaaaaagaaaagcaaaagtgttgcaaccacttaatctgaaagtaagttctaccgctttcctctttctagctgaaattatttcctacatggcttcagtgccctaatacttctctttctttatcctaatattcctactcctttatccttatctttctcccctgctcacaaaattgggaataagatggggagagcagtatgt

SEQ ID NO: 527606 - DNA, 523 bp, Homo sapiens
cttacatttaagatttgggttatggtgtcacattttctggtttgtgtattaaatcaggtgtttttagttccttcagcactaggtacctaataatcaagcccacgtggagatttgctactgcttaacaattacagagaatgatttagttatcagttgtggccgaaagtaatcactaaaataaagcatttagactactcgtggttttaatttactcataacttcagtcggcccacctaaatcactgtgttatctatcaggtggtgagttacttagcacataatgccgacgtatgttattcactgtagaccatattaatacccacaaacaaaattaaaatgtgagaacttatgtctgcatagacaatggccaacaacatcaaaacagattttyctctctctacagttcagggcctatttgtcaggcaaacagtttcctacatttttggtaattatcattttttttgactgctttagctggagtcgaagtcattttcccaatctttacatttctcaaacgccataga

SEQ ID NO: 527607 - DNA, 545 bp, Homo sapiens
ttgtgcctacatacctatgtacatacatgcatttacaaccatcwatattactgtatctatttgtaaacattgaaaaccatgacttcacacaggtatttctaattctgccccaccaccatagggtctattctagtttcctcgctttctctttttgtaactccattctcccacagtgagaatcatggccctcattgtcctagtggcatttatttattttgtcagtctccctctatgtaattaatagtctgctggcatcctttgccacctccccctgctcattgttgacactctcctcacctgcttggaccctgttatggactgaatgtttgtgtcccctcaaaatgtacatgttgaagccctaacccccaaagtgatggtgttaggagatggggctttgggaggtagttagatttagatgagttcttgagggcggggcccccctgatgagattagtgtccttatatgaagaggaagaggcactgaacttccttactctgccatgtctgttgtttaagccacccatctatagtattttgttatagcag

SEQ ID NO: 527608 - DNA, 525 bp, Homo sapiens
atgtctatgtatggttgtgcctacatacctatgtacatacatgcatttacaaccatcaatattactgtatctatttgtaaacattgaaaaccatgacttcacacaggtatttctaattctgccccaccaccatagggtctattctagtttcctcgctttctctttttgtaactccattctcccacagtgagaatcatggccctcattgtcctagtggcatttatttattttgtcagtctccctctatgtaattaatagtctgctggcatcctttgccacctccccctgctcattgttgacactctcctcacctgcttggaccctgtyatggactgaatgtttgtgtcccctcaaaatgtacatgttgaagccctaacccccaaagtgatggtgttaggagatggggctttgggaggtagttagatttagatgagttcttgagggcggggcccccctgatgagattagtgtccttatatgaagaggaagaggcactgaacttccttactctgccatgtctgttgtt

SEQ ID NO: 527609 - DNA, 639 bp, Homo sapiens
tcaagcatgtggctagggtgcaccagtcatgccctgttggaagtcgtactagccaggaggacattatagttgatcctgacttattttctgccatgatagaccagagttcttcattagcaggtgtacaaaatctctaagcatccctggaagcatgttgagagtgttgtgttgaggataaccagttggaacaacagcctataaaattagtttatcattggtaatgtaacttcattgtatccactattaaaaataagggaaattaatttcaaggaatttaatgttcaaaggataactttatatcttctagtatcaaacagaaacttacatgatatcttgctattcccatttgtatgtgacaacacgttctgcagctgactccttaccccaagccctggagaaatcatyagtgttgagcagttcatgagagcatggcagtgtaaaggcttatgtgggattcggggcaacagtctgaaatgtagcaccctgcttactctgggcttttaggttagggaattaatcccccagagtcttttggccctagcagaatcgaatatgcttcctggaactgttcaccaagtatttcagtcaatatcaattgctaggaataaaacaaggtcacattcctgcaactactgacat

SEQ ID NO: 527610 - DNA, 532 bp, Homo sapiens
gttcttttgtttactagtagtgaaaaccagtgcaatttatgcaatatccacacaaattttcttagggaaaaaacagaaataataataccaactcacacagataatgcacataaagcatttagcagtgccttaaatacataactacccaataaatggtggcagttattatcattaaaatgaaggctgaaagtaactagaagatacggaaatcactatggaaatagaaaatggcaatcttaagaaaataagaatkaacattcagagaaaaaacaaattgacagaatcttaaattgttaaaaagctatgttgaataagattgtcttttcaaataattatcacctctaactatcaagacttctgtgcttatgaatatagtccttacttggaacaaatcagttaaatttgtacacattaacatcactgctccttcacaatgccttatgattaatcagaagcactaaaaggaaatgatttttttttgtatgttgaggcaggagaatgagatctgcagacagggaatgtacatgattct

SEQ ID NO: 527611 - DNA, 640 bp, Homo sapiens
tgtgctagagcactgtatgtgctgatttacatgtcttcaatcgacacggacatttcctgaaaataaaacactgggattagtattacgaagcagsttccaacgcaaaagattaatcttcgttaaaaaagaggatccactcttcaaaaggctacatttaactcatgctgtacattatatatcttaaaataactatgtgaaggattaagaaaaacacaataatgctattcaatgatttcttggtctctcagatattggtactacatgctatgagtttgagatactggagacaacatagttggggctgagtcgtaaaatagcacagcactatccctcctcattgtgttttagttgataccaatgatatattatacacatggtttcccaaacttggatgctaatcagaattaatgtaggagctcattaaaaacaagaatttctgggctttaacctcagacttattgagtcagaatctgtattttctccagcacccccaatcgctaatgattttgacacagccagaaagaaccccaatcgctaatgattttgacacagccaggaagaaattatgcttgaaacctctctgtattagattgaacatctaagctcagatcctattcttggcagcaaaactggtttggtg

SEQ ID NO: 527612 - DNA, 640 bp, Homo sapiens
tgtgctagagcactgtatgtgctgatttacatgtcttcaatcgacacggacatttcctgaaaataaaacactgggattagtattacgaagcaggttccaacgcaaaagattaatcttcgttaaaaaagaggatccactcttcaaaaggctacatwtaactcatgctgtacattatatatcttaaaataactatgtgaaggattaagaaaaacacaataatgctattcaatgatttcttggtctctcagatattggtactacatgctatgagtttgagatactggagacaacatagttggggctgagtcgtaaaatagcacagcactatccctcctcattgtgttttagttgataccaatgatatattatacacatggtttcccaaacttggatgctaatcagaattaatgtaggagctcattaaaaacaagaatttctgggctttaacctcagacttattgagtcagaatctgtattttctccagcacccccaatcgctaatgattttgacacagccagaaagaaccccaatcgctaatgattttgacacagccaggaagaaattatgcttgaaacctctctgtattagattgaacatctaagctcagatcctattcttggcagcaaaactggtttggtg

SEQ ID NO: 527613 - DNA, 640 bp, Homo sapiens
tgtgctagagcactgtatgtgctgatttacatgtcttcaatcgacacggacatttcctgaaaataaaacactgggattagtattacgaagcaggttccaacgcaaaagattaatcttcgttaaaaaagaggatccactcttcaaaaggctacatttaactcatgctgtacattatatatcttaaaataactatgtgaaggattaagaaaaacacaataatgctattcaatgatttcttggtctctcagatattggtactacatgctatgagtttgagatactggagacaacatagttggggctgagtcgtaaaatagcacagcactatccctcctcattgtgttttagttgataccaatgatatattatacacatggtttcccaaacttggatgctaatcagaattaatgtaggagctcattaaaaacaagaatttctgggctttaacctcagacttrttgagtcagaatctgtattttctccagcacccccaatcgctaatgattttgacacagccagaaagaaccccaatcgctaatgattttgacacagccaggaagaaattatgcttgaaacctctctgtattagattgaacatctaagctcagatcctattcttggcagcaaaactggtttggtg

SEQ ID NO: 527614 - DNA, 685 bp, Homo sapiens
ggacaacgggcaaaatactctagctgtctctgtaacaagcactggagaaatgaccactgccatactgagtgaattctaaacctgttttgcccaaatcagagaattataaccagtgctgcattttaaattttaatttacttcctagcacgtggggttaatatttttaaaaaaggcttaaatgttctaatgcccttagattactgtttcctccttaaaatatcaatctgtttggaaccagggtcaagggctgccgcttttgttgttgttctacaaattttacttagtataaacagactgctcatacggtgttaatgaaagatctgtctgcacagcataaaaccagtgaggtaaagcaagaaaaacctgccaatcaactgattgtttagactctacttgacagtaaagaattaattgatactttacagaattgactgagctgcacacctgctaaatttgccacatagkcatagtcagtactatcccaaactgtagccattagccacatgtgattattttaaagttaaataatttccaaaaattcagcccctctgtcacactagcccaatttcaaatgtcaagtagctacgtgtagctaatgactactgtatattggaaagtgcagatatagaatatttccatcatcacagaaagatctattggactgcactagtatggatgatgaagt

SEQ ID NO: 527615 - DNA, 509 bp, Homo sapiens
tctttattaaaaactgaaactactaaacattactgacacccaaacatctatcacagaacaactctgatcatcctctgcaacctggcaaggccatgcaaaggggataaaggaatgaatgatgagaccagcaggcaccatcaccaaaactctgccttttcagttatttgtgaaggtggtcagagacttttgaaaarcatagtgctccaaaaaacaatattaggattccaccttcatcccttggtagccagtggatatttcccatccacagcttgaactcttggtcccccagaccttgttactcaaaatgtgattgcagatcaatggcatcagcatcatctgggaggttcttagaactacagaaacagacctctccagatctgctgagccaggctctgcattttatcaaaatcatcagagcattcctaggcatggtcaagtttgagaagcactgctttggatggtagataagttgataatattgtcatctctttctagcctagatcataaac

SEQ ID NO: 527616 - DNA, 636 bp, Homo sapiens
atttgtaaatgttccagttttccttctgatattgatttctagtttcattccatggtgattaaaaatatacttggtatgatttcagtcttcttaaatttgataaggcttgttttataactgaatatgtcttctactctgaagagtgtttcatctgtgcttgagaagaatgtatattttgttgtcgttgagtagaatgtttctatgcatgtttattaggttcatttgatctattgtatttttgttcaattctgctgtttcttagttgtcttatctgttattgaaagtgggatataaaggtatattatgattaatttctatataatccttttatttcaggtaattcttaattgggaagagtttactattagtaattgttttctgttggtcatatagttcttttgcccctatttctctcttcctttgtgtttcattgacattttttgtttttgyattggtatgctttgatttctttctctcttttgtatataactttcgtaagtattttctttgtggttcccatagggcttatataaagtatcttatagcagtctattttgagctgataacaacttaacttcaattgtttaacttcaattgttactacacttttactctctattcctatgatatgttatt

SEQ ID NO: 527617 - DNA, 505 bp, Homo sapiens
gaaaaactgctcacttgtaagctgtcattttccatttcttctcaatccctgtggctgtacgcagccactgatctgctttctgtctctatggattgacttattctagacacttcatataagtggaatcatacaacatgtagcatttcatgagctattttcacataccataatgttcttaaggttcatccttcattcttttttatggctaaataatattccatgtgtgaatacgcacattttgtttatccacatctgggaaggttccactcttggaactaatatggataatgttgctgtgaacaccatgcaggtttttgcatgaatatacgttgttatttctcttggatttgctagctgatttagcatgtttactaacatgccattttagttgtaaccaccattctttcacacttgggaactgrttatccctgactcaggatgcctcgttaagtgtattagtgctgttgctagttgggttacttccttcatcatccaattctgacag

SEQ ID NO: 527618 - DNA, 605 bp, Homo sapiens
tgaagacagagcatggagtcacaggttaggaaacctcacttctagtcctggattcccgacaacccattcatattatcttcagcttattgctttataaaccccagaactaaatatcctggttgagctttgaaagagccctgtcggctccatgacttcaaggtttcatccttgttttattcatttaaaaaatgttttagaaattatttgtctttatttttttatatctcctaaagtaaaatctgagaatgacccaagaatatttgtttcagagggttgtctttttgttggcaagcagtgaagcacatgtaagtttctcaagctttagaatatatatatattaaaaaacaaaacaaaaaaaatgaagcacagacatgttattttcccagagccatcagtccaaagtatttcactgtattattagaagcaacaacttctaaacattcaactattccaaaaataagattttcctccagtaagttatcattctcacttgataataagataactaagataactycccaaataaactcattcttcatatcttgcaaatctaaaaagcaacgtgcatcccctttcctgatgcctacccctgcactgtgctgacg

SEQ ID NO: 527619 - DNA, 645 bp, Homo sapiens
acatagatgctagattagagagaggagcaaggctggagggtatagtaggagtaaagggaagagagaaagggagttgggagggaagtgaaacctcatggcctcagttttacagggaaagtgagtcagagaataggaataaaggcagatgagggacaatgcaatggggaaaacttgctggagggggtggtatttgagctgggcattggcagattcagacacagtcagtgccaagggaatgggctaaaggcatgtctgtgaaatggtgaaaataaatgactggctcagaaaaactcataccagggcatagttggaaataatattaatggagtaggtaggatcagattagggagagcgtgaaatcaaggcagagcagttcttgagctgggtgttaaaagtggccttcaaagaggcaatttgacagagataaactgcatagattgggtcagatgtagattaaggtcagtgaagtccatcctaargttgttacagaaatcaaggtgtgaaatagtaagagcaattgaaatagagagtgctttggacaggtttgaggagcttgtcttggcaaggccccctcctcccagggtctacatctactgctcaatgagtggacagtggctcctgtggcccaggcccaaccatggccac

SEQ ID NO: 527620 - DNA, 618 bp, Homo sapiens
gattatttttattttgggaacacatacacatatacacacacttcccacagaggttttcaattttacaaaaagcccactcaattgggagactgtgtgcattctaataaggcaggacacctggstgcttcatctgaagtttgtcaccacatatgggatccttgggcaagctgctggacttccttggcctgtgttttctattttgcaaaatgatctcttatgttctttttcagtcctgagttccatgattttattcaaaacaatctacaaagtgttgatagagaaagaatactgatttctctagtattatgaaagtcaatttattctcttagacatcatattctgtataaatcattgtgagataaatgggaatctgttacgcatttctttggtgactgaatacatcttccggtgatacagttattttcttaagtcttccttagtcataccagcatctcaggatctataaaaatgttttaaaaagccaggtgtggtggtttgaacctgtaatcccagcgactcggcaggctgacacagtaggatcacttgagcccagtagttcaagacagaggaagaccccatcgctaataaataaataaaaatttaaaaatgtttaaaaga

SEQ ID NO: 527621 - DNA, 522 bp, Homo sapiens
tgctcctcccataatagggctaatcaaaataaaaatagacatctaccccaatctcaccccaataaatggcacaggagttaccagctttcaaatctaggcaaacaaggaaatcattgaatagtctttttcctcatctgtatgatggccctggaacccctctttcctgacccctaagttaaaagagctgtttgagaggactctctggccagacctttattcccagacccaaaactaaattcactcatgccacctgcttgattctgagcctgtgcccttattgtaactgaaatgcaggttcagttgcttcccgctttcagagtccaattattaataagaagagcaaagtctggtataaagaaagtgattttttattccaaagctagcttaggggragcaaaacaggcttcctgccttaagggtaccactttgcttctggggcagaaagcaggggcttttaaagggggcagttggtatgaactgcatgctggggagggagcgagtgggtgggggttcgcatgactc

SEQ ID NO: 527622 - DNA, 600 bp, Homo sapiens
ataagcactatcaatcctgccctgaaggccgccggaggaccactgcttcaccatttctgtgtgtcaggcatttctctgagaggtctgcatgttgccaagacaccataaagaattctgattacaggtcaaagcatcccaggaaaatataattattatcttccaaccactgtcatttatccgttcgccccatcccagaccacccttttgtgatggctttttccttttgccctttttatgatttctcttgtcatattcttttataaactcacatgaggcacacacagaaatatggcaaacttgtacactacaaaattttttttctttctttttttgagacagggtctcgctctgtcacccaggctggagtgcagtgacatgaccgtggatcactgcagcctcaaactcccagacctgagcaatcctcccacctcagcctcccaaggtgctgggattatgattgtgagctgctgcccccagccaggaaattttctaaaccatctgtaagtgtacatttcagtggcagtaattacattcacaatgctgtgcaggcmtcaccactgtctattcccaaaacatttttatcaccccatataaaaaccc

SEQ ID NO: 527623 - DNA, 482 bp, Homo sapiens
tgtacaatacatgcattttatttgggtcctgattctaactaaaaatagtaaaacaattatgagactttcttgtattcaggaaagctaaatacaggctggatatataacaatattaaggactgttcattgtttggttggtttgttcgttggttttgttttgttttcagacagggtcttgctttgttgcccaggctggaatgcaatctgtgatctcggctcactgcagcctcaacctcctaagctcaagcgatcatcccacctcagcctcccgagtagctgggactacagcatgaaccactacactcagctaagtttttgtagagactgggtcttgcyatgttgctggtctcaaactcctgggttcaaacgatctgcccgccttggcctcccaaagtctcccaaagtgctggcattacaggtgtgaaccaccgcaccagttttttttgtttgcttgcttgtttttgtttttgttttttagaaac

SEQ ID NO: 527624 - DNA, 445 bp, Homo sapiens
gggtgccacagctcgagttgcaggtgcagacagtttagagcttgcgtgggctgttgcatctgccttctgggttgggaggaaggtttttgttggctcaaatatgcacaggctgcacattcaggaaaatcagtttaaaccaaactgaggctaagtgatccccagaacctgggtggagaaagcgatgtttccagatttttcaggmgggaaagctgttattatttcacaatgccccacctaaccctctggcaagttcagtctgacaagaagcggacatgtgtgatgtgggtccagcaaagatggtgaccacccagcctcggcagcatgccagccagaggaagggcaggtatcatcagagatgaatcaaagagacttcaggagagatgaagtgcaccaggaacttctctgaacttcaactttcccttgaaagagatgggattccttcagt

SEQ ID NO: 527625 - DNA, 401 bp, Homo sapiens
gtgccacagctcgagttgcaggtgcagacagtttagagcttgcgtgggctgttgcatctgccttctgggttgggaggaaggtttttgttggctcaaatatgcacaggctgcacattcaggaaaatcagtttaaaccaaactgaggctaagtgatccccagaacctgggtggagaaagcgatgtttccagatttttcaggcgggaaagctgttattatttcacaatgccccacctaaccctctggcaarttcagtctgacaagaagcggacatgtgtgatgtgggtccagcaaagatggtgaccacccagcctcggcagcatgccagccagaggaagggcaggtatcatcagagatgaatcaaagagacttcaggagagatgaagtgcaccaggaacttctc

SEQ ID NO: 527626 - DNA, 401 bp, Homo sapiens
gtgccacagctcgagttgcaggtgcagacagtttagagcttgcgtgggctgttgcatctgccttctgggttgggaggaaggtttttgttggctcaaatatgcacaggctgcacattcaggaaaatcagtttaaaccaaactgaggctaagtgatccccagaacctgggtggagaaagcgatgtttccagatttttcaggcgggaaagctgttattatttcacaatgccccacctaaccctctggcaagttcagtctgacwagaagcggacatgtgtgatgtgggtccagcaaagatggtgaccacccagcctcggcagcatgccagccagaggaagggcaggtatcatcagagatgaatcaaagagacttcaggagagatgaagtgcaccaggaacttctc

SEQ ID NO: 527627 - DNA, 578 bp, Homo sapiens
agcctcgacctcctaagttcaagtgatcctcctgcctcagcctccagagtagctggggccacaggtgcatgccatgatgcctggctaatttttaaaaawttttttgtaaagacaggctctcattatgttccccaggctggtctcaaagtcctggctcaagtgattctcccgccacagcctcctaaagtgttcagattacaggcatgagtgacacacccagacaactgcccaagctcttaatggcccagactgaagcctggttctgtctgtgcccacctgagtctagaaaaggtggtgagctggtacctgatgaccccacaacatggcacagtacaggaccgggggtgcagaggtagagaatgggcagcagcagacagaagcctcaaggaaggattgccaaggagcagagaaaaatcaggcacaagagaaggggcgggaccaggttccaaaaggatttagacacccagcaagcaatcaggaatagagcctacagtgatgaggaccgtgtcttctttacttctgtttcccaagtgcttagtacaatgctgaccatagtgctgcctcataaagatgtagca

SEQ ID NO: 527628 - DNA, 509 bp, Homo sapiens
gccatgatgcctggctaatttttaaaaaattttttgtaaagacaggctctcattatgttccccaggctggtctcaaagtcctggctcaagtgattctcccgccacagcctcctaaagtgttcagattacaggcatgagtgacacacccagacaactgcccaagctcttaayggcccagactgaagcctggttctgtctgtgcccacctgagtctagaaaaggtggtgagctggtacctgatgaccccacaacatggcacagtacaggaccgggggtgcagaggtagagaatgggcagcagcagacagaagcctcaaggaaggattgccaaggagcagagaaaaatcaggcacaagagaaggggcgggaccaggttccaaaaggatttagacacccagcaagcaatcaggaatagagcctacagtgatgaggaccgtgtcttctttacttctgtttcccaagtgcttagtacaatgctgaccatagtgctgcctcataaagatgtagcag

SEQ ID NO: 527629 - DNA, 578 bp, Homo sapiens
agcctcgacctcctaagttcaagtgatcctcctgcctcagcctccagagtagctggggccacaggtgcatgccatgatgcctggctaatttttaaaaaattttttgtaaagacaggctctcattatgttccccaggctggtctcaaagtcctggctcaagtgattctcccgccacagcctcctaaagtgttcagattacaggcatgagtgacacacccagacaactgcccaagctcttaatggcccagactgaagcctggttctgtctgtgcccacctgagtctagaaaaggtggtgagctggtacctgatgaccccacaacatggcacagtacaggaccgggggtgcagaggtagagaatgggcagcagcagacagaagcytcaaggaaggattgccaaggagcagagaaaaatcaggcacaagagaaggggcgggaccaggttccaaaaggatttagacacccagcaagcaatcaggaatagagcctacagtgatgaggaccgtgtcttctttacttctgtttcccaagtgcttagtacaatgctgaccatagtgctgcctcataaagatgtagca

SEQ ID NO: 527630 - DNA, 535 bp, Homo sapiens
ctgagcatccattttctgtaaaattgaagtccaaagttttggaaatgggttaatggagcagggaggtgtgaatcatgtaatattgtatgcaagatattttaggttttatgcagttggaggagagtatccataattttcatcagaatctcaaagatatatgcaataaccaccatcccctccccatataaaaaagttaagaaatactggacaggacagtttccatccaacaagcattttttgaacaccttctatgtgccctgctctgtgctaggtacttggagagccctgyttttaaggtgctcagtgtagctgatgtttgctgtgacagaagcatgtccagggagctttaggaacaaagagaaagcagcatttgcctctatcttgtcaggaagggccttctgcaggggaaaaaaccttatgtttaatgccgaagttcaaagctaagagtgcattcactgggtgggcaagaataatatttcagaccaagggtagtagtatgtgcaaaggcaacgcgtggcccaggaaccacttgaag

SEQ ID NO: 527631 - DNA, 383 bp, Homo sapiens
gggctctttccatgcagtgtcactgttttcatcaccctcttkctccagcccctcaggatgccatggttggcaagcccatgggtctgagtcagtacagagccaggcagggtttgtccctgggcttcatggattctcggaaggcaaacagtgtcagaaacattctttctaggactcgtgagttcagcccaggccagaaatagcacccagccatgtgccttctagtatttctgcacatcagcttctcctcccactggaatggcaaagaggagcgtggaaggctgaaaacaactccaggcctcaggaagagcctcaaagatagggcagaagatgagaatgcactgctttgcatgtcagtttccctgcctggtgccagcccaggccca

SEQ ID NO: 527632 - DNA, 609 bp, Homo sapiens
tgcttaagctgaaacttgaaggaaaaaggaagaagaggagttctccagagagagatggtgtaggggacagaaagatgattccaggttgaactagaagcttctgataagcctggggcaatggcacatgtgggaagggactggaaatgagaccaggccaaagcataaggatccttgaagcttattctaaagacacggactttatctacaaggccatgagattccactggataacttaaattagtcaatattatgattagctctcaattcccaaagctcatctatctgttatttggaaaggaacagatgagtattggaacttgattagacatgtttcaataactcagagttgatgatacctgaacaagggcagtgggtggggatggagtggaaagaactgcctggaaagtttacttgttgtaaacttaaagtacttacttatttattcttatttatttacttgtttattctgttttctgttgctataatagagtatcacagactgggtaatttataaasaacaaaagcatatttgactcacagctctggaggctgggaagtccaagagcatggcaccagcatctggtgagtgagttgcattgcagaaggcat

SEQ ID NO: 527633 - DNA, 609 bp, Homo sapiens
tgcttaagctgaaacttgaaggaaaaaggaagaagaggagttctccagagagagatggtgtaggggacagaaagatgattccaggttgaactagaagcttctgataagcctggggcaatggcacatgtgggaagggactggaaatgagaccaggccaaagcataaggatccttgaagcttattctaaagacacggactttatctacaaggccatgagattccactggataacttaaattagtcaatattatgattagctctcaattcccaaagctcatctatctgttatttggaaaggaacagatgagtattggaacttgattagacatgtttcaataactcagagttgatgatacctgaacaagggcagtgggtggggatggagtggaaagaactgcctggaaagtttacttgttgtaaacttaaagtacttacttatttattcttatttatttacttgtttattctgttttctgttgctataatagagtatcacagactgggtaatttataaagaacaaaagcrtatttgactcacagctctggaggctgggaagtccaagagcatggcaccagcatctggtgagtgagttgcattgcagaaggcat

SEQ ID NO: 527634 - DNA, 556 bp, Homo sapiens
ggttcttagatggtgatctgggattaggccctcaagacccttttgggtttctgccctgcccaccctctggagaaggtgggcactggattagttaacagacracacgttactagcagtcacttgatctccgtggctttggtttaaaagacacacttgtccacataggtttagagataagagttggctggtcaacttgagcatgttactgacagagggggtattggggttattttctggtaggaatagcatgtcactaaagcaggccttttgatattaaattttttaaaaagcaaaattatagaagtttagattttaatcaaatttgtagggtttctaggtaatttttacagaattgcttgtttgcttcaactgtctcctacctctgctcttggaggagatggggacagggctggagtcaaaacacttgtaattttgtatcttgatgtctttgttaagactgctgaagaattattttttttcttttataataaggaataaaccccacctttattccttcatttcatctaccattttctggttcttgtgttggctgtgg

SEQ ID NO: 527635 - DNA, 529 bp, Homo sapiens
gtgttaaaatcaccagtgaataaaaggaatgatcgagagtggtcagtaaatgacaaccacttggagaagtagtaactaatacagtctgatggcacaagcttcaaagaaacaaagctttgaaggaggaaaaataaattatttgaaacacctactgcacccccagataccgaggtacttgagataagggacaataatatgactccactgtaaatggaaaattaaattttgatataaaaagtttaaagaaattcagagtaggaaggaattaacacaaagcagtggagaaagctttatgggaggaatggtcttgaaaaataaacagaatttcatagattttaagatttaagaggtgaatcacctacaacaaccctcattttacttaaggaaactgaaacctggagaagtcaagtgacatctaaaaatcatacagcaaatttgtgactgagctagggctrgaatgagttttaagactcttaattctctatattatgttacactacattcctgatgtagggaagagaaaagaata

SEQ ID NO: 527636 - DNA, 631 bp, Homo sapiens
tctccagcaaaggaggatttatattctgtctttaggcaagcagaagaaagacagaagcccccctgcatttttttcacagaaatttttatggcctgccataggtgagaaaggacagctcagatagccgtttctgtaactgctgcttcccaattgcctctagattaaaaatrtatctgtcacagaggcatgcttgggggtgaaatagcctggcttccttcaacatacagtatgttatttaagaccctttaaggcattgagtgctctaaatgttaggtacatcagaaacactagtgaaattttcaaaaaaatgatatccaatatgcatccaaatatattaaattagcatccccaaggaaaggacctgatcatcaaagcttaaaaaacaatctttcttaggtaattctgatctacaattaggattaaaagccagtgcttttgaataatagaaaagtgcataaaaatatttgagtgagaaaaagttgaacctaaattctaattcacatagtacttattagctgaatgaccttggtgaaatttaatttccataagcctcctttttcatctacaaaataggagtaaaatttgtgtaggagagaaaatatttattttccttttccatcactaggttcat

SEQ ID NO: 527637 - DNA, 609 bp, Homo sapiens
gcatggcatatggtatatactcagggtgcgctcggccatacgtaataaatacactcacttcacacagatgtctgcctactgcagcttcagcaaaacactcctaaaagaatctaaatgagtgtaaacacctttagacctcagctaaaatgctattgttggccatgctcttagctactgtgtaatgctgtctcaacaattcacccaacagagagtagagtccaacaactcaagcagaacacggtttgccagccagtcaccttacccaaaacgcctactctgtagggttgctctgaggtttagaaataaaatgttgaacataacgtctagcacacagtggatgtccagtcattaatagcggtcattacaatgatgcaaatcaaggattttaaagtcgtgcttggtaaaatgaggtgatgccattgagaaggcagcaycggaacaagaattccgattggctgaaaacccaaaagggaataggattttttttttttagcaggcagggtctttctgaatgcaggacatcctcagaattcagttcatcccatttccgtggctcaaatcctagcccaaacacagaggaaaaatggtgagccaagagactgcagcgat

SEQ ID NO: 527638 - DNA, 438 bp, Homo sapiens
tggtcaacccagtgttgatgacaggagcccaggacctggggaggacagggggccgctgggcctaggcctggccttcctgaccattttgattttctgggtgcacacagcacagactccaggtggaagtgctgtgggctcctgaactctctacagcccggcagcctgcacggaggccgttctgtctctcgagggtcctggagcctgcgctgtgtgaggtcgactgtgcttccgtgcccctgggcactgtcctaggtgataaagggcagggccccgaagccaattcggatctcccgggagccccgccaggattcagggaacccctgaacctgggctccaggaaaagcaggtgaggcgggtccaaggcacccaggagccaggctcccactggcttgggtgacagtacaggccrggaccttgtccctgccatacatccccttt

SEQ ID NO: 527639 - DNA, 597 bp, Homo sapiens
aaagtaaagaggaaaaagaaagagctgtggagtgctggggcaagagtgagttttggggatggaggttaagcaaataagagtctcagggaaatgcgggatggcagagttgggggagaggagaaaatagggtataagaaatgtttttctgtgttgtgaattgggctcccttygatgctgcttttactgttgtctatcaaaagatgcaagtgaaagagtggcattccctttgctttctctaaggcgtgtttgctgtttgggatgtgcatcttggactaagtctccttctggagcttggaacaccaggttctgccgtcacaacctttatcatgcacaggtcgccctggcatggacaggaccttagctttattgtccgtgctccctcgctcaactgagagctttctgagggcagggcctctgtctgcttgtctctagtcccagcacctagcacaggctagcatttagtatgtgctcaatagtgtgcagtgtagggacgagtgcacgggctccagcgtggttaatgtccttcacaaggcgccttggaggagccgtccccaagctcatgcttcatttcacatcctgctcctgcagaaatggagc

SEQ ID NO: 527640 - DNA, 597 bp, Homo sapiens
aaagtaaagaggaaaaagaaagagctgtggagtgctggggcaagagtgagttttggggatggaggttaagcaaataagagtctcagggaaatgcgggatggcagagttgggggagaggagaaaatagggtataagaaatgtttttctgtgttgtgaattgggctcccttcgatgctgcttttactgttgtctatcaaaagatgcaagtgaaagagtggcattccctttgctttctctaaggcgtgtttgctgtttgggatgtgcatcttggactaagtctccttctggagcttggaacaccaggttcygccgtcacaacctttatcatgcacaggtcgccctggcatggacaggaccttagctttattgtccgtgctccctcgctcaactgagagctttctgagggcagggcctctgtctgcttgtctctagtcccagcacctagcacaggctagcatttagtatgtgctcaatagtgtgcagtgtagggacgagtgcacgggctccagcgtggttaatgtccttcacaaggcgccttggaggagccgtccccaagctcatgcttcatttcacatcctgctcctgcagaaatggagc

SEQ ID NO: 527641 - DNA, 604 bp, Homo sapiens
ctgccccctgccccattgccgcacttccaggcctatgagctttttgagattgtttgcattttgggaaatgccagtcatctctcccaaatctgcagatagcagcatctcaccatccagggttggagtttctaaacagtcagataaccttgctcacagagaaacagcctgaacaccatttacagatagcgacaggatttaatgagataaagccttgggcatccatgaaccaatttttacgagccgtgatgaaatggctgttttcttaatagatacccaaacagaacacaattcagggctctgagagcttcaaaggaacttctcagctctagcctcttgaaatttcgggcaaaatccaaacacgtatcagtcttaccaccaccatgaaaatgatatgtttttgtaaaattatgtgggacctatctatctgccaagggagagatggcccagatgcttttgggactccaagccagtgtcttcagccttttctcacatratgtgaacaccaaattccagtgccactttctagaggggagattgcagatggaaggcttgtcctggagaggttgaaacagtgggaaaggaaataaagagcatgctctcgctc

SEQ ID NO: 527642 - DNA, 376 bp, Homo sapiens
ctgggcacacagcaggccctacatagcaggagctgaaatctagtgaaatctttctgtgtatataaatgaagccrcagattccttttatctgttcacctttctctaaaccagactgagtgaacagagcctctcacttctcactctggcttgtgatgtggcagtgttagcagaggggcttctctcccaggcttgccctgagcctcgggcttgttctcttagctcttccacaggtgccagcgtgccgtgcaggccctgccgagccgggcccgggcctgctccgagcaggaggggcggctgcttgggaacgtggtggcctcgctggcgcaggccctgcaggaactctccaccagcttccggcacgcacagtcaggctacc

SEQ ID NO: 527643 - DNA, 503 bp, Homo sapiens
taatacttaacctggaaataactcagatgtcctccagtacagcacagaaggccaaggagggaatgggagtgagaaagtagaggcaggaagttgttgcggatgcaaaaagagatgaaagaacaaatgggagtggactctttctgatggaagaggtttgagtgtktttataagctttgagaaaagattcaataaggaggtagaagttgaaggttcaggaggaggtgcagagggatggagtaagatgttcgataggtagcagggcgtggtattctaagcccagttgcagcagtttgcttcagagagaaaactagaacagagggtaggaagatgaagatgtttgtaggttgttgggttcagaaatccagaagggtcctgcctgatgtgggtgttggggagttatgggaattaaaaagaataataagattttgtaataaccattgtgggaaatgagaaaggggccagtaagattgtccaggggcaaatatgattgctaaacagtttca

SEQ ID NO: 527644 - DNA, 599 bp, Homo sapiens
gccaggggctggtgggcgcagccccagcagggtgagcgcatcatctccaggcctcccctaagagacaacctgagcttcactttgccaggtttccactactctggttccatccagaactgaccaggaattcgccaaggacagccagctcctcccacttggcaaatccactatttacgtccagggcaagtcctccaaaggccagggttaaccaggaatcatctatctggccagaaaataaatccaccaggttcttcggtccacctctttggagaaggacccatggaagggggtcctgggagcacaacctgccctgcgggctcacgtgtgacccargaaagttctccacctcctgtgccttttttccccccaacaggaagtgggctgagagaagctctgccttcatagttcctgggaggcatgaactggttgctgcatgctgagcatttcaaactggcacacggtagggctacccatgtctgagttattgttacattggtgattcttatagccaaaggggagtttctagtgctgacttgagaaagttaccagtgcccctgatatggtttagatatttgtcccctccaaattgcatgttgaaa

SEQ ID NO: 527645 - DNA, 198 bp, Homo sapiens
tgttggccaggttgctctcgaactcctgacctcaagtgattgcctgcctcggcctctgaaagtgctgggactacaggcatgagccaccgtgcttggcctataaatattattcktcacctccctttttcatgtaatagatgtctgggacatagccctctgccagtgcacagtgacccaccttatttctttaaatgcctg

SEQ ID NO: 527646 - DNA, 638 bp, Homo sapiens
tgctggttcctgaaaaaaaattgtagcacgcgagaatcagcgacaataatttgtggaagaattacaaataggccaggagttggctggctttactggttttgacttgaattagatgtaagacagatgagtcgaatgaggtctgttttgcagcagaaagtattgcaatgtcacaaggggccataaaggtgcctaaactgagcagaaacatatgttcttcagaaattagctgttaggtacgagcctttctcttgttgatgctatcggtatgaaatccaatattatcccagggaaaggaaataaggccacttagctgttggatgacaagctgtcttacactccatcaaacccacccgtttacttgtcacacggcttgtaccgctcaggaagataagagacgtcgtatctctgcttttcctcatggtgtgttttggaatagatgccagcttgatgtgttgaccacggtatgcrgggccattcaataaagacagatccttggccaaatgttctgtatttttccaaatacaaaagacaaactaataaaatcaatgcagccatgctgaacaccagcacagagggctccctcctgcgctgccacgtgcttcccaccagggaaatggatcagacgcagccacgtggcc

SEQ ID NO: 527647 - DNA, 612 bp, Homo sapiens
gacagatccttggccaaatgttctgtatttttccaaatacaaaagacaaactaataaaatcaaygcagccatgctgaacaccagcacagagggctccctcctgcgctgccacgtgcttcccaccagggaaatggatcagacgcagccacgtggcccgtgctacctgatgtctttggaaaattatgcttttgttttaattttagaataaaagttgttgagaagtcactctggcaatcccctgcccaccaagaacaggcgctatcaagagtggatattgcagaaacgcttcctctccctacaaaccttccagggtaagcatggagggagaggctaagccttctcttcattcccttgccactgtcttcttgacccaaagatgaggggcttccatctctaaatctcccaggcaaaaattctaatagctgagagacagaaagcagctcaaatattaaaccacagatggcctgccatttttgtttgaagggctggaattttcagttaatgctgggggaagtaagaaagtcaactcagttgctctgtccagtaattcaccattgctgggctttactgaacaaaggcaaactctgacgacatgatcatgattgaaagagg

SEQ ID NO: 527648 - DNA, 508 bp, Homo sapiens
ttgtttgttaaatgaaaacagaaacagtgctttgctcatggcattgtcatgagacttaaatcatacacaaaaatgttagctataatgacaatgtgatctacccacagaaaatataaagtattatttgtgtgtgcatgtctgtttaatgtgagtagtatcagactacatttccaatgccgataaaaatgtgtgatctgactgaaacaataacctcgcattttatttcaaacttacacacttacacaatacatccatacatgcgagtcaccattgcgtttcgttcccatgaaaacttggattgcgtcagagttttattgcttttgacccaatgccacttaatgattgaaaaaaaatggtgggttcatgtttggtatttcctgatgcgggcaagggagcagggctgctctcagcaggcggttctyacccacgtgctcactggccctccgcaagctgatgtccaagacgacagacacatggtttagggagctcagatgcttgaactgtgacg

SEQ ID NO: 527649 - DNA, 528 bp, Homo sapiens
ctgcccactgaaaaccaggctttggtcaatgccatgtgggacagaagaattacccaagtaagcccagcccaaattcctgacctatagtattgagatatgtaatgmaatggatgttattttaagccattgtgttttagggggagattgtcacacagcagtaggtaacaggaatgcttgcttctacctgccccagccctccagcctctgcaccttagtcacttccatcctgacacctggaaaaccctttacccagatcctagactatcaaaattctgcattccaaatgggtcagatccaaagggccaggctgcgtgatgcagttcttctgtttgcccctgcaggtgcactctccacccttctgcacgctgctctgctcctctgtgtccggcagccatgctgctgtgggtgagaccaatgggctctcctgccctctggctctggttgggttttgtcaacagggagcaccagcaggagaacagcagatgagaggagagaggtcaggatattcattccccctttccctcggtg

SEQ ID NO: 527650 - DNA, 655 bp, Homo sapiens
tgaggagggtatatggataggtggaaagagtgttaccaggaagccagattctgctgtccatatcatatgtctttaagcctctttctgaccaggagaagaaaataagagagcaagatagaaagaggcctgagtataatcatagagacaacttaccaaggacctgttgcatgccaggcccagcactgagtcttgtgccaacattgttttagtccattttgtgctgctatagcagaatacctggaactgggtaatttttatggaacagaaatgtattggctcatggttctggaggctggaaagtccaatatcaaggtgctggcatcattcaagggccttcttgctgcatcattccatggtagaagatgagagagtccgagagggtaagagagggagcaagagattgatctcacggcctcaagcctttttatactcagcattaatccacccatgagtgtggagcccccatgacctaaacacctcccatgaggccccacctgccaacactgttgcattggggattaagtttctaacacaygcttgttggggaaccacattcaaaccatagcaaacatcatctcagattattcttttcatccagcctatccggtgggtgggcctcgtgttattgtggggtggggtcacatcttgcctgtgc

SEQ ID NO: 527651 - DNA, 408 bp, Homo sapiens
tgctgagactccacacagctctgtgtgttagacccaaggccctggtggcatggactcatgagggtatctcctgatctgwgggttgcgaagatccatgggagaattgtggcttcccaggcttgcacattctctcacagcttccattcactgggagtgggggtcctttggctctgtatcactccctggtgggctgtcacctccccctgtttttcttcattctccatgggttgagctgttttcctggtcagtcccaatgtgaatacctggatatctcagttgaaggtgctgtattcactcgcctcttctgtttctctctgtgagagccacacaccactgcttccacttggccattttgaccccctccaaattatgactttcaaatctaccagtgttgtattgttgccatca

SEQ ID NO: 527652 - DNA, 493 bp, Homo sapiens
agaacatgctgtctatggtgggaagactagtagagaaaattttggggcaggtgacagaggttttgaggggaggcaaagaaccacgtgtggactatgtagtagtatcccagatggtgttgttgaagatgctgtttccaggatctgttcctaagctcagataattattctttgaaggcattattttgtacatatctgcaattaaataacctgaatgatcgtgtctttatttttatatgtgtggcataagagacaatgtgattgatttcctgagaataggcatttttaatcttacatttctattttttaaaatttcttcgctgaaatatcaattttgggttaaacagttttggcttttatrtgtaagctaatatatcttctcaaagtttcaatcttgacttttcatcattttctctcattattttagcttgcttgtagcattgtgggtgaagaaggtccatgtagagaggtcatttctttgtcctcttgccccagg

SEQ ID NO: 527653 - DNA, 444 bp, Homo sapiens
tgttgttttattttccagtttaaggggtttttgttttgttttttgtattctacatgcaagwcttttgtttgatgtatgtgttgcaaatattttatcccaggccatagcttcatcattgccactgggctcagtaaatctttgcccttctatcttgagttattcaagtaggtgaatatttagtcacaataattactggaataatgcaaagaaagcatagagccttttaccaaacttgcagggagccctgaatggttttaaatctaaacagcatttccagtacttttacggatcaacatacactttctggagctttggtagaagcgctgttggaaagaacatcgttttccattaggctatgataataccactttttatcagatagcagaggtaatactatgctattgaacgtgtgggtagacatgaaagatctagcagatggttttg

SEQ ID NO: 527654 - DNA, 444 bp, Homo sapiens
tgttgttttattttccagtttaaggggtttttgttttgttttttgtattctacatgcaagtcttttgtttgatgtatgtgttgcaaatattttatcccaggccatagcttcatcattgccactgggctcagtaaatctttgcccttctatcttgagttattcaagtaggtgaatatttagtcacaataattactggaataatgcaaagaaagcatagagccttttaccaaacttgcagggagccctgaatggttttaaatctaaacagcatttccagtacttttacggatcaacatacactttctggagctttggtagaagcgctgttggaaagaacatcgttttccattaggctatgataataccactttttatcagatagcagaggtaatactatgctattgaamgtgtgggtagacatgaaagatctagcagatggttttg

SEQ ID NO: 527655 - DNA, 555 bp, Homo sapiens
aaaatgtaatccagatttttagagtatgtttctgaataggctccacttaattcatttggaaaatagtcattaagcatctactgtgtgctatgtgctaaagatacaattgtaaagatgacagaactgtccctcaagcagctagggaccacagaccagaagggcaaaatgctgttatagtgtaagttcagacaccatatataaaagcacatgcaaaagtgtttaatcaccaggaagacagaatgaaaaacaaggcagagactaaggagagacaagctaagtgcttaaagcacgacatttaaggagacataaactcttagagccatgcaagtgtagggtgagcacctgagatgagcacatccttaaatcttgtttcctaggcacctcatcctagccctggccctgatggaaaacttataacttgcccatatatactaagagtcatttgtaaaactatcccagtgaagattggtagagccttagggaccaggatcctctctaatgggaaattaaataytttatgggatgtgaacagactctcttttattaaagggagca

SEQ ID NO: 527656 - DNA, 620 bp, Homo sapiens
ccttctaatagtaaagcattactgtattcctgagataaaccccattattggtgctgctttattcttttaatcccatacttaagcacattctgtagttttaaaggttttgtaatagtggtggcacctacacttgctgctgtaaccaaaatgtttatgcatatgtgtgtgagtgaaagtgtgtgttattttcaggtttagatttcaaagtgatactgttcctattaaaatatgaaaaaatgaagatttttctttcttctgcatgtcrttaaaaagacagacaaaaagcaaaccctgaaggtttaaaaatacttacatgtgaaatcatttgaggcctgattttaatcaatttcctctatgattatccatctatttggatttttcctccctttctgccctcatttagataaaatatattttcagataattctctgatctgtagattctttcaaatgtgtttgtatgcagttttgcaaagtatacttttccgactcttaagtttcttttacatctctagctatttcctggtattccattttaacattcactcacatttttccttgattaggccacttagtgatgtatatactttatcgtatacaggtatgtttgttttcaaagaa

SEQ ID NO: 527657 - DNA, 635 bp, Homo sapiens
cgtaataactaatacacaatggaataacagactaaatgattgcaatggactctcccatttaaaaatgggggaaaagaaagcacatttggcagtgtcttgattaggggccagtcctaccttggaaatattaaatcgttctctctggctctttcattcacttcccgggttcttggaactcwcttcttgtttattttttattttccataacaagaaaaacattttggctgttgtgcaacattatcagctttctttctactctcagagaattgagggcttatgggttggtttttgttttgtttttctttttaatatgtctattccttttatttcaagttcacagtactaatgcaattctcatataaactttgtgggatccctgtgaatcttagtaagtttcactatactaaataaaagccacaccacaaatctctcaacacaggctctcttggatttgggatagggtcaaaatggctgtaggaaaatatcttaaaattttctggaaggctttttgtctaactgagagtttctatgagacatgcctttaagtctttctgaaaccttcataaagggtcttataggcatacttttgaggtggtctttgacttatagtcatttttaactcgaaagccttttgg

SEQ ID NO: 527658 - DNA, 587 bp, Homo sapiens
gccgccgctgcccccactgcctgtttgccttccaaggaagggcgccgaggttcccctggaacccgcgtctctcggcttttgtctgctggttcggctgcccggcggtgccatgcgcctgggacttgaggcgccgcgcaaggctgggggccctgcccgggatgggggagggagggaacgggaaagcatgcccccttctttcctgttccggccatcttgtgaccgagatccacgcaaggggaaaggggtggtcagcggcacgacgccccacgatggagtgtggcggccaacggagatgggtacctcgggcccgcaggcctctgcgcccagatctcagcgggggcgcgcgggccacccccacgttcagctytgaagcccttggcccagatcatgggttaatcgttctaacaggccagaggcagcaaaaataggagggataaagggccaggagctgatgtttccttaactaagcgcctaagtcattcgatcgttcttcattcacgtgtccattcagcaaattctgaacgccttctccgtgcctgtcctctgctaggttctagggacgtatacttgagcaagagagaccacag

SEQ ID NO: 527659 - DNA, 607 bp, Homo sapiens
cccggggggcgaccgcgagccctctgaggcccctcaagggacagggcatgggtgtgaggggtcgcgtgcgccccctggcgccgggtccgctgggcggggtggtgggcggggacggtgggcggaggcggaggcggtaggcggagccccggggttgggagtgcgggggtcgcggcgcagagtgggagccggagagcgagcgcggctgcagccggcggcatggctagcacggcttcggagatcatcgccttcatggtctccatctcaggctgggtactggtgtcctccacgctgcccaccgactactggaaggtgtctaccatcgacggcacggtcatcacaaccgccacctattgggccaacctgtggaaggcgtgcgttaccgactccacgggcgtctccaactgcaaggacttcccctccatgctggcgctggacggtctgcatccccgcggcccccgccctcagccctccttccttgatggccagcccgctaggcgccctctcgcccccaatacccccagcgggacccctagactggactcctctgaggcccgacccgtctctcccmacagggccttagggagccagggacgctcctggtgcccgc

SEQ ID NO: 527660 - DNA, 489 bp, Homo sapiens
actgcctggaatctggtttggagcatctccaaagccaacgtactttcccccaagaaaatacaggaagatctctctgcccaggcttggaaatacataaggatcaggtttgccatcctctactttagggtgactttaacataattyaatgcccactgactgcttttctcctacaggtaaagtaacaaacaaaggagtcaactctcaggagctctctctttcatctgctttatgttgccattttccctcattgccctctcacattcactcagtaattcaccaaatatttatagagacttcatggtgtgcaaggcagtgaactccacactgtaggaagagtaaagccatggagatcgcaggcctggctcttcatacctttggctttctgttgaattgaactttctgttaagtttaaaatacacaatagaactttgacgatgttgtggcctggtcagggatgggacagataaccagcccttaaaaataaagctc

SEQ ID NO: 527661 - DNA, 558 bp, Homo sapiens
cagctgtcaccaagttgaggtggcagtggtggttttctttatgtcaaagcactttccatctattcctaattgattgcctactgatttcttggtttccttgactatttcgttgaaaggatctcaagccgctgtaaaacttgcattttaacatctagcgtgacattytccctctgtttagtgtcatttttgtggcagattaagatctcccaccagcacactttcccatttaatcctccagccattgtagttcaaaactctttgccagaaatcctgcatgcccagaacacacacacatacacacacacacacacacacacacacacacacaaacacacacacacacacacacacaatgaaaggccactcaagtcagggtaacaaggtggagcctttgcagtgcatttagctaatgccaatagagatgcagtataaatagttgtaccaagtttccatctttcccttaagcaggatgtaagcatgagattgtagaagaaaggattctgtaaacagatttatttcgtgatatttgggtagacagttcttgttaacatagaacaa

SEQ ID NO: 527662 - DNA, 602 bp, Homo sapiens
cattattagcaaaaacacagtatttgtctatatctttctctgaaggttggcggtgattcaaaaagcaatatctatacatgctctgctcttcaggacacctgtgaatatagctggcaacttagtgctccacctatagctactcaaaaattatttgttgtycttcaaacagatcccttgaacaaaacagtttatttggaccttgcgctagtcttcaaacttctctttgaaatacgtctggaaaaaatagacataatttccttcaattattctttgtgtttaatcacatttctactcaccactggcattcgttcatagacacgaatagaagatagtctatctacaataaatcaaatatgagcacttaatgttttatcagttttaactcaaattataaaatgtacatatgattggttttgtacctgaagagtttccatggattttttccactttctccttgagataaacaatttgcttttctagttcatcatttaattcaagttgtgtctcataacgggttttccattcactacctgagtaaaaacagggagaaacaatcaagatcaccccaccacctctcatttattcattaaaataacattatg

SEQ ID NO: 527663 - DNA, 602 bp, Homo sapiens
cattattagcaaaaacacagtatttgtctatatctttctctgaaggttggcggtgattcaaaaagcaatatctatacatgctctgctcttcaggacacctgtgaatatagctggcaacttagtgctccacctatagctactcaaaaattatttgttgtccttcaaacagrtcccttgaacaaaacagtttatttggaccttgcgctagtcttcaaacttctctttgaaatacgtctggaaaaaatagacataatttccttcaattattctttgtgtttaatcacatttctactcaccactggcattcgttcatagacacgaatagaagatagtctatctacaataaatcaaatatgagcacttaatgttttatcagttttaactcaaattataaaatgtacatatgattggttttgtacctgaagagtttccatggattttttccactttctccttgagataaacaatttgcttttctagttcatcatttaattcaagttgtgtctcataacgggttttccattcactacctgagtaaaaacagggagaaacaatcaagatcaccccaccacctctcatttattcattaaaataacattatg

SEQ ID NO: 527664 - DNA, 602 bp, Homo sapiens
cattattagcaaaaacacagtatttgtctatatctttctctgaaggttggcggtgattcaaaaagcaatatctatacatgctctgctcttcaggacacctgtgaatatagctggcaacttagtgctccacctatagctactcaaaaattatttgttgtccttcaaacagatcccttgaacaaaacagtttmtttggaccttgcgctagtcttcaaacttctctttgaaatacgtctggaaaaaatagacataatttccttcaattattctttgtgtttaatcacatttctactcaccactggcattcgttcatagacacgaatagaagatagtctatctacaataaatcaaatatgagcacttaatgttttatcagttttaactcaaattataaaatgtacatatgattggttttgtacctgaagagtttccatggattttttccactttctccttgagataaacaatttgcttttctagttcatcatttaattcaagttgtgtctcataacgggttttccattcactacctgagtaaaaacagggagaaacaatcaagatcaccccaccacctctcatttattcattaaaataacattatg

SEQ ID NO: 527665 - DNA, 602 bp, Homo sapiens
cattattagcaaaaacacagtatttgtctatatctttctctgaaggttggcggtgattcaaaaagcaatatctatacatgctctgctcttcaggacacctgtgaatatagctggcaacttagtgctccacctatagctactcaaaaattatttgttgtccttcaaacagatcccttgaacaaaacagtttatttggaccttgcgctagtcttcaaacttctctttgaaatacgtctggaaaaaatagacataatttccttcaattattctttgtgtttaatcacatttctactcaccactggcattcgttcatagacacgaatagaagayagtctatctacaataaatcaaatatgagcacttaatgttttatcagttttaactcaaattataaaatgtacatatgattggttttgtacctgaagagtttccatggattttttccactttctccttgagataaacaatttgcttttctagttcatcatttaattcaagttgtgtctcataacgggttttccattcactacctgagtaaaaacagggagaaacaatcaagatcaccccaccacctctcatttattcattaaaataacattatg

SEQ ID NO: 527666 - DNA, 488 bp, Homo sapiens
cctgcattcaggttcacaccccgtcttatctttattaccttctttatctttaacattctaatgttgacccagtgggggaagggggacattgttttgaacttaaggctataactcaatggagttaggaatgtttttatcaacttacatcttgtctcctgcgtttcctccgctgcagtccactctgtagccagaaggatgtctctatgcacgagtctgactccactctgcytaaccctcttccataaagtccaaaattgctgcatggcaagaagctctttgtaatgggccctattcacctctccagccttatgtccccagccgctcactagctgttccccatgtgccctccacctccagccagtttattggccgactctcttgcttggtctcttagtttagaggtcacttcgttggggaaagtttcttaactatgtgcacctcagaacccctgtttaccctcattgcagcctgtgtcacactggagggat

SEQ ID NO: 527667 - DNA, 488 bp, Homo sapiens
cctgcattcaggttcacaccccgtcttatctttattaccttctttatctttaacattctaatgttgacccagtgggggaagggggacattgttttgaacttaaggctataactcaatggagttaggaatgtttttatcaacttacatcttgtctcctgcgtttcctccgctgcagtccactctgtagccagaaggatgtctctatgcacgagtctgactccactctgcttaaccctcttccataaagtccaaaattgctgcatggcaagaagctctttgtaatgggccctattcacctctccagccttatgtccccagccgctcactagctgttccccatgtgccctccacctccagccagtttattggccgactctcttgcttggtctcttagtttagaggtcacttcgttggggaaaktttcttaactatgtgcacctcagaacccctgtttaccctcattgcagcctgtgtcacactggagggat

SEQ ID NO: 527668 - DNA, 577 bp, Homo sapiens
ctccttcttcactattaccttcaagatcatgtcagcatcccatgatctggctcttgctcacttccctgacttcatctcctccatatgtgcccttgtccayatgcttcagccacactggccttctttctgtttcttgagcatcttctctttagaaaaatgtacgctatctgttcctttgcctggacaactgcttctgcactctgcatggctgccttcttctcattcatgcctttgttcaaacaccacttactcagtgagtcctcccttgacaacacaacctaaatttgcacctagcctctgtcccagcacactccataacaccagccagtgctctttccttcacagcacttattacaaaataaaataaaattttctttgtcactaatttgtttgctttttatctgtttcctatccctatcctcaatgctagaatataagctttccaagagtggtgtccttgtctgtcttcttcatcattgcatccctaggacctgtaaagtgtctagcacatatagtagcacatgctaaatatttgtttaatgcacgcatgaagggaaggacattctagacagatggg

SEQ ID NO: 527669 - DNA, 577 bp, Homo sapiens
ctccttcttcactattaccttcaagatcatgtcagcatcccatgatctggctcttgctcacttccctgacttcatctcctccatatgtgcccttgtccatatgcttcagccacackggccttctttctgtttcttgagcatcttctctttagaaaaatgtacgctatctgttcctttgcctggacaactgcttctgcactctgcatggctgccttcttctcattcatgcctttgttcaaacaccacttactcagtgagtcctcccttgacaacacaacctaaatttgcacctagcctctgtcccagcacactccataacaccagccagtgctctttccttcacagcacttattacaaaataaaataaaattttctttgtcactaatttgtttgctttttatctgtttcctatccctatcctcaatgctagaatataagctttccaagagtggtgtccttgtctgtcttcttcatcattgcatccctaggacctgtaaagtgtctagcacatatagtagcacatgctaaatatttgtttaatgcacgcatgaagggaaggacattctagacagatggg

SEQ ID NO: 527670 - DNA, 577 bp, Homo sapiens
ctccttcttcactattaccttcaagatcatgtcagcatcccatgatctggctcttgctcacttccctgacttcatctcctccatatgtgcccttgtccatatgcttcagccacactggccttctttctgtttcttgagcatcttctctttagaaaaatgtacgctatctgttcctttgcctggacaactgcttctgcactctgcatggctgccttcttctcattcatgcctttgttcaaacaccacttactcagtgagtcctcccttgacaacacaacctaaatttgcacctagcctctgtcccagcacactccataacaccagccagtgctctttccttcacagcacttattacaaaataaaataaaattttctttgtcactaatttgtttgctttttatctgtttcctatcsctatcctcaatgctagaatataagctttccaagagtggtgtccttgtctgtcttcttcatcattgcatccctaggacctgtaaagtgtctagcacatatagtagcacatgctaaatatttgtttaatgcacgcatgaagggaaggacattctagacagatggg

SEQ ID NO: 527671 - DNA, 577 bp, Homo sapiens
ctccttcttcactattaccttcaagatcatgtcagcatcccatgatctggctcttgctcacttccctgacttcatctcctccatatgtgcccttgtccatatgcttcagccacactggccttctttctgtttcttgagcatcttctctttagaaaaatgtacgctatctgttcctttgcctggacaactgcttctgcactctgcatggctgccttcttctcattcatgcctttgttcaaacaccacttactcagtgagtcctcccttgacaacacaacctaaatttgcacctagcctctgtcccagcacactccataacaccagccagtgctctttccttcacagcacttattacaaaataaaataaaattttctttgtcactaatttgtttgctttttatctgtttcctatccctatcctcaatgctagaatataagctttccaagagtggtgtccttgtctgtcttcttcatcattgcatccctaggacctgtaaagtgtctagcacatatagtagcacatkctaaatatttgtttaatgcacgcatgaagggaaggacattctagacagatggg

SEQ ID NO: 527672 - DNA, 400 bp, Homo sapiens
ttgggaggcaaggcctctgattgcagagcaaatgaaactacgaatcccttgcttagtagcacaactattcacttgagcaataattaggaaggcgagttcctttaaaaatgaacatatgatttgggacatggtctgaattggagaaagctagcaattttgaagtggtagtgttggttctctccacaagagggcgcctctattctttgtttttattttctatctggaagcaacaatttatgtttattactggcacagaataaacagaagagtgacttatgttttgctgtttgcagagctgacttcatgtaaaatttggacagttttattacattycaaacagttacagtttttttccgtcaggactttgggatatgtggttagcactgtttctttttaacag

SEQ ID NO: 527673 - DNA, 634 bp, Homo sapiens
acttattctgccactgctatttctttctattctttgatcatttcaagctcattcctgcctcatggtctttgtgctcagtaatccctccactggaattccctktacaaaggttcccctgttaaccatgggccatacatttcaagacacccagtggatgcctgaccccgtggatagtaccaaaccctacatatactcatgttttctgataaccaagatggctacgagtgactaatgggtggggagtgtatacagcatgcatctgctgggcaaggggatgactcatgcctcaggcggaatggagcaggacagcacaagagttcatcatgctactcagaatggtgcatgcaatttaaaactcatgaattgtttatttctggatttttccatttaatattttcagacttcagatgtcagcgggtggtggaaactgcagaaagtgaaacctgggataagggtggacgactatactgaaatcttagcaaggccagctcctttttgtcattcaagtctcaatttaagtgtcatcttctcagaaagccctagaaagcaaagcttcagccccttccacagcactgttttattttcctaatagcactcagtactatctagaattatcctgttgacttgcttattg

SEQ ID NO: 527674 - DNA, 551 bp, Homo sapiens
ggtggaaatggtcccagtcttgtcttcactggaaatgtccaatgtccacgtgctgctcgtttctcttcttatgaagcgtctccctgtctctctgggcctgtctctgtttcttccatcgcttttttccccactaagtaaccatcccggcgcactgtacccaactggtcgaggaacgcccctgctgtacccatcactgctggctgcctcggagattaatgcgagcgactcgggtggtttatgagaagtgacacttamtacccagcttcttgtatctgccgccgagcagttaacgttaaagcccgctctgtaccaccgcggatgtgactgctgtaaataccacggggcagggctctcatgcttcagaaacacgtaagcaagacgcaccgagccagccccggacacccaatgaccctggactgcggcaaagggggggtgggaaaggaagaggggaggaccactcgctcttctctccttcctcctcgcccgggccggagcacgccttcctccccggagggcaggggaaggtcgctccaggtcgctggcacctccag

SEQ ID NO: 527675 - DNA, 420 bp, Homo sapiens
gtatttttggtagagacagggtttcacgatgttggccaggctgttctcaaactcctgacctcaggtgatctgcccgccttggcctcccaacaattacaggtgtgagccaccacaccaggcccatagtaagaattgatataaattttatatcacaaatcataagcatagtgacaaccttccttcagtctttcattatatatattggctcctctattaataagttatgattggcattcttttgagtaaatatgcattactagagaaagaaataatacctgccatataggaacctcaagggtcccttttagcattcatgggctatggtttttatctctttttttttttttttttttttttttttkgatctagagtccctctttatcttcccatcacaggaagtccttgctcctctcccacccc

SEQ ID NO: 527676 - DNA, 450 bp, Homo sapiens
gatatacctaatgctagatgatgagttagtgggtgcagtgcaccagcatggcacatgtatacatatgtaactaacctgcacaatgtgcacatgtaccctaaaacttaaagtataatttaaaaamaaaaaaagaaagaatgcataagtatgtttaaaatgaaaaggcaaaagtatatagtagtgaaaagtaatcatttttgagatttattgcttcctaaataaattcattaattgtaaattgtcaacaagtacatagacacagcagcagaaccacaaaagtaacacttttaaggcagaactctctcaaagttaataaattatacatctgctgagcaagtcattacgtcatcacaaacgataagaaagtgactagagtttcaagatgtattaaagattccaggagggagaaaagtagctggcatttttgaaggccatacagtgatactttta

SEQ ID NO: 527677 - DNA, 621 bp, Homo sapiens
agctgtggatattaaagtcaaaaagtgggaatgttcttctgattctttgtcaagaatgtaatagtaaaattgtaaaattaaaggaaaaaatcttcagactattctaaaattttactattaaaaacactttctgaaactcccagtaaagactgctatcattttccatcmcaacttcatctgctacctcatgttccattaaccactgacttgtataacaagctagaaatatcttgtcccaggaagtaagcagacattcaatcacatttctttcaactaccaaataagttaaagtgaaaacaattcagtattgattatacaggggtcaaaaggcaacagaagtttagaaaaagcaacattcgcgtcacatggactacaaagatttttatacagccttgactatgggggtttctactgactgtagatacagttttgtggcaaaaaaaaaaaaaaaaaaaaaaagtggatctgggtcagagttgctgaatgagaaatatttgtaaagaaaacagtagagaaaagagagtttctgggaaatggcatgcaatataaaaagttgggaaataaatagaccaatggggaaaatgtaggcagacatatgccaggcatatggaatttctgtgt

SEQ ID NO: 527678 - DNA, 621 bp, Homo sapiens
agctgtggatattaaagtcaaaaagtgggaatgttcttctgattctttgtcaagaatgtaatagtaaaattgtaaaattaaaggaaaaaatcttcagactattctaaaattttactattaaaaacactttctgaaactcccagtaaagactgctatcattttccatcacaacttcatctgctacctcatgttccattaaccactgacttgtataacaagctagaaatatcttgtcccaggaagtaagcagacattcaatcacatttctttcaactaccaaataagttaaagtgaaaacaattcagtattgattatacaggggtcaaaaggcaacagaagtttagaaaaagcaacattcgcgtcacatggactacaaagatttttatacagccttgactatgggggtttctactgactgtagatacagttttgtggcaaaaaaaaaaaaaaaaaaaaaaagtggatctgggtcagagttgctgaatgagaaatatttgtaaagaaaacagtagagaaaagagagyttctgggaaatggcatgcaatataaaaagttgggaaataaatagaccaatggggaaaatgtaggcagacatatgccaggcatatggaatttctgtgt

SEQ ID NO: 527679 - DNA, 569 bp, Homo sapiens
gctgatcatttggtaaactttggataaactattttgctagttttactataccttttgagatactgtttcaaaagagaaaatataaagaatataagcataatcccaattagaagagtcaacaggtgctgctttctgatgcagggcagttcaatcattataattctaaattacaaaccctttcaagtctggcagaagaaaatgaattgccagcgcattttcctttttctgcttcaatttttaaattatsaagtacaaagaggatttttttttctctttatctttaaagatgttttctttttcttttcaaaatttgttctctgtgtttccaggtgcagcagtttttcctgttagccttcgcatgttagttgagcccatcagtcccagacttctcggaccctgagagaacttacggttcttgttccagtagaagaaaatagctaatcatttgtttgatttgacctgtatgatgtgatattgaaaaattggttactaacacttaaaagtcttggaatttcatagaaaaatacagattttttagttcttttgcaccttcctgcatggcagtagtc

SEQ ID NO: 527680 - DNA, 569 bp, Homo sapiens
gctgatcatttggtaaactttggataaactattttgctagttttactataccttttgagatactgtttcaaaagagaaaatataaagaatataagcataatcccaattagaagagtcaacaggtgctgctttctgatgcagggcagttcaatcattataattctaaattacaaaccctttcaagtctggcagaagaaaatgaattgccagcgcattttcctttttctgcttcaatttttaaattatgaagtacaaagaggatttttttttctctttatctttaaagatgttttctttttcttttcaaaatttgttctctgtgtttccaggtgcagcagtttttcctgttagccttcgcatgttagttgagcccatcagtcccagacttctcggaccctgagagaacttacggttcttgttccagtagaagaaaatagctaatcatttgtttgatttgacctgtaygatgtgatattgaaaaattggttactaacacttaaaagtcttggaatttcatagaaaaatacagattttttagttcttttgcaccttcctgcatggcagtagtc

SEQ ID NO: 527681 - DNA, 614 bp, Homo sapiens
gccttcctgccccacctcatctccatagcccttccttctagacggcctgccccaagcctgcgtttctctgtgaacctcagcacacatttgcacaggtcatgctgttccatctgggagctctgcctgcaaaattttggccccttcctcctcaccccagattccccacccctccctcagacctggcttcctactaagggataagaaataaaaataccctccccgcaacctgactgatcagattcctcccttgggcaagaggaccccacagaacccttaaaaacggggtacctcaccatgatgggatggtagcgtcacatgcctcattacagcccctcccttttgtggattaaacacractgaccagcattaatggtaaaatagagatcataagactgacagaatggagtctttgtggcaataagataccaaattataaacaagaccatgccaggcaagggttaagtggtgaacccctacatttaaagaataaattatgctctaactgccacaagggattttgtttgtttatttttttctctagcagcgaaacaagcactggcctggagataagcagtatcgaaacaattacaactcctctgacctccacacactgc

SEQ ID NO: 527682 - DNA, 614 bp, Homo sapiens
gccttcctgccccacctcatctccatagcccttccttctagacggcctgccccaagcctgcgtttctctgtgaacctcagcacacatttgcacaggtcatgctgttccatctgggagctctgcctgcaaaattttggccccttcctcctcaccccagattccccacccctccctcagacctggcttcctactaagggataagaaataaaaataccctccccgcaacctgactgatcagattcctcccttgggcaagaggaccccacagaacccttaaaaacggggtacctcaccatgatgggatggtagcgtcacatgcctcattacagcccctcccttttgtggattaaacacaactgaccagcattaatggtaaaatagagatcataagactgacagaatggagtctttgtggcaataagataccaaattataaacaagaccatgccaggcaagggttaagtggtgaacccctacatttaaagaataaattatgctctaactgccacaagggattttgtttgtttatttttttctctagcagckaaacaagcactggcctggagataagcagtatcgaaacaattacaactcctctgacctccacacactgc

SEQ ID NO: 527683 - DNA, 609 bp, Homo sapiens
gggtgtttgcaagggaagggcaggtggtggctgtgttttaggatgatgaatctggatgtggtatgtgctttggcttataagaagggtggggacagagagagacaagcacagagccaatgaaatccttgtctcagggcaataggagtgttgaaagaatggcaaaattaaatgacattgcagatggaaaaacatcaagatagaagttagggagtgattcccacaccaaatcaaatcattgcataagatgaaattgggcgtaaagacaagaggaagttatgaaggaaggccgtgtctttcatgagttaacattgctgctgttttgttgccacatggttcttttgactccccctaagctgatggcaagcgtgcagggagcatgacggcatttataccctggttttgtctaaaaggagcaagctgagttaacragtgattttatgttcttcttgggtagctcaaattccaagaaaccctccacagctttggcagcccagttcaaaccagagacaaggctctaagataacccagcagctctgagtctacaaacatcacatctttacccccaccaccagccatgttatctggccgggtacctccagtctttccaag

SEQ ID NO: 527684 - DNA, 587 bp, Homo sapiens
aagccctggaccaggtagattcacagccaaattctaccagatgtacaaagaagaagtggtactaatcctactgaaactatcccgaaaaatcaaggaggagaggctcttccctagctcattctatgaagtcagcatcarcctggtaccaaaatctggcaagacacaatgaaaaaataaaacttcgggccaatatccctcatgaacatagacacaaaatcctcaataagatgctagctaactgaatgtagcagcacatcaaaaagttaatacaccatgatcaagtaggctttattccttggaggcaaggctggttcaacatatactggagctttaaatctactctcctcatcctttaactcctctttcatattcttcatctccttggctctgcatatcttattatttggtgatttcttcagttcttgcttctatttttcctaaccataccttcaaagtgtacaacctagaattttttctgcctattcagctccaaaattgaatcagtaatagagaagactacatttttcttttttaagatttctatttgattcttctttttaaatgtttgttttgttttcatttataac

SEQ ID NO: 527685 - DNA, 603 bp, Homo sapiens
aaaccagacatagaatacatactatgtaattccacttgtatacatatttagaaaatgaaaaagaatctatagtgacagaaagcagatgaatggttgcctgggggtggtggaagggtttagacagagttgaagggaaagggcacaaggaaacttggaatgaygaaaatgttggtatcttaatagtggctgtggtttcatgggtgtataaacaaatcaaaacttcaaaatgcatgtttcaaaatgcatattttaaatatgtgcagtttatttcatttatgcctcaacatagttgttaaggtagattctagtgggaatatgctgtatttactgaaaggggtgatccaggaaaggtgttctagatcagcatttgcagagaaatagagttcatacatatttcataatagtgatttaaatgagtagctgagtggtgcagtgaagcatagggtttccccattttaattaggctctttcatttcttagggtcaggagccttcttgtactgtgcacgcacaagtgagcttgttgctcaagtctgctccctggtgctgggagaggatctttgttggttggtgttagggagagcttctctctgttgtgcctttt

SEQ ID NO: 527686 - DNA, 603 bp, Homo sapiens
aaaccagacatagaatacatactatgtaattccacttgtatacatatttagaaaatgaaaaagaatctatagtgacagaaagcagatgaatggttgcctgggggtggtggaagggtttagacagagttgaagggaaagggcacaaggaaacttggaatgacgaaaatgttggtatcttaatagtggctgtggtttcatgggtgtataaacaaatcaaaacttcaaaatgcatgtttcaaaatgcwtattttaaatatgtgcagtttatttcatttatgcctcaacatagttgttaaggtagattctagtgggaatatgctgtatttactgaaaggggtgatccaggaaaggtgttctagatcagcatttgcagagaaatagagttcatacatatttcataatagtgatttaaatgagtagctgagtggtgcagtgaagcatagggtttccccattttaattaggctctttcatttcttagggtcaggagccttcttgtactgtgcacgcacaagtgagcttgttgctcaagtctgctccctggtgctgggagaggatctttgttggttggtgttagggagagcttctctctgttgtgcctttt

SEQ ID NO: 527687 - DNA, 586 bp, Homo sapiens
taagttatcacaggagtgggttactaataaaaggatgagcccaacccccttcccttctctctctctctctctctctctctctcgtgctctcttgcccttccaccatctctcatgggatgatgcagcagaaggtcctcaccacaaacttggacttcccagcctccagaacaatgagctacataaatttctgttccttataggttaccgtgtctgtggtacttcattattgcagcacaaaatggactaagacacctgccttgtgacttacatgggctttgtacaatcaactctcaatcacagtgacaactgattgggaaaaagactgtatcaggcaagagaaatgctatggggtcttatctatccaatgaattgccttaggagttcggcaaatttatcttgagggctttttcctaatataattgagtgataaaagtattctctctcttctttaaactcataataattaatgaaaagaaggcagascggtcaaaagcagtcttttggtgtttggaattcaccagtgataacccacaagttgaataattcttatgttgtttttataaacatttgtccaacagagacagct

SEQ ID NO: 527688 - DNA, 586 bp, Homo sapiens
taagttatcacaggagtgggttactaataaaaggatgagcccaacccccttcccttctctctctctctctctctctctctctcgtgctctcttgcccttccaccatctctcatgggatgatgcagcagaaggtcctcaccacaaacttggacttcccagcctccagaacaatgagctacataaatttctgttccttataggttaccgtgtctgtggtacttcattattgcagcacaaaatggactaagacacctgccttgtgacttacatgggctttgtacaatcaactctcaatcacagtgacaactgattgggaaaaagactgtatcaggcaagagaaatgctatggggtcttatctatccaatgaattgccttaggagttcggcaaatttatcttgagggctttttcctaatataattgagtgataaaagtattctctctcttctttaaactcataataattaatgaaaagaaggcagagyggtcaaaagcagtcttttggtgtttggaattcaccagtgataacccacaagttgaataattcttatgttgtttttataaacatttgtccaacagagacagct

SEQ ID NO: 527689 - DNA, 518 bp, Homo sapiens
gtgcccacccagattgagggtgggtccacctctcctagtccactgactcaaatgttaatctcctttggcaacaccctcacggacacacccaggaacaatacttagcatcattcagtccaatcaagttgacaccsgatcactcaatatcaaccgccacaatattttaaattgttggaaggttagagtcccatgatatacctctgtatctctcaaaatgcctagttgagtgctttccatttaaatggtcaatacatatttggtgtctaactgaataagtaaatagtttgcaaatctctggaagtgatgcagggtaggcaagcctccgaattggtgcttagcttgggaaggttcttgattttgcccaggaaagaattcaagggtgagcctgtggtgttagacagcaacttttattgaagtgccagagcacagcaacaacagggatactggtctttgtggagcagggctactccatagacagtgtgcccagaggaacagctcagaggcagttctgcagtcag

SEQ ID NO: 527690 - DNA, 595 bp, Homo sapiens
ttcatttgcaaatgccagtgtttttagcttagctttttccctcaaaactctgagtttgaaagaataaacttaaaaaggatacgtttccaggctttcttctcccttcattgaatggtgtttcttcatgtagcttgaggaaatggcttggagtcagttgcaggaaataaagtgaaaattagagactcacagccatattggcaagaatgagagagagacagacagagaggaaggtaggaagaaaagaaggcacatagaaacctaggtttgtattatatgtgtgcatacacatgtgtaaccctctagtacataacgggaatatggaggagatattgggaacccctgtgagacagtgcaccagtttgagacgatacattgtgtacttggaaataagagagaacatgctatgagttgtatttatgtgctactttgtttatttattgttgtttttccctgtcagcagcagaatatgtgatattttgtctaaacctgactatgtccatatgtgacaggcctgaggggaagcatggtgtttctaacctgtctctcyctcttcactccctgccccacctcctgcccctccctgtctcccagaccc

SEQ ID NO: 527691 - DNA, 628 bp, Homo sapiens
atcccagccaacaacaggtggagcagaagcaccatcgcaccaattccgcagggtcctgagaaatggtaacccactcactgccgtttcagctcctgcactcgcrgtcactcgtgacacagccaaaaataactgactcacagggtgtcttagtctgctcaggctgctgtaacaaaatcctttagatggctattcatacacacagaagtttgcttcccacagttctgaaggctgagaaatccaagatcaaggtcccagcagatctggcatctgagaaaagttctctgcttcatagaaggcctcttctaagcatcttcatatggcagaaagggcaagcaggctcccaaaaacctcagttttaaagggcactaatcccattcctaaccacctcccaaggcccccacctcttaatatttgggattaggtatcaggtatttgggattaggtttccacgtgtgaatttgggaggacaccttcagaccatagcacagggtgagttggactttgttttttaatagccctgatttttttttcttagatttaccgtgaagatgctgacatgtgttagaaacagaaaatccagctcatgtggtttaaacggagacgtctctcatagcaggaaattccaggt

SEQ ID NO: 527692 - DNA, 567 bp, Homo sapiens
tggtatccactgctcgctgtgtgggaaaaaccctacacctttgctcacaggagtttcctgtgtcaatgatggctgtggcgctgtgagagcagaggaaaaactcgggtttagagttttttcctgaaacacattcccgaggtatctagtggatctgccttctccttgccaccttccagagtcttatgtttgcttttaagataaaatccaaggttttgggctgtaattagagggaagagtaggggaaaatacatcttttccaacttcccagaaacacagtcctggtatgttagtctttttaatagatttgcaatgatattgaactcaaaagaaatcaagagctactaaagaagttttttaggataccatataattaatgtcccagacccacagttccctaccacgcacacaatggcctattgtatcacagcactcaggacaatgatatttccacactaattttatcattcagggtcaatacatcgctaagaaaatgaaactgctaatgtcagtctgtgaattttycccactgctttcaaaagtttccttcagcaaaaacttagtttcaaa

SEQ ID NO: 527693 - DNA, 553 bp, Homo sapiens
tgctggtgaggggagagggcaggcagcagatcctggagagtgagatgtgatctgcaagcctcgagacatccctgcaccccagcaaaagccagggttgctggcctccttggtcctgacttcctctcctgtggatgtctggttctagcttcatggggaattggcactagaaaaactcaggcctttgtggatggaagccagagtttctgttgccagcatggagcccagggtgcccaggctgtccatccaggtgtgctgcccagctcccgtacctgagccaggagatgcccctggtcaggctggtgaggtgggcggggtgggggaggggcccatggatctcaggagcagactctggggctgtgggctcatgcacaatgagaccgcaacacccttggcagactggctcccaggaaggtcctggtttctatctaggaatgtttctcactgccatttagacttgagcccaccttggctggtgagcagggaggctatggggtgggaagacaagtttctgggyatttcctacccaagtatgggtcagcgtggctctgctagg

SEQ ID NO: 527694 - DNA, 594 bp, Homo sapiens
gttacctttgtatgtgactgcacgcacttgggcatagtgttctgagaaggggtcctgggcttgtacccctcgggggccgaggggtcttgacacaaatgaagttaaggmcccttggtctgtggggctttggagcatggactgaacgcatgacacctgcacacatgtggctctctaaggcagactgtcctttgccaataaaccactgtttagagccaaatagccaagaagcacaaccaaatttcatcccattcccatccccaatctttctgaaatggccacacattctgatgacgccaagtcctcaaaccttgctgggcgatgctgcctggattttgaggcaggctggtcaccccttgggcaaccctggagagaggcgcccacagagacacacactcatgtcctgtgagaagagccagacagacctgtctactgaccactgtggtctcccaggccccgagcgtggactccagctcccccttcagcaaagccgacagtgtgccctttggggatgtggagggaaagcgagctgggagctgagcccagaccagctccggtaggagtcagaagaatgtgccctgctgccagtctgagggt

SEQ ID NO: 527695 - DNA, 460 bp, Homo sapiens
cccattttgatttcctaattatcaagtccctccaccaccttcatgctcttcatgagtcacagatatctttgcttctcctcaaataggatcaagtgactaaacctgaggcaggggctccatccaatgtgatgatggctttgagtttggggcaccagctctgaagggtgagggacagatacagggtctcttagctcctttcttkctgctgagggctcctctgctgcctgtccaatgctaccaccttctttctccaagtaggattctctcctctcttggaccactcttgaagagagtctcatacacaggcattctgatagtttcctaaggttttggctgctaattacttagagtcacaaacaatctttgagtaccaagcatccttcttctgacctgatcttattttttccactctggttcaaaaacaatgttaccaaagatgcttaaagtctctgatagaaag

SEQ ID NO: 527696 - DNA, 460 bp, Homo sapiens
cccattttgatttcctaattatcaagtccctccaccaccttcatgctcttcatgagtcacagatatctttgcttctcctcaaataggatcaagtgactaaacctgaggcaggggctccatccaatgtgatgatggctttgagtttggggcaccagctctgaagggtgagggacagatacagggtctcttagctcctttcttgctgctgagggctcctctgctgcctgtccaatgctaccaccttctttctccaagtaggattctctmctctcttggaccactcttgaagagagtctcatacacaggcattctgatagtttcctaaggttttggctgctaattacttagagtcacaaacaatctttgagtaccaagcatccttcttctgacctgatcttattttttccactctggttcaaaaacaatgttaccaaagatgcttaaagtctctgatagaaag

SEQ ID NO: 527697 - DNA, 460 bp, Homo sapiens
cccattttgatttcctaattatcaagtccctccaccaccttcatgctcttcatgagtcacagatatctttgcttctcctcaaataggatcaagtgactaaacctgaggcaggggctccatccaatgtgatgatggctttgagtttggggcaccagctctgaagggtgagggacagatacagggtctcttagctcctttcttgctgctgagggctcctctgctgcctgtccaatgctaccaccttctttctccaagtaggattctctcctctcttggaycactcttgaagagagtctcatacacaggcattctgatagtttcctaaggttttggctgctaattacttagagtcacaaacaatctttgagtaccaagcatccttcttctgacctgatcttattttttccactctggttcaaaaacaatgttaccaaagatgcttaaagtctctgatagaaag

SEQ ID NO: 527698 - DNA, 513 bp, Homo sapiens
ctgagtattactgtgaaagacttaatgagaaggtgtccttgtgagccctgacacaaaccttgctggcagggcactcaggactgccaggaagactcaggaccacagaggggactcaagaccaccagggaagagcaggttgcaggaagcacagggccagccccagagcagttgggggtagagatgagaggttggtttactgccaggttctggggttgcctcaccatcttcatgtttcctccagggaccctctcttatttcatggtgctgtgwctagctctacatctctaaaataccacagttttgttgtaccaggaggaaaccttctcacaggccctaaatgtagagcaatctctctgccagtggtcactaggatcacagccctgaggaagctgagggtaacctggtgaatcttctccagtcacattcgggacaggaaccttagcggggttccctgaggtgaacagtctcaggaatcctaacctcagccaagacagaggctgggccagatcaatg

SEQ ID NO: 527699 - DNA, 573 bp, Homo sapiens
tactgtgaaagacttaatgagaaggtgtccttgtgagccctgacacaaaccttgctggcagggcactcaggactgccaggaagactcaggaccacagaggggactcaagaccaccagggaagagcaggttgcaggaagcacagggccagccccagagcagttgggggtagagatgagaggttggtttactgccaggttctggggttgcctcaccatcttcatgtttcctccagggaccctctcttatttcatggtgctgtgtctagctctacatctctaaaataccacagttttgttgtaccaggaggaaaccttctcacaggccctaaatgtagagcaatctctctgccagtggtcactaggatcacagccctgaggaagctgagggtaacctggtgaatcttctccagtcacattcgggacaggaaccttagyggggttccctgaggtgaacagtctcaggaatcctaacctcagccaagacagaggctgggccagatcaatgtcagatagaacctcacaagttttatgtctgacccttctccaccaacaataaagcatgccaatcagtat

SEQ ID NO: 527700 - DNA, 573 bp, Homo sapiens
tactgtgaaagacttaatgagaaggtgtccttgtgagccctgacacaaaccttgctggcagggcactcaggactgccaggaagactcaggaccacagaggggactcaagaccaccagggaagagcaggttgcaggaagcacagggccagccccagagcagttgggggtagagatgagaggttggtttactgccaggttctggggttgcctcaccatcttcatgtttcctccagggaccctctcttatttcatggtgctgtgtctagctctacatctctaaaataccacagttttgttgtaccaggaggaaaccttctcacaggccctaaatgtagagcaatctctctgccagtggtcactaggatcacagccctgaggaagctgagggtaacctggtgaatcttctccagtcacattcgggacaggaaccttagcggggttccctgaggwgaacagtctcaggaatcctaacctcagccaagacagaggctgggccagatcaatgtcagatagaacctcacaagttttatgtctgacccttctccaccaacaataaagcatgccaatcagtat

SEQ ID NO: 527701 - DNA, 378 bp, Homo sapiens
attacttaatgatatttcttagctgtattccttaatactgtgtcttgtgacttctcctagatataagtgtgtcagtcagcttttcagctagctgaagcctccctaggtcctgccttcctttagcacaaaagttgatggtggttcatcattggtaaatcaacacctactgacagggacctgacatattgaaggtgctgagcagcctcataytgaacttctctgggaggaatttactaccacacttaagatctgatgataatacttttgaactcgtaacacagtcctatggcatggaccctgaggatactgcaacagtgggtctcaagaacaaatggatttttaaaataaccaaagtaagaagagtaaggcaaggaacaa

SEQ ID NO: 527702 - DNA, 499 bp, Homo sapiens
caccttacatcccaataaaggcttccactctcaggtccctccctctctctcgctattgctcccacccatcagtcgagcacaggtctcctggatggctcccccttctagttggccctgcgaagtgtgctgccctcctctctctggaattaataaaaaactgcttcggttatttcatgtgttgtattgtgctgccttctctgtttcacccaactgagtcacccaaacctaactctctttccagtcagtgctcccagctactcgggaggctgaggtgggaggattgcttgagcccaggaggttgaagctacagttagctatgatcacgycactgcactccagcctgggtgacacagtgagaccctgtctcaatttcttaattttttaaaaaagatgcaaaacaaaatgtaatcaatgctatgcagtaaaacatacctttggggtttttttttttagcatcttgactttgtgtgtgtgtttattttgtattttttgtatttga

SEQ ID NO: 527703 - DNA, 541 bp, Homo sapiens
tactgttgcagcaatgtgatgactacatgaggatatagtgtatgattctctggacttttgtatatgattaaaattttccataacaaaatgtttctaaaagaaaaaacagagtaacagtgtatatttcatayaggtgttatgggtattaaatgagatatgtaaaagtgcaatactgtctgggatacagaaggggttttgaaaagtttattttcccttttattttctcttttaaaatacacctcccccacaacacacagaaaagacacacacacacacacacacacacacacacaccaggagtcatccaaaaacagtctttgtgatgttctgcaagggttgaattgtcctagtaagggtttgtgaaagacttggatcttttttacattgaaatcaaaggctggtgattttagacacacttcagagtcctggagccttgggtactggaccttcctactttgggaaaataatcaactcctgagctctgtaaacaataaccagtatagaatagaaagcaggattctctgaagagaaaccagagtcc

SEQ ID NO: 527704 - DNA, 610 bp, Homo sapiens
gctggcatttcacagtaaacagcattatatgtttgaaattaatttagtcatcmacagagcctaaagcaatatgccccgactataatttaggatctcaacctaagaaaacacattttgggttatggcatccccatctttcttccctatggtagactatcaaaaacggccacaattctttataattccttccatcaagagttggagtttattttctactccttgaatccagactggtagtgtaatttgcattgtccaataaaatggggtagaattaatatataattttgagcctgggcctgaagaggatttgcattgttttgttgccgctcctcggactcttgcctctgccatcatgtgaacaggcctgaagtagcctactggagaatgagagaccacatggggccattcagccaagtcaggtaattttctttcctttcatttaaaaaatctgtttccttcattctttaaaaatatttttaattgacacataatacttgttcatatttataaggtagagagggatatctcaatacttgtatacaatgtgtaatgatcaaatcaggataatcagcatatctatcacctcaaatatttatcattctttgtgttg

SEQ ID NO: 527705 - DNA, 452 bp, Homo sapiens
agatttcatacaacatacaaaaaaattaatttatacatgatcagaytccattttcacagaaaaaaaaccttttaagattgaggttgacagaaaagagctaatactcaggataatcaaataacatattaaattatccaacacaatgaccattaaactgccatggagttcttaagtctccactagttctaactgtatgccatgtatttatgatggcctcagtctgaagttccccctgttcttagaatttatttcttatcttaaataccagagaaaatccaagatttctgggcaccagtgatggtgggaactcccaaggtgctttgcagccctctgactcagaaaacctgagatctacaaagcactgacctcattctctgggattctaggataagaagaggtctccatgggatccctgggactcagaaataactactagaggttaataaattgaa

SEQ ID NO: 527706 - DNA, 452 bp, Homo sapiens
agatttcatacaacatacaaaaaaattaatttatacatgatcagattccattttcacagaaaaaaaaccttttaagattgaggttgacagaaaagagctaatactcaggataatcaaataacatattaaattatccaacacaatgaccattaaactgscatggagttcttaagtctccactagttctaactgtatgccatgtatttatgatggcctcagtctgaagttccccctgttcttagaatttatttcttatcttaaataccagagaaaatccaagatttctgggcaccagtgatggtgggaactcccaaggtgctttgcagccctctgactcagaaaacctgagatctacaaagcactgacctcattctctgggattctaggataagaagaggtctccatgggatccctgggactcagaaataactactagaggttaataaattgaa

SEQ ID NO: 527707 - DNA, 452 bp, Homo sapiens
agatttcatacaacatacaaaaaaattaatttatacatgatcagattccattttcacagaaaaaaaaccttttaagattgaggttgacagaaaagagctaatactcaggataatcaaataacatattaaattatccaacacaatgaccattaaactgccatggagttcttaagtctccactagttctaactgtatgccatgtatttatgatggcctcagtctgaagttccccctgttcttagaatttatttcttatcttaaataccagagaaaatccaagatttctgggcaccagtgatggtgggaactcccaaggtgctttgcagccctctgactcagaaaacctgagatctacaaarcactgacctcattctctgggattctaggataagaagaggtctccatgggatccctgggactcagaaataactactagaggttaataaattgaa

SEQ ID NO: 527708 - DNA, 452 bp, Homo sapiens
agatttcatacaacatacaaaaaaattaatttatacatgatcagattccattttcacagaaaaaaaaccttttaagattgaggttgacagaaaagagctaatactcaggataatcaaataacatattaaattatccaacacaatgaccattaaactgccatggagttcttaagtctccactagttctaactgtatgccatgtatttatgatggcctcagtctgaagttccccctgttcttagaatttatttcttatcttaaataccagagaaaatccaagatttctgggcaccagtgatggtgggaactcccaaggtgctttgcagccctctgactcagaaaacctgagatctacaaagcactgacctcattctctgggattctaggatragaagaggtctccatgggatccctgggactcagaaataactactagaggttaataaattgaa

SEQ ID NO: 527709 - DNA, 513 bp, Homo sapiens
ctgagtattactgtgaaagacttaatgagaakgtgtccttgtgagccctgacacaaaccttgctggcagggcactcaggactgccaggaagactcaggaccacagaggggactcaagaccaccagggaagagcaggttgcaggaagcacagggccagccccagagcagttgggggtagagatgagaggttggtttactgccaggttctggggttgcctcaccatcttcatgtttcctccagggaccctctcttatttcatggtgctgtgtctagctctacatctctaaaataccacagttttgttgtaccaggaggaaaccttctcacaggccctaaatgtagagcaatctctctgccagtggtcactaggatcacagccctgaggaagctgagggtaacctggtgaatcttctccagtcacattcgggacaggaaccttagcggggttccctgaggtgaacagtctcaggaatcctaacctcagccaagacagaggctgggccagatcaatg

SEQ ID NO: 527710 - DNA, 573 bp, Homo sapiens
tactgtgaaagacttaatgagaagrtgtccttgtgagccctgacacaaaccttgctggcagggcactcaggactgccaggaagactcaggaccacagaggggactcaagaccaccagggaagagcaggttgcaggaagcacagggccagccccagagcagttgggggtagagatgagaggttggtttactgccaggttctggggttgcctcaccatcttcatgtttcctccagggaccctctcttatttcatggtgctgtgtctagctctacatctctaaaataccacagttttgttgtaccaggaggaaaccttctcacaggccctaaatgtagagcaatctctctgccagtggtcactaggatcacagccctgaggaagctgagggtaacctggtgaatcttctccagtcacattcgggacaggaaccttagcggggttccctgaggtgaacagtctcaggaatcctaacctcagccaagacagaggctgggccagatcaatgtcagatagaacctcacaagttttatgtctgacccttctccaccaacaataaagcatgccaatcagtat

SEQ ID NO: 527711 - DNA, 473 bp, Homo sapiens
cataaaaggttaaaggagcctaaggtatgactgcaaattggaatcagtaagaccaaaatgccaaattataacctttgcaatttctgtttattaattcaggcaagaagtgttgtaagacagatgtaaaccaagaagtgagcaaaaaatgttcaaaagcataggttgaatcactttttctgtaattagttacttgccattttctggccacagccaagtgagaaggaaatggtcacagcctcagccctagagaatatattcattttgatttataaacgtgttatgcagacatctgattttaaaagttgatcagagatttcaccacaaggaaaaaaaaatcagtgtgtaaattaattgyatttcctaaaataagataaaaataatataaatagaatgttaatattgggatattctttcctcagttttgctgtagataacattgtgagagctgtcagataaagtgagtatgagataaa

SEQ ID NO: 527712 - DNA, 609 bp, Homo sapiens
gaatttggaagttttctttaaacaagactacatraaaccaagctggtttagagtacttctgtgtctacctcttgttttttgttttttttttttctagcttggctcgcctgttgacatgaagctattagtattacaattagtactgaaatacattattaagcaaacagaaaacttttctaaaagataggaaggcttagggaattgacaccatgagtaagagtggtgaggtaatatttttagtccaatctcactttgcgactgattttaaaagaaccataacactttagaattcaaagtgactttagatattcgttagtccagttcattcattttctaagttagcagttgatgttcagagaggtgaaatggcctgttgaaaaatcatagtgatattcataaaatgccctcatgagtagcaaactttctttaactcagattagtggggctttcaacatgttatcttgcctccttctcaaatcacaagagattaagatgtattcatctttttcttgtttgtttgtttcaatctttcacattatctccatttcttcacaagttccagggaaagagaatttgagatttctcttttatccatatttttgatagtgc

SEQ ID NO: 527713 - DNA, 581 bp, Homo sapiens
ggctgcgggaattgagggtgctggcgtgagtgtacctgattcaatgggggataggggagaaagtgaaacctgggaaaaattgcttgtgtcagtcttaagagaaaagggtggggtcaggcacttggtgggggccaaggatcagaaagcaggtgcatgggaatgggaaaggaaagatgatggaacacagtatgttgggctgcaggcacagcacttcagagctcaagattttataggattattttgttgtttttcagaatgcattgtttaaaaattatcttaatattttcgtaacagaaaatgatttctgttttttttttttttttccacagatcatgagcagygtgcctagggcttaagggaaattttcctttcttttcttgagagctttgttaagggcttataatattgctaaagggtgagctcagagtttacagaaatgctgagaaaagcaaggttttaacaaaggcacaggaagtctcaggcagttccctagaaactgtagattttcctcataggaaaaaaaaagctaatataagcttagtggtttatattttttttcctttgcttttaaaggtaaaacc

SEQ ID NO: 527714 - DNA, 554 bp, Homo sapiens
accaaatgacaaagtcaaagtacaaagtgaaagtttgaattttgcaatgataacttaccatttgattggtttcgtagtcacagattacacgctggtcagyctgctcaccagtgaactccatccctggctacacggggctctgagtgagaatacctcatactccatctctaggtgtccatctccttgtaactaggagtgttgatacttaatattaccctcatatttcaagtagcatttcttttctttcctttcttttttttttgagacagagttttgctcttgttgcccaggctgaagtgcagtggtgcaatcttggctcactgcaaccactgccttctgggttcaagtgattctcatccctcagcttccaagtagttggaattacaggtgcataccaccacgcccagataatttttgtatttttagtagagatggggtttcaccatgttggccatggctggtctcgaactcctgacctcaggtgatccacccccccttggcctcccaaagtgctgggattataggtgtaagccactgcacctggcctgaagtgg

SEQ ID NO: 527715 - DNA, 554 bp, Homo sapiens
accaaatgacaaagtcaaagtacaaagtgaaagtttgaattttgcaatgataacttaccatttgattggtttcgtagtcacagattacacgctggtcagtctgctcaccagtgaactccatccctggctacacggggctctgagtgagaatacctcatactccatctctaggtgtccatctccttgtaactaggagtgttgatacttaatattaccctcatatttcaagtagcatttcttttctttcctttcttttttttttgagacagagttttgctcttgttgcccaggctgaagtgcagtggtgcaatcttggctcactgcaaccactgccttctgggttcaagtgattctcatccctcwgcttccaagtagttggaattacaggtgcataccaccacgcccagataatttttgtatttttagtagagatggggtttcaccatgttggccatggctggtctcgaactcctgacctcaggtgatccacccccccttggcctcccaaagtgctgggattataggtgtaagccactgcacctggcctgaagtgg

SEQ ID NO: 527716 - DNA, 554 bp, Homo sapiens
accaaatgacaaagtcaaagtacaaagtgaaagtttgaattttgcaatgataacttaccatttgattggtttcgtagtcacagattacacgctggtcagtctgctcaccagtgaactccatccctggctacacggggctctgagtgagaatacctcatactccatctctaggtgtccatctccttgtaactaggagtgttgatacttaatattaccctcatatttcaagtagcatttcttttctttcctttcttttttttttgagacagagttttgctcttgttgcccaggctgaagtgcagtggtgcaatcttggctcactgcaaccactgccttctgggttcaagtgattctcatccctcagcttccaagtagttggaattacaggtgcayaccaccacgcccagataatttttgtatttttagtagagatggggtttcaccatgttggccatggctggtctcgaactcctgacctcaggtgatccacccccccttggcctcccaaagtgctgggattataggtgtaagccactgcacctggcctgaagtgg

SEQ ID NO: 527717 - DNA, 554 bp, Homo sapiens
accaaatgacaaagtcaaagtacaaagtgaaagtttgaattttgcaatgataacttaccatttgattggtttcgtagtcacagattacacgctggtcagtctgctcaccagtgaactccatccctggctacacggggctctgagtgagaatacctcatactccatctctaggtgtccatctccttgtaactaggagtgttgatacttaatattaccctcatatttcaagtagcatttcttttctttcctttcttttttttttgagacagagttttgctcttgttgcccaggctgaagtgcagtggtgcaatcttggctcactgcaaccactgccttctgggttcaagtgattctcatccctcagcttccaagtagttggaattacaggtgcataccaccacgcccagataatttttgtatttttagtagagatggggtttcaccatgttggccatggctggtctcraactcctgacctcaggtgatccacccccccttggcctcccaaagtgctgggattataggtgtaagccactgcacctggcctgaagtgg

SEQ ID NO: 527718 - DNA, 608 bp, Homo sapiens
acaatttcttaatgactcttctggacattagtgtgatacatcaagagaaaaattcagagactaaattcaagtttaatgacaaaatgagaacattctcagtgggaatttaaaactgaacactgatactcaaagcataaataaacgaaaaacaatcagaagaaaatctccaaactgccttcgttatccccaggtgacctggtaagaacatttttttctgagatttggtaattgctcaaaaattgtatcctttttctccctaccctactatcttttagaaaagatgagtctgaacaataagatgtatcttatataaaatgctgggagttaaatatggattaagtccaattaagacctcttaaaaaaccaccaacacttttgagtgaccacgactataagaagtctttytttttctggtacatattaaaaaacaaaaacaaacaaaaaaaaggaacattcacacaaacaggttaatgaaacccagaagaaacaggatgaaagaatgaccagcagagatgaaagctaacagcagcataaaaaagaaaaccctctaaaaggtcagagagtgaagtgagaaaaggaaaaaaaaacagtgttagttcaagacaggc

SEQ ID NO: 527719 - DNA, 514 bp, Homo sapiens
tgcggtgccaatcccccctggggggccttgttcaacttttctgcttgcagcctcatcttccccttcggagtccacaataaggacatattcagctttgaagaggtcactttgctgcatcccttgaagtttgtttgcttcgaattccctttcttgtaaaatcgttccactgacctctgaaggacaagtcaatttcgcttggtctctctcttgttggctcccagcattcaaggtcaagtagtcattggatttagactgtaatagatgtagagagataaaagcattgacattagtttaataaatgcttcttttttggcatgtacactgaaaagcttaacctccttatattttcaaaaatatattaaattaggttgacataagaaagagattgggttgaagttagcagtttatttttactagcccactagcccacctgtttttcctggtctaagcccaaacaattttgggatagtaatcaacatcaacargcaaacctaactgttttcaagtaagtcat

SEQ ID NO: 527720 - DNA, 633 bp, Homo sapiens
atgtaaattctgtgtaaatagttgttgtactgtattgctttttatttgtattatttttgttgtttttatttttccaataaattttttacattatttatttatttatttttttagagacagggtctcactatgttgcccaggctagtcttgaactcctagtcacctcagcctcccaagtagctgggattacaggcacatgccaccacgcccagctctgttttagaatattttggatcctcggctggttgaatcctaaggccaactataacgagttacaggcatggtcctgatgttactgtcttaactaatctgtaatggtgggattatttttatgaatgaagtacatctaatgaatggattctttattaagtttgcacctctcatatgcccattctccaaggacactgggtcacagggatgacataagtgacaacccatgcttgtgtgtttgaggcctccacagtaaggaagcaggccgagaatagatcaaaatgcaataattatggtaacaacaacatgtacctcatctyttcttatctttttgttagattttcttctttctcattaaaaacacgtataagcaaatgtaatatcaacaagtaggttttctactttgctgaatattaaagtttc

SEQ ID NO: 527721 - DNA, 450 bp, Homo sapiens
gtgaggacaccagaaccagaggacaaaatagagaggccaagccaacgatgactgacatcataagccatgatctctttaaagcccagagtgatcctagtgatggggccatctgggtcactatcagagggatggcagttctcttctagaaaacaaaatcctatttgacgaaagcagaaaatccagcggatgaaagccagggtccagagagagatacgcattgccttcatatcacaaccatgaggccgaagccatatgaccacaggcaagtctcttcacatctctaagcctcagtttcctgttcaatagattattcatagaatttaacccagtggggttcttgtgagaaattaatgaaaaaaatacacctaaaacatttagcacacagccaagataacagataacaagataacagctctctggayagtaattctgtcagcaccgctcccccca

SEQ ID NO: 527722 - DNA, 633 bp, Homo sapiens
ttatttgtaaatatgtattttactgtgctgggaaaaaaaaaagttgcattaagagaaaattaggccgggcacggtgactcacacctgtaatcccagcactttgggaggccaaggtgggtggatcacctgaggtcaggatttctagactagtcacatggcgaaacctcatctctactaaaaaaaayacaaaaattagccaggtctggtggcgtatgcctgttatcccagctactcgggaggctgaggcaggagaatcgcttgaacccaggagatggaggtttcaatgagctgaaattgtgccactgcactccagcctgggagaagagtaagactccatctcaaaaaaaaaaaaaaggcagggaaaattaaataaccacgctggctttgtctagatgctttcccttccagctcccaccagccctgccttgatgccattttcctatctgtgcagcgacatgatgagtgttccaaggtcatgctaaacagtgacctctggactcatctcagatgcatgcagagactcttatttagaaagaaataagtctcattatttccttttaataagttcctttacattttatactaagtgttttttttaaaaggaaattccaaatctaaattcagtgcttgagg

SEQ ID NO: 527723 - DNA, 633 bp, Homo sapiens
ttatttgtaaatatgtattttactgtgctgggaaaaaaaaaagttgcattaagagaaaattaggccgggcacggtgactcacacctgtaatcccagcactttgggaggccaaggtgggtggatcacctgaggtcaggatttctagactagtcacatggcgaaacctcatctctactaaaaaaaacacaaaaattagccaggtctggtggcgtatgcctgttatcccagctactcgggaggctgaggcaggagaatcgcttgaacccaggagatggaggtttcaatgagctgaaattgtgccactgcactccarcctgggagaagagtaagactccatctcaaaaaaaaaaaaaaggcagggaaaattaaataaccacgctggctttgtctagatgctttcccttccagctcccaccagccctgccttgatgccattttcctatctgtgcagcgacatgatgagtgttccaaggtcatgctaaacagtgacctctggactcatctcagatgcatgcagagactcttatttagaaagaaataagtctcattatttccttttaataagttcctttacattttatactaagtgttttttttaaaaggaaattccaaatctaaattcagtgcttgagg

SEQ ID NO: 527724 - DNA, 565 bp, Homo sapiens
agtaatattcggcttacttcactgacaaggtaattgttaattgagccaacatctgctttatcctctcccatgtcccagtaggccaagctcatatgacctattccaatcttccccagaggccttcctatcttgtgtctcagcagcctaaggaagcatactggactgtattaagctagcccctaaccaacagagcccacgctgcaatctttttttatggatcttaccacggagtggacagcccccagaactgggttgggattgtcagagacaccactaaaggctgtcctctccagcacttgtaagcttggtttcatttttccattaaaaaaaaaaaaaaggaayatatggctaggcacagtggctcacgcctgtaatcccaacactttgggaggtcggtggatggatcacctgacgtcaggagttcgagaccagcctggacaacatgacgaaaccccatctctactaaaagtacaaaaattagctgggcatgatggtgggcgcctgtaatccctgctacttgggaggctgaggcaggagaatcgcttgaatccgggaggtagaggtt

SEQ ID NO: 527725 - DNA, 565 bp, Homo sapiens
agtaatattcggcttacttcactgacaaggtaattgttaattgagccaacatctgctttatcctctcccatgtcccagtaggccaagctcatatgacctattccaatcttccccagaggccttcctatcttgtgtctcagcagcctaaggaagcatactggactgtattaagctagcccctaaccaacagagcccacgctgcaatctttttttatggatcttaccacggagtggacagcccccagaactgggttgggattgtcagagacaccactaaaggctgtcctctccagcacttgtaagcttggtttcatttttccattaaaaaaaaaaaaaaggaacatatggctaggcacagtggctcacgcckgtaatcccaacactttgggaggtcggtggatggatcacctgacgtcaggagttcgagaccagcctggacaacatgacgaaaccccatctctactaaaagtacaaaaattagctgggcatgatggtgggcgcctgtaatccctgctacttgggaggctgaggcaggagaatcgcttgaatccgggaggtagaggtt

SEQ ID NO: 527726 - DNA, 565 bp, Homo sapiens
agtaatattcggcttacttcactgacaaggtaattgttaattgagccaacatctgctttatcctctcccatgtcccagtaggccaagctcatatgacctattccaatcttccccagaggccttcctatcttgtgtctcagcagcctaaggaagcatactggactgtattaagctagcccctaaccaacagagcccacgctgcaatctttttttatggatcttaccacggagtggacagcccccagaactgggttgggattgtcagagacaccactaaaggctgtcctctccagcacttgtaagcttggtttcatttttccattaaaaaaaaaaaaaaggaacatatggctaggcacagtggctcacgcctgtaatcccaacactttgggaggtcggtggatggatcacctgacgtcaggagttygagaccagcctggacaacatgacgaaaccccatctctactaaaagtacaaaaattagctgggcatgatggtgggcgcctgtaatccctgctacttgggaggctgaggcaggagaatcgcttgaatccgggaggtagaggtt

SEQ ID NO: 527727 - DNA, 565 bp, Homo sapiens
agtaatattcggcttacttcactgacaaggtaattgttaattgagccaacatctgctttatcctctcccatgtcccagtaggccaagctcatatgacctattccaatcttccccagaggccttcctatcttgtgtctcagcagcctaaggaagcatactggactgtattaagctagcccctaaccaacagagcccacgctgcaatctttttttatggatcttaccacggagtggacagcccccagaactgggttgggattgtcagagacaccactaaaggctgtcctctccagcacttgtaagcttggtttcatttttccattaaaaaaaaaaaaaaggaacatatggctaggcacagtggctcacgcctgtaatcccaacactttgggaggtcggtggatggatcacctgacgtcaggagttcgagaccagcctggacaacatgacgaaaccccatctctactaaaagtacaaaaattagctgggcatgatggtgggygcctgtaatccctgctacttgggaggctgaggcaggagaatcgcttgaatccgggaggtagaggtt

SEQ ID NO: 527728 - DNA, 519 bp, Homo sapiens
accaccccttgtctcagcccggcctcttcccatccctgcatccccacccaacactgctctctctttaaggcatcacactttggagctcctctctgcaccttatcctggttacaggacaggaaatctacaacttgtcctcctaatttcaatstaagttagccatttgtgaccaagaacccagaatcctctagaaacatgttaactgctgacagcctgtatcacaaaagtagcttaagcccagaatagagctgaaccacagtgctgacagtcccttcccacattcagggtttggggaagcatgatgcttccagaaacagcacatcacatcaaagagaccacagctcagtaaagtccctgccctgccacctacttagaaggaatttgggaaggttatctcactctctaaactttattttccttggtgtcccaagttgggggttccaggagaaagacactgagatggagtttggtttgcaggatatttattagaaatcaacgtttacagaaaagaggtggaag

SEQ ID NO: 527729 - DNA, 247 bp, Homo sapiens
cactgtgcagggccctgggatgggccctgtggggtccctctctgatgtctcgctcagaacagaggcttccattgggacccctcattatgtggctcttcatgcctggtgagacaccatattycttgcactgggcctccccagtgctgactatacttcccatcgcctgttgccacactcgccgttgccatcctcttcctcccaggaaggactccctccctcccagccactgtagtggatctgtgccccc

SEQ ID NO: 527730 - DNA, 552 bp, Homo sapiens
gggcagcagctggaggatgggggtgggcraaaaggagtctctctcagcctcagtgagcaccgtggcctggccacccactctgttattgtttcacatagggaaggtttaagggtccctggacacccattcagaatattctttcatcatatttgggacgctagttaatggattatttgtaataatatgcaagcataatttctaaacaaaagcagaatttcaataagaagctttaaaggatacatgttcttattgcagaaatgttgttctcccttgttagggacacagaccccttgacatggaaaacacagcttgctcccctgagaaggaaagcaaacatgataggtgggtgtgagtgcacgtatgtaatgggcctggaggggagtggttctcaggctccaacaagacgactttcccaagggtctcccgtattttttttgtactctaaagtacactcacacatacacacagacacacacggacactactgacactacttaagaacactgacactgtgatggtggtttgcaagatgtgcttacagtgcaggaagtg

SEQ ID NO: 527731 - DNA, 582 bp, Homo sapiens
cgtctgaagggctttcataccgaagagagcttggaggtactccacgtggcctcaagggaaagaactaccattggtaggaggaaggtacagggaaagtatatttcattcttagcaagacatttcaaaaagaatcaagactgaaggcagggagctccttgccaataaataagcataaactaggcgaacatttggcaggggagaatggaaaaatgtgtcagagagctcatctattaatttcaattctgagatactaagacttaaattatgtaatacattctcacatcttaacaccaattaaattacagactgccaaagtgttaaaaccaagcagttcctctttcattgctcagacatcgttttcaaattcttttcatcttggggttagccagaggaaatcccttcaaggccattgccatccattcctctccctcaccacactaaggttgcatgtcccaggccatcactggtctgcacagtatcaagacaggcagagttcttagccatctragaactatggatgtgaggagggagacgtgggaagatacgtggctccacactgttcttgatgacgttcaggccaaa

SEQ ID NO: 527732 - DNA, 484 bp, Homo sapiens
tctcccccagaagaaaatgctgaaaagtaactagtctcaacatgagtaatttaaaaatatacattgtaaagtaagtataataagatttaatctttatttttaacactataagcatttaatcctgtaatagtgtgagaagtctgaatttccaaagataattaaatttgaaccttttcatttcagaaaagccacagaagaggaattgagactcgaagaagaaaatcgaaggctactggaacttatgaaaktgaaggcaaaaggcaagcacagattgctatgactgatgatgtgtcatggtattgttactgcaagcaattgcagtatttcaagtgaattatagactgggtgatcacatttcccaatttgtccatgagagcccaggtttatgcctatattcttgaagtctttatagtaccttttattcttaaagtgttccagtttgtatactaaataatattgttactgaagtaatggattcatagga

SEQ ID NO: 527733 - DNA, 439 bp, Homo sapiens
ggtatatgagagggtgaagacaaacagtcctcggctttgcttaccaggagagagcagtcgtaggtcaaggctggctccaaccctgccctcacacctctaggggtctctctgcagccctgtggtagtccctttgcctactcctctcggtggcctccagaccctccaactttcctcctgcttgtgtaagctccccatgccaggatgtgtgtgatggggcggggctgagctgcctgacactcaagtcaggctgggaatgatctyggtctccacctcatttttccctttagttgaatcagagttccccccacctcccagtctacagggctaactgagaagcagcttttatacctctctccattccaaaaggagcttgaacatttaatatggattctagctcctccactcaccagctctgtgacttcaggcaagtgactcaacc

SEQ ID NO: 527734 - DNA, 683 bp, Homo sapiens
gatgtcacaactgcagctgccatctaagaatgcccctagatctctggccagcaggcatagagacctgagatgtcaagtcagaggcatgagttcaaaattagtttttctagatggttcatctgagactgacttggagggctcattctgagcatagaaccaggaagatactaggaaagcccaagtaaaagattaaaatggcctttagcaggctatggggataacagcagcagaaaccatagcttcgatagcagcttttatgtatgtatgttagggatgagaaattattaattcagtctttatccctataattcagaagctaccaggaaactggtgtcaattatgttgctgcactaatagtttattggcagaacttggccttctccttattttattctttttcatcattgttcccatgttctaaccacaatgagatggacgattttctcttctggaaggatggaatagggaaatgtaggaatagggaaatgtaggatttttattgttgtaarccccatttgaggacagatcttaccttccaaggcttctagttggggccagtcttatataagcagctacttgcaaggtctgagtggagaggattccgaaagacagtagcttcaaaacacgggctcatacaatgttagtgatggatggccccactagatattatttattttgttgat

SEQ ID NO: 527735 - DNA, 683 bp, Homo sapiens
gatgtcacaactgcagctgccatctaagaatgcccctagatctctggccagcaggcatagagacctgagatgtcaagtcagaggcatgagttcaaaattagtttttctagatggttcatctgagactgacttggagggctcattctgagcatagaaccaggaagatactaggaaagcccaagtaaaagattaaaatggcctttagcaggctatggggataacagcagcagaaaccatagcttcgatagcagcttttatgtatgtatgttagggatgagaaattattaattcagtctttatccctataattcagaagctaccaggaaactggtgtcaattatgttgctgcactaatagtttattggcagaacttggccttctccttattttattctttttcatcattgttcccatgttctaaccacaatgagatggacgattttctcttctggaaggatggaatagggaaatgtaggaatagggaaatgtaggatttttattgttgtaaaccccatttgaggacagatcttaccttccaaggcttctagttggggccagtcttatataagcagctacttgcaaggtctgagtggagaggattcygaaagacagtagcttcaaaacacgggctcatacaatgttagtgatggatggccccactagatattatttattttgttgat

SEQ ID NO: 527736 - DNA, 665 bp, Homo sapiens
gaagcaggaaaactaggcaaagtgatgctaatcacagtaatatcactagcctctcacayggataagcatctaattgcctacatggctagttcataccaattatttcccttaatctttgcaacagtcttcagaaagatgtaggtgaatttacccagtctgtagatgaggaaccaagttccagaaagattaaacaacttgcccaatgatacacaggaagttgctgactctggtcaaatgctcttcctgtcgtttgccctcaccaggagtggaggaggtgagggaaaagggagctgctggggtgggaggtagagtggtggggcagggcccagtccttggcaatatggggcatgcagggcctggagcttggactgcccatcgggcagcacccccaggccaccgtggctgtgaccgtgatggtggtagtggtggtggtgcgtggaagaaacagatgaaaaggaggcagaggcctggccagagaagggtgaggagaatctagaaggtgggagaatacggtagatcttaggccgaaggaagttcagcctttccatctagaggctcaaggaagtacaaagagcatgaatcaggaatcaggaggccagattttgggtctcagctctgcacagtcttcctacagccttctttgaggtcctttagcccagacacac

SEQ ID NO: 527737 - DNA, 665 bp, Homo sapiens
gaagcaggaaaactaggcaaagtgatgctaatcacagtaatatcactagcctctcacatggataagcatctaattgcctacatggctagttcataccaattatttcccttaatctttgcaacagtcttcagaaagatgtaggtgaatttacccagtctgtagatgaggaaccaagttccagaaagattaaacaacttgcccartgatacacaggaagttgctgactctggtcaaatgctcttcctgtcgtttgccctcaccaggagtggaggaggtgagggaaaagggagctgctggggtgggaggtagagtggtggggcagggcccagtccttggcaatatggggcatgcagggcctggagcttggactgcccatcgggcagcacccccaggccaccgtggctgtgaccgtgatggtggtagtggtggtggtgcgtggaagaaacagatgaaaaggaggcagaggcctggccagagaagggtgaggagaatctagaaggtgggagaatacggtagatcttaggccgaaggaagttcagcctttccatctagaggctcaaggaagtacaaagagcatgaatcaggaatcaggaggccagattttgggtctcagctctgcacagtcttcctacagccttctttgaggtcctttagcccagacacac

SEQ ID NO: 527738 - DNA, 603 bp, Homo sapiens
tggtgtagggtatatgtttttgtatatgtccttccagttttttcctatatgtagtattttgttttccctccacctttctttttagcyaaacaatctattgtatggcactcttctgaaaaggtcaactgatgtgtgttcttcctgttagactgagttttttggggactggatccaggactcattcatctttacatcgccaggacccgggcagggagctcagtaaatgtttcttgagtgaatacaagcctcagtggatgggtggtgaatgagtgcatccccagtggggtgaagggtcctgggccagtcttctccaattccagcctcattatccctccctgataccacccccaagagccacatcccaaaccctcccctggcgctctcttgcatcccgactcccattcccaaccagatgcctctgttgcaccttcttgtcctgcaggtctgtggagagttcatagctgtccgatagggccttggagcgctttatctcctcctcctcctgcttcctcagggcgacactggctggctggaggcgtgcccgctgagcccagggaaggcccactccagcaggggggccccccatgtggctgctggaggggg

SEQ ID NO: 527739 - DNA, 464 bp, Homo sapiens
ggagaaaaatcagggaattatgcagtakatgggttagacaggaaaacattctaggaagaacgagattctatgtataatcttaagggcaataaagcatcatggaaggttttaagcagtatataatcagatctacactttagaaaccccccaaatcactgaattgtacatttcaaacaagtgaattttatagtatgtaaattatatctcaataaagccattaacaaaaaaatccctttgggagcttgaggaggataaactggagggcatcaactgggggaggttgtagtgtaggagtttgggtgagggggcccgagcccatctgtttggacttgagggaaagtggcttggggttagagtcgggggaggatcagaatgtcttgcccaaggttaagaagctggtggaacttgatttcagaacccagagctccctggcttcagccctagtgctcctgccagcactacag

SEQ ID NO: 527740 - DNA, 512 bp, Homo sapiens
tgacttgttacctacaagaagagttcctcacaaattggggtggtttggggtggaggcttcatggcttctgggccttggccctttgcccagtgatatttcactgaacaagagaactgctgactcctgtctcagagccagtgaagggtttcatgtgctttctcaccagcagaaaacagaaaggatcacaggtggtggcaaggaccacctgataaggctgtgtcctggcaggggaggggtacggggagtaytgtacagaaggaggcagatcatatggtgctaacctatctctcttttttgttgcagaaggacaagaggatgctattttgtcatatgagccagtgacacggcaagaaagtaagcctcctctgagagccttgtcttcgtgctggtctcctggtcgtggggctcaatacagtgggtggctgtggcagcagagggagggacctggaggaggaggaaggcttgactcatggcacatccagcccctgggctccttcttctctatgcttctt

SEQ ID NO: 527741 - DNA, 594 bp, Homo sapiens
ctatctggggtggtacctggtggacagaagggtgccctcatctagatggcagccacggctcatcatcctggagtagttcaatgagaagccatagacggggtggctctgctcatgagcagttaggagacagtctgagtcagaggcctgaggtgrtgtcaccatagtttcatcagatgagtcccagagtccctccatgccaagcccagcctggggaggtgttcattgctcagtggtcccgcctggtgggcgagggggtatctactggatgacagagttgaaggtgcctagtgcttctccagaagctgagctcatcccccaagatctgtccagctcagggcagctttggaggccacactctacaccatgcgaaacttttcctgaagggtttgaacagagtgaatcagtattgggcaaaggcttcttgaggtgatggcaattctatctgcctacctggcacacgcggacatttgctctttcacgcactgcagagggaaatggtgatttcaggggcaaacagagacctgggctccacaaccaaaatttagtcaaagcaggtgctctaagccttggagtgtcacctgtcctgtcccattg

SEQ ID NO: 527742 - DNA, 498 bp, Homo sapiens
aatcaggcacttagagctgttacctctttggttgaatgggagcagactgattttgtaaacctggcagccaaatttataatatgcctgtctgcttgattttcaggatagcttgggcactgttgaacggacccaggattccgaaggctccttcaaactggaggatcctaccgaggtgaccccaggattgagcttctttaatcccgtctgtgccacccccaatagcaaggtaggtgggctaaaaggcaggcattggaaaactggattagcgtccttctctgcattatctatgakagaccagtaggagagaggcaggtggagtaaaggtgtaatcagcttgctgggaactagggatcgggcatagactctagtctggttttttccatagaatgatcttaaagaacacttcatactactgggagtatgtcgagcatctatagcagctcggctgggctgagcttctgcccctttctaaagtctattcatacctgtctctgtccc

SEQ ID NO: 527743 - DNA, 452 bp, Homo sapiens
tatctagtccctgctaaaagggacccaagatgacatttcatccaaacttattttayagttgaagaaactgagatgcagaatgataaaggacttgcccacgatcacatagctgggcagtagagtccatgtacatttggagaccttgtttagagttattacatatatttcatccacatttttacctcctttgtggtcgaaaatatgcaacaaagactcatgctcacatactggaaaacatatagaaagtagatgctgaccaaataaaaaacttactggaagtataaatgctactttctctgtagttgtccataatctttctagctccattttgacagaattaaccattcctttctctgtgtcacagcagccctttagcgttattggtaatagagcacataccacatttgcactttttatttaattatttgcttctatctgtacctcctcttgag

SEQ ID NO: 527744 - DNA, 649 bp, Homo sapiens
ctcagttatgtatgatatcattagtctgctttttcaggacaaaatctgtgtcacagtgttacagacaaaatctataacacagtgtcggcatartaaattcagctcagtgaatgcttattaaacattaacgtaatccttgttgctttctttattcaaccctacagtgaaattttctgggtgcttggagtaactaaaatatatttgcagatatttaatttcaacttcttacacattaaacaagtagaaaaccatgtcttcaaaaacatattctttaaaagtgattgcttagggcaaaagtagtctatgattttagaattcattataatagttattcttagggtgggttcatgattggaatggaatatgtaggggcttctggggtgttggtcatgttctgtttcttaatcttgatgctagttacatgggtgtgtttagtttctgcagattgattcaggtggccacttatatgcacttttcttaatgtatgttttacttcaaccaagcggtttttaaaagccagtcattcagatttttaatatgtgtaatatgaatagtgaggatggtactacattttaattcagaaggtcctcttgcttttacccatgcttagttatagtgatcacatgcattgtataagtgtaaataggca

SEQ ID NO: 527745 - DNA, 649 bp, Homo sapiens
ctcagttatgtatgatatcattagtctgctttttcaggacaaaatctgtgtcacagtgttacagacaaaatctataacacagtgtcggcataataaattcagctcagtgaatgcttattaaacattaacgtaatccttgttgctttctttattcaaccctacagtgaaattttctgggtgcttggagtaactaaaatatatttgcagatatttaatttcaacttcttacacattaaacaagtagaaaaccatgtcttcaaaaacatattctttaaaagtgattgyttagggcaaaagtagtctatgattttagaattcattataatagttattcttagggtgggttcatgattggaatggaatatgtaggggcttctggggtgttggtcatgttctgtttcttaatcttgatgctagttacatgggtgtgtttagtttctgcagattgattcaggtggccacttatatgcacttttcttaatgtatgttttacttcaaccaagcggtttttaaaagccagtcattcagatttttaatatgtgtaatatgaatagtgaggatggtactacattttaattcagaaggtcctcttgcttttacccatgcttagttatagtgatcacatgcattgtataagtgtaaataggca

SEQ ID NO: 527746 - DNA, 623 bp, Homo sapiens
cacatgcaatagctcatataactctttaagcaaccctgtgaaacaggcagggcagttgttattgcacaatttacagatgtgcaaactgtggttctgcagagctgctacaaacactagagttggatctcaaacacacgtgcttgacctttttttgctttctggtttactgcaatgggcaagtcatagggtgaggagtgctatggtaagattaggttaaatgggaagagagagtcagcagagtttctgactatgcccaaatttgtacaaaaataagaagaaatggtgtttttttttttgaaaaaaagaaaaagtctgaataataaaatgatccatgaatttatggtgaggactagtaaaaaagtaaacttcatttaacaattatatttaagctaagctaggatgaagatgcacaagaaatatttaaawaagtaagacaaacatggcaaaaacaaaatcaacaaaagaaaaataaaaacaagaactgaaagacttatcaaggcatagccgagaggtctatgtggtttgtacttcccagccattacagtctctgcggattgtggcttacctgttgtaattcagggatctccatttattatgaagcacagcacctatgtacaatttac

SEQ ID NO: 527747 - DNA, 436 bp, Homo sapiens
aactactactgcaaagaacatatacttttaacaaagktagcttcatgtggtttgtgtgcatttttaaatatttaaaagtgatccatgctttatacgctgttctaaatgcttctgtaacatctcggatttatttcagtttgaacctttaatgtattgcttaagcaagtgggtgagggaagtgtgaaccctgcctgccttctctcagctctccctcactgaagatgggaacgcagccctcctcagtggcacctgggacccctggctgcagtggccaggtgacattcctgtggagaaaagcactttaggaccagtctgcagatgccctagcatgaatcttctgctttaccgtgaagcctgggagaaaacaaaggggaaaaatgtgagaagaactacgctgcccttcctgaatagaaacctgttgtgcagaggcacatgc

SEQ ID NO: 527748 - DNA, 598 bp, Homo sapiens
tctactgggcaggccaagcaacacagccaggaccaaggtctcgccggagccagcccaggactaagtgccacaacgcctctgtctccaggcggttcatttcttcaccttccaagaagggattcctaggtcaccatgaaaacatttgcagaaggactatgcatctttcattaaaaataaaaagttagcgcaagtcccagcttgagcctccactggtatttgtacaggggactaaggcgtttcctgggagagaatcattctaggggagaaggagcgagcctggaacataggggctgtaagtggagcacgtggactcctccttgggtcctagagagagaaggaaggctataagtgaatatagaaggctgtttcattaaaatacttataggaggccaacactttgggaggccaaggcgggtggatcacctgaggycaggagttcgagaccagcctggccaacatggtgaaaccccatctctactaaaaatacaaaaattagctgggcatggtggcaggcgcttgtaatcccagccactcgggaggctaaggcaggagaattgcttaaacccgggaggcagaggttgcagtgagccgagattga

SEQ ID NO: 527749 - DNA, 546 bp, Homo sapiens
gacattaggtcacactgatgcggggcagctgagccccatcatggagcttagcccacaaggcttcttggctttgcccaggaaagaattcaagggcaagccaaaagtaaaagaaaacagtcttagcgttacaactctgtgactgcccccgcagagcagggctacccagtaggcagagagtagcagctcagggcagggcaattttgcagccatatttatacacacgtttagctgcatgcagattaaggagtggtttatgcacgggaggggtagtaacttttggatsgttgggtgccgtggaaagaggcagtacctcccgagtgttgccatggcaacagtaaattgacctggtacactggtgggtgggtctgattgaatgctgctttcatcctggccctgtttcagctagtcctcaatctgatctggtgtccgagctccacctctggaggtgagtcctgcctcttacctcaacacctcaccaattttttttttttttactaatttggagattttaagagacttctcatgccttgaaaacctttgcatgtg

SEQ ID NO: 527750 - DNA, 587 bp, Homo sapiens
ctgcctgggactgagggcgagtctagcttctccaaaagtacgtggctgcccaataacagaaagaaatcaaggtttgttggaaaaataaaggagataaaatggctgctgagaaagtactggtgttggctgcagaggttcagagacctgttgattgagtgaagggatggatgggtggatgggtggatgggggctgtgggggatggtaggtacattatttccctgtccctattgccactgctcctgcccttgcaaagatcaccatcattatcacttgattattaaaatggctctacatgcatatcatcgtctaccaccatttttctccttctcaatatattatctacattgatgtgagaatcccttctaaaactcagattgaatcatggcatcagcctcttttaaaaaattattccataattwaaaaaaaacccaagtccttcatatgatagtcaagatccttcacaatttgattagaacgtgtccacctctaccttcctccacctacatggtcttcccaaacacacccaattagctttagctatgctatacaattaaagagtgtatatctccacacttgtggtcctctg

SEQ ID NO: 527751 - DNA, 586 bp, Homo sapiens
tcatacgtaacaaaattgcaaaataaagtttatcactaaaggtagaaaagtattgtgggtacatgtttatctaaatgctattttatccaggttcaagctcttgtaataggatttatactacttgtaaggagaattctatatttgagaattgtccttttgaaaaggtgaattttatcacatactaaccttttgctgccctgcacattttctgagatacttgaaaacatattttgacatttacatgttttgccagtacccattatgttcctgctttattaaagccattttattcacctgacagattaagattagaatattttaaaagttgaattttgaaagcaaaagtttgttctactgcagtagttcgcaagtgctggtctttgtatgactgcatctgagtcacttaagaaggctttttaaactctagattcctgggctgtaatccttggagattctsatgacttaccatttttggcatccattctttagaaatagttccagcaatcctattctgcccgttttcatttaatacacacactttgtttcttcatctttattttgtggcagatgggtttgactttgccag

SEQ ID NO: 527752 - DNA, 565 bp, Homo sapiens
gtcaggagagggttgcccagcagggtagcaggtgatctgtctcaagattttccaaccagccctgcccgcctgtctccaaaaccccctcattttatagagaccccatgtaggtttcctgtacccagccagggccaggtacaagcaccaggactgtgaaagcacatggtctgaacagctcagcagacctgcctcagcatgtggctgatttttgtcaacagctctagtgattggagctgtgcctttctcgtcctctaactggaagtgggatttttctatttctgaaaggactgggccagggaggaaggtcacagcgtggacagcacccagccagcctgggtggcagtgaaaatgttttctctgtcctaatttgaaaaaccgactgaaaaacagacctcctggctgactcagggccattatcactaattacattcatgaggcactaacctctgcctagaaaacttccgatggcagcaactccgagagcaacctgcacgttgagggagggagagaagcrgtcttgctgcagacctgcttgtgtctcagaggctacatttttctgggaggg

SEQ ID NO: 527753 - DNA, 551 bp, Homo sapiens
tgatggagtggagtgtttgatccctgatttattcccttccttcctctgagagcatattctgacttcaatttcatttactcaattattgaatcatccacaaatatgattaagcctctactagatgcttatcgctgggctgaacaggggagaaatgatgatgaaataagatggtaccaaccagcgaccctattccagtctttggaaacaccattctccccgtcttctaaactagaaaccacacaaccacacataagcctctttttacctgcccactgcccatctgcatggcagctctaagttctggcatcattgtgagccctgaggccccacyatatccaagcatatctctgtgtagacaaaatgacagacaagctgtaaggaaggaggttattactgagaaggtcacctgtgtttttgaagtttccaaagggcaacattagcattagcctcaccggtgcaatgtatttgggagcccagagatttgggtttatgagaactgttaaattgccacttcttcccaagacaaagtacctcatcaacttggctgaaac

SEQ ID NO: 527754 - DNA, 548 bp, Homo sapiens
cattttcttcctccacacctcttctcctccattcaatatagtgtacccattttaggtgtgcagtttgatgcattttaacccatgtcgccgtytggtgtggaatttgattttaccctactaatacttaaaaggtagcctattactgttacaggttgactatccctcatccaaaatgcttggggccagaagtgttttggatttcagatttttttcggattttggaatatttgtgttataccaaatgattgagcatcccaaatccaaaaattcaaaatccaaaattttccagtgaacatttcctttaagcatcatattggtgctcaaaaagtttcagattttggatttttggatttaggattctcaacttgtattactgggtgctgacataagatgggggactcctgagtgagagatgaaggaatttatttttcttgtcatagcacacagcatgagaattgctatatttgcatagtttccccttcccccaagtcccaagagggtgacatactatgaccaagatggatgctctctcagtggttctgtgttgc

SEQ ID NO: 527755 - DNA, 548 bp, Homo sapiens
cattttcttcctccacacctcttctcctccattcaatatagtgtacccattttaggtgtgcagtttgatgcattttaacccatgtcgccgtctggtgtggaatttgattttaccctactaatacttaaaaggtagcctattactrttacaggttgactatccctcatccaaaatgcttggggccagaagtgttttggatttcagatttttttcggattttggaatatttgtgttataccaaatgattgagcatcccaaatccaaaaattcaaaatccaaaattttccagtgaacatttcctttaagcatcatattggtgctcaaaaagtttcagattttggatttttggatttaggattctcaacttgtattactgggtgctgacataagatgggggactcctgagtgagagatgaaggaatttatttttcttgtcatagcacacagcatgagaattgctatatttgcatagtttccccttcccccaagtcccaagagggtgacatactatgaccaagatggatgctctctcagtggttctgtgttgc

SEQ ID NO: 527756 - DNA, 548 bp, Homo sapiens
cattttcttcctccacacctcttctcctccattcaatatagtgtacccattttaggtgtgcagtttgatgcattttaacccatgtcgccgtctggtgtggaatttgattttaccctactaatacttaaaaggtagcctattactgttacaggttgactatccctcatccaaaatgcttggggccagaagtgttttggatttcagatttttttcggattttggaatatttgtgttataccaaatgattgagcatcccaaatccaaaaattcaaaatccaaaattttccagtgaacatttcctttaagcatcatattggtgctcaaaaagtttcagattttggatttttggatttaggattctcaacttgtattactgggtgctgacataagatgggggactcctgagtgagagatgaaggaatttatttttcttgtcatagcacacagcatgagaattgctatatttgcatagtttccccttcccccaagtcccaagagggtgacatactatgrccaagatggatgctctctcagtggttctgtgttgc

SEQ ID NO: 527757 - DNA, 495 bp, Homo sapiens
ctgcagtgagctatgattatgccactgtactccatcccaggcagcagggtgagaccccatctcttaaaaaaaaattttccagaaaatctgcagatagactagtagaactaatatccagcaagattgttgaatataagatgaacacacaaaaatagatagactcttacttactggtaacagtcaattagaagaacaaaactccattcacatggttgcagygtgaggatgtaagttactatctagtgttctgtatttcatcagcatttcttgtaaggcaagtcttctagcgacagattttctgtttttgtttatctggggatgtcttaatttctctatcattataatttcaatgtcgtttggttttgttggatattgaggaaaggcatatgtggccacatggttttgaagtagagtaacaggtgctgacagtctttcttctggcacttggagtatgtcatctcgctgcctctcactccatgatgtctgatgagaaat

SEQ ID NO: 527758 - DNA, 488 bp, Homo sapiens
tggttctccctaatgttctcctccacaatgtgatataaaactagcattgaccctaagcttgacaaacagatgatagataggtaggtaggtaggtagatgatacatagatagatagayagatagaagatagatactgtggtagataatttttcatcagctttaattgccactcatgatagattgcagaaataaaaacaaatctattccttcatgatgtgcaacatctttgcagcttctcccttcaaaagatggaatttttcttcactcctagaatctgggctgccttaataacttgctttggccaataggatggtagcggacatgttgcaaacagagctgtgaaaagcattttcccatttagggcttgccttcttgctgctctgggaagctctgctgtgaggtgaacaagcccaagctagctactgaatgatgagagacatgttgcccaccacctgtccctgtcacccccagcagaggtacctaactgt

SEQ ID NO: 527759 - DNA, 488 bp, Homo sapiens
tggttctccctaatgttctcctccacaatgtgatataaaactagcattgaccctaagcttgacaaacagatgatagataggtaggtaggtaggtagatgatacatagatagatagatagatagaagatagatactgtggtagataatttttcatcagctttaattgccactcatgatagattgcagaaataaaaacaaatctattccttcatsatgtgcaacatctttgcagcttctcccttcaaaagatggaatttttcttcactcctagaatctgggctgccttaataacttgctttggccaataggatggtagcggacatgttgcaaacagagctgtgaaaagcattttcccatttagggcttgccttcttgctgctctgggaagctctgctgtgaggtgaacaagcccaagctagctactgaatgatgagagacatgttgcccaccacctgtccctgtcacccccagcagaggtacctaactgt

SEQ ID NO: 527760 - DNA, 537 bp, Homo sapiens
tactaccatgcctgcctgtgacccatgccagggccaaacaccaaaagacaccctctcaggtatgatggtctatgaggaaaagaacaggaagatccctaaagctcttgccactgagaactgtagcaatctatcttgccaccaccaccctcacaaactcctacagcctaggccactgaggsacacacaagcattgctgacattgattgctgctgaagaagttacacagagaccacactactatgctcacctggaaccaaaccaatgaaacttcctaaactaaggatccatcggcaccctaggatcaatctgcaggtgaaagtcttttcttacaaaagccactctataaaattgaaaaaggtgactcttccaccagatgcacaaatggtaaagcaggaacacaacaaacatgaaaaagcgagaaaacatgacaccaatacaagaacaaaataattttccaataactaactggagatttattaattgcctaaaaaattcaaaattataatcttaaggaaactcacttataagagaatacag

SEQ ID NO: 527761 - DNA, 537 bp, Homo sapiens
tactaccatgcctgcctgtgacccatgccagggccaaacaccaaaagacaccctctcaggtatgatggtctatgaggaaaagaacaggaagatccctaaagctcttgccactgagaactgtagcaatctatcttgccaccaccaccctcacaaactcctacagcctaggccactgaggcacacacaagcattgctgacattgattgctgctgaagaagttacacagagaccacactactatgctcacctggaaccaaaccaatgaaacttcctaaactaaggatccatcggcaccctaggatcaatctgcaggtgaaagtcttttcttacaaaagccactctataaaattgaaaaaggtgactcttccaccagatgcacaaatggtaaagcaggawcacaacaaacatgaaaaagcgagaaaacatgacaccaatacaagaacaaaataattttccaataactaactggagatttattaattgcctaaaaaattcaaaattataatcttaaggaaactcacttataagagaatacag

SEQ ID NO: 527762 - DNA, 537 bp, Homo sapiens
tactaccatgcctgcctgtgacccatgccagggccaaacaccaaaagacaccctctcaggtatgatggtctatgaggaaaagaacaggaagatccctaaagctcttgccactgagaactgtagcaatctatcttgccaccaccaccctcacaaactcctacagcctaggccactgaggcacacacaagcattgctgacattgattgctgctgaagaagttacacagagaccacactactatgctcacctggaaccaaaccaatgaaacttcctaaactaaggatccatcggcaccctaggatcaatctgcaggtgaaagtcttttcttacaaaagccactctataaaattgaaaaaggtgactcttccaccagatgcacaaatggtaaagcaggaacacaacaaacatgaaaaagcgagraaacatgacaccaatacaagaacaaaataattttccaataactaactggagatttattaattgcctaaaaaattcaaaattataatcttaaggaaactcacttataagagaatacag

SEQ ID NO: 527763 - DNA, 602 bp, Homo sapiens
tcaagcaatcccaccatcccagtctactgagtaactaggactacaggtctgtgtgccactatgcctggataattatttaaaaactttttgtagagatggggtcctcaccatgatgtctaggctggtctcaaactcctggcctcaagcaatcctcctaccttggcctcccgaagtactgggattacaagtatgagccaccacacccagccaagttatacttttttttttttttttttycagcataaaaagacattgaaggccgggtatggttgcctgtaatcccagcactttgggaagctgaggtgggtggatcacctaaggtcaggagttcaagaccagcctggccaacatggtgaaacccgtctctactaaaaaaaaaaaaatacacaaattagccaggtgtggtagcgcacgcctgtaatcccagctacttgggaggctgagacaggagaatcgcttgaacctgggaggcagaggttacagtgagccaagatcgtgccattgcactccagtctgggtgacaagagcgaaactccatctcaaaaaaaaaaaagagctggtggtggtgcaaatgcctctaatcccagccttttggaggttgc

SEQ ID NO: 527764 - DNA, 520 bp, Homo sapiens
  misc_feature (1)...(520): n = A,T,C or G
gctgggactacaggggccgccaccacgcccggctattnttttttttttttttttttttttggatttttagtagagatggggtttcaccgtgttagccaggatggtctcgatctcctgacctcttgatctgcctgcctcagcctcccaaagtgctgggattacaggcgtgagccaccacgcccggccctgtctgctattcttaacagctctttccacagaatttatttgagtcaagtttccattttcttcagtcactggctttatcaatgtgcaaagccatttaaaattaattaaattgattsttatctgcaaactggtgctggataatgcttttgtagttgccaaaggagctttcccaaaggcacgttaatgatatattagttttccactgtctttttctttttgttggttccatattctaggccttccactccccagaataataagtgtggctgttattattacacgcaaggtagcaaaatgttccatcctcccagagagatagaatccccattaggct

SEQ ID NO: 527765 - DNA, 448 bp, Homo sapiens
ccacggagggtgcaaaacagtggccyagcttggccagcagcactccattccgaaggctctcctccagctccaccggggaaggaagctcctccttcaggcaggcctccatccagctatgaacatgagaacaccttctcacgcactctggcagaccacagtgatttattctaacaacaggaacttccctctgtccctccttttaagtggcccctgaccctcctctgcttcctgttcctgctctacctccaactcccttctctgcccattgcctggctgttcccaccttctcctaggttgccccaaatatctggactggccaaccctcagccccacccaccccagcaaatcttccttgacagatcctgaacctgcccatcttcagtgaggcttaactgttacatagcttctcactcagtctagttacatgctttttttttttttttttttt

SEQ ID NO: 527766 - DNA, 448 bp, Homo sapiens
ccacggagggtgcaaaacagtggcctagcttggccagcagcactccattccgaaggctctcctccagctccaccggggaaggaagctcctccttcaggcaggcctccatccagctatgaacatgagarcaccttctcacgcactctggcagaccacagtgatttattctaacaacaggaacttccctctgtccctccttttaagtggcccctgaccctcctctgcttcctgttcctgctctacctccaactcccttctctgcccattgcctggctgttcccaccttctcctaggttgccccaaatatctggactggccaaccctcagccccacccaccccagcaaatcttccttgacagatcctgaacctgcccatcttcagtgaggcttaactgttacatagcttctcactcagtctagttacatgctttttttttttttttttttt

SEQ ID NO: 527767 - DNA, 448 bp, Homo sapiens
ccacggagggtgcaaaacagtggcctagcttggccagcagcactccattccgaaggctctcctccagctccaccggggaaggaagctcctccttcaggcaggcctccatccagctatgaacatgagaacaccttctcacgcactctggcagaccacagtgatttattctaacaacaggaacttccctctgtccctccttttaagtggcccctgaccctcctctgcttcctgttcctgctctacctccaactcccytctctgcccattgcctggctgttcccaccttctcctaggttgccccaaatatctggactggccaaccctcagccccacccaccccagcaaatcttccttgacagatcctgaacctgcccatcttcagtgaggcttaactgttacatagcttctcactcagtctagttacatgctttttttttttttttttttt

SEQ ID NO: 527768 - DNA, 448 bp, Homo sapiens
ccacggagggtgcaaaacagtggcctagcttggccagcagcactccattccgaaggctctcctccagctccaccggggaaggaagctcctccttcaggcaggcctccatccagctatgaacatgagaacaccttctcacgcactctggcagaccacagtgatttattctaacaacaggaacttccctctgtccctccttttaagtggcccctgaccctcctctgcttcctgttcctgctctacctccaactcccttctctgcccattgcctggctgttcccaccttctcctaggttgccccaaatatctggactggccaaccctcagccccacccaccccarcaaatcttccttgacagatcctgaacctgcccatcttcagtgaggcttaactgttacatagcttctcactcagtctagttacatgctttttttttttttttttttt

SEQ ID NO: 527769 - DNA, 568 bp, Homo sapiens
gctggtaaggggcagaactaggagttgaaccagttagttctggactatgccaagttcagagatccttgtgccacactaacaaggagtatacagtagatcaggcttcaaggttgtccaagtgtgagagggatactttatcagtcaggataggttatattgcagacacagtactcaaaatcactgtagtttaacaaaacagagttactatctattcacacaaagtccactcgtgctggacaaaaccttagggcagcttagccgtctaggctgctttgatctgctagcactcctcaacacgtgcttctgcaattcccacaacagggaaagagtgtttgaagaatcaggcactagctgcatttcagaagggacacacattacttcccattataggctactgcccagaactagcccaataaccccacttgactatacagggactgggatgcacggccttttgtgtgtccaggaagggaagagaacaggaaatatgtgtgggcraaactaatgcctacccaagacatcatggaatgatgcctataaggaaggaggtacaggccaggccagtctg

SEQ ID NO: 527770 - DNA, 654 bp, Homo sapiens
tgcccagttcttcagagggagtgggtggaggcgaatttggcttgagaggaagaagacattaagtcctcatctgaggtctgggttcccagggacccattcatctggccgcccaggagcccctacccccaagagaaaccttcggatactgaactgcagaaatgtcacatattcacagaccaccccatccccagggacagagaagaaaggacactgaaacatccacacatggtaatcaaaagccaggtttgcctttatgaggcagagggcaaaactggtgaatattgcaccgtgaattgcaggggccctcacccccaccccgtgtttaatggtggccaagcccagcctagaaaggtgggcagactaatgktgggaatagcctgagaagggaaggccattcattcatttattgagcacctatcattcaactattcacccattcagcatttattgagtgcctactatgtgccaggcactgggcgaggctctggggacgcatgcatgaacaagattacaccctggcttctttcaagccctggatcgaggctcatcagtttttgaaactccgtctagaagcctgcaggagaggtgggaaggctggacgtgctgtccccacccagtcagcggattggggttaagagtgagtaagtgatcact

SEQ ID NO: 527771 - DNA, 558 bp, Homo sapiens
aagtaagagaggcatcaagcataacaccaaggtgtttgacctgtacaatgttgatgtcacaacaaagataggaactacaggtggagtaaatttttggtgggggaagatgagaagttcaagtcttgtcttattagacttgagatgtctattgggcatccaaatgcagatgtggagctggcgctagcaggtaagaaccttgagtttaagagaaagctaaaaatgtaaatgaataaggcatgaatatttaacaacgagtgagtgtataaatggaagataggggaaccaaggccctccaacaagacgaggaatgagaaggtagctggttggggcaaaaatgtcaagagaaggattttgtaagagcctgacaaaaatgatccatcgaaaagggtaggagagtggtgatctaggaaagatgggragaattgggagagtgatttccctgagaatgtgaaggaggatgaaagagatcagctctggataggaagatggataattcagtatatgagtacagatgctggtgggtgggtagatgtgctggcaagtctatggttcctttct

SEQ ID NO: 527772 - DNA, 582 bp, Homo sapiens
ccatatttgcaggaagcaatttgtgcctaaaggagcagcacagaagagagtcgttagggtgtgaagctggaatacagccctggttccccattaaccctccccaacacacaaaaataaatccctgaaattgctgatccagaaaaatccaactcaataattgatagataaataagtttcctaccactgccataacgaataccttaagtattcgtgtggcttaaaataacaaaaattaattgtctcacagttctggagcctgaaagtctsagatcaagatgttggcagggctgtgttccctctgaaacctatgaaggaatcctttcttacctttcttactttctggtggccccagcatgctttggtttatggcagcatacttccaattctcaatctttagatggcatttcccctgcgaatcatcccatcatcttccctatgcatttttgtctctgtgcccaaatttctccattttttaacttttattttaggttcggggtacatgtgacatgtgcaggctttgttatataggtaaactaatggcacaggtcttgttttactgactatttcatcacccaggtactc

SEQ ID NO: 527773 - DNA, 620 bp, Homo sapiens
aggatgttattattatggtttataaagagaattcccatttcccaagaggtgtcctctaaaactgcctgttcagcaaagtgggtattttataaccaaatggatggacttgggctattatagagaatgggcaagcaggttatttttaaaaaatatctgtggaataaaatgttttagctcaggccaagctattcaagtcatgttcaataccttaaattccaatcaagtctataaaagagagttcgatttgaaaacctctgccagaattagttgtattttgaaggtccttgtatgcaaacgataaaataggacaagaacacacaggagaagagaaggagaaaagccacatataagagaaaatgtggtaaggttatgtgtaagttattaggctttaatcttattttataattaagcatttggtgaaacatttgataagacatcaaatgtaattatgaaaaggtaaaatagcagacwataatccattaaggatgcctaaatcagacttgttaaattagttatttccagaatctgcttatcttgcatatgaggatttaaaaaagctgggtggtgggcagattagtagattctaatagtttaccatgcaggctgtgatgattagtttg

SEQ ID NO: 527774 - DNA, 541 bp, Homo sapiens
tccccttccctacatctctacaccctttgtctggcaaaatattcatcaagggcatcaccttgtataagaaatggggcctctcccatttactctcaaaagatctgtgcctgcctctaccaccaacttcatcacactatatagatctgtttaggtgttgcctgtcttgctccattagttaaaaagctatttgagagcagggaaggtgtcgttcatttttctagccccatcatttaacatagtacctggcacaaagtaagggtttaagaaatgttaagtgaacatgtgagtatcactgaaattgtttatcagttaattaggagaggaagaagcaggggaagagaaggggaaagagtttttatcttgagttgttaagaaagtttartaaagagtggatctctgctgggtgtggagaaggaacagcagacaaggggaagacgagatgagatatacatgactttcaggcagtgaggataatgagcctgaggcgctgaagcctcagggccgcatttctcagcagggttgcttttgatgtgtgcctgct

SEQ ID NO: 527775 - DNA, 563 bp, Homo sapiens
ctctccctgttctggttccgatccctcagccctgtattccctaccacagcattcatgatgctgacttcttatttgtccccacactaggctgtgacctctgtaaggccaaggactgtaactccatctgtatttgctctggggcctagaacatcactttccaaataatgaatggccatggtttgaatgtaccccccaaagttcaygtgctaaaactgtgatccccaatatggcagtgatgggcggtggggcctaataggggatgtttggaacatgggagcaccaccctcatgaacagactaatgctgttattgcaggagtgggtttattattgtgcgattgggttcactcctcttgccctctctttgcccttctgtcatgggatgacacagcaagaaggctcatgaaagataccggcctcttgatttggacttccctgcctccagagccacaaccaataaatctttatttattataaatacccagtctgtggtattctgttatagcaacatggatgtgagggcaatctggctgtgacatctgtcaccccactggtcaccaggttt

SEQ ID NO: 527776 - DNA, 653 bp, Homo sapiens
acaaccatatgcaacccctaagcatcagcctcatgtttctggcttgactcaaaycatttcagatatcgggaaaatcacaggcttttgtcaatccgatacagaccattatcaagcttgcattagggctaggctctgtgaaaagggttgtggggtagaaagatgaaggacattgtgccggccctcccaagggctttctatgagctgtggccacatacacaagtgaccgcacacaaaatccttcaaggctgacagtaatgacttctccatgagaggtaccaagtatcagggaacagtgaaatccctgggatgaggggatctggaagacagcttcctaagggtggtaggatttgagcttagccttcaggcataggcaggaccaccaaggctaaagcacatgctagacagaggggctagacgggggagcaaaggcctagagacctgaggctagggggattaagagttgggaggctgggcacggggactcatgcctgtaatctcagcactttgggaggccgaggcgggtggatcacaaggtcaggagttcgagaccagcctggtcaatatggtgaaaccccgtctctacgaaaaaatacaaaaattagccgggcatggtggcaggtgcctgtagtcccaggtactcaggaggctgcggc

SEQ ID NO: 527777 - DNA, 497 bp, Homo sapiens
tgatgttccctattaaatgacagtggggagtcttagaagtattcgggaggcctacgttcaccgctaacatccttgttgtgaaggcctgctgacgtttgccattccaggaccaagtggacaatgagttaagctaggccaggagggggttcagctccccataacaaggcaggggtggccctttgtgtccggcagcatggtagcccccccgcaggagctccggctaccctttgtgtttgaccttgtggaagggcatgggaaatgctggcctgtcagcaggcataaactcaaaagtttctccttcagctaatttcagggactgtctagccaagtgaatacacaggattaggtaatccatggatcctgcgagggcaattggctgattggcttaggtgtgcccaagagccctgcaggtgtcagaacaaatccatgtagaaatgcagacgcccacaccrgcttgaatggcataaaggcacacattggaatgtggctcatgagct

SEQ ID NO: 527778 - DNA, 553 bp, Homo sapiens
cctcaccaggagatttggctacagaaatgaataacccaatttttaatctattcagctagtctcaccactgctacccaaagagctacctgagagtcttggagacacaactgaacaccaatgataatctcttagattatagctggggatattaccaaagatgtgatttacccagaaggattaactctagtgaagcagctagatcaggaaggttactggggtccgagtttggactatgccctgcttggaatgagaatatggtcagaaatcttgtactgttaatagaatgactgctccactggccaaaccatcagagcacagcagaagtcccaaactcccttgctcatgtggtcctagacaactacattgttttygactgtcttcttgctgtacagggtgatgtttgtgctgttgctaacatttgctgctgcacctgggtaaatacatctagttagattgaattggacacatctaagatcctaaagttagctaaatctctgaatgggacaccttcaaaaagcctcctggctggacttcctggcttgaatttacaatt

SEQ ID NO: 527779 - DNA, 627 bp, Homo sapiens
gcgcccagggagcatgaggctcctgccctgccaactcaggagcgggctggccttccacctgtttctggctccctccggctccatggagcatgcaaccctggccacacctccccagtgaagccagtgtcatggcagcagccactctagatgggccatggctgccatcattagggctttactatacacatgttaaaaagtaattaaacgtggtttctaccctcctgacattaaaaactgatcaattccagatggattatagatatagttgtggaagacaaaacaatcaaacttttagaaaaaagtcaaagrcattattttcaggttttccaagttgggaaatgtgatacaaaactattcagtttaaataaaaaatcaatacctttaactattaaaattgaggactgctatttatccaaagatacaatgaagagactgaaaggcaaagattaaaaaaagactaaagatttaaaaaattaaatatgtatacacacatgaatggaatatgtgaaaaagtctccaagtaaagaaaaaaggacaattcactagaaatagaagaaaagtcttaaacagtctcatcccaaagaagatatcctaatgaacagtggacatgaacaggggctcaacttc

SEQ ID NO: 527780 - DNA, 627 bp, Homo sapiens
gcgcccagggagcatgaggctcctgccctgccaactcaggagcgggctggccttccacctgtttctggctccctccggctccatggagcatgcaaccctggccacacctccccagtgaagccagtgtcatggcagcagccactctagatgggccatggctgccatcattagggctttactatacacatgttaaaaagtaattaaacgtggtttctaccctcctgacattaaaaactgatcaattccagatggattatagatatagttgtggaagacaaaacaatcaaacttttagaaaaaagtcaaagacattattttcaggttttccaagttgggaaatgtgatacaaaactattcagtttaaataaaaaatcaatacctttaactattaaaattgagractgctatttatccaaagatacaatgaagagactgaaaggcaaagattaaaaaaagactaaagatttaaaaaattaaatatgtatacacacatgaatggaatatgtgaaaaagtctccaagtaaagaaaaaaggacaattcactagaaatagaagaaaagtcttaaacagtctcatcccaaagaagatatcctaatgaacagtggacatgaacaggggctcaacttc

SEQ ID NO: 527781 - DNA, 270 bp, Homo sapiens
gctgctataacaacaccccctatattgttggggctccatcaagtaaaarttactttccactcatataaaagtccaatatgggtttgtaaagtctttgttccacatagtcatgaagacacacagtccttccttcctatggtctcactatctctgagtgctgtgccttatgaatccaagcacaagaacagggaaatagactgaatatagagaaggtgtccctgcacttatccacttggaacaagaaatggcatgtatcccctcagttcttat

SEQ ID NO: 527782 - DNA, 270 bp, Homo sapiens
gctgctataacaacaccccctatattgttggggctccatcaagtaaaagttactttccactcatataaaagtccaatatgggtttgtaaagtctttgttccacatagtcatgaagacacacagtccttccttcctatggtctcactatctctgagtgctgtgccttatraatccaagcacaagaacagggaaatagactgaatatagagaaggtgtccctgcacttatccacttggaacaagaaatggcatgtatcccctcagttcttat

SEQ ID NO: 527783 - DNA, 571 bp, Homo sapiens
ttcatccactaagtagcatcaagtcaattttcataggattggatccaccaaacttgccatattcagattaaactcaacatttcagggcacaaagaacagaggaactcaaggaagccgactcaccaggttctccaaggcagatcagtgctcaggtaccaggggtttaagagtcgtgcagcagaggatctctttatagagcctgctaccccacccagcaggaagtgaaactacccaaaacaatgctgatccagtaatttcttaagccagatgcaaatttatccatgactggcatgagcaggatactcaaaataggaaatatcctgttctgaaatctctcctctgggttaagctctcctgactcacagaagccatgccttggatctcagtttcagtgacttatggcaaagagggacttgggggaatctctaactgatggtcaagggatctctttcttaattgggaacaaagatattttcctgtcttayaccttccctaaatcataaaacttctgccctcattcactttacctgaatgccttattgttgtacatgaactcaactgtacctctact

SEQ ID NO: 527784 - DNA, 652 bp, Homo sapiens
agaatgctggagctcttagcaacagaggaagctatggattaggtaaactcttgcatgatcatcttacatgatccctggaagaaaatagcatgagtaggacatcacaacctgttctcatttctttgctcagttagtaggtaaaagtcaagtcattatccattaaaacttatcaactgatggaacacaatgggcacccgaaaacagagaacccaaaacaaattaaaaagatgaaaataaaatgtgttgaagtttgtaaaattatrcaggattttagaaataaattaatgtttgtactttatatgtgcataaataaatcaattaaaagtttttcagttttttttgagacagggtctcactctgtgctgatgtcaattccctggtctcagttattgtacttgataatacatgggagggcataatctactgaaattacttaaaataagaaacagaaaaacaaaaggaaaatctaagtttccaaattagaagaatggaagaaatattcagcaaaaaaattggaaaataattgttgagtactgcttcaaaaaagaatagacaagagaagatactgttaattcaactaaaaattggcactagctctgtgaaaattaactctgtgctcataaataaatgataacatcccctagattcagac

SEQ ID NO: 527785 - DNA, 621 bp, Homo sapiens
tttacagattgactctgtaaagatattccttcatattttgtgttatatccattctccaaataactgagaatacattgtcctaaagaccataaaatgattaaaaggtagattagraacatgaatttgatcaaaatagtatattaaaataattttttgaatatttaaataagactgcatcagtacacaaaaatgacgtatcactgaaggaaaactaaagctactactaaatgtttgtacaaaaaggtcagtattcaatgttacttatctttagtttttatgataaaatatgtttaaattatataggtattctcataaggttcctatatttatttctcatgtgattttcatgaaggtctcataacagaaaagatctagtttggtgtttttgcatgaacaactcttcctttggtaccatctctgtcatataagacaatgtaatcatttgtttgctcttctctctccattctttgcaagttttatgcacatattgttgtaaagaggtttgcttactgaggcatgggactgttggcaaccacccatcttgtgtgcagtgaatgtaatcccagtaacttcctgaaggagtcacaaaattttggtcacagtaataggagtaagattgtc

SEQ ID NO: 527786 - DNA, 539 bp, Homo sapiens
ggagcctagtgcacagtgaggagaagcagaggggaggctgtggaaggaggggctcaggtccatccttcctgggggacaggcagagtgaatcctcacaccccctcctgttctttaactcttgagggcccagcacagtggggaggagcactaggacagacagacagacaagggctagcccaactgccttggggaggccagtaactgagctggaagaaggccaccaccccctcccccaacccatccccacccctgccrggctgagcaccaagactaattaaactggatttgctcagccaggccctggaggggacagctccgagcattccagatgggctctatttgtcaatttgaaaactaatctctgactatttaaacagaagcttatctgggtccagaccaggattagcatttggcaccttggctgaagagggtgggtggcactccccaggtgttaggaaaggatttgagggtgaatttctttctagaaagaagaagagctcagagcttctgctcccagcccaccagccctgaaggcaacc

SEQ ID NO: 527787 - DNA, 598 bp, Homo sapiens
ctaggggttataggctttctggggcatgygtgtttcctcgacagcagctttaaagatgcccaacgctgggtgtcaactgcctgctgggtgtcagaagaaactcctgatgttttccttgttgcactgaagcctccataatggtatgagatggggattatgaacctcatctacagaggaggggaatgactcctgggcctcttgctccagggcacacaacgtgaaagggcagaagcagaactcaaaccctcaaatgagccttttaagtgcggtgtaaaggagcttcctttgtgaggagccagggatagaggctgccattcaggcctggcacccccgatggggcccaactggaggatgggacttgagcccctcaaggcctcgagaacactccggctcagcgtgtctcctcctgcaccccttaaatcacctggaccctgaggggtcatgtgtcaaagccccacagaatgcctcctccagtcaccagaaatgctttctgggatgacataattgccttttacacaaagcgccagctcaaatcagtttttggtttccgctgtggcacccttggagcgggtggtaggcgatttcactgtttattttc

SEQ ID NO: 527788 - DNA, 569 bp, Homo sapiens
ttcattccaatgttacagagaaaaatcccaaggaccacagaggttaagtaacaccacagaggttaagtgattatggaatcataattagagacccaataacattttgactcctaggctgtagccctttccttcatcccaggtttttgtttgtttgtttgtttaatmccatcctttcaccctcaagatgagtttgtctttatgcatagaatagataaggcacaaagctcgtggggcaaacactggctgccttctcaatagccattctccttgggggagattgcagccatgaccccaattcttcacctctccttataaccacaccctttgccatgtaactttgcagggccctccaattgggctcacccatgtgaattgttttggccagtgggatgttggcaggtaccatgcaggcaaacagttgaaatggaattgtacattgggtttgctctctcgcccctctgcaattgtcatgacaatgtgcctcggctatcctgctggaggatgagagacaggtggagagctgaatatacctgcatttcagtcaaggccagcctagatcaaccaacagc

SEQ ID NO: 527789 - DNA, 641 bp, Homo sapiens
caaagcgcttctgcattcattaccctatttaaccatctcccaatcctagaaggcatatagaacaaggattttcattccaatgttacagagaaaaatcccaaggaccacagaggttaagtaacaccacagaggttaagtgattatggaatcataattagagacccaataacattttgactcctaggctgtagccctttccttcatcccaggtttttgtttgtttgtttgtttaataccatcctttcaccctcaagatgagtttgtctttatgcatagaatagataaggcacaaagctcgtggggcaaacactggctgccttctcaatagccattcyccttgggggagattgcagccatgaccccaattcttcacctctccttataaccacaccctttgccatgtaactttgcagggccctccaattgggctcacccatgtgaattgttttggccagtgggatgttggcaggtaccatgcaggcaaacagttgaaatggaattgtacattgggtttgctctctcgcccctctgcaattgtcatgacaatgtgcctcggctatcctgctggaggatgagagacaggtggagagctgaatatacctgcatttcagtcaaggccagcctagatcaaccaacagcca

SEQ ID NO: 527790 - DNA, 617 bp, Homo sapiens
atttgacctcagacacacaagctccatgtgccttactccatgtccttactacagatctgggggatgatcttgttagcacatgatcattctcaaatactactgaaggatgattatgatggtctgcgtgacctttaacactgcttaacctctgaacgatatctcgattcacagggttccatgaggatcgggtgagatgctgcacacacagccctcagagatagcggggtacgtaaagagctcttgataaatggcagctagtgctatttttattaccatatttcattgatttcaaatcacacttttttttttcacattttaacatccctgaaattgagatgggtcttgcagtagatgataagaaagcactgtgtcatagtataatgggtggcattttttttctttcttagggaagtacataaaattatgtatattactgtcgatgtgtcttagattttatgaaatcaaagcagaccaaggcaggagaaggagtttccactgaggacctggccctgctttgtcctgagggtgtctcacctgccctgctcctattgtaggacaaatccctcgggtcacctggggtccagtggctcmttccctcccacctctctcctttcccc

SEQ ID NO: 527791 - DNA, 511 bp, Homo sapiens
agggtggcccactgcctggggcttgaaggcctcagcaaagggttcctagcacaaagcatcagggggcsgggtgggagggtcaagggcctggaggaatcagccgtgcagattgaaggccaggtaggggtgggtctcctgaactcctttctcaaacactgatgtgttggatacagcatgctctgggcagccagagagcaaagacaagagatctcagagtacagaaagaaaacgtggttattgggagaaagggctaagagactgagggccctagggagtggaagacccagagcagtgggagtttggccagattgactcgggcagaggacggagggaccttgggttcagcgtgaaggtgggagaaattagtgggaagccgtggtgtttgtcgctttaagtagttaatattttcccaaatgttaatccaatttgaggttattaggcaaagtgccgagaaaggttgcacatcagagttattccagtaaatctccgtgctctggatgtggggaaagat

SEQ ID NO: 527792 - DNA, 462 bp, Homo sapiens
catcagggggccgggtgggagggtcaagggcctggaggaatcagccgtgcagattgaaggccaggtaggggtgggtctcctgaactcctttctcaaacactgatgtgttggatacagcatgctctgggcagccagagagcaaagacaagagatctcagagtacagaaagaaaacgtggttattgggagaaagggctaagagactgagggccctagggagtggaagacccagagcagtgggagtttggccagrttgactcgggcagaggacggagggaccttgggttcagcgtgaaggtgggagaaattagtgggaagccgtggtgtttgtcgctttaagtagttaatattttcccaaatgttaatccaatttgaggttattaggcaaagtgccgagaaaggttgcacatcagagttattccagtaaatctccgtgctctggatgtggggaaagatatataca

SEQ ID NO: 527793 - DNA, 511 bp, Homo sapiens
agggtggcccactgcctggggcttgaaggcctcagcaaagggttcctagcacaaagcatcagggggccgggtgggagggtcaagggcctggaggaatcagccgtgcagattgaaggccaggtaggggtgggtctcctgaactcctttctcaaacactgatgtgttggatacagcatgctctgggcagccagagagcaaagacaagagatctcagagtacagaaagaaaacgtggttattgggagaaagggctaagagactgagggccctagggagtggaagacccagagcagtgggagtttggccagattgactcgggcagaggacggagggaccttgggttcagcgtgaaggtgggagaaattagtgggaagccgtggtgtttgtcgytttaagtagttaatattttcccaaatgttaatccaatttgaggttattaggcaaagtgccgagaaaggttgcacatcagagttattccagtaaatctccgtgctctggatgtggggaaagat

SEQ ID NO: 527794 - DNA, 655 bp, Homo sapiens
ccagtcttcttatcctcttcccaaatttttcagattcttgagaaagataatctgattagcccagatactcactttcatctctatctgaatgaatttagtggaatctctctgaaacttcatttccccatctgtaaaatggggataatgccacccacttatttcatagccctattgtgagaactgaatagataatgagtgtgtagcagttagtagatgcctggcaaataattctcaacacatgtcaagtccttcctttcctttccctcaaggccatgtatagtgccctttttccggatcagtggcattgtaggtacttagcaactatttgytgttgtttaataaaaattatatatgtatgtgtgtgcctttatgtgtatgtgtgtgtgtatatatatatgtatacaacacatatatataacacatatacatacacacaaacagagagagagaaaaagagagagagagagacatatacacagagagagaaaggggagaaataaacatttacttaatacatagccagctatttgaaattaggcatttggagaaataatacagatgcaaaataaaaactatgaacacttgctatttttgagcattggaatattttgtctgtattcaaatttcttgtacttatcatactctcaagctgaag

SEQ ID NO: 527795 - DNA, 599 bp, Homo sapiens
tcccccctggccgccccctgccttttgcgatctctaaggactgcattcaacatggatttctaaggaattaaaaaatccaacgctcctggccattcttaattcccacacctcttcccaagttacgccaccggtcgaggacggcaggagacccccgagtgcagagaaagctcaaaccggcagcgaagtcggtcctagccaagctgaaaaaacgtctcggatttcgcggacagcggcctagacacagcccgatcttccagtcctagtgccctggtcgagacggttctatccttttgcaaagaagccggaaagagctgggtcccgggggcgggggacagactragaggccaagcaggccagtcgtgacgacagccaggcccttagaagtctccaaacctgaaagtttaggttagggggcccacagcctgttaagatttcttgttgttgttttcgcgaggcccgggagaatcagctctcccaccttgcggcaagaaaagatgacttgtcaggcctctgaaacgccgaattctctgccggactgcggaggggcccagggaaatctagtctttattattacagttggaagtgttctggtgctgaag

SEQ ID NO: 527796 - DNA, 562 bp, Homo sapiens
tccagccctcgctactccggagagcyacccagttcttggcggtgactaggacttttttccaaagccccaagatcctcagcagggactgacagacaggacagtgagaaatggtggggccaagtgggagcagcagggctttgtcttgctttcatgtgcactcccttggccctttagtccgcaggcctcaggccaaaaagctaaatcttgggagccagatgagtcctacacagagaattctttcctgttctttctggtctcaggaaccccagttttaccaggttcaccctctaaatgtgactctatctcccgcttcatgctgggtttgcaggtgcttggctaagtagagttctccctttattttttccactgagaggaagaattatctaaagcttatgagggaagaagcaccgggccctgcagtctatctctgtagcaaccctggaacataaagggggtacctgaggtttctgccgggtggtggtggggaggctgaggttggcagaaaggagggaggggagaggggcctctagcactgaaatctgttggggcacaaggaccagca

SEQ ID NO: 527797 - DNA, 572 bp, Homo sapiens
ctgcacatgaagcagatttgaaaaggcaaaaagtgattgagcttactggcactgccaggtaaaatgtgaatatgttttatttaccttcccacttcaatatcagtggtatctgagttttgaaatcagataatgttcagtggagcatttgcttgaggaattaatgtctccatagtctgtgttcctattgcattttgtttgtatttccttcatatctctcattatgctttttwctgtattacagtttaatgcttttaaccttcctactataagtttcttaaggcaaggatcatacctggtttattttagggtcttacacaacaactggcacagttccttatacctcataggcactcagcaactgttaattgtgaataacattaaaagttgtaggcaaaaatgtaaatgtactcacatagaggaaactttcaggcaatccaattatataggggaagaatgacaatataaaagtggttctcagccttgagtgaatattaaaatcacctcaagagcttgtaaaaaaacatactgatgactgggtcccacttttagattaaataaaacctaaagattct

SEQ ID NO: 527798 - DNA, 612 bp, Homo sapiens
ctggttccaccagttattagctgcgtgaccttgggcaagttactgcaacttgctggccctcagtttccttcttggtggaatgggaataaaggttgtaactacycctataagattgttggtggaattaaaggattaatgcaggctgcccattatgtctgtaatcccagtgctttgggagacctaggcaggaggattcctggagcctaggaatttgagggatcccaggaatctgagccatgatggcaccaatgcactccagcctgggtgacagatcaagaccctgactcttaaatttttaaaaaaggggttaatgtatataaagcacttagaacagaatctgatgcaatgacacaaagtaagcactcagaaaatattagctattcctatttcagccataacaaacaggccatttattatgctagcctcacctagaggttcttgtaagggaaattccctggcccacaacttctgaaggggcaactacaggtcgcctattttgtgcaaagattctgtacattttaggcatacctgattggacaaggtgtgcaagctcaagcaataggttagccactgatctatgactttgccagtcaaggaacagtgaccttataa

SEQ ID NO: 527799 - DNA, 612 bp, Homo sapiens
ctggttccaccagttattagctgcgtgaccttgggcaagttactgcaacttgctggccctcagtttccttcttggtggaatgggaataaaggttgtaactactcctataagattgttggtggaattaaaggattaatgcaggctgcccattatgtctgtaatcccagtgctttgggagacctaggcaggaggattcctggagcctaggaatttgagggatcccaggaatctgagccatgatggcaccaatgcactccagcctgggtgacagatcaagaccctgactcttaaatttttaaaaaaggggttaatgtatataaarcacttagaacagaatctgatgcaatgacacaaagtaagcactcagaaaatattagctattcctatttcagccataacaaacaggccatttattatgctagcctcacctagaggttcttgtaagggaaattccctggcccacaacttctgaaggggcaactacaggtcgcctattttgtgcaaagattctgtacattttaggcatacctgattggacaaggtgtgcaagctcaagcaataggttagccactgatctatgactttgccagtcaaggaacagtgaccttataa

SEQ ID NO: 527800 - DNA, 610 bp, Homo sapiens
gctgtttttaagaatgcaggaagtacattgaccccccatatataatcaataatagtatctaacatagatctatttagtgtaattatgttaaaaaacagattttctctttttgaatattaattattaaacaaaaaattatgatctccaatgtcaacacatgctaatatgcccattatcattgataacatattacatgtcgagtaatatggtaagttctggacacataggtaaacaaaacaagatgtggtccctgcccttaaagagcttacagcccagtaaaggagactgcttactaattcaacaaatctaaacttttcattatgattagtgccataaaagagagttacatggtgcttgagactgggcaagaggtcacggtcagaggtttcatggctaagctgaggaaggaagaatatcagtttattcagtgataagaagacagaagggttttccagactgaagaagagcacgtgcaaaggtccattcayaggagggaaggggcatgatatatgtgtaggactgaaagaaagccagtgatgctaaagaaatgagagcaggctcagggaaggttaaagagggagatggcccagaccactcaggaccttgtaat

SEQ ID NO: 527801 - DNA, 312 bp, Homo sapiens
tggtggtgtcggagggaagtctggacagaccagtggtggggctcgggtgggaggcactgggggggctggagtggaaagaatgtggccacagatgacagcttcacagcagaattcagtgctaagaggaagtgagtggccatgagttccatggtgacagaaagtctaagacacccagcaaggcaggagtgggtgtcaactcagggaagcccagaggctaatcctaggtgagagctgagggtgtcagataagagcaaggcaaggctccggttctggagyagtgaaggacatagcagagctatgacccaggaacaa

SEQ ID NO: 527802 - DNA, 579 bp, Homo sapiens
tctcttcctccctctctacatccctctctctcttccttcyttcctcgacacttaccatgtaccagaccttctgccaggcacatggatgggagcacaggggaagttggctgcagggttagaactaagtcccaagccccctaaagctcatgccaggggactggactgtccagtactgagggatggggatgctgaggctggtggccttcctcaaatgcactgtagtgccccaggcagagtcctgggctgccctgtgaggaggtgaccagaggtagagcaacttcaccctaaggctggatcaggatcccctccaggtttttactagagccaaacccacatctcctttctcttctgccacccccccttaaaatgcttagaaacacatagatttaaatacaaattcaaatgtaagtaatttcaactgtgtaactatgaggagtcagttctacgtgggtcctatctgtatcctccccagggctcagctccattctttgctttcattcattctcattcaatacattgttgttaagagctcactgggtgccctctctgtcatgtagtaaggttttaaaaagaaagcct

SEQ ID NO: 527803 - DNA, 579 bp, Homo sapiens
tctcttcctccctctctacatccctctctctcttccttccttcctcgacacttaccatgtaccagaccttctgccaggcacatggatgggagcacaggggaagttggctgcagggttagaactaagtcccaagccccstaaagctcatgccaggggactggactgtccagtactgagggatggggatgctgaggctggtggccttcctcaaatgcactgtagtgccccaggcagagtcctgggctgccctgtgaggaggtgaccagaggtagagcaacttcaccctaaggctggatcaggatcccctccaggtttttactagagccaaacccacatctcctttctcttctgccacccccccttaaaatgcttagaaacacatagatttaaatacaaattcaaatgtaagtaatttcaactgtgtaactatgaggagtcagttctacgtgggtcctatctgtatcctccccagggctcagctccattctttgctttcattcattctcattcaatacattgttgttaagagctcactgggtgccctctctgtcatgtagtaaggttttaaaaagaaagcct

SEQ ID NO: 527804 - DNA, 520 bp, Homo sapiens
atgtaccagaccttctgccaggcacatggatgggagcacaggggaagttggctgcagggttagaactaagtcccaagccccctaaagctcatgccaggggactggactgtccagtactgagggatggggatgctgaggctggtggccttcctcaratgcactgtagtgccccaggcagagtcctgggctgccctgtgaggaggtgaccagaggtagagcaacttcaccctaaggctggatcaggatcccctccaggtttttactagagccaaacccacatctcctttctcttctgccacccccccttaaaatgcttagaaacacatagatttaaatacaaattcaaatgtaagtaatttcaactgtgtaactatgaggagtcagttctacgtgggtcctatctgtatcctccccagggctcagctccattctttgctttcattcattctcattcaatacattgttgttaagagctcactgggtgccctctctgtcatgtagtaaggttttaaaaagaaag

SEQ ID NO: 527805 - DNA, 520 bp, Homo sapiens
atgtaccagaccttctgccaggcacatggatgggagcacaggggaagttggctgcagggttagaactaagtcccaagccccctaaagctcatgccaggggactggactgtccagtactgagggatggggatgctgaggctggtggccttcctcaaatgcactgtagtgccccaggcagagtcctgggctgccctgtgaggaggtgaccagaggtagagcaacttcaccctaaggctggatcaggatcccctccaggtttttactagagccaaacccacatctcctttctcttctgccacccccccttaaaatgcttagaaacacatagatttaaatacaarttcaaatgtaagtaatttcaactgtgtaactatgaggagtcagttctacgtgggtcctatctgtatcctccccagggctcagctccattctttgctttcattcattctcattcaatacattgttgttaagagctcactgggtgccctctctgtcatgtagtaaggttttaaaaagaaag

SEQ ID NO: 527806 - DNA, 520 bp, Homo sapiens
atgtaccagaccttctgccaggcacatggatgggagcacaggggaagttggctgcagggttagaactaagtcccaagccccctaaagctcatgccaggggactggactgtccagtactgagggatggggatgctgaggctggtggccttcctcaaatgcactgtagtgccccaggcagagtcctgggctgccctgtgaggaggtgaccagaggtagagcaacttcaccctaaggctggatcaggatcccctccaggtttttactagagccaaacccacatctcctttctcttctgccacccccccttaaaatgcttagaaacacatagatttaaatacaaattcaaatgtaagtaatttcaactgtgtaactatgaggagtcarttctacgtgggtcctatctgtatcctccccagggctcagctccattctttgctttcattcattctcattcaatacattgttgttaagagctcactgggtgccctctctgtcatgtagtaaggttttaaaaagaaag

SEQ ID NO: 527807 - DNA, 554 bp, Homo sapiens
aaagtcacaccgctaatcagcggccggcacggggtaacagttactaacactcactacgtacccaatgctgggcraagtgacttgcatgagccagcgagctcaatgctcatggcaatcctctgagcagctggcattgtttcatctcaattttacagctcaggaagctgggacacagaggaagagccaggctctgaacactgacaacctgattgagagacccacactgttcatcaccgttacgctatatatgctgtatagaaaggcaggatggcataatggttaaacctaggtaggtagggtttgaatcctcctgctaccatttactagctctgtgacttggactagttatagcacctctctgtgcctccctttccccatctctaaaatggggataataaatcgtacctcctacctgaggctgttgtgggctaagtctgtaaggcacgtagaacagtgcctggaacgtggggtactgtctatctgtgtgcctgctgttacaacaatggtgagtattgccttatctctcgctgctgaactaccaggttagacttctt

SEQ ID NO: 527808 - DNA, 554 bp, Homo sapiens
aaagtcacaccgctaatcagcggccggcacggggtaacagttactaacactcactacgtacccaatgctgggcgaagtgacttgcatgagccagcgagctcaatgctcatggcaatcctctgagcagctggcattgtttcatctcaattttacagctcaggaagctgggacacagaggaagagccaggctctgaacactgacaacctgattgagagacccacactgttcatcaccgttacgctatatatgctgtatagaaaggcaggatggcataatggttaaacctaggtaggtagggtttgaatcctcctgctaccatttactagctctgtgacttggactagttatagcacctctctgtgcctccctttccccmtctctaaaatggggataataaatcgtacctcctacctgaggctgttgtgggctaagtctgtaaggcacgtagaacagtgcctggaacgtggggtactgtctatctgtgtgcctgctgttacaacaatggtgagtattgccttatctctcgctgctgaactaccaggttagacttctt

SEQ ID NO: 527809 - DNA, 554 bp, Homo sapiens
aaagtcacaccgctaatcagcggccggcacggggtaacagttactaacactcactacgtacccaatgctgggcgaagtgacttgcatgagccagcgagctcaatgctcatggcaatcctctgagcagctggcattgtttcatctcaattttacagctcaggaagctgggacacagaggaagagccaggctctgaacactgacaacctgattgagagacccacactgttcatcaccgttacgctatatatgctgtatagaaaggcaggatggcataatggttaaacctaggtaggtagggtttgaatcctcctgctaccatttactagctctgtgacttggactagttatagcacctctctgtgcctccctttccccatctctaaaatggggataataaatcgtacctcctacctgaggctgttgtgggctaagtctgtaaggcacrtagaacagtgcctggaacgtggggtactgtctatctgtgtgcctgctgttacaacaatggtgagtattgccttatctctcgctgctgaactaccaggttagacttctt

SEQ ID NO: 527810 - DNA, 556 bp, Homo sapiens
gatagcgccattgcactccagcctgggcaacaaaagtgaaactccgtctcaaaaaaaaaaaaaaaaatagaatgtctctctaggtgtggcatgtctatttctctctgtctaaygtgtttccttcttacgttttccataaacttatattgattatgtaactttacaaaatcataatcgacaataacaggaaagaaaggatgcaggaggaatgtaggcctggattccttgtgatacacggagtagggctgtccagtaaaatacaggatgcccagttaatttgaattttaaacaatgaataatcttttagtataaggatgtcctaaatattgcacagcactggtgctagacagagagggggcaatatcccagatcttctggaacctgtcctttcggggtccattccctctatgacccagaagtgatccagccaccatcccaatacctgaacagtgtgatgaccaccttcccagaagggaactggctcaggaagccgtccagcaggattgcccactgcacaccaagcgccagcatgaagaggttgaaggccacactgctc

SEQ ID NO: 527811 - DNA, 565 bp, Homo sapiens
ctgtaatcccagttactcrggaggctgaggcaggagaatcgcttgaacctgggaagcgaagtttgcagtgatctgagatcatgccactgcactccagcctgggtgacagagcgagactttgcctcaaaaacaaaacaaaacaattgtacatatttaaagtgttgtaaccaagtgagttacagagaaacaccacactttgagcctaattcaggagtcctttattagccggcgacctagagacgactagtgctcaaaattctctcggccccaaagaaggggctagattttcttttataccttggtttagaaaggggagcgggaattgagctgaagcaatcttacagaagtaaaacaggcaaaaaagttaaaaagacaaatggttacaggaaaacaaacagttccaggtgcaggagctttaaagccatcacaaggtgacaggtgcgggggctctgggtgctatctgccggacacaaacgcaggggcactagagtactatcacccgggcaaattcctgggaactgcggacacagcttgccacagtaccttatcagctaattgcactctt

SEQ ID NO: 527812 - DNA, 567 bp, Homo sapiens
gcctgtaatcccagttactcaggaggctgaggcaggagaatcgcttgaacctgggaagcgaagtttgcagtgatctgagatcatgccactgcactccagcctgggtgacagagcgagactttgcctcaaaaacaaaacaaaacaattgtacatatttaaagtgttgtaaccaagtgagttacagagaaacaccacactttgagcctaattcaggagtcctttattagccggcgacctagagacgactagtgctcaaaattctctcggccccaaagaaggggctagattttcttttataccttggtttagaaaggggagsgggaattgagctgaagcaatcttacagaagtaaaacaggcaaaaaagttaaaaagacaaatggttacaggaaaacaaacagttccaggtgcaggagctttaaagccatcacaaggtgacaggtgcgggggctctgggtgctatctgccggacacaaacgcaggggcactagagtactatcacccgggcaaattcctgggaactgcggacacagcttgccacagtaccttatcagctaattgcactctt

SEQ ID NO: 527813 - DNA, 425 bp, Homo sapiens
ggcatgggaaatagttcacacagtaaaaacatggctgtcaagaagaggagtaaatttcagaggcagaacactccctgtgagcccgaacctcttcctgctttgttgcagtcttcataacgattgctttaaaagactgcattgatataacatcatctctcttctctgcatctttgacttgctagcttaactggtctagaggagggcttagcactgattttgagtattcattttcctcaaaacttcaattcagcctgggtttcttcagcaggagggcccgggggaaccagagccagggaccagagtcatttcagtgcaccagctcaagaaatgaatattccaggccaagaatccccaagtgttcttyctgaactccttcctggtggagttcaaagagatgaaaaacacaagcccgcttttcagttctt

SEQ ID NO: 527814 - DNA, 591 bp, Homo sapiens
gtagggtgggagggacaagcttccggaagccatgtctgtacaaagtggccctggccacagctcagtggtccagggctgaacccctgacctgacccaggacagcctgaatctcacctgggaaaacactgaatagaggctcagcaattccagtctcggtgtggaccaaagccttcaacaagtaagacataaaaactgtggagttgtgggagccatttttcccttgacatgaccaggaaagctcagaaggcaaatcacagtgagggaggaaagaagctgacatgtgcagtgaagtggatacggaagaaaaaatatcccccagtcycttacagtccccagggacctgtgctaccccaaaagaactttccccaattttaatatatagacatatagggcagtagatgagataggtaaatgtccacttacaatagaacatttaattagaaaaatatttgaaatcacacagtatataaaatgatatattttaaaatgttattttccacacccacagttcatgaaacagttgtattcaaacttctcatattcatttccaataccagtgtcctgacctccctgaagccaccttctgagtta

SEQ ID NO: 527815 - DNA, 591 bp, Homo sapiens
gtagggtgggagggacaagcttccggaagccatgtctgtacaaagtggccctggccacagctcagtggtccagggctgaacccctgacctgacccaggacagcctgaatctcacctgggaaaacactgaatagaggctcagcaattccagtctcggtgtggaccaaagccttcaacaagtaagacataaaaactgtggagttgtgggagccatttttcccttgacatgaccaggaaagctcagaaggcaaatcacagtgagggaggaaagaagctgacatgtgcagtgaagtggatacggaagaaaaaatatcccccagtcccttacagtccccakggacctgtgctaccccaaaagaactttccccaattttaatatatagacatatagggcagtagatgagataggtaaatgtccacttacaatagaacatttaattagaaaaatatttgaaatcacacagtatataaaatgatatattttaaaatgttattttccacacccacagttcatgaaacagttgtattcaaacttctcatattcatttccaataccagtgtcctgacctccctgaagccaccttctgagtta

SEQ ID NO: 527816 - DNA, 608 bp, Homo sapiens
ctgcctgcactctccctggcctgtaatctcacagacaaaaagtctccctccggtgactcctccagtgtcagtttctgtgacaagtatggacaggattaggtgacagcctacatctgtgtcatcttgcttcatcagaggaaaggggagggggccacgatctgtaaaccacaaccagcaggaatttgtcctgtgcagtgcgggcctgtgattgtcaaggtttgcaaggtccccagactagggacctcgcctttccctcgttccctccatccctccctcctcccttcctccttccctccctccttctttccttccctccttccttccctccctccctccctccctccctccttccttccttccttccttcctgtctttctaaaattattctggcaaatcacaagcagcttacagaacacagggcagcctccgcacctttgtgtgcacgtgtatgtccrtgtgcacacctctgtgtgcacatctctaggtgtgtgtgcacctgtgtgtacacctctgtatgtgtgtgcacctttgtgtgtgcacttctgtgtgtgtgatcaatgtaggtgatgcccagtattcacaggacacttaaaaaccatggggaaata

SEQ ID NO: 527817 - DNA, 611 bp, Homo sapiens
tggacttcctatttggccagcatgagcagcaaagcaaaagaaagttggccaaactgccagtttcccagccttcctctccatcagggcctgtggcagcacacccaaaactgtgctcaatagattcctctccctgaaaattacccaggggtgcaggtgaggcagacctgcctgcctgcctgttccatgtgaacayaccactcgccagtgtgcatagccttgtcatgttctagttactgctgcctgagtgctagaggcttccaatatggggaaggatgacatatcatttaaattagctccttttatggcaggaatgattctggttgacattggctcaggcagtgcccatagagataatagcagttggtattgattttattttttattttgtagctcagggtgtttaaaaatgtttggtgctgaaatgcaaaaacacaaaatttttgcaggggattttaagctccagtaaagctctaaaacctctcactaaatttgaatctggatgactgctttgcaaatgatattcatctgactttgatgagtgaatttttaaactcagggaagtaaccgcttctttgtgcataaatataaataggaagcatttgtgaatccct

SEQ ID NO: 527818 - DNA, 638 bp, Homo sapiens
taccactaaaataaaaccactgctgcaaattgttgtacttactcctctctaccccacatttttaagtgtcttgtgccaagaagtttatagccatttcatcatttaattctcacaacagcactgtaaggcagacataactccacccattttacaaatgaggaaacaaaagctcagaggggttcaatgatttgcacagttcccacagtttgggaatacagaaaggttcagttccaaatctatctggctcccagtcccaccacatgaatccattcaccaccactctctttcattctcattcttctttctacctttctttcctctgatatctactgtgtaaacttgattaaagaccaagttatggattcaatgtgtaaccatgagtggttgctttttcatctacatagacaggcactttacagagagaacatgggcatatraggcatacgtaaaacaaacagagcatggggaaagaaaagagcaagatcaccagcccactggagaccaaagttacaacatccacctctacaagcagaagccacacactgtgggtgtaaagaaaaacagagtccctttcccagtcaaccccaggtccctgaaaaacttcatctggcctcatctggtcaggaaagaaaagcaat

SEQ ID NO: 527819 - DNA, 638 bp, Homo sapiens
taccactaaaataaaaccactgctgcaaattgttgtacttactcctctctaccccacatttttaagtgtcttgtgccaagaagtttatagccatttcatcatttaattctcacaacagcactgtaaggcagacataactccacccattttacaaatgaggaaacaaaagctcagaggggttcaatgatttgcacagttcccacagtttgggaatacagaaaggttcagttccaaatctatctggctcccagtcccaccacatgaatccattcaccaccactctctttcattctcattcttctttctacctttctttcctctgatatctactgtgtaaacttgattaaagaccaagttatggattcaatgtgtaaccatgagtggttgctttttcatctacatagacaggcactttacagagagaacatgggcatatgaggcatacgtaaaacaaacagagcatggggaaagaaaagagcaagatcaccagcccactggagaycaaagttacaacatccacctctacaagcagaagccacacactgtgggtgtaaagaaaaacagagtccctttcccagtcaaccccaggtccctgaaaaacttcatctggcctcatctggtcaggaaagaaaagcaat

SEQ ID NO: 527820 - DNA, 639 bp, Homo sapiens
tatgacttatatgtctttgtaagaagaggagaagagacacagagacagacatctgcagcttggaagccaagcaatgcctggggctcccagaaaccaagaaatgatttttctcagagcctgacatgaaccaacatcgtgctttcagccttctggcttccaggaacgtgacagaatacatttttgttgtttgaagtcacccagccctgggtgttttgtcatggtgtccctgggaaactaacccacttgggatacagaggctttcactggccagccctgactcccatggcagtttcaccttctagcactttctgtcagcacgtggtactcaaatcttaattttcaactgtgacctctttcacttccatgctcttttccatccggatttatcagccaggagcacctcagtcctgtccaccaggcctgcatagtatagtcctatttgtccttctaggcacattgtaaatatcacatcctgtagagccctctgccagcctcccaggcaaaatgtgttggcccgtcctctgggmtcctctgtgatatggtcacctgtgtacacatttccccttgtattaggatgtactggttgaggtgactctctttccctagattctggagggtagggtgtatttgtccattttc

SEQ ID NO: 527821 - DNA, 601 bp, Homo sapiens
gacatcacatgcacaaaaagcatcagggagaagagatggtgacttttcaggtgaatctgcttgtggccaaaacccatagttgagaggacacagaaacatcctatctcctttktgtctgctctctccccagacacaggcaaatatccggtgtcttcatccttcttaatggcctcagcgacaccatgcaaggacttctcatttcctttctttggcttcctctttggggaatccattcttatgcatccttctcccagttgcccccagttccttccctgccacctactttctacattcctttttattattttacagactttcctaccacatcctttgttctttgggcaaatgctgttagatttttcagcttccagtgcagcattcattgatattttagatattcaagaaatctcaccctgtagcttaccacaaattcacagcaatcaatccttcctatgtcaaccccataaatgtccttctcttctctactctgggagacctaacccaaaaccattcggctttttcctttattctccctaaaagtaaccaaacattgtttctctccagtagcactgattttactagctaatatttattaaacact

SEQ ID NO: 527822 - DNA, 624 bp, Homo sapiens
ctttaaatgtgtttgctgttctttgattgaatgtttgaaggatggcacacccagcgaaccttatacattatttaatgatgactttaacccatcgtttaatactgtttctgacccttaagaataaaaggggagggaaggacggcacaaggcaaagtggaaagacaccaaatatggcccattttgctcaaggccaggccctgaatacactcaggcacataggcacatgtatattactgttcatcacaccagacgatgctacaggttgagacagattcttgcaggactttcttatcatgaatcgaaaataaaaattttctcccattcgggaggttgtttgtctactctgctkatagtttcctttgctgtgcagaagctctttagtttaattagattccaagaaaacaatgaacaaacccattaaaaagtgggcaaatgacatgaacggatgcttctcaaaagaagtcacacatgcagccaacaatcatatgaaaaaaagttcaacatcactgatcattagagaaatgcaaatcaaaaccacaatgaaatgccatatcacatcagtcagaatggctattattaaaaaggcaaaaattaacagatgctggcgaggttacagagaaaaag

SEQ ID NO: 527823 - DNA, 638 bp, Homo sapiens
taccactaaaataaaaccactgctgcaaattgttgtacttactcctctctaccccacatttttaagtgtcttgtgccaagaagtttatagccatttcatcatttaattctcacaacagcactgtaaggcagacataactccacccattttacaaatgaggaaacaaaagctcagaggggttcaatgatttgcacagttcccacagtttgggaatacagaaaggttcagttccaaatctatctggctcccagtcccaccacatgaatccattcaccaccactctctttcattctcattcttctttctacctttctttcctctgatatctactgtgtaaacttgattaaagaccaagttatggattcaatgtgtaaccatgagtggwtgctttttcatctacatagacaggcactttacagagagaacatgggcatatgaggcatacgtaaaacaaacagagcatggggaaagaaaagagcaagatcaccagcccactggagaccaaagttacaacatccacctctacaagcagaagccacacactgtgggtgtaaagaaaaacagagtccctttcccagtcaaccccaggtccctgaaaaacttcatctggcctcatctggtcaggaaagaaaagcaat

SEQ ID NO: 527824 - DNA, 614 bp, Homo sapiens
aagaagcagttgaggtagtcagaagctttcagacatactaccctaaagtggtttgtgttatccaagaatgagtgaatgtatttttataaatttagctgctcatggaaagccaactcatctgagtctatcgcagtccctaccgccaacagccatgatttgttgaggatactaatgttatcaactgcrgtaattcagttaacagagtcatcctaccatcacgttgctttcttgtcaccaacaaactccccttagaagcccctctgtcctagctgactattaatgactttcaatcaaacaggccagagattattgtttgtactcaggaagagactggttatgttcctttattcttaaatgtgtactctgcaaattctcttacataatttgatgtgaaactataattttttaaaagacggttccaattcactggaaatgtcaagtataaaaataaatcagcacaaaatagctcgatttttaagatctgagcatcaaaaggtatttcaaattagcctctgtaaaaggcaattagttgtacagctcagaaaattagagcacaacatgttctacagctcacagacgcacttggacagggagtgtcagttactttattccag

SEQ ID NO: 527825 - DNA, 518 bp, Homo sapiens
gctgaaaaccatgaaagagataaggggtctagatttaaagaactttcactgcatgacgacaatgatcatatgcatttcaatgtctttatctcagtgattttctttgtagtygggctagcccactgggtaacagcaattttgcacacgggcatttctcctataccccaagcgacactgcgaacccttctggcatgtcgcacgctcaccacgttctgttttcgtattctggcatgccgcatgctcaccaggttctgttttcatatgctacagcacactcgaagagcatccctttgcctcaagttctgttattatgagtgccacttagaaatttttatttttgccgaaaccattcaaagcagaggataaaacacagaggtcaggaatggcggccccctcccactccacattacattagcggcatttgaaaattacagcctcaccagcttgcaaaggaaatactacatttttcatcttcggtgactctgattaagtaacattcactttggaccgctcctatg

SEQ ID NO: 527826 - DNA, 580 bp, Homo sapiens
gctgaagaagtttgattctgagaggtacagtgacttgcctagaacaatcagtggcttgtaaagccaggctggagcccatgtcttgggactgctggttcatggcatctttccttgggccacgcaggctggagacaagccattgttttcacagaactctagtcactgaatggctccaggaggcctggatggtacaaccctttaggcttccagcttcttcagcacccttgccaatgttgagggtatcatccttgctgatttatttattgtttttctcagcagagaaatttgcaggagagaagtgatctccttcagagaaagggctacattccagaaggttcatggtgaagataagaaaccgtcatgcagtaagaggaggcccctgtgatgtatgtgtttgtttctttagacccaagtatgaattcaatagctgaatgaagatgcttagaaaagagcctcaggtaccttttttaaaaaattgttctgattgtgtacagtgtaatgttttaatacatgtacacatggtgtattgataaaatcagggtaatcagtktatccatcaccttaagcacttatcgtttct

SEQ ID NO: 527827 - DNA, 583 bp, Homo sapiens
cctgaacactcttggaagtcttctatgtgtcacatttagtctcagactgggattctcatatcaatttggttaatttaaaaaggtaaggtaagagactaggaattagtaagaatgtggacaacttttcaaaatttataataataactgttgatatttacayagtattttgcacaatgtgaagtactttcttgtgtgtatttcatggtgtaatacaaaacaaaccaaccaacaaaatcccaacaagatctgaagtttatgacttagattcaagtcatgttcttcctcagtttccttctgtgttaatggggaaagtaaaataataaccatgtcacagtggaggtaattatgcgttattcttacctgataccttaggagaagtcaacacttttgaaggggagaacaaaacaaaagatttcttagcttgcttagagagaaatgaatacaatgaggaatgcagtgcaggaacttacaaagataaaacagtgactttaacaagcattaagatacatttggaaaagatttgaccctttttcactcttcctacagattcatatctgacatgtttgtcttttatgacaaagaa

SEQ ID NO: 527828 - DNA, 574 bp, Homo sapiens
gctgacttttaaaaaatgtaaagcctaaggcgaaacaatactaayggccttgctgagatttcatgaagccatgtactgaaagagttaatggactttttaattcaccctttgggaaaaatgtggctcactgggttaagttaaatcaaagaaacacgaatgccctgaaagaatattagtgttctagggagatatttcatcataatggaaaaacctcacgtttgctggaattttttttttttttttttttggagggagttaattattacagaacataggttagtcaatatagcctagtagctttctgttatttaggtcaggtttggatgttgaagatagcttccatgcagaaatcactgggtctgtgaccaaaactgaggaaaacactgacttctaattactttggaacaacacctggccacataatcaggtggagacctacataacaatctgtcacaacaacctcacatcttgaaagcccctaaacagagatcctatcatacccttagaaaaacagaagtgccataaaagaaaccctttagtgtggaagtgagagacaggactagctggatttcct

SEQ ID NO: 527829 - DNA, 611 bp, Homo sapiens
ataatttaagctctatgatgaataggttttcatacattttgttcattactgtatcccagtatctgtaggagttaccagcacatgatatgtgtttgaaaaaattgagaatgaaagattatgaagaaataaaatttttagtcataatcrtccccttttgcaaacatttattgaaggcaattagcatgtagatttctgtaatgagaaagaaaagataggaaaggaaagacaatgaacactcatcaagtgtctatgataggacagacacttcactgtgctatgtgttttatatgcattatctcaaatgatcaattatctcttcaaaatcaaggttgaacatttcttcctcagactgaaggaatgaatcatgtatccatgtaaaacaaattatttgctatttcctttactacattactgggctaaattaaagcaaagccaaatggacactttgtttaaagtgataacgagacccaaaatactgtttcctgatcagttgataatagccactcagtgagcttggtaagccagttaggaggaccttgcacacaaaatgttagattggcttcctgattggcccgtgaagagcttcagagccgtgggtgctggacagctgg

SEQ ID NO: 527830 - DNA, 612 bp, Homo sapiens
aattatgtcccattcaccccagcaaacaaatggctactgcttcatccacttcaggttgtgaacgrcccggtcttgcctgaacctgctttatctatttgctgcgaaaccccactgagacaccccagtttcattttcaatgaacccttggtaataacagcagcaaaatgcagtgagctttcaaagcagggagaaaataaaaaaacgttaaaaccaaaccacccaacgtattctgtctcggtttctgctcttctccgggcaacatcagcagcatgtggtagcagagagagccgcctgtcacaggcttctttccatttaggaggctgtgattgataaggcccaagtggggaacatcataagacacatatataaaatgatggcttatctccaggatattctgcttattccatggagtggaaggatgcacgaatctaattcaatggtatgcactgttggaaacctggatggaactcctgcccttatgtggatttttcagttcacacccaatgggcagggaactatttttacatccctgagaagctatcttttggcatgtgtaagaataggaaatagaaggcacatatacctctctttcagtcctggcaaagttgtgtt

SEQ ID NO: 527831 - DNA, 380 bp, Homo sapiens
gacactaatgactacctctggcctggtaatcacctaaggctttgtgccacttaggtacttggagccaaagtggggccttctgttcacctgggctatggtgtcccacttggggtctggatgtcagcctggggcttgttgtatacctgtatcttagatatccagataggggtctgttttctacttaggtgcagcagtccatctggtgcttgagtgtcgacctaaggcctgatgtctrtgttggacctagggttcacctgaggcctgatatccacctggggcctcaatgtccaaatgtggcctgatgcccatctgggcgctgggtgtccacctgcaacatggatgtccactggtactttatgtccaccaggggcctaatgtcc

SEQ ID NO: 527832 - DNA, 663 bp, Homo sapiens
catgcatctggccaaataaaatgcttgaaattttgatgttggaaagttgtgggggactgacgatgtatatctttcttcttcttgagtggtggaggatggtggaaggtaatttgagattgttttcctcctgaaagtgccttttacagcaattaaatggctttgagagatcatgggtttggaaataattaaaatgatgatcactttaaggcagtttttaaactgtgtttaacttaatgcttcagagtatctccaagccacctgaaacttatagaaaattttgtgcattttttttttacgaaagaggagacttcgcttttattcctttctcaacagatcgatgatctggcaaatagttgccctaggatgcccattrggttgaacatgaaggacaggtttttatggactactactaatttatttatatatgttcctcttccaaaagttcatttaataaaagcagtttttttttttatcattgcaatcatcttttgcagtttaggggagaaacaataggaaaggaatcagttatcttttaggggtaattagcagttaggacagcatctaccaggaggaggagagtacctgtgtaagtcaggattcatttggaaagtacctcaactgcagctccctatggagtcaagggggatgtcagtggccagtcag

SEQ ID NO: 527833 - DNA, 453 bp, Homo sapiens
atattagggttaaactgtaacattctttagtagacatctggcaatcagttagacactacctagcaatggtgatatgttacgtattttgtgtgtggctgttsgctgtgtgtgtgtgtgtgtgtgtgtgtgtgtgtgtgtccgaaaatattttactacttttgtacagttttcctaattgactgtaaattctttagagtagaggcccttccttgaactttgcctttgtcctagggagcccagcacaaggcttcacacaaggtgcttcctctcatttgttaatagattgagaaattttcttaagatatcataatgggaagttacatttaaagtttaatgtacatgctgaaatctaacacattaagcacttacacggaatacaatgtttattaatacagaggctttatacaaagatattctcttttttatagtttaaaatggaactggcatatattt

SEQ ID NO: 527834 - DNA, 453 bp, Homo sapiens
atattagggttaaactgtaacattctttagtagacatctggcaatcagttagacactacctagcaatggtgatatgttacgtattttgtgtgtggctgttggctgtgtgtgtgtgtgtgtgtgtgtgtgtgtgtgtgtccgaaaatattttactayttttgtacagttttcctaattgactgtaaattctttagagtagaggcccttccttgaactttgcctttgtcctagggagcccagcacaaggcttcacacaaggtgcttcctctcatttgttaatagattgagaaattttcttaagatatcataatgggaagttacatttaaagtttaatgtacatgctgaaatctaacacattaagcacttacacggaatacaatgtttattaatacagaggctttatacaaagatattctcttttttatagtttaaaatggaactggcatatattt

SEQ ID NO: 527835 - DNA, 446 bp, Homo sapiens
ctaaagagggcagaagctctttgtacaatttgtataacttttccctaattttgaaataatatcaaaataaaaagtttaaagaatagggagtctggaaagtgtacattatttaaccttataaggaaagtgcagtgtatatatttaaaaaataaagatttgaatattagataaactcattttactttttagaaaatatgtagtttggaagatatgttccaatagagaatgtgtattagtattctacttgcttctaaacagcaggtgataacaattttagtaaaagcactgttgtttgtaatatttttgttcttttmctatttcaaagatcaaggaaacagctctcttttaaaacagttatgagtcaaggtgaattcaaaccagatgtttagagagtctcatttcacttgaagatttctgatacactctgtagagaacgtctaagacat

SEQ ID NO: 527836 - DNA, 511 bp, Homo sapiens
atctgctttctgctaggaactatcagtagtttacctaccacaagtgatggtgtcattatgatctgggcattgagttatccaacatgaaatccttttctcgtgactcctcctaccaccaattatctgaagcttggataactaaaatctgagtttgtgacagggattacatgcatgtgatttactgaaggagtgatccccattaaaaaaaaaaaaacttgtaagaaaatgaatgaatcaaattggtgaggtaggagagagctaaacaaaaatcccaattcaagtaaagtccatccttagcctgattcatgtgggaaaacwtataaaaagcatcacagagttgttcctattaaggcaaaggagactgccatttccacctgatataagcagaaattatctatgggccttttctggaagtgagggaaagaacgtatttctagctttcaattgctgagagcaattctctggagaagggaaacacttttgtactgttaacagtcacagtggacagcag

SEQ ID NO: 527837 - DNA, 599 bp, Homo sapiens
tgcagccttcagtctgtggccaaaggcttgagaccaccaggcaaaccactagtgtaagtccaagagtccaaaagccaaagaacttggaatctgatgtttgagggrcagggagcattcaggataggagaaatatgaaggctggatgactcagcaagtccgctcattaaactttcttctgcctcctttctctagcctccctggcagccagtggtatggtgcccacccagattaagggtgggtctgcctctcccagtccagtgactcagttgttaatctcctgtagcaacatcctcacagacacacccagaaacaatactttgcatccttcaatccaatcaagtttgacacttaatactaaccatcacagggatcatgtgttattgttccatgcaatcattgagggaaccatggagtctctgctattttcaacctgtggctctgcaatccgttttggtatcaggatcctctgctggaatatctgcatatagctagtggacagagaaagaaaatggaaatggcatcccttctctttgcctacaatccactgataagggatttgttcacacatggctacgagaaaggcaagaacgtattgtata

SEQ ID NO: 527838 - DNA, 616 bp, Homo sapiens
acacagcttggagaaagctgctttcttttaaaatattaaaaaatgattcacaaatctaacagaaataattagagcagaatcattctcatgaaatacaggtcccattggtaatttgagaattcacagagttgttctaaccctaggacacagacagcaaacaattgcccttgatattttttttaaatgtgcatatattctattttccagaatctacctttcacccaggacaattcataaggaattttaaaaatgcactgataaaatgatctaatctagcatcattttaaaagaaaacgtaattctaactttctaaaaggggagcagcaggagaacaaagggaaggggaagaaaaggcatccacacaaaacaccatacgctggaaatgatgctcagtttctagaagaacactgtaagctcactttgtgcatcctcttttcctaaatcctctatccctaaatgtccactcacctgcctttcttagacatctcgtggacttctcttccgggccagygcattctgctttcagtggccaaaacccatccccaccacaaaagaaagatgccaaatctcatatttgggacagccaacatgggtttccaaattcaaacagctctct

SEQ ID NO: 527839 - DNA, 541 bp, Homo sapiens
gccctagctcccaagctctggtttcatcacctttttcttttgcccttcctgctctccaggtggtagcggcttccttctgttactcttctcagggttgcctaagggtcctaccattccctgtttgaccgttagctcttctaacacttttggtatttgtttcctatattaaattattttgattaagttactgagtatgagctttgtttttctaattggactcaaacagtaaataatcagaccaagacagataaatacatggatggatggatagatagacagacagacatcccaaggcacaatctaaactaaatttaatataggcaaagaactctccattttgagggttatcttgttttctaattctcaaatccctttgatgcaaaaacatattttaattagatctttcttcagttggtttaaaaaaagaaaagaaaaattgtcccccaatcctgaaaatagttggtctcttttgcagcaactatcaagaaagatatgycgttaaataaaagtagtattaaattactttagaaaagaattgtaa

SEQ ID NO: 527840 - DNA, 546 bp, Homo sapiens
tcacctttttgggagatcattgcttggggagttagacatttaaaaaagagaatttaagataatttataatctagcaggaccagttctaggcaataaggacaccgagatatctgttttaagaaagatgactattatggggaggttctgcaggtgatgggaggagacaagacatggagcccaggtgacaaattttgcacaaagctcaggggcacagcctggtgaagtaagggactccttataatataacttgggaatgaaagggccttttctaaccacaacaaatraaccattatttactctacctctgagtaagccttactgattatctgtttaatgagagaccattgtgtactttgcccaagaaaagtaagtaggtttggagttacttaatactaagaagaaaacaagaggaacaggcaaatacatagggtctatatttacaccataaaaaaaaggtataatggaatccaaaacccctagtcataattttcttctgttcactggtgtaagagtcttggccagtactcttcaaagtgtccattctta

SEQ ID NO: 527841 - DNA, 459 bp, Homo sapiens
gcaatgactagttatgttcagaaacccaatctacttcaggcctaaaggataaacttccaagtgacccatgaaaaattcttgcatattagagctacttttttcrtttgatagaaagtgaataatttaattttttccaacttgaaatatataggaaaattatcgtacactaatttacttcttaagaaactataattatttggcttgcatcatgctctgtcatttaaaatgctttcactctatagcttcttagtttttctagtccaatttcaagtcatagtgtgtggatattgatacttttgatattgatatttcaattaaagcttaagatgtggaaaatgataagtcagaagtataattcccttttacttataaatgtagaatatatttgaacctctttccagagtttaaagatgatgacaggagagtaaaattccttgtcttctaagagtaaagcctgca

SEQ ID NO: 527842 - DNA, 459 bp, Homo sapiens
gcaatgactagttatgttcagaaacccaatctacttcaggcctaaaggataaacttccaagtgacccatgaaaaattcttgcatattagagctacttttttcatttgatagaaagtgaataatttaattttttccaacttgaaatatataggaaaattatcgtacactaatttacttcttaagaaactataattatttggcttgcatcatgctctgtcatttaaaatgctttcactctatagcttcttagtttttctagtccaatttcaagtcatagtgtgtggatattgatacttttgatattgatatttcaattaaagcttaagatgtggaaaatgataagtcagaagtataatycccttttacttataaatgtagaatatatttgaacctctttccagagtttaaagatgatgacaggagagtaaaattccttgtcttctaagagtaaagcctgca

SEQ ID NO: 527843 - DNA, 459 bp, Homo sapiens
gcaatgactagttatgttcagaaacccaatctacttcaggcctaaaggataaacttccaagtgacccatgaaaaattcttgcatattagagctacttttttcatttgatagaaagtgaataatttaattttttccaacttgaaatatataggaaaattatcgtacactaatttacttcttaagaaactataattatttggcttgcatcatgctctgtcatttaaaatgctttcactctatagcttcttagtttttctagtccaatttcaagtcatagtgtgtggatattgatacttttgatattgatatttcaattaaagcttaagatgtggaaaatgataagtcagaagtataattcycttttacttataaatgtagaatatatttgaacctctttccagagtttaaagatgatgacaggagagtaaaattccttgtcttctaagagtaaagcctgca

SEQ ID NO: 527844 - DNA, 472 bp, Homo sapiens
tgccatgtccatttaaccaagcttggcagcaagtcttaaggactagtcacaaaaagaaagtgcaaaggggcacagcttctctttggagagtgccaagataccatcaatctctgccccagcccaggggaggctggaaaaagtgcctcaagcactaagggggcggggagcaggggcaaagtgggtaatgagtcagaaaggaatgtctgtgaacccacacccgcatacctgagtgccaatgtgaagaaaacccagagtaaattcctttacacagactagggtctcacatgcacttctgagggtagtttttccgtataagaatctgccctgtgctttacagaacagtgagtcacttacttgcttttggatggaacgctgcagagtgtgctgtcattgtgatatctttttttccctcatgcattctcagcattgccagccttggctttgytcattagataaataatagagtaaaatt

SEQ ID NO: 527845 - DNA, 627 bp, Homo sapiens
atctttgtttcactcattgttaaatcccagcacctaaaacagggcctggtacatggtaggtccttgacaaatatttgttgtataacgagtgaattccagtgagtaatgtacaccctcgctcatgtattaacagattcagtgacctaagatacattagaatatggaagaactgaacccaattacaaatttgtcttgacaaacctatatagaatattgaatccaacaaatagaattcctgacctcaagtgatctgccctcaagtgcttcattcaattaatgaagcagttactaaaacagaccatgcattatggctcaaagaaaatctcaataaatcacaaaaggccaatattataaaggcccactatttcgcaacatgcagtaacattatacattaacaacaaaagaatatccaaaaaaaaagctatgtgcttagaaattataaataattttttgaaactcttctaagtaactcaaagaggaaataaaaactgagattatgaaatatttgtgaatgaagaccaaagaaaacattatatgtcaaaatktgtaagatgcacgtctccactctccctttcctttgtgcccagagaaaaatcctaattgtgaatttggtaaaatgccttccag

SEQ ID NO: 527846 - DNA, 606 bp, Homo sapiens
ccagcagtcttgatttcataatctttctccagagctttgtaaaatgtccaaggatcctgggacagaatatwcactataagaaattattaagctgtctaaaaacagaaatagcttttacactgcctgtaagacagcaaataggagcgctggttggttgattgattgattgagacagcgtctcactctgtcacccaggctggagtgcagtggtacaatccgcagctcactgcagccttgaactcctgggctcaagcgatcctcccacctagtcttccaagtagctagcactacaggtgcacatcaccatgcccaggtaatttttgtattttttgtagagatggggtcttgctatgttgcccaggctggcctcataattcctgggctcaagctatccttccacctggacctcccaaagtgttgggattatgggcatgaaccactgcaccttgcctaggaactatttattaagcaaatgtaaacagtgttcactttcatatcatctgagaggacttttatacctttccctgtccctcaaactttgtattctcttttgctttcagtatttttagcatctctttttactgttaaaaagtgaaaagtatctct

SEQ ID NO: 527847 - DNA, 606 bp, Homo sapiens
ccagcagtcttgatttcataatctttctccagagctttgtaaaatgtccaaggatcctgggacagaatattcactataagaaattattaagctgtctaaaaacagaaatagcttttacactgcctgtaagacagcaaataggagcgctggttggttgattgattgattgagacagcgtctcactctgtcacccaggctggagtgcagtgrtacaatccgcagctcactgcagccttgaactcctgggctcaagcgatcctcccacctagtcttccaagtagctagcactacaggtgcacatcaccatgcccaggtaatttttgtattttttgtagagatggggtcttgctatgttgcccaggctggcctcataattcctgggctcaagctatccttccacctggacctcccaaagtgttgggattatgggcatgaaccactgcaccttgcctaggaactatttattaagcaaatgtaaacagtgttcactttcatatcatctgagaggacttttatacctttccctgtccctcaaactttgtattctcttttgctttcagtatttttagcatctctttttactgttaaaaagtgaaaagtatctct

SEQ ID NO: 527848 - DNA, 328 bp, Homo sapiens
tcatggttgttaatttttgaattatatgaaagtcctacatagaaggttctctcctggtgttttggcagatgtaagaaaattgatttcgtttgtagctgttaatttgagaatccattgtagatactagcaatttctgaaggaataagagattcacactttaatgggacttcacaatctttcatctaaaaattctagctcctggtrgggagacaagttccagacccacaactattagaaatatgttaataaactgggccccggattgaagcatgtctaaacaaactatggaatttaataatgtccgaataatgtggaaataatgttttca

SEQ ID NO: 527849 - DNA, 656 bp, Homo sapiens
ccaacttctaatttctgatctctgtctcctcagctcagcaaggtcactgtgctctactaggagtctggctctctgtgtcatccccaggcagagagtttggtgactgcggctcacttgtgaaaattcccttctcttgctgctagtataatgaactcttctgacctatgtatcacccagcttcaaaatcatcaacatttggccagtcttcttcaatctatatcactagatctagattactacctctaatctagacactatctctgctgtctaatctaaatcactgtgcaaattacttagagcaaatcctagacaggtcatttcacttataaatatttcagcatgcatctctaaacagtaagaattatttaacaaaacsccacaaaacactattttacacaacataataacaatattttcttaatatcattatatatatggtaatgttcaaatttctccagttctttcataaactctttatagttttttcaaatagtgatccaagtaaggtcccatacatcgccattggttgctgtttcctaagacttttaaaaatctttgggttgtttctctctcctccttacaaattacttatggaggaaatcagtctggattttcctaactgcagccctgttgtattatttaacatgttcctctgt

SEQ ID NO: 527850 - DNA, 534 bp, Homo sapiens
gtaggacatgattgaaaatgacttaaaagtcgcaagtctgtagtcccagctacttgggatactcagcaggctgaggcgagaggatcacttgagccccaggagttcgagctcagcctggacarcatagagagaccttgtctctaaaaaggaaaaaaacaaaacaaaaaaaaaaaaacagacaaagaaaatgaccttaaaccagtgttttatttttttaacttttattttaagttctgaggtacacatggaggtttgttttataggtaaacttgagtcatggcagtttgttgtacagattattttgtcacccagctattaagcctagtgcccattagttatttttcctgatcctctccctccttccaccctctgccctccaacaggccccagtgtctgttgttcctctctatgtgtccatgtattctcattatttagctcccacttataagtgagaacatgtgatatttggttttctgttcctgcattagtttgttaaggtcgggaggtggcctccaactgtatccatttcctgcc

SEQ ID NO: 527851 - DNA, 532 bp, Homo sapiens
tcaccctgaattctttcttgcttgagatccaagaaccctctcttggggtctggatctggacccccttcctgtaacagaactatgggtacatctcttttctttttgttttttttaagcctataaggggacaaaatgttaacagtatttcgttacctctggtcatgggactatgagtgatcgttakttgcttctttaaatacttgtctacatttgactctacaatgaggctgtattactgcgatagtcctaaagtgtcaattattgttaaagctctccattctgaagaaggtcgagaggtatcaggcatggagctagctggttgtcagcaggagtgagccccattttagctggaacctcatcctgagctgcccaaccctgtacgggcagccacctgccttctgcagagttgtactggccagagcatggtgcatctgggggtgtctcctccccacaaaggaaacttccattctccgcaaggtgtcagaagagctgcctctgctccccatgttcacctggcagggctgcagtgcat

SEQ ID NO: 527852 - DNA, 532 bp, Homo sapiens
tcaccctgaattctttcttgcttgagatccaagaaccctctcttggggtctggatctggacccccttcctgtaacagaactatgggtacatctcttttctttttgttttttttaagcctataaggggacaaaatgttaacagtatttcgttacctctggtcatgggactatgagtgatcgttagttgcttctttaaatacttgtctacatttgactctacaatgaggctgtattactgcgatagtcctaaagtgtcaattattgttaaagctctccattctgaagaaggtcgagaggtatcaggcatggagctagctggttgtcagcaggagtgagccccattttagctggaacctcatcctgagctgcccaacyctgtacgggcagccacctgccttctgcagagttgtactggccagagcatggtgcatctgggggtgtctcctccccacaaaggaaacttccattctccgcaaggtgtcagaagagctgcctctgctccccatgttcacctggcagggctgcagtgcat

SEQ ID NO: 527853 - DNA, 532 bp, Homo sapiens
tcaccctgaattctttcttgcttgagatccaagaaccctctcttggggtctggatctggacccccttcctgtaacagaactatgggtacatctcttttctttttgttttttttaagcctataaggggacaaaatgttaacagtatttcgttacctctggtcatgggactatgagtgatcgttagttgcttctttaaatacttgtctacatttgactctacaatgaggctgtattactgcgatagtcctaaagtgtcaattattgttaaagctctccattctgaagaaggtcgagaggtatcaggcatggagctagctggttgtcagcaggagtgagccccattttagctggaacctcatcctgagctgcccaaccctgtaygggcagccacctgccttctgcagagttgtactggccagagcatggtgcatctgggggtgtctcctccccacaaaggaaacttccattctccgcaaggtgtcagaagagctgcctctgctccccatgttcacctggcagggctgcagtgcat

SEQ ID NO: 527854 - DNA, 616 bp, Homo sapiens
ttatcctatgctgtgtccaacagagcccaggacttcgtcctcgtctgagggtcctggggcaggagcgctgtcctggctccaccagaaaccatctggtgtgggtggaaggggagttactcggtwttcccagtggctattacctcctgtgtcaagtcagggtgaatttctaagcccttcactaactttcagttttgatgctatgactaagaggacctttgttttgtttcatttggtttttcaaaatgagttgtgtgtgaatttttttactatgccagagtccaagcagaaaagaaaccaacagaaggaggatcttctatgacggcttcttgttagcatttaatgcaaatagagaccttctatgagactcaagaccagggctggcccagccgtggtgcatagtgatgctgaagagaaggaggtgggctctgaacccctccaacagtttcaggcctgtctccaaaatgtacaaggttgtagctttgggaaaaccactcagccttttgacacctcaataattttatctataaaatgtaaataaactgtgcatcctacccagaaggaatgttgtaaaaccaaaatgaagattgcacggaaatgggtagaaaaagtgtctggc

SEQ ID NO: 527855 - DNA, 616 bp, Homo sapiens
ttatcctatgctgtgtccaacagagcccaggacttcgtcctcgtctgagggtcctggggcaggagcgctgtcctggctccaccagaaaccatctggtgtgggtggaaggggagttactcggttttcccagtggctattacctcctgtgtmaagtcagggtgaatttctaagcccttcactaactttcagttttgatgctatgactaagaggacctttgttttgtttcatttggtttttcaaaatgagttgtgtgtgaatttttttactatgccagagtccaagcagaaaagaaaccaacagaaggaggatcttctatgacggcttcttgttagcatttaatgcaaatagagaccttctatgagactcaagaccagggctggcccagccgtggtgcatagtgatgctgaagagaaggaggtgggctctgaacccctccaacagtttcaggcctgtctccaaaatgtacaaggttgtagctttgggaaaaccactcagccttttgacacctcaataattttatctataaaatgtaaataaactgtgcatcctacccagaaggaatgttgtaaaaccaaaatgaagattgcacggaaatgggtagaaaaagtgtctggc

SEQ ID NO: 527856 - DNA, 616 bp, Homo sapiens
ttatcctatgctgtgtccaacagagcccaggacttcgtcctcgtctgagggtcctggggcaggagcgctgtcctggctccaccagaaaccatctggtgtgggtggaaggggagttactcggttttcccagtggctattacctcctgtgtcaagtcagggtgaatttctaagcccttcactaactttcagttttgatgctatgactaagaggacctttgttttgtttcatttggtttttcaaaatgagttgtgtgtgaatttttttactatgccagagtccaagcagaaaagaaaccaacagaaggaggatcttctatgacggcttcttgttarcatttaatgcaaatagagaccttctatgagactcaagaccagggctggcccagccgtggtgcatagtgatgctgaagagaaggaggtgggctctgaacccctccaacagtttcaggcctgtctccaaaatgtacaaggttgtagctttgggaaaaccactcagccttttgacacctcaataattttatctataaaatgtaaataaactgtgcatcctacccagaaggaatgttgtaaaaccaaaatgaagattgcacggaaatgggtagaaaaagtgtctggc

SEQ ID NO: 527857 - DNA, 616 bp, Homo sapiens
ttatcctatgctgtgtccaacagagcccaggacttcgtcctcgtctgagggtcctggggcaggagcgctgtcctggctccaccagaaaccatctggtgtgggtggaaggggagttactcggttttcccagtggctattacctcctgtgtcaagtcagggtgaatttctaagcccttcactaactttcagttttgatgctatgactaagaggacctttgttttgtttcatttggtttttcaaaatgagttgtgtgtgaatttttttactatgccagagtccaagcagaaaagaaaccaacagaaggaggatcttctatgacggcttcttgttagcatttaatgcaaatagagaccttctaygagactcaagaccagggctggcccagccgtggtgcatagtgatgctgaagagaaggaggtgggctctgaacccctccaacagtttcaggcctgtctccaaaatgtacaaggttgtagctttgggaaaaccactcagccttttgacacctcaataattttatctataaaatgtaaataaactgtgcatcctacccagaaggaatgttgtaaaaccaaaatgaagattgcacggaaatgggtagaaaaagtgtctggc

SEQ ID NO: 527858 - DNA, 634 bp, Homo sapiens
ataactaaaataaactaaataacccttcagttcatttcttggaataaaagtttaacttgagatctcctcgtgtgtaatatcaattgcttgaaaatgaagagaagaatatttttacaaagaataacttacggttttaaataaggtattgtttctattaaagtggacttaatttaaagttataaaaattaattcaaaratattttttcctcttaagaaggaatcttcctattgcatcactctatcaacaaatggaagaaataaactaaaataaatatggattccacagtgtttacatgcaacttaaacacagcatatcattgtctggtaaaatatttgtagtgccgatcagagtacagacttgaggatgctacttgaaataaacaaacgcttatctaaatctcggaggcctgcaaaattaagtttgggatttcccagcagcggggagcaggcttcctacaagcgtctggacttggatctgcacttgggaccatgaatctctggagcctggcctactggacgcagatgtcaccaacgccattctgccttcctcaccgtcatcagaggctgctgagcagtagtgccctgctttgcaccttcagagatcagcaaataaggtttattgtgcaggacacaa

SEQ ID NO: 527859 - DNA, 433 bp, Homo sapiens
ctctactaaaaatacaaaattagctgggtgtggtggtgcatgcctgtaatcccagctactcaggggactgaggcaggagaatcgcttgaaccggggaggtggaggttgtggtgagccgagattgtgccattgcactccagcctgggcaacaagagcaagactccatctcaaaaaaaaaaaaaaaaaagtcttcaaaatttttagctggatgacgacagaggggaatccaaaattccttccattctaaacaccagaggccgctttgagaaaatgttcctcccacactcacttctttccaggctctccatgagtcccgccagggcccatgggcctctttacctccaataacttcccttctgtgactccaaacgctgctaccagaatgtcagctttgcaggccccaggccygtccaccacaatctcttcttcctgg

SEQ ID NO: 527860 - DNA, 589 bp, Homo sapiens
tgacccttatgacaggtaagggaaggtatgacaccttcctgcttctgtagtagctttaaggaaagatgagaaaccaggctctgaagaccatcaccaaattcatttgccccatttcagcctgtagayagtggcccgtggcaataaagataaaaatctttctcccttagcggctgggttactgtgatcactactgcagcagggagaaaactgtcctctaaagttaatctggaaaccaacagaagtaaggccagaattttaaatactaaatattatactgtttgcttcagacatgaaccttcatgcaacatgtgagtggtgcataacattcttattttaaacgtaaatttatctgattatacctaaaattcttcaatataactaggtccaatgcaggcataattcagttccatgagggatggatatattgtgagcctgatgatgttagtgttctaagataaaatatttgggtcgctccatctagcccctctataatgtggctccactctgctcattcaacctccccagtgtgcttagactcctcacggcacccagcttcttttctaacttcccagtgaaaggaattaacaca

SEQ ID NO: 527861 - DNA, 589 bp, Homo sapiens
tgacccttatgacaggtaagggaaggtatgacaccttcctgcttctgtagtagctttaaggaaagatgagaaaccaggctctgaagaccatcaccaaattcatttgccccatttcagcctgtagacagtggcccgtggcaataaagataaaaatctttctcccttagcggctgggttactgtgatcactactgcagcagggagaaaactgtcctctaaagttaatctggaaaccaacagaagtaaggccagaattttaaatactaaatattatactgtttgcttcagacatgaaccttcatgcaacatgtgagtggtgcataacattcttatttwaaacgtaaatttatctgattatacctaaaattcttcaatataactaggtccaatgcaggcataattcagttccatgagggatggatatattgtgagcctgatgatgttagtgttctaagataaaatatttgggtcgctccatctagcccctctataatgtggctccactctgctcattcaacctccccagtgtgcttagactcctcacggcacccagcttcttttctaacttcccagtgaaaggaattaacaca

SEQ ID NO: 527862 - DNA, 589 bp, Homo sapiens
tgacccttatgacaggtaagggaaggtatgacaccttcctgcttctgtagtagctttaaggaaagatgagaaaccaggctctgaagaccatcaccaaattcatttgccccatttcagcctgtagacagtggcccgtggcaataaagataaaaatctttctcccttagcggctgggttactgtgatcactactgcagcagggagaaaactgtcctctaaagttaatctggaaaccaacagaagtaaggccagaattttaaatactaaatattatactgtttgcttcagacatgaaccttcatgcaacatgtgagtggtgcataacattcttattttaaacgtaaatttatctgattatacctaaaattcttcaatataactaggtccaatgcaggcataattcagttccatgagggatggatatattgtgagcctgatgatgttagtgttctaagataaaatatttgggtcgctccatctagcccctctatratgtggctccactctgctcattcaacctccccagtgtgcttagactcctcacggcacccagcttcttttctaacttcccagtgaaaggaattaacaca

SEQ ID NO: 527863 - DNA, 662 bp, Homo sapiens
gtgtgttattgtagctaattggctcttcctgcagtttctctcctacaggtcatgagcacaaataaagtccaatagagtcatgcaatctgatgcaatgttggaaacagtgcttttaggtaaaaggtgtatctcttagatttcaagctagtctaaccccgaaggtgaggttgagtgtggtgtgtaaagaagaaactttgaggaaagttcccctgtctgcctgtcagggtcttctgctacatgcaggtcttaactgaccctggcttatggcagagtctgtctgcctgggccctcctcacttccaggaaatgcactgttcacctctggtgcacaaggaaagtgttgtacatccttggttctacatcgcataggctggattttcttcctaatgggtcctgcatacctcctgagactcacctgtgactctgactttctttggccccagcacttggccccattaatctgcttcaaagccatttcaaccccaatgcagcagccactcctggcagaacccctyctcccatgccagccaccctcttgaggtacacacactcatctctgagttccttctagcccacacagaaggggagccaaggagtgctgcactcaggaacttttcctgcctacatatgaaatggtgaatccccaagtggtaagtgttagcc

SEQ ID NO: 527864 - DNA, 496 bp, Homo sapiens
gggatcactaacaggatcttggattcatttccatttttccagaataatcatcatcagtctgtttgtttttccttcaacagcaactcataaaagcttttggctctgaatctaatttcccaagaagaaactggccaygtgtcataggttctctagaaccagaatcttctgaacctaagccctaaaaagcttaataatgctcatagacttcgttactgaagcagatgtgagtgaatctagttctctcagttgtagtctctgtagacacactgatatgaaatgcacggtttcaacaaccttcagtgtataccctgaggatctaacccttccctcatttccaggttcctactttcctctgcctactctctgtcttaagacacatgaactatttggaatccaacttggaatgacccaataacattcaccagaatatgtggtgggatagcagcaaagataatggaaggaggaattgcccaagaggagtgactgtcaggggagg

SEQ ID NO: 527865 - DNA, 496 bp, Homo sapiens
gggatcactaacaggatcttggattcatttccatttttccagaataatcatcatcagtctgtttgtttttccttcaacagcaactcataaaagcttttggctctgaatctaatttcccaagaagaaactggccatgtgtcataggttctctagaaccagaatcttctgaacctaagccctaaaaagcttaataatgctcatagacttcgttactgaagcagatgtgagtgaatctagttctctcagttgtagtctctgtagacacactgatatgaaaygcacggtttcaacaaccttcagtgtataccctgaggatctaacccttccctcatttccaggttcctactttcctctgcctactctctgtcttaagacacatgaactatttggaatccaacttggaatgacccaataacattcaccagaatatgtggtgggatagcagcaaagataatggaaggaggaattgcccaagaggagtgactgtcaggggagg

SEQ ID NO: 527866 - DNA, 565 bp, Homo sapiens
attagaatgtgggtatttgtgaggcagctagccgccagcctgccacagctagtttcctctgaaccaagccaatctggactccaaagctagagcatgaactccaacagcttccatttttaggragcaggacaagtgctaagacccagaatccatattcaaactcatgccatttaagaggcgctcgcagctgagctctcactaatgaggttgaggtgtgatggggagggtcgtctggaccaggtcagtggacagctcaatggggccatgaaagagagggcctagaggcattgacctgatgtgtcactgatgggcacttgtcagcgcaacatgtagctgatgagttgcaggagaagctcagccctcgcaggccggggatgacctgcatcctgcctctttctcaacagcatgcctgcttttcctcagctccagagtgacccatgccacctccctgggtctcagtttctcctggcagaggagaggcaagcacagctttcaaccccgccatagaggcatccggcggcaatgaggaggactgcttgccgggctgcgtgcagagcatcatact

SEQ ID NO: 527867 - DNA, 635 bp, Homo sapiens
aagcaaggatcctttcttcctctgcagagggggaggaacgagcctttcccccagcccaagagcctcgccaggtgcttttatcggaaacttgctattttccctgggaagctgtgtgcaaacgcaggctgacagatagaagaatgtgcccgttaccatcagccacgtccacatggctttgcaatgtgtccccttttagtggcttagactccacmgccgctcgcgttggcaaacacgtttccttggctcgtccctttgaactgtccaaattaagtgtttctgcttttttggtttgtgtgtttttaatcagcataaataatttttgaggggaaggaataccaaagcacagcctcttctcccaagtcttttctctggccccctggagtgtctaactctgctcccaactccagcaacgcagatgactgagcctggggcaaaaccagagagagaggggacacgcggtgcattcagctgacaaacagaaacaaacacctttccagcaggttctacataatcgtccaacaaaactagggagaaggtatttttgatgtaaattccaggcagctgtgccctgtattttcttgaggaaataacaccatttcctaaagacgtctagcactgggatctcggcagcatca

SEQ ID NO: 527868 - DNA, 616 bp, Homo sapiens
ctgctggccttgttttcctctttgaagtggtaaacagtgttgaagatggcaaggagtggatgtcggccttttttgaaggtccagcctgtaagagcggtgctggaaggcatctatgcccagagatgagatgagcctgctagggcttccttctgggcccacagccacctttctgtggccaggtcagcttggttgtggcaaagtacaggcagagggcattccattgatgagccagacatcagcaggccacaccagtgttggcgcttcagcaaatgaaggctggccaggccaccatgctggctccagggagatgcyggaagtgtggagtgggctgtggcaatggccttgttctgggtactccatgaggaggggacactccacagctcagggcacacctaccatgagtccagagcaaaatgcagcgggcgggaatatgacaacgaaggacccctggaaacataatcccttccagagggacctgaaagaaagcatttcaaaggtacactgggtggacactaggggcttcacgctgccggccttccatgccctcccagcggcactgacttcctcaggggcattgcgtcctccccactggagaaagtcaaaccctccttcccag

SEQ ID NO: 527869 - DNA, 615 bp, Homo sapiens
tgccttcatataatgtaagtttctttgaaagagttctagcattttagtcctggtagtctgttaaatsgacatttgaaattaaccccacccctcaactgcaaaagaacccccaaaacaatagggggaagggcaggcactcagagggactcaccctgaaggggttggaatgataaacccagccatgtttaggtgtccaccaggggctgggtggacaattcttgctgtcttgtaagttttgtgatcctttgtcatttaaaaaaagtccatactagaagaggaaacgattttagagcctacaaatattgcacctatttctcaggtgcaatattaagtaatctgaagtcatttcaggacatgtctctctttttttccctctttactttgccttttaagagtagctgcttgaaataggcaaagcatgtgtgtcacacacatgctgcccacagagcttgaccctataagagaccctgctccaaacctgtcccttcctatatgcccctgtctagcctctgccccactcctcactccggaaggtccactctccctgaggaaaaggagctggaattaaaattttggttttattagacatgtatgcatgtttgacagtacattatg

SEQ ID NO: 527870 - DNA, 524 bp, Homo sapiens
ggcattcattcattcattcattcattcattcattcaccacattcaacaaataggtacggagtgcttgctgtgcaccagggactggtgtaggtgctgggagtaccaaagtgagcaaagtaaaggagtatgaggtcacaggagggaagcaaggcagatgtccagtacaaagcagcaagactggaagtctccaggagggacacacagtatgggcaagggggagcaaggaggaaatgaagtcaggagttaatggaagggcctgattgtccagggcctgtgggcatcggtcagaaaattgaacataagctgtgttgagatgagatggtagagggcgcggggtaacagctccaggagaccccttcactagtccagatgagaggatggtggcttgaatggggtgggtgggtagaggcataagaaggggtcagattctgggtctgttgtgggaatcaggccaactgagtgttttggtggatcagacatsaagtgtgagagtaaagaggagaaagaggccacccatggttggc

SEQ ID NO: 527871 - DNA, 605 bp, Homo sapiens
gtggtggcacgttttccttcaaaggtttccccccaccccgatttgtgtaactcttamagtcacacttgttctgtgggctttgtcctatttctcaggccttttacatggggacagcttttaaataaaataaaaattcctcttgcttcttacagattggatttgattaaatattccactgattaagggtaagcaaatgtcagcttcaatatcataaaaagagaaatgagagttcatacagcagcaaagcaaacaatccattttcatactttattagaaacatttattgccataatgactacattatattaagcaagcaggtggaaaggtgttccgtgcatgatatcttcaaataactttattttgaagatcttatccctccagtatttagacagatgttttattccctctaccagagtgagggcttgagttgctgtgattttagctcctccataagcactcgatgatcatggcctattcttgtgtttcaaacagtgggagctcattcaatgcactgcacaacatgaggtgctgtgggtacaaatagcagaactcactgggcactgctcggtcttcttccaaaatctttggctcacattctaagtgta

SEQ ID NO: 527872 - DNA, 605 bp, Homo sapiens
gtggtggcacgttttccttcaaaggtttccccccaccccgatttgtgtaactcttacagtcacacttgttctgtgggctttgtcctatttctcaggccttttacatggggacagcttttaaataaaataaaaattcctcttgcttcttacagattggatttgattaaatattccactgattaagggtaagcaaatgtcagcttcaatatcataaaaagagaaatgagagttcatacagcagcaaagcaaacaatccattttcatactttattagaaacatttattgccataatgactacattatattaagcaagcaggtggaaaggtgttccgtgcatgatatcttcaaatawctttattttgaagatcttatccctccagtatttagacagatgttttattccctctaccagagtgagggcttgagttgctgtgattttagctcctccataagcactcgatgatcatggcctattcttgtgtttcaaacagtgggagctcattcaatgcactgcacaacatgaggtgctgtgggtacaaatagcagaactcactgggcactgctcggtcttcttccaaaatctttggctcacattctaagtgta

SEQ ID NO: 527873 - DNA, 616 bp, Homo sapiens
ataacttcagtgacttgggaaataattataaattagtgtcaagtgaaaaatagcatattaaagaactgatgtacaaaatgatctcaattattgtaatttttttaaagcaaaggtaccaaaagtctaagacaaatatctctgaaaggtaggattacagatgaatttacatcatgcctccaatgtttttgtatttaaaaacactattaaaataaatgtttttaaaatttataactggaaagaagtaattttggatttatataccaatactcctgaaaaaatggcaacagactttttttggttctctataaattttgctagtgagctacaggattataccaactgcattgttaacagtcattctggaactcacctagagataggctgtacagaaagggaaaaactgcaggttaccaggatctggaataagttgaatcagaaaggaaaggttataaaaatttggggaagggagatgggattcatcaataggcagatgtgtgtaaagaaattaagtaaatcaagattacaacaaatgggcataaaaccacttgsacatagggaaagttgtagaggtgaagacagagtgctctgtcttaagtaaatgtcaggagggcccaca

SEQ ID NO: 527874 - DNA, 545 bp, Homo sapiens
tgaagctgtttatatgaagctgtttctatgacatgtttatatgtgtttcaattttatcaaatactgtttacttctctcaagtttgtgtttaaggactaactacttccgaattacaaagactttgtgtttaatatagacttcagatcctattgcagattgtcttgttcacaaggtctaggcagggcctgggaacatattatcaggctcttcaggtgatctttatgcccagccaggtttgggatcagcgaataatgaacataaattaacctttatttgatgactcagcatctttttcttcgtgtctgttattaaactgcaagttcgctgcagccatagctaatgcaagtgatggtcaccaactcccttggtctcattttcctcacccataaaaataaattggattaygtgatctctaaaatcccctttacttctaaaattctaattcagaaaggagcttttcacaagatgtttactaaaaacattggttctttaacgaatgcctcaatatcatttgttatttgcctctttttcataaacatggaaag

SEQ ID NO: 527875 - DNA, 621 bp, Homo sapiens
caaatcctgcaaaatttgtactattatcctcattttataagtcaaagagcctgaggttcagagatattatttcctcaaagttcatctgcaggtaggtggcagttggggtcaggattcaaacccacatttctctgattctaaagcatatacattttatatcacacagggctgcatccaatagagcaccaacagttctgccaaatttgcccaagtcttgactaaaatccacctacttccttccctccgtaggctatttgctaccttagtgtatgctgtcattagttctcacctggactgatggcataagctttctcacttgtctctctacctccarccttgctgtattctctagtggtatgtctgttagctgactgatcataagcaagttcctgtgtgctcaccctgaacctactaaatcacaatccccaagccttcatgtcagtcttagtaataagcacctcctgttgattcttatgaggagcgagtatagccaaaggcagttctaaaaagaaaactccaggctcaaagccttcagtggctcccgttcacctacatgataaattgaatattctttaatctgacatttaagggccttttatggtctgggtaaaactcgtcctt

SEQ ID NO: 527876 - DNA, 303 bp, Homo sapiens
tgagttgactttgatcacaggacactgcgtggccacctgacttgcattagaaagaaacctcattgsgaatcacctctacagagtcaggggccctggcttgagcttcaggcatgaatttctctgttgtgggcacccaaataaggatgggaagaggtatatttagttttttgcaagagcattttgctctccaaatagctgtatgaaaatcagactgtgcttcattgttaggcatccagaacatgttattaattgagtgtagagacgcattaggcaggattagttatgcaatcagcagcgttcgag

SEQ ID NO: 527877 - DNA, 303 bp, Homo sapiens
tgagttgactttgatcacaggacactgcgtggccacctgacttgcattagaaagaaacctcattgggaatcacctctacagagtcaggggccctggcttgagcttcaggcatgaatttctctgttgtgggcacccaaataaggatgggaagaggtatatttagtyttttgcaagagcattttgctctccaaatagctgtatgaaaatcagactgtgcttcattgttaggcatccagaacatgttattaattgagtgtagagacgcattaggcaggattagttatgcaatcagcagcgttcgag

SEQ ID NO: 527878 - DNA, 584 bp, Homo sapiens
ctggacacttgacccttgttcttatgggtgaccaaccctgtccagtgaccccataattcatagtgaacagagtctcagattttagatcccaaaaattgtatccctgtctgtctggaactttggcacattttccaaggacaaagaagcacttaatgggcatcttagtaaagaggaaaatgaggaaggaaagggtggctaagaagaggccgtgattctcatgcataagcccactgtctgcgagccaaaccacattgtcatctgcggagaggagagaaagccacacacccttgtaaagatggatgaaatgtgctcaggaatggtgtaggagagaaaaccagaggaaggacatatttattgagtgcctagaatatgtcctacacacatctttcaacagctcctagaagtgaggtactagtagcttcatttcacagacaggaaactgaggcaaccggaaagcgataacacacagaagatctagctgataagggggctgagccagagtttaagtccaagtctctctgactaaaacccttgcccttcttggaamactggactgcgtctccagaatgatttgaagggaaata

SEQ ID NO: 527879 - DNA, 320 bp, Homo sapiens
cctgctggcacagccccctccacatcccactccctcctcactcattttatttctgtccgtttcattttgttagcatttatcaagtcagagcatgggtagtcttggtctacatactctcaactctccagcgatcaccctctttcttgttcttgggggatcccctggcttcccagcttcttttaatcagttgcttttatgggtctacagggaaatgaccatcaattcmgaaattcagggcatcgaaaggaaaaagccaacttcaagggaaaggccttccccctgccttcgcccagtctgcccagggaggccgtaccaatcag

SEQ ID NO: 527880 - DNA, 578 bp, Homo sapiens
agctgaatgttggagtgatggaaaggatgaaactacataggaagaaaagattgaaaaaagaaggcaaatttgaaggaagtcagctctaagaaacctcaatcattaatggtgcggtaaaaaggatgaacttacaaaacaggggagagaaacagcagccacagcaataggagggaaaccaggggaatgtggtgcaagagaagccaagagaagagagtggatttagaaggaaggagtagtcgagagtgccgagtttagctaagaagtcaactcaggcaagagtggaaaatgtgcataggatttaatgacaaaaagttcrgcagtaacccttgcaaaacctgtctctatggagtgaccagggcagaagtcaaaagtgaatgggttgaagagtaaaatggaaaagaacggagaaacccactattgacaattcttccaagaactttagctggggagggggggggcagaaagttgagaaagagctgcaagaataatatatgagcaaaaagaagaggttgaggtttttatgggagagacataagcaattgcacatcaaggtctcagcccatcttttctcaggcaat

SEQ ID NO: 527881 - DNA, 594 bp, Homo sapiens
tgaacacagtgctctgtttttcagcagcagttgaggtaccttgaaccatgaagaacccttggtatcagaacatcatgacttttcaaacaaaatacagaaacagaagctaccaaacattcaccttttcagttcatctgaaaagctaccaagtgagattgtttttaatggcacatttataccaggtaattgtctggcattatttaaaaaatgggatgaatctgtttgttgacacagaaagggcaacaggattacatagttaccagggacacagactttgaagtcagataaacctgagttcagatcccagctctgttacttgtaacctgtgtgatcttgggcaagttattcaatgtccctaccctaagcccaaayatcttcatctgtaaaacatgataaaagtattactgcccatagggtcattttatgacactactttcttttgtttttaagtgcgcgtgtgtgtgtatatacgtatacatatatatacacaaacacacatatatacctgtatatatatgtacacacatacacaaggcaaaatgttggaaatatattttttaaggtttctgtgtacttttcatactgaccttgtat

SEQ ID NO: 527882 - DNA, 519 bp, Homo sapiens
cgatccagcgaggctctggtttaacttttgcattttgcttaatgactrttgaatccactcagtctggcgctggcctcccaattattaccaagttgtgggcgttaggggaaagcgcaggggtagcggaaatgaacggtgggtgtttcaaggaaaaattagagaagaactggctggaaaaactatctgccgaagacacttctgcaggctggcatttgcaaagaaatgattttctgtttgtttaatcaagtgtttaattttttaaaagaagagggagaaagcgaagggaaactgaactattcactctctaccagaattagggctgggcgtttgggcacatacttcatctagctgagtagatgggaaagatgtaaatgaagaggaattggaggtgagttttgagaggcagttagggtttggggcccggtgctgggagggtgggaccatggggctggtagtggctttcacaggggaagaaatggtgcaggcaaggcagctatcagggaagcctggagacagggg

SEQ ID NO: 527883 - DNA, 625 bp, Homo sapiens
actatggatctcaaaattccgcctcctggctccatcatgatgctcattccattcaaggcagatgagatatccaaggtggactctgcaggattacaygcttctctccgtcctcttacatgaactttctttcatagcattgagggttcccagacctccctttgaaaggcacactaaatgcatacacacctaaatgaataaatgaatattgagacagcacaaagaccctggagatgacactgctgtatcaaaactgttaattgatgcttgtaaaggactattttggggtaaagggagctacccagcatccattctgctgtcttgggggagagtaccctgatttcctttgcggtaatcgctgtgcccatgtggaatcagttcttcaagactgaatttcaaatatgccctccctcttttgggcaacagcagaacacacctccagccaggcttctcagagctggcctggaaaactccaaaaagagggtctttccagtcaggactcttcatagaccctgatagcaagactctctgcagcaactgagttttggtaccagctaagcctggcttccaaatctccctctgtcctgtgaattgcctggtagcctctcaataaatcatggcctttcat

SEQ ID NO: 527884 - DNA, 625 bp, Homo sapiens
actatggatctcaaaattccgcctcctggctccatcatgatgctcattccattcaaggcagatgagatatccaaggtggactctgcaggattacatgcttctctccgtcctcttacatgaactttctttcatagcattgagggttcccagacctccctttgaaaggcacactaaatgcatacacacctaaatgaataaatgaatattgagacagcacaaagaccctggagatgacactgctgtatcaaaactgttaattgatgcttgtaaaggactattttggggtaaagggagctacccagcatccattctgctgtcttgggggagagtaccctgatttcctttgcrgtaatcgctgtgcccatgtggaatcagttcttcaagactgaatttcaaatatgccctccctcttttgggcaacagcagaacacacctccagccaggcttctcagagctggcctggaaaactccaaaaagagggtctttccagtcaggactcttcatagaccctgatagcaagactctctgcagcaactgagttttggtaccagctaagcctggcttccaaatctccctctgtcctgtgaattgcctggtagcctctcaataaatcatggcctttcat

SEQ ID NO: 527885 - DNA, 664 bp, Homo sapiens
cagtgctgtttctaataatagcacattataaacaatctatggggtcaatcaacagaggaatggtccagtaaatcatggtatagctatataacagaraattagaaagctgaaaaaaagaagaaataagccctttatattcaaatataaaaggaactataagagaacatattccaagtagaaaaagcaggtacagaataatatgtatacatggatgactttttgtttaaaaaagcaaaagatccatttttaaacttagatgaagaaaaatatcacatgaagggtaaacaagaaaccactaacaatggctacaagttttggttttggaggctttgggaattaggacaggaaaaatatttcctgctacttatctttttatcttttttatatttttggtatacatgactggatgaccttgtcaaaaattaaaattaaaaattcgatggggaaaatagagattgaattattcaacatcctaattcccaaagaacaacatcactggccattactcatcactggaggattgatgtagtatcagaacatcttaaaattcttttcatcatgccaaaatttattaaaactaagaaggtggatcctttcagccacaatttggtgaatcggatgttcttaacaaagaattttttgaaggagagggtggtgctgtttt

SEQ ID NO: 527886 - DNA, 664 bp, Homo sapiens
cagtgctgtttctaataatagcacattataaacaatctatggggtcaatcaacagaggaatggtccagtaaatcatggtatagctatataacagaamattagaaagctgaaaaaaagaagaaataagccctttatattcaaatataaaaggaactataagagaacatattccaagtagaaaaagcaggtacagaataatatgtatacatggatgactttttgtttaaaaaagcaaaagatccatttttaaacttagatgaagaaaaatatcacatgaagggtaaacaagaaaccactaacaatggctacaagttttggttttggaggctttgggaattaggacaggaaaaatatttcctgctacttatctttttatcttttttatatttttggtatacatgactggatgaccttgtcaaaaattaaaattaaaaattcgatggggaaaatagagattgaattattcaacatcctaattcccaaagaacaacatcactggccattactcatcactggaggattgatgtagtatcagaacatcttaaaattcttttcatcatgccaaaatttattaaaactaagaaggtggatcctttcagccacaatttggtgaatcggatgttcttaacaaagaattttttgaaggagagggtggtgctgtttt

SEQ ID NO: 527887 - DNA, 373 bp, Homo sapiens
actaacaatggctacaagttttggttttggaggctttgggaattaggacaggaaaaatatttcctgctacttatctttttatcttttttatatttttggtatacatgactggatgaccttgtcaaaaattaaaattaaaaattcgatggggaaaatagagattgaattattcaacatcctaattcccaaagaacaacatcactggccattactcatcactggaggattgatgtagtatcagaacatcttaaaattcttttcatcatgccaaaatttattaaaactaagaaggtggatcctttcagccacaatttggtgaatckgatgttcttaacaaagaattttttgaaggagagggtggtgctgttttcag

SEQ ID NO: 527888 - DNA, 465 bp, Homo sapiens
gctgcacagtggcatcagtggatgctatcatcatcatgaaatccaaactgatttccctactaggaattggaataaggatattgatagggctgtctttctccttcctcaaaactcctcacactggtgggctgagatctcctayagtcaagttacctctgactgtcctaagtctccattcaatacagtagttagtacaaaccctgcccgcagcaataatagccaacatttttagcacataactaatcccaagcactgagctaagcactccataaacataagcccagggaagcctcagcacatcatcacaaagtagagatggttatcatttgcactttacatgtggagatactgaggctcagaaagggcctttctcttgcccccagatcacactcgctggaggtaacagaactggacttcaagccaaagtctgctggctgcagagcctgagatcacagccattctgct

SEQ ID NO: 527889 - DNA, 657 bp, Homo sapiens
cacagtggcatcagtggatgctatcatcatcatgaaatccaaactgatttccctactaggaattggaataaggatattgatagggctgtctttctccttcctcaaaactcctcacactggtgggctgagatctcctatagtcaagttacctctgactgtcctaagtctccattcaatacagtagttagtacaaaccctgcccgcagcaataatagccaacatttttagcacmtaactaatcccaagcactgagctaagcactccataaacataagcccagggaagcctcagcacatcatcacaaagtagagatggttatcatttgcactttacatgtggagatactgaggctcagaaagggcctttctcttgcccccagatcacactcgctggaggtaacagaactggacttcaagccaaagtctgctggctgcagagcctgagatcacagccattctgctaggggtcagagtctgtctgcagcagtgaaggtccatggcagcgtgttcctggctgctgccttcaagtgcccttcagaaaaagtgaaactcactctaagaatctcagaggctgaatcaaaagccccctagtaatattctgtgccctctaggtttctaaatcctgttatcctccagccaagaggcgtggctcaagcat

SEQ ID NO: 527890 - DNA, 641 bp, Homo sapiens
aaaattttttgtgtctagtaatattacccagggataatagaatgaaaaatttattcactgttgcttggttgctcttgtgtayataaatcccctttcagctcacagggataccctatgtgtaaagaattttaaagttgtaaaatagaatgggcgcttgttactatttataagcatggcatggaataatactgagatgtttcctacatttgaaaaaaatgaatttaactgtcattatcttttctatatccatttaatattcattagtacagtagtttgaaaagtgggctttagagtaagaaaaacaaatgtggctgcatctcaactgtgctgttattgtatgagtgacctttagcaagtagtttaacttccaagttttagggttttttaatgtctaaaattgagataagaagaccattttcctcataggatttttgggaatattgtctaagaaatatatgcagcatgcctataacaattccaggtactttgtgagcagatgatatacatcaacaatattgtcaccaccagttaaattaattagttccattgaaattgtgattactattttaccctattaaattaaaaccctgagcctgaaaagcaggagttgctgggattctgtgcttacagcaatattagaa

SEQ ID NO: 527891 - DNA, 643 bp, Homo sapiens
ctggccacgtaactcctgagcagaaaaagtgtgcagaaactatgtcttggtagagttcaaaccactcccataatcccattcttgtggcctttcattaatcttacaaaggccgtttcagtccccaaacaaggagaggatcagctatagagatggattattatcatcyttgctttcaaattaaactataaagtaaattcctcccaaagataaatttgcctatgctcaagagtggccaacaacagcttggaggttggaagcaagatggagttaactatgcgaaaggaaaataaatctcagggccctaaaatcactaagctaaagggaaaagtcaagctgggaactgtttaaggcaaatctgcctcccattctattcaaagtcacccctctgctcactgagatgaatgcatatctgatttggagaggctaatctgaaactcaaaagaacgcaatcatttgtctcttatataccaatgacttgggagtctcctccccgatttgcgttgttccgcctttgcttcaagttgtcccacctttccggacctaaccaatgttcatctaacatatgttgattgacgtctcccgtctccctaaaatgtgtgaaaccaagccatcctctgaccaccttggtcacatgtcgtcagga

SEQ ID NO: 527892 - DNA, 643 bp, Homo sapiens
ctggccacgtaactcctgagcagaaaaagtgtgcagaaactatgtcttggtagagttcaaaccactcccataatcccattcttgtggcctttcattaatcttacaaaggccgtttcagtccccaaacaaggagaggatcagctatagagatggattattatcatccttgctttcaaattaaactataaagtaaattcctcycaaagataaatttgcctatgctcaagagtggccaacaacagcttggaggttggaagcaagatggagttaactatgcgaaaggaaaataaatctcagggccctaaaatcactaagctaaagggaaaagtcaagctgggaactgtttaaggcaaatctgcctcccattctattcaaagtcacccctctgctcactgagatgaatgcatatctgatttggagaggctaatctgaaactcaaaagaacgcaatcatttgtctcttatataccaatgacttgggagtctcctccccgatttgcgttgttccgcctttgcttcaagttgtcccacctttccggacctaaccaatgttcatctaacatatgttgattgacgtctcccgtctccctaaaatgtgtgaaaccaagccatcctctgaccaccttggtcacatgtcgtcagga

SEQ ID NO: 527893 - DNA, 657 bp, Homo sapiens
tagtaatttggaatgtggctaggagattacaccatgttttttaaattacataatgcaagaaattttggaaatttctgtttctatttaacctttgcagcagtgtgtgtgtgcgtgtgtgtgtgtgtgtgtgtgtgtgtgagaaacaaaatggatatcttctgaagaacctgtataaaattttaatataatcccagagacttttgaatattctctgctgaagttattcataaaatattttcccaccttcttaaattcggaaataaaatgaataagaatgcgaagggtattaactgggggattagctgygtgagcaatggtgcaggggcgtggcacactgaggaccacacaagattgatcctacagaaagtgctacagattacataaggaaaacattacaagtgggtaatgtaggttcaaaatatgaataatttgaataattcttttaataaaatgcccactgctatgcctgagtagatgataaaaaatatagcactcagaaataaacttgaatattgaaccttcttctttaattttaaggggcccaaaaatataacattcaggctctcacaatagaaatatatgtatagtctactactatgaaactaaaaagaaatgcatattaatctataaattcaatggtgcaggcatttaaactct

SEQ ID NO: 527894 - DNA, 592 bp, Homo sapiens
gtagattcttgaaatagacactgacattttgaaaacatctctttactaagattgatctactggtcataagcaaaacaatttgtgggtgacttaaaacatttttagttcccatcactaaataaacattttaggagacatyaggcaaaattttgacatggctggaagagtatttcattctgaaaatagtatgtaaccaaccttataaatatacttattttattcatgcacttaaattataattagttgaatttatcatttaaaaaatatatataaattgtatttccttaaaattataataaagtgatatcaaatattctgacttgaatgacgtgtggcaaggcttaaaggaaatttcaatattcctaaaaactctgtgtttaactttggagcttcctactaaaaagatgatttagttgtagagttgctgctgacagtaagatttgaacatcttattgttaaaactttctgaactatagaatgaataaaatgtttacatgtgtatatgtatgtgcatgtttaaccgataaaacaaaataacctattcaacaagaacttttaatgcctctagcatttaaaatgaatgaatttgcca

SEQ ID NO: 527895 - DNA, 592 bp, Homo sapiens
gtagattcttgaaatagacactgacattttgaaaacatctctttactaagattgatctactggtcataagcaaaacaatttgtgggtgacttaaaacatttttagttcccatcactaaataaacattttaggagacatcaggcaaaattttgacatggctggaagagtatttcattctgaaaatagtatgtaaccaaccttataaatatacttattttattcatgcacttaaattataattagttgaatttatcatttaaaaaatatatataaattgtatttccttaaaattataataaagtgatatcaaatattctgacttgaatgacrtgtggcaaggcttaaaggaaatttcaatattcctaaaaactctgtgtttaactttggagcttcctactaaaaagatgatttagttgtagagttgctgctgacagtaagatttgaacatcttattgttaaaactttctgaactatagaatgaataaaatgtttacatgtgtatatgtatgtgcatgtttaaccgataaaacaaaataacctattcaacaagaacttttaatgcctctagcatttaaaatgaatgaatttgcca

SEQ ID NO: 527896 - DNA, 550 bp, Homo sapiens
gggttacatagtttgcaaaaggctcacagcatgagtgagccctagttgcttttaatattgctattagttaatgaacctgttattactttccttttttcacgtatcacaatcccatgtgccttgcttgtacttcctagcaatatctaccacataaactgcctgatcaagggttacttaagtgcctacttttgatgggaattcaaatggaagctatatatcagtttgaaattagttatacgatttgattcatcattttgatggagtaacctttaagataatcttcttttaagaatagatttttatgaagcttgtgtcattaatattcttattccaagccccaaagcaaaaatatttgtcagagactgrggtcctggatggctctaaatctcaatacagaagactgatttttattatttcagttagtaagtgtgatagtcagagtaatttctcttctcccaaagatgtctatgttctattcccagacacctgtgactaggttatattacatgataaaggggaattaaggtagcagatggaattaaggctgcta

SEQ ID NO: 527897 - DNA, 601 bp, Homo sapiens
aaacgttatgattgtgacacagattataatattactaatttttggatgtttcaaaaggtcaagaagtaaaagatattagaaaaaaaaatgaaaaacaaacttggatgttgtgataaatttgacatacagtgttataaagaggaaggagtcaattattcttttgtgtggtattatttaagagaaagtttttctccatgaaaaaagctttttatttacaaaagaaaaaaagacataaaattgaagctatcccactgtcaaattcaaatttttttaacttcttgtataggctgcatcaccaggttctattgttaatgagaaaagagaatgaaaaaaaaataaagctagctgagtacttgttattcattcatttactcagttattcactaaataattaattggagattttgktaagacaatagaaggattatttgaaaaataaaggaaataagagcttacacatttatggaaggatatatctaacaaacaatacaaatttacaggtagggttcccttcgagactagtaatagctcatcactagaaattgatctgactgtagccaaatttatctaaggaaattgttataattttggtctagatagc

SEQ ID NO: 527898 - DNA, 454 bp, Homo sapiens
ttactctgatggagtatatttagcataagggaagtaacacaacttcaaagattgtgggttccaccttcttttggtctctcacttatcttctaaaggttaagagcataggcygggggcggtggctcatgcctgtaatcccagcactttgggaggctgatgggggcagatcaagaggtcaggggttcgagaccaacctggccaacacaatgaaacctcatctctactaaaaatacaaaaattagccagatgtggtatcatgcacctgtagttccagctacttgggaggctgaggcaggagaatcgtttgtgcccgggaggcaggggttgcaaagagccgagactatgccattgcactccagcctgggtgacagagtgagactctgtcaaaaaaaaaaaaaaaagcatagaccatacaatcagaatactgagttcaaatttctattccaccatatac

SEQ ID NO: 527899 - DNA, 591 bp, Homo sapiens
gtagtgtagccacactccacaggaggctaagtgtgtttgtttctttgtttgtttgtttgtttttgagacagggtctcactctgtcacccaggctggaggccagtagtgggatcttggttcaccgcaacttgcgcctcctgggttcaagtgattctccaacctcaggatcccaagtagtaagtggtattttaatcaaacgactctctttggaatgtaaccaacagcttgtagaaacatagtggaatayttcctactatgtgaacccttggaatgtcttaccaagcaaaatggctgcagttttctattagtggagaagtttttcctgaatggaaatgcataatttggatttaataagactttccaatataagctgtacatacaaatgcgtattttctcctttctttgtgttaacagcatgagataagctgtagaccaattttatgtagcattttatatgcaaataagaagttatttttgcatgttttcatttttataggagacaggcaagagaatttcaaataatgcagttttccattctagtcagataattgacttttctatttagttaattctgctttctatgtgcatgtt

SEQ ID NO: 527900 - DNA, 609 bp, Homo sapiens
tgcatcattttccccttgatctagaaattgctaggtggcagaattccacatactagattgtcatataacctatccacacaaactttaaatatcaacttacgtccccagaaatctgaaagatttaatgttgtttccaaaggtatttacagtacatcaaagacttttgatgacagttcatccaaaataaaaaaaaaaataggagaaaaaaagcagcagcctgacacctatgatatatctgccaygtctttaatacattgttatgcaattatttattgttttacataagtaattcatgcttgttttagatgtaacattttaaagttacctaaaatacaaccaaccagagatgatcattacaaatactttgttgtttagccttccaaaatgttgtcctagtcattaaattttagtaaaaatagaaatatatttatcatattgtacagtctactgtgtaactgcctttctcatttatcaatattaatatcttttcatgtcccatatagaattatattttttcatgactacatgtttttattttatttaatgaatgtcaattatttatcagtcccctactattgggaatctaggttattttccttatttatttac

SEQ ID NO: 527901 - DNA, 535 bp, Homo sapiens
tttcattggcagtgttagtaattatkaagagggcaggagaaaatacagagcacaacttaaggaaacacttcttatgagagcactattacctactttagagttgaacaacagaccttgtacctaagcaaatatttttgtcaataactggcacattttagtattgaaaataatcatgaatcacccagttcaattacccatctgttgctcaactctcctctagaatatttaggtaagaagtcatccagttatgtttggctacatcaagtaataagtaactatacttcccatgcctgcccatttttatctttgaacaattctgatagttaaattgttttttacattaagctgaaatatgttttcctctagcttcagtccactcattctagtcctgatctttagagcaatttcagcacattcaatccctgttctaagtgacaagccttcaattacccgactcctcttgagacagttgccctttcagatcttcatgtcacaatatcattctgaacatgtggaaatccacttctccaaaatc

SEQ ID NO: 527902 - DNA, 535 bp, Homo sapiens
tttcattggcagtgttagtaattatgaagagggcaggagaaaatacagagcacaacttaaggaaacacttcttatgagagcactattacctactttagagttgaacaacagaccttgtacctaagcaaatatttttgtcaataactggcacattttagtattgaaaataatcatgaatcacccagttcaattacccatctgttgctcaactctcctctagaatatttaggtaagaagtcatccagttatgtttggctacatcaagtaataagtaactatacttcccatgcctgcccatttttatctttgaacaattctgatagttaaattgttttttacattaagctgaaatatgttttcctctagcttcagtccactcattctagtcctgatctttagagcaatttcagcacattcaatccctgttctaagtgayaagccttcaattacccgactcctcttgagacagttgccctttcagatcttcatgtcacaatatcattctgaacatgtggaaatccacttctccaaaatc

SEQ ID NO: 527903 - DNA, 530 bp, Homo sapiens
agggctctctaccttctggatgctgccgctggcacagaggctgtcttggaacagaagagcttgagctctttatgctgtaatagctaagccagcacttttaccccwtgctggccttgaggccagcttgtccaaggcactgaggacacatgtgcagtatcatatgtccctctcttctttaaattaggtcagccaaaattcaagtttacttttgttttgatgatggggggtgggatgattggccagggcagggctttagacctctggatcatgtgctgcaatccagcctaccagaatgtttcctgatgaggtctgggtgccaagtcaacttagcaatacagtgccactgtttttcctttccattactccttacttgcatatacccctcattgaggaagttgactttgggctggagtagaattcagatatttctgggtctcctggccatttggccatcccaagcccatcccaacttccaaggccacatttggacaggggaaagcagcacacaatgtctagagcatgaaggacaa

SEQ ID NO: 527904 - DNA, 623 bp, Homo sapiens
tatgggctagtgttgacattttacaagcatgagtgaggataggattcttctgtcttcaaggattccacaggataggagagaagataaggcatgcataaggagctaatacatcatctgtacaatggtgtatgctktcagagagagatacagataaagagccccagaggttcagagaaagaagagatgatctctgaactcaagaataccacaagcaagatggcagatggtaaagcaacaggattcaaataaaagcatgttgatttagtatcctgaaactttactgaaatcatttaataactctagaagccttttggtggagtctttagtattttctaagtacagaatcatatcatcagcaaagagagatacgttaacttcttcttttcctgtttgggtgccttttatttctttctcttgccagatggctctggctagaacttccagtactatgttgaataagagtggtgagagtgggcatccttgtcttgttctagctccagctttttcccattcagtataattttggctataggtttgtcatacatggctcttattatttttaagtatgttctcaatgcaacgcagccataaaaaggaatggaagaatgtccttcgtagcaacg

SEQ ID NO: 527905 - DNA, 455 bp, Homo sapiens
ttgccaaaataattatcaataatgtgcacaaaagttaatttccacaccaattttcaagaataataatatggatttaatatattgtgaatggcattctggcccatggcctattaataagtggaaggaaaggaaaggaagggaagggaagtgaaggggaagggaacgggaaggggagggagaaaggaaagaaggagtggggggaagggagggaagggaaataaggacagagagaggcaaggagggaaaggaaggaaagaaatcataaatcaccaccattcatctccttaggataattttgaaccagttttttatcccctttctwctttacattcttccataaagccttaccaaatctccttcttgtgtcctgttatataataatgtcatgtacattatataattaaggcaaataacccatgcccttatggggcttctttttcagaataagaatacac

SEQ ID NO: 527906 - DNA, 647 bp, Homo sapiens
ctgtgacgctgcagagcaaggtaattgccaaaataattatcaataatgtgcacaaaagttaatttccacaccaattttcaagaataataatatggatttaatatattgtgaatggcattctggcccatggcctattaataagtggaaggaaaggaaaggaagggaagggaagtgaaggggaagggaacgggaaggggagggagaaaggaaagaaggagtggggggaagggagggaagggaaataaggacagagagaggcaaggagggaaaggaaggaaagaaatcataaatcaccaccattcatctccttaggataattttgaaccagttttttatcccctttctactttacattcttccataaagccttaccaaatctccttcttgtgtcctgttatataataatgtcatgtacattatataattaaggcaaataacccatgcccttatggggcttctttttcagaataagaatacacataggcaaacaaggtcactgcagcccgtgcyaagttctaggagaacgtagagggatatgatcatgagaacaagggactggatagtggcacagcactggaagaaggcctgtctgagtcactgagatttatactgaatcctaaagaatgtggaaagaggaagcctttctg

SEQ ID NO: 527907 - DNA, 662 bp, Homo sapiens
ctgcacctttgtggtttgacaggcagccagtaataattcaaaaatcrcccacttttccaggatggcgcagcctccacaaggaaacacggtttggagagcagagcaagggtcttgtgtcgtcacctcaattgtttgcctattttagggaataacctgtgcaatgctcaaacaacacgttttttaactttataatcaggtcctcatcttcttgttctttcatctactaattgaagatgattgaaatggcaaaaatggcttcaataagatgaccttaaaaggaggtgggggcaatctttgaaggatccctgtgttgatttctttagagaagaactttgcaaagagttaaataatgtcactgttatataagtcacattggatccttcaagccagaaaatcagttagttaattctaataacggtttaattgtttatattcaattcatggaatcagagtcaagatattggaagctcactttgccaaaggtaaaacatctaacattgtaaatgttattgtaaaattattttatatgtcaacattaagaacaaatgacttgctctgtggtgataatacaaattttggtagagctcagtgggtaagtgccatgatgcaaacaatattcttactaaattaagaaagcctacagaacagaaaggttattggag

SEQ ID NO: 527908 - DNA, 662 bp, Homo sapiens
ctgcacctttgtggtttgacaggcagccagtaataattcaaaaatcgcccacttttccaggatgrcgcagcctccacaaggaaacacggtttggagagcagagcaagggtcttgtgtcgtcacctcaattgtttgcctattttagggaataacctgtgcaatgctcaaacaacacgttttttaactttataatcaggtcctcatcttcttgttctttcatctactaattgaagatgattgaaatggcaaaaatggcttcaataagatgaccttaaaaggaggtgggggcaatctttgaaggatccctgtgttgatttctttagagaagaactttgcaaagagttaaataatgtcactgttatataagtcacattggatccttcaagccagaaaatcagttagttaattctaataacggtttaattgtttatattcaattcatggaatcagagtcaagatattggaagctcactttgccaaaggtaaaacatctaacattgtaaatgttattgtaaaattattttatatgtcaacattaagaacaaatgacttgctctgtggtgataatacaaattttggtagagctcagtgggtaagtgccatgatgcaaacaatattcttactaaattaagaaagcctacagaacagaaaggttattggag

SEQ ID NO: 527909 - DNA, 406 bp, Homo sapiens
ttttttcacactttctcaaaaagtgcttactacaaagaatccaacttcccttcaagtaatgctttttaatgaaaacaattattttctgaattttgactatctgctgaayagtttccactatgacaaaacccaagacaagatccgtaagagttttacattgctttcaaaattttgatttccgtaagatacatctgcttcttttttgaggagtttaaggaaatcaagcttttcatatcattaatttatttctcctctgctggtaaaaatacaggtactttatccaagtacgtgatgctattgccttgggaaacaacagagacaaacgctttaactcccattttatgtccaccctcttaaagattaaatattggtgggaaatttgaaatcactctggggttgcagctaa

SEQ ID NO: 527910 - DNA, 625 bp, Homo sapiens
cagaacctttccaagcttaaaaaatttatgtttacctacccaatttgagcaagttgagagaattaaaattggactattaggacttaatctaagttgaagcttttcctccctcctttcaaacaaaagcatttctgaaggtagaaagttgtaaaagataaccttgaaactatccttttgaaaatttataacagtgtttctcttttcttaatttcaacttttatttgagatacagagggcacatatgcagatatcatacatgggaacattgagtgatggtgaagtttggaggacagatsgcatcactcttgccatgagcatagtacctggtagtagtaatttaacccactcccttatagaagtcttaaagactaatattaatcattgataatatctgatttacatatatcatataaatcaaaatattgaataaaatgagccatgcttattcatttgaattttgatgtttctttggcctaaagttttctgaaagccaagtaagaatagttttttggtaaaaatgtgtcattattatctcagccgttttttttcgctgttcttttttgggttgtcttcctattttttatttctatgggtacatagcaagtgtacataatatatttatagg

SEQ ID NO: 527911 - DNA, 625 bp, Homo sapiens
cagaacctttccaagcttaaaaaatttatgtttacctacccaatttgagcaagttgagagaattaaaattggactattaggacttaatctaagttgaagcttttcctccctcctttcaaacaaaagcatttctgaaggtagaaagttgtaaaagataaccttgaaactatccttttgaaaatttataacagtgtttctcttttcttaatttcaacttttatttgagatacagagggcacatatgcagatatcatacatgggaacattgagtgatggtgaagtttggaggacagatggcatcactcttgccatgagcatagtacctggtagtagtaatttaacccactcccttatagaagtcttaaagactaatattaatcattgataatatctgatttacwtatatcatataaatcaaaatattgaataaaatgagccatgcttattcatttgaattttgatgtttctttggcctaaagttttctgaaagccaagtaagaatagttttttggtaaaaatgtgtcattattatctcagccgttttttttcgctgttcttttttgggttgtcttcctattttttatttctatgggtacatagcaagtgtacataatatatttatagg

SEQ ID NO: 527912 - DNA, 447 bp, Homo sapiens
gttgtacttgtgaattttgctaaagcttgagtgaagaaaacacactttcttctatatgaaatggtggtgtaaagggtggatggggcaatgtttccagcctctccctgcagacacgtaggcattaaaggcctttagtgatcataacagggatgcaggaagtattgtcaaagaggaaartcaccttcctagtaataaagatttggtaaatgctaatgcaacatgcaatttttttgtccccagttaaactatgctactttgccgtatcttccccttgcacccagtttcagcagcaaattcagagaaagccgctccttctgttcataaagcctcgcacttcttctaattccttcccctcagtaaggcctcccttttcccaccttcttttctctccctctttttctatccccatctgcctttacaaagcttccctttacattctgtactcct

SEQ ID NO: 527913 - DNA, 447 bp, Homo sapiens
gttgtacttgtgaattttgctaaagcttgagtgaagaaaacacactttcttctatatgaaatggtggtgtaaagggtggatggggcaatgtttccagcctctccctgcagacacgtaggcattaaaggcctttagtgatcataacagggatgcaggaagtattgtcaaagaggaaaatcaccttcctagtaataaagatttggtaaatgctaatgcaacatgcaatttttttgtccccagttaaactatgctactttgccgtatcttccccttgcacccagtttcagcagcaaattcagagaaagccgctccttctgttcataaagcctcgcacttcttctaattccttcccctcartaaggcctcccttttcccaccttcttttctctccctctttttctatccccatctgcctttacaaagcttccctttacattctgtactcct

SEQ ID NO: 527914 - DNA, 302 bp, Homo sapiens
ctgtaaaggtgaaactgartaactgaatacacaaccagagctaacatgactttgacaatcaaattgctttaaagcgctaacagaatcatagcaataggccatcagtcatgagcagaaaagctgactgttgctaaagagcatgaacgacaaagttctgtgacaccagtgctcagtatttgttaaactgcatgatgaaataatgtgagtcataaaatcaattcaatgaacagtattttatgtaaattaaatggaaacacatatccttagcagtaactgtaaacatctgcaacttgcaacaaata

SEQ ID NO: 527915 - DNA, 302 bp, Homo sapiens
ctgtaaaggtgaaactgagtaactgaatacacaaccagagctaacatgactttgacaatcaaattgctttaaagcgctaacagaatcatagcaataggccatcagtcatgagcagaaaagctgactgttgctaaagagcatgaacgacaaagttctgtgacaccagtgctcagtatttgttaaactgcatgaygaaataatgtgagtcataaaatcaattcaatgaacagtattttatgtaaattaaatggaaacacatatccttagcagtaactgtaaacatctgcaacttgcaacaaata

SEQ ID NO: 527916 - DNA, 417 bp, Homo sapiens
ttgaaaatgcacaggacatgtattttccaaagcaaataatccatggcaaaggtgcaattctgtaccttaatcaatcaaaagctaagattgaacagaagagtctattgtggtaaaatacacataacttaaaatttaccattcttaccattttaaaatctacaatacagtagcatgaagtgcactgagtcatatttatttttaaaataaatagctataaatgagcccctagtctctctaaagaaatgtactcaacaggcacaacaaagagagaagtgctgctttctttyctttcctttttttttttttttttctgttttgagacagtttcactcttgtcgcccaggctggagtgcagtggcgcgatctcagctcactgcaacctccgcctcctgggttcaagtgattctcctgctccag

SEQ ID NO: 527917 - DNA, 598 bp, Homo sapiens
ctgcactccagcctgcaagacagaacaaaactccatctcaaaaaaaaaaaaaaaaaaaaaaagaaagaaagaaagaaaagaaaaaacattgccaagtttcagagcatttgcatttgctcatggtcatgtgcaacctggtggtggagccaggagcagagctcaggtcctttacatcttggtcccatgctttctactacaccatgctgctgactcagtgaataatgaaaatgcagccaagtgtgagctcctgatgcagccctcctccctcaagtgctttgtctgagaggtccccctctgaccctgatttccacactacttcctgtcttattccagtgcactgtggtctcatgaactggtgcatttaggaggtttggtctccctaataagtctgttccatgcctactcctcaggcctgcatcccagtgagcaattctgtttccatcaattttactgcctgatcttggctcaaaccagtactggccctgtgtggtcaacagtgttcttgggactggatcttagggacagtgagcagattggacagaaggcaatctcaggccacagtggtacaawagtgcttctatttagtccacaagatgcc

SEQ ID NO: 527918 - DNA, 430 bp, Homo sapiens
tcttagtaccgtaattacatttattacatcaatagccgaggaaggtgggggtgggcagggggaatgacaacgttcwttcttaactccagcaaatccagttacatccaaaaagatcgagagatgtaatctaaagaatgaaaattacttgagtgagccacacatatttacataaagcatattcaggacaactagcttcagatcacactaatttctacaaaatcggtgcaggttatagaaatgcgtttttttgtttttttttttttttttttgagatgcagtctcgctctgtcgcccaggctggagtgcagtggcatgatctctgctcactgaaagctccgcctcccagattcacgagtagctgggactacaggcgcccaccactatgcctggctaattttttgtatttttagtagagacgtggtttcaccgt

SEQ ID NO: 527919 - DNA, 573 bp, Homo sapiens
ttacgttaatcactatcaaatgaatacactgaacactaaaaacatcatacattatctgattagccaagatttcttgttaaattagcaactaccttcctttgtaaaacgaagactgatgtggaatcatgccacagttagctgtctgaagtgttgctttgttttctgctcacgctagctgacgtaaaatttacaactttccaccctgacgttatactcaaatttcaggaagcataatgtacttcatccatttattcattcaacagacatttacaataaacaaattatgggctagatactgtgataagcaccaggaatggagagatttacaaacagaagaaagaaggaaaggaattaggacctccaggaacgccatctactgcagaagtggrggagggcagtggggcaacaggcatagaggtaaatatacaaaacgcggagctctgcaaaactattaatacctgttaggggaggacgcagaaggagaagggagagtcaccaaaggattcttgcaccaaagagtatctgacctgcaaggtattagaccaacatgatttggcaagatgacagggatgt

SEQ ID NO: 527920 - DNA, 593 bp, Homo sapiens
gcagaggagaaccagggcagagacaggcaccgaggctggagwgtagattgcaacctgtggcctctgcacttccagagaaacccagatggcagcggcctgcagagggcatggagaggggccggaggtgtgaacagaaactcaacacgcaccaaccgctgttggcgaaactgtggaggagggagcacagggatagcacgggataccaggcaggacggctactgctcttgtttttatttaatgctaggagaaaccagaaaactgaaagaccaacagggaagtaagagagagagagagagagagcatataaaaataagtgaaagaggcttagagcagaatcagtgtccgttaagaagtgatagatcaggataataggaaactaaattcggagaggaagagaaaaacttatcgttttagaaatgagtgtataagagatgtcacttagaaagcatcccttaaaaattttttttttaagtaagtaaagtacctaaggaggttatctgcggaaagagagagtagtagaggctaaagttaggtcttcaggaatgaggagaagatgggtgatgtctctgggtagagagaagatacaatgtcac

SEQ ID NO: 527921 - DNA, 607 bp, Homo sapiens
ggtattacagtgttgtttccccagtttaccaaacttttatatttttacccatctgataagaaaaacagttatatccatttgtgtacatgtttaataaaaatgagatttcctgtgtttctaagccttttcttccccctgtgatcacactccatatactctttgcccatttttctagcagcttgtagggttctttctgtctgatttgtaagaactttttatatattgaagaaattgggcctttgttttcatagatattccaaatatgtgtgtactattcatttaatatcagttttctttcaactttgttaatatttgtatttatagaaattagtttcaaatttgtccctcatttctaagtttaatgtcttacaggagtcmtgtttcacatagagcaaaataatggttttcatgttttcttccaatgctttcagagttttgttttttgtgcttaaatattcaaggcatctgaaattcatttgagtatatagagactgaaatactacatattcttttccaaatactatggtaatttatcatgtgataagggacatttcaaacaagtgggataaagatgacttattaaacaaatgctgttgacataattgct

SEQ ID NO: 527922 - DNA, 469 bp, Homo sapiens
cctcagatatggtcagcttcccaaatcaaagcagggactgagttcatggcatttggtgtcccccctacccacccaaaaaacaaacaaacaaacaaacaaaaaatcttcatcttccctgcagatccctggagggacagttttagaagagaaatctgagaacacttagggaagtcaatgagggtaatttatagtaatacaagagatttttgagttcagagatcgacaacagcatctataagatttcaacccaagttgacacatacagcaagggttgtatggtgagacagatggaggatccatttcgtcttctgttagaagaaagatgcctgctgtccaagggctatttctcaaatagcccttattctccctgtggttgagcaaatgaagaaaatgttgttccaaagccaccraattcatcttttctttggtcgagcaaaaatgtgcccatttgtgacagtgcaggtttagg

SEQ ID NO: 527923 - DNA, 479 bp, Homo sapiens
actggtcctgaggggccaaggggcaacattgggcctttgggcccaactggtttaccgggccccatgggccctattggaaagcctggtcccaagggagaagctggacccacggggccccagggtgagccaggagtccggggaataagaggctggaaaggagatcgaggagagaaagggaaaatcggtgagactctagtcttgccaaaaagtgctttcactgtggggctcacggtgctgagcaagtttccttcttcagatgtgcccattaaatttgataagatcctgtataaygaattcaaccattatgatacagcagtggggaaattcacgtgccacattgctggggtctattacttcacctaccacatcactgttttctccaggaatgttcaggtgtctttggtcaaaaacggagtaaaaatactgcacaccagagatgcttacgtgagctctgaggaccaggcctctggcagcattgt

SEQ ID NO: 527924 - DNA, 594 bp, Homo sapiens
atccccaggaaaacatggccccaaggggcttgcagggcccatgggagagaaaggcctccgaggagagactgggcctcaggggcagaaggggaataagggtgacgtgggtcccactggtcctgaggggccaaggggcaacattgggcctttgggcccaactggtttaccgggccccatgggccctattggaaagcctggtcccaagggagaagctggacccacggggccccagggtgagccaggagtccggggaataagaggctggaaaggagatcgaggagagaaagggaaaatcggtgagactctagtcttgccaaaaagtgctttcactgtggggctcacggtgctgagcaagtttccttcttcagatgtgcccattaaatttgataagatcctgtataatgaattcaaccattatgatacagcagyggggaaattcacgtgccacattgctggggtctattacttcacctaccacatcactgttttctccaggaatgttcaggtgtctttggtcaaaaacggagtaaaaatactgcacaccagagatgcttacgtgagctctgaggaccaggcctctggcagcattgtcct

SEQ ID NO: 527925 - DNA, 594 bp, Homo sapiens
atccccaggaaaacatggccccaaggggcttgcagggcccatgggagagaaaggcctccgaggagagactgggcctcaggggcagaaggggaataagggtgacgtgggtcccactggtcctgaggggccaaggggcaacattgggcctttgggcccaactggtttaccgggccccatgggccctattggaaagcctggtcccaagggagaagctggacccacggggccccagggtgagccaggagtccggggaataagaggctggaaaggagatcgaggagagaaagggaaaatcggtgagactctagtcttgccaaaaagtgctttcactgtggggctcacggtgctgagcaagtttccttcttcagatgtgcccattaaatttgataagatcctgtataatgaattcaaccattatgatacagcagtggggaaattcacgtgccacattgctggggtctattacttcacctaccacatcactgttttctccaggaatgttcaggtgtctttggtcaaaaayggagtaaaaatactgcacaccagagatgcttacgtgagctctgaggaccaggcctctggcagcattgtcct

SEQ ID NO: 527926 - DNA, 594 bp, Homo sapiens
atccccaggaaaacatggccccaaggggcttgcagggcccatgggagagaaaggcctccgaggagagactgggcctcaggggcagaaggggaataagggtgacgtgggtcccactggtcctgaggggccaaggggcaacattgggcctttgggcccaactggtttaccgggccccatgggccctattggaaagcctggtcccaagggagaagctggacccacggggccccagggtgagccaggagtccggggaataagaggctggaaaggagatcgaggagagaaagggaaaatcggtgagactctagtcttgccaaaaagtgctttcactgtggggctcacggtgctgagcaagtttccttcttcagatgtgcccattaaatttgataagatcctgtataatgaattcaaccattatgatacagcagtggggaaattcacgtgccacattgctggggtctattacttcacctaccacatcactgttttctccaggaatgttcaggtgtctttggtcaaaaacggagtaaaaatactgcacaccaragatgcttacgtgagctctgaggaccaggcctctggcagcattgtcct

SEQ ID NO: 527927 - DNA, 529 bp, Homo sapiens
ctgtggccaggtcagatgtgaggagggctgggcatgaccactggctgtagcagcgtggagctcactggacctgcagcacccagctccagattccgtgactggcaggtcacccttgtgcactaagtgcttggtgtgctgatgtattggcagggggctgttgtgcacatcatcrcgtaagatgtgctctgggtccttgaggatttaaagcttagttgaggagctggatatatgcatataaaaagataaataataatagaggttggcacgttttcggtgtcgatggagtagtacagacaaaacaatgccatgggatttaggagctcggggcatttgtcagatgcatctgtggctgtggaaggcgccctgagggaaatgaaactgtcatgcacagtgatggagtgagtcctcagcagagcagaaggaagacagagaggctgactgaggctaaggcgggcattcatgtggctagtgaatgaggaggtaactgcggtgaggcacttagtggggggtttcaaactgaatcttaata

SEQ ID NO: 527928 - DNA, 529 bp, Homo sapiens
ctgtggccaggtcagatgtgaggagggctgggcatgaccactggctgtagcagcgtggagctcactggacctgcagcacccagctccagattccgtgactggcaggtcacccttgtgcactaagtgcttggtgtgctgatgtattggcagggggctgttgtgcacatcatcacrtaagatgtgctctgggtccttgaggatttaaagcttagttgaggagctggatatatgcatataaaaagataaataataatagaggttggcacgttttcggtgtcgatggagtagtacagacaaaacaatgccatgggatttaggagctcggggcatttgtcagatgcatctgtggctgtggaaggcgccctgagggaaatgaaactgtcatgcacagtgatggagtgagtcctcagcagagcagaaggaagacagagaggctgactgaggctaaggcgggcattcatgtggctagtgaatgaggaggtaactgcggtgaggcacttagtggggggtttcaaactgaatcttaata

SEQ ID NO: 527929 - DNA, 556 bp, Homo sapiens
tatttctcatgacacttaggtaaaatttggattaatagtgatttatgtgtgcactactaattgtatctaatcttatgaatattggaatgtaacataagcaaactagtcctttcataatgtaattgttaaaattttgtcctaacaagtaatgataaacctgttttatagaactctgaaagattttgagatgatacgagggatgaaaatgaaactgaatcctcaaaattccgtaagtatgttggaatatttttattataatatagacagtctgtcaactgaaatcaatatcttttgattcaggaactttcttgtgataggctacaggtccatttagtcttgtttctgatcctcggttttggtgaataaagatgttgaaatatttgattcttatgtcccaaactgatgttgcctgtacatacagcatttttgttgaggagtcracatattttatgtatatacactaacacaatgtgtatatattcatgcaaagactgctttcattctgtggaatgttggcttctcagtttgaagcagactttaaggagactcagtggag

SEQ ID NO: 527930 - DNA, 620 bp, Homo sapiens
taaaattcttgtaaaactgtagaagagtctgaggtggtgacagggatggcactgaagccaaatcctcaaaatgcatctaagctctgtctctgctggttgtggctctgctgtgctgtgaggtcctatatgctgcccatggtgctttcccactgtcttgggtctctagatgagagaggaaaatgttcttatgtgtagcatctatgcagataaggaagctgtggatggagatggtgcagttggttgttcacaggtcggcctcagcctcggagtgctctgtggaggcaggcggagccacatgatgagcctggcgtggagggctgtactggggcctgtgaccacccaaacaccctctgtgcatgttttttcactccgtgttgaagacgtgagctgagagcacagcagtcacgccctcctgactggctggtcatgtgggactgctccttggggcccctcagatgtgggttggagctgcrggaaacaccctgtagctttttgaatctcttccaccctctctggacctctctccttctggcttttcttcaggaaggaagtagcctgcatttggtgagagtcactgagggtgtggagaggcatgtagtctcgctctggatggctgaggc

SEQ ID NO: 527931 - DNA, 496 bp, Homo sapiens
agtgaggactaaggcactagtgcttgcttgagcttgtctgccccatttgcttgaatccccttgggcctttgctgccctctttcttcccctttgagtgccctccccctcttctaggagcctcatctttccaggtgtgctccagatgctgcctcttctttgtagttctctctgttcctcccattcccagcttctcccctctgccaggtgtaactgaccacagcctcatctttgagccaatgccttgtttgcagtgctcctctgcccctgatcatttggattggtcgtcattattgttacaatgtgttcatctttccacactgaggagttgtcatgcaggcacatggcaggtgattaatgaaagtttactgcatctacacagcttcttgacacagtgttgcatttctttttagaggtaaggtcagctttggggratagaagggaactggaataggagtagaagaagggaactggaatagaagtagaaaccgctgggttt

SEQ ID NO: 527932 - DNA, 624 bp, Homo sapiens
aaaaaagctcactacataaaggataatttctggagggctagtgtggggatccaccatctcgcagccacccaagccatagcttctgtttctaagtccctatataaatttagtttctttctgagaactggatttgccagcctctttctctggcctctcagatcccctggcctctgggggtacataygcatagacctgctcactgcaaaacaatccccatcaatgtaatcaacgttttacacaaaccaggccctaagaatcacccagcttctcctgtatggccctctcttgggtacatttcacatccaaatctcaggacctgtttgggtcagcattctttcaacatcacaatgatagttctgaatcagtgttctcctatcctttccaaataatctctcttttttaaaaaaaagaggtttagttcactcagctataccagggcttctcaaacaatgagattaaaatgcattgtagatacaccaaaatatcattcccctcaattcttggggcagctagtaatgttctggggcagcaggagcctcagggccagtggactctgactacaagcaatcttctccatctacctccaaggccccactgaaataccttctgtgaatgccatgacat

SEQ ID NO: 527933 - DNA, 624 bp, Homo sapiens
aaaaaagctcactacataaaggataatttctggagggctagtgtggggatccaccatctcgcagccacccaagccatagcttctgtttctaagtccctatataaatttagtttctttctgagaactggatttgccagcctctttctctggcctctcagatcccctggcctctgggggtacatatgcatagacctgctcactgcaaaacaatccccatcaatgtaatcaacgttttacacaaaccaggccctaagaatcacccagcttctcctgtatggccctctcttgggtacatttcacatccaaatctcaggacctgtttgggtcagcattctttcaacatcacaatgatagttctgaatcagtgttctcctatcctttccaaataatctctcttttttwaaaaaaagaggtttagttcactcagctataccagggcttctcaaacaatgagattaaaatgcattgtagatacaccaaaatatcattcccctcaattcttggggcagctagtaatgttctggggcagcaggagcctcagggccagtggactctgactacaagcaatcttctccatctacctccaaggccccactgaaataccttctgtgaatgccatgacat

SEQ ID NO: 527934 - DNA, 624 bp, Homo sapiens
aaaaaagctcactacataaaggataatttctggagggctagtgtggggatccaccatctcgcagccacccaagccatagcttctgtttctaagtccctatataaatttagtttctttctgagaactggatttgccagcctctttctctggcctctcagatcccctggcctctgggggtacatatgcatagacctgctcactgcaaaacaatccccatcaatgtaatcaacgttttacacaaaccaggccctaagaatcacccagcttctcctgtatggccctctcttgggtacatttcacatccaaatctcaggacctgtttgggtcagcattctttcaacatcacaatgatagttctgaatcagtgttctcctatcctttccaaataatctctcttttttaaaaaaaagaggtttagttcactcagctataccagggcttctcaaacaatgagattaaaatgcattgtagatacaccaaaatatcrttcccctcaattcttggggcagctagtaatgttctggggcagcaggagcctcagggccagtggactctgactacaagcaatcttctccatctacctccaaggccccactgaaataccttctgtgaatgccatgacat

SEQ ID NO: 527935 - DNA, 632 bp, Homo sapiens
ccaaaagactttgaaagaagaggcttgattggtcacggtaatgatgctcccctggtatgtagtgatgtgtgagctgataggctagcagcaaagtttgcaatttatgcaattacttacagttaatatgctatggtacctgaaacttgaacatatcattgggaattggcattatttaactaaaccaggataactgaaatctgtgcatatcacaacaactgggaaaagcaagaactgtctgtattgtgatcttaatgcacaagsagtttgaatagtgaaaattgccagttttaaagagaaagagagagacaggagagaaagggggatatttgttaaaaacaagcaaaattcaattttttagaaacacattaaaggaattgaaaatgttattgaatacatttaatatagataattccatgcaatatgagattaagaagtaggcagataacataaaaagaaatattctacttatcttcaacttaagtgacaaaaaggggtccttaaaagaaatcaatacagaaggccagagagacagggactggggaaaaagccagccaacagatgcacacaggacataaaggcagttttataaaagcaaaacatgctagaattttttcccataaagcccttgaata

SEQ ID NO: 527936 - DNA, 468 bp, Homo sapiens
gagttcaggggggcagtcacgtcccatccctggcacagctctttaggccactcactgcactgcctccagggctgctgaggtcagggtggcacttaccagcactacccagtgtcagctctgctctgacagcagggyggaggagcctagggagtggggagagtggcggggacaggtgtctgggggctgggagtggccaggctgctgagaaagtgccccaggatgccttgggggctggcccagccttgggggctaagctgggcttctatcacaggtgagcagagggacaaaccaggagctcccagtctgaaggagaaagacagaacccttgccctcagggagtttccagtctgatgggagagtcagcccctgcttatagggagctccctgccccatgaggagacccagcccctgtctgcagatgcagccgttgtgtctgggctgagtgtggtagtggcggtggtcaaagct

SEQ ID NO: 527937 - DNA, 468 bp, Homo sapiens
gagttcaggggggcagtcacgtcccatccctggcacagctctttaggccactcactgcactgcctccagggctgctgaggtcagggtggcacttaccagcactacccagtgtcagctctgctctgacagcagggcggaggagcctagggagtggggagagtggcggggacaggtgtctgggggctgggagtggccaggctgctgagaaagtgccccaggatgccttgggggctggcccagcctkgggggctaagctgggcttctatcacaggtgagcagagggacaaaccaggagctcccagtctgaaggagaaagacagaacccttgccctcagggagtttccagtctgatgggagagtcagcccctgcttatagggagctccctgccccatgaggagacccagcccctgtctgcagatgcagccgttgtgtctgggctgagtgtggtagtggcggtggtcaaagct

SEQ ID NO: 527938 - DNA, 502 bp, Homo sapiens
tctgatgtaaccgactccatcttgtttctaccaggttttctaccagctttagctcattcttgtgtggaggccataatagtcctttccttgaactgatcccctacctgttcaaaaattgaaaccacatttgtaaaggctaatgaaaggtcaagaagttagaattatggtaggggcttgaaccatcacttagcttgttttyccataacttagcttagtcacttaagctaagctaagttagctaagctaatatcacttagcttgttgactgccccagagtcacataactagaggtttcaagatttataacttccccaactacttctatagataacatcgctattgtgaaacctaaagaataaagaaactaaaaggtaattccacaaagagttgtttagctcctgtgtgtgcccaaggccaggcagggagtcccagcccctatcagccagaagtcgctgggtctttgatatggttttcagatgtagcatttccacagaccgagaga

SEQ ID NO: 527939 - DNA, 567 bp, Homo sapiens
gcagcccccagctcctgtttgtccctatccaggtggagacatttccattcccagacataggagcttctcccagggaacctcatgaagacagagatggtggggactgaatgggggggtgtctcgattcccagcagcttcttggctcctctgctgtcacataatcagtgagtgatgactggcagcaggcacttcyctgggtgctcttgacattcccgtgacctacaggcaagggagagggttccagagaaggaggagtgggagcctcagggtggcagagtggctgtggcctttccacaaaaggaggatctcttccgggaaccagatgatgagcttagcttgtctgcaggcattaaaacaccaacactgggaacatcctcatggtatgtaaagggaaactgaggcacaaggcagggaagggacttgcctagggtcacacaacattgagagttcccaattctcttctctactccaggctgtacgagatctgcaaaagtcaaacttccactctgcctccatacttgtatgtgtgcgtgggtgcttgtggggcatgctcggcaggcccagcag

SEQ ID NO: 527940 - DNA, 490 bp, Homo sapiens
tggggtgaggacccctagaggagcagtaggaactgaactgggacccaactctggtgcccaccggctacgtggccctgcgcaagccactcccctcctctgtcccacagcattacagtaagatgaagggactgggcaaggttggtcctacatcccaaggtcctttgtccagagcttcagagactattggatgggaccttaggttgacttctagaattcaaaaagtctgggccgggcgtggtggctcacgcctgtaatcccagcactttgggagaccaaggtgggcagatcacttgagcccaggagttcaagatcagcctagataacatggcaaaactccgtatctactaaaaatacaaaacattagccaggcgtggttgctcacgcctgtagtcccagctacttgggaggctgaggtgggaggatcacttgagcccaggaagtcgaggctgcagtgagccatgatygtgccactgcactccagcctgggcac

SEQ ID NO: 527941 - DNA, 394 bp, Homo sapiens
tcttccaccttttgtttttccctagaatggagagggtcactcactgtgacagcatctaataggtgttcatgaaactagtaagcccacagatggctacccttgggagtcatcactgccctctgaggcaagaagaccctgagcaattgtggccaccaggccttgaactatcctcaagagcaggctgtgcccagcccctgtgcccggccaccctggcctcagtgcccrtttagggcctggcagcacagagtaagatgctggtctgggcagagcaacgtgttgtggcccaagtgtgcccaagaggggccctggcatgctgcagttgctggaagtgcctcgtagtatggccctgagaacacagccaccaccccctgggctatttcccagccccttgttc

SEQ ID NO: 527942 - DNA, 413 bp, Homo sapiens
agacctaaaatgctattaaatattatatataataaaattagaattaaaaattgttacatgtcaaataggaaaatttaaaatatgartaagatctgaatgttgtgaaacaatacctctcattccactcatgagtatttttttgaaaagccattttacaaaatgaattaaaagtcataaaacatgttcaaatctttttactcaacatttccattttggcaatttatctcaaggaattcatgagaagcatgcacaaagatgttaatgtgaagatgaaaaattagaacgaaaccaactagccgataatacaggaatggttatttaaaacggcccattcatataagatgttatgcagcccttacaagccatattttgaagactaattaatgatctcatacaacacttgctctacagta

SEQ ID NO: 527943 - DNA, 644 bp, Homo sapiens
tgttcaggaagctgaggtgggagaatcgcttgagcccaggagttcaaggctgcagtgaggtatgagtgtgccactgtattccagcccgggttccagagggagatcttgtctcttaaacaaacaaataaacaaaaaataggcttagtgagaaatttccctctcaaagcacatcatgccattaatccccacrctggctgtgtagagtgcgaataataatgatagtagctgctagcattgactagatgcattgactagtcatcctagacgactgttcactatgtcacagacaccatgcaaagtactttgacgacacctctgtgaggcaggtattgttatcaatccctttattcaggtgagaacgtgaaagctgagagagtttaaatagctggctcaaagtcaagcaggttcaaacccaggaagatatgaagccatcttactctatgcagacttccatgaggagtccacagttgtccctttgaaagttgagttacggccgctgggttggagacagcaggctgcaatatctgctctgctcactagtcactcttctttttgccctctgggcaaacatctggtgaaggaaaaatccagtggttgcttgagggtgttcattccgggaaaatttaggagggtgattagagcaa

SEQ ID NO: 527944 - DNA, 635 bp, Homo sapiens
atatgataatctaattagacaaatccccccaaaatcaactgaatcgataagaataagaattcagtaaagtggcatattcaaattcaacttacaaaaattgataactttaatacactttcaaatgtacaacaaataaatgaacaaaaaagtacatatacagagataaggcaaatgtggcaagacattaactgctatgaattcgactgaaggaaacacagattattattattaatattaatctttccacttttccttaagaacatcatactacctcgagtctaaggctctatacaacatagtaagtacattcaagacacttccttcatcttcaaacctcacattgcccagtaacacactagtaatttattgatcctatttcacctccaaataaatcccaaagacatttaaacttattttctgctccagactcttcacttccgcttcttcattwatctttttttttaaccttagtttctctattccagccttttaccagatcaaggataaaactagggcccctagaacaagtgcctagagccatttaatccaatatatgacttctgctacctaaggtgctgagcaagcgcatataaaataaaaggagcaaataacagctcatcttttgcacgaatatt

SEQ ID NO: 527945 - DNA, 620 bp, Homo sapiens
ctgcttcttctaagtcaaatggcaaggcactgtttgcctatgayagcaatgagatgtagcccactgattaggggttaaccctgtggtttattacagcccccacattcctatattatttgcactcaaagcatttcatacacttacatttctggcctggatcatgaggcattttgtttcagcatacattcactcataggccccagctatcagaataagagaccaaaactaacttgccatcattttcaaaagaagataaaagttcctaataaaactcaaatgccattctttcattcatttattcatacatgaattcaacaaatgtttattaagtgcataatatgtgtcaaggactgtcctaggtggttaagtatacaacactgaaataaaaatctacaaaatctataccctcataacacttatatactaattgatggagacagaaaagagtaacaaaacaaaaaaactaaaatttattatgctacctagagaatgttcattactattgggcaaagtaaagcaagtaaggagtgtccagcagttgaggaatgaatgctattataaaatgggtagtcagggaaagctttattcaaaagatattttggaaaacacccgaaggggct

SEQ ID NO: 527946 - DNA, 620 bp, Homo sapiens
ctgcttcttctaagtcaaatggcaaggcactgtttgcctatgatagcaatgagatgtagcccactgattaggggttaaccctgtggtttattacagcccccacattcctatattatttgcactcaaagcatttcatacacttacatttctggcctggatcatgaggcattttgtttcagcatacattcactcataggccccagctatcagaataagagaccaaaactaacttgccatcattttcaaaagaagataaaagttcctaataaaactcaaatgccattctttcattcatttattcatacatgaattcaacaaatgtttattaagtgcataatatgtgtcaaggactgtcctaggtggttaagtatacaamactgaaataaaaatctacaaaatctataccctcataacacttatatactaattgatggagacagaaaagagtaacaaaacaaaaaaactaaaatttattatgctacctagagaatgttcattactattgggcaaagtaaagcaagtaaggagtgtccagcagttgaggaatgaatgctattataaaatgggtagtcagggaaagctttattcaaaagatattttggaaaacacccgaaggggct

SEQ ID NO: 527947 - DNA, 599 bp, Homo sapiens
cactgcatagcagtgtgcagaagaaaataggaaaatatgcctcaaaatgtattataagagacttttcctttaaaattaagggagaatctaatgaatagactattttkattactttacccctttctaaaaaatcagttttcttatagttgactaagttaacagacagattaacaatttaattatcattactctcaattttaatttttaagatacaaccaaagtattattttaaaggtgcattctgtcactttattactgaaacaggtgatgaaatagtaatgctgttgaatgtactctctaaatatgctgttttctggtttatttacaaagaaaaggtgaatgagattgataatcagcaaaatttatatttctttggaaattaaaggttgaggatgcaggtcttagatttacatttttaatttaaaatattttagtaaatcttgtttgtgtacatatgtctatgcaaagatatatacatcatacttactacgcatactcctcataaaagtatggaaaattctagtttgttaagacagattagccaaatgtaactcttcagaaatgacaaactcaatatctcatcatatctgcaactttcc

SEQ ID NO: 527948 - DNA, 507 bp, Homo sapiens
ggctactctctccagagcctcctctctgctgagaactgaacactccacggatgacatacctacagagaggagccacccactgtgggtctcctctgagctgttgtgacactaaataaaactcatctttatcttgttcactcttcacttgtctgtgtacctcattcttcctggatgcaggacaagaacctgggtaaaggcgccacggtcacagaggtttctggctagaaaaytgacaccccaaagatcccgtaacaataagtagagaggaataaattattaaggggcaggagcaaacttttggggttgatgaataagttaattatcttgactgtggtaacggcttcattggcacatacatatgtcaaactgaggtatgtttatgtggcggctgatggttgcttgcttgtgtttttaatgattttaatgatattataaaactatactacctttgtaataaaatttattttaaaaattataaaagttataaaaatgcactggacaagtatt

SEQ ID NO: 527949 - DNA, 599 bp, Homo sapiens
aacaaaaggtggattcagcaactataaattcgagattaaaatttcacaaatgaaagtttatgtaataaataatttattaatatatattcttatggatggtaagactacttcttcactgaactgtgtagaaaatataaaatataatgtaaatgagattaaatgcactattgcttaaggaaaacatggatargcagatagaaaaatatttttttcaaaaaatggagattatattacagattattgcatgccaaactctttgtaaacatagaaaacgatacagaattactgtgaacaacaatttagacttgtcggctttgttggcatttctaatgtgaatactctaagatgtgaatctgactgaataagtgatatttatttcaaaaaactgtagtatatcaatgcctagagtcttatatgaatgcatactttatgaaatgaattttatgactgggttgaataaaattgttgtaaattattgcctgattaagcagaatggtatctaactttagttacctttggcttctaatttagcgagaataaaagacttcttgaaatgtccatggctatgtgacatttttcatattttctaatacttacaa

SEQ ID NO: 527950 - DNA, 599 bp, Homo sapiens
aacaaaaggtggattcagcaactataaattcgagattaaaatttcacaaatgaaagtttatgtaataaataatttattaatatatattcttatggatggtaagactacttcttcactgaactgtgtagaaaatataaaatataatgtaaatgagattaaatgcactattgcttaaggaaaacatggataagcagatagaaaaatatttttttcmaaaaatggagattatattacagattattgcatgccaaactctttgtaaacatagaaaacgatacagaattactgtgaacaacaatttagacttgtcggctttgttggcatttctaatgtgaatactctaagatgtgaatctgactgaataagtgatatttatttcaaaaaactgtagtatatcaatgcctagagtcttatatgaatgcatactttatgaaatgaattttatgactgggttgaataaaattgttgtaaattattgcctgattaagcagaatggtatctaactttagttacctttggcttctaatttagcgagaataaaagacttcttgaaatgtccatggctatgtgacatttttcatattttctaatacttacaa

SEQ ID NO: 527951 - DNA, 599 bp, Homo sapiens
aacaaaaggtggattcagcaactataaattcgagattaaaatttcacaaatgaaagtttatgtaataaataatttattaatatatattcttatggatggtaagactacttcttcactgaactgtgtagaaaatataaaatataatgtaaatgagattaaatgcactattgcttaaggaaaacatggataagcagatagaaaaatatttttttcaaaaaatggagattatattacagattattgcatgccaaactctttgtaaacatagaaaacgatacagaattactgtgaacaacaatttagacttgtcggctttgttggcatttctaatgtgaatactctaagatgtgaatctgactgaataagtgatatttatttcaaaaaactgtagtatatcaatgcctagagtcttatatgaatgcatactttatgaaatgaattttatgactgggttgaataaaattgttgtaaattattgcctgattaagcagaatggtatctaactttagttacctttggcttctaatttagcgaraataaaagacttcttgaaatgtccatggctatgtgacatttttcatattttctaatacttacaa

SEQ ID NO: 527952 - DNA, 653 bp, Homo sapiens
taactattatctccttttggcagaaggatatatataaattcagagaatatagaagtataattaaaaaaaattttttaacactagttggtcagacaatttaacatctaaactcaaagttgctgatatagttgccccacccaaagctcatgttgaaatgtartcctcaatgttggaggtggggcctgatgggaggtgatcggatcatcggggtgaagttctcatgaatggtttagcgccattcctttgatgctgtcctcgtgatagtgagagagttcgagtgagatctggttgttgtacaatgtggtgcaacccctccaccctgctcctgcttttgccatgtgatgtcctgctccctctttgccttctgccatgattggaagcttcttgaggcctcccagaagcagatgctgctatgtttcttgtatagcctgcagaactgtgagccaattaaacctttctttataaattatccagtctcaggtatttatttatagcaatgcaagaacaccctaataaagttgcttttacaatattaataataagaactttaagaatttggttgatgtgatggaaagaatagagagacagcacctctgtgttcctaaccattttttttctagcatcagtttatcaacaatctcagagctcactca

SEQ ID NO: 527953 - DNA, 599 bp, Homo sapiens
ccatagccccaactgagaacacaattggagtgtccaagaacagtaagattgctccactccacctcagaagactaggcttggtgccagcttccagcgcagtggccttgtttctgcctcaactctgccagggggaacagctccaggttcctcgggaagcactttgatggcaggatgggcaacccatccatcaccactgctcatagccaggtggtccatatctcctgtggcttgcagcacagtggaaatgcttctgcctaaactctgtgggagggtgtaatcccatgttcccacaagaagcacccagacagtagattgggtaagcaccccgctgcttctagctgagtggtacccactggctgagttagtgaccaaagaagggagagtgcatastctcagaacatggagaggtgttaggtgcctggttttgtgagtgagtggaggagcaagcagggtgtgcctccctccacaggacctgtccggcaggtcctataggaggagggagtcaagatgacagactagaggcagctagtgtggtctgccaaccatgatccctgcctgagggagccctgtggacaagaacacctaacaaaggcaacaca

SEQ ID NO: 527954 - DNA, 644 bp, Homo sapiens
aggattttatcatactcaaggtatagttagaaaaacataaaaacactatctgtgctgcaarcataatttatttcttaaatgccatttgtaatgggcagttgtctatctgaaagcacacacatacatggaatcaacctaagtctggaataaagcagagaaactaatttgctcctttccaaggtcaatgtgaactgagaaaagggcccactataccttggagagctcagtaataagaatcaactttggctctgtaattgactagtgaaataacaaacgatagactctaaatgattgtgtcatctgaaaaaccaccaagaatacacgtgatcagtttctgtggcctttaaaacacttctacatcactctgtctagatttatgacatgaactaaaggtaaaacctaattcctgaggacagagacatagagaatcctgtttcatttttgcatgcaaaaaagctttgagttaatgaataggataataaatacagttacctatgtcctgcttatttttctcttttctcacaccttccttctaagatgttattttaaaagcagcttgagagaaaagagtattatgtatcatttaaagttgtatttttttaattaaaaaatacttattttaaaaaagtagaaaagaaatagcc

SEQ ID NO: 527955 - DNA, 644 bp, Homo sapiens
aggattttatcatactcaaggtatagttagaaaaacataaaaacactatctgtgctgcaaacataatttatttcttaaatgccatttgtaatgggcagttgtctatctgaaagcacacacatacatggaatcaacctaagtctggaataaagcagagaaactaatttgctcctttccaaggtcaatgtgaactgagaaaagggcccactataccttggaragctcagtaataagaatcaactttggctctgtaattgactagtgaaataacaaacgatagactctaaatgattgtgtcatctgaaaaaccaccaagaatacacgtgatcagtttctgtggcctttaaaacacttctacatcactctgtctagatttatgacatgaactaaaggtaaaacctaattcctgaggacagagacatagagaatcctgtttcatttttgcatgcaaaaaagctttgagttaatgaataggataataaatacagttacctatgtcctgcttatttttctcttttctcacaccttccttctaagatgttattttaaaagcagcttgagagaaaagagtattatgtatcatttaaagttgtatttttttaattaaaaaatacttattttaaaaaagtagaaaagaaatagcc

SEQ ID NO: 527956 - DNA, 590 bp, Homo sapiens
gagaaatatttagcaacatatgaagacattagggaagaaaacaactaaaaatcttgcagagagccttttttagtgcaaaaaatagctgatttagtggctccaagaacccctattctttccactctatagagccctgtggtaaaactacaagtaaaaaacacaagccccaggatactaggctgataagaatgtactgtgattataagtacaaatgccattggagatttgcaatgactggtatatttaataagattaytattgttttagttagaggtctctacattctacaagttttgagtggactatcttaactgtattttcctcataaacactgtgcaattagtatgccattttacagaatgcaaggtatttcaggaatacatatatggtatgatagcagaattaattatacaaattggatttcatttacatgattatcagtgaataaatgttaacttcttgacatggttatttattgctgcattacaaccatccctaaagttagtggcctaaaacaataatcatttattttgccaataaatctgtaattttggcagggatcagcagggacagcttttctctgctccatg

SEQ ID NO: 527957 - DNA, 590 bp, Homo sapiens
gagaaatatttagcaacatatgaagacattagggaagaaaacaactaaaaatcttgcagagagccttttttagtgcaaaaaatagctgatttagtggctccaagaacccctattctttccactctatagagccctgtggtaaaactacaagtaaaaaacacaagccccaggatactaggctgataagaatgtactgtgattataagtacaaatgccattggagatttgcaatgactggtatatttaataagattactattgttttagttagaggtctctacattctacaagttttgagtggactatcttaactgtattttcctcataaacactgtgcaattagtatgccattttacagaatgcaaggtatttcaggaatacatatatggtatgatagcagaattaattatacaaattggatttcatttacatgattatcagtgaataaatgttaacttcttgacatggttatttattgctgcattacaaccatccctraagttagtggcctaaaacaataatcatttattttgccaataaatctgtaattttggcagggatcagcagggacagcttttctctgctccatg

SEQ ID NO: 527958 - DNA, 493 bp, Homo sapiens
agaactattctcagatgtttgaccagaatgcttaatgtagaatttctggcacacataataataaatttgggtagattcatcatccatctatttcaattcgaattacaataaatctattttatttttcacacatattctcaagaytccagtggtataagtcagtatggtactgaagatgtttggtgtgtaagctttctcttctttggcttgactttgcaactggctttccaggacatgctgaaacctggctgtggttttaagtttgaagacaaagaagaaaaaaaagtggacatgagaaaagttggtccacttggtaaggtaactcccttaggtaagctaagacaatatcttcaagccaaaagagatgacctcattgacagggagaaggctggcagtgggagatgaggattcaagtagtccaagtttttccaaacctcctgtatattcttaggggtcacaccagccctagaacaatggcagtgaattcagcaga

SEQ ID NO: 527959 - DNA, 493 bp, Homo sapiens
agaactattctcagatgtttgaccagaatgcttaatgtagaatttctggcacacataataataaatttgggtagattcatcatccatctatttcaattcgaattacaataaatctattttatttttcacacatattctcaagattccagtggtataagtcagtrtggtactgaagatgtttggtgtgtaagctttctcttctttggcttgactttgcaactggctttccaggacatgctgaaacctggctgtggttttaagtttgaagacaaagaagaaaaaaaagtggacatgagaaaagttggtccacttggtaaggtaactcccttaggtaagctaagacaatatcttcaagccaaaagagatgacctcattgacagggagaaggctggcagtgggagatgaggattcaagtagtccaagtttttccaaacctcctgtatattcttaggggtcacaccagccctagaacaatggcagtgaattcagcaga

SEQ ID NO: 527960 - DNA, 493 bp, Homo sapiens
agaactattctcagatgtttgaccagaatgcttaatgtagaatttctggcacacataataataaatttgggtagattcatcatccatctatttcaattcgaattacaataaatctattttatttttcacacatattctcaagattccagtggtataagtcagtatrgtactgaagatgtttggtgtgtaagctttctcttctttggcttgactttgcaactggctttccaggacatgctgaaacctggctgtggttttaagtttgaagacaaagaagaaaaaaaagtggacatgagaaaagttggtccacttggtaaggtaactcccttaggtaagctaagacaatatcttcaagccaaaagagatgacctcattgacagggagaaggctggcagtgggagatgaggattcaagtagtccaagtttttccaaacctcctgtatattcttaggggtcacaccagccctagaacaatggcagtgaattcagcaga

SEQ ID NO: 527961 - DNA, 539 bp, Homo sapiens
tgttgttcctcagtttcccagaaggcctgctgcttctgatgggcacctgtctttaacagtggtgtggaatgtcaacctggctggccaagccatcaccagtgaggcaccaggataccctcctcttcaactcatagcccattatgttttgctgtagttcttcttaggcatcatcaggggctcctgtggtagaaagttgagrgctctgtaattacatcagccaatagtcaaaagggctcaggatcccatccagtcaaatgaagaacaaatacctttggctgtaactaaatgtccatacaggcggttagctacaaaggactgcaatattgaagactcggcccctggtattttgtgataaagtggagtatgccagtgtttatggagtaaggaacaaccttctttacatttataggtagaatgaatctttctgttaaacttctaggaaaatcaaattatttacaaacttctcaaaatgcaactgttttctgtttgtattgaattactctatattgaagaagataaaaatgaggcattttaaaata

SEQ ID NO: 527962 - DNA, 548 bp, Homo sapiens
ctttggatgcctttgctcattcactcagtatgctggtgatgcaccagtaagcacagtccataccaatgagacgttagcagtctgagggaggatcttaatgtctcttaatatttcttaaaataattaaatatttccatggcaaattttttactgttgtacaatgtttcagaattcagctcctaaccaataataagttatgattctattattccttcagaaacaaacaagcatcatttctagaaaggtgggtaggtgtccgccataataaaatgccctaaactggatgactcacagttgkagagactggaattccaagattaaggtgccagcatggttggtgtctggtgagggccttgcagacggccacctttttgatgtgtcctcacatggtgaagacagagaagtctttctttcttcatcttcttttccctcctagctttattaaagtataattgacaaataaaaattttgtatactcaaagtatacaacattatgatttgacatacgtatatttttgtgtaatgattccccccaatcaaattaatca

SEQ ID NO: 527963 - DNA, 623 bp, Homo sapiens
caccataatggggccaggctgaatcacctgatagctggggagcagtgcggtcgggaagagagagaccccaaaatggagctgatccaggggcagggacgcgtttgcacatggagcatgggggccaggcctggggtgtggagctggggccatgtttcaggggcccagggtgggaactgggagcagtgcccactttggggacctggtcagtggcacagccacaacattcaccccactgagggcgctgggttcctgtgcttcatgaggcggctctgcatggggctgcccagggccgcatccccagggactgccctgcatcagggtgaccaccgatcctgacactcctgactgcygggaccgggacctgcaattcgcttctagaggcactccctgggcagaaccatgagccagatgaggggaagccccaagctactcctgaatgctggggacgtggtaggagctcatggtgacattacccctgccccggatgccagcctgggcccactaatgacctggagcccctgtcccaggctgtgaaggggcatgatcagggctgcatgctccaaagaaccagcaggagctagggacaagtgagagccccccattccaagttggtggggcaggag

SEQ ID NO: 527964 - DNA, 623 bp, Homo sapiens
caccataatggggccaggctgaatcacctgatagctggggagcagtgcggtcgggaagagagagaccccaaaatggagctgatccaggggcagggacgcgtttgcacatggagcatgggggccaggcctggggtgtggagctggggccatgtttcaggggcccagggtgggaactgggagcagtgcccactttggggacctggtcagtggcacagccacaacattcaccccactgagggcgctgggttcctgtgcttcatgaggcggctctgcatggggctgcccagggccgcatccccagggactgccctgcatcagggtgaccaccgatcctgacactcctgactgctgggaccgggacctgcaattcgcttctagaggcactccctgggcagaaccatgagccagatgaggggaagccccaagctactyctgaatgctggggacgtggtaggagctcatggtgacattacccctgccccggatgccagcctgggcccactaatgacctggagcccctgtcccaggctgtgaaggggcatgatcagggctgcatgctccaaagaaccagcaggagctagggacaagtgagagccccccattccaagttggtggggcaggag

SEQ ID NO: 527965 - DNA, 653 bp, Homo sapiens
gtaaaatggggataacaatacctagttcacagagatattgtacagattaaatattatatgcctgaggtgtatgataagctctaaatattagtttctgatttgttcatagtcccttatctgccattccaacatccaaaatgctctaagggcagaaagcttcttttaactcttttggyggcaaaacctgatttgaaatgaaacaaggccctttctggtctttattgaatctcacttattgcgagtgttcatacattttgctgcagaaatatgaacacagccgattacagagcttactaaggggtgttatgtaacatcgtatatgcatcatgttacctttctgaaatgtgaagaaatggaaattctgaaacacatctggccccaggggttttgggtaagggcatgtacacctgtactgttatttttttttttaatgggcattgacttatttatccctgatcatgcctctgagaagtaggtagtcttcctgtcattaacttataaatgaggcagcggaggcacaaatgtctacgtaccttccacaggccacatgtggcaaagccagcatttggagccaggcagtcaggttccagttgactaagcatttcaccattaggctaaacggcccctcacaccgactattccctctcagcatg

SEQ ID NO: 527966 - DNA, 547 bp, Homo sapiens
tgtggtttaacaagacctacaggtgattctgatgagcactagagtgcgagaaccagtgcattaaacatattccaggcacctacatgttcggcagctactaactgtagcacagtattctcccctttctgtctcaggatttgtgtagctctctgccccacccctccttctaagaggatgtcttccttccaccattatctcctttaacgggacagctatgtctcttctaccagcctccctcgtcatccggggattacacatccctcctctttactgcctcctcttactgaatttctatattccagtccttacctgcagaggcaagccggcctcttcagcctccagacaggcctccaaggggcttggactggtgctcctgctccccgaggggggcgctgctgcccctgcaggagctgcaytggggagcaccacagcaggccgaggatgagggggtggctgcggctgcagagactggatggtgaaggtggaatagaggcccgagcgcatgtactcgttccggctgctgcgtgccaaaccgcctgggcctgcc

SEQ ID NO: 527967 - DNA, 506 bp, Homo sapiens
ctggcgcctgcagtattggatggacagatagagccagaacctttccatccttgcagaaagtctggctgtacarccgtattctagatacttgccttacacctctccctctctcttttttttcttgtccagtgggtctgaacttttttaggttcaagacatacttaggaatactagaatttgtagtggacatcttcaaggttttaaaacaacactaagaagtaaacagccattatagtgcaaactctgccaaagtgtcatatgcatactgagtctataactgcgtctgcagtgatcatgctattcatttggccatgcttctgcagtatggcccttagaagagctgttttttacccctactgggctttctgatatgtttgtaggacagagaattgcaggaagcaggccttcatatctgagccgtgctgctctggtttgctgtgctgaatgttgctgtgctctcccggaagaggtaggcacaagtgctttagaaggaactgtcagaaccc

SEQ ID NO: 527968 - DNA, 632 bp, Homo sapiens
ctggcgcctgcagtattggatggacagatagagccagaacctttccatccttgcagaaagtctggctgtacaaccgtattctagatacttgccttacacctctccctctctcttttttttcttgtccagtgggtctgaacttttttaggttcaagacatacttaggaatactagaatttgtagtggacatcttcaaggttttaaaacaacactaagaagtaaacagccattatagtgcaaactctgccaaagtgtcatatgcatactgagtctataactgcgtctgcagtgatcatgctattcatttggccatgcttctgcagtatggcccttagaagagctgttttttacccctactgggctttctgatatgtttgtaggacagagaattgcaggaagcaggccttcatatctgagccgtgctgctctggtttgctgtgctgaatgttgctgtgctctcccggaagaggtaggcacaagtgctttagaaggaactgtcagaaccccactgctctactgagcactggtgagtctgaggattcacaggctraaggcaggtcactgaaagcggcctacattctggaatttctcggaacagattatttcctgagatgacaaaaagtataattttg

SEQ ID NO: 527969 - DNA, 465 bp, Homo sapiens
agagggagacccgaagccatctgtgttcctggttctattatagagtgccactgtcacttgaactgccttcctaagcctgctggtccaactcttcattccttttttttttttttttttgagacagggtctcattctgtcacccrggccggagtacagtggcacaatcatggctcactgcagcctcgacctcccaggctcaattgattctcccatctcagcctcccgagtagctgacactccaggtgtgcgccaccaggcccagctaatttttgtgttttttttttttttttttttgtagagacgggatttccccatgtttcccaggctggtctcaaactctggttttaagagaactgcccacctcagcctcccagagtgctgagattacaggtgtgagccactgcgcacagcctcagctcttcttttccatcagtcacctttctgtttaaattagttcaaatggag

SEQ ID NO: 527970 - DNA, 465 bp, Homo sapiens
agagggagacccgaagccatctgtgttcctggttctattatagagtgccactgtcacttgaactgccttcctaagcctgctggtccaactcttcattccttttttttttttttttttgagacagggtctcattctgtcacccgggccggagtacagtggcacaatcatggctcactgcagcctcgacctcccaggctcaattgattctcccatctcagcctcccgagtagctgacactccaggtgtgcgccaccaggcccagctaatttttgtgttttttttttttttttttttgtagagacgggatttccccatgtttcccaggctggtctcaaactctggttttaagagaactgcccacctcagcctcccagagtgctgagattacaggtgtgagccactgcgcacagcctcagctcttcttttcmatcagtcacctttctgtttaaattagttcaaatggag

SEQ ID NO: 527971 - DNA, 603 bp, Homo sapiens
ttcaagcctaggccctcaagcttgttgacatttcatgagcaatttggttgcaacttctgtggatcatgcactgtacaaaaacttaacaataacccttttttttcttttgagacagggtctcactctgtcacccaggctggagtgcagtggcgtgatcatagctcactgcattctcaacctcctagccattctcaagccatcctcccaccttagcctctcgagtagccaggaccacaggtgtacaccaccaccctggctaatttttagaaaaaaaattagtggagatgagatctccctatgttgcccaatctggtctcaaacccctgagctcaggaaatcctcccrcctcagcctccaaaaatgctgggattacaggcatgagccaccatgcccagcctgaaaacttaataactcttaatctaatacttagcacaaaatgttgagataggaattggcatctccattttagagataagtaagtgtcagagagattgaatcacttactcagggtcacacagcttttttcaaagccagaaattgaactaatgctattgggctgctgagttagtactcacttcaccacacagtactaagcgtcatgtg

SEQ ID NO: 527972 - DNA, 424 bp, Homo sapiens
cttcagcaggctgggcaaggtggttcacacctgtaatcccagcactttgggaggctgaggcaggcagatcacctgaggtcaggagttcgagaccagtctggtcaacatagtgaaaccctgtctctactaaaaatacaaaaattatctgggyatggtggtgtgtgtctgtagacccagctactcaggaggctgaggcaggagaattgcttgaacgtgggaggcagaggttggagtgagccaagtttgagccactgcactccagcctgggcgataaaagcgaaaactccatctcaaaaaaaaaaaaaaaaaaaaaaaaaagaaggtgacttcagcagttccaggcttctccagtctttattgctgtcactggaggaggagagaccctctctcacactaggaagcatacaccaaagtcttagagaag

SEQ ID NO: 527973 - DNA, 603 bp, Homo sapiens
gtgaggggtgaagactgttcagggacrgaggatgtcacatcagccatggcctctgtgcagagggccaggggtgagtggggagggagaaggctggagagagaagtgggagcctctgaagaggagttacactttggcctgaagacaatgggagtccttgaagggctggatttgatcaactgggctttggaaagatgactttagcttgaactggaggggagaccaaaactataagcagtgagacccaggaacctgggtgaggaatgatggtgacatagactagagtgagcctctgcttggagaaaagtgggcagattgggggaaaagagagagagagaaaaaacagagtgtgtgtcttcagcctctagaattgatgggatgtgggggtaaaggaggcatgagtctagagtcactcccaggctccatgcttgggtgactcagggtggttgatgggctttcattagatggggaacccacgaggaggggcaggctttattgggggaaaataaagagttcggcatagaaaggttgttcttgagatcctaaagaataccccagaagaaatgtctggcagcacatggttctgctgccaggaggcagccggca

SEQ ID NO: 527974 - DNA, 622 bp, Homo sapiens
gaagaattgcaagaaaaaaatgttactcttgatgttcaaatacagcatgtagttgaaggaaagagagcgctttcagaacttacacaaggtgttacttgctataaggcaaaaataaaggaacttgaaacaattttagagactcagaaagttgaaygtagtcattcagccaagttagaacaagacattttggaaaaggaatctatcatcttaaagctagaaagaaatttgaaggaatttcaagaacatcttcaggattctgtcaaaaacaccaaagatttaaatgtaaaggaactcaagctgaaagaagaaatcacacagttaacaaataatttgcaagatatgaaacatttacttcaattaaaagaagaagaagaagaaaccaacaggcaagaaacagaaaagtaagctaaatgttattcaaaatattttaaaatacacaaagcattcattttgctatgcagctttaaaaaagttagatagtcatacttaatctggtaaagcgtagcatgtatgatgagtgaagaacttgaactttgtccatataaacctttggaccataggttatgtgaaaagatcagcttataaaaatcatatgaaatattttctgaagaactcattcata

SEQ ID NO: 527975 - DNA, 622 bp, Homo sapiens
gaagaattgcaagaaaaaaatgttactcttgatgttcaaatacagcatgtagttgaaggaaagagagcgctttcagaacttacacaaggtgttacttgctataaggcaaaaataaaggaacttgaaacaattttagagactcagaaagttgaatgtagtcattcagccaagttagaacaagacattttggaaaaggaatctatcatcttaaagctagaaagaaatttgaaggaatttcaagaacatcttcaggattctgtcaaaaacaccaaagatttaartgtaaaggaactcaagctgaaagaagaaatcacacagttaacaaataatttgcaagatatgaaacatttacttcaattaaaagaagaagaagaagaaaccaacaggcaagaaacagaaaagtaagctaaatgttattcaaaatattttaaaatacacaaagcattcattttgctatgcagctttaaaaaagttagatagtcatacttaatctggtaaagcgtagcatgtatgatgagtgaagaacttgaactttgtccatataaacctttggaccataggttatgtgaaaagatcagcttataaaaatcatatgaaatattttctgaagaactcattcata

SEQ ID NO: 527976 - DNA, 622 bp, Homo sapiens
gaagaattgcaagaaaaaaatgttactcttgatgttcaaatacagcatgtagttgaaggaaagagagcgctttcagaacttacacaaggtgttacttgctataaggcaaaaataaaggaacttgaaacaattttagagactcagaaagttgaatgtagtcattcagccaagttagaacaagacattttggaaaaggaatctatcatcttaaagctagaaagaaatttgaaggaatttcaagaacatcttcaggattctgtcaaaaacaccaaagatttaaatgtaaaggaactcaagctgaaagaagaaatcacacagttaacaaataatttgcaagatatgaarcatttacttcaattaaaagaagaagaagaagaaaccaacaggcaagaaacagaaaagtaagctaaatgttattcaaaatattttaaaatacacaaagcattcattttgctatgcagctttaaaaaagttagatagtcatacttaatctggtaaagcgtagcatgtatgatgagtgaagaacttgaactttgtccatataaacctttggaccataggttatgtgaaaagatcagcttataaaaatcatatgaaatattttctgaagaactcattcata

SEQ ID NO: 527977 - DNA, 657 bp, Homo sapiens
ggagcacagagaggacatcgctgagatcacagagatggtgagcacgctttcctgccctatgaaggtggctcctgcgccttttggattgtgggttaactttactttggggagagcatccaattgcactttcagagtgggaaaatatttttccttttgcaacatcttaacaaacctacatagaatttgcttaggaagaagagaagtctaatggaaaatcaattaactattttagtaattttctacacgatacccaaattttaaaaacttaaaagcaaaggtgagttgaatcatgytgaggactatatatgtacataaaagctgcgaactcttcattctgtttgctaagaacctgttgcttggcattgcttgtctctcagtgtccatgtgacgcacaaccaaaccctcatgtttcagatgttaaccttgtgtagaggagacacaaacgaaatctgatgaattagtatgttcagaaaactgaatgaatggaggtgctgcgactcccttatgataagggatcactcaacatctcattaatattgtcttttatgagaccacctggtatttctgcatgaggcatttatcataacttctatccaccaaaatatattataatctagaatgttttcttttccaaccacacaggaaagaattttatta

SEQ ID NO: 527978 - DNA, 657 bp, Homo sapiens
ggagcacagagaggacatcgctgagatcacagagatggtgagcacgctttcctgccctatgaaggtggctcctgcgccttttggattgtgggttaactttactttggggagagcatccaattgcactttcagagtgggaaaatatttttccttttgcaacatcttaacaaacctacatagaatttgcttaggaagaagagaagtctaatggaaaatcaattaactattttagtaattttctacacgatacccaaattttaaaaacttaaaagcaaaggtgagttgaatcatgttgaggactatatatgtacataaaagctgcgaactcttcattctgtttgctaagaamctgttgcttggcattgcttgtctctcagtgtccatgtgacgcacaaccaaaccctcatgtttcagatgttaaccttgtgtagaggagacacaaacgaaatctgatgaattagtatgttcagaaaactgaatgaatggaggtgctgcgactcccttatgataagggatcactcaacatctcattaatattgtcttttatgagaccacctggtatttctgcatgaggcatttatcataacttctatccaccaaaatatattataatctagaatgttttcttttccaaccacacaggaaagaattttatta

SEQ ID NO: 527979 - DNA, 583 bp, Homo sapiens
ccctctagggcagaacaccatagaggcgtgaggtggattctgcaacagttcagggagttccactaagtccttacaygccaccaatttgccaaagtgaaaggatggctctttttttcttttcaatagtctttttccctaaataagaaagctcagatgccactgtttctgacattgtggaaataagatttctaaaggcctaacatactctttaagcaatagcaaaggttttatccctaaataacataagaattatttaattcgcaatgtttctcaaagaagttcccaaacagggataatttaaacacacatcatttggacagtcagaaaatagcaattttactaatccggtgggaaaagtcgattgcatcctaagttttttgctggttatggttcaaatttgacattcacaatgtcagaaaagatgaaaaaaaatttttttaaggctgggtgtggtgatcacgtctgcaatcccagcacgttgggaggcctagacgggtggatcactggaggtcaggagtttgacaccagcctggccaatatggtgaaaccttgtctctactaaaaatacaaaaattagccaggc

SEQ ID NO: 527980 - DNA, 583 bp, Homo sapiens
ccctctagggcagaacaccatagaggcgtgaggtggattctgcaacagttcagggagttccactaagtccttacatgccaccaatttgccaaagtgaaaggatggctctttttttcttttcaatagtctttttcccyaaataagaaagctcagatgccactgtttctgacattgtggaaataagatttctaaaggcctaacatactctttaagcaatagcaaaggttttatccctaaataacataagaattatttaattcgcaatgtttctcaaagaagttcccaaacagggataatttaaacacacatcatttggacagtcagaaaatagcaattttactaatccggtgggaaaagtcgattgcatcctaagttttttgctggttatggttcaaatttgacattcacaatgtcagaaaagatgaaaaaaaatttttttaaggctgggtgtggtgatcacgtctgcaatcccagcacgttgggaggcctagacgggtggatcactggaggtcaggagtttgacaccagcctggccaatatggtgaaaccttgtctctactaaaaatacaaaaattagccaggc

SEQ ID NO: 527981 - DNA, 481 bp, Homo sapiens
gcgtgtgaagcatcacctacagttcaggtctcctgcaggcgttggcagatgccaggaacgcacttcggagctgggcgacagagacytttgtgtccagcatgctgatctccccataaggcccttcggtcttggagctgggcagctccagctctctcctggaagctgggtccttatacttcaaggcctggagctgaggggggcctgtgaaatctgacagagagcgggtacggaccttgcgctttttcgaggcttccctgttgtgaccagttggtttggcgtcttgggacacaggctcactttgaatgtagagaaccatctcgctcctgcctgtcctctcagtgggctggtgcggagcttgagggggttgtgccacgttttccagttccttctgatgctctaaggtgactgtgctcacagcaggcttaccaaagtcctcatttctagagggatcttctgggcttctcactagcccatcaccctc

SEQ ID NO: 527982 - DNA, 379 bp, Homo sapiens
taattttaaattattagaaaggagtctgttggccgggtgcagtggctcacgcctgtaatcccagcactttgggaggccggggtgggtggatcacctgaggttaggagtccaagaccagcctggccaacatggtgaaaccccatctctactaaaaatacaaaaaattagccgggtgtggtagtgggcaccagtaattccagctactcgggaagctgaggcaggagagttgctggaacctgggaggtggaggttgcagtgagccgagatcatgccactgcactccagcccgggcgataacagcacgactctgtcmcaaaaaaaaaaaaaaaaaaaagaacggagtctattatagtcacactctgcccacaaataccaggca

SEQ ID NO: 527983 - DNA, 544 bp, Homo sapiens
attaaatattcatgtatcttttccattattttctttaaaytaaacaggtgagtaactggaactaattttggagtttggtatgaattgagaagagagatatgcctcttcccaccctctggcaaacccatttttttcattatgattttattaaataattcctccttttctcactactatgtgaagcttaaacttcacatatactacacagattaccatttcgggtacactacggtttatttctggctataaattttgggactctgatctgtgtattgatatttcaagcgtgtaattactttttaagaggtggagtctggccgtgttgtccaggctaatcttgcactcctgagctccagctattctcctgcctcagcctcccaaagtgctggaattactggtgttgagccaccaagcccagccttttttttttttttttcaataattgcatgtgattttaaaatatcttagttttctagctttctggccacaggaaattggaaactgtagagacaagcaaactgataacatcataaaatgagatcaa

SEQ ID NO: 527984 - DNA, 404 bp, Homo sapiens
atttaaacttcatgcaagtgttggccagtgatagtatgctagattaactatgacattagtaaaagatggcacgtatttcctcaagcaatttcacaaacgtggtgccatctgaccaatcactaattgaggtcaggaatttcctttgctgctaattggggaaagcaaaacaccaaggatgaaagacccacccggggtcccagagctggaaaacagaggcctccaattcccacatagagggttgtgatcctcacctgtcactgcaggctggggaactggttcctgtgagaagtgtgagggctctaggacatctgtgagcatgccaggcttcctgggaaatgttctccttctcctyctgggagcgtgggcattttcttcagtccccaagggttacttttacaaaaggg

SEQ ID NO: 527985 - DNA, 484 bp, Homo sapiens
gagtgtgagtatgagtgtgggtgtgtgtgggtgtgagtgtgtgtgggtgtgagtgtgggtgtgggtgtgagtgtgtgtgagtgtgggtgtgggtgtgggtgtgagtgtgggtgtgagtgtgggtgtgagtgtgagtgtgagtgtgggtgtgrgtgtgggtgtgggtgtgagtgtgggtgtgagtgtgggtgtgagtgtgggtgtgggtggcacaaacctggacccttggggaactcctgggtgctgggcaccgctcctgtggtcagtggtggcggggccctggggagttgccttgtcctagaggggggtcatcaaggaccagggctgagtgacagggaagggagctggtatcccaagggcgctttctgcccacgcagtgcttctccctcccaccaccagcagttccaaccattagcaagaccttccttacacaggacccaatgccaactgtctcagatcccctcactgcaggctcctggcccac

SEQ ID NO: 527986 - DNA, 540 bp, Homo sapiens
ctgctcctgagctctgtcccccagcccctgcggcagcttccctgaagcagaagggaaggccctgagccaggtgggccaagctgggtggaggtggaaagggcccccaccacctgggccgctctggcagcccaccttcttcccatctgctctaaggctctttggagtcagccagcctccttggaaaacgctggagctgagggccgacccgccgccccttcaaggcaaatccctcgagagcacaggttctagacgcccagggcggctggacttagaggcagagcagggaggytccgaaggtcgcctgggtgaggggtgcacagcagaagggccacccaccccaaagcccaagagccgctcagcccagctccctgctggccgagccgcccccggctctgcgcttcctcccagggcaccaaggccttcaacgccaacacgtggggctgtcaccaggggaaaccggaggcctgagctcagcacctctggacccgcacccggctagcctccagcctcccttcaaacttcggtcccttcccggctgta

SEQ ID NO: 527987 - DNA, 634 bp, Homo sapiens
gtcccaggtgccttttacgaagccgccctccccttccatccccgtcgttgcaggggcggttgcggggtcaacgggaagtactcggggtgggacacgcctcttcttgctgagtctcaggtgaacacagtctrttgcttccacccaaaagagcagccagtgccacctgccactcagcttagcgatttccagtgcccccctcaggggaaaccatgctgctgtccgtaggtgtgaccagctttttggtgactacctcttgaagaaagtgtctttccctcagcacatgtgtagcaaacaggacttggatcctctccttatggtgcaaacccatatcaccgcctatagacacccactttcctcccataacacccttccggagcttgccagagggtctgggatgactccacaccttcaggaattttgaaacggctgctgattaggactcagtttttgagtccgtgcttgatgaggatgtacagaggctgcacagctctgccttgacccaaatcatcccagagagagtgcgaaggtgggagctgcagccggacccgcagggccaccggcatggcaggttctgcaagagcccgcctggccgtccctgctttctagcggctgacgtgaagtactggacaaaagc

SEQ ID NO: 527988 - DNA, 634 bp, Homo sapiens
gtcccaggtgccttttacgaagccgccctccccttccatccccgtcgttgcaggggcggttgcggggtcaacgggaagtactcggggtgggacacgcctcttcttgctgagtctcaggtgaacacagtctattgcttccacccaaaagagcagccagtgccacctgccactcarcttagcgatttccagtgcccccctcaggggaaaccatgctgctgtccgtaggtgtgaccagctttttggtgactacctcttgaagaaagtgtctttccctcagcacatgtgtagcaaacaggacttggatcctctccttatggtgcaaacccatatcaccgcctatagacacccactttcctcccataacacccttccggagcttgccagagggtctgggatgactccacaccttcaggaattttgaaacggctgctgattaggactcagtttttgagtccgtgcttgatgaggatgtacagaggctgcacagctctgccttgacccaaatcatcccagagagagtgcgaaggtgggagctgcagccggacccgcagggccaccggcatggcaggttctgcaagagcccgcctggccgtccctgctttctagcggctgacgtgaagtactggacaaaagc

SEQ ID NO: 527989 - DNA, 634 bp, Homo sapiens
gtcccaggtgccttttacgaagccgccctccccttccatccccgtcgttgcaggggcggttgcggggtcaacgggaagtactcggggtgggacacgcctcttcttgctgagtctcaggtgaacacagtctattgcttccacccaaaagagcagccagtgccacctgccactcagcttagcgatttccagtgcccccctcaggggaaaccatgctgctgtccgtaggtgtgaccagctttttggtgactacctcttgaagaaagtgtctttccctcagcacatgtgtagcaaacaggacttggatcctctccttatggtgcaaacccatatcaccgcctatagacacccactttcctcccataacacccttccggagcttgccagagggtctgggatgactccacaccttcaggaattttgaaacggctgctgattaggackcagtttttgagtccgtgcttgatgaggatgtacagaggctgcacagctctgccttgacccaaatcatcccagagagagtgcgaaggtgggagctgcagccggacccgcagggccaccggcatggcaggttctgcaagagcccgcctggccgtccctgctttctagcggctgacgtgaagtactggacaaaagc

SEQ ID NO: 527990 - DNA, 634 bp, Homo sapiens
gtcccaggtgccttttacgaagccgccctccccttccatccccgtcgttgcaggggcggttgcggggtcaacgggaagtactcggggtgggacacgcctcttcttgctgagtctcaggtgaacacagtctattgcttccacccaaaagagcagccagtgccacctgccactcagcttagcgatttccagtgcccccctcaggggaaaccatgctgctgtccgtaggtgtgaccagctttttggtgactacctcttgaagaaagtgtctttccctcagcacatgtgtagcaaacaggacttggatcctctccttatggtgcaaacccatatcaccgcctatagacacccactttcctcccataacacccttccggagcttgccagagggtctgggatgactccacaccttcaggaattttgaaacggctgctgattaggactcagtttttgagtccgtgcttgatgaggatgtacagaggctgcacagctctgccttgacccaaatcatcccagagagagtgcgaaggtgggagctgcagccggacccgcagggccaccggcatggcaggttctgcaagagcccgcctggccgtccctgctttctagcggctgaygtgaagtactggacaaaagc

SEQ ID NO: 527991 - DNA, 301 bp, Homo sapiens
attttaaaattaaggtatgtatattgttttttaaagacgtaatgatattgcacacttaatagactacagtaaagtgtagacamaacttttatacatactggaaaaccaaaaaattaatttgactcactttattgtaatattacctttattacgatggtctggaaccaaacccccaatgtctctgaggtatgcctgtccatatcctgtttccttaccactccctggtaatcataactaaaatttgcttcaaactctcctcattgagaaaaactatattaaagcaacattaggcctatgtaga

SEQ ID NO: 527992 - DNA, 301 bp, Homo sapiens
attttaaaattaaggtatgtatattgttttttaaagacgtaatgatattgcacacttaatagactacagtaaagtgtagacaaaacttttatacatactggraaaccaaaaaattaatttgactcactttattgtaatattacctttattacgatggtctggaaccaaacccccaatgtctctgaggtatgcctgtccatatcctgtttccttaccactccctggtaatcataactaaaatttgcttcaaactctcctcattgagaaaaactatattaaagcaacattaggcctatgtaga

SEQ ID NO: 527993 - DNA, 301 bp, Homo sapiens
attttaaaattaaggtatgtatattgttttttaaagacgtaatgatattgcacacttaatagactacagtaaagtgtagacaaaacttttatacatactggaaaaccaaaaaattaatttgactcactttattgtaatattacctttattacratggtctggaaccaaacccccaatgtctctgaggtatgcctgtccatatcctgtttccttaccactccctggtaatcataactaaaatttgcttcaaactctcctcattgagaaaaactatattaaagcaacattaggcctatgtaga

SEQ ID NO: 527994 - DNA, 398 bp, Homo sapiens
gggtgatgacagagggaggaattttctgcatggaagagcttgttagccccatggatctgaatgagagcattcactgtggcttctgcctccatttcaggaatatacagaccagagactcaggaaaagccaattgataarcgggcttcttatcgcctcagacacctgctcccaggaagaatcccgctttctcacccaagaccttctgctgggtggaatgttgccaactgtaggtacagagtgctcgtaatttgcctgattccagccacacaataatgttttgttgcccttcaaccaaagtaaataaaaagccagtgtttgggggcaagatttagcattgccatcagtggcaacagcctggtgtccaggctgccccagaggaggtggctgtgatgagcagc

SEQ ID NO: 527995 - DNA, 600 bp, Homo sapiens
ggtcactgtagaattcacggcagaggcagttcactggatgaggctgctttctgtcagtgctgtgagatgagccctcatgttgctgtgcacggctgtgcccccgcacctagctcaggtgggctgatagaattaagtgtggcagggcgcagtagttcacacctgtaatcccagtgytttgagaggccgaggcaggcagatcacctgaggtcaggagttcgagagcagcctagccaacatggtgaaacccatctctactaaaaatatgaaaattaaccaggtatggtggccggcgcccgtaatcccagctactcgggaggctgaggcaggaacccaggagacggagattgcagtgagccgagactgaaccattgcactccagcgtgggtaacaagagcgaaactccgtctcaaaaaaataaagaacaaaagaaagacaaatgaaagaaagagaaagaaagaaaggcagacagaaagaaagaagagaagacaagagaagagaagagaaaagaagagaaaagaaaagaaattaagtgaatgaatgaatgatccatcccagatagggtcagacatcagacttctgtgtggaagagtggaaacaaag

SEQ ID NO: 527996 - DNA, 600 bp, Homo sapiens
ggtcactgtagaattcacggcagaggcagttcactggatgaggctgctttctgtcagtgctgtgagatgagccctcatgttgctgtgcacggctgtgcccccgcacctagctcaggtgggctgatagaattaagtgtggcagggcgcagtagttcacacctgtaatcccagtgttttgagaggccgaggcaggcagatcacctgaggtcaggagttcgagagcagcctagccaacatggtgaaacccatctctactaaaaatatgaaaattarccaggtatggtggccggcgcccgtaatcccagctactcgggaggctgaggcaggaacccaggagacggagattgcagtgagccgagactgaaccattgcactccagcgtgggtaacaagagcgaaactccgtctcaaaaaaataaagaacaaaagaaagacaaatgaaagaaagagaaagaaagaaaggcagacagaaagaaagaagagaagacaagagaagagaagagaaaagaagagaaaagaaaagaaattaagtgaatgaatgaatgatccatcccagatagggtcagacatcagacttctgtgtggaagagtggaaacaaag

SEQ ID NO: 527997 - DNA, 588 bp, Homo sapiens
tgtgttcttctcatgacatagcaaatggctgacaaaaggcagatatctgccttgctgagccacaaagacaggttccaaataagggaatgtcttggttgtttcggggggggcttttagctgtggctggagaacacagactcaaggcctctggwctttttgagaagcagaggccagtggaaggctgaggtctggtagtgtggagcccccactgcagcctgctcatgagggccaggcctccctctgggacctgcagcactgtgacaaatacttctttccggctgactttgctcagacacacgaatgaatactcagcatgggaatcgccctctctaacatgaagtgagagccttggaaagccctgtaagcaacatggctgcaggctcttgttccttcacatatgcacacaagcaatgcttcgagacggcacggtgcttcgcggagcacgcagccagcaggaggctaggacagcagaggcaaacctattttctccaggcagtctggaaaccagagttgcatgttaagtattatgtgtaaatgaaataggaatcagggagaggaaaataccaatttgggctgaattggcaaaat

SEQ ID NO: 527998 - DNA, 613 bp, Homo sapiens
tttgggaaaggctactatcattcttgctttaaagttaaactataaaccaaatttctcccaaggccagcttggtctatacccaggaatgatcaaggacagcttggaggtttgaagcaraatggagtaaactatgtcaggtttcttttactgtcataattttgcaaaagtggcttcaaaggtcaaaatggtattttctgcatctgcccaccatggaacgttgtgatgaaacacatgtcaaatttgactttgcgactgctttagacacacaatagaatgccaaatggatgacttcaaagcacttaggtttaatttagtcaagataagagatgcactggatggttaagcaatgacaagaggtcctcaaataaagaatacgtcttggtcttttatgaaaaatcagtgttgaattcgtgatactgtcagttacaattcttataaattattgcttgctgttaataatgttagcaaaatcaaaccaaaaaaaagtcaagtagatcatagtttctctatttttactttttaaagaactttaaatatttttaaattttcaagagaaaaaatccacatggaaaggatatcaggaaaagtaaagttacattccaaaaagcatatc

SEQ ID NO: 527999 - DNA, 614 bp, Homo sapiens
tttgggaaaggctactatcattcttgctttaaagttaaactataaaccaaatttctcccaaggccagcttggtctatacccaggaatgatcaaggacagcttggaggtttgaagcaaaatggagtaaactatgtcaggtttcttttactgtcataattttgcaaaagtggcttcaaaggtcaaaatggtattttctgcatctgcccaccatggaacgttgtgatgaaacacatgtcaaatttgactttgcgactgctttagacacacaatagaatgccaaatggatgacttcaaagcacttaggtttaatttagtcaagataagagatgcactggatggttaagcaatgacaagaggtcctcaaataaagaatacgtcttggtcttttatgaaaaatcagtgttgaattygtgatactgtcagttacaattcttataaattattgcttgctgttaataatgttagcaaaatcaaaccaaaaaaaagtcaagtagatcatagtttctctatttttactttttaaagaactttaaatatttttaaattttcaagagaaaaaatccacatggaaaggatatcaggaaaagtaaagttacattccaaaaagcatatca

SEQ ID NO: 528000 - DNA, 576 bp, Homo sapiens
catatcaacccctgagctgggtcttaaggggtgagcagaattagctgagaagccctgctatagtcccttcacatatgactgtcattagctaccttagataactggagtgaagatgtcattttakaattcagcttaatgagctttgttctaggtgtgtatacaaacagaacaggaataagaggtcataacttctagttttagctgtaaataacagcaaatgcaagataatgcgggcttcaaaattttagggtttttttctctcatgtaaaagaagttcagagttaggtaccccatgtctggaaatgtagatctaaggtacaaggacctaaggttcctctgttgtttcactccatcatccttagcacatgacaaccattcttaagatcaccttgaggtccaagatggctgtcaaatctccaaaagtcatatcagtattctaggcagtagaaatgaagaagtgtagaaacactaagatcccattaaggagtatgccaaaagcttgacatctgctttcatcttacgggtcagcacttagttgcatggttgtatctagcagtcagagaagcttggtatatc

SEQ ID NO: 528001 - DNA, 470 bp, Homo sapiens
atgtcattttagaattcagcttaatgagctttgttctaggtgtgtatacaaacagaacaggaataagaggtcataacttctagttttagctgtaaataacagcaaatgcaagataatgcgggcttcaaaattttagggtttttttctctcatgtaaaagaagttcagagttaggtascccatgtctggaaatgtagatctaaggtacaaggacctaaggttcctctgttgtttcactccatcatccttagcacatgacaaccattcttaagatcaccttgaggtccaagatggctgtcaaatctccaaaagtcatatcagtattctaggcagtagaaatgaagaagtgtagaaacactaagatcccattaaggagtatgccaaaagcttgacatctgctttcatcttacgggtcagcacttagttgcatggttgtatctagcagtcagagaagcttggtatatcatcttt

SEQ ID NO: 528002 - DNA, 627 bp, Homo sapiens
tggtacaaagaggaacaagataaaacatgatccttaccctccatggggcttgcagtacagtatagggaatcagacccatgaataaatagctgtagttctgtttgatgagtgttataactgtgataagaaacaaactcctgtatgggtacagggtaaagagataagagcccaacttgggcttgggrtcagggaacactttttggagggggtgatatttaagctgggtcttaaggggtgagtggaaactcatcagacagaagacaagaaagcattccaggtagtgtggacactaagcataaggcatggagctctgcaagaccagatgtggggttcaggaacccgaaatcaatccatgtgtctaaagtgtgaagggcaaatgggaaagtttggtgcatacgaccatgggctgcaggcctatcaggaagggccttggataccccattagtcttagggaaggtgaagtcattacctgcacagatccccacccacaaaggtgaagattgtctcacctggcattgcagttagaagcatgaacctagagctctgcactgggcccataaagtcagccagacatgcctgcaagttcctacagtcatgatctcttctcattttcccacatcagagcag

SEQ ID NO: 528003 - DNA, 456 bp, Homo sapiens
gacaagtctgctcggtgtagcacccgggtctccatgtcaccatcggatgcatcagtggcagacagagctaattgggaagctggcagtcatctcagctttgttggtctgagacagcactgggtcacggcagtaatttcacatgagtgcaaaagggcagcttggggtggttttcatttttcttgtgaaacaatgaagctgtttgaatttgtctaggggcaggagcagagggtgggcgacgctccagtaaacatgagagatagaactggatacggcatccatcatgtgttctgggctggggataggtagagatgaaaatgcatcttccccttccctctccttctgtcttcttctcccatgatggcaacattgtgtgatggggaggtcaacccaaccacagtggaaaagctcccgtgtcytttcttcagggaaccaaacatacacttagaatcccttaga

SEQ ID NO: 528004 - DNA, 651 bp, Homo sapiens
ctgattagatggagcccacccagattaagggtaggtctgcctttcccagcccactgacttaaatgtaaatctcctttgtcaacaccctcacagacacacccaggatggatattttgcatccttcaatccaatcaagttgacattcagtattaatcatcacaatcagatatatggttttcaaaaattttctcccattgtggaggttgtctttttaccctttggaggtgttttttgaagcacaaaggtctttaattttgctgatatccaatttatctatttgttgcttttctgctcacttatgttttgaaacctaattataaatgattttgaaattttggatagttccctctgtatactccttctggtatgcatagataagaamtgaccataatgtctgggagaaaaaaaaagtgctccaagaacattagttataaaaataataattaataaataacaataattattattatataatatcagacaaaatatttaactttcaggactgttgtttacttatctagaaatgaataaggaaagagaaggaaatttcccattttgatttgcattttgtgccagacactgtgttaggcacttaaataggtagatgagaatcttcaagcctagtaaggttaagtaagttgcccaaggtca

SEQ ID NO: 528005 - DNA, 579 bp, Homo sapiens
  misc_feature (1)...(579): n = A,T,C or G
gcctccagtcccctctgtttggcccatgtccagttggcccatgagcttctgactacctctgacaaccactggtagcacttcctgggtgttcatcatgtccagggagctacagatactttatctcttttaagtcttatgaacaatattctaagataaaggtccttatttcatggataaagctctttgagccctgtgagaatacctccactgccactggacagaatctttcttcactctccgagcctggggcagaacgttgatcttgcacctttgtggctattggttcgaattcctcctattggtgtccccatcatctaaggaccttgttttttcctttttcctttcttctacaggcagtrgctggagcactggactcagggtcaatgaggagcaaagaggaaacaaaatataaacatgtacaattatacaggttgacctagctccccctgttaagtctcaaggagaagagagtactgcacagcatggtgactgtgcttgatgaaataaataatgagnttggngtttcctttattagaaaaatnnccttgttccttcaacctcggcatggaagcctcttga

SEQ ID NO: 528006 - DNA, 609 bp, Homo sapiens
gctttcatagcagaataccatagacgggctggcttaaataactgaaattaattgcttgcagttctcgtggctggaattctgagatcaagttgccagcacggttgggttctggtgaaggctctctctctggttcacagatagttatcttcttgctgtgtcctctcatcggggagagtagaaagtgggaaagcagaggctctcctgtctttttataagggcactgcttgacctagttacattccaaaagttccagctcctaataccatcacattgggggccaggatttcaacatataaattttgggcaaayatccacttcataggaggcagagaagggaagcagtcacttgagcccctgaagataataatctttaaaaaatgggttaaaatagaaaaaccaactctttaaagacactaggaagcatccaaaaacaaatagaagccaagggagtttaatttcaaaagattgcaaagggaagtggcagcaattttgagtttgtggctcatgagcaccagaaggatgatcaaccccaattatggctcttaggaatgatggctggacaaaacatggccttcctgccagaagtcagagttcagagctgaaaaaaca

SEQ ID NO: 528007 - DNA, 614 bp, Homo sapiens
tgtgtcctttagtaattaaattggaacctgcttttagttcatctttaggagggtgggactcccatgaggtatggtgggaaggacccacaatttgaaatcttcaggcttaggtcagagcccttgtttggtttctttgtggctaattgatcagagacaatccacttggactctcagcctcaatttctgtatgtggaaaatcatgatgaaaataaygtatgcaccttagcagttgtttgtggggctctgacggataatttttgtgtaataggcaaaactgctttgtggttgtgagagaacttgagccagactatttgggttcacatcccatatctttacttagttgctgtgtcattttgggcactttaatcaatcctctctgtgcctcagtttccccttctataaagcaaggataacaataagtcctagtttatagggtgtgagggttacatgaaataattcatatagatcagtgggaataaagtctgggatgtaggatattagctatgatcactaaaaatgaaaggatgtttagagagagatgctgcagaataaaaaattaaataaataaaaaatgtcctaccaactgcaggacattttccaggaactttgtacgt

SEQ ID NO: 528008 - DNA, 614 bp, Homo sapiens
tgtgtcctttagtaattaaattggaacctgcttttagttcatctttaggagggtgggactcccatgaggtatggtgggaaggacccacaatttgaaatcttcaggcttaggtcagagcccttgtttggtttctttgtggctaattgatcagagacaatccacttggactctcagcctcaatttctgtatgtggaaaatcatgatgaaaataatgtatgcaccttagcagttgtttgtggggctctgacggataatttttgtgtaataggcaaaactgctttgtggttgtgagagaacttgagccagactatttgggttcacatcccatatctttacttagttgctgtgtcattttgggcactttaatcaatcctctctgtgcctcagtttccccttctataaagcaaggataacawtaagtcctagtttatagggtgtgagggttacatgaaataattcatatagatcagtgggaataaagtctgggatgtaggatattagctatgatcactaaaaatgaaaggatgtttagagagagatgctgcagaataaaaaattaaataaataaaaaatgtcctaccaactgcaggacattttccaggaactttgtacgt

SEQ ID NO: 528009 - DNA, 624 bp, Homo sapiens
atagttacctggggcagaagagcagcagtgtggatagagagaataggataaactctagagtttaggaggtagaaataacagactttgccaactatgagttattaagctatctcctagcattgaacacacttttctatgtttggttcttcaatgcctaccctggcattctgcaagctagctttttttttttcctactggtatgtggagacaaaattaacttcatcttggatgctaatccaccatgttgacttctcattaaccccagtcccataaatgccttcggattcctactttatttactgtccttagtgtaagaacacatacttactgtaaatcctgcctttagaccaaagcaaacttgatgttatcacacaaatataggttatgatgcacacagcactcttgcctgttctggggggttgtctttaattgtctctatagagcatgtatcccctttccttatgatatataagccckgggtctggggtgtattggtgtggagatctatttgtcttgctactgcaggccacacttctgtctgtaagttcccccaataaattaccctttatcaaaaaactgattttgtctgccttattatttggtttcttggctccttccttgttt

SEQ ID NO: 528010 - DNA, 548 bp, Homo sapiens
tactcatcttttgatgggcatttttggggccagaactgcctgctcatttctattccaggcatgaaactcaaaacagcccttgtggtaaataacccatgaaatatcaacaggtttgtttgtgtatctgaattgctactaccaggattttgacctactaaacttcctagacactatagctttcttccttgaccattaatatggggttgttttttgtattttaactcatacattctcaatgagagtaatattgttttcccaggaaatgaaatttcttcttgaggggaaaaaagtctattatccttataaacatagcacagatagaaatataatatgtaggggagggggcaaaaaactttcttctgccttctttatgtttagccaccagggcccrtgaatcagactaacaaaaaacagattaacaggagaaaattacaatgtttattcattcatgcaacatgcgtacatgtgggagagcttggtgatgagtaactcaaaggggtggttagaatttggggcttatataccattttaataagtaaagggataaa

SEQ ID NO: 528011 - DNA, 519 bp, Homo sapiens
cgcgcggggtggggtgggccgcccacttctcccgcgccctcaacccacagggaaacgggctgcgcgcccgggccgccccgcagagtccagatgcctaaatccctcctagtctgtttcctcatctgcggcctgcacgcccgccgcagccacacccaacgccgggacgcgcaaaaacacctgccgggcctatttcctctcgggtattatttacagccgctcccaggccttctcggaaaacatcctttgccggaaacasaaccccaggtccccagagcgtagggggcccagcgccggatccacgcggagctcacgagccggacagtcgccgcagagcaggctggggccgcgcggcgcacgccgggagggcgcgcgacagcacgtgaacgcggcgtgccgcacggcccgggaagggcggggtgcgcgctgaccggctcgtgcgccgcaggcagcagccaatccgcgcggaccacccccaggccccgcccccgccggtcccgccacgcccccgtcgggcccgca

SEQ ID NO: 528012 - DNA, 454 bp, Homo sapiens
atttcagagagcactcgatgctcccaaaagaagaagttgacagagcccacgtcccctcagcccttcacacagcctccccttgtcttcctctcctactcagcactgtggctgcactaggacccctcatgatgaccaagatcctcataaagaggacaagaagttcatccagtaccagtcaggccaatatcccaaaattagcataactgrcagaaatgcagaggcatcaacaactcctcttgacaacagggttggtagaagaatcaagggcctaattttgatgcctggcacaggttatgggagcagcagagtacatgctgcccagcggcttccagaagctcctggtccaccccgtcaagaagccggaggtcctgctgaggtgcaacacatctcagtgtgctgagactgccctcaatgttgcccccaagaactgcaaagccatcctggaaacagtggc

SEQ ID NO: 528013 - DNA, 457 bp, Homo sapiens
aggaaggagtgaggtctaggttgaggattctcccagctccctctctgcaggctacacactgcccgccccctccaacagaggccacagtccctgtcaggctgtccctagttttggctctgccacttgacattttaaacctcaaggtgctaatgcccagggctctgcactatcccttacggttttcctatctcctacccaaatctccccatcattaaactcctcgacttgcctggtacccgctgggcccctgacggagctgatcccaaagtctgaagcttgtcaagaggcagaagcacagcctggggagggaatccrcagttgtccctgctcagcttccagcccgcagaggatggacgccttctccggatggcttctcttggttttgggagcagggcggcaaagtcttttcatttcccaatttttaaattacttttctgaatagttaacacattcagat

SEQ ID NO: 528014 - DNA, 446 bp, Homo sapiens
tgctggtggagccttcagaacagaccctgctcgtgggcctggctgtagatggagtcctgagccctgatttcagcttctgcgccaccgcctttgggggtgtgagtgtcagcgaagcaggaagtgggggaacagaagggtgccccaaatccaaagttaggtgtaatcgtcagctccctctgtccttttccctgccataattgcaatggcaggtggacctggacttagctccatggacgtaactgctacagaagacaaattttatccaaggccaagggttccagataaagcgtgcatcatcccgcctgtatcagactcgccaccgccgccgtcatagtaaggccagagcacatgccctcagaggtggatggggccgtggctgcatatttggtctttgatcctgttttctggtccagagcttccaaarcccttgggatctccagagggat

SEQ ID NO: 528015 - DNA, 454 bp, Homo sapiens
caaggcctctgccacatccccgacgtgagtgtccagagccgttcccactaccgggctgtccccacgccacggcccgcgtgtggtgtggatccgcctcctcaagctccccatctccttggagtttgccagaaggctgggggatctgggatgggtctgagtccctgctgggtcccttcctatgctgtgtgaaaaacggtctttgagcctgtgttttgtccatgcagcacaaggagagcttaataaatgggtgcttctattgttattatcatcagtattaccattatcatcatcattattatattaccattatcatcatcattatgatcattgccattatcatcatyattatgatcattgccattatcatcattattgtttagctgggagcagagaggggctgctttaaccgccccagggtagtgaataggaagctctggtctccaagaagagtgag

SEQ ID NO: 528016 - DNA, 586 bp, Homo sapiens
aaccccacctgctggggcatgggctctcagaccattcgtgtgtgtgtgcacgcacatgcatgtaactgtgaaaggattcatgattcacagcatcggagagaactatgaacactgcaagtaagtaaatgaggccgggcgcggtggctcacgcctgtaatcccagccttttgggaagtcgaggcaggtggatcacctgagrtcgggagtttgagaccagcctggccaacatggtgaaaccctgtctcttctaaaaatacaaaaattagctgggcatggtggcacacgtctgtaatcccagctactcaggaggctgaggcatgagaatcacttgaacccaggaggcggagattacagtgagccgagattgtaccactgccctccagcctgggtgacagagcacgactctgtctcaaaagaagcaaaaaagcaagcaagcaaacaaacaagcaagcaagctagaagaaaaaaagaaagtaaatgagtgcatctacctcccaggtcttggtattctaaataccatcctccaattaaaggaaccaggagatctcagagggttagagggttagggtgggaaagcacaacatga

SEQ ID NO: 528017 - DNA, 565 bp, Homo sapiens
ttccctgtccactctcagaaagcccagcccctggcaaatatgcaacaggtttattttattttattattttttttaatgttgcaaagaaccttcatataattttttccatagcatcctgacaaactctggattcaagcggaggcagcattcacccatttctctgccgacaaagctggcctcggccagggtagtgacttgcccggattgctcagccagaccagrggcagagccccaacaccaggtctcctggccggcgctgtgtctcctcccgcctccatcctcatccgaaggttgggacgtcacagtccttggaggctcgcttagctgggaactgaggaccttcaatttcaatgtactgagtcttcatgacctgcataaggccgaggagcctggctgcctctttcccagaaattagtctcagtctcctgggccaagtggttgctttctactgcattgcgctcctggaatcctggaatacgctgctgaattctgcagaggaaatcagagtcatggtgacttcaaattaatcacataagcactcccagagagaaacgggattctctgt

SEQ ID NO: 528018 - DNA, 605 bp, Homo sapiens
gtgccaagtgtttggcataatttttctccttattttcaattattggcactgttattttactttttagctgaagcatctgagaacagtctaggaagcttctctgctcctctcacttttacaggaaagcaagcaggcattttttttcctgaaaatattgtaaataaacacaatccttgaaattttttcttgtgccccaaaacaactcatcgactatagaaaaggaagagaaattggctgaaatgcaatttgacgttttcattctgccaaaattactatgggttgaatttttaatttgattcagaagacgattcaactcttcagcctcatctatgtgattttgatttcagaatagcatgtctgagaccagagcttcctaagctgttttcttttaaaacacagattgttaaattctccaattgacatggcatattcattttgctatttgacttttttcttttaagtagtgaaggtaaamgttgcaaaaatattggatgaaagtcatttcatgccctgttattccaccaatttttaagaagagtaagcgctgtgccaaaaccttatatagaacaatgtgcaaaaaacaatacaaggacccatgaggaatg

SEQ ID NO: 528019 - DNA, 605 bp, Homo sapiens
gtgccaagtgtttggcataatttttctccttattttcaattattggcactgttattttactttttagctgaagcatctgagaacagtctaggaagcttctctgctcctctcacttttacaggaaagcaagcaggcattttttttcctgaaaatattgtaaataaacacaatccttgaaattttttcttgtgccccaaaacaactcatcgactatagaaaaggaagagaaattggctgaaatgcaatttgacgttttcattctgccaaaattactatgggttgaatttttaatttgattcagaagacgattcaactcttcagcctcatctatgtgattttgatttcagaatagcatgtctgagaccagagcttcctaagctgttttcttttaaaacacagattgttaaattctccaattgacatggcatattcattttgctatttgacttttttcttttaagtagtgaaggtaaaagttgcaaaaatattggatgaaagtcatttcatgccctgttattccaccaatttttaagaagagtaagygctgtgccaaaaccttatatagaacaatgtgcaaaaaacaatacaaggacccatgaggaatg

SEQ ID NO: 528020 - DNA, 312 bp, Homo sapiens
attgatgatgtactgttcacaaatactgtaattctcctggaatatagtaaatcatattccagagaggaaatttggagtaattgaaattgtgggcgcaggmatcaagtacagcagattagccacttactggatttgtaaatagatttacttaactttgattacttcattcctaaatgaagataactttctaacttgcagaattagaagtgttgtttgtaaagtatttaacacaatgtctagaacaaagttggtgataaacacacagtgattattactactctgaatcaaaagtgaaggattgctaaaccttgt

SEQ ID NO: 528021 - DNA, 625 bp, Homo sapiens
gctgcgtttggactgttgacaacttcctttaattttatttctatctttctggcctctctttagctaatgcttttttttttttgtaagacagggtcttgttctgtcacccaggccccaggctggagtgctggaatacagtggcatgatcttggctcactgcagcaggcttaacctcrgaggcccatgtgatcctcctttctcagcctcccaggtaactgggactacaggcctgcactaccatactcagctaattttgttgttgttgttgttgcagagacagggtcttgctgtttcccagactggtctcaaactcctggcctcaagcaattctctcaccttggccccccaaagtgctgggattaccagcatgagtcatcacacccgacctccttagctgcttttaactgaagttccttctcagtcttacatttagctgttagagttcctcggggctcttacctagatttctctagtttctctctgtactcccagtgtaatcccatcaactctcatagctttaggttaccgtcttagaaaatgttaaataagtaatagatggatgaactagatagctgaatgaatggatagagagaaaaaataagaaagatcagtagctgactttaag

SEQ ID NO: 528022 - DNA, 650 bp, Homo sapiens
caggtggtgtgggcctggagtgagggaaataatctgcactctggaaatttgccatactgcaacctggcccatggaagaacccaaggatgcatgagctccagctcctcacctttcatcttagagagaaatatgggctgtgagagttggccagaggaggtgcatatgtccaggaagcacacctgggagctcaggctggacgtgccaccacttcctctttggctgcaatgcacacatcyggctattcccatcagtggttagcaagaggcaaagagatgcttggctcagcatccaagagaactcagtcacccaagagaatgttaacactgatgcattgacctgcctcctatgttttaaagtcctgttcacaataatgacaatgaagtgtcacctccccaaggaagtgcagcaaacccataaacagagtcataaatgccactgaaaggaattagtattcaaaagcacattttaggacagtgaagttataaccatgacaactttgccggcagactaaagaagtgaacattctagtacaaccatcagaagaaaagtgtgggccagaatctcatccatccaatagctagatcctgttactgctattcctagtagatatctaaagaattcatcagcatctgttgtaaatccaacagaca

SEQ ID NO: 528023 - DNA, 528 bp, Homo sapiens
tttaaataattatcttgtttggtttctgaagctgccatcacacaggaagtagactgctagaatcatttacttgcagacctaaagaatttcagggtgagaagagattagttctttaattttrtaagtaaataaactaataaaagcagaattcaaataggatttgattaaatttacacagctatgccatgaaagaattcttcatccctagtggaatttcccatgcctctgtttcattttatctcaaggataaatgcttctgattcctagtcatggaaacttccaaagacacttcccagagaatagacattttcaagtaactggatgtgcaaaaggcagtaccgtgtgagtctgctatgtattttcactttgtagagataatgtgttcttatcatgatgctaccctcccacacatggatccctgaaccaagacgggccaatcagagccctctctcttggacctgggaattgtgacagaaagttagtgtcatatgactgtcctttcccactgaatgcaggtgtccttggtgg

SEQ ID NO: 528024 - DNA, 651 bp, Homo sapiens
tctagaataggcattgctctgtgtcctttacccatcacaatctaaaacatttgagcatttttgattagccgaaccatggaacatcagtgttcgaatccttctcttyaaatcttacatcgttttcaaagtgatttcatttcttgttgaagcttattttcacagatggaggcttgtttcttagatttgtttttattcatttgaccatcatcacactttgaaatgtgcacattatgattaaaaaatcagcccatgcccattctttatttctcaagtaatgtaagtttctaccttgttcttcagtgtgtcttttggttttctacctttttcactaaatttcagtgtttccattttaaaacttaatgcttttccttatttcatatttctttcaagttatgaaggcaattctgttcattatagatattttagaagatacaaaacagtatatagaagaaaaatcttgtttatcatctagtgatcataaatgaccattgttagaatatggtgtgtttcagggtttttttttttttttttttaagtgttgcctatctgtctatctatcatcttttccccatctattttggtcactagctgtgaccttagacagatagacttctgtgcctttctttcttcatttgtaaaatgagaataata

SEQ ID NO: 528025 - DNA, 556 bp, Homo sapiens
atagtggtaattcttggcccatcagacctttggtttattttgcctttctcttgtgccttttattattaaatcttgccctttggtcatggtgtgttcaaactctatctagacgattccattctagacacaacacaacaaggtgattgtaaaagttactatgtttagtctgcagaagaaaatgctaggcgaacactaggtgtgaactaccttctagtgtgtgaaaggctgtttgaaaagtcagacatttatgatactgcagagttgttgatttaggaggaatggagtagaaaagaaaacaaatgacaactttacccacccccaaacacacactcaagtaattttataacaacaacattctcacacagcagtcagtggctggaggtggtatttgctaycactttaccacttttagatggggcaatatatcttgttgcctctgcccctgctaattcccaaccgtgaggccaagctcctgtggctgtcatggttgcgtgtgatacggcagtgctgggaagggaagagcatggtccctttaaatgatacataacgggtggtg

SEQ ID NO: 528026 - DNA, 600 bp, Homo sapiens
tgtcaccttgaagccacagagaaagcacctgtctgaaagtgtcatacacagcccagagcccaaagatgggaagagaggaagagtactggtaacactgtaaagcctccagcccacttatgcctgaagatagcttggatttgtcaattacatacacaacagaatctcatttttcacttgcactaacttgagatagatttccgtcacgaaatctagagagttctaacacagcctccatttcacttttcattttttttcttttttgragatgaagtcttgctatgtcacccaggctgaagtgcagtggcatgatctcagctcactgtaacctccacctcctgggttcaagtaatactcctgtcttagcctcctgagtagctgggattacaggtgaacaccaccacacccagatagtttttgtatttttagtagagatgaggtttatcatgttggccaggttggtctcaaactcctgacctcaagtgatcctctcaccttggcctcccaacgtgctaggattacaggcatgagtcactgcacccagcctcacatttttctacagtgccaaatctgttctttgttgcttccaacgaatatttgaat

SEQ ID NO: 528027 - DNA, 629 bp, Homo sapiens
tgcaactctatgagtgtagaagagaactacaggtatagccaatacttggcattaccataggatgtgtcaggattaactagaaggcactctcaaagccttccagtaaaataaccaaaacatcaggagaaaataagcgtaagaatgttgttgatgagaggcactcagaagaggaaaagatattttgcacattataattgagttttaaatcatctagtggaattaccccttaaaagggaattttatatcatgtaatttatctaattatctacttaaacatkggagccaaattcacttatccacagcctctaatgttcattttaagtgtgaaaataggcaacaaaaaagtaagcatatgagtacaaactaaacaatttccccgtaatattttggtagtacacatcactgtgagccaagtgtggtggctcaggcctgtaatcccagcactttggaggctgaagcaggaggatcgcttgcagccaggagttcgagatcagcgtacgcaacataaagaaatcccgtctctacaaaaaatttaaaactattttttaaaacaatgaaacattagttgggcttgttgatatgtgcttgtagtccagctactcagaggctgaggcaggagaatcacttga

SEQ ID NO: 528028 - DNA, 524 bp, Homo sapiens
atctcatgactgaatttgtttggacacaagtccttacagcaattagattttaatagtagttcccagttatacttgacgagtaatggtcttttaaaaaaatcaatctcaaaaggttgagatgtgccccatcttctcttaccaatctattattatgttacctgtaatctgccaatttctataggtcccctaaactggtcaatgcatattgtattgtctcttaaattgagaaactttataatttcaaagtatgttctacgtgcaattaatgttaccttttgtagcttcctttcaagttatttccctattaygacaaaaagctgtcacctcaaagttggtgaatgaattattgttccccatattcatgcacatcttaattattaaggcttaattcatttttttaagctttataatttcccagaccaaaaataagagattgatttcttaatagttatccgtacaaataggctgttttgcctttcctgataacctgctttgcctaaattatgaaagaacaatttggaaga

SEQ ID NO: 528029 - DNA, 639 bp, Homo sapiens
tgttggccaaacaggatattccaccacatatcctgagggcagagactgagtattctttcttctttgtatttctagtgtccagcacagaacaaattgagcattattcattacacaaataaaccataccatagccgttttatttgtgagttggttataagagtattttatacctagaagttgggggattgaggtattacacatgaaaatttagctgaacttgaactccagttaaaattgtatatatacgtatgttttgagagcttaatgtcagacgtaaggcagtstgacataacacctgcaaataagtccaatatcagtttctgccttgcccaacaaaaatctcagcctcttgttcttgtggaatgcactataaggttggtttaacttcattttggcgatgttgaaataattccaccaaaaaaacaaggaatattcactcttcaaggttctgtacagagacatacagaacattgggtctttgccaaatgctatttttatgccatgattcaattgttttctttaatattttttccagaacatagacagagttgtgtttgttggaaattttctcagaatcaatatggtctccatgaagctgctggcatatgccatggatttttggtccaaaggacaactgaa

SEQ ID NO: 528030 - DNA, 646 bp, Homo sapiens
ctctgccattggtacagaaagtagaaatgkcatagcatatgccatctgtcacttatggggaccttaaattttcctatttacatttggttcagaccttttgctttgctcagctagtgtaatttataagtcatctcacaatctcatattcttattctgcattatattgctctagccatggacagggaccccttttccttgacatacacacaagccatttgtgtgtatgttggtcacaattaaaaggctatagtgatggaaagagtactttcacataaaccagacatttaactttggacactcctgtctttaaaagtctttcaaatgaaccctctgatattgaattggaatctaatgtattagtatgaactcataatttttattattttagggacagagtctcactgtgtcacccaggctggagtgcaagtggcatgatgatagctcactgcagcctcaaattactgggctaaagtgagcctaccacctcagcctcccaaatagctgggactacaggtgtgtgccaccatgccaggtgaattttttgtatttttttatagagacagggtctcactatgtacccaggctgttctcaaactcttggccttgagagatcctcccacttcagcctcccaaaattctcggatta

SEQ ID NO: 528031 - DNA, 553 bp, Homo sapiens
gctctgcatgaattaactctttctcttttgcaattcccctgtcttgataaatcggctgtatctgggcagcaggtaaaatgagcctgttggttggttacataaacttttcagccattactgctcaccttctcccttctcaggctgctcttcagccttgtggaactcctggcagtttcccaaaaatgccaggttgtttcaaatgcacccacagagtcttggctccttcagttctgagtagattcttttaaaccttccctccctattcacctgaagaaaggccaatattattcaaaattcagtttaagggtcatttcctccctgaamcctgttttagcttccacctcagcaccactcccccataaacccccacccctgactctgtcattgctcactctctggggtcttctggagttacctcccgcagcatagatggcatactttgcttccttcattgtttctccaagccatgatgatcatctgcatcaaatcccctgtttttgaaaaagttatttttttaattttaaaaatatttattatcatcttcgttatcatc

SEQ ID NO: 528032 - DNA, 649 bp, Homo sapiens
tgtgttttatacccagtagatagaatacataggcctagaaactaagaaatataggtagaattgtcccyatttaccatcatatccagtgacctactttcatgcatgcaactagtttctgcttcccaagaggttgtttttctttcagaagacacaagggttccactatagcaaagttcatgcttatcaaccagtcactttgcatttcttgggccagaagattagtctgcaatcaaaggagtttactctatcggaagggacgattgaccctgattattgttaggagataaggataccgctacattatcggactgaaaggaggatgtctggaccccagaggattcactggagggttcccatgcctgctgataactagaaatcagcaactgcagaaaccacagtctttgagtgagtagaccaggttattagaaatgctgttctgtgatgaagagtttagaatatgtcacagagtagacagatgatgaatatagtcatctctcagtatcttcaggaaaattcttccaggactctttgcagatgcccaaatttacagatgcacaactctcgtaaaatgacatagtattggcatataacctacgcaatcgtcctatgtactttaaataatctctaggttacttgcattatttaatcc

SEQ ID NO: 528033 - DNA, 533 bp, Homo sapiens
acagccagccttggtggccttgtaagtgagcatgcctgtggatgataatggtccccagccctctagtcttccaactaaggcatcagacgaagtagagaagagatcaaccatatcccccatgctttgtttaaattctgacacattaaaaccaagagcatgataratggttgttttacatcactaagtattatagaaatatgttctgaaaccatagtaactggaaaaacatgtatctttctagtttgtgattgctgtatgttataatgattactgtacattattaaagtatttctatatatcacagtttattaatttattcccctagttggtgaacacctagtttgtttcactcttttgctattatagttgaagctactaataacatcccttaaacacatctctagtattggtttgcaggagtttctctggtagcatagatttaggggaaaaattgcttgggccacaaaatatgcatatctttaaaccatatttaactaaaagattattgaggttgtactaatttatacttccac

SEQ ID NO: 528034 - DNA, 504 bp, Homo sapiens
ctctcctgctctacaaaaggtgatttagtgtccaaatttcatttccccttgctaatacctacttttcctgagatttcaggatagttggctgccatgtgacctggggtctttattttctggaaaatgtatgattttctaaattatctttgtttttttcttgttatattggaagtaatagtctttctaactttctacatcttaggtgaaagccaataaatagtaatacctcttgacattgtgtttaagtattaacttatcagagttagaggatttacctagaaatacaaccataaaagttgttaagatccacatagttttgggatttttcagaatcctttagatagcacttaatatctgtagtgtgatattctgtcagacataaagaatatggaaaacatacagaatttcactaactccaaatattaaatatgtaaatattttgagagccaaggtgttacartcttgccaatgcaccaccatgtcgcagtttctcgttgcctgacg

SEQ ID NO: 528035 - DNA, 649 bp, Homo sapiens
acttattaaaatggctctaccaagctcaaaatttttcctctaaatttagtgtcttaagtgtgattctaccaaattaaaaaaataattctctaaattcagtgtcttctagtggtaaaaaattaaaaacaaactgttgtgaaactattacctacttttctttggaacagcattaaaaatagttgtcattgggttggtttagtgtaactgttgtgaatgactttggaaaagttaatctcaagcttaggttctctatttttttatagggataatatcatccatttgataagatactgtaaaatgcaaaccagattcattggtaagtgtgcagagcagttgtgtctaacaaaagtgtaatatgagccacaaaggcaactcatatatakgtaattataagttttctagaagccacatcaaaagtgtaaaagaagtaggtgcagttattttagtaatatatttaatctaataatattcatattttaacatacaatcaatataaaaattattacattcttttatttcatactaagtctttggaatctggtatgtagtttacacttatagcacatcttgattgggactagctacacttcaagtgcttagtagccacatgtgaagtggtcaccattttggacagtgcagcaataaatgg

SEQ ID NO: 528036 - DNA, 429 bp, Homo sapiens
tgggagggaggagctgaattacgcctgacccctggccagagcaagagctactggccaaaggggagattgagcatctgtgttgtacttcccacgtctcttcacctaggaagtgcaatagatttctgacgagtctatgattacccactgatgaataaagacaatctccctgcacaattgcactgcaggcaagactgaacttatgaccaccacttctgtgtaattttgaatttcttagacctgaaccctgctgagtacacctgcttccytctattccttgctgaagttcattcttttcagtgcgttaatggagccaaaccaagctggtggtggtaacaatttgaataataatagtctttaactttttatcttttgaaaaatagaattctcaggagcacttttagctataagattccttcatccaattaaata

SEQ ID NO: 528037 - DNA, 415 bp, Homo sapiens
tgcaccttcttggaggccctccttctctattgcctcccctgccctgcagggagaagtcgcgctgttggttgcaagagaccgggggccgaattccctctctgcacagccgtgcccaagccttggctctattcagctccctctggaaaagtacgcgctccctaacccctcccgcgcccctctaggttcccgccctacacccctttcctccccctttcttccagtccctctccgcctgccttccagtggctgacaacttggggttcggagcgagcgccctcctgtggrcagagagcagggcgctgcggggacagtcgggttggttttcttgagcctctggcaggggcccgccgtggggctgtggcctggcagtcaggggagtccttaggaagaggaagacagaatagggcgccccggg

SEQ ID NO: 528038 - DNA, 629 bp, Homo sapiens
attaaatattgaggctccttttgggatttttgccagttctcactagcytattcatactttcttctttacagaccttttaaatctttctttctttcttttttttttttgagaccgagtctcgctctatctccctggctggagtgcagtggtgcgatctcagctcactgtaacctctgcctcctgggttcaagtgattctcctgcttcagcctcccgagtagctgggaatacaggcacccaccaccacacctggctaatttttgtatttttagaagagatggggttttgccatgttggccaggctggtctccaactcctgacctcaggtgatccaccctcctcggcctgtgtcatgggccacggtcacttatatttggctcagaataaataacaggggatccaaccttggggagagcaggagaagggctcgatggttagaggaaagagctggaacagaagtgctcaggtaggagccagcctgggctgacggaggggcagaaagaagggctggagtggtgtaaatggagttcagagagacaggaaatgaggtctgagcggcaggcagaggacaagccaatgaggacttcgcaaaatttgaactttaagcaggatgggaaacgactgaaaggt

SEQ ID NO: 528039 - DNA, 365 bp, Homo sapiens
tcactggcatcctggccacccaggagccatacctaggyatcctagaccccctctctaggctccatcctacctcctcccaccctgttaccctatagccaacaaaccctgcatgttcatccttgggcacacgtctgccctcttcctgctaccctactccaccccaggtcacatcctcattctctcaccgacccagggcaccagcctcctggcggggggctctgcctccactccaggaccccttctccaggctccaggtctccttgaagtccaggttttcatcacatcaccattctgttcaaccttcacctacttcacggcttagagatgaggctttcaaacatctgtttattcctagaacctttctt

SEQ ID NO: 528040 - DNA, 648 bp, Homo sapiens
tggctgcccttggagctgggcaggttctgaaagaggctgatttcctttccttctgggcatttgacaaactaacaaacaccactttcccagatggttccggcaatcttcccttatcccctttcctctccccaaatctctgtgcagaggcacagaggaggagagtctagaaatagctctgttcaaaagtttgttgggccagttgtctcccacttcctcctagagctgctgctggaggagagcctcaggaacacatacctcaccctgcatcctgccctactgtcactttggcatttgctgtttcgcattaatccctggcagcctattaaccctccaggaaaggacagaatgaaggcaaagctgggctctgagacaagggactggctgaaatagggcccccatgcccttgtctttaggtcacttgatctctccactgactcactgctctcatctatgaattggtcacaatcagtcamtgacttggcagtcaaaagaagtagtaggtctaagtaataggtccacaggcctctttgatctcagttcagatcctcttcccatctccccaggcccagtccccaattctgtagcaaaggccttcctggctctacaccagtcccagtcatcaaataccccttcctacaccttccctat

SEQ ID NO: 528041 - DNA, 489 bp, Homo sapiens
gagattttttataatgaagtcctggattacgtaaatgctgcatgatctttggcaaatctcccagcctcagtttctgcatctgtaaaattgcactgatgatcacccacccatcctagatggctgtcctcaggatcgaatgaggtatttgtggaagtatttagtaatttgtaaaatgtgaagggttaatatgattattactattagcagatagttactattaacatagatttacatgatagtgaagccaattctatagtaaatagtttggatttcattaaaagtagctagagatttcaagaggagtgttccccatcactaggatggcaaaactatctgccaaaggtattgtagagtgattcctgcaccaggaagagagtggaaataataatattaaaagtgataataatggtgaataytatgtggcagatattttctaagcactttatgtatattagctgctattataaccgttataacaagcaaaagaag

SEQ ID NO: 528042 - DNA, 618 bp, Homo sapiens
tctatgtgctgagacatgccttttctggtaataccataggactccaatggtacaatcacaatacacagagatactctccctgactttccagatcttcgacagttcttaggagctgggcctagcactgctggaactacctttcattaaaatactactggttctatagtttatattactccctttaaaatcttactaatttccagacacttgttttcctgaataaaaatgtctcaaggctccatagtcacatactacctttgcattaaaatgcaattgcagctaaaatcaggaatgaaagcaggacatcactactgatcttagaraaacaaaagggattataatgtaatattataaacaactgtatatcaacaaaatagacaacttagatgaaatggacaaatttccagaaagacacatactacagaaacggactcaggaagaagtagaaaacctgaataggcctgtcaggcctctgagcccaagctaagccatcatatcccctgtgacctgcacgtatatatccagatggcctgaagcaactgaagatccacagaagaagtgaaaatagccttaaccgatgacattccaccattgtgatttgtttctgccccaccctaa

SEQ ID NO: 528043 - DNA, 618 bp, Homo sapiens
tctatgtgctgagacatgccttttctggtaataccataggactccaatggtacaatcacaatacacagagatactctccctgactttccagatcttcgacagttcttaggagctgggcctagcactgctggaactacctttcattaaaatactactggttctatagtttatattactccctttaaaatcttactaatttccagacacttgttttcctgaataaaaatgtctcaaggctccatagtcacatactacctttgcattaaaatgcaattgcagctaaaatcaggaatgaaagcaggacatcactactgatcttagaaaaacaaaagggattataatgtaatattataaacaactgtatatcaacaaaatagacaacttagatgaaatggacaaatttccagaaagacacatactacagaaacggactcaggaagaagtagaaaacctgaatagrcctgtcaggcctctgagcccaagctaagccatcatatcccctgtgacctgcacgtatatatccagatggcctgaagcaactgaagatccacagaagaagtgaaaatagccttaaccgatgacattccaccattgtgatttgtttctgccccaccctaa

SEQ ID NO: 528044 - DNA, 592 bp, Homo sapiens
ggacacccaaattgtcatcactagggaaattgaatgaaatgaaaaataaaactgcagtgagccatcatcacatagccaccataatagctaaaaaattgtagaagattgaccatagtgttgataaacacatagagcaataagagctatcacatactgcttgcagaagtaaaacttagtataatcaccctcggaaagctacatgaaagtaagtataaatgaacatatacatgctttatgactcagcaatcaccattctagaaatgtgtacacatgtgcaccaaaagacagttataatttggaaacatttacagaagcatcatttacaattgctccaaactgggaaataacccaaatgtgcatcaacagataaataattgtaatgtatttaaacagttgagaaaatatagagaataacaagaaacaaacctttgctacatacaatggcatgaattaatctggcaaakagaatattgagtgaaacaatttagatttttaaaactctattacttcatcagtatgaaattcaaaataggtaaaactatttttggtgttaaaattcaaggaaatggttgcccttgaaaaggcagtgttt

SEQ ID NO: 528045 - DNA, 592 bp, Homo sapiens
ggacacccaaattgtcatcactagggaaattgaatgaaatgaaaaataaaactgcagtgagccatcatcacatagccaccataatagctaaaaaattgtagaagattgaccatagtgttgataaacacatagagcaataagagctatcacatactgcttgcagaagtaaaacttagtataatcaccctcggaaagctacatgaaagtaagtataaatgaacatatacatgctttatgactcagcaatcaccattctagaaatgtgtacacatgtgcaccaaaagacagttataatttggaaacatttacagaagcatcatttacaattgctccaaactgggaaataacccaaatgtgcatcaacagataaataattgtaatgtatttaaacagttgagaaaatatagagaataacaagaaacaaacctttgctacatacaatggcatgaattaatctggcaaagasaatattgagtgaaacaatttagatttttaaaactctattacttcatcagtatgaaattcaaaataggtaaaactatttttggtgttaaaattcaaggaaatggttgcccttgaaaaggcagtgttt

SEQ ID NO: 528046 - DNA, 616 bp, Homo sapiens
ttttttttttactttagattgtgagcttccgaaggaccttggctattgccatttccaagattatggccatgacctgcaattgaattagaatctttcagaatgggacccgggaatttctttgtttgtgttttgttttactgtatttttttacatatgctaagtgctttttggcagccaagattaaggacaacagcactaaggcctctaagtgtttctyggttgcacttatatacgcaaaactatttttccccttttgtacccaatagttacatttattagtatgcaaatgtgtataaggtaaaacaaacattttattatctttccataattatttctataagcccaatttttgcaataaaagatatttgatcttcggatgaaactgaattatttgtatttaaaagactttttcttcatgaatgatttatataaaacttaagtttctggtatatttagtgtattgagttttatctcaatatagaattcactgggattcatcaagcattacttaaaatagtaaagctcagaatacaaaaattatgggaactttgcaactattattgcctccttgttattatatctgaatgggaaaaaaaagaattaaacctgatttata

SEQ ID NO: 528047 - DNA, 512 bp, Homo sapiens
gatcctggtcactatgtatatctaatcaaaactgactttttttaatataggacctagttcctttcttttgtttactcataacagcactcttgaaagtcactatcagcgcaaaacgtttggcctgactgggtgagggatrcgtaacaacatcatatggcaaagataagattagatattcaacacttctttttatttggccacccataccactgagaacttctttctcttgtccttctcttcccctgttttcaccttcctttcttcccaactcctaatcactcttcgtttcttatgcagaacgtaagtttcatatctccttttagtttcatgatctccttttacactacagtaggtgcagggagataaggagcatctcactttcccttcccaaggagacctatgaagaagtattttattaaatgaaaaatcatctactctgaacagcagttatgtcattttcatagggacagaagtagtggccaatattgttattctaaatggagcaatttatt

SEQ ID NO: 528048 - DNA, 594 bp, Homo sapiens
agaaagaaaaaggagaaaaataaatcccaaactttgggcttacctcctggctagcttgccaaaatatgttactggtggagggtgtccaggttcttgatgtcttggaaaaaagaattggacaaaacacgcaaacaaagcaaggaaaggatgaagcaacaaaagcagagatttattagaaacaaaagtatacttcacagtgtgggagcaggcccaagcatacgggctcaagagaccaattacagaattttctgggctttaaatatcttctagaggtttccattggttatttggtgtacaccttatgtaaatgaagaggattttacctgtcatagctgaagtgtttccatttgatttagwtctaggaagtccttagtttccctgcccccaggccctattctcctggctcacaattattcttatttctttatttttgcttgtttatttattgttattattattattttcactggaatggagccacaactaacagaataatatttccagagtttaagaaagtcagcatggaattcaataggattgaaactgattactaactacgatgtttatttcatatattgtcttgaaccacttaca

SEQ ID NO: 528049 - DNA, 457 bp, Homo sapiens
tcagtttttaatcatttgtttagtagcttttcccatgttttcttccttaatatgaaacagactgggctctcctgttgtgtaaggcatgaggagctagaggagacaagatgcctctcatgcctccacctctcaggtgtcttgttatctgctgaacactgccaactgcagtggtggttgataaagcttggccctgtgtccccacccaaatctcaacycaaactgtgatcctcacatgtcagagaagaggtttggtgggaggtgattaaatcatgggtgcagatttcccctttgctattcttgtgatagtgagtgagttctcatgagatctcatggtttaaaagtgtatggcacttccccctttgcacgctctctcctgctctgccacggtaagacgtgcttgcttctcgttcacctgccaccatgattgtaagtttcctaaggcctcccagccatgctt

SEQ ID NO: 528050 - DNA, 457 bp, Homo sapiens
tcagtttttaatcatttgtttagtagcttttcccatgttttcttccttaatatgaaacagactgggctctcctgttgtgtaaggcatgaggagctagaggagacaagatgcctctcatgcctccacctctcaggtgtcttgttatctgctgaacactgccaactgcagtggtggttgataaagcttggccctgtgtccccacccaaatctcaactcaaactgtgatcctcacrtgtcagagaagaggtttggtgggaggtgattaaatcatgggtgcagatttcccctttgctattcttgtgatagtgagtgagttctcatgagatctcatggtttaaaagtgtatggcacttccccctttgcacgctctctcctgctctgccacggtaagacgtgcttgcttctcgttcacctgccaccatgattgtaagtttcctaaggcctcccagccatgctt

SEQ ID NO: 528051 - DNA, 646 bp, Homo sapiens
ggtctggacctgcacatgaggagaattgagtctgtggtgcagaaacatggaggtcagatgcatgcctcaaatcaatgaattctggagagcaagaagagagacatcaacctccagatcccaggctacgattcaacggttctccccataggaaagcagaagcaatgaaaaaattgtctcacagtcagcctaaacaagagagcccgctgtttaggacccttctccaacctccctaagaagagaagtcattctttcccttgggaagaagtaaaaagaggaaggggcaggaaataacttcccaatcccccagaggacagaaagtcctgttacaggctgggaagaatgcaggaggagaaatgtttyctctaacacagggaggagggtgttgaatggaataccaaaggcatatagctggcccatggtagacactccttacttgcccttgcttcccaggaaacacaagtctaaccaccttcacctgtgtgtgcagagtctgcagctcccagcagctataacgaaggtatttactgccacctacacacatagttcaaagtcccttggaaaatgaaaatcaacagtaagatatttgatttctctcccgtaacagctaagtagaatgaatatatgaagttattgaaattttaagagc

SEQ ID NO: 528052 - DNA, 646 bp, Homo sapiens
ggtctggacctgcacatgaggagaattgagtctgtggtgcagaaacatggaggtcagatgcatgcctcaaatcaatgaattctggagagcaagaagagagacatcaacctccagatcccaggctacgattcaacggttctccccataggaaagcagaagcaatgaaaaaattgtctcacagtcagcctaaacaagagagcccgctgtttaggacccttctccaacctccctaagaagagaagtcattctttcccttgggaagaagtaaaaagaggaaggggcaggaaataacttcccaatcccccagaggacagaaagtcctgttacaggctgggaagaatgcaggaggagaaatgtttcctctaacacagggaggagggtgttgaatggaatacsaaaggcatatagctggcccatggtagacactccttacttgcccttgcttcccaggaaacacaagtctaaccaccttcacctgtgtgtgcagagtctgcagctcccagcagctataacgaaggtatttactgccacctacacacatagttcaaagtcccttggaaaatgaaaatcaacagtaagatatttgatttctctcccgtaacagctaagtagaatgaatatatgaagttattgaaattttaagagc

SEQ ID NO: 528053 - DNA, 429 bp, Homo sapiens
gataaaatgtaaacatgtatcgtttgtattatgaaaataatttraaattcaaaattaaaagcataagatactactcagcaataagaagggatgaacacgggccaggcacgttggctcacgcctataatcccagcactttgtggggccgaggcgggcagatcacctgaggtcaggagttcaagaccagcctggccaacatggtgaaaccccgtttctactaaaagtacaaaaaactagccaggcatggtggtgcacacctgtaatcccttctacacaggaggctgaggcagaagaatcacttgaacccaggaggcagaggttgcagtgagctgagatcgaaccactgcactccagcctaggcacaacagagtgagactccataaaaaaaaaaaaaaaaaaaaaaaaggatgaacatgatatacataacat

SEQ ID NO: 528054 - DNA, 429 bp, Homo sapiens
gataaaatgtaaacatgtatcgtttgtattatgaaaataatttaaaattcaaaattaaaagcataagatactactcagcaataagaagggatgaacacgggccaggcacgttggctcacgcctataatcccagcactttgtggggccgaggcgggcagatcacctgaggtcaggagttcaagaccagcctggccaacatggtgaaaccccgtttctactaaaagtacaaaaaactagccaggcatggtggtgcacacctgtaatcccttctacacaggaggctgaggcagaagaatcacttgaacccaggaggcagaggttgcagtgagctgagatcgaaccactgcactccagcctrggcacaacagagtgagactccataaaaaaaaaaaaaaaaaaaaaaaaggatgaacatgatatacataacat

SEQ ID NO: 528055 - DNA, 565 bp, Homo sapiens
aactgcagtgctctccatctggactctgcttctagtcccactgaattctaatgtatacttttcattgcaactaccagtgatccctataaaatgagccattcattcaacaaatatgtatttcatacctactgtgtgtcaggacctgtgttaagctttgggggtaggtgcagagcacaaaacagagtcctggtcctcatatttatttatttatttattttcagaccctgtgttcagcaaaatgagcagaaggcaactattaaacgawcaaaatgacccatagcatgggtcaacaaaggattttaaaatctgtaattatgtagttaattatacttggaacttttctgggtatgatatatgtgtctgtgttatattaacagaaatactggtattaagttagtgtgtttagaagaatgcgttttgactaataaagacttaaacaagataaatagatatgaagtgtttacattttacaaccacataattgagataaactaagcatttgggaatttgacaacatagagccaggggtcttcctaagactccactgcgccagcaacattcccag

SEQ ID NO: 528056 - DNA, 565 bp, Homo sapiens
aactgcagtgctctccatctggactctgcttctagtcccactgaattctaatgtatacttttcattgcaactaccagtgatccctataaaatgagccattcattcaacaaatatgtatttcatacctactgtgtgtcaggacctgtgttaagctttgggggtaggtgcagagcacaaaacagagtcctggtcctcatatttatttatttatttattttcagaccctgtgttcagcaaaatgagcagaaggcaactattaaacgaacaaaatgacccatagcatgggtcaacaaaggattttaaaatctgtaattatgtagttaattatacttggaacttttctgggtatgatatatgtktctgtgttatattaacagaaatactggtattaagttagtgtgtttagaagaatgcgttttgactaataaagacttaaacaagataaatagatatgaagtgtttacattttacaaccacataattgagataaactaagcatttgggaatttgacaacatagagccaggggtcttcctaagactccactgcgccagcaacattcccag

SEQ ID NO: 528057 - DNA, 383 bp, Homo sapiens
aattacagaagcaaggtaagctgctacaaaattagtgcttcgatatttaaaaggttactgttgcaaaaacaaaaaacaaaaaacaccaagctctacccaaccagtatctggatgctgcccatccagctttcatcaagcactgtttctaccactcccgctccaggackgtggactgagaggctcctttccttccccaccgctttctactgcacctttagtttcctcgcttttcttctctgttcttgccctcacagtgtggatttaggtgatccactgaaagcgaagtgtttttgccaccaagtgcacaggtgagcagtggagaagagaagctggtccaggtctgggtgcaattatctgaagggcgtgacaaactggcagatggc

SEQ ID NO: 528058 - DNA, 594 bp, Homo sapiens
gacatattgtccttcattttttaaaaatttttcaaattctcgtggctcatcctcagttagcttgttgttaaactagtttgttattaggcctccccagtgagcatggagcagtaaatctgctggcagccaatgttccttagatactggatgttgaagttgtgagggctcctctcttaggtagtatttcaggtctaccccttttctcttacagatggagaaagagctggttctgggtcatataataaaaacaactgattttagggggacatgacagaagggactacaccagtgttttgtggtttttgttttttggttttggagtgcctattaggtcccaaacacatgcattctgctatctcatctaatcttccyaccagccctactgtttgcttcattaactctttacagatgagaaaacagacatagaaacgcacggtagtttgtctggggccacctaggagttaataggtggtggtaggaggattcccattcgggcttgatttttttccagtctttgctgttttccctcctggttggtctttacctgtctcctcactcccagtccactgtttctgtttcattgtcctcaatggc

SEQ ID NO: 528059 - DNA, 594 bp, Homo sapiens
gacatattgtccttcattttttaaaaatttttcaaattctcgtggctcatcctcagttagcttgttgttaaactagtttgttattaggcctccccagtgagcatggagcagtaaatctgctggcagccaatgttccttagatactggatgttgaagttgtgagggctcctctcttaggtagtatttcaggtctaccccttttctcttacagatggagaaagagctggttctgggtcatataataaaaacaactgattttagggggacatgacagaagggactacaccagtgttttgtggtttttgttttttggttttggagtgcctattaggtcccaaacacatgcattctgctatctcatctaatcttcccaccagccctactgtttgcttcattaactctttacagatgagaaaacagacatagaaacgcacggtagtttgtctggggccacctaggagttaataggtggtggtaggaggattcccattcgggcttgatttttttccagtctttgctgttttcsctcctggttggtctttacctgtctcctcactcccagtccactgtttctgtttcattgtcctcaatggc

SEQ ID NO: 528060 - DNA, 629 bp, Homo sapiens
gctgcttgggagagtgaagtgggaggatcgcttgagtccaggagtttgagctgcagtaagctattgattgcacctctgcaccccmacctgggcaacagagtgagaccctgtctcaaaaaaaaaaaaaaaaaaaaaaaagaagaagaagaagaattaaatggggtttttggtgttcttgttattttagaaaatgctgtatatcatattaagtggtcattcttttttcctttttttcttcaggtaaagatctttagtgttatgaacttcttaaaaataatcaagccaaattaattagtgggcatctgtaattaaaagtggtttaagtttccttttcatatttagcactcagttcatacttgaaacattccaaatccagtatgtttaaagaagagtcttcccctcagtgccctggaatttgctccctgtgcctagtgaattaaaatggtatccctctggaagcaaaacctaaagaagtacattatgggaaaacatttcttgaggattgatcctagcattactcctggatttgagtttccaggaaactttgttttctgaagaatccaatgagctggccaacaaagctgggacaattatgagtcaaaccagacaattaaaaagtatggagccct

SEQ ID NO: 528061 - DNA, 480 bp, Homo sapiens
ttattgacaaacatactgatttgaaattaagcaaatgaatgaaacccataactattccaaaggaacmcagtaaaggaaatagtcaggtttacaaagtataggatgactgctcactgatttacacacaaagaaaaagagaacccaacccagtaactgactgcagtgtttaagctgattctccaagaggcaaagaaaagctttagaagctgagtgagttgcccaaacattctccagggaagcactattctcttcccaactacacttacatttgaaattatttgagagcctttatactgtattagaatatggcttttgtaaagttttaaacttctgtatgtcaataaggaacaagaaccaatttctggtagtaaactgctaccctgcccatcattctgtaagtcaaaaatagaataaacaaagggctgttttgttaaatagataattttgatcatggagttttttgaaggagacagaagaaca

SEQ ID NO: 528062 - DNA, 532 bp, Homo sapiens
tggccaagtctgatatttatttacaagyaaggcgccctccttgaatttcttagatgtgttaattgggcctagtctgcttagccacgaggtcctccctgcccatctcctttaggagcagccttgttatacttgtcacccaagggatgttttagagaaagttggtgctccacgaaatcagagaccactgcagtggagagcagacagccaaagacccatctcagaaaacccaggggtctctgttggcccattaagtagaagcatctgtacattcaactttcttcctcatggtgaatttttctgtagcatcacttccatttgacagtgaaaaaacttaatctgtcaaaaggtaagagttatttttaaaacatggttatattgagaaaccttgcatcttacatgtgaaaatagccacagaactggaaaggatggtctgaagaggggactttcaatatttcccagcagattctcagacagagactcaccttggcccattattggatcaaagtcaatataatattaggttaacttgact

SEQ ID NO: 528063 - DNA, 644 bp, Homo sapiens
ccaggcctttttggataggttgctgtgatctcctgttttctggaaaactgatctaagtacagcttgattatgaagcacaagtgagtccattctggtttggtctggtctgttcagccaactgcaggaactgagtccaaaccaatggcctcccataaactttatttaacaatatctttgcagcattctgattratttcccaggagagatctagaagtggagctgctgagtccaagagcattcataatgctttttttatttttaatttttttagagacagggtttcactctgtcactgaggctggagtgccgtggcacaatcatagctcactgcagcagacttgcactcctgggctcaagtgatccacctgcctcaacctcccaagtagctgggactacaggtttgccccaccacacctggctaatcacaatgcttttgatacatgttaccaccaacctgataatgatccatttaagccacccatttttatgactgaagactccttagattccctaggcttcctcccagaggaacgtggtaggacagaattttaaactacgaagaacttcaagttcagtccttacatcctatttgaatgtgaaataacttcacctctctgtttttcaatgccttcatttgtcaaatg

SEQ ID NO: 528064 - DNA, 613 bp, Homo sapiens
tatgagtatcatcattgacttctgaccatatttgagagtgaggtattgaaaagctgattaaaagctatgtgaccatgggtggggtttgttgcctggttaatcttcattacagagataaagtggctggctgggtttttccatttgagaatatcatctcagtatcattagggcttttctacgccactggccagtcttcttagagaaggattcttcagtcttctgcccaggctctgtagacctgactgctgggttctctgagctgatcaggaaaatggttgaagttctccccattcagaatgtggaattgcctgtttttggaagactctttccactgtttttctgttttcagttgcctgccctggacctctttgctacatctggtgttttgggtctgaaacctctctggttaaagtttactccacagtaaaccttcggtcccctggcagggttggggagagatgcgyacctctcaatgttcctgtttcagacccacgtctccttttgtccgcagtgttctgcggtgtgaatgggcttgcttctcctttgaattctcttttaagaatgttggggcgcaccactcagatggcccccttttgatggaggtctcatttcc

SEQ ID NO: 528065 - DNA, 466 bp, Homo sapiens
atctcagcgctgagcaggatggggctggggccagttaatggcatcatttcattgtagtaactacagcaggccagagccaattgctgtttagtcagctttcccgtgtttgttgattttggtattactgatttattaaaggaagaggaactgtgttggatatcagaaaagtgttagaaagaggaaagtagagtaaatccaaacctctctctctacactctccaaacctgtcccccacacccaccccacccccttgttgccaagttgtaagatcttgggctgacttccaagttcccaaaattcaagtgtggaaaaagccaactaatctcctggaaaaatctcctgatgtgtatttttmtttaacaatctgggctgattttaaacttagcccacagtaaactgtgctcaaccggcattatcattatggacacttgctgctgtattttccaaggatctcccctcccccgct

SEQ ID NO: 528066 - DNA, 595 bp, Homo sapiens
tgtgtgatgcactcagtgtggtaagcgttggacagaaatatctgagtccatcaactcaactgggctccctagaacacagaacctgcagcaaggttagaattccgaggccttatttagaagtgtgattccaggccagcgaacaygggggaaatggaaaggaggtgtggaaggaggcagggcaacatctgatatttctccctttggaagcaaaagcaccaactgagagtcacctcggtgtgcaagaatcagagcagcaccttagcccctccatagctttggtgccttcatcagaaagcatagaagactgcctttcctcctaagactcaaggaggtcaaaactgcagcatagaggtgcattctggtccataccacctcacatcaaatgacaatttgggttatataataagctgacatcaatcgttttttcagagtgcaacctgtgttagccaaattggaacccaggttaaagagggtaataacattctcaccaggacagccttgttttgagtgcagtaggggcctgtttgggtgtcagcagcaagccttcgctggccacagctccagttctctgttgagccaagaaatgcgctgctgc

SEQ ID NO: 528067 - DNA, 513 bp, Homo sapiens
ctacccatgtgctaaatagtaatgaccacccccgtccctggactccccagccctgcccccaggctgggcacttgctccccaccctcagcagtgcctcaggccctgacgcctccatggccccctgtctcctcctccccatcccatctctcagcaatccagcatggacgtccgtaaggattcctaaatcctcacttctgttgagaaagccatggatctcttcccatccccttcctcagttctcyacctgacccatccaaatgtaacaacctgctcagcagacaagctttttaaaaggcagttttaaagtggaggggttttgtcagtttgttgttgcttgtttcacaccagtatgtgaaatatcctctttctacaaaaaaaaaactgctacctaggaggaaaaactaaaagtatgacagcatatacccaagatgattggtcagtaatttagggcaatgtgtgttcaaatatgaaaacagggtttcctaggactctgcactctggaacccccagatc

SEQ ID NO: 528068 - DNA, 334 bp, Homo sapiens
tcaggacagaggggcaagaagtgagtctcaagggtgtttaaacccgcatctgccactaaccagcctgtgtgggctgagagaggcaagttgtatgctggggcctgaatttcctcatctgtaaaatggggatgatgccatgagactcatctgtcccccctttccgtgatagccaaccggattttcattaaggcagttgtgccttacatagcctccaccctggccttagaggtggggcctgtggtttaataaaaggcaactaatcctctggctacagtgattagttcagggatgagcacatgacccattytggccaataaatgaaggagaagtatcc

SEQ ID NO: 528069 - DNA, 609 bp, Homo sapiens
taacaatggatattaggaaagtgtactcattgatctggaaagaggttggttttccatccaaagggaggtggcagataaattagtgaacaggactctagcagatgctgtgggggccctgtccttacccccttggccttcacttttcccgggtattagaacgcaatagctcccagtgccaggacatgctagtgctccccagaagtactcagggcagaggggttaacactctcctgggagcagccctcaggcaatgattaatggtaggagtgaatgcactgttcatctcctcaagggctaactcccaggcacctcctgaaccacytatgggaagcccccagtgaaactgacccccaggtgcccacagaagaaacctgctcccttctgtctgcccagctaatccttcttggaatcagttcccaattcactcacttgccaccctgggggttagaggctatagaaaggggcaggagtttgccattcctgatacaggaatgataagcacagagaggacatggggcgttacacgtgggctgccagccacacagtggaggcagtgcctgtgcttaggaatctgaatgttaagtacgcattcctgcccggagagattcc

SEQ ID NO: 528070 - DNA, 511 bp, Homo sapiens
tgggaatgaacaaagccatcttaggagtttgtcggtggcagattctactcccactgagctcaagctgatgcgaaatttgtgggaaggagcctgaggcatctcagaaaatctccagccccaggctctgtgtctgtcagggcaaattccccaggaagtgcctctgattggcccagtgtgggtcacatgctgtctctgagccaaatcggctgtggccacccaggcagcgtggtggtgcacaaacatggctgccaagaggcccaccctcttgggtgggacagttctccccaaagagagatgtgggctgaggtggggaaggggttgtactcataatgttgtctgttcgtgcaacagtatttcctgctgccagggagctggagttagggtttagaaaaggctggggaagtttagaggaagccgtagctgagtagcgaaaaggggagttgaagaagccctgaacaacatcttcccgtcgtygccttcttggaaaagcaagcccgcttctcctgtgcgc

SEQ ID NO: 528071 - DNA, 491 bp, Homo sapiens
cctcccacttccagctacaagccccactgcagcagagayggtgagaacaccacctccagccctgcccttggccgtgagtaagtcctcccagacttttccatggtggttgttaatcttcagccctaacgaccagcctgctctctgcacttccaggtcttgtttggactggaaccatttgaaatgctgtcttataattacagaggttgcgcgggcgggggctgtgctgccaggcggccgttggacttgcacgtctctgctgcagccagcaatttcagtaatgatagtcatgcacaccgtttatctttggggtttccagaaatacagggacttttccagacactcacgggtgtctgacatgagtgattccgtctgcatcgttctctgaggccatgagggcacgcttcctgaatgagctgggatgctgtcaggggctgtttggggaacactgaacgcgaacaggttcagaaatccatggagcaaaggagcctcag

SEQ ID NO: 528072 - DNA, 517 bp, Homo sapiens
tctgcagaaacagcattcctggtcccagaatcaacccgcattcaccaacctggaagctctctgaaccccttctttcagggaggggtatgcatgactgattaaatctttcgccattggtgattagatcaaccttcagcctctctcccctccccagggtcaggaggtggggctgaaagttctaaccctctaatcagcatttcttttttctttctttctttcttttttttttttttcgagacagagtttcgctctggagggttgattccattggccattcaagggttacctaattagcataaactcaggtatggtcaggagaggattggtctgaatgacaatcgatgctcccatcagcccgctgaggggattccaagggttttggaaactctgtggcaggaccaaatatttatttttgattctatcacaccttgcacaaaaractttgcaggtgcgatggagttcaggatcttgagatgagcagactatcctgaaatatgtgggtgagccccatgtcatc

SEQ ID NO: 528073 - DNA, 554 bp, Homo sapiens
gacagggtaccaaaagacgggactgtgagagttcacaattgaccatgaccttcaattaaagccccaaagtcggcagctcaaagggggctaaaaatgaccaaagcaacatgaccaatgggggaggtggggaaaacaacataaaagggacatctgtccaaccaacccaatgcctcccttcctcccaagacccttcctcccaactctgaataaactccgcaagttcaacrttagtgggtgaggagcagagcacctggacagacctgcacaggaaggagcctgcagcctgcggggtggggtcacttactgggctcctattggctggatgcagtgggattaggggtcagggttctcactccttctgactctggggtctgagaaaacacagcaacgaggtgaatgacatgggagacagacctggggtctttcagggacggaaagcctcagccaagacccagactcccagggtcatcaacctcctcgggtcactaaccctccccagtgtctgtctacccctaagtccagagaacacgtcctctctaggctcgagccggaat

SEQ ID NO: 528074 - DNA, 554 bp, Homo sapiens
gacagggtaccaaaagacgggactgtgagagttcacaattgaccatgaccttcaattaaagccccaaagtcggcagctcaaagggggctaaaaatgaccaaagcaacatgaccaatgggggaggtggggaaaacaacataaaagggacatctgtccaaccaacccaatgcctcccttcctcccaagacccttcctcccaactctgaataaactccgcaagttcaacattagtgggtgaggagcagagcacctggacagacctgcacaggaaggagcctgcagcctgcggggtggggtcacttactgggctcctattggctggatgcagtgggattaggggtcagrgttctcactccttctgactctggggtctgagaaaacacagcaacgaggtgaatgacatgggagacagacctggggtctttcagggacggaaagcctcagccaagacccagactcccagggtcatcaacctcctcgggtcactaaccctccccagtgtctgtctacccctaagtccagagaacacgtcctctctaggctcgagccggaat

SEQ ID NO: 528075 - DNA, 585 bp, Homo sapiens
acactctcctctgttccattggctcctctaccacgtgtcttcccaagttacctctgggtgctgagccagttaagcaccctgtgctcttgggtgaagactctcmgttacaaagactttgaagctaacagatgtggctgagtaggacaaaaaggggcaaaagtgagctgcctcatcctgccctgaggagagtaagcgaataacacacctgtgaaaagtgttgggagaatttggagaggaaagagctggattgagcaagcaaacattctgacgaattccaatgacataatttccagaatcatcaaactacctgggcaggagaagattctggacatatgtataactaaatttagttgtcaggcagggaatgaggcaccatttgtgttgatagaatactgtgactggtgacaagaaaaaggcttttagaaatgcccaaagaggtaacatgccctaataaaattgagacacaaaatataagtgcaaatttgaacacagaacattagcaactgcttttagaactcatggaatgcaattctgtgacttatttcatgtcacttagatgtaacattcagctatccttactctaac

SEQ ID NO: 528076 - DNA, 585 bp, Homo sapiens
acactctcctctgttccattggctcctctaccacgtgtcttcccaagttacctctgggtgctgagccagttaagcaccctgtgctcttgggtgaagactctcagttacaaagactttgaagcyaacagatgtggctgagtaggacaaaaaggggcaaaagtgagctgcctcatcctgccctgaggagagtaagcgaataacacacctgtgaaaagtgttgggagaatttggagaggaaagagctggattgagcaagcaaacattctgacgaattccaatgacataatttccagaatcatcaaactacctgggcaggagaagattctggacatatgtataactaaatttagttgtcaggcagggaatgaggcaccatttgtgttgatagaatactgtgactggtgacaagaaaaaggcttttagaaatgcccaaagaggtaacatgccctaataaaattgagacacaaaatataagtgcaaatttgaacacagaacattagcaactgcttttagaactcatggaatgcaattctgtgacttatttcatgtcacttagatgtaacattcagctatccttactctaac

SEQ ID NO: 528077 - DNA, 568 bp, Homo sapiens
tccatacagtcatctcacctacaacaactacaggctgggagggaacccgggcaccaacagccgggtcatggcatcctctggtattatgattccaaaaccaccaaaaccatcagataagctgctgatgccctacatgaggtacagccgaaaggtctgggaccaagtcaaggcttccaaccctgacctaaagttgtgggagattggcaagattatttgatggcacgtggcaagatctcactgatgaagaaaaacaagaatatttaaacgaatacaaagcagaaaagatagagtacaatgaatatatgaagtcctatcataattctcccatgtaccttgcttacataaatgcaaaaagttgtgcagaagctgctttagagaaagaaagtygacagagacagtcttgcatagagaaaggagaaccttacatgagcattcagcgtgatgaagatccagatgattgtgatgatggcatttcagtgaagcaagcatacagccactgcctgtttccagagaaaccacagcctcatcaatgaaatccttagtgacagtgtggtgccagacattcagt

SEQ ID NO: 528078 - DNA, 520 bp, Homo sapiens
tgttggagtctttgttaaaactccaatacaacagaaacagttgcatctaacatcttgttacgtatattgtctcagagggaagaatggtagtaggtggtaggcagctatatttgagcacaatacaaggtgagacatttttaagaaaggaaactctacaaatatgctgtgggcttcctcacgaagcgacgaatctcctatcacttgcagggtttaagcagagataggataacmacttattcgaatgctgcatcaggaattagaaggttgatttagctgacctctcattttcatattttatgattattggcgttcgatggcaatttagagtgtatatatcaacattgtttgatttgattttaattttaaaggtttagaaaaatccttgtgaaatgaaatatgagctatcagttactattcattcaatcactcattcagaatatcttttgagagcctagtatatgttaggcgctatgctaggaactggggaaattaagaagaaacacattgcccctgtgttcaa

SEQ ID NO: 528079 - DNA, 600 bp, Homo sapiens
cagaactgcaacacaaaaatcagcatgaatagacagcatatgcaggaaggatcytcccacagcacatcttgttgaaatgataaatgtggaaaaataatttacgaaatagcatgtagggccattttaaaactgaaaccaaggatagaatcaaccacttcacgcctctgaaatgtaaagtagaagcaaaaaaggttgcgagtttctggatgttctggttacctgttaattggatctctgatagttgtcttacctgaatccaccatctttccacacacaacaatgggtgcacagacatcaacacattggtaatctttccaacccaaacagggtcaccagtttaggtgattagccctacagtctgccacaggctctgttgcctgaacgccatgcacagaggcagagagatgcccacaggaatgagacaagagtgtggctcacagatggctcccctggagggaggaagaaagtcagtcacacgtacagttggtttccatgctctttgactaaaagcgttgaagaaaacttcacttaaactacctattgtgtattatgctgattacctgggtgacaaaaacaaatgtacactaaacctcctccgtg

SEQ ID NO: 528080 - DNA, 517 bp, Homo sapiens
ctaattttagaatataagctcagaagccatattttttgtatgttaaacactcctacctataaagtgacattatagttaatgtttatttttcataaataaacatgtcaggggccaagttttgcaaatattatctagaagcctgtatgccatagaaagtgagaaggctcatggagatactatttcacagatttggtcaaagtgtaaatcaattggagaggggaggaggaaaggtgggacttttactccagcttgttagctcattcgcactttccttggtgatttatatggttttagaccaccacctracttcccaatgaggagacatatgtgaaagcctttgcaatgcgcaatgaaaagctgtgctatacagacagtctcctgagctaccattctcagatgcaaaataagtggagagaaaatccagacttgaccttccacactggatgtttaatacattaaatcttctgcccaaacgtttaatgtgttgtttccttctgggcatgtgccagttaaacat

SEQ ID NO: 528081 - DNA, 530 bp, Homo sapiens
gaaacccaccccttaagaaccacttagcagaaaatatcagtaagcctcaagctccggtggtctgactgcccacccaactcttctgtccagcaagctgcacaaagtcaaagatcctttatgagcgtctcctcctgtgtttttctgaaactcaaactgtgagctayaggtcaggttctggccacttctccaagtcagagaaaatgctctagaagtttaaaaggagagcaaacatccattttcaaaagaactgaaacttcctcccaaccctcaggacctgggcattcagttgcagtcctggcatgcagaggaaaatgccctgttggaaactatcagagaatcatcctatgtggagcttctcatggatacaaaagccagagccttacaacagaaatacttacacagagcctcagacaaacctgtaatgacagatgaatttgtctgttaagtgtttctctttacctattaagtaacttcaagtcttgcttctgaaatcattaggaaaatctgcaggagactggaaaattccacca

SEQ ID NO: 528082 - DNA, 530 bp, Homo sapiens
gaaacccaccccttaagaaccacttagcagaaaatatcagtaagcctcaagctccggtggtctgactgcccacccaactcttctgtccagcaagctgcacaaagtcaaagatcctttatgagcgtctcctcctgtgtttttctgaaactcaaactgtgagctacaggtcaggttctggccacttctcyaagtcagagaaaatgctctagaagtttaaaaggagagcaaacatccattttcaaaagaactgaaacttcctcccaaccctcaggacctgggcattcagttgcagtcctggcatgcagaggaaaatgccctgttggaaactatcagagaatcatcctatgtggagcttctcatggatacaaaagccagagccttacaacagaaatacttacacagagcctcagacaaacctgtaatgacagatgaatttgtctgttaagtgtttctctttacctattaagtaacttcaagtcttgcttctgaaatcattaggaaaatctgcaggagactggaaaattccacca

SEQ ID NO: 528083 - DNA, 575 bp, Homo sapiens
tgcttcattttattttattttttttctttctcaaacatctttttcttctccagataatcagtgctctcaactgctctcaaatgcacgtacttctgtcaccataaagctagtgtaaccccatggagtacactcccaagccatgcaagagccatttaagagtagatatttttgtttaagtcagatctcaggatagaaggggacatcatccccaattgactcttggctctttttcatgtgcaaaagctaaaaaaaagaactggaccaagttgggtttgggtgtttgtttgggctttttgcatgtactaaagcaacacagagctgatgcacaataaacaaacatgcattatgggttgttttcagtcactttatagacatatgcattcataaattttgatacggttgtaagaagctgactttgatgggaccaaactcacagacgagctttcgatcactggagcaaccgcagtctaactttatgttgacaatgtatcagcccttctccgtcaaggaaaattgttttttagtgyttgcctattagcaatcacatgcataatatgaaattgagttttggggag

SEQ ID NO: 528084 - DNA, 617 bp, Homo sapiens
attttcttcctaccctgaactcctgaagatcttattccaaacctttcktatggaacatgcttgttaattaatcaaacagtatttgttgagcatataatacacatcaggcattatacctaggcactttgcacacattttcattccctccaaccagccctgaaagacttggattttttttttcttttttttttttttttttttttttttgagacaagatcttgctctgtcatccaggctggcgtgcagtggcggaatcacggctcactgcagcatccatctcctaggttcaagcaatcctcaaacctcagcctccaagtagctggggccaaagacatgaaccaatatgcccagctaattttttcattttttgtagagatgggagtctccctatgttgcccaagctggtcttgaactcctgggctcaagcaatcctcctccctgaggctcccaaagcactggggttacaggtgtgagccacaatgcccagcctggaaaactttaaaaatgtctatgaatattgatgccagtgccccaccacctgagatccagatttaacaggtctcaggtacagccgggacagggggacttttcaagacttgctggtttattccaatgtg

SEQ ID NO: 528085 - DNA, 617 bp, Homo sapiens
attttcttcctaccctgaactcctgaagatcttattccaaacctttcttatggaacatgcttgttaattaatcaaacagtatttgttgagcatataatacacatcaggcattatacctaggcactttgcacacattttcattccctccaaccagccctgaaagacttggatttttyttttcttttttttttttttttttttttttttgagacaagatcttgctctgtcatccaggctggcgtgcagtggcggaatcacggctcactgcagcatccatctcctaggttcaagcaatcctcaaacctcagcctccaagtagctggggccaaagacatgaaccaatatgcccagctaattttttcattttttgtagagatgggagtctccctatgttgcccaagctggtcttgaactcctgggctcaagcaatcctcctccctgaggctcccaaagcactggggttacaggtgtgagccacaatgcccagcctggaaaactttaaaaatgtctatgaatattgatgccagtgccccaccacctgagatccagatttaacaggtctcaggtacagccgggacagggggacttttcaagacttgctggtttattccaatgtg

SEQ ID NO: 528086 - DNA, 617 bp, Homo sapiens
attttcttcctaccctgaactcctgaagatcttattccaaacctttcttatggaacatgcttgttaattaatcaaacagtatttgttgagcatataatacacatcaggcattatacctaggcactttgcacacattttcattccctccaaccagccctgaaagacttggattttttttttcttttttttttttttttttttttttttgagacaagatcttgctctgtcatccaggctggcgtgcagtggcggaatcacggctcactgcagcatccatctcctaggttcaagcaatcctcaaacctcagcctccaagtagctggggccaaagacatgaaccaatatgcccagctaattttttcattttttgtagagatgggagtctccctatgttgcccaagctggtcttgaactcctgggctcaagcaatcctcctccctgaggctcccaaagcactggggttacaggtgtgagccacaatgcccagcctggaaaactttaaaaatgtctatgaatattgatgccwgtgccccaccacctgagatccagatttaacaggtctcaggtacagccgggacagggggacttttcaagacttgctggtttattccaatgtg

SEQ ID NO: 528087 - DNA, 545 bp, Homo sapiens
cttaaactaatttatttggcaatgaggaacaagacaatttttaaataaaaacagcaggcrggacaagagggaacatatacattcagttgagcacaaaaaactggttttaaggctgggtgcggcggcttatgcctgtaatcccagcactttgggaggccgaagcgggcagatcacgaggtcaggagttcaagaccagcctggccaacatggtgaaaccccctctctactaaaaatacaaaaattagcccagcatggtggcgggcacccataatcccagctagttggctgaggcaagagaatcacttgaactcgggaggcagaggttgccatgagccgagatcgtgccattgcactccagctctgggtgacagagcaagactccgtcttggaaaaaatgataaaaataaaaataaataaattggttttagcccttgtggactacaattcttacccgtccttctcctactcctagacaaagtctatttaacattgagaacgtttaaagtaatttgaaaatcaacttgccctatgtattatatttaaga

SEQ ID NO: 528088 - DNA, 677 bp, Homo sapiens
tcactgtgtgtgtctgtgtcttcacatggagttctccccgactgtgtcactctctcctcttataaggatattaatcagattagattaagggcccaccctactccagcatgacctgatcttractacctacatctacaacaactctaccataagaaggaaatgaaagtaggccgggcgcagtggctaacgcctataatctcagcactttgggagactgaggtgagcagatcatttgagttcaggagttcaagaccagcctggccaacatggtgaaaccccgtctccactaaaaattgaaaaaaaaaattagccagccatggtggtgcatgcctttaatcctagctaccagggaggctgaggaaggagaattgcttgaacctgagaggccgaggttgcagagagccaagactgtgtcactgcactccagtctgggtgacagagtgagactccacctcaaaaaaaaagaaaaaggaaatgaaagtaaggtcaaatgctgggtactctcatgttaagaaactgggggttaggacttcaacttttggtggggcacaattcagctcataacagctcctattcaaatatggcaccttgggccagtcacgtgactccagacatgatctgatacttgcgtggcacagaagttccatcctatctcttcctcaagactctgagctcct

SEQ ID NO: 528089 - DNA, 677 bp, Homo sapiens
tcactgtgtgtgtctgtgtcttcacatggagttctccccgactgtgtcactctctcctcttataaggatattaatcagattagattaagggcccaccctactccagcatgacctgatcttaactacctacatctacaacaactctaccataagaaggaaatgaaagtaggccgggcgcagtggctaacgcctataatctcagcactttgggagactgaggtgagcagatcatttgagttcaggagttcaagaccagcctggccaacatggtgaaaccccgtctccactaaaaattgaaaaaaaaaattagccagccatggtggtgcatgcctttaatcctagctaccagggaggctgaggaaggagaattgcttgaacctgagaggccgaggttgcagagagccaagactgtgtcactgcactccagtctgggtgacagagtgagactccacctcaaaaaaaaagaaaaaggaaatgaaagtaaggtcaaatgctgggtactctcatgttaagaaactgggggttaggacttcaacttttggtggggcacaattcagctcataacagctcctattcaaatatggcaccttgggccagtcacgtgactccagacatgatctgatacttgcrtggcacagaagttccatcctatctcttcctcaagactctgagctcct

SEQ ID NO: 528090 - DNA, 436 bp, Homo sapiens
aaggccacgtgactacagcaccatatcaaacactggcctaaagaatgtcaggtgtccttgcaaagaaaatttctccagtttgctctaaatccttcatgattaaagcttttaactcagttggctacatttcaaatgaggaggatttttgagaccctaataaaaacctgggacatgtaggctgcagaggtaatttataattttagtttttgattcacagagaggagaagaaaatgtctcaaaagccaatgttttacaaggaactgcacattttgtaacgtcatttcccamaataaatataagaaacaaaatctgagcagtgagtgacactttagagttggacatgtatgaagaagaacagaatctgcagttttattaaaaatgcatattaaactggattaatgttacagtcctcttgtttcagagagtatattgaatg

SEQ ID NO: 528091 - DNA, 617 bp, Homo sapiens
aaatttgactgacagtggtagagtcagtttcattgaatatgcatgtaatttcaaaattaaaaatactgggagctaaagttattgtaggggccatgggaaaactttccttttgyctctgatgattcactcaaaactcaataaagggcagattaattgcagaaacagcatacacatgtatttaatgtttacacaggagccttcagaaggaagacccaaagctacagggagaattgtccattttatgcttagattcaacaaagtctggataactatgtagaagtatgatttcatgctaacagactgactggagaaacacagcaaggcctgtttgtctaggttcctctttcctctctgagcatgcattccttcctgcaggaccctttctgaaatgtggtcttatgacctacagtcagacaaggtgggtcagatcatttctttatggccagtggagagaaccttagagtattatttttaggttttatggctggctttggggaaaaagagttctgatttctatgacccgccttggggaagagggattttagtttctatggctagccttgggggagaatgagactgagagacaggaaagcagaacgccagagaaaaactttgct

SEQ ID NO: 528092 - DNA, 638 bp, Homo sapiens
agtgggtaagcaaagaataaaagtaaagctcagaagccactggttaaatgaagtggggtaaatttaaaaaatgtgagtagttttgaattgatataaagtaatatggagaatcattaaaaacaaaagataaaaacaggacccagcatgcaaggtcaagttaagggtagccataatggaaggcaaataatggttcaacaccagatagatagaggcaaccaagaartacagattattaaagaggatggcagaagtgcagtcagaaaattagctgtctctagaaacttaacaagcagagtcaaaaattccagagagatgttttttacaaaaaaaaaaaaaaaaaaaaaaaaaaaaaaaaaaaacttggataactgaggcaatgtgcctgcttcaggctcaagcggcaaaagcaatcactgcatgatttgcccagactaggaggtaatggtacactgggcagaggtggaagaaagaagagtggtcgggttttgtcaggcctctgtcaatatttcccaactaacttaactaaaaagttgactacagcccagcagtggccaactttgttctctccaaaactttttgactgaacaagtttccatgttttgaaatgttttttggtgatgccccactctcttctccca

SEQ ID NO: 528093 - DNA, 573 bp, Homo sapiens
aatgcttttaaaacccagaattctagactcttgagttctggaagctggattcttatgaaaaattcgacattcttagacacacttcaacactgtgaggatgtgggggtctcagaatgccttgagtgattctgagattctaagtcatcacataaaaattacactatattccctatggttattaatacacatccatacacgtacacacacacacacacacatacacacacacacacmcacccaccatcagattagaaacacttttatctattcaaattaatgcaacttttttataatactcagtagtcaaagattaatatttacctacgtattcattctctttctttactacagttagtttttaatctacttttggtgtcaagcatttataataataataatgctgtctcatatgcttatttgaagtactttacaatttcaattcgctatttcatttgctagtttttaaaatcatgttatacaacttttatatataaatccagtctctcaattaaccaacaacaaaaccagattaattttggggatgttgatgagaaaacctgtaaagaaaaccaa

SEQ ID NO: 528094 - DNA, 369 bp, Homo sapiens
aacacaaataagaatatatttcccctaaaattcacaatttaattcaagtgtctgtcaacacatattaactttactgtctgctgtcagcagtataccaagaaaagaaagatacttgttgattttggtttttgaagccaaaaagatgttaatttggaatagggtggagaaagtyagaataacagtatagctcagtagaaaggaagctacaattacaactactgcaaaaattaaaaataaaaaaatgaaaaatgacaaaattacacaaaaattaaaaatttattaaaattagaaagctataattatcaaaacacactggcaaaattaagttcatcaaacatcattgtagacaccataaactataatttttta

SEQ ID NO: 528095 - DNA, 549 bp, Homo sapiens
tctaaagtggtacagtggttaccagcacaagctctggagcaagaccagtttaaatcgtagctgtgtggtcttgtgcatgtttttaacgagttctgtgccttagtgttctaatctgttaaatggggataataagcaagttgttatgaggattaagcatgctaatacatgcaaagcactttgaacaatgctcaataaagctatcatcattatagttcaaaattgctattgcatgtatcatcatagttgacccacagcactctataaaacacaggtaatcattttatctgtgtttcrctgatgaggataatgaagctcagttaagtgttttgctaaaaacataaggaatctacggctgagccaagacttgaatcctggttttttgacattaaacctcggattccgtcccatgactttggattatttacatgtaaaccacagtaaactagccattatcaaatattaattctagacaaattcagtaaggaagaaaacaactgagaacatcatacctattgtagggatttattcctgaaataaacaaaattaaat

SEQ ID NO: 528096 - DNA, 525 bp, Homo sapiens
ttctctcacaaaggagggctgcgagattgggtactgacacaccaagtttctgatttacaagtaattctctcagcagatcatagattctcaggcttactttctaagagaaaaaaaaaatgaaagaacaaaacaagaagaaaaaaccttacccagtccyagcatagaggacatttctacaaacaatggcctttgagcacaaactgaagaaagagtttttctcaggactgtaccgacctcccaacccatggcattctcccaaatacgtcctaaccaatcagccaaccaacaaggaaacaaaatgctcatctacagttcaaaacgaagcacaacctctccagcaaatttccctgggtctggtgtaaaatgctacatgttaaaagaagataaaaatcagggcaattaccaccatatgtaacaagggtacagtgtctcagggaattttcacttctcctgcaactataatgagcatagtttttgaaccaacagttaggacatataatgtgagtgtctgaagtcctgactcca

SEQ ID NO: 528097 - DNA, 553 bp, Homo sapiens
ttcttttctgatatgtgggtctacttgctgctttaactgggcactgcatcctgcccagcagggtttttcagtggagcatctctctcatgagccrctgaggtcaagaactgtcttatcatctagcatatgcccaggtcaggtcttcaggagctgagtgtgagcagctttcacgggacagccatttcctccactttccctctgccctccatccaacaccaaagggctgaggcaaatcaggtcactctctgtgctttgctgggaaggggcatcttcaaggcaggagacatcatttgctgtttccaaggtggatattttcatattctcagaaattttcaggcatttgaagggatgggtctttaaatcacacagatgtaacacattgaatgacttcaggcctgatgtgtgggagaaacatcaaggggcctggtgtgacaggagaacagggagcaggggaagatctggggttgaagagggaatcaggccttggaaagacgctgcctttttctcagagtgagatgagcagcagggtctgagtggaagagggagtggaagg

SEQ ID NO: 528098 - DNA, 553 bp, Homo sapiens
ttcttttctgatatgtgggtctacttgctgctttaactgggcactgcatcctgcccagcagggtttttcagtggagcatctctctcatgagccgctgaggtcaagaactgtcttatcatctagcatatgcccaggtcaggtcttcaggagctgagtgtgagcagctttcacgggacagccatttcctccactttccctctgccctccatccaacaccaaagggctgaggcaaatcaggtcactctctgtgctttgctgggaaggggcatcttcaaggcaggagacatcatttgctgtttccaaggtggatattttcatattctcagaaattttcaggcatttgaagggatgggtctttaaatcacacagatgtaacacaytgaatgacttcaggcctgatgtgtgggagaaacatcaaggggcctggtgtgacaggagaacagggagcaggggaagatctggggttgaagagggaatcaggccttggaaagacgctgcctttttctcagagtgagatgagcagcagggtctgagtggaagagggagtggaagg

SEQ ID NO: 528099 - DNA, 553 bp, Homo sapiens
ttcttttctgatatgtgggtctacttgctgctttaactgggcactgcatcctgcccagcagggtttttcagtggagcatctctctcatgagccgctgaggtcaagaactgtcttatcatctagcatatgcccaggtcaggtcttcaggagctgagtgtgagcagctttcacgggacagccatttcctccactttccctctgccctccatccaacaccaaagggctgaggcaaatcaggtcactctctgtgctttgctgggaaggggcatcttcaaggcaggagacatcatttgctgtttccaaggtggatattttcatattctcagaaattttcaggcatttgaagggatgggtctttaaatcacacagatgtaacacattgaatgacttcaggcctgatgtgtgggagaaacatcaaggggcctkgtgtgacaggagaacagggagcaggggaagatctggggttgaagagggaatcaggccttggaaagacgctgcctttttctcagagtgagatgagcagcagggtctgagtggaagagggagtggaagg

SEQ ID NO: 528100 - DNA, 643 bp, Homo sapiens
attataataatgtgcctaaatttactataatttactttactttcaaactcacatgtgtttaaaacatttcctcagaataataagaaaactgaattgagaggtattatatattgttagataagtcactaacttttctcagtctgagtgtattagttctcacattgctataaagacatacctgagactgggtaatttataaagaaaaatggtttaatctgctcacagttctgcagactttccagatttctgcttctggagaggcctcaggaaactyacaatcagggcagaagatgaagcagaagcaggtacatcttcgcatggctagcaggagagagtaaagggataaggaaggtgctacacactttcaaacaaccagatctcatgagaattctatcatgaaaacaacaaaggggaagtccaccaccacgattcaatcacctcccaccaggcccctccttcaacactgggaattacaactggacatgagatttgggtggggacacagagtcaagccatgtcactgagttacatcatttatttaaaataataataataattcataaatatgtgtgaggattaatcaacaatgtaagtgcatgttaatttctgaacatatatagaaaatatcaggacttattattga

SEQ ID NO: 528101 - DNA, 629 bp, Homo sapiens
gctgctttccccaaaattctgtacccacacaaggaactacacaattctacacattttttttctttgctctakaatttaatgttaacacctgggaagcctcctttctccatcttctgaaaaagaattcagaagttccatcactttagtccaacagcacattatctagtcctttatttaggaaatcctttaattatttctgtgtgtatctctctctttggattaagagctttgtaatgacttatttatattgtatttgtctctgtgtttcaatgtaaaactgcaagaactaggtgcctaaagcagacattataggtgatctaacaacatatttataacctctcacttcttgcagatgcaaatttgtatttagtgccttttctcccatttatattctgaagttaatatttatttcaatattcattttacttaattatagtcacagttccattccacccattaaagcaagcaaaaacagtagtagaactaaggaaaagcacattaaatttctttttttttccttctaatccagaacagctctttactttccacattggtacattctctggtcttaagttccaataaaaattctgtaagctatggagagacttttgaagagtgatcaatgcaag

SEQ ID NO: 528102 - DNA, 553 bp, Homo sapiens
catttttttcataaaaataatgcaaataggcattgatgtcagtgacttcatatccctgtcttgaccatttatctgataaaaacacccttttccaggttacctacaaaacagagtttatgactcttcccctaaaaaataaaaatgctgcaagtttttctgttaccaaagactgagaagcatccagggtttctttcttgtttttaatagtgaaattgttcaatatcacctgactttttcaaaaccccctacagttaatattmcatgtacaatttaaaaaaggagagcaagcctaaagaaaaaagaagagaaaaagaaaaaagaaataagagagatgttacagcttaacataatttgtaacacaatgtaaatattagaagacgtgtttctattaaaaatgtgctgtattttacatgcatattattttaagaaaatatctattatatatccaaacaagagaagtaaaggttgataataaatctatcacagagactggtttcatacaatttccccaccttcaaaagctaccgagagagagaaaaaaattatctcctta

SEQ ID NO: 528103 - DNA, 651 bp, Homo sapiens
ctgtgtgctagaaggagcaaaaagaaacaaaattgtgtgtagagcaatttcattttcttcaatatctgataaatcaaattctgaaatttctgttgctcagtctaagatttaactgaggctaagaataatataaatacttgcaagggcctgattaaatttacagacagaacacaacagaggtatagcagtataggaagcagaaaatggtttctttyttccagtttcacaatctcatttcctctctaagcaagatttctggatttttgaacaaggatgtccacagaaagatctcaaaagtcaattattgcaatttcttactctatgattgcacataaaaaagacagatggggctaaatgatactatgttttactaaattaattgactattgatttttcctaaaaagcattatgatggaatctatttctccctacctaattgtagatttttggagactaggctattgggtctaagcatatttgagaactcagaccactttgaaattctgataagtacatcaacaaaaagaatatactaatatgagcacatattcatatagataaatgaacatatctatagataaatacatctattggaaagttacacagaatacatacacacacatatgggaatgggggttgatgcaaataaca

SEQ ID NO: 528104 - DNA, 683 bp, Homo sapiens
atttacataacaagagagaaaacaaatttccacaaaacttttattgatgaaattagaatgacaataataattgagaacttttttttgtactacaggtcttctaataagaagaatgaaatttggggaaaggggataacattttgcttggttggggttcaaagttaacgctccctattatcaaagtgaccaccaatgttcatctgtgaaaaccacttagctaacagaccatacaaaaccaggcaggattttgtctgtgagccacagtttgcagactcctgaattaaatcaaagcattacagagctaagggaagagacagtgggaagctgatgctggagatgatactgaccccataggtctgtgggaggcatcttataaggcatttctttataaggcaagttcatgtccattgagctccttaatcytgacaacaattccatgagggtaggcagggtaaggatggttgtacactcttcagagaggagactgaggctcagagagaagtggcttgtctgaagtttcatagcaaagcctctctgggacacctttgaggatgctaagacatgggccttggaacatgtgctttgttgagtaattgaacaattatggtgtctcctggttggaagacaggctgagcctgcagagggacaggctggtctgaacatggtctggaaggctaagtttc

SEQ ID NO: 528105 - DNA, 464 bp, Homo sapiens
gcatacctatagcatcccctttcctggtttgtcagtctgggggttctctgttccctgggagaggggataagccaggcccaggttccaggaaagctaggaggtaggaggtcggggggtcagagttccagccatgggggaggggtgctacattcaaaggctgagttggggcttgggggttgcccagacagatccgcccgtggggccagtaggcagacacacaggcagctctctagtgggcggggaaggcacagcacttgactgagtgtgcyccatcctgtggagccactgacgaggcccaaccctgtgcccctgcaggccgccctggccgagagcagcttccccctcctcaacagccctggcatgctgaaccctggctccgccagcagcctgctgcccctcagccacgatgacgtgggtgcccccgtggagccgctgcccagcaacggcagcagcagccctcctcg

SEQ ID NO: 528106 - DNA, 606 bp, Homo sapiens
aagactccagcttggtaaatgaggaagcactgcagaagatttgtgctcttgaaaatgaacttgctgctctcagagctcagataaccaaaattgtgactcagcaatagcaggaaaatctaatttcaagtgacttagattttaccacatctgttaccacaccaccatcccctccacctctccaccagtcttgcccgccctctccactgggactccaccaaagtatatttgatattgatctgattagagagtgaggagggagaaaagccaattctgkaaagacgttggttaagaacaatccaaaaaaagctgacatgccaaaaatgctagagactcttaaagacatgatcagtgtaaaactttagtcagtaaaaacctcagagcaagatgtacagcccaagccagtggatgctgctggacttgctcccctcatagcagaggctctgaaaaagaaaaatttgcttatcggaatcaaagtagtataccaataggcttattggtatacccaggatgaagttgaaaaaggagttccaaagtctgaatcagaggccacctcagatacagagttgtctgcactacacatgttgaagtcaacaggaaaaatgaagg

SEQ ID NO: 528107 - DNA, 588 bp, Homo sapiens
atgaaacaggggtgagactatggcaaaaatcatgctgatgggatgtgaacaactaacatttgggagcactgtgctcctctcacgttcttggaccaacccagccacagggcagccctgggagggcttctgggagctttgtgtggaggggatctacacatgtggtagaggtggggcagcctgggggaggaggacttgtggactcaagtggacctggcttgctatctcagcccaacctctttctagaaagctcatttcctgcttaaagaccaaatgtaatctctaagaggggctagactttactcacttccgtattcccagcacctagcagagggcctgacacatagtaagtgctcaataaatattcatggagtgaatayatgagttttgacttcctcattcctcaggtacagtgagaagagtaattcctactgaaaaagttgtgaggattaattgaagtgaaatatctcaaagcatgcttcattgggccaagcagatagtcagtcctcaatcagtgggaggtgttattattgttgcagcgattgtgaggaaagagtatgagttgagcctcagacaaggcaaagctcataa

SEQ ID NO: 528108 - DNA, 581 bp, Homo sapiens
tctccacattcttacatcatctgctggccagatgcagaaaatcccacagcaccrcaagctagaaggagcttggatcccgagtcaccccctggaggagagccatccaggagagctttataaccagaaacacccttgggggatggttgtatgagcaaaactaaacttttatggtgttttgcctttgaaaattttgaggttggttgttacactaggtgccctcctgattaatctatttccctcaagccagatttcacccaataattccttaatttgtgtcatgcttctccacttttcacaattgatgttttgtggcccagttcttttattctactcaaaagtagctgaataatctgaaatagcaattgagtatccaaaaggagccaatctcaatgctggagttgccctgcatccgctccctacaatccatcactatcatggaaccaaaaggatctctctggaaccaaaaggaaaaggcaattcctccaaaatactttcatggtcttctgttatcctcagaatgaagccaaagggctcatgcctacaagggctaccaaaactggctttgtctatttcttctactt

SEQ ID NO: 528109 - DNA, 628 bp, Homo sapiens
ccctgaccctggaaggtcactgaatcttgagccaggctttgggcttgtgcagctccccccttcaccycctttcaatggtaaaaccaagtttactccaaggaagaagggagtacccatctgacctctgagttacactggaatatccacagtaataacaatcatatctatgtaatcaaatccttgaacgtgccaggcattgagccaagaactctacatgtatccttctacttaatgctcagagtgaacctcatgaaaaacgaagtccagagtttaaataacttgtctgagtcatagaacatgtcagtagagagaacaggttcaagtgttgccaaaatgacttcagagctggccctcttaggcatgacagtgaacttgagccaggtctgtgaatgactagatagtcaatggtacaaaaacagaaagccagaaacaggtgtgaaggtgtgatttcatacatatctatatacaatttgtatataataactaccatttcaaaggatagggtattactgaaaccaacaggctactgggaaaatcaaatcagtttatatcacatgctaaaacgaatcccagatgtttataagatttatatataaacagataatcataaatgtagaataatttgatc

SEQ ID NO: 528110 - DNA, 628 bp, Homo sapiens
ccctgaccctggaaggtcactgaatcttgagccaggctttgggcttgtgcagctccccccttcacctcctttsaatggtaaaaccaagtttactccaaggaagaagggagtacccatctgacctctgagttacactggaatatccacagtaataacaatcatatctatgtaatcaaatccttgaacgtgccaggcattgagccaagaactctacatgtatccttctacttaatgctcagagtgaacctcatgaaaaacgaagtccagagtttaaataacttgtctgagtcatagaacatgtcagtagagagaacaggttcaagtgttgccaaaatgacttcagagctggccctcttaggcatgacagtgaacttgagccaggtctgtgaatgactagatagtcaatggtacaaaaacagaaagccagaaacaggtgtgaaggtgtgatttcatacatatctatatacaatttgtatataataactaccatttcaaaggatagggtattactgaaaccaacaggctactgggaaaatcaaatcagtttatatcacatgctaaaacgaatcccagatgtttataagatttatatataaacagataatcataaatgtagaataatttgatc

SEQ ID NO: 528111 - DNA, 628 bp, Homo sapiens
ccctgaccctggaaggtcactgaatcttgagccaggctttgggcttgtgcagctccccccttcacctcctttcmatggtaaaaccaagtttactccaaggaagaagggagtacccatctgacctctgagttacactggaatatccacagtaataacaatcatatctatgtaatcaaatccttgaacgtgccaggcattgagccaagaactctacatgtatccttctacttaatgctcagagtgaacctcatgaaaaacgaagtccagagtttaaataacttgtctgagtcatagaacatgtcagtagagagaacaggttcaagtgttgccaaaatgacttcagagctggccctcttaggcatgacagtgaacttgagccaggtctgtgaatgactagatagtcaatggtacaaaaacagaaagccagaaacaggtgtgaaggtgtgatttcatacatatctatatacaatttgtatataataactaccatttcaaaggatagggtattactgaaaccaacaggctactgggaaaatcaaatcagtttatatcacatgctaaaacgaatcccagatgtttataagatttatatataaacagataatcataaatgtagaataatttgatc

SEQ ID NO: 528112 - DNA, 587 bp, Homo sapiens
ttctgccatgcgaggacacagctacaaagtaccatcttggtagcagagagcagtcctcaccagacatggaatccactggcaccttgattttggacttcccagtctccagaactgtgagaaataaattcctgttctttctaggttatccagtctgaggtagtttgttacagcagcacaaatggacaaagacagggtgtctgaattgagagttatgttacctgttctcacagtactctggggcatgagctcctccaacatgaaggagggtgtttgttgatgcaccacagttccactatgcaaacatcatctcattttatcccttctagaatgttgtaaagtgggcatgattatgcccattttacagatgaagaaactgaagctaagaccaatggaataacttgcaaaagctcacagggctggcagagccaggattcaaatccaagcttgatgggctccaaattagtcyaagctgttcaataactcagctccaagatttggacctttgttttcggttttcctgtaacaaagatccccaagtgatggatttctattcttctcactggttggacaggggatgccatgtttgg

SEQ ID NO: 528113 - DNA, 387 bp, Homo sapiens
cccaccccacctttttttttcttttaacaaaaagtttcctcccatgtagtattttgtaattatacaaaagacgcttggtaaaatgaaaaatgtattcttaacgattagaaacaaaacaaaatttgaaacaggaaaacactacccctggtagaataggaatggcgctttagcataataagcatgatgaggaacatccttctgaaaaagtcagctcatacttggaattgccagggaggcactctgtgctggagctggtggaatggtaaagataggagtctcctcactgtccaaattgtaagycaatgccttttccttctgaaactatcaccttcagaggtttggctattgagatattataagttaagtagatcattgcaggctagacag

SEQ ID NO: 528114 - DNA, 637 bp, Homo sapiens
ccaatccattttccatcattaagaggcctgatgctggcagccagaaaaatctgccgccctggttctcttcctgccaaagtccatccattcgatatttcactgagaaaaagtaattgaaatgattacaaaatctacaaactttagcatgagttatatattcatgtaaggaaaaaaagctttaacctttccyttcgcactcaacttgtcttgagtttgagaaagactcaaactcaagagggtcttacaataaggccacacagttgttgttcctttctattggaagaagggtggacattccacttcaagaacaaaataagagagccccttgactgaggagggggcattcaccttcacacagcaaacacctgatctcatatattagtctgtattaaggctttgttcaagtctaaattgataccaatctctcagcccatccatcaagaagttggggagagggaattgttaagcctagctcagggctgctaggctggacagttccaggaaaaggacaatggaaaaatacagtggctgactgggtggaagcgctggctgaaagagaggcattgtccaggatgaaagtgcaaatcctttggatgaggccccatagcctcccttccaacaagtttctcaggaaaat

SEQ ID NO: 528115 - DNA, 637 bp, Homo sapiens
ccaatccattttccatcattaagaggcctgatgctggcagccagaaaaatctgccgccctggttctcttcctgccaaagtccatccattcgatatttcactgagaaaaagtaattgaaatgattacaaaatctacaaactttagcatgagttatatattcatgtaaggaaaaaaagctttaacctttcccttcgcactcaacttgtcttgagtttgagaaagactcaaactcaagagggtcttacaataaggccacacagttgttgttcctttctattggaagaagggtggacattccacttcaagaacaaaataagagagccccttgactgaggagggggcattcaccttcacacagcaaacacctgatctcatatattagtctgtattaaggctttgttcaagtctaaattgataccaatctctcagcccatccatcaagaagttggggagagggaattgttaagcctagctcagggctgctaggctggacagttccaggaaaaggacaatggaaaaatacagtggctgactgggtggaagcgctggctgaaagagaggsattgtccaggatgaaagtgcaaatcctttggatgaggccccatagcctcccttccaacaagtttctcaggaaaat

SEQ ID NO: 528116 - DNA, 581 bp, Homo sapiens
gctgtagcacatagactaactttatagcctcgtagggctgtaatttaggagagacctcaaatctgttgaatcagatacccaggggcaactccaamagggaggggctcaccagctttattgcgctagttggaaagaaagcaaaatgactgagcgcagccaagatacgccaagggtgacacttttatatggggatcagcaatttaatttgtctttgcattttatgaattgcaggcagagatgtatttgcagagaaatacatgagcatttttgaaagcgattaattaagcatgcaatttatatgaaaacaatttactgcaggacattatcagggcacccaaaatgcacatgcaatttccttgccttctaatttgtagacataatttattttgattgtgcaattaggaaagaagacctttattagttttggtgcaagtctaaagaactaagaccaatttagctgtgaaagagtcggccttaatgtaaaaaaggaaggggtggtcttgggctctggcctagtggatgagtgttctgaatccaaagccctggaatcacatgtatttctgttcctttcttcaacaggt

SEQ ID NO: 528117 - DNA, 656 bp, Homo sapiens
acctggggagacaggaggaagattcttctaacacacctaagacattgtagtagatacctgtcatttgcggctgctaagatcttttgataattctccacatggggaatcccaccttctcaacatagactcaaaacaccaaaaaagctagttyctaaccctctttgctatttagagaacagacttgtgatgtagatgccatcactcagacccacccaaatgagactgattctgaagcaatatgagaggagaggtggaagatgacaggtctattttgctgatacttttggcaaatttctggaggtactggtgcttctggcagcatgatttgggggtaagggaaagacaaaaataccctgatggcagcagataaacctggctctggggttgatggtggcagaggctccctctccaggccagttctgcagtgtgcttctgaaatgcaagctcagccaagatgctgttcagccttccagtgatcctctgtgcttcctaatattcttgaataaattcatttctgcttgaacctgctaaagagtatagtgttgtctgcaactaagaactaaagcagcacttaaagcttctcccctaccaattatgcaagggaagagtaattgtttggagaagactgacatgtttgcttcatttaggatgggcca

SEQ ID NO: 528118 - DNA, 656 bp, Homo sapiens
acctggggagacaggaggaagattcttctaacacacctaagacattgtagtagatacctgtcatttgcggctgctaagatcttttgataattctccacatggggaatcccaccttctcaacatagactcaaaacaccaaaaaagctagtttctaaccctctttgctatttagagaacagacttgtgatgtagatgccatcactcagacccacccaaatgagactgattctgaagcaatatgagaggagaggtggaagatgacaggtctattttgctgatacttttggcaaatttctggaggtactggtgcttctggcagcatgatttgggggtaagggaaagacaaaaataccctgatggcagcagataaacctggctctggggttgrtggtggcagaggctccctctccaggccagttctgcagtgtgcttctgaaatgcaagctcagccaagatgctgttcagccttccagtgatcctctgtgcttcctaatattcttgaataaattcatttctgcttgaacctgctaaagagtatagtgttgtctgcaactaagaactaaagcagcacttaaagcttctcccctaccaattatgcaagggaagagtaattgtttggagaagactgacatgtttgcttcatttaggatgggcca

SEQ ID NO: 528119 - DNA, 416 bp, Homo sapiens
tagtaaataggaaagttacactaggtcccttcaaaaatctccagctctgagactttaaaatgtcagtagcatcacacttttaggctagctttcaggatagtataattatattaattaagataaggcagtgttccccttctgacatgatggagtaaactgatagatcaactctcacacagataacgactacttagaggctctgcagagtgaacaaagcaaatggctgtgtgtttgggtgcaaaatggtacgatcacttaggaaaacastttggcagttacttacgaatgcaaacgtatatttaccatagcatgcatcagatctactcctaggtatttacccaagagaaatgaaaacatacgctcacctaaaaaacttaaactgcatgtttattatggctttacccttaatcatttag

SEQ ID NO: 528120 - DNA, 620 bp, Homo sapiens
attgaatacaaagggacacacacatttggagggtgaggatgggactgttgtatattttggttgggtgttacttctatgactgtacacgtttatcaaaactcacagaactgtacactagggtaggtttaacagtattaaattatatcttaacaaaaaggtaaaaaagtaagatttttgctctgaaactttggactatttttaaaggaaaatctccaaagtgaacaacagtgagttaaataggaattaatactcaatatgctttagctgttgataagcgtgtacattgtggccctttcaactgttttaaactcaaaagwccaagacacccgcataaatgccaccttcatgcatttatgaagtaaaaaacgaaaacccttcctttgacttgaatgtgttcacctctacagccttctttttgagacaagcgctcttttatcttgatgggtttaccacctaaatggagagaggccatgcatttcttactggcaatgtcaaaactgaaggttctcttctcaatgttaaactcctcacttaacaagagggaaaacctgcctcttattttctctgccagataacttttccccaacctgcacttgaattcaactgtctaaagtccaaac

SEQ ID NO: 528121 - DNA, 600 bp, Homo sapiens
gctgctgctgcagcagcactagaagccaaaccagatgagaaggcggcggttgcaggcaagaagcctgtggtaggtaagaaaggaaagaaggctgctgttggtgtgaagaagcagaagaagsctctggtgggaaaaaaggcagcagctaccaagaaatcagcccctgaaaagaagcctgcagaaaagaaacctactgtagaggaaaagaagcctgctgcattaactcttaaatttgattattccataaaggtcaaatcattgtggacagcttcttttgaataaagacctgattatacaggcagtgagaaacaaacaaacaaacaaaaatctatgtgacaagaaaacttggaacatagtacgtactcaattactgaatattatcattacacttcctccactgacacatacgtctcttctaaacatgaatttttttgagaagctgtgacttatagaaaatttgggaggacgtattcaccctctatttctattccagattttacaattccctttctcaaacacctgtttaatttcattttcctggtgccttaagaacaaacatcctaatatctctagccacttcttttagattaggaacaatga

SEQ ID NO: 528122 - DNA, 620 bp, Homo sapiens
gctgcccacgctggtgaaaaaggccggagctgggagggggctcccctttaaaaagcacattgtttatgggacccaggcacaaagggtttaattcagagaggcaaaggagatctcagaattgcctgctttgtgctgggttaaaaaaaaaaaaaaaaagcagccccagaaagttgagttcccactaaaagacactgaatatttcaaatctctcacactccataaattgttctctgtatatctgacttccagatgttgcacttgagttctaaacaatcacacgtttgggagagaaaaaaagaaagtctgccttttcttctcccagcttcagtaaatatttggggctgacagagagcacaaccataagcttttgcatatcagtcctcctcaacgctgtttccaaaatccccatttggaagagaatgctgtgtacagccygcacttctagtcaccatcaagtaatacgatgatgaagacatgtctttttcacttgcccccaccctcttttgagcaggaataaacagtaaagcaaaaccatgtaccctttttgtgccccctacccccgctccaaatataccctgaacccagctactctgccaagtgacaaggctgaatgcctctcg

SEQ ID NO: 528123 - DNA, 620 bp, Homo sapiens
gctgcccacgctggtgaaaaaggccggagctgggagggggctcccctttaaaaagcacattgtttatgggacccaggcacaaagggtttaattcagagaggcaaaggagatctcagaattgcctgctttgtgctgggttaaaaaaaaaaaaaaaaagcagccccagaaagttgagttcccactaaaagacactgaatatttcaaatctctcacactccataaattgttctctgtatatctgacttccagatgttgcacttgagttctaaacaatcacacgtttgggagagaaaaaaagaaagtctgccttttcttctcccagcttcagtaaatatttggggctgacagagagcacaaccataagcttttgcatatcagtcctcctcaacgctgtttccaaaatccccatttggaagagaatgctgtgtacagcctgcacttctagtcaccatcaagtaatacgatgatgaagacatgtctttttcacttgcccccaccctcytttgagcaggaataaacagtaaagcaaaaccatgtaccctttttgtgccccctacccccgctccaaatataccctgaacccagctactctgccaagtgacaaggctgaatgcctctcg

SEQ ID NO: 528124 - DNA, 543 bp, Homo sapiens
agggatttaaggctgtagtgacaaagtaagtggacaggatagcaaaaccgagaggtgacagcagtgtggcaaaacgctaccatcacygctctaacagcataaaccctggaccactgcgccattttggagtgaattaaaatgaagacagcatgttataacacatcattggtttattttaaaaaagggagtgaattgagagacttaatcccctcaagagagaagtattttcaaaatttagttgttacggttgagctctcctctctgagccactggttgcttgtgtgaaactctcatttttttttttttttatccagttactaccctaaacctgcctctctttatcaatggagcatacccaagggctttcaccctatggccacattacaaataacaaaggacactgaaaaatcccgattcctacctctcaaaagtttagatttacatccaaattaacagccaacaagagaactgactattctttcactccctgagccctgggtgtaagaccgctggagagtttggtttgcatggcccctgctgttt

SEQ ID NO: 528125 - DNA, 543 bp, Homo sapiens
agggatttaaggctgtagtgacaaagtaagtggacaggatagcaaaaccgagaggtgacagcagtgtggcaaaacgctaccatcactgctctaacagcataaaccctggaccactgcgccattttggagtgaattaaaatgaagacagcatgttataacacatcattggtttattttaaaaaagggagtgaattgagagacttaatcccctcaagagagaagtattttcaaaatttagttgttacggttgagctctcctctctgagccactggttgcttgtgtgaaactctcatttttttttttttttatccagttactaccctaaacctgcctctctttatcaatggagcatacccaagggctttcaccctatggccacattacaaataacaaaggacactgaaaaatcccgattcctasctctcaaaagtttagatttacatccaaattaacagccaacaagagaactgactattctttcactccctgagccctgggtgtaagaccgctggagagtttggtttgcatggcccctgctgttt

SEQ ID NO: 528126 - DNA, 543 bp, Homo sapiens
agggatttaaggctgtagtgacaaagtaagtggacaggatagcaaaaccgagaggtgacagcagtgtggcaaaacgctaccatcactgctctaacagcataaaccctggaccactgcgccattttggagtgaattaaaatgaagacagcatgttataacacatcattggtttattttaaaaaagggagtgaattgagagacttaatcccctcaagagagaagtattttcaaaatttagttgttacggttgagctctcctctctgagccactggttgcttgtgtgaaactctcatttttttttttttttatccagttactaccctaaacctgcctctctttatcaatggagcatacccaagggctttcaccctatggccacattacaaataacaaaggacactgaaaaatcccgattcctacctctcaaaagtttagatttacatccaaattaacagccaacaagagaactgactattctttcactccctgagccctgggtgtaagaccgctggagagtttggtttgyatggcccctgctgttt

SEQ ID NO: 528127 - DNA, 628 bp, Homo sapiens
tgtgtgccaccacagtgctgcccagccctgccaccctggactgaccgatagaggggagaccacagcgtcagctgctaacatggaaggacttgattgtgcaagagctgggtttcctgggaagtcaggcaccctgctccttcacctccacataacagctgtccccatggcagtctcatgacaataaacagccagccttgctattttggaaagcagtgagggaccgtgagatcccattttgacagtattcatctcctgtgtgacctgggtgagttgcccaccctcacagagtcttttcaccgagttcacatgggactcaaatgggatgccatggttttaacccctggcgtgcgttagaatcacctagaggaattgaaacagagaaataccagtgtcccaaccccaccctcaggaatttggatttaattcccctgctgggtcccaggtggcacctgaaggtattgaggtgattctaaygtgcagccaaggttgagaaggaccaagctggacgttgcgagagtgctctggtaaatttcgtttggtgttactctcattacattctccactgactttggcagtgtctgtgaattttcacatttttcatgtaaagatcttcatgactttttttctt

SEQ ID NO: 528128 - DNA, 628 bp, Homo sapiens
tgtgtgccaccacagtgctgcccagccctgccaccctggactgaccgatagaggggagaccacagcgtcagctgctaacatggaaggacttgattgtgcaagagctgggtttcctgggaagtcaggcaccctgctccttcacctccacataacagctgtccccatggcagtctcatgacaataaacagccagccttgctattttggaaagcagtgagggaccgtgagatcccattttgacagtattcatctcctgtgtgacctgggtgagttgcccaccctcacagagtcttttcaccgagttcacatgggactcaaatgggatgccatggttttaacccctggcgtgcgttagaatcacctagaggaattgaaacagagaaataccagtgtcccaaccccaccctcaggaatttggatttaattcccctgctgggtcccaggtggcacctgaaggtattgaggtgattctaacgtgcagccraggttgagaaggaccaagctggacgttgcgagagtgctctggtaaatttcgtttggtgttactctcattacattctccactgactttggcagtgtctgtgaattttcacatttttcatgtaaagatcttcatgactttttttctt

SEQ ID NO: 528129 - DNA, 572 bp, Homo sapiens
gccatgctgtcagagaaccacatgagacagctcagcattcaccgtgagctgaacttcattcaggcttcttcaagccagcttagccaggaggcgaatgtgagatgagtttctcatgtactgagagtttttgtgtgttaaaaattatagcatgatgcaaacaaaaaatgcattgacttattttcatgactggatgtcgttgtgctttgagggtaatgggcaggcattgctttctcttattgctgttggattaaaaggtgcsgctacagtattgacttgataatctcaccaggtattcgtgcagagcaaaagaagaaaatatattttatggctcacaaattgatttacataaaccaaacaatctgctggttgtttgaatgcagaatattctattttgcttattggccacaggggcaacaatctcacatcgttgatgccagaattctgcttttcatgcattcactctgaaatgacaatagacgtcagcctctcagtgtttagatctgcttcatttggaaatcttttaagtagtaataataatgttttgaggaaattgagtggaacactaaattatt

SEQ ID NO: 528130 - DNA, 489 bp, Homo sapiens
tctaagtatatgggttcagatggccttttacatgattgaaaactgtaaaggaaaaaggtagtagtcaacagtacaatcatggctttaataaccctttattttatgtgacaccaaaaagaattgaaaaatacaaggattgcaatttttaaattatgacgtaggcagctttgaatacatttatrtgttttccctatcaaatgaaaatataaccatatattgtatatatatatatatccttaaaaattggtttttcttacttgaatgttaatttttaaaaatttataatggcattgattaatgttgatgtgatttattgaatctaattcatgtaaaaatgatatattgtgaactgtgatactttcattatcacatcctgtgacatacatggtagttatatgttgaatgttgttgactgacttttattgactaggttactaaattttatctgaatttcatcttaactttgtggcctttatatctcctaagaca

SEQ ID NO: 528131 - DNA, 533 bp, Homo sapiens
gctggaaaaaaatataattggatcctaccacaacccatcttcaaaattcaattccaggtggattaaataacctaaatatgaaagcaaaagtataatgcatttataaaataatattttcatgactttgaaatagcaaaatatttcactagacaaaaagtgtaagatgatatttgtgaaataataattgataaaggacacataggtagaatatttaaagaaatcttatcaatgcataagagaaaagaacccaataaaagttgggttaagagacgtgaacaaatattrcacaaaagaaagaaaactcaatggctacaaaatatattaagaaataaatggtcagtctcattagtaatcatagaaatgcatattaaagccatagcgtaataccattacacatacaccagatttgaaaattttaaacaactgagaatattatgtgttgataagaatatgaacaactagcacgttgtaccctgtgggtgggagtaaatattgctgtaatactttggaaaacagtcggtgctactttacaa

SEQ ID NO: 528132 - DNA, 618 bp, Homo sapiens
tttaaactatgtttctgctttggagagctaggagacattggagtgtgcccactgtaagttggaatgtcctttgttcttggagacggtactttaggatgctcctgccagaaatttggaagaaaggcctttggaccatttgatgaggtagaatctatgcagccatgtcctagtccaatcagctttccctgtaaaggattttattattgttttaataggaagaatgtgttctttgaaaagagcatcacgtgaggaaaatgataaacatcgagtaagaaaaatttaaattctttcaaatcaaagactttatcatttaagtccctcctccctcccaagtcactggtcatgcctcatgcattttgcagccccagtgcctggcatggtgctcagccatagcctctagcaggggctcactgaatcctgttgaatgagacaaatgtgagggcaagygtccaggctttgattattggtttgccccaaccacactttcagaatccctgaatgaagagactttttctttagcttgctaatttgtgaattttgagtggaaaaaagtaacaaaagcacaaagcaataaagtcataaataaccttagaattgagttagttgagattaagacct

SEQ ID NO: 528133 - DNA, 522 bp, Homo sapiens
ccacagctgctgtccttagaccccttcatgcttcacatgcattaaaaggacctggtgttgacaaacaagctgaggctcctgtgggatgaatctcccaactgggaggtgctcttctgtgtgcagaaagagcacctgattgttgctaaggtttcttttggtaccaaaatagtaccttgtgctaccaagggaaatactgtaggagtgaatttcccagatgcaatagccgtcatccttctttgatgatttatgagtccctgttaagtcaaacattttctttcaatattctaaaattaacaatttcaaaaatctagtgagcttcatgtagaggattgtgttttaataaaagtgatcattcaaaacacctgtttaactcatagctttcaattccaatcaaagcwctgttaatcctttgcttgggatgtcttgatttttctttttctttttccttaaaaaaaaaaaaaaaaagacaacacatccatgcatccattggattgatatttgattcttcttggtaaaccgcca

SEQ ID NO: 528134 - DNA, 499 bp, Homo sapiens
gccacacttggcactaaccttatggctcatgctaggtgcacatgtgccaagacccacgtgaggcactccacacacagtatcttatctgatctttacaacccaagggggtrgaggtgctattatcatgcccattacacagataaggaaattgaggcttagtgagattagaaaaggcccaagctattaaacagtagagctgtacctggaactcagtccaatcttaaatcttctgccaacataactcacatgagttacctggaatataaaattcagggagctggactggctgagcccaagatactttcaaattcctaacagccagtgagataagattcctagcaacttcataagatatctgcctgaaatttaagtcttcattgtgttcaaaaaaacttctaaaagattccttatttaaaaaaaaaaaagtaattaagtacatgtttagggcagatgataaaatacacacttaactgaatatgtaccatgggctactacaatt

SEQ ID NO: 528135 - DNA, 628 bp, Homo sapiens
caatgccaccctgagcacctgtgaaaactgtgtccacaaatcacagaagagaccaaagagcccagccaaagaggacgggacagaacagaagtggccttgcctgtttcattactgctggccaatctaaaactatcatgcatcacaccttttgctataggaaactgtaatgtcttgctctggtgtatcaccttcctttcctatggtacttcttgtttattttcaagtttgtttcctttagcggttacagatttgggggaacatttagacacttgctgacaaggctgttccaacaactttagaacgctgtatccgttttggccgagttctttgcagcaatattataccatattctgcatatgttactgttaacctgtttggcatttactcgcttgtttcttataataggatcttttataagtccaaatttagaaaaccaattaagaggttattattcacattagaaatggagactgccttaaagaaggatgcacttatgtattcctgtccaaggtccaattcttctctctttctctctctccctctccatagcagaggtgtaaagtgttttaggaagcatasattttttttaatctatagagaaaccatttaggagggagcatacacaact

SEQ ID NO: 528136 - DNA, 685 bp, Homo sapiens
aatgcagtcctgtccaggtcaacaaggtgctttccaygtgtgctttccacgaagcaccacacatccaggattcctgtcctccctctcctcctccagccgtggctagaacataatgtgggggcaagacccagctctgtgtgtttggctactcctgtctgcccagttctttgacttttcagatcacgatttctctttgtttcccttttcttatttgagaccttcagcacaacgttccaatgttgccataagatgtggatggttgtgctgagtgcaaacagtggcagcccatctgcgggctggacccaactggctccctgaccccgtggctggctggctctgcacaggatcctgttccactccgaccttgggctcagggtccaggaaggttcacggtcctggctctggaaggactcagtgccacctcgctggggaatgcagagtggctgagcagcctctgggctatgctgatagaatttaggaagcagatgtcctcatgcaaagggcaaacagataaaatcacaggtcttgaagttctggctaaaaatgaaatcaatttgctaagccccgcagagtcatttctcctcagcctgctgggaaggagttctgtctcgaaactgaatgagaagccccgattccttacagacgaggagaggacccctgggcacagggctatcccactctccag

SEQ ID NO: 528137 - DNA, 440 bp, Homo sapiens
aagtattacgggtaggaaatgggactgcgaaaaaaatggaggctgattctggcctaaaggatacttatctctatacaaagggcttctgattcaaagaggccccgggattcaaaaacacaagcagagctacaccacgtggggtttgggacgagctgaattccggataaagatgcctgtaaakaggagttgatgcgaatccagaaaagcacttgaaatgcccaggctttgcatggcacattccccaggattttttcgcaccgcatttagaggtttagacggagtgagctcgaatcaggccaaaagccttaggttactcctgggcggcagcggggcagaggtcagatcaacaggtgtggaaggctgcgaggtgagggaagaagcaggtgtcggtggaggccccagttcctccggcccagaggctccaacgctgctattggtgt

SEQ ID NO: 528138 - DNA, 656 bp, Homo sapiens
tcttcatcatcttcacattgagtaggttgggaaggtggaagaaggggagttggtcttgctgtctcaagastggcagaggcagaagaaaatccacatgtgtaagtggatgcatgcagttaaaaaacccatgttgttcaagaatcaactgtatatataaaaccattatactttctgaaaataattaagtagctaagtttcttgaagttttttttttcctgtttctttttttccttgttttagtccatttatgctacaataacaaaatatctgagactgggtaatttataaacaataggaatttatttctcacagttctggaggctgggactccaagatcaagttgccggggggctcagtatatatctggtgaaggctgttctctgcttccaagatggcagcttgttgctgtgttcttacatgacagaaaagcagaagagcaaaaggggctgaactctgtgtgaagccacttttataagggcctcaatcctattcatgagagagaagccttcatggcctaatcacctcctaaagacccccagctcttaatactattgcattggagattaagtttcaacatgaattttggaagacacagtcagaccacagcatttctggtaagacaacagtaaaaccaggcaattcaaaggaaaatttta

SEQ ID NO: 528139 - DNA, 593 bp, Homo sapiens
aggagtccttagatattcacagtagggtctgtgtgaaggaaaggggaggatatccgtgctgtagatcaaaaactgattccactgactaaggctgatcttaattcccaagctctatgttctgctgaacaagaattacattgtaagaaacagtggarcagcttgatttatagagaggttaatgttttatgaatgctgggctcactttggcttggaggcaatctctgttttgggtaaggcatggataaatgcctatggttttctaagatggggtgattcagggcatgcttcaggaaacattcccaattccagaggaggtggcccctcccaaacagaatgcctgttaggtagatgaggtcagtggactctgagaaccactctggaatatgagaagtgctctgagccagggaagaagtacctgctcctcctacaaggcccagcagtatcagcgacagattatgcttttgcaaaactaggtttacaatatcacgaatagtttgcgggcggagaatatttccacagaacaggaaggatgatttcttcagacagacaaaggtaagtatgtcctacaggacctggacgctaatgggggccag

SEQ ID NO: 528140 - DNA, 593 bp, Homo sapiens
aggagtccttagatattcacagtagggtctgtgtgaaggaaaggggaggatatccgtgctgtagatcaaaaactgattccactgactaaggctgatcttaattcccaagctctatgttctgctgaacaagaattacattgtaagaaacagtggaacagcttgatttatagagaggttaatgttttatgaatgctgggctcactttggcttggaggcaatctctgttttgggtaaggcatggataaatgcctatggttttctaagatggggtgattcagggcatgcttcaggaaacattcccaattccagaggaggtggcccctcccaaacagaatgcctgttaggtagatgaggtcagtggactctgagaaccactctggaatatgagaagtgctctgagccagggaagaagtacctgctcctcctacaaggcccagcagtatcagcgacagattatgcttttgcaaaactaggtttacaatatcacgaatagtttgcgggcggagaayatttccacagaacaggaaggatgatttcttcagacagacaaaggtaagtatgtcctacaggacctggacgctaatgggggccag

SEQ ID NO: 528141 - DNA, 558 bp, Homo sapiens
tatccagaggagataatgaaacagatgaggaggactttgctaaatgttccatctgccttaggtagtctcgcttacagtgtttcctattcctttcatttgacgaaatcatcaagcctaattttcaagaaaacaaaatttcctaaaacaactgcctgtaaatattatctttcctttgttcagcccccaggctgattaaaagttggactggcagcacattcaaaggggcaagaacataagagctgccagtggttgtatttagtaccaggtgtctaggaagtcttgatgtaacaaacagaaggatggaaatttctcagatagcttstgactaggcctgggaacttaacagagaagaaggccaaaaaaggctcctgcttctctagaaactgaccctccctcaggcagtctctactatgtgtgtatcagttaactattgctgtgtaacaaatcatcccaaaatgtagtagtttaaaacaaccaccaccatttctcatgattccttggtttggctgggagattatggtgctggtcttccctggacatactttggctgagggccag

SEQ ID NO: 528142 - DNA, 614 bp, Homo sapiens
agcacctaacctagtttaaagcttggactggaaggtatttgggacagtgttttggagaagatgatgcctaggttgtgccctaagttacttaatcaagttcttcaactgtcaagatagaactggtgagtcccatcttgccatctattatacagatcaatgttcctttccctctttcctctttctcttgatcctcaaaacaatttaatgagtatggcctctatatgtacagatgtgatttctccatgttgtctacctttctggttagattttaaaagtattttcttaagcttcttgtgtaaacatttagaatgcagaattgaaatggcattgtcgaaataaactggaaatgaaacttcattaaaccctataggctggyttcaagtttcaatactcttcagaaattctaaggtctcatgaagattaatagcctagagaagcaaaggtgtagtttctgataacagacagaatgcaggttataacagggcttgataactatcagcatgcagattacccaaaaggacattctagaaatcaaacagtcacagtgaaatttttcagcaggacacagctctgagcaaggtgcaaggtcctcaaatgttcacgaataacagaga

SEQ ID NO: 528143 - DNA, 526 bp, Homo sapiens
ggagggcgagagaggagaaatcctggaagctgggggccaggtcaggggccaactgtgatggcaaagatggtggggtgaaccccagcaccaccaggggataccacagctagaactaacttgagggaggaagggtgactcctggttctctcccgggtctgggtggccagcgggtgttgtgactgtaggtggggaggggagagggggacgatggcatcttggggttatggctctccatggtgtttggagtgatgaggtggatgggagtagagagaatgcagaaccaggatcaatttccctgctcctaatcggacttgaagaggtagatgaagttttggtgagaaacctaaagctctttttcacaagcctgaaggccaacacacatgcctcctgcacgctgtgggctggtgagggcacgggggccaatgccgaacgtggcgctgtgggccggtgagggcacgggggccaatgccgaacgtggcaggtgctcaygggctcatccctggggccctgcacacctcgctcccta

SEQ ID NO: 528144 - DNA, 492 bp, Homo sapiens
tctcacttataaaagggtataaagacaccaccacccttctgcctaccccacagttgctgtaaagacacattcgtggttataccatggagtaaatgaatcttaggctagtgtctaaggcatgtaccaaaaggttagtgtgcaagcatatccacacaygattgtgatttgtcactccaacacaagattggcatgtccatcctgtttctggtcctagaagtcctatcaggaggtggaagaaatggatccaactctaagactggagtctcatccctagcagctcctgctgtgaggaggagtcaggagagatggttgaatggatgaaggcatgggcccgcctgaaaaaccatatagcataactcacgtggaaggcagtgctgttactaggatcttacattttcaaaatacagcctgctctttggagctctgagcctcacagcaacttccaaacctgacttccttgaccgcctggagaagcaattggcttcttcaagg

SEQ ID NO: 528145 - DNA, 641 bp, Homo sapiens
tacattcccgttgttgaaagccacccagtttgtgctacagcagccctaggatgtgaacgtcggtaccttcataaagtgtgctagtcagttttctcaaaggaaaaaaagaaaaataaaacaggttctgaaatgagttaggaatcttgatgaaaccaaagaaggagttccaatgtcacttcggtggcaggttttaaaaacttctgaaactgaaacagcttttttttttaaatagttactgcataycttaatcagaagaactacagtgatcagatataatactggctgattaaaatgacagcaggtttccttttagtggaagtcaagtggaatctataattttgtttaagccaattaaactagaagccaccaggatggagcaatatccatcctaccatgggattaattcttccgtgccaacagaaaaatgcaggatgtcaaaggaatacattagctctgtgggcacggaaacacctccgaatcagtgttccagacttagttccctctggtaagggttataaaaatacttggtgcttttttagagcatctataaaagggctattgattttttttaaaagaagatttctacttttaagtgcaagctgaaggaacatgcataaaacatttcaatatacaacttgtaa

SEQ ID NO: 528146 - DNA, 613 bp, Homo sapiens
tacttcctaaatatttttgttcatatccttgcatttatttagtcaatttcataaamccttaagttataggcctactaaaatttgccatggaaaaatacaattctgaatattgttagaatttataacaatagaatcatcaaggtgactggtaattgacattaccttaagaagctttgcatggagaagcaaggtgtaagccgcttcggtgtagttatcacactccttgtgcaggtcacagagcttgtacaaatacctgagacaataaaacagaggtatgttcttaaaatgtcactaaataatttgtgttgaggattgcaagagctaaattctatgttcaacagtaaatcatggctacacttcctttttacaatgttcataattcaaaatgccttaaaaacttttggtacagaaagcactaagaaaaactcaggaaaaaaataaagatgatacacaaaggtagaattttccttcaaatttttcattccttttcattttcccttaaacatttttaatgagacacacaatacttgattgtgattttctgcatttctactgagtccaaatgcacaaaaaaatccgtaaaaatacaaatccatcagaataaagagctcca

SEQ ID NO: 528147 - DNA, 472 bp, Homo sapiens
accatgacaacaaattactttgaacgttggtcagaatgcaagaagacagtgaagtaagcgccaggttcttttctgtctgtaagatcagaccaactgacctggggcagagcttgctgctgtaccacttggtcagtctccaggtgaatataaagacaaacacagccacagcccagacctcagggccagacatcagagaccagtaatttctacagtagcctaagacacatgatgcatctgcaaacattcagatttttcaagtccacagattctgtgtccagttgattgatgagaccatcagaggcattcttcacactgttacagtgttttagatttccagaatttcttcttgatgatttctgtgagtttctacgtagtttacccaccttcttttatgttttatctacttttcccattagagcccttaggatattcatmacagctgttttaaattgcaggtctgatgatttcaaaa

SEQ ID NO: 528148 - DNA, 518 bp, Homo sapiens
ttatttcaaacccagcaagtgctggctcatttcccctaagttctgtttgaagactgaatttccttttttagatcatctctatcctcttatattttctcagaggcagagggatgagaccaggtagctctttccatattctttccgttcatctccttaggccgaccctgacatggtgagattcccttttaattttttacgtcacggcaggcagtcacattgcccacaatcctccagtttgtaacccacatgtctttttcttcagtttccagtgtgatttttcttactctacttcagccctcaccaagagtcttgacacccttccagcttccatgaacggtctccttgaggcccagcttctgctcagtcttaggtccagtgctgcatgtcatagcttcttattaccacagcaccccattccagctgccaaattctgttcctgttayctaatctgctttaaaaaaccacccctgaaacatagcagtttcaaacagtttactagtacttctgtttctgtggct

SEQ ID NO: 528149 - DNA, 440 bp, Homo sapiens
agtggttcttctgttggggtcattcatgtagaggccatcacccagaagctcaactgaggttggataaagtaagatggcctcagtcwcctgtgcacttggtcttggctgttggctgatggatctaggggactcaggacagttttactctgcttcacatggcctctgatcctcccatgggtagaccaggcttcctcatagtggtcttagggcagtttctcaagacagtgagagcaggagctgcaaagtcttttgagactaaagctcagaagccacacaacatcactcctgcattttatcagccaaagctatttgcaaggccagccagactcaagggttggggaattagactccacttcttgatgaaaaaagcagcaaagccccatggcatgaacatggggaaaggaagctttgttgtagccacagcatcctgagcatgtcca

SEQ ID NO: 528150 - DNA, 318 bp, Homo sapiens
tgcaactgtgcgggagccagtatcctttcgggaaggagtcctgcccctcttccccacagagsccagtacagatctctgccctgggtgctgtggtcccagggagggcacggggcctgtggtaaactgataatggcccctgaagacatcagggtctaacccctagaacctgtgaatgttcattatttggtagactttgcagacacggctaagctaatgatctccaagtggggagattttcctggattttgtgggtgaactctaaatgcaatgacagtgtccttgtgagagagggagattcgatggcacacgatggaggaa

SEQ ID NO: 528151 - DNA, 318 bp, Homo sapiens
tgcaactgtgcgggagccagtatcctttcgggaaggagtcctgcccctcttccccacagaggccagtacagatctctgccctgggtgctgtggtcccagggagggcacggggcctgtggtaaactgataatggcccctgaagacatcagggtctaacccctagaacctgtgaatgttcattatttggtagactttgcagacacggctaagctaaygatctccaagtggggagattttcctggattttgtgggtgaactctaaatgcaatgacagtgtccttgtgagagagggagattcgatggcacacgatggaggaa

SEQ ID NO: 528152 - DNA, 318 bp, Homo sapiens
tgcaactgtgcgggagccagtatcctttcgggaaggagtcctgcccctcttccccacagaggccagtacagatctctgccctgggtgctgtggtcccagggagggcacggggcctgtggtaaactgataatggcccctgaagacatcagggtctaacccctagaacctgtgaatgttcattatttggtagactttgcagacacggctaagctaatgatctccaagtggggagattttcctggattttgtgggtgaacyctaaatgcaatgacagtgtccttgtgagagagggagattcgatggcacacgatggaggaa

SEQ ID NO: 528153 - DNA, 554 bp, Homo sapiens
tggggctcacttaaagtcctatattctctacattagtcaactagaatgatttccacatagatggccctccagccccagagtttgggtggctatgtgggaatatatatatatacaggaatatatatatataggaatatatatacaggaatatatatataggaatatatatatgtatatatatrtttaggaatatatataggaatatatataggaatacatataggaatatatatatattatatatgaatctatatataggaatatatatatatgaatctatatataggaatatatatatattctatatataggaatatatatatgaatctatatataggaatatatatatgaatctatataggaatatatatatgaatctatatgaatatatatatgaaaatacatatatgaatatatatgaatatatatatgaaaatatatatatgaatatatgaatacatatatgaatatatatatgaatacatatatgaatacatatatgaatatatatacatatatatatatggctgattaatcaggatccatcaaataca

SEQ ID NO: 528154 - DNA, 578 bp, Homo sapiens
cctgggggagttggggcctcatgggtaggggcctgcagcatgtgtgtgttggagaccaggctgggttcagtgtgtggatgtgtatagtatctgtacccgctcccatggagctgtagtagattaggtgacattggaccccctaatctgcaggccatagagggaacatgggacatctccaggccaactccttttcttagtgatgagcagtgacttgcttgaggtcagttctcagtgtgggtcttttcttggrtattgatttggatgggtgccagtttttcagtgttgccagaagaagatgggaaagggggtgtttcttttgaaatgaggcaaggggaattcctctgataaagtggtactcttttcagactttattcctaggatgtatacatctctgtctgcattttgaatatatatatatgtgtatttttaaaaagtttttgaataagtgtaagctactccttctaacacaaaacccaaatgtatatataaaaaatctgagtgcaacaatagaagtatttttttaccactcgtattctcctaggacttttaaaatagtgagtgcctctctagtacttcta

SEQ ID NO: 528155 - DNA, 642 bp, Homo sapiens
atggatgcaaagtccattgaggcatggcctgttctgtttgcacaagctgagtgtgggagacaatagggcactgatgattacaagacagtgtggtaaatattataatagagttgtgtataagaagctatgggagtccagagaaagggcctggaaatgaggctgggttaggttgtcagggaaggcttcctgcaagaggtagtgcttgacttgaatttagacttagaagaaaggaaggaaaagatttttttccgtcacagccctagttaggaaagagtgtttggggaaatttagaagggaaacttttctaagataaagttattttatgaagaagcagcactgggaaattaaggagatttaattacaactgcctcacgagcaggatttgaaaaggagtgggaggytcatggaaaccttaattgctgagaaaagttaagaggagaaatatgacagaagtaatgggtctatatgtatgtcatgtctgatttgtcacttttctagacaggcactctgcctcctgccttattctaggttagagaaaaaaggatccttcagcagctaaggtgaagataccatccaggatgcagaaatgggacctggaaagactccgtattccttttagggaagaaaaggtccatctcgaat

SEQ ID NO: 528156 - DNA, 551 bp, Homo sapiens
tttataaacatttagcaagatccaaaggaatggaccatagcacaggtaagttttccagggagactaggagatatataataggtaaaggaatatggaagagaagagtccatagctkaagactctatccaaaaatttgttttggcttctaagacattgcacacaatctactccctacttagcaggcagagtgatcattatgaattaggatttaagaatttgaatctgattatgtcactctactgcttaaaaaccttcactgtttaccataataacaaatgcttaatgtggttacacagtcttccaaaatgaatcctctgtcaattttatctattgcacctttgcattcactcttttcacttagttataagtctttttaatttgcctaaagtgtgaggatctctccttacctgtaggctactaatcatgccatttcttttgtctcttggaccctcttctctgaaacattgcttaccctttctttttctgactaagatctccttctttagttctcagctaaataattataccctaatgttaggcaaagttaggtc

SEQ ID NO: 528157 - DNA, 519 bp, Homo sapiens
cagttgtgactgaagtcagtggagctgtttgggaagggcttatgttagaaataccagccacttaggataacgttgttataccaataatggtcttagggaagacacartggtgccaagaaaaaaaaaagtgggttaaaaagaaaaaaccacattcatatttgttgatctttaggcagagcttatggtttgttatggggtattaagccatatggaaggtatcataagaaaagcatactggggtaccgtttggtatattgtttttgatgtatttgactatgtcaagcatttttgatacagaaatatttgttgagcacctactgtgtgttttagcacttaggtgagaaaacaaagagacataatacattatcactatatttgaagagttaacaatcatgttatgaagataagacatattcaaaggaaagataaataaccattccttgccatttcactggggatgccacaaggccatacatactaagtgtcacctgaacacactggacaataagttttatcaga

SEQ ID NO: 528158 - DNA, 373 bp, Homo sapiens
gtgactgaagtcagtggagctgtttgggaagggcttatgttagaaataccagccacttaggataacgttgttataccaataatggtcttagggaagacacaatggtgccaagaaaaaaaaaagtgggttaaaaagaaaaaaccacattcatatttgttgatctttargcagagcttatggtttgttatggggtattaagccatatggaaggtatcataagaaaagcatactggggtaccgtttggtatattgtttttgatgtatttgactatgtcaagcatttttgatacagaaatatttgttgagcacctactgtgtgttttagcacttaggtgagaaaacaaagagacataatacattatcactatatttg

SEQ ID NO: 528159 - DNA, 572 bp, Homo sapiens
tctcctggttattgtccccattccttccatgctaattagagtgtgtcccacacccattgcctggcttcacatttataagtgtttctaccaaaacctttgttggatacatgttacttaaagataaaaagtcccagctcttcacaataacataccaaaccctctatccttccagtttcttatcatcttcaaccatgacacaactataacccttcaattcactccattctgtccagcctccaggcctgtgctactattacaacctctgctaaactagaaatgcaaaatgagccctataaaaatacaattacagtggaaaacattaatataccactctcagaattggttatctgtaacataatagagaaattgaataattttgttgaaaaagatagaaataaacttagaatacctcaaatagagaggacatatttagtagaatrtttactaaattgactgtatattttgccacaaagaaaatcttaatttcagatttatagggcacaatcgctgaacataatccaataaattagaaataaatattaaaacatgaacaaaaatttggaattatgcac

SEQ ID NO: 528160 - DNA, 531 bp, Homo sapiens
ggaactttttacggagataggggttgtgctgttaaggacttcaggattccttttaaacttgagattctgggaaacctagartatgattttatgataaatcaggaaggctatgtttgatacccagggcctcgggtatcaaagccaaagaacagagtagagcccaaatgggtccattgccagcaggacttccttcagtagtaattctaaggagggcatccaggggacaagccaaagggttagttaacaaacaggaaggttggagaaatgccacgatgatgggaagacagaactccaaaaaagaatgtggcacaggcaactggagaagcaaaaaaatcaggctgtcacaaccagagggactggagcagaagggaaataaaataataaagctggttgttgggatgggatgacagagtgacatagcaagagtcagtttaggtcaaatctggtggccaccacattaaggatgatttgtgcttggcacagagtaatcactcaagaaacataagctattattatttgtaacttttgtcc

SEQ ID NO: 528161 - DNA, 570 bp, Homo sapiens
ggggagcactggctgcagagttgggcggtggggaaccttctctcagcagtcccagctamcccaggctcctacgccaaggacctaaagagccacacagcctcgtgcatcttgctgtggaatgtgtgagaaggatgttggtattggcttcttccagtccaagaaaggccctggcacctcattccccaggtatccatagaaccttccagaccagccttcctcagcatggccagacactgcaaaatcccctccagacagacagtcacacaaacacacacatgcacccacacacctcaccttccccataataatatataactagccagcacttgatattagtggttcccaaatacttgtcttcaatcctgtattgcttgtgatgaaactcttatcagtccatggggaaataagaaaaataaaaaaaatgtggtgggcttttcataagctaaatgttcattttcaaaggactgtcctctattctgagactgatcttcccgcttttattacactttaaaatgtcctctcttttatgaaagcatggtgatggtagacagggtgattgtttcttaatga

SEQ ID NO: 528162 - DNA, 461 bp, Homo sapiens
ctgggcttctcctctgtagaggaaccaaccaatttggctacctgggagtaatgtgcaatcacatttttatttttgtcaccaccagggtgtcctgttggactctctcctctcatcctctcccaaggcggctggttggtgtggctttagcagtgggtgctattatttggaggtgcctagagacttagagtggtggctgcaccatttckctgggtggcttgcgaattgtcagtctggttcctgagagctcaaactgagatggaaatgagacctgttttctctctaggtcggccggggcgttccgcacaacccacttgagaggccccaccggcgtggcctttaggacggtgcctcttgtcttgtaatggccaccggccctccctcgggagacacgcggccacctgggtgggacgctgcggtgcttacctccgggacacgaggtggtcgctgggagagggctcgga

SEQ ID NO: 528163 - DNA, 559 bp, Homo sapiens
ctgagttcgtaaactttatccttagcgtcatcatgtactatgtaaattacttgagcaacttctgtaacagtatcatagcaggtcatttctttcatctgaagcttttctatttctgttttacagcttgcctggctttgccagtggcacaggcccaataaccatataaaacacctgatgagtcaatcatggaaaattgtgcactgtcattcatactgtaagaccctaacatgaaactgaaggcaaaagatctaacagcactgtagagtgtatatgcatgtacatacatgtccactctgtttgcaagatgttttagtggagtgttataaccaaagtcagatttaaagttggaaacttcttctcttgctatgtctgctaaagaacaagcatctgcctacaaacytgctgccagcattccaacattccgatccaatgtgctgatcaacattaataagtcgtttgttggaaactccttcataaagtttagaaagcactaattttttagaccccaaagacattgctatgtttatatatgatttcaatcactgtacgatttcccaca

SEQ ID NO: 528164 - DNA, 524 bp, Homo sapiens
tatttttctatttacgtagggacacttaacctaatagggaacgccccccaggctttataaacaaaggacatagatacatacaatgtggagaaaattatattctcttagcaaataccagagttattcttactcatataacaaaagaacaytgctaaacaggcattccaagaagggtggatactggtaactagaggacctttgatgaccactgagataataggtttggttttaaacatttgggagaaaaatctagagtagacttgcattagagataagaaatctaaaggctgaagggaaatccaaagagaaaaaaatatatagtgagagactacaagctcctcggggaaggtggggaaaaggaacgttaacaaacagcacaggtcacagtggataatatggcaatattcaaattacttgcagtgggatgtagagcgtaaactctctactgctaccaaatctttatattctacattgctcactaatgcttacatatgtacgggctttgtcctcaaagataaggacaa

SEQ ID NO: 528165 - DNA, 598 bp, Homo sapiens
tattcaactgacaatttgagcagaaaccttaaaaagttgagtaataaaaccctacatatttttctatttacgtagggacacttaacctaatagggaacgccccccaggctttataaacaaaggacatagatacatacaatgtggagaaaattatattctcttagcaaataccagagttattcttactcatataacaaaagaacattgctaaacaggcattccaagaagggtggatactggtaactagaggacctttgatgaccactgagataataggtttggttttaaacatttgggagaaaaatctagagtagacttgcattagagataagaaatctaaaggctgaagggaaatccaaagagaaaaaaatatatagtgagagactacaagctcctcggggaaggtggggaaaaggaacgttaacaaacagcacaggtcacagtggataatatggcaatattcaaattacttgcagtgggatgtagagcgtaaactctctactgctaccaaatctttatattctacattgctcactaatgcttacatatgtaygggctttgtcctcaaagataaggacaaatggtcagctgacttctg

SEQ ID NO: 528166 - DNA, 528 bp, Homo sapiens
gaaaaagaaacagaaactaaggatatctttgatacctctctctacctcatctcccatcagtccatcatcaaatcccatgggttatatgcttcctaagcattctcaaatctgtccacttttttctaccaatgccctggtctcaagttaccatcattctcactgcagaatactagcgtctttagtctcttcacgtggatcctggcatccctctaattcattctccaaactgcagcctaagtaamtctttcaaaatacaaatttcaccatatcacttctgtactaaaagtttctcaatggctttccactgctgggggtaggaggtggataaataactgcttaatatggctcacatgaaggccctgggaagtcaagcccctacgtaccttctctagccgcatctcacttcatactgtcccttctcctacattctctactccaaccacaagggttttcttacagtacctagtactcatcatacttccttcctccaaatatataaacaaatgctactttccctaccttaacagc

SEQ ID NO: 528167 - DNA, 611 bp, Homo sapiens
atatttcaacttatagccttaaataaatatttacttcactttttcagttaaatatttacttaccctcctccaacaataaactttacccaaatgaattataatgcaactgaactgttattgagttcaatgtgccccaaattaagacaatacaaartttcaaaaagcaaaccaaaatcaaccaattgaaccaactaaagtaagtcgggtaaagctcttctacgctaaagaccattttttttaccccaaaatttttaaaaaataattagtctttgctaaattaaaagtactcaaaccatagtttgcacagataatggcagcagtttcaatctcacaaagtgcaagtgaacacaccttgccacttttgatgttcttcataggtttcctgattttttatgtaatgtatcaacatcttctagttgtgctgtgatctgaagtacataatccataagtcgttttcttaaatttctataaaggcatgtattacacaatttttaaaagtaaactttgtaagtatataattgctagaaaaacatctaagctaaatttagttggagagctctagtgactataaaaattagatactgacctattttcactacaattatagtaca

SEQ ID NO: 528168 - DNA, 524 bp, Homo sapiens
agcagctagggttgagaaaccctgccctagagcctaaggtcccatttcaagtcatagggaagttcccatctatattgcgtaaagccaatggttcctatgcacacacgaattcattctctctctctctcwcacacacactcatacacatacactctagccactttctaatctttgaaacctcactgagaaacaagagtgataaggtgagtagatactaagacagttttaattagaaaatagttgaaggaagaaatacttcagagagtttgtaggcaacagagaagacattcaaagaaagaagtaatataggtctcatttgccaatggatttccagcaactgggatgaggggaatgaaggaaggaaagggaagaagcaagagaaaagagaaacaggggaaggggagagagagagagagaacaagaacacaaagatgcgcagatttggagcgtcaatgggggttggaggaggtttaagaaagtccctgacaggaattctgtggaaagtccacagaatataagcacaa

SEQ ID NO: 528169 - DNA, 606 bp, Homo sapiens
aatttagtatcttaatgagttttacttataaagcaggtggaatgaagtgaggctaatgctataattggtaaagaagcagaagtcattcacattagccagaataggggaatgttccacattttttgtggtttgcagactgactttgtttttgtctatatttagacaagatgttgttggggtgggcgttgaccccacttcctcacggtcacagagtggccgtgatgttggtgttccgtgagattgtttatgttcaacagaacaccaaggcctatcacgcagttcctagttgtcagggactgcttttctctttctcatgcatatatttgtaattccatgaataccttttttttttaattccttgactttgtgctgaaattataaaagtttgtgatgattttcaaagtggatatcaacagaatatgaagctctaaggatgcatcataaatgttgcaagggtgtgaaatccagctcaaaatcrtttggaaaaaggggaatttattagaagacccacataacacaaggaagaccggagtgcagatggactatgagtcagctcatagcacgaggctaaatgccaagaaactccccatccacctctcatctcct

SEQ ID NO: 528170 - DNA, 580 bp, Homo sapiens
tggatgtattttagtcaaagaaggaatctgatgggtgttttattttgagtgttatttgctcttaagagggattctctgctggcaatctgagggaaagattgcaagcagatggggtggacatagatagatcagaacagaagccaccatttcaattaaagaagaaaacgtaagtcctgaaatatctctgtggcaagagaaaggaggggaagatgcatacagaaaaattagggagatgagctcaaaggaattattgartgaataaagaaagtaaaaaaaaggaacggataggcaatggcttttgtaaattgtggtagcattagtctaaggaggtgataactactgccctgacaatatcttgggcctttcactttcttacttttaacaatggctctgatctatttccaccacatctgtttacagttgattgtttgctccatgccagtgctgttccacatgaatcagttcttttgatcatcagcataaccctaggagtaggttttattatttccatttcaaaggggaggaaactgaggcacaagagtttaagtcagttcccctttgtcctgcactgttcaaacac

SEQ ID NO: 528171 - DNA, 580 bp, Homo sapiens
tggatgtattttagtcaaagaaggaatctgatgggtgttttattttgagtgttatttgctcttaagagggattctctgctggcaatctgagggaaagattgcaagcagatggggtggacatagatagatcagaacagaagccaccatttcaattaaagaagaaaacgtaagtcctgaaatatctctgtggcaagagaaaggaggggaagatgcatacagaaaaattagggagatgagctcaaaggaattattgagtgaataaagaaagtaaaaaaaaggaacggataggcaatggcttttgtaaattgtggtagcattagtctaaggaggtgataactactgccctgacaatatcttgggcstttcactttcttacttttaacaatggctctgatctatttccaccacatctgtttacagttgattgtttgctccatgccagtgctgttccacatgaatcagttcttttgatcatcagcataaccctaggagtaggttttattatttccatttcaaaggggaggaaactgaggcacaagagtttaagtcagttcccctttgtcctgcactgttcaaacac

SEQ ID NO: 528172 - DNA, 589 bp, Homo sapiens
agtcttgcccttgacacagcactgctcctctgtgctcagctctgtgcagactagaaatcctgccctatagcttttctattctccaccaytgaaggatctttgaatccaagtgcagttgtattagttgtgtgtttactatgtgcatagtactaggtgaggcatttgaatgacatcaaaattctattctctgctattttacaaatttgataaaagttaaggcttacagaagcaactgagaataataaatatattaaagtcaaaactaaggaataaataagaatggagaaaagaagagagacattttcgagaaagatttcaaaagctattaaaaaatagtcatggtcttgatagttcatgacatatcaaatgtcccaagagagttttcatttaaaatttgcctttcatatttttctaaatgggaaaagtagtgttcattttctttttgtgataattataagctcttgtttctacataaatattcataggtctgatatgtccaaacgaggcaggtaacgatctttatgtgcatttttttcaaattcatttaagatcgactttaaatatgatttccagccatttcttgagagtc

SEQ ID NO: 528173 - DNA, 653 bp, Homo sapiens
ccaactgttttctttctcgacatacattagaataaaaacagcagaatacatgactctttcctttatatacttgttcaatacatctttattaagaacataccatrtcccatgcattttttgaaacactaaaaatatattaatgttcaaagctgatgaagtatcccaccctcatggagcttatattttagtgggagaaaatacataaacaaacaaataaataaaatatgtaatatataagataaattctatcaagaaaaggaaagcaggaaagggatggagattctatggggtagaaacaatttttaataggctcgttaaagaagttctccttgagaaagtaacatttgaaccatgcgtatagttataggtattgtgggatgatctggaaatcctcagctacttgaagactgacataagtcagtaaacataaaagtgagattttagcgactgttcacaagaaagatcacggcggtgagcctgtgagcaggggctgatttaatgagaagctaaagaagcttcagtttcaaagaccctcatttgcatgggcccttttgaggaccccaggagaagctagcaatacatttgcctggtattttgtgatcttttacttgaaaagagcaccccaaagtgtataaagctcagtcccacagaat

SEQ ID NO: 528174 - DNA, 653 bp, Homo sapiens
ccaactgttttctttctcgacatacattagaataaaaacagcagaatacatgactctttcctttatatacttgttcaatacatctttattaagaacataccatatcccatgcattttttgaaacactaaaaatatattaatgttcaaagctgatgaagtatcccaccctcatggagcttatattttagtgggagaaaatacataaacaaacaaataaataaaatatgtaatatataagataaattctatcaagaaaaggaaagcaggaaagggatggagattctatggggtagaaacaatttttaataggctcgttaaagaagttctccttgagaaagtaacatttgaaccatgygtatagttataggtattgtgggatgatctggaaatcctcagctacttgaagactgacataagtcagtaaacataaaagtgagattttagcgactgttcacaagaaagatcacggcggtgagcctgtgagcaggggctgatttaatgagaagctaaagaagcttcagtttcaaagaccctcatttgcatgggcccttttgaggaccccaggagaagctagcaatacatttgcctggtattttgtgatcttttacttgaaaagagcaccccaaagtgtataaagctcagtcccacagaat

SEQ ID NO: 528175 - DNA, 653 bp, Homo sapiens
ccaactgttttctttctcgacatacattagaataaaaacagcagaatacatgactctttcctttatatacttgttcaatacatctttattaagaacataccatatcccatgcattttttgaaacactaaaaatatattaatgttcaaagctgatgaagtatcccaccctcatggagcttatattttagtgggagaaaatacataaacaaacaaataaataaaatatgtaatatataagataaattctatcaagaaaaggaaagcaggaaagggatggagattctatggggtagaaacaatttttaataggctcgttaaagaagttctccttgagaaagtaacatttgaaccatgcgtatagttataggtattgtgggatgatctggaaatcctcagctacttgaagactgacataagtcagtaaacataaaagtgagattttagcgactgttcacaagaaagatcacggcggtgagcctgtgagcaggggctgatttaatgagaagctaaagaagcttcagtttcaaagaccctcrtttgcatgggcccttttgaggaccccaggagaagctagcaatacatttgcctggtattttgtgatcttttacttgaaaagagcaccccaaagtgtataaagctcagtcccacagaat

SEQ ID NO: 528176 - DNA, 653 bp, Homo sapiens
ccaactgttttctttctcgacatacattagaataaaaacagcagaatacatgactctttcctttatatacttgttcaatacatctttattaagaacataccatatcccatgcattttttgaaacactaaaaatatattaatgttcaaagctgatgaagtatcccaccctcatggagcttatattttagtgggagaaaatacataaacaaacaaataaataaaatatgtaatatataagataaattctatcaagaaaaggaaagcaggaaagggatggagattctatggggtagaaacaatttttaataggctcgttaaagaagttctccttgagaaagtaacatttgaaccatgcgtatagttataggtattgtgggatgatctggaaatcctcagctacttgaagactgacataagtcagtaaacataaaagtgagattttagcgactgttcacaagaaagatcacggcggtgagcctgtgagcaggggctgatttaatgagaagctaaagaagcttcagtttcaaagaccctcatttgcatgggcccttttgaggaccccaggagaagctagcaatacatttgcctggtattttgtgatcttttacttgaaargagcaccccaaagtgtataaagctcagtcccacagaat

SEQ ID NO: 528177 - DNA, 581 bp, Homo sapiens
gtgcccactcagattgagggtggggctgcctctcacagtccattgattcaaatgttaatctccttcggcaaccctctcacagacacacccaggaacaatactttgcatccttcaatccaaccaagctgacactcaatattaaccatcacactgcttttgggttaaacagtttataggatgcccccttaaaatgtagtagccaaaggaaacaacaccacggagctatttactagatatatagactatcttgtcgattaaactgccattaaatctacacttcaatgttgtctaagattgcaacatttttcttaacaaggcttgtaatatttttggccaacaaactttccaaaactttttcaaataatttgttgccaaaccaggtgtcctccsatgaggacttaacgtttagccatgttgtttcaactgtcttgatccagttcttctgacctagttgggcataatgccctttagatgcacatttatatttacacatatgcacacagactgcacaaacgtaacccccatacgctccacacaaaactgaatacatttacctcaattaatgttgattaaaaacaaac

SEQ ID NO: 528178 - DNA, 563 bp, Homo sapiens
tgataatggcactacttacagaaactgagaactcattatctctaaaaaatggtatctgaatcagccaggactgtagaaccaggatgtcyctcaattcaagaacataactgggccaaggaatactagaaataatgtctttataatcccatttcttcctgaattcctagggtaatgccaggatatctcaggtattgccttgtcttaagctacagccacaggtgaattgtttctctgaaaactttctccatagctgcacattcagttgtgctcacttcatttttcagctttttctactaaaaatatttgatggcaggaagatttcagacatgcttcagtcagtagaatttcaaaaacattaacaacagtttctgcaatctttgcactttgagcaacaaagcagttacgatttcacaatcttttatgaaagaaaactggaaaaggaaaataagagtcaaggattccagtcattgctttcagagactgccactttatttggcttcagtttagagttatttaatctgagaagagcaactgatgctttaaagaggaaaagaccctagaca

SEQ ID NO: 528179 - DNA, 628 bp, Homo sapiens
ctttgagtacgaaagggaacagagaccagggcgaatgaaaatcacagaagaccagttccggacttcgtgtgcatttcggggtccccgccctcatgtcaggtgcttcgggctgacccagtgaccaccctttcccgccctcagggcagtccgcgccgctgactttcagtggccaccaaagtatgggcgcccgtagatatgccttaatcgctcgccatttattctttttaatccagagggcaaaatcaaaacatcgcacactcagacacgaggtatggtggggatgacattcaaaataatgaccgctaggcttcgggaaggatttttgccacatcctattcctaccatccaggcatccgctatggatrcctatattcccacaccaggaccccacctctggctttcaggaaagaggggcccaagctggcggcgcagtgttgagtttacttgggcgcgactggctttattgtaggtccccatgagctggtgggggctgtaggggtaaccaggcagggcgtctggcgctgttggggctgcgtttttccggagtccccctatgcgaggccgtgcccctcttcgcccggctcctggtgctccccagccgccggcccgctcccggaagctgcagcag

SEQ ID NO: 528180 - DNA, 583 bp, Homo sapiens
gatggcatttactaacttttagcattttaaagataaatatcttttggattccattacttctgttacaaagtcaactattagtattattttgagtccattgaaggaggtacattttttttaataagccctcaggctaattttttaaattttcactttgtctttcactagtttttatatgatgggcctaactatagttttatttgaatttatcctggttggggtctttatatcttcttcaattcttatcttgaagtctttagtcagttttggaaaattctcagttcttaayattttaactatttcttccatcttacgatctctttcctatttatctgggttttgagctacacatatgttagaacttttatcacatcctgtattttcttaagcttctgttacttaagagaagatttagttccttctgttgagcagctagtagataacatgaatccaataagaaattgaggtaatgcatagctggtcttttttagttaccctttattcccacgttttgcctttatgtgacccattgaaagtaatggactccagcttttctctcaatccaatgtctgccaaaagtttt

SEQ ID NO: 528181 - DNA, 525 bp, Homo sapiens
ataatacccacattagttacatgcatacttaacctcctggtaaaatttgtttctgtttaactggggtcccttacataggcctstaagagagatctgactgctattttcccaaaacaacatctcctgttagcatgaagcagtcaaagcagtcatcattcctatactaatgacagtgagatatactcagagcagggcttaatagggacaggagacagacagatttctaggcagacagggaaagggccctggtgaaatctgaccatcaagccaagaacagtttaaagcctgtaaacagagctgccagttctggatagagtctacaactacagtgagaacttccatccccatcttacccactctcttttgattggttcctcctgaaggatgcctgttaaccaatcaaatggtgttttttttttttcaagcccaccctgggcctgtcaacatgcactccccatttgtaagtttataaaaaccctggactcagcctcgcagatggctactcactttcaggtcccctttcgc

SEQ ID NO: 528182 - DNA, 328 bp, Homo sapiens
tgaagggacaaacctctataaaacaggtatcaaaagggaagaggtcctcattctctattcccatccaactctcaacaggcaaggcactaatataggacctaggtttagatgattgagtgcttccagagagtataaaattcaatctagaggagattgcacatagaaataaatgatgaattaattcaaagtaactaaaacagtattgagaaccagatgcaatgtgatacarcattcagtgtttccagctcgacgctttccactggtagtgagagcaacattcaacctagacatctgcctgtccacatttcagactcctgctcccatgatt

SEQ ID NO: 528183 - DNA, 645 bp, Homo sapiens
tttgttagaaaaggttggtgaagaatgagtcattgtggagttagaggaggttactgaaaatggtgactccaatggtgggatttgaagagggaagtctcgataattttgacatatggtttcttgccaggaatcggcaatgctaattgcctatgcttaattctttatcaacagactctttgaatcaatttagagatactcagtgaccccatggctagagttcctgacccctgctaygggaaacattgaatgcaaacaagcaaaaattgctcaaagccatgttatttttgaagtacaaaatggcttacaaagttaaaaataggcatccaaatacatatgtctgcacttacatggatggaaacactgagcctcttctttcaggcccagcacccctatttagagcagatactgtagagtaccacaatcacagtaaggtcacacaatcgccagtggggtccaagatgagacatcttttctaacacaggttatttttattttttaaaaaagtacctcttaccactgccttacaatttctatattaagaattacatggaagctatgctaatcataattttatccaattattaatctgaatgttaatttttaattgaatttaaaagtataattcagtagggcaaaatcctatcc

SEQ ID NO: 528184 - DNA, 622 bp, Homo sapiens
tgactgagctacaaaagttaatgggtggcatgttccactattgacrtcataacccacagtgtccttcctaacaccagctcccttagctcattcctaaggactggccaggcagatggaacaagagaaaggaaccaatacattcattccttttaaatgcataattctacatctaagaacaatatagaaaaactttcaaaagacacccacggtccatcttcttattctgtcttttaacgttccataggttatggtaggtggagagggagagagtgaggccaataacagcctcctagccaagtctgggcaaagaccatctgccaccagggccagaagccaggggaaaccacgtgtttccacctggaaacacccaggctgaattcaaatgagaactgatgcccacctgtgcctagcagacatgtaccacatgtctgtcttgtaattacacactggggatggaccagtaatatcagccagcatcccagccagtcattatcctacaagactgtccctacacactctgtaccataaagctttattcatcattttcctgagcctcaaagggtggactgcttgcctttgaaatctggtacaatggtaagtccacagaacagaatattatcgc

SEQ ID NO: 528185 - DNA, 584 bp, Homo sapiens
tgacaggttagtgatgtttagtaaatgcagtaaatgtgattggaagtgatgaggtaggagttactctataaaacagaatgacagaggttttgtctataaaacattagactatgtagactattaactctatggaaayctaataagccatgtttactttatttaacctatcccaagtaattttaggctgctttagccattatgtggtttctccaagaatcattgtgaaaagtgatcgcattttatttctactgactttgatggttttgttctgcatttcttacttaaaatgctgcctaaagataggaaaagataccttctacagtataattatctgggatgtcttacataaatggtcttaaaatagatctctggtgtgacaatcttctaatgctctcttttcaggttctcatagaacatgctatacggaaattttctttttatagttaattatgctttcatgacaaaagccaaagagatagctaaaaacaagcagaattccttatgaattctatgaattatgcagaataagtttctctctgttaaagtaaaatttgctttagcaaatatacttgtgctaaaatatc

SEQ ID NO: 528186 - DNA, 627 bp, Homo sapiens
gtaactgacatatgcctatattttaactaactgtgtttgtggaattaaaaataaatttcccagggcccatgcttctgacatttttcatacaatttctcagtgttcccagtgtatctgtttctctttatgccttgagtagatcttgtaataaaagtttgaacatcataaatataatgttttactgaaaagagtaagtattttgaaagaaacttagaatgcttttttttatttaggataattgtctacatatttagaactttaaaaaaagtaaatttttaaaatatccatgtacaatatttttaagataatagctcctactgcttaatgttggtaaacatacaagcctgtcattgacatactgttttgcatgaactattttctttcttttctcccaacattttataatttttttttttcctgagatacaggatcgatgaagaaatggtacaatacgcgttgagaaagtctctacccagattcaatttcaatattttctaacattttaccttgtcccctgccacgtcccccattcctgtctgtttctctgctttttagagcacccctggagcttgtctkagctgggacaattggcacttgctaggatagaagggatgggatgtgaacagg

SEQ ID NO: 528187 - DNA, 596 bp, Homo sapiens
agttttgccccagatccaagcaatgaagatcatctgaagtgagtccctcagttccctgtcctaatgtcccttttacctttcacaagattctgggtaacacttgcatcttggttaactacttttcgattmtcttgcctcatctaagccagagctgcaatgagagccttgggagtttgcaggcactaaaactgagagaaaaaccaccatgtgtttccatgagaggaaaatgattgaaagagaaagatcagcaaagggattaaaggacctatccttcaatgctggtgtgaatggaactttcatttcatcacaccagcagccagtagggaaactctactcctgtcaactgaaaagaggcttaaagaagaaaacggatcaaatagatcttcacgcttcctggccaacaggcaatttccccggggtgatcctttgacaattgtgactgtgcaggcttcagtgtaacaatccattttcttctgttaggaggactgttcaggatatacacagcatcccactgctgttggagagtccaaagaaagaaatacatcttgcttagggattttctccacctgagtccttcattgtgaaaccctgaaacc

SEQ ID NO: 528188 - DNA, 507 bp, Homo sapiens
gcaataaaatatatatgagataatatgttttaaaagatataaagaatatacttatccttccaatatttattagatgcctactatcttccaggaattgttctgtagtataatcattgtgtgatttgttttgtatatagaattccaactttctaaaaattatatatatatgtgtatgtatgtgtggatatatatatakagagagagaaagagagccatagccataaaaatatttatggagaaacacaacatgatgttaacgatagttgcatcaggatgatggactgttcatttacattttcttatttacttttctgtgatttctaattttctacaatgaacatgtattagttacatactttcaaaaaataataacttttgatttaccttaatttcaccctaaacaaaaaagaaacttctctttaggctattttaaagaaaacacattggcattttcaaagagaaattgacccagttaaaaggaaaaataaaagaaataaatacccaaaa

SEQ ID NO: 528189 - DNA, 507 bp, Homo sapiens
gcaataaaatatatatgagataatatgttttaaaagatataaagaatatacttatccttccaatatttattagatgcctactatcttccaggaattgttctgtagtataatcattgtgtgatttgttttgtatatagaattccaactttctaaaaattatatatatatgtgtatgtatgtgtggatatatatatagagagagagaaagagagccatagccataaaaatatttatggagaaacacaacatgatgttaacgatagttgcatcaggatgatggactgttcatttacattttcttatttacttttctgtgatttctaattttctacaatgaacatgtattagttacatactttcaaaaaataataacttttgatttaccttaatttcaccctaaacaaaraagaaacttctctttaggctattttaaagaaaacacattggcattttcaaagagaaattgacccagttaaaaggaaaaataaaagaaataaatacccaaaa

SEQ ID NO: 528190 - DNA, 487 bp, Homo sapiens
ctgtgcaaactgaagagcaacacaaatttaacatgacatttttattattgttattacttttgtgtgtcagatgtagcaaccaaagagaggtagtggtcttgccatgcttgtctgcaacaaaggaacttttaaaacagtgttagtgaatacactatggcttaatgttcagaacttgatatctagaggcagacaaacctttmtctctatctcgtcctaggcatttacctaataaattgaagacactggtgattatattgaagacattagcgattatagattatgacataatgccttttatctgctgaacactttattttagaatgaaagcctacatttaattagccatgggtttttatcatacatcatttgtgtgtatgttaaaaggaaaatatgtgtgaaagaaattggttaatgtatttctaaaacctgttcacacacacagtttgactcttctgaatcactggacaactatgtttttccacaccct

SEQ ID NO: 528191 - DNA, 487 bp, Homo sapiens
ctgtgcaaactgaagagcaacacaaatttaacatgacatttttattattgttattacttttgtgtgtcagatgtagcaaccaaagagaggtagtggtcttgccatgcttgtctgcaacaaaggaacttttaaaacagtgttagtgaatacactatggcttaatgttcagaacttgatatctagaggcagacaaacctttctctctatctcgtcctaggcatttacctaataaattgaagacactggtgattatattgaagacattagcgattatagattatgacataatgccttttatctgytgaacactttattttagaatgaaagcctacatttaattagccatgggtttttatcatacatcatttgtgtgtatgttaaaaggaaaatatgtgtgaaagaaattggttaatgtatttctaaaacctgttcacacacacagtttgactcttctgaatcactggacaactatgtttttccacaccct

SEQ ID NO: 528192 - DNA, 703 bp, Homo sapiens
gggaaaaaaacaggagaggcaaggaagaggagttggtcaacaggcagcaggtgcatctcattgtctgggtgcagtgatctcgaaagcctcagttccctgatgccgttcaggaggcccgatggtaggtttcctgagaaaagaactgaactacaacaaatataagtttctcaagcttcagttctatgggataattgagctggcttcaaatcctttattacacttaaaattttttcgcatgattatcagtaaaaatatatgatgggaatgatttctaaatgttgtgggacacatttgtttcatgtgcaaaatgattttaaaacttaacatttttagttttgtttcagatctctaagatctccaaagagcatagcaatttacaagtatattttctattaacaaattattagatgacctaaagaactagtcagagccacacatcatccaggacacatatatcagaaacagaaaagttctaattcaaggtgaggaagttgaatacrctctctgatatttgattcataataagagaggcctattacgttctcactagcactttagaaaatgtaaagaatgtgcacatgtaagtgtgaacaggaaggaatcttcatgaccacacaaccctaccttaccctaatcacctcaatttgtcagttgacaaatctgtggttttgagtgatggcattatttactcaagtgcacacag

SEQ ID NO: 528193 - DNA, 703 bp, Homo sapiens
gggaaaaaaacaggagaggcaaggaagaggagttggtcaacaggcagcaggtgcatctcattgtctgggtgcagtgatctcgaaagcctcagttccctgatgccgttcaggaggcccgatggtaggtttcctgagaaaagaactgaactacaacaaatataagtttctcaagcttcagttctatgggataattgagctggcttcaaatcctttattacacttaaaattttttcgcatgattatcagtaaaaatatatgatgggaatgatttctaaatgttgtgggacacatttgtttcatgtgcaaaatgattttaaaacttaacatttttagttttgtttcagatctctaagatctccaaagagcatagcaatttacaagtatattttctattaacaaattattagatgacctaaagaactagtcagagccacacatcatccaggacacatatatcagaaacagaaaagttctaattcaaggtgaggaagttgaatacactctctgatatttgattcataataagagaggcctattacgttctcactagcactttagaaaatgtaaagaatgtgcacatgtaagtrtgaacaggaaggaatcttcatgaccacacaaccctaccttaccctaatcacctcaatttgtcagttgacaaatctgtggttttgagtgatggcattatttactcaagtgcacacag

SEQ ID NO: 528194 - DNA, 703 bp, Homo sapiens
gggaaaaaaacaggagaggcaaggaagaggagttggtcaacaggcagcaggtgcatctcattgtctgggtgcagtgatctcgaaagcctcagttccctgatgccgttcaggaggcccgatggtaggtttcctgagaaaagaactgaactacaacaaatataagtttctcaagcttcagttctatgggataattgagctggcttcaaatcctttattacacttaaaattttttcgcatgattatcagtaaaaatatatgatgggaatgatttctaaatgttgtgggacacatttgtttcatgtgcaaaatgattttaaaacttaacatttttagttttgtttcagatctctaagatctccaaagagcatagcaatttacaagtatattttctattaacaaattattagatgacctaaagaactagtcagagccacacatcatccaggacacatatatcagaaacagaaaagttctaattcaaggtgaggaagttgaatacactctctgatatttgattcataataagagaggcctattacgttctcactagcactttagaaaatgtaaagaatgtgcacatgtaagtgtgaacaggaaggaatcttcatgaccacacaaccctaccttaccctaatcacctcaatttgtcagttgacaaatctgtggttttgagtgayggcattatttactcaagtgcacacag

SEQ ID NO: 528195 - DNA, 577 bp, Homo sapiens
agcactgattgttttgacccctgaagcatgagaggaggtcatgaatcagtgggcagagagtatcatgaacacatttcatgtcacttcatgtgttaaaaaatattagrtcagcaaaagtagtagcatctaatatttgcaaaaaccgtctgcagttgactaaatgctgttagaacacagctcagtttggtgttgcggtgatacagttcatggataaggcaagctggccctgtttagggatgaggaaagttgggcacagcgagattatgcgattctcaagccatggtgaggagaagaccgaagaatgttctcttccatcaggtggtgctactccccaaatggtagggtagaagcagcgttcctcttctgaaaagaaagagaaggaggaagaaggaaatgaggtttgagggggtgaaaggaaaatatcttaggcccccaaaatcactaaggaaaactcaacccaggaactgcttagggcaaacctgcctcccattctattcaaagtcactcctctgctctctgagatagatgcatatctgatttgcctccgttggaaaggctaatcagtaatctcattaag

SEQ ID NO: 528196 - DNA, 515 bp, Homo sapiens
gttgaacaccaggccccacttaaacttcaggcctcaagtggatgtccaggccccaggtaaataccagggccacagtggacaggaagccccaggtagactacaggccccaggtggatgcctaggcccctggtgaacaccacgctccaggyagataccctgaccccagggcaacatccagttcccagtggacatcaggccgcaggtggatgcccagttcccatgtggacatcagtccccaggtcaacatcaggccccaggtggacactggacttaagatgtatatcaggcaccaggctcacatccgtgccacagcaggacacaatgtcacaggtggacagccatcccacagaggataccgaggactcagacggacgttcaggctcaaggggaacataagacactatgtaggcaacaggcctgggtgcatatcagaccccaggtaaatactcaggttccaggagtacaataggcttgaggtggatacccaggtccctggtagatacccagtccccagc

SEQ ID NO: 528197 - DNA, 562 bp, Homo sapiens
ctgctcagccccaaagtttgaaatgctgatttcaaggaaacgcttaaagggcagtaggaagcagaacaaacagaaaaagatacctaattcggaaatcctacccattgtaggctagggtttcatgggaggagakgggcagggagcagagagaaagggaagtggcttaagagagaagtaccctgataatgaatctgcacttaaattgactgaacatttatttaacagactttttacatctgatgaaattgctcccttgaattggcaagttttttttaatctatgactatttgttatagaagacaaagtttcattttctgagcatgtgaagtttgacctgccccacattttgaagtcttaccttgagtatgagaaaacgcttagagacatttatggaatttattggtcaagttaggctggggaacactttggtacagctccatgtgcatggtctggctgcctgcccagtttgctttttgtcttttttttttttttgagacggagtcttgctctgtcacccaggctagagaatacagtggtgtggtcttggctcactgcaaccaca

SEQ ID NO: 528198 - DNA, 584 bp, Homo sapiens
atcaccacttagacacagagaaacatgagcaacagagattcatattatattctgcatgaatttgttctcttactttaggttcatattttgtagtcatgtaagatgtagcaaaaaagaagtaagatttggattattttccttcaaattatatacacacacacattcacatacacctatgcaatattcaataatctgttacaatcacgtacataagctgtgtcttctatattaaagaccaatatttctggaacttatttatagacagataatagtaaaacgttcagaaatatggatataagtatgcttatatacttatgcatacttatatattaagctataatatatagagcttaatatatatakagagagagtatgtgtatgtaataacttgaaggaaatattaattggagagtataaggcaataataaataacaacacatatccttaaaaaggcacttgattttattagcatatatgtatattttagtaaaattaatgtgtttccaatgtaatgtgtttcttaattctctttcagtagaaacaatatcgaacatacaccaatattttattattgattaagtacc

SEQ ID NO: 528199 - DNA, 645 bp, Homo sapiens
tccagagtttttcttggaatacttatctgtgctcttttacttacttttgaggcttttgttttagttcagcagcttataatctagtcaggtaaggttttatttgtattatgttccttaggttttgttaastttcttgcaagtaggttaatattctttatcaattttacaaaatttttgaccaacggctcttctgatattgcttattctctattctctctcacttgtctttatgtccaattcagttatagtagatgttttgactgtgcctcatgtctttcttgttttgttctgctttattcaatctcatcagttgagattatttctacagatcaatttacattatttctatgaatctcttttcaggttgttttaccacacttattcaaaagcaaacctattcagtgacataagttcaattattgtatttctgttttagaatgtctatgattttttatagatttaaatctttgctacaatctccatttcatccagtttgtctacttttattatattagcaatggttattctaaatttgtccgcttaattctgaactgtgaatctgtggagctgtgcttattgtgcacatgtgttttgttgattgttaataaaattgttgccacttcacatatctagacatttttcgta

SEQ ID NO: 528200 - DNA, 641 bp, Homo sapiens
gggctgacatgataagacactggagctcaaaggcctagggtaaaatcccagccctgcaggctcctttctatatgggaatgagcctaatgatttcgcagggcattaattttaataatgtctaatgggaaagataataatgcattacttgaagtatggttttcagaattaaattactgtcgatayatgtgaaaacaagaggtatctagaaaatcataagtcctctaaggatatttttcataagtacccttttattacccatcacgcagttgacataataaattataatattctttactgctatgtataattattgttgatgtggagttttagaatgaaggaatttcaagaaaatatgtaaagaacaaggcaacagagcataagaggtaacagctatgacaaaggaaaggatgactaatggaacaaagtggctgggttggaatacacaggtcagatgcaggaattagctctggaaaaaggagacttctctcttactttgaaattggagggaagattatataataggttaagagggtgaaactttcttatggagaaaaagagcaatttggacaaattagtattggatggatttaggcaatttagagaacaaatctgctcaggcattttgtggtgagtctctggtg

SEQ ID NO: 528201 - DNA, 522 bp, Homo sapiens
tagctctctcaatgcaaatagcctttttcccccggggtatttgccaaaaacaatcagtaatcatggtttaatatttcagctctataaagtggtaataatggtcagggcaaacaaaaagttgaccttgaaaggaattctgaggaatgagatgtccatgtggggctttgaaaagccccactacgttcctgggaatcgcaactcatgcaccagcagtgctatgtgcacttctgaaaaaaacctaagagaatcgtaatctctctttgctggctgacctygaggctcaaagcaagaagttatggctaagggttgtaaactgccttaggaatgttgaaaatgtgacccaacacacactcagaaatgcttgctaaatgccgagagagttattgttgcagggcctttaaggattcttgtgcacacacatgcacattttcagataaagaggtttcacagtaattttggaaatttctctagtttctaggggaaatactctggtccttgggttctccaaaaatagctatttac

SEQ ID NO: 528202 - DNA, 522 bp, Homo sapiens
tagctctctcaatgcaaatagcctttttcccccggggtatttgccaaaaacaatcagtaatcatggtttaatatttcagctctataaagtggtaataatggtcagggcaaacaaaaagttgaccttgaaaggaattctgaggaatgagatgtccatgtggggctttgaaaagccccactacgttcctgggaatcgcaactcatgcaccagcagtgctatgtgcacttctgaaaaaaacctaagagaatcgtaatctctctttgctggctgacctcgaggctcaaagcaagaagttawggctaagggttgtaaactgccttaggaatgttgaaaatgtgacccaacacacactcagaaatgcttgctaaatgccgagagagttattgttgcagggcctttaaggattcttgtgcacacacatgcacattttcagataaagaggtttcacagtaattttggaaatttctctagtttctaggggaaatactctggtccttgggttctccaaaaatagctatttac

SEQ ID NO: 528203 - DNA, 578 bp, Homo sapiens
atagtaacaaaagtataggatatcagagaaaaagtatttgacagaatgaaagaaaaaaatggatgttttaagataagtggtccgagatgcattcatgtgttacttcattagcttgtatatatttagtgtgttctatatgtattcaacaattgatgcagattcaaaaataaaaaaagtgttagtttagtaaggagatatacaacaacaaaaatttcctmtaaaaggggattacagtaatgaaagtatctagaaatctaattttaaaaagtggtgctaattatctgggatcatctgggaagacctcatttaatagaacatttgagtaggcacttgaggatgaagataaattttcgggcagattaataacaatggggagagttttcacggcagaggagatgacttttataaaaagaggaaagcatgaagtttatgtagcttgtaaagtgtgttgtattcaggtagtaatgcaatgactccatcactcttgcattttttattggaggctctgaggaaaggtctgcttccaagtttattcagattgttagccacacttagttccttgtgtaggtagtatcgca

SEQ ID NO: 528204 - DNA, 578 bp, Homo sapiens
atagtaacaaaagtataggatatcagagaaaaagtatttgacagaatgaaagaaaaaaatggatgttttaagataagtggtccgagatgcattcatgtgttacttcattagcttgtatatatttagtgtgttctatatgtattcaacaattgatgcagattcaaaaataaaaaaagtgttagtttagtaaggagatatacaacaacaaaaatttcctataaaaggggattacagtaatgaaagtatctagaaatctaattttaaaaagtggtgctaattatctgggatcatctgggaagacctcatttaatagaacatttgagtaggcacttgaggatgaagataaattttcgggcagattaataacaatggggagagttttcasggcagaggagatgacttttataaaaagaggaaagcatgaagtttatgtagcttgtaaagtgtgttgtattcaggtagtaatgcaatgactccatcactcttgcattttttattggaggctctgaggaaaggtctgcttccaagtttattcagattgttagccacacttagttccttgtgtaggtagtatcgca

SEQ ID NO: 528205 - DNA, 578 bp, Homo sapiens
atagtaacaaaagtataggatatcagagaaaaagtatttgacagaatgaaagaaaaaaatggatgttttaagataagtggtccgagatgcattcatgtgttacttcattagcttgtatatatttagtgtgttctatatgtattcaacaattgatgcagattcaaaaataaaaaaagtgttagtttagtaaggagatatacaacaacaaaaatttcctataaaaggggattacagtaatgaaagtatctagaaatctaattttaaaaagtggtgctaattatctgggatcatctgggaagacctcatttaatagaacatttgagtaggcacttgaggatgaagataaattttcgggcagattaataacaatggggagagttttcacggcagaggagatgacttttataaaaagaggaaagcatgaagtttatgtagcttgtaaagtgtgttgtattcakgtagtaatgcaatgactccatcactcttgcattttttattggaggctctgaggaaaggtctgcttccaagtttattcagattgttagccacacttagttccttgtgtaggtagtatcgca

SEQ ID NO: 528206 - DNA, 550 bp, Homo sapiens
catgttaaagtgatgattgacacctgtttgcatactatttgagaatttaatatttggttgaaattctctgatcctaaaacatacagcttggaaatacacattttgtttgcatacacaagggatgttgcacgcataccagaattaaagaattacaattagttggtacccagcttgcattcttaagcaatctttgtaactactatttttcttattaacactgccttctgttctcattaagtttcaacagagtactctaagtaatttaaaacatattgttccttcatttaaatgggcaatttcactctcaacaaatgcctggaccttatcatraggtgtggaaacggagcaaatagtcccaaatattttaaccagctacataaacttttgcaatgcttttataggatgtttaaaataacaagaaagactttgttctcatgattttcagcaacagtggttacaaacagtcttcttctttactatgtttgaatggcatatttcacttcatatatcctttacttgcggctacagccttaatattgctaggggaaaa

SEQ ID NO: 528207 - DNA, 612 bp, Homo sapiens
gctgctcatgcccccatctcagtgaatgtccctgccattcacctgagccagaatgctgggcatcaccacctatagctattaccaggtctatcaattctatcttctaatgtatcttgaaggtatatactagatttcaccaacgtatctttggtgaaaaccctccaaagcttcccactgccttcaagatactatctaaaacttcttctcctggtctaggaagccttgaatgatctggcctctgctcacttcctgctactgggctttcctcaaacccagaaatcactaagctccttcctgcctccaggttcttctcacatgctgcttcctctgcctgaaacagtttctccctctctccgcctagttctctcctactctaaggtctcagtccaggggtcccctcctcagtctagatgaagacmtcctccttgtatacattcctatttaaaaaatatattgaggccgagtgcggtagctcacacttgtaatcccagcactttgggaggccaaggcgggcagaccacctgaggtcaggagatcgagaccatcctggccaaaatggtgaaatcctgtctctactaaaaatacaaaaattagccaggcatggtggcgtgt

SEQ ID NO: 528208 - DNA, 612 bp, Homo sapiens
tagaacttggtgttgatgtgcatctgtcttgtattagatcgatgtttctgcttgctacaagtatagtctggaaaagccatgaagctcactattacataggattaaattagtttctacttggcccactactttaaactttaacttcagtgaggaaatctagtttcagatcagtggctctcatccctgctatccattagaataggatatgaagcttctgaaacatacggattattaaaccccatgggcctaaaattctaaatcatagagactgaggtaggwcttcttttattttttatttttcaattaactacaggtaatgccaattctcagctagggttgagaattttggcttgaattcttagagatgaaatatgtaaaattagacgacctgaaaatattcacataaattgttagacaagaaatatgaaaaatgagacaatctgaaaatatttgtataatttgacttgtctaatttcagtaagtttatatacgcaaaattaaatttctgcggacagaaaagttaaaatctgcagcaaagccaaaaatcactttcggtataagacccaaagaccaataacatttcaatacaaaaaataagtttctttagttctt

SEQ ID NO: 528209 - DNA, 612 bp, Homo sapiens
tagaacttggtgttgatgtgcatctgtcttgtattagatcgatgtttctgcttgctacaagtatagtctggaaaagccatgaagctcactattacataggattaaattagtttctacttggcccactactttaaactttaacttcagtgaggaaatctagtttcagatcagtggctctcatccctgctatccattagaataggatatgaagcttctgaaacatacggattattaaaccccatgggcctaaaattctaaatcatagagactgaggtaggacttcttttattttttatttttcaattaactacaggtartgccaattctcagctagggttgagaattttggcttgaattcttagagatgaaatatgtaaaattagacgacctgaaaatattcacataaattgttagacaagaaatatgaaaaatgagacaatctgaaaatatttgtataatttgacttgtctaatttcagtaagtttatatacgcaaaattaaatttctgcggacagaaaagttaaaatctgcagcaaagccaaaaatcactttcggtataagacccaaagaccaataacatttcaatacaaaaaataagtttctttagttctt

SEQ ID NO: 528210 - DNA, 612 bp, Homo sapiens
tagaacttggtgttgatgtgcatctgtcttgtattagatcgatgtttctgcttgctacaagtatagtctggaaaagccatgaagctcactattacataggattaaattagtttctacttggcccactactttaaactttaacttcagtgaggaaatctagtttcagatcagtggctctcatccctgctatccattagaataggatatgaagcttctgaaacatacggattattaaaccccatgggcctaaaattctaaatcatagagactgaggtaggacttcttttattttttatttttcaattaactacaggtaatgccaattctcagctagggttgagaattttggcttgaattcttagagatgaaatatgtaaaattagacgacctgaaaatattcacataaattgttagacaagaaatatgaaaaatgagacaatctgaaaatatttgtataatttgacttgtctaatttcagtaagtttatatacrcaaaattaaatttctgcggacagaaaagttaaaatctgcagcaaagccaaaaatcactttcggtataagacccaaagaccaataacatttcaatacaaaaaataagtttctttagttctt

SEQ ID NO: 528211 - DNA, 646 bp, Homo sapiens
ctggagagtttattaaagctcagattttttgaccccaccttcaaaacgtyagattccacagtgctgggatgggaccaaagaatatgcatttcaaataagtttccaggtgtattgttagggttctccagagaaacggaaccagtaggatatgtgtgtgtgtgtgtgtgtgtgtgtgtgtgtgtgtgtgtgtgtgtgtataaagagagagagtaagacagttattttaaataattggcttaagcaattgtggtgacttgcaagcctaaagtgtgcagtttaagtcaaaaggctgtctgctgacagaatttcctcttgctgaagtatgtcagggggttgaggtatgagtcttttgttctatccaggcctttaactgattggatcatgcccacccacattaggaagaacaatctgcttttctcacagttcactgatacaaatgttaatctcatccaaaacaccctgggagaaacatccagaataatgtttgaccatatctctgggcatcactgcccagccaaactgacaaataaaattaaccatcacaccagaagatgctgatgctgttggtctgagcacttcttagactgagactaatcatttgaggtacatgggtgttggcaagttcacatcatccatgatcagtact

SEQ ID NO: 528212 - DNA, 631 bp, Homo sapiens
ctggagagtttattaaagctcagattttttgaccccaccttcaaaacgtcagattccacagtgctgggatgggaccaaagaatatgcatttcaaataagtttccaggtgtattgttagggttctccagagaaacggaaccagtaggatatgtgtgtgtgtgtgtgtgtgtgtgtgtgtgtgtgtgtgtgtgtgtgtataaagagagagagtaagacagttattttaaataattggcttaagcaattgtggtgacttgcaagcctaaagtgtgcagtttaagtcaaaaggctgtctgctgacagaatttcctcttgctgaagtatgtcagggggttgaggtatgagtcttttgttctatccaggcctttaactgattggatcatgcccacccacattaggaagaacaatctgcttttctcacagttcactgatacaaatgttaatctcatccaaaacaccctgggagaaacatccagaataatgtttgaccatatctctgggcatcactgcccagccaaactgacaaataaaattaaccatcacaccagaagatgytgatgctgttggtctgagcacttcttagactgagactaatcatttgaggtacatgggtgttggcaagttcacatca

SEQ ID NO: 528213 - DNA, 510 bp, Homo sapiens
cctggtgttgaaccagcattgtgtgtttggagaaagcatcctgtttacaaatgaatgtttggaaatgcagcctgttattaggtatgaggttgcttggtgtttgaagttgattgttcctaaaggtcaccaggcaatgtctccaagcagtcagcacatgggctttcaatcatctttaactagtagtcatgcttgggagggcttaaaagagtaagagaatacgttttgcatgtatttgcatggcttactctcctgaagctttcaaattttaaatgaaatgattacttgtttgcctgataactttttaaaaatagtagaaagcccattgtccttaggcttaagaatagctgggtctgacctttcttcatttggaagatgctgtctctgcagcctttgtggtttcaacttgctgattacagcttgtgtaggtgggaggaggcatggctagtggtttctttttggctgtgggtatarttgttggtctgggtatgaaccgtgatccagccttacaag

SEQ ID NO: 528214 - DNA, 315 bp, Homo sapiens
ctggcagcccctagcttaaaccatctttgggtacttcctctcagacatgcctagccagaggcacacagatggaggtctgagcaaactggaaagctggaggctttagctttggcatgtgagtgttcattttctactccctcctacctttgggcayccaccattcatgctatcttaagccctcttgcccatcaaagccctcttgcaaatcatccagtgtcagttcgttatgttagagagacaggatagcgtgcttaaaagggagacctctggtgtcagccaaagctggattttcatctctgttgtactatgaactgt

SEQ ID NO: 528215 - DNA, 527 bp, Homo sapiens
gatgagcattggggggagtttgctctccacagttttcttgcagggaggggcgcatgccagggyttattgcctaagaggcaccagaggcagtcaatgtgcggggattttacaggtgctgggaagggacctccctctttatttcctcaaatatggcccacttgattgccctccaacacagttctgaagccatcactcctcccccttttgtatgtagggttgaccatggaatccacatgcagagtgcatttagggggtaagtagggagggtaggagttgctcagaaggacctgccatgctcagtgctttatgtacatgagctcacctagctcagcaacctgatgaggtcattatttttattcccattttataagtgagaaaactgaggctcaagaggtagagtaacttatccagcattaaagaacaaataagtttactatgtggggttcaaaccctggagcttctgatggcagagccaaccctcttcacaccgctctgcacaaactgacacatggccagcattgacctca

SEQ ID NO: 528216 - DNA, 527 bp, Homo sapiens
gatgagcattggggggagtttgctctccacagttttcttgcagggaggggcgcatgccagggtttattgccyaagaggcaccagaggcagtcaatgtgcggggattttacaggtgctgggaagggacctccctctttatttcctcaaatatggcccacttgattgccctccaacacagttctgaagccatcactcctcccccttttgtatgtagggttgaccatggaatccacatgcagagtgcatttagggggtaagtagggagggtaggagttgctcagaaggacctgccatgctcagtgctttatgtacatgagctcacctagctcagcaacctgatgaggtcattatttttattcccattttataagtgagaaaactgaggctcaagaggtagagtaacttatccagcattaaagaacaaataagtttactatgtggggttcaaaccctggagcttctgatggcagagccaaccctcttcacaccgctctgcacaaactgacacatggccagcattgacctca

SEQ ID NO: 528217 - DNA, 527 bp, Homo sapiens
gatgagcattggggggagtttgctctccacagttttcttgcagggaggggcgcatgccagggtttattgcctaagaggcaccagaggcagtcaatgtgcggggattttacaggtgctgggaagggacctccctctttatttcctcaaatatggcccacttgattgccctccaacacagttctgaagccatcactcctcccccttttgtatgtagggttgaccatggaatccacatgcagartgcatttagggggtaagtagggagggtaggagttgctcagaaggacctgccatgctcagtgctttatgtacatgagctcacctagctcagcaacctgatgaggtcattatttttattcccattttataagtgagaaaactgaggctcaagaggtagagtaacttatccagcattaaagaacaaataagtttactatgtggggttcaaaccctggagcttctgatggcagagccaaccctcttcacaccgctctgcacaaactgacacatggccagcattgacctca

SEQ ID NO: 528218 - DNA, 622 bp, Homo sapiens
gacccatctgggctggcactgtttccacaggggtggtgatggcgttttattggatgcagctttatcctctctccctgacctcccacaaccagctacataaattggcagtttgaaaatgcgatgctctataagcggatttaagctgacacctcggaaattgaaatcagaaccctgccacctttagaatccgtcaaatctactaggaacatgaccaagcctggatccatatacgcatttttaaatgaacattactggatgtgatgtatgttaagtactctgcaaggatgactatttctccaactcaaaattaggagtgtatttgacatggaatgtatgtagactctccccaaaagagtcagatttaaccactaygaatgtctcctatattagatacttcggattgtagagcaaatataaaatatcagcctgtcctaaggaagaaatggggaggcaacattcccagcaaaaacacattgacaacatggtgctgtctgcatcttccctgttccagagtggcaccaagcctagcagagagagggaagtggcagcttcatcagcgtcactcccatttcattaactgctcaataggatgggaacataccgccctctgaatgtgaagctg

SEQ ID NO: 528219 - DNA, 648 bp, Homo sapiens
gctggggcctgggccactcasactttttgctacaggagatttaagtaggcctttccatgtgcagtgcaatcctttttgtcatattttaaaaatactttaaagatatcacacgtattaaaatatctaagtattttaaagacaaaggcctgtaatatttacactgagaactgagatccaggtaggaatataagggcaggaactgcaatcggcacatccagcgaaggaagctgtgatgacaccaggccagaacagggtcagggtcccagccaggggatatggaggtgatcacacgtcagctctgaatactctgattcagagtcacaaaaagagacaggcaatgatcgttcctaaaactagttgagggcttaaaccagaggagcgaatgtctgaaccaaaataattccctaaattttttatttttactcataggaagttctaacttcctgaaatgttacaaaattggtgctggaaatcatgacgaagagaaaagacaacaattttcctggtcgatctggatgttcagcggcctgaggacaatgccgcagcagtgggaagaggggtggtgtgtaactggggagtgaaatgcttcctggaaagtagtttatttgctgtgaaggcaggggaaggcatgggtcatgggtggtacag

SEQ ID NO: 528220 - DNA, 648 bp, Homo sapiens
gctggggcctgggccactcagactttttgctacaggagatttaagtaggcctttccatgtgcagtgcaatcctttttgtcatattttaaaaatactttaaagatatcacacgtattaaaatatctaagtattttaaagacaaaggcctgtaatatttacactgagaactgagatccaggtaggaatataagggcaggaactgcaatcggcacatccagcgaaggaagctgtgatgacaccaggccagaacagggtcagggtcccagccaggggatakggaggtgatcacacgtcagctctgaatactctgattcagagtcacaaaaagagacaggcaatgatcgttcctaaaactagttgagggcttaaaccagaggagcgaatgtctgaaccaaaataattccctaaattttttatttttactcataggaagttctaacttcctgaaatgttacaaaattggtgctggaaatcatgacgaagagaaaagacaacaattttcctggtcgatctggatgttcagcggcctgaggacaatgccgcagcagtgggaagaggggtggtgtgtaactggggagtgaaatgcttcctggaaagtagtttatttgctgtgaaggcaggggaaggcatgggtcatgggtggtacag

SEQ ID NO: 528221 - DNA, 537 bp, Homo sapiens
gcttcccaccatcaccaacaataaccaatcrcaatagtccacctggttgtcagcatttattttgtgtttctagatactgtattgccaccatttatctgtaaggtctttggagaccccattagctagtgtggacatgtgactgcatagcaatctatacctcctctcacacaatctccaccacagtggctcttgaattcacaaaggtgttacatttaacatcaacagaggaaaggaagataaaactaagcatacctgcgttctcaattctgttcctgttataagccctgcagaagacagtttccagacagagggaaggacaatcacaggtgataagaagttagcaattggtaaacctggttagaggggatatgggagttcttgtgttacctgggaaagttttctgtaagtttgattttatttctaaataaagaagttacaatgaataacaacaaagtatcaagccagtgtcatttttttcctcctgaaatgataatgaaaacatcaatgtgaagacttctaaaaaagtatgcctgagaa

SEQ ID NO: 528222 - DNA, 537 bp, Homo sapiens
gcttcccaccatcaccaacaataaccaatcacaatagtccacctggttgtcagcatttattttgtgtttctagatactgtattgccaccatttatctgtaaggtctttggagaccccattagctagtgtggacatgtgactgcatagcaatctatacctcctctcacacaatctccaccacagtggctcttgaattcacaaaggtgttacatttaacatcaacagaggaaaggaagataaaactaagcatacctgcgttctcaattctgttcctgttataagccctgcagaagacagtttccagacagagggaaggacaatcayaggtgataagaagttagcaattggtaaacctggttagaggggatatgggagttcttgtgttacctgggaaagttttctgtaagtttgattttatttctaaataaagaagttacaatgaataacaacaaagtatcaagccagtgtcatttttttcctcctgaaatgataatgaaaacatcaatgtgaagacttctaaaaaagtatgcctgagaa

SEQ ID NO: 528223 - DNA, 537 bp, Homo sapiens
gcttcccaccatcaccaacaataaccaatcacaatagtccacctggttgtcagcatttattttgtgtttctagatactgtattgccaccatttatctgtaaggtctttggagaccccattagctagtgtggacatgtgactgcatagcaatctatacctcctctcacacaatctccaccacagtggctcttgaattcacaaaggtgttacatttaacatcaacagaggaaaggaagataaaactaagcatacctgcgttctcaattctgttcctgttataagccctgcagaagacagtttccagacagagggaaggacaatcacaggtgataagaagttagcaattggtaaacctggttagagsggatatgggagttcttgtgttacctgggaaagttttctgtaagtttgattttatttctaaataaagaagttacaatgaataacaacaaagtatcaagccagtgtcatttttttcctcctgaaatgataatgaaaacatcaatgtgaagacttctaaaaaagtatgcctgagaa

SEQ ID NO: 528224 - DNA, 521 bp, Homo sapiens
gttataggtatatatatatatttttagacaagactcattctgtcacccaggctcgagggcagtggcataatcatggcttactgctgccttgacctcctaggctcaagaaatccgctcacctcagcctctcgaatagctgggactacaggcatgtgccaccatgtctggctaattttctgcatttttttttgtagagatggtggatgtggaactgggctcaagcaatccacctaactcggcctcaacatactgagatcacaggcaagagacaccagccccggccagtgtatcccatttttaaatatagttacattaatatcagaaatttccacatataaagtagagtcaaataaatccagagcctgtttttctctagaggacagagattttcaaatctttcagctactcattttgggatatccaaccgtattgttaaatagcatgcttataattatgttaataattttttttccattttagataaatcttytctttgtggaaacgaaatggttttcttttac

SEQ ID NO: 528225 - DNA, 706 bp, Homo sapiens
atattttaaggggggtatttaacctgctgtgtggataataaatatagagggggcataattgtagaggaggtgaaggttgttttagcaatctaaggcaaagttgattcttgacgtaacataatgatgtggcaggtgtcacagagaataggcatggatttatgagatttaaatgttgaaagagggagaaatacttgatacctgttaggtttccatcttgctaacttcatggatgacagtagtatacacagagttagagaacaaaggaataaaaacttgtatggagaacagtaacttgaaagattttatcttagtttaggttgcctctagaaacagatgctgaggaaattcaagtagctaatttggaagacgattttaggaaatactgataggtgaggagaaactgaaatagggatgaaatgcagcaatgaaggagttgttrtctgaaaattattgcttaagttactatatccagtttccagtagaaaactggatcttgatcctgctgggaaattgtggggctctccatgtgtaaaacaggcacaccattgttatctcaactgggagaaaaggaagctaatatatttaaagatcacacagctatgttatttatagaagaagacttctccttgggtatgttaattccttcacttctggcttgcatgaaggtggcaaagtgggttccagacactgaagtcctgtgctggca

SEQ ID NO: 528226 - DNA, 706 bp, Homo sapiens
atattttaaggggggtatttaacctgctgtgtggataataaatatagagggggcataattgtagaggaggtgaaggttgttttagcaatctaaggcaaagttgattcttgacgtaacataatgatgtggcaggtgtcacagagaataggcatggatttatgagatttaaatgttgaaagagggagaaatacttgatacctgttaggtttccatcttgctaacttcatggatgacagtagtatacacagagttagagaacaaaggaataaaaacttgtatggagaacagtaacttgaaagattttatcttagtttaggttgcctctagaaacagatgctgaggaaattcaagtagctaatttggaagacgattttaggaaatactgataggtgaggagaaactgaaatagggatgaaatgcagcaatgaaggagttgttatctgaaaattattgyttaagttactatatccagtttccagtagaaaactggatcttgatcctgctgggaaattgtggggctctccatgtgtaaaacaggcacaccattgttatctcaactgggagaaaaggaagctaatatatttaaagatcacacagctatgttatttatagaagaagacttctccttgggtatgttaattccttcacttctggcttgcatgaaggtggcaaagtgggttccagacactgaagtcctgtgctggca

SEQ ID NO: 528227 - DNA, 600 bp, Homo sapiens
atggtttgatgactgtatatgtgtgtayatatgggaatataatcatctaaccaataaaatttttcactaggtcagcagcttctgtttagacaggaagaaattatctcaacaataggaagtaattactgctgggagtgtgtgtctctgtgtgtgtgtgggtgcatgtgcatgtgtgtgtacacattaaatggctatactacagtcaagctttcttaccatgggactcattgtcttcaataatagttggaagcattggatataagaatcaattatagaactggtttattcccttgttctatattcatgtaaaatgaaagcaacataacccaaatatcctattatatagagataggatagcctgatttatttagtttcttttcctaattctgaaatttgtgtgaaaaaatcagaaaaattatgcaaataattcacttcatgataaatcttttgaaaggatactctgatataggaacaaaattgactctatatacagtttttacttacaaaaattgaaagcaaaataataaatacacaaatacatttcttatatctgtacaatgcatttctgcatttgtatacatgtaatatgtataaataagg

SEQ ID NO: 528228 - DNA, 600 bp, Homo sapiens
atggtttgatgactgtatatgtgtgtatatatgggaatataatcatctaaccaataaaatttttcactaggtcagcagcttctgtttagacaggaagaaattatctcaacaataggaagtaattactgctgggagtgtgtgtctctgtgtgtgtgtgggtgcatgtgcatgtgtgtgtacacattaaatggctatactacagtcaagctttcttaccatgggactcattgtcttcaataatagttggaagcattggatataagaatcaattatagaactggtttattcccttgttctatattcatgtaaaatgaaagcaacataacccaaatatcctattatatagagataggatagcctgatttatttagtttcttttcctaattctgaaatttgtgtgaaaaaatcagaaaaattatgcaaataattcacttcatgataaatcttttgaaaggatactctgatataggaacaaaattgactctatatacwgtttttacttacaaaaattgaaagcaaaataataaatacacaaatacatttcttatatctgtacaatgcatttctgcatttgtatacatgtaatatgtataaataagg

SEQ ID NO: 528229 - DNA, 600 bp, Homo sapiens
atggtttgatgactgtatatgtgtgtatatatgggaatataatcatctaaccaataaaatttttcactaggtcagcagcttctgtttagacaggaagaaattatctcaacaataggaagtaattactgctgggagtgtgtgtctctgtgtgtgtgtgggtgcatgtgcatgtgtgtgtacacattaaatggctatactacagtcaagctttcttaccatgggactcattgtcttcaataatagttggaagcattggatataagaatcaattatagaactggtttattcccttgttctatattcatgtaaaatgaaagcaacataacccaaatatcctattatatagagataggatagcctgatttatttagtttcttttcctaattctgaaatttgtgtgaaaaaatcagaaaaattatgcaaataattcacttcatgataaatcttttgaaaggatactctgatataggaacaaaattgactctatatacagtttttacttacaaaaattgaaagcaaaataataaatacacaaatacatttcttrtatctgtacaatgcatttctgcatttgtatacatgtaatatgtataaataagg

SEQ ID NO: 528230 - DNA, 590 bp, Homo sapiens
tgaccaaccatgagttttccacaatcatgtttaagttaagagcaagggcaatctttaaggaaagaagtcataaaaggccagcaaagtaatatatatgtacaggaaaggaaagtggaacaatttaattcacttcaatttactaatttggtcatagtgctgggcttcaaggctgatggtatgggctaatagaagatgrctggaaaatctgagtatttttaaaaccatattatccagtaaccaggtcacatattaacatgtagtcagagcaattcatacaggaactctcactgttttattctacgatgatacaaatgttcactgtgcacttctaggtcatcatcaatgatagtcacagtgacagtcaaaatgtggctgtgaggaagaggtgttacgaaaatgagttacatgtgtgtgttcatatatagagtataacctacatgctgagcaatacattttgaaaacattccattctttttgattcaattgatattttaactttgcaaagttggatgagggttttacttactctctctttttttttaaagctctctctctcttttttctttttaacggagtgaaggtcttattgt

SEQ ID NO: 528231 - DNA, 500 bp, Homo sapiens
ctgctcaaaatgaaaaagaaaagaaaagaaaagaaaagaaagaaagaaggaaagaaagaaagaaagaaagaaagaaagaaagaaagaargaaggaaggaaggaaggaaggaaggaaggaaggaaggaaggaaggaaagaaagaaagagaaagaaagaaagaaagaaagaaagtcaagagctcaatcaacctgtgtgagaggaaagaaaattaattcgatggatgtttaattgttggaagcagggattctagtagagtaaggagaagggaaggctgtggattaaaaattagtttttggaaaggtaattagcctggtcacctacggtcttttgagaagatagtggttataaatagcctattctttataagaggagcacgtatctaccagatatggtactttctacagcacctcacatgtggttctaacattattaggctcattttagagtttaataaagtgaggtttatggccagcgattttccagtgatcacagagaggtc

SEQ ID NO: 528232 - DNA, 520 bp, Homo sapiens
ggccatggcatagatttagagggtcaggcctatactgtcactaataaccttgtggttctgatgacacagccagcgtggtccaccatttgggtggcrggaatcaaagtgaaccaggtaaaggacatcaacctccatggcaacgttgtggcaggatcagagagacttggctttcacatccgaggccacaagtgctcctcttgtgaactgctttggtctgacaatgtggcgcattcaagtcttcatggccttcatctctataaggaaagtggacttgacaactgtaccagaatctctggcttcttggctttcaagaactttgactatggtgccatgttacatgtagagaacagcgtggagatagagaacattactctggtagacaatactattggtcttttggcagtagtgtatgtattttctgctccacaaaattccgtcaaaaaagtgcagattgtgcttaggaattcagtcattgtggccaccagctcttcttttgactgcattcaggacaaagtgaagc

SEQ ID NO: 528233 - DNA, 499 bp, Homo sapiens
tactcttaaataggttgactgtacctcctgcatctgcttctttaccactcactcactacctccctgtaactgttttgaatgcctgaaatggccaatactaacttcttaattccagaagtttgacattttcccgggttttatggccctctctcccatactcattcaccctactccactccatggaagttctcttctcttgactaacttgtctgatgcccttctttgctcccccagccatctaaataccatttcgtataaattttcsttctctgctgtcttctctccccatcatgccccagaccctctacttagagaacaacctcttctagagctgtatcaccaatgccagcctctcacctgagctccagtccaaatgttctaagcccctgataggtacttgtagttgaatgatcttttggctacctggcatatgaccccttttactattttgggagacttaaaagattgaagaagctttggtgggatacagaggctatgc

SEQ ID NO: 528234 - DNA, 348 bp, Homo sapiens
ctttgctcttgcgtgaacgagtgacctgccaggtgttctctgaagaacagttagtttggatttgaggagtgtttrgggtaatactacatttgcctaaagggaaagtcactcctctcttctgtccatttctcgtgacaaaacgcccctctaatacacaccaaggaaatgccggcacaggcaaggagatacaggtctcccttcctgttttctaggagacaggccgaaacgctatcttattgtgtgccagtgactttacccaaaaagagtgagtccaggtggtggtccagtgatagtcgctttgagtttacagcagattccgagatttggaataggcactctccttgtttc

SEQ ID NO: 528235 - DNA, 515 bp, Homo sapiens
gcgaggagacgggccctattgatctggcagtggggctgattccacctctcctatttataggccccgcatggccttaaagagaagtaaacattccggagtaaaygggcagaggcgacccgggtccggggactgcaggcctggagtaggcgggggagaaagaactgcatgcaggtctctgggttcagagaaatcgaaatctgatttcttggagaaggtggctgtgggaggaagctgcgggggccccgggggggggggacgggggaagggaggaggatggagagagaccaagggggctgcagcaggttcccgcacgaagcccgccgcccgctgcggggagggtgggcccgggctctgaaatgcaatgtgtaaacaattgctagtgtaacagttcataaatcaaacccagtgagtcgcagcccaatctgcattccccccacggattgaattccagcaacacatgcgtccctgcgcccggagcgctggaagctgcacggattcttaatggcagcatatat

SEQ ID NO: 528236 - DNA, 565 bp, Homo sapiens
catgtacctcaaagtgacagtctcctgtggtcctaatcacaggagcctggcacaaaagataacacagcttggtgctactgaaggatgacggccaaaacattttgtccaaactcctactggcactagattccataagcagaaagcctgccctctggccctagtttggctaaagcttagcaactaaacatgtagccaccattgtttttttcttttctccaaaggcagccttgttatcttaagtcaaagatayaattttcaaatataaatgattcatttttcatactaccttgtaggctgaaacaattatcaatagaaagggagaggagaaaggagagcatatagcctaagaaaggtgatgagagccagggagaagccaaatatggaaagtcaggaccagagacctatcaggtaagcaactgtggaattgctttggcaagttgtaatagagaaagtaaatttctaggatgtagacaatggaatgaacagaagtggtagagagaatgggagagaagggggaagaggaggaggaaaaggcatgaaaggagcttgaacaggattataactt

SEQ ID NO: 528237 - DNA, 599 bp, Homo sapiens
ggctgatgtaatacagaagctttggctccactactctgtgattcttatcttggctctcctctgggtggtggtggctgcattctcaggttgatattgaaatggctacatcagtttgggttcatgtccaatgaagatagtgttcagaaggaaagaggtatgtctagctttttgtttagtttggtttggttttaaaaatttgtttgtttttaatgagatccaaggtaatataggcttctcatgacctgagtcaaaggtagtaagcaggtattggctaaacaagtacaccaagtgttttataaatgsagaactttgccatctggtgttacctccacagagagggagtctatgacttctttcatatcctctttaatatattttaagttaaataattttttaaattatatctaaattctatcttgatacattttaagactacattttcctcatctgccttttgaccaagtgtcaatgtcattatagtaaatcccaatatgctcaaagaaaaacatgattatgtgtatgtacgctgagtaactgattaaaaatggggaaaagtaatgggaattatatgtctaatgccatgtaaacagttttaacat

SEQ ID NO: 528238 - DNA, 684 bp, Homo sapiens
gaacaagatcttattgaaaataaaatatttttaaaaatgattataaaagaacttaagaaaaattgcttatctcccattcagtatgatctagtataaagtcagaagatctcagtcaaattgttccctctcttatcattctattttcatttttattagctcttgtttatactcaraagatggggttataaaggtgataatggtcagatctagaagtgaactctcttactgcaataattatgctttattgatttgttaaatgtttatattctgaaaaaacatttaatagtattaaaatttcaatcattagcctcatactaattaacataaatttcacaccatgcatatcaatcactttattttaatacaaataatgcacttaaaggaaaaatttcccaaatgtctttatttttgacttggcaaataatgttaacaattatatattctaatatagtcagataggggctccatatttagctacatgagtaaaattctgtttccattctgtgttgaatatttatgctaaaatttattttgatttttctaagttgcacatctcttttacataccttctgaagtaaatgacaccctccacattcaaatcaaaagagacagagaagtggcttaaaattcatattaatagttggattcaaaatttaaacattattataaacatagaactgcaac

SEQ ID NO: 528239 - DNA, 336 bp, Homo sapiens
cataataaacattgtcaatgattttaaaaagaatataaaatgggacactttgcacaacagtttggtagtttcttaaaaacttaaacacataggatccagcaattccactcctaggattcacttaagaaaaataagtatataaaaatatacctaggatttgttttaacagttttgaaggctgggggtggtgactcatgcctgtaatcccagcactttgggaggccgaggcgggcggatcacgaggtcaggagatcaagaccatcctggctaacayggtgaaaccccgtctcaaaaaaaaaaaatgcaaaaaaattagctcggcgtgctggcagaccc

SEQ ID NO: 528240 - DNA, 631 bp, Homo sapiens
aattgagtatattagagacacaaatttctaggacttgtaaggattctgtcaaaaatrtgtaacagggatgtattactcttgccctgagaacttcaacttttgcacttcctgactttgctgtggctaaaattgaaataccaaagtggtattccccaaagtgtttgaatttaatagcattaatgactaggcccctacaagtctataaattcttatttgaaaattcagctattctatttgtactttctgtgagtgcttgacttttagtttcctacctgtaaacttttcaaaaagcaaataacctcacctcagacatcaagtccttgtaaggagtgagtgagcagccctacctccctaaagaaacagctatactcaggagaagtcttgtggtttaaatttagctgggtcttatctccttctattccatttaactattatgctctcagagccttggggaaacatgttctgggaaactccttcgccataaaatgttaagaacagagagcaagttaacacttctaagaccatccacatttcaaaagacagtaattctaatgtacaggcattcatggtaatggtgggtttcaggcattgtgggaaggagagacagaacagcaagagagcctttcagcat

SEQ ID NO: 528241 - DNA, 639 bp, Homo sapiens
tgtttcacctatccatggagtttttggttcaattgctatagtttttatttctagatgatgtattgttttaatacatatttttcttttcatatagtatttatgccctttagtcttagtcacttaaaacatgttagataatctgttcttttgttcatttatccaaacttcttagggtccaaagtcccatatttattgtttctggtgatgcagttcttctcatgacagattgtttctgcatgaaatttgtaatttgggattatgagctcatcttcaatggggaatactgtatacaaatatgtagccagattggatatagctagcccttcagagacattttgaatttgcttttaattcatgtcctaagtgaatccttaggctaatttcttaattcagttattcctgaaccacmcacatagccctggttataaattctgagtgatactgtctcttcccttcacttggcatctagatagaaacagataggcatcattatggtgcccatttatttggacacttttcactatcctcttatgtccactacataagaatctaaacctaagcttctaggtcactgagacccattaagtccccttaatgcagatcaatatcagtttgtatcttaccacactgctcttaggt

SEQ ID NO: 528242 - DNA, 623 bp, Homo sapiens
ttcttaaataggtaaaggcaagggagaacaaaggaaaagaggaagttgcttatgaaagatttaaagaagcaataacatttccaaataaggaaggggcataagctataagctaagatttgcctcggcctgtctagacatgcctgagtaagccaaagcaactaactgggctaaagtgtaagaactaacagttgataggaggctttagagtaagaagctattattcctagtgcctattttatttttaaactaagacgagctttgaagaggaacktttctactttctacaagtcattgcccagtattgtggaatgagaaaggacttgtttgtctgggctatgctgagttacagtaaaggaagactagaagccagtgatgagaattttctgtcccctctctttttaggataagccttgattctgccaaatgaaggtacccagatagctctgtttaaacctctgttctggttttagctggtcagtttttggccactaataagactaccctgtgcttcaacctcttgagagtgtcttgtgtctctctccttctagaataaatgggcaagcacccatagagctggtgaatatattgagataaattttacctctcccacccccaatgccaca

SEQ ID NO: 528243 - DNA, 623 bp, Homo sapiens
ttcttaaataggtaaaggcaagggagaacaaaggaaaagaggaagttgcttatgaaagatttaaagaagcaataacatttccaaataaggaaggggcataagctataagctaagatttgcctcggcctgtctagacatgcctgagtaagccaaagcaactaactgggctaaagtgtaagaactaacagttgataggaggctttagagtaagaagctattattcctagtgcctattttatttttaaactaagacgagctttgaagaggaacgtttctactttctacaagtcattgcccagtattgtggaatgagaraggacttgtttgtctgggctatgctgagttacagtaaaggaagactagaagccagtgatgagaattttctgtcccctctctttttaggataagccttgattctgccaaatgaaggtacccagatagctctgtttaaacctctgttctggttttagctggtcagtttttggccactaataagactaccctgtgcttcaacctcttgagagtgtcttgtgtctctctccttctagaataaatgggcaagcacccatagagctggtgaatatattgagataaattttacctctcccacccccaatgccaca

SEQ ID NO: 528244 - DNA, 513 bp, Homo sapiens
atttatatgagggacctagagtwattgaaatcacaggcggaaaacagagtggtggttgccaggggcttggcgaaggggaatggggagtcagtgtttaacgggtacagagttttagttctgcaagatgaaaggagttctgtggatagatggtggtgatggctgcacaacgctgtgaatgtacttaacgtcactgcacacttaaaaatggctaagatggtaaattttctgttatgtatatttcacaacacccaaaaaatctacaccttcagaaatgttctctcctctgtccctcatggacaaggctgcagagattagtcagggccaaatgacaagctgagtgtgttttttttttaattgcattgagcatctgccaatctggacttgatgccaaaggctagtaatgcttacaccctcatctgagcaccaagggcttcacaagctccagctcttcccaccataggagctatcaggggtaacaggccaaccataacagcagggaaccctgagacaggc

SEQ ID NO: 528245 - DNA, 571 bp, Homo sapiens
gtgcctgggctctgtccctcctctgcctctaccatccacaggcaacatcccccgctagacaatgccagcttgaggaggaaggactgaaaaggtgcctgtgctaaagacactgactctagtcccctgggtgtccctgggacccccggctctatcccctgtgatgttactcacttagctgtggcaggcaggtctcaagtgctggcagagcctggtgacccttccctactgctcatctctaccaaggkggcccagtcctgccacccacacccacactcacccaccgtcctggggatgggtgtcaggctacacacattaccacgttcttcataatctccttctacatgcacatggtccctatgacacatttcttggagcagcgtctctgtctctcaagaataaaggacacgaactgcctctgggagaagcaaacctcatcccactacatgttgcaaatgcacagaataattttggaagatgacgccatcttttgccccacaatcaggggtctaactgatccaaatgcccacaatgaagcatcatcgacagtcactctgcagtgggtttagagatt

SEQ ID NO: 528246 - DNA, 607 bp, Homo sapiens
agggttcaggtgctggaggtttctacctgcctagacctttttgattactggctggttcttagagagggacagttttgacggttgagtacctggtgcatgaggttttaccattcttgttactgagtgtgttgcccccttgagtacaatagcagaacatcttctgactaatccagtagttacaggttgaataaggagtgcatccaaggattattggctgtggatgtgcatctggtgcaggctggggaggctgtccagggccatgcctyaggaccctgaatctgacctcctttgtccaaggttttgatcagcaacttggataaagacatagaagccagccttatcaaatttgcgaatgacagaagaccgagatggaaagctaatatattgaataatagaatcaggattcataaaaatcttgacagagaggatgcatctgaaactaacaaggtaaatcctaacaggattacacatgcagtcggcagctcacttcagcagagctggcagcagccaccaatgacgggagaggactggcttgaaggcagtttgtggaattagtaaggtcctgggtttcctaaatgtttatttttaaaagtaattcttccttcta

SEQ ID NO: 528247 - DNA, 533 bp, Homo sapiens
tagtcttggaagaaaaccaagcaagttgtagaggaaaaacaaacagggtagaactgaaatcgataaggcttgagtttgaatccrtgtgtctttgtacatttggagaaattacttaaccttcataaatcttcatatcctaatatttaaattgtaattaaataatatgcaccttggagagttgctatggttattggtgttcaagaaatagaatttgtcatcgttcacattttatggatgaagaaggttaaatttagaaaatttaagttacctgtataaaattgtacagctaaatagcagaactagaacaataatttgagtcaaagaatttcaccttctgtgtttatttcaattatcatttctagcttttacacccaagcttaaatattacctttgcttggaaacctttgagaatgacagagtttctctcctagtttatagcaatctcacttcttttgcctcccgtaatactatctttataccttatttgggactttttatcatatatattataaataatagatgagtcaataagt

SEQ ID NO: 528248 - DNA, 631 bp, Homo sapiens
ttatatctaaggctccttggaaaaaggccttacagtcagatgctctccagagatgttcctctgcaggtgaccaccctgttctctgactgtctccagccaaaactaaatcaktccaggtttgagacaggcttctctgaggccccagggcacctgaatttctctccttgaatgtagtcaattactctgtaccctgtacaggctggccttgacttatttccaccccttgctaggcacaaggccatacttgcagccagtaagagagagagctgaggctgatatgtgcatctcttgaggcaccctgtgcagtggaaagaactctgggagacatggctttgcattctgcatctggcattgtgaccttggacaagtgacttaacctttctgagctttggtttcctcatctgtgaaatgaggataataatacataacttatggggcaattttaatactaaaaatatcatctgtgaagtagtatctggccttgttgatcagggtgggtgcatggggaatgctgattccctttcctgtctctccttttgggcactgctcttcccttcctcaggtctaagctgacagcagacttctctgcaactgctaggatgaactgtctcattagagatgacaacagctg

SEQ ID NO: 528249 - DNA, 631 bp, Homo sapiens
ttatatctaaggctccttggaaaaaggccttacagtcagatgctctccagagatgttcctctgcaggtgaccaccctgttctctgactgtctccagccaaaactaaatcattccaggtttgagacaggcttctctgaggccccagggcacctgaatttctctccttgaatgtagtcaattactctgtaccctgtacaggctggccttgacttatttccaccccttgctaggcacaaggccatacttgcagccagtaagagagagagctgaggctgatatgtgcatctcttgaggcaccctgtgcagtggaaagaactctgggagacatggctttgcattctgcatctggcattgtgaccttggacaagtgacttaacctttctgagctttggtttcctcatctgtgaaatgaggataataatacataacttatggggcaattttaatactaaaaatatcatctgtgaagtagtatctggccttgttgatcagggtgggtgcatggggaatgctgattccctttcctgtctctccttttgggcactgctcttcccttyctcaggtctaagctgacagcagacttctctgcaactgctaggatgaactgtctcattagagatgacaacagctg

SEQ ID NO: 528250 - DNA, 668 bp, Homo sapiens
cagtcagggtcagccatgattatgatgactgtactgggaactggtcttgtggctactgccgtgaacaagacagacaaggccccttcccttgccaatatgtgtagagtatttggggttcaatgggggacgtgatttagagagcagccagggaagccccttagaggaagaaacatttcagctaagacccaagatctcacctgaatgataagaaggaagcaactacatgaggagatggggtaagacagttcacttattaataatctcacagacagattttgctctcatcattacaggagaatcatgtaaatcaacttttaaaattccaatcctagattctcatcgtttttaagttctacactgaaagccmtagagtaccatgcaccatcactgatttctatttgtcagaggtccacaacctaggtttatctgtcaggttctttgtactgataaatgtgagctacagaatccccaagggatgaacaaaatcgactttgtctaaaatgtgtggaattttatgaagacccctgagttaactcttctgttgagttggctttacccttgtagaactgtctctgagtgccatctccctccccttctggtccacagatgttctccaccacctcatcatgatgttggggatttgtgccgtgttataggagttagccagg

SEQ ID NO: 528251 - DNA, 551 bp, Homo sapiens
atcaatttcatttcagtcaaccaatctcattaaaaatccctscccccacttctttggtctagacatgcaagaagcgcacgggaattttaacagcaaatacttctgccaagtgttgagagagtgaacatatagaaacagaaccaaaaatgaagcaatatttgaatgtgaagccacaggtacatattaaactgtgtggaggttttggacctacaatcaaatacaggggaggtagcaattagtcggactcgtgaaacgagggcgccatctagtggctactctcctgttgctgcatccaccaccctccacgtaaaagaccgactacagcctctatttctatggattcaggagagtttgcctctatctccctttacaggtgtaccaaactgcacaaaaaaaaatgcctgaccccttttagaagaacctgacattctcttagaaaaataatcatggaaataatcccccctatgtggggctgctagatggtgatgccgcagcttcaaggccccagtgcttccgaatacctgggcactttggtggacagaagcttctcc

SEQ ID NO: 528252 - DNA, 503 bp, Homo sapiens
tggctggtcctctcttgcaccacttcctccaggtaattggcatacacttccagcttgctcatcacactggccagtatgctcacatgrctttaaaagaaaccagacattgatgttttctcccaagacccttagggcctcagtggaacagagcttccagctacacattccaggaaaatattgcttgcctttcaggtgtcctagttaagggttgccaacggacatcggggaagtgacaatggcattgcagccgcgtgacaggacagagcctgcctttcatcagccctctaagctgcctccttcatttctctgagcctcactttactcatttggaaaatgaagataatcacgcgtacctcatgtacatacgatcacgttgttgttctgaggatgtagggagataacatgcataaagtgtctagggtcacgtccagggccacaggcactcaacaaatggtggccttcaatggcccattccccacctcccaacagacattgagaatgca

SEQ ID NO: 528253 - DNA, 620 bp, Homo sapiens
tgtatcccctttgaaacctgcaggagaatctgacagtgcctcttcttagcttctggtagtttgtctggagcccttggcatttcttggcttatggctgcatcactgcgatcttgcctttgtcatcacatggtgttctcactgtgtttctctgtcttcacatggccgtcttcttataaggacaccagccatatgaggttaatggcccactctattccagtatgacttcatcttaatgatttttgcaatgtcctaacttcctaataagctcacttgatatcctgaaggttaggacttcaatatatcttttttctcttttttttttggcaagagagacaygattcaattaataacatctgcctcacttgactatatttcatttcagggctttttacagtaaactttctttattcctacccccactttatttttgttcaatgagatcttatcgattaattctcacaataattccataaggtaagtcattattattttttgtgtgtgtgaatgagaaacctgctggaggtcatgcagcttataggattcggaggtgggatttgaagtcaagcagttgacccctcttcctgtgtccactcatggagttgtgaagaagaaaggagata

SEQ ID NO: 528254 - DNA, 438 bp, Homo sapiens
gacagcagctctgtgggtggaaacctttttcatccatttctctaaccgataagaaaccagagcaaaggtgaaggctgagtcacagggccgaggggccctgaaactgtgtctttcaatattcattccaagtagctaagaaggaaggatggcctgagatcctgacctacagcctgctgataacttcccagccattcaccagttgctcaagccattgtcttataatagccatggccccaggcagatgggaagggccttattttatttatttatatattwattttgggacagagtctcgctttgttgctcaggctggaatgcagtggcgctatcgcagccccatcctaacatgctcagctcactgcagtgttaacttcccaggcttaagtgatcctcccacctcagccttacaagtatctgagactacaggtgtgcacaacc

SEQ ID NO: 528255 - DNA, 632 bp, Homo sapiens
ggggaagtttgcagttcacaccctgataggtcacagccatgtttacttgctcttatttctagaatagtgagtacgcggtgtgctctacctttaggaatgtccccgttaggaacctgtaagcccgaactgaagagaamcttgctgtcatcacccagcagggcccccaggaatactgtcttccatttgttaggaatccaccagaggcctagtatcttagggcaggaggctggtaaggtcagagctctctgccctctgcctttttcccatttcacagataaggaaactgacgctcaggtagtcttacggacttgctgaagccttttccaggaatgcaccggtaggtgctccctttgcctctcccccagtgtgatcacaggctcatcgcattgcattccacttaggtcaagcacctttttctgcctctcaccttttccctgggggagaagtagagcccaaacatgccaaacctttacttttcacctaaacttgatcaggccactgatttagaaattgaagggaggcaggcagaaagagggagctggaggaaggagagctagaaagttgctagaggttttactaaaacccaccatcctggatacagctcatcttatctgacctaggacgccgaacag

SEQ ID NO: 528256 - DNA, 478 bp, Homo sapiens
ggatttgtagccagtctgtctccaaaggctgtgtttgctcttccatgcgatgcttccttcctgctaagtaccagagagtacagatatagggcccagaggtaggagtgctgtctgccacccaggaatttccagtagggcaagaaatgtagctaacagacagatgattgaactgatactggtgggctaggggaggtccccaaatgctggtgggaccttgaccccagccagtgtgcaagctcttaacaccactgtgagaaggaattcaaggataaatcagaaagtagtgaaagtatggagatttactgcaaagtgaagagtacacactcaggaaaggggagygcgggcagacttgagagagagtcacgcaatggaatttggggcttctaccttcatgagtttctttaaccaaggggtagaacattcatgaggattcctggaaaaaggtggagatttctgggaactgtgatgttacccattt

SEQ ID NO: 528257 - DNA, 577 bp, Homo sapiens
cagttgactccagggacaaggggctatgctggtggctcctgaacaaatgaacacagagatgggcgcatcccctgccccaggcccctctgtctgtgtttctgtccatctgtctctctgccttggttccttccagcagtgttatcagcacctggtctgcctcatttgctcattttcacccttgcagggcatgctgttcctccacaggagccccctgggctcccacagcaacctgaaaccttccaactgcctgatggatggtcggctgcaggtgaagctgtcgtgattcgggctgtgggaactcaagcatggctaaaaatacagaacatatgatgagacagtgaccaaccactcaggtaacctttggttgatcttgcacccactagctattggcagcatggtcagaggttcctggctccatctttgcttcctgatgctcatctgtacaggtatccacaggtgggccttcctctggagctgatgatatgtggctgttccgttcaactgaggagaacgagaaaaaraaaaagtatctgcaggtggcatgagttcgtggggtgatgtctgggtttggagactg

SEQ ID NO: 528258 - DNA, 565 bp, Homo sapiens
gcaaaccatctctgaggtggcatatatacaattcttccaatcaagagtaatccaaatcagatgggcacaggaaccccacttgaaatatctctttttaaaatgtaagcatggagaaattggcaatgagcccaatgatcactgtcttagtccattttctgctgctataattgaaactggataatttataaaaaaatagaaatttatttctcaagattctggaggatgggaagtccaagatcaaggcaccagcaggttttgatgtctagtaagagctcaatctctgcttccaaaatattagaccgtaccttgaacacaatgtcctctggaggggaagaactgttcgtctcttggcagaagagtgcagggagcaaatccactcccacaagccctttttatagtagcattgattcattcatcaaggaaacrccctcataagctaaacacctcccattaagcttcattttccaataccattgcattggggatttagtttcaacctaagttttagaatggataaaacattcaaaccatagcagtcactaaacttaagtataaaccaaatgaa

SEQ ID NO: 528259 - DNA, 534 bp, Homo sapiens
ggctgcaggaggctgtggagcacacttaaacgttacagggcctgtaaggcaagggagctagctgggctttcatagtcctttgcaagtgcctggcaactctccaactgaaattgaactcccaggcatttctggctcctggcatgtctgatcaaagtgttccagaggccccagggtggtcctctaaacaggttgcaggtgtgagcccttaggaggcactaacagacargcaggctttacccacggaactggtaacagagatctgagggatgacaacagcatttgctacaatatttaaaaccactggggaaacctgaaagcacttattatatcatcaaacagaactgaacttaaggctcacctgagcacttacacctgtgccacattagccaaattactgcagcttcttgatcctcggtttccccatatgcagaatgaatgtgatagtaactgcccccgtatgtttacaaagaccaaattagaaaacatgtacaaagcaatgtaaaacagtgccttctatataataactactcaata

SEQ ID NO: 528260 - DNA, 563 bp, Homo sapiens
cttcctatgagaacaaatttgttctcctgaaaaaactttgtgttctggcattctatgtggatttgctctcaacaagtcaaccaggtaaagattcatggcaggacggagttcttaatggtgccatgtgctaaagtagctgaatttcattattgagctacaatgttggccataaatatacatcagacttggaggcacatcctgtgtctgacagtcatgtccatagttggtagtgctgtggttcataaagagagactataagcaacttgacacctcattctggaggtagccaaaagcttactgttgggcctgtcagtgcaagatatctatggtagaactcgggattactgctatagtctgaatgtttgtgtcccctccaaattcatatgttgaaatcctratctccaaggtgatggtatgacagggcctttggcaggcaattaggtcatgagggcagagccctcataagtggtcttataaaagaggctggaaagagtgttttcccttctaccatgtaaagacacaactagaaggtatcatctacaaagcagaaagcaggcccttgc

SEQ ID NO: 528261 - DNA, 582 bp, Homo sapiens
agaaataacacttgaaacgttgatggtgcagtgagaagtgattgataaagacaggagaccaaggcctttcatccagactggctactatttgttatttatgactttttaatccaggttgctctgccttcacttagggattgtgtgaagatcaaatgggagagattatctaaaatcttcmaaaacgataactctaaggtatggttatatcagtagcccatgcagccattctgcatttagaacctttacccaggagcaaagaacaaacagaaagttacagtggaatgagttatatgtctatgaccttgactcagttgcttaaacttcctgagtctcaatttccacatccttagaatgggaaaaataataacactcgactcataggttagcatgagaactaaataatgcattctataaaacaattataataaagattctaggtcatcatgagcattttataaatgacagctaacaaaaccaaacaaaacaaaattttcaggaagagagtttgtcagaaaaagtgcaggaaagcactctctgggatagacaggcctaaatagcatatggtaatggagacccaaggcc

SEQ ID NO: 528262 - DNA, 582 bp, Homo sapiens
agaaataacacttgaaacgttgatggtgcagtgagaagtgattgataaagacaggagaccaaggcctttcatccagactggctactatttgttatttatgactttttaatccaggttgctctgccttcacttagggattgtgtgaagatcaaatgggagagattatctaaaatcttccaaaacgataactctaaggtatggttatatcagtagcccatgcagccattctgcatttagaacctttacccaggagcaaagaacaaacagaaagttacagtggaatgagttatatgtctatgaccttgactcagttgcttaaacttcctgagtctcaatttccacatccttagaatgggaaaaataataacactcgwctcataggttagcatgagaactaaataatgcattctataaaacaattataataaagattctaggtcatcatgagcattttataaatgacagctaacaaaaccaaacaaaacaaaattttcaggaagagagtttgtcagaaaaagtgcaggaaagcactctctgggatagacaggcctaaatagcatatggtaatggagacccaaggcc

SEQ ID NO: 528263 - DNA, 520 bp, Homo sapiens
aaaacctgtttgacttagctttcaggttgtgagggtcaaataaaggattgggtgtaaaggcccttctgaggtgcacctgtatgaggtcggaaacatctgcctcttgcccagctccttcaggataaattaagcagaccaatccctgcctcctaaaagctgacagtccaagatagtgtgaagcagagagtagatggcttcacaggtgagaatgggttaacgacaaaatagcaagcctagagaagtggaatgagtcacatagcagtgctgtgttccttgcgccatggcttckgacagtaactttggttacttggttacggtggtgtctgctgggcttttccactttcatggttgctattttcacctttgtaggaaattggtattttgtggggaggtattttgagactatgacaatatcttgttcatcctgaaattttcacccacaagttttagcctctgctaatgattcttgcctgagtcaattatcgttatgatggtttgcaaattgtcattgtctaattgt

SEQ ID NO: 528264 - DNA, 583 bp, Homo sapiens
ctgtttccacggcttccctgtgcctcaacccttatgaccttgttattccccagaaattctgcagcatggcaggctgggctccccgctccctgggggagccttgtgctgtgtcacttcctcagacccctgcctgagcctgtccccttstgggggaccagagtgtatacctcacctgagctagctttctgttgctgctatacatattaccacaaacttagtggcttagaaccccacactgtattatcttacagttctggagggtcagaagtttgacacaagtctcactggcctaaaaccaaggtgctggcaggtctgactccttctgaaggctctaggggtatattagtctattctcatgctgcttataaagacatacccgagactgggtaatttataaagaaaaagaggtttaatggactcgcagttccatatggctggggaggcctcacaattatggtggaaggcaaaggaagagcaaagggatgtcttacatggcaacaggcaagagaacttgtacaggggaactcccatttataaaaccatcagatcttgtgagacttattcactaccatgagaacagcat

SEQ ID NO: 528265 - DNA, 583 bp, Homo sapiens
ctgtttccacggcttccctgtgcctcaacccttatgaccttgttattccccagaaattctgcagcatggcaggctgggctccccgctccctgggggagccttgtgctgtgtcacttcctcagacccctgcctgagcctgtccccttgtgggggaccagagtgtatacctcacctgagctagctttctgttgctgctatacatattaccacaaacttagtggcttagaaccccacactgtattatcttacagttctggagggtcagaagtttgacacaagtctcactggcctaaaaccaaggtgctggcaggtctgactccttctgaaggctctaggggtatattagtctattctcatgctgcttataaagacatacccgagactgggtaatttataaagaaaaagaggtttaayggactcgcagttccatatggctggggaggcctcacaattatggtggaaggcaaaggaagagcaaagggatgtcttacatggcaacaggcaagagaacttgtacaggggaactcccatttataaaaccatcagatcttgtgagacttattcactaccatgagaacagcat

SEQ ID NO: 528266 - DNA, 598 bp, Homo sapiens
gctggtgaaggagtcctctaaggtggaaggcagggcctgggtgctggtgagtctgatcttgctgctgctgtgtgtatggtaacacctccatggagggcacctacttccccagccacgcacagtgtggtggggctgacccttagaactgagttctggtattccagctctccaagctctggttccatcatgcagccaatcccagggtgcaagcagctccaggaggactgcaagtcagaatgtccccagctcggccactgcgcaggcccagaaccagggtccttcttcctytccagggatcaaattcttctaaaggaggcagacagtcttaaaaagctgcttactatacaaaaacgttgttatacccttctcccaggacacaaaggcctgcttactgacccttcacttacaaactgatggatttttccaaaacaaagaagacctgctttgaggttttgttttttccttctgtctataccctaaggtagctggaaaattatcttgctgaagattaaaaacacaagtttaaactctgatagggctctctactgtaacccatgattgatttcatttagtactctccgcaactttgggaagtctt

SEQ ID NO: 528267 - DNA, 598 bp, Homo sapiens
gctggtgaaggagtcctctaaggtggaaggcagggcctgggtgctggtgagtctgatcttgctgctgctgtgtgtatggtaacacctccatggagggcacctacttccccagccacgcacagtgtggtggggctgacccttagaactgagttctggtattccagctctccaagctctggttccatcatgcagccaatcccagggtgcaagcagctccaggaggactgcaagtcagaatgtccccagctcggccactgcgcaggcccagaaccagggtccttcttcctctccagggatcaaattcttctaaaggargcagacagtcttaaaaagctgcttactatacaaaaacgttgttatacccttctcccaggacacaaaggcctgcttactgacccttcacttacaaactgatggatttttccaaaacaaagaagacctgctttgaggttttgttttttccttctgtctataccctaaggtagctggaaaattatcttgctgaagattaaaaacacaagtttaaactctgatagggctctctactgtaacccatgattgatttcatttagtactctccgcaactttgggaagtctt

SEQ ID NO: 528268 - DNA, 598 bp, Homo sapiens
gctggtgaaggagtcctctaaggtggaaggcagggcctgggtgctggtgagtctgatcttgctgctgctgtgtgtatggtaacacctccatggagggcacctacttccccagccacgcacagtgtggtggggctgacccttagaactgagttctggtattccagctctccaagctctggttccatcatgcagccaatcccagggtgcaagcagctccaggaggactgcaagtcagaatgtccccagctcggccactgcgcaggcccagaaccagggtccttcttcctctccagggatcaaattcttctaaaggaggcagacagtcytaaaaagctgcttactatacaaaaacgttgttatacccttctcccaggacacaaaggcctgcttactgacccttcacttacaaactgatggatttttccaaaacaaagaagacctgctttgaggttttgttttttccttctgtctataccctaaggtagctggaaaattatcttgctgaagattaaaaacacaagtttaaactctgatagggctctctactgtaacccatgattgatttcatttagtactctccgcaactttgggaagtctt

SEQ ID NO: 528269 - DNA, 598 bp, Homo sapiens
gctggtgaaggagtcctctaaggtggaaggcagggcctgggtgctggtgagtctgatcttgctgctgctgtgtgtatggtaacacctccatggagggcacctacttccccagccacgcacagtgtggtggggctgacccttagaactgagttctggtattccagctctccaagctctggttccatcatgcagccaatcccagggtgcaagcagctccaggaggactgcaagtcagaatgtccccagctcggccactgcgcaggcccagaaccagggtccttcttcctctccagggatcaaattcttctaaaggaggcagacagtcttaaaaagctgcttactatacaaaaacgttgttatacccttctcccaggacacaaaggcctgcttactgacccttcacttacaaactgatggatttttccaaaacaaagaagacctgctttgaggttttkttttttccttctgtctataccctaaggtagctggaaaattatcttgctgaagattaaaaacacaagtttaaactctgatagggctctctactgtaacccatgattgatttcatttagtactctccgcaactttgggaagtctt

SEQ ID NO: 528270 - DNA, 577 bp, Homo sapiens
tcccactgacagccagcatcaactgccaggtgtgagtgaagatatcagcagatgattcctgcccccagccgtaaattcaaccctagcctttgagtcctctgtggagcagagacaaatcatgccttctctgtgctttctgaattcctgacctgtagaatctgtgagcattrtaaaattgttactttaagttgctaagttttgggaaaatttgctatacaaatagataaccagaacaaggacaaaaaggaggagtcaagagaagttggaagccaactgagagagagggaaggcttgaagtggtcaggacagtgaacacctaagagacatccactgaatttgcccactaggaagccattagtgacttcaataggaacatcttcagtgcatcatgaaggccaaagattgccatgaaagagaggaatggaaatggagtgtgggccactttttcaataagcttggccatgaaacaagggacagaaacagtggaaattagatggagatgcaaagtcaaaatttttctttaaaagatgttagagagagatttgagaagagaaaaaggttggagatgcagcaggaa

SEQ ID NO: 528271 - DNA, 577 bp, Homo sapiens
aaaagttgcaaagtttcagtcagtgagcacttactaatgagaccaaggttgagggtgaattcaatgagtgagtaccaattagatttttctgtactgagatcaaattgcacttttatgcaaccatgcaaacactgtatgtgcctttgacccaagtaagaacaagacttgataagtgtctagttccttttaagtattttaataactggttggttggatgggtggataacatacaggcaaaatggagatatttcacatctttgctttgtagcttaattctcctgtccttctcttccttacccctacaatttttattagcatcccaatctgcttctctataaggccaccgatgcctgcccttctgggtcagctatcacttctatgcaaaaacatcacacycgtcatccctaattttaaggtttgcttgtcatctactattagcatggtgttgtatgtcatgctgctttggtagcatattcattctgtttgtctcaaaatgtagtgtaattgcatgttgtttgtactaatgatacatcaaagggtttttggaaataagttaatctcatctttactgttgaaa

SEQ ID NO: 528272 - DNA, 523 bp, Homo sapiens
atctctaaactatttgtgttcgtttgatttggctatgaccgttcattagcatttttgaggaaaggaaataatgttattaaaaragtataatgtggatgttaaaacatgatactgaaagtggactaagaagaatagaaccagcccaagagaatttcatgcaatgatggtggattattttagcttttattaatttaaaaaaggaaaaaagttatatgtcattatctcttttatggcattggaaaagattttaatgtttttaagagcatctttttaaagaaccatgttcttttatgtttccataactaattcttcttagctgtaataactcttaaggtggctgcattttgcatttttctattgttcctgtgtattaaatcaaagaaataattttggatcctctggaatgaaaagaaacttaacaaagtttactaccatagatgaagttccccaattctgacccacagaagagagaacaaggtcatcaggcctgaaatctcaagcactgggtcacaattgtgctaaa

SEQ ID NO: 528273 - DNA, 626 bp, Homo sapiens
gcaactttatttatcctccgtaataactagattccaggcaggatctgtcataatagcaacagtaacagcagaaacagcaactaatagtttgccactgaatgtagcatcttaccttattatattgtttaatacttgtcatcacattgtatggtaggtaccataccactattaactactttaatatctggaatcttacctattgtctcatagatagagtagattaggaatcagacccatctgtcccagagtctkggatcttaaccatgtgactatgtaatacttccttattattctgaatttttttgcagtagcctatgaactttctgaagatgtagaatatgccatcctgtttatctttgatctctcaatgtatataagttaagatggggaagtcatggttctcatgatagaaaatgcacaaaaatagaaaaatgcacataaagggcttagcacactagctttctcatattagcagacagaaagctactaattagtgtctgcaaagtcagtgaattatggcattatttgaggtgtcctagcctggattcacagcacacctagagctcagagaatgataaaattgtgctcctttcttcgggtgcttttcagaggcgtccttcagacag

SEQ ID NO: 528274 - DNA, 545 bp, Homo sapiens
gggtccaagggtcaagaagcagagagtcaaaggtatggttagagaaaatgtgttacaagcaaaaaacactgtggggcctgtaatcccagcactttggaagaccgaggtgggcggatcacgaggtcaggagatcgagaccattttggctaacaaggtgaaaccccgtctctactaaaaatacaaaaattagccgggcatagtggcgggcgcctgtagtcccagctrctcaggaggctgaggcaagagaatggcgtcaacccaggaggcggagcttgcagtgagccgagattgggccactgtacaccagcctgggtgacagagcgagactccgcctcaaaaaaaaaaaaaaaaaaaaaaacaacactgtggggaggcaagagtgttattacaagatacttttccaagaccaaagctgaaggatacacttaagcctagtaggaaatgtgtaggagcagttggtgtttgaggaaagtcatgagaggtaacataaagagactgagattcacatgctatttctgtgataaagaaatgttaagtaggcagga

SEQ ID NO: 528275 - DNA, 545 bp, Homo sapiens
gggtccaagggtcaagaagcagagagtcaaaggtatggttagagaaaatgtgttacaagcaaaaaacactgtggggcctgtaatcccagcactttggaagaccgaggtgggcggatcacgaggtcaggagatcgagaccattttggctaacaaggtgaaaccccgtctctactaaaaatacaaaaattagccgggcatagtggcgggcgcctgtagtcccagctgctcaggaggctgaggcaagagaatggcgtcaacccaggaggcggagcttgcagtgagccgagattgggccactgtacaccagcctgggtgacagagcgagactccgcctcaaaaaaaaaaaaaaaaaaaaaaacaacactgtggggaggcaagagtgttattacaagatacttttccaagaccaaagctgaaggatacacttaagcctagtaggaaatgtgtaggagcagttggtgtttgaggaaagtcatgagaggtaacataaagagactgagattcayatgctatttctgtgataaagaaatgttaagtaggcagga

SEQ ID NO: 528276 - DNA, 585 bp, Homo sapiens
ctgatggttagacaaagccatttacacaaggctgggtctttcatcttctctcagccagtgacataagaaagcactgaggttattctcaactagagacgaaaactggcgtattagaaagaatgttattctccttagctgtcacacaaaggatmtgaagaaatgtagaaatgtttttttttcttccctcccccctccctctggtcatctggggagatcacaaagtgactctaatagccttcactctgaaattttcacatggtttaagtgattgccaagtctgatattttccatttacacttcattgccatcagaaaaagaaaaaaaaatcaatatacctacctactcaactgtgtcacaggatgagcttataaaagaagacatcagtctttttagggcatgaaaaatatacttattcaaatatatcttatttaaaatgacataaattgcagtggttagtcaagattcgatttcctctaaaatataagatttaaaatattccttgacttgccagcaatcagaatccttcaaattgttgatatatacagatgtacttgttttctgatgtaagtcattctgactgtattt

SEQ ID NO: 528277 - DNA, 150 bp, Homo sapiens
tgacgtggcagcgtgggggagccaggtctgctgtttcacttaaagtcctaatgtcatttccacttaaaaaaatttttattgggattaaagtgcagcttgtatgatattgaacaatgtggttcmtaaaacaaggaacacatgcaatcttat

SEQ ID NO: 528278 - DNA, 638 bp, Homo sapiens
ctgatgtaaggatgactttgccccagtagggttttattatttctttgcttttgatacttttctaccaggacctgcagagggtggcagagtgctttgctgatctgtcccttcttcctgcctcaggttctcagggccaatttccccattaggtggagcaggcactgtgcctagagcccatgagacttttagggacccatgaaagtgttttaattactttcaaaatcagaagaaaaaatagaatattaatgaatacctaataatgaatctagactatgtcaatttttaaaccaatacagttgtttcaaatacaatttttaatttttttttttttaatgaagagggagccacggaggcaaaagtgctgtcagcccaagaatgtgataatgccaccctgtaggttctggaactcacctcagagagtgagttggcagcatgggttgctgcttgctsttgtttgctcaggtaatggaacaggtggagcctgaaaggagatttgtgtagtgagtatggtaagccatgctgacttcagtgtgggagtgaagaggaccacgtcagagcatttttcagagagctgaaggttgcatcttaaatctaaagtggttgcttgtcgacactagctatttttgatgaaaatttcc

SEQ ID NO: 528279 - DNA, 638 bp, Homo sapiens
ctgatgtaaggatgactttgccccagtagggttttattatttctttgcttttgatacttttctaccaggacctgcagagggtggcagagtgctttgctgatctgtcccttcttcctgcctcaggttctcagggccaatttccccattaggtggagcaggcactgtgcctagagcccatgagacttttagggacccatgaaagtgttttaattactttcaaaatcagaagaaaaaatagaatattaatgaatacctaataatgaatctagactatgtcaatttttaaaccaatacagttgtttcaaatacaatttttaatttttttttttttaatgaagagggagccacggaggcaaaagtgctgtcagcccaagaatgtgataatgccaccctgtaggttctggaactcacctcagagagtgagttggcagcatgggttgctgcttgctgttgtttgctcaggtaatggaacaggtggagmctgaaaggagatttgtgtagtgagtatggtaagccatgctgacttcagtgtgggagtgaagaggaccacgtcagagcatttttcagagagctgaaggttgcatcttaaatctaaagtggttgcttgtcgacactagctatttttgatgaaaatttcc

SEQ ID NO: 528280 - DNA, 684 bp, Homo sapiens
aagtatagcactttggtatgctgaatactttgcactgagggagattggaagggcctcagaagcaagatgttctttctgagcttctcccactctcctttctctttctttcatttctttcccacagcaggtcatagaaactagaacccctctttcccaaagcaaaccataaacctaaaaatgtcagtctctgacctttcttctccccttaaaactctcatttgacaggtgatcctgccttatcctggagaaagaaatgttatgcaagaggccaagaagaagctaaacaaacaagccatgatggattcccatctcagcttattaccatygggacatgtcctttttgtccaatcacatttctacatggcagtacagtcttcatcaaacctaagcattaaaaaaaaagttttctctgggtctttgggtcttttgtttcggaaggctcctgtattacataaaactttgttaaataaatttgttatacttttttcttgtgaatctgtctttcatcataggggtgttagctggggaccttgcaatgagtgaggacaggcattaccgtttcacccctacacttgctacagactatggttaggctaccaggacactcagttgccctttgtggaggaagcaaggatgaatcaacatgtgtagaataggactccctccaagaagtacagatgtgca

SEQ ID NO: 528281 - DNA, 517 bp, Homo sapiens
cagaaaaagtttataaaccccaaattggaatatcttacgtattcctattccatagtagttggttcacaaatgcctccaattaatccactcatgtgtcttgtgttgaaatctgtctgatatggaccacatagtagcttcatgtgtarggaacataagattgaatcttgtagcaaagtacccttttccctttttccaaattttaaatgatagcaatctgaatttgatattgtagaaaccaaactataaatttaaaaatcacaatttctaggctgtccgtgaggactgtgattctgaaggtaaatcttattcccttttattaacaaaacagctattctttgattgacaacatcccgccaagagctgttgtacatatttacctggaactaatagctatttcagaaaagaaagaatgttcgcgtaattggaacttatcaaatcctataggaattagaagtcctgcaaacatatccatcagttctaatgcagaaaacagtgtggaaatagactttgccgtggg

SEQ ID NO: 528282 - DNA, 517 bp, Homo sapiens
cagaaaaagtttataaaccccaaattggaatatcttacgtattcctattccatagtagttggttcacaaatgcctccaattaatccactcatgtgtcttgtgttgaaatctgtctgatatggaccacatagtagcttcatgtgtaaggaacataagattgaatcttgtagcaaagtacccttttccctttttccaaattttaaatgatagcaatmtgaatttgatattgtagaaaccaaactataaatttaaaaatcacaatttctaggctgtccgtgaggactgtgattctgaaggtaaatcttattcccttttattaacaaaacagctattctttgattgacaacatcccgccaagagctgttgtacatatttacctggaactaatagctatttcagaaaagaaagaatgttcgcgtaattggaacttatcaaatcctataggaattagaagtcctgcaaacatatccatcagttctaatgcagaaaacagtgtggaaatagactttgccgtggg

SEQ ID NO: 528283 - DNA, 517 bp, Homo sapiens
cagaaaaagtttataaaccccaaattggaatatcttacgtattcctattccatagtagttggttcacaaatgcctccaattaatccactcatgtgtcttgtgttgaaatctgtctgatatggaccacatagtagcttcatgtgtaaggaacataagattgaatcttgtagcaaagtacccttttccctttttccaaattttaaatgatagcaatctgaatttgrtattgtagaaaccaaactataaatttaaaaatcacaatttctaggctgtccgtgaggactgtgattctgaaggtaaatcttattcccttttattaacaaaacagctattctttgattgacaacatcccgccaagagctgttgtacatatttacctggaactaatagctatttcagaaaagaaagaatgttcgcgtaattggaacttatcaaatcctataggaattagaagtcctgcaaacatatccatcagttctaatgcagaaaacagtgtggaaatagactttgccgtggg

SEQ ID NO: 528284 - DNA, 517 bp, Homo sapiens
cagaaaaagtttataaaccccaaattggaatatcttacgtattcctattccatagtagttggttcacaaatgcctccaattaatccactcatgtgtcttgtgttgaaatctgtctgatatggaccacatagtagcttcatgtgtaaggaacataagattgaatcttgtagcaaagtacccttttccctttttccaaattttaaatgatagcaatctgaatttgatattgtagaaaccaaactataaatttaaaaatcacaatttctaggctgtccgtgaggactgygattctgaaggtaaatcttattcccttttattaacaaaacagctattctttgattgacaacatcccgccaagagctgttgtacatatttacctggaactaatagctatttcagaaaagaaagaatgttcgcgtaattggaacttatcaaatcctataggaattagaagtcctgcaaacatatccatcagttctaatgcagaaaacagtgtggaaatagactttgccgtggg

SEQ ID NO: 528285 - DNA, 389 bp, Homo sapiens
ccatatattgtatttagtcattatatttcctaaagttttttttttaatcccacaaatagcatcctgatcttattttgtgtatgccattgatttgttggagaaaatgtgtcatccaccttgctgaatcctccacattctgagtgtggctgcttgctrctggaggattccatcttgggccagtggaaaccatcttcacattggatcttgtttcctactgacgtgcaagtggtattgagagacgatcaaggatctggagtgctcattgttattggttttcaatacttctaggcatttttaagaaaacagagctaaatatacatgtgtgtacaagaaaaaagtgagtttctagtgatatttacaatcaaatttaagatagcattgttttactt

SEQ ID NO: 528286 - DNA, 389 bp, Homo sapiens
ccatatattgtatttagtcattatatttcctaaagttttttttttaatcccacaaatagcatcctgatcttattttgtgtatgccattgatttgttggagaaaatgtgtcatccaccttgctgaatcctccacattctgagtgtggctgcttgctactggaggattccatcttgggccagtggaaaccatcttcacattggatcttgtttcctactgacgtgcaagtggtattgagagacgatcaaggatctggagtgctcattgttattggttttcaatacttctaggcatttttaagaaaacagagctaaatatacatgtgtgtacaagaaaaaartgagtttctagtgatatttacaatcaaatttaagatagcattgttttactt

SEQ ID NO: 528287 - DNA, 604 bp, Homo sapiens
catttccaaactaaggcttaaaattagagctaaaggaaaatttaagttttaatgtaactacaaacaatgtgagagaaaactatcagtcaagactttggactgaaaacaagactgaagtgcagaatgtactggatttttaagttaaataattaaaatacctgggaatattattgaatagaatggtttataggtagaaatttgacacataaaatcctatagctttatatttcctttcttacagattgttggctataaggacattggagtaccaggtcatcatataaagaccgtaactctttaataaaatgcccagtattggggctaattctgtgtaacaaaaagactaataggttatatttttgtatatgatgcatggctttgtctcctacgcatgaagtactaatgaattttctgaatgatatctgacatgactgaaaagagataaacaatagtttaaatgggactagtttaggtttgtcatgactctttctttattttaaatattttttaatttttttaattttgtggttacatagtagctgratagcttttggtatataaaaaatgaaccttgaagtttatttcaaacctgaagagattaaaa

SEQ ID NO: 528288 - DNA, 618 bp, Homo sapiens
aatcaatatttgtaatgttaccacttcccagacattgcaagggtcttagaaagagttaaaaccatttattttttctagcttgtattctaattatttgattggcatatatggtaaacctcataagccattagtatcattttatgcaagtcaatgttcatgtacaattacttatagatttatcctttcaattgccatttatttattcctgaatttccttgtytctcactaggatcattttcctctgcctgaacaatccctttagtatttaatagaagttttctagaaacaaattctcccattcttttctgattgtctagaagcaactttattttcctttcatactggaaagatattttaatataacatgagctttaagattaggtgttttctttcacattttaaagatgttaaaccactgcattctgacttcaattttgttttactattgagaagttagctattagttttattactgcttcttttttttcatttgagaaagaagaggctttttatttctggcctgcttctattattttctctttgattttgatttcagcagttttaccgagattcaccattgatgtgattgtctttttatttattctgcctgcgagtcat

SEQ ID NO: 528289 - DNA, 666 bp, Homo sapiens
gatctagaattaatttttatcttcttcccttgtaactaactcctctattttctcttattctcctctaacattttcattgtttttttcccccckatggttcttttcttacggctttgaaatgtacaggtaccagaataggtcttgggagagggatgggatagaacaagtgagtttgaagttgcaggtaggggcaacagtggttgggctcaggttcaatgatccttgctctcaagagaggcaaaaagcactatgccagagtctccgtggtggtctaaagggtgcctgagttttgtacttgttagagaaattaagtttactataaccaaaaaggtttaatgtttagaagttaaaagcaagtgaagaatgtctcattctgaaatagaccaaactcaaaagcctaagaatgcagggtgggaatgagcagaagttaggattccaaacaggtcagtaattgaaaaaaaaaatggtggaaataatactaaaaatttaagacacatacatctctgtggccagagagaattgtgtcagggagacaggccctgagaggcaagcaacaaggaaggaatctaggaactgagctaggtcactggtgatgaaatgccagatggtggctatcaaggattcagtactgaccaagcagcattgcccaacacaaaccaaaagcag

SEQ ID NO: 528290 - DNA, 666 bp, Homo sapiens
gatctagaattaatttttatcttcttcccttgtaactaactcctctattttctcttattctcctctaacattttcattgtttttttcccccctatggttcttttcttacrgctttgaaatgtacaggtaccagaataggtcttgggagagggatgggatagaacaagtgagtttgaagttgcaggtaggggcaacagtggttgggctcaggttcaatgatccttgctctcaagagaggcaaaaagcactatgccagagtctccgtggtggtctaaagggtgcctgagttttgtacttgttagagaaattaagtttactataaccaaaaaggtttaatgtttagaagttaaaagcaagtgaagaatgtctcattctgaaatagaccaaactcaaaagcctaagaatgcagggtgggaatgagcagaagttaggattccaaacaggtcagtaattgaaaaaaaaaatggtggaaataatactaaaaatttaagacacatacatctctgtggccagagagaattgtgtcagggagacaggccctgagaggcaagcaacaaggaaggaatctaggaactgagctaggtcactggtgatgaaatgccagatggtggctatcaaggattcagtactgaccaagcagcattgcccaacacaaaccaaaagcag

SEQ ID NO: 528291 - DNA, 666 bp, Homo sapiens
gatctagaattaatttttatcttcttcccttgtaactaactcctctattttctcttattctcctctaacattttcattgtttttttcccccctatggttcttttcttacggctttgaaatgtacaggtaccagaataggtcttgggagagggatgggatagaacaagtgagtttgaagttgcaggtaggggcaacagtggttgggctcaggttcaatgatccttgctctcaagagaggcaaaaagcactatgccagagtctccgtggtggtctaaagggtgcctgagttttgtacttgttagagaarttaagtttactataaccaaaaaggtttaatgtttagaagttaaaagcaagtgaagaatgtctcattctgaaatagaccaaactcaaaagcctaagaatgcagggtgggaatgagcagaagttaggattccaaacaggtcagtaattgaaaaaaaaaatggtggaaataatactaaaaatttaagacacatacatctctgtggccagagagaattgtgtcagggagacaggccctgagaggcaagcaacaaggaaggaatctaggaactgagctaggtcactggtgatgaaatgccagatggtggctatcaaggattcagtactgaccaagcagcattgcccaacacaaaccaaaagcag

SEQ ID NO: 528292 - DNA, 419 bp, Homo sapiens
gctgcatttaattttaaacttacctttgtcattttaaacatagaaacccattcaactatggaaagaactcatgatttttatgtttggtttggtttacattttttttcttgtggcccttaaaatttttttctagcatgtcaccagcacagctatatattcaaaattacgtctgttgcattttattcaaatattttaggtggtttatagtaacaaaggttaattaaaatatacaggaaagtaatttgtaaaagataggtgatataatagtttcttcatttatataattaagaatatataataarttggttgcttcaaaacattttacattaatatattaatgtcattttatcctagtctgatcattactcatagtccattcttgagaagattggtgtagaagcagagtagtcagtcattcc

SEQ ID NO: 528293 - DNA, 419 bp, Homo sapiens
gctgcatttaattttaaacttacctttgtcattttaaacatagaaacccattcaactatggaaagaactcatgatttttatgtttggtttggtttacattttttttcttgtggcccttaaaatttttttctagcatgtcaccagcacagctatatattcaaaattacgtctgttgcattttattcaaatattttaggtggtttatagtaacaaaggttaattaaaatatacaggaaagtaatttgtaaaagataggtgatataatagtttcttcatttatataattaagaatatataataagttggttgcttcaaaacattttacattaatatattaatgtcattttatcctartctgatcattactcatagtccattcttgagaagattggtgtagaagcagagtagtcagtcattcc

SEQ ID NO: 528294 - DNA, 419 bp, Homo sapiens
gctgcatttaattttaaacttacctttgtcattttaaacatagaaacccattcaactatggaaagaactcatgatttttatgtttggtttggtttacattttttttcttgtggcccttaaaatttttttctagcatgtcaccagcacagctatatattcaaaattacgtctgttgcattttattcaaatattttaggtggtttatagtaacaaaggttaattaaaatatacaggaaagtaatttgtaaaagataggtgatataatagtttcttcatttatataattaagaatatataataagttggttgcttcaaaacattttacattaatatattaatgtcattttatcctagtctgatcattactcatrgtccattcttgagaagattggtgtagaagcagagtagtcagtcattcc

SEQ ID NO: 528295 - DNA, 626 bp, Homo sapiens
ctttggcctgttgtaccggcgggatggagatggtgttgggattaggatctagccctgcctttttttttttttaatattctcttcgcttcagcggactcaaacaatgggctcaaacctttggagactaattagttagtctccaaacactgttttcctgagcggaasaaaagacaaaatgccttttaggagatgaatgtcgttataaaggcttccaggcagcctctgtctctaaaggactttcctgtgcagagtcagcaccacatccaggccgcgggtactgacccaggaggaaagggtgttttttcctatctggagtaatcctgggggagggcgggagctgcctagactacagaaagcctcattcctggaaggtcggagaggttttagactaatctcaggatttggcaaccctgtgagggcaggtagagaatccaggcccacgatcgacccagagttctaacccaaccccggcaaagctccccacagggcccctcctgccccaccactcctagcccaaatgcgggactttactccctagggcattcacccagcaatgggctttctctgttatccaaacttattcatagctctctacagcacccaattataatctggtggagtaacct

SEQ ID NO: 528296 - DNA, 453 bp, Homo sapiens
cccatttaataagaaatgaaacagaggccaaacacccagagacgctcaggaccatttctgtccagcaggttttgattacacatgcaatctctgtacctacaagccagaataattccagkattgctattctctatggccatctaacacccaccattgacacgtggatttgaaaaggagtcggcaaatgatctcataactcattaagaggatccctggtttcttccagtcccctgctaaacagtcataaatggcatttgagaatggtagcaaaatttcttggaaaccatctcatcccatgtccttatttctcagcagagacatcaaaagcccaaggcaagtaatgtgacaagtccaaagtggacaccgagctggtcgtgcgcagtggctcatgcaaataatcccagcattttgggaagcaaaagcaggtggatcacttgaggtcaagagttcaag

SEQ ID NO: 528297 - DNA, 453 bp, Homo sapiens
cccatttaataagaaatgaaacagaggccaaacacccagagacgctcaggaccatttctgtccagcaggttttgattacacatgcaatctctgtacctacaagccagaataattccagtattgctattctctatggccatctaacacccaccattgacacgtggatttgaaaaggagtcrgcaaatgatctcataactcattaagaggatccctggtttcttccagtcccctgctaaacagtcataaatggcatttgagaatggtagcaaaatttcttggaaaccatctcatcccatgtccttatttctcagcagagacatcaaaagcccaaggcaagtaatgtgacaagtccaaagtggacaccgagctggtcgtgcgcagtggctcatgcaaataatcccagcattttgggaagcaaaagcaggtggatcacttgaggtcaagagttcaag

SEQ ID NO: 528298 - DNA, 607 bp, Homo sapiens
ctaaagcagaaagccaagcacccaccacaggtgaagccattctggggaaacaaagagtgggtctgggagactcgcaagagaatccgaccagcggcattagaagaatgtcttgatcgtgactatcttcactgatgagctgagcattttccagaactctctgccacagaattcagctcccatatgccctggggctccccagtaccccaagaaaacctgtactacagtgcccaccacatactccagtaatttacttgtgtgtttgtctcccagacaggcagtgagcttcttcagaacagaaaccaagtcttattcattgtccctgacactgagcggaggctttagttcattctgatgaatgaataattggaaaaaagaagtggtcctagtgcaaaatgaatatggccagcagctagaatgccctggawaaatgataccgctacaaggtaagtattaaacaatggatactgggcgggtatggtgttcacacctgtaatcccagcactttgggaggccaaggtagcgagaatcgcttgaggccagaatcttgagaccagcctgcgcaacaaggcgtgatcccttctctacaaataataaaaaaagaaattag

SEQ ID NO: 528299 - DNA, 566 bp, Homo sapiens
aaaactcttatcaacaatgatctcagtgtagaaagtgtaagattagaaggttcaatagttacttccttgttctaagaaacaattcaaagactggtgtttgcaaaaagaataaaagttttaatttttttttttttttgagatggagtctcactctgttgcccaggctggaggagatctcagctcactgcaacctctgtctcctgggttcaagtgattctcctgcctcagcctcccgcgtagctgagattacaggcacatgccaccatgaccagctaatttctgtatttttagtagagacggggtttcaccacgttggtcaggctggtctcaagcttctgayctcaggtgatccacccacctcagcctcccaaagtgctgggattacaggtgtgagccatagcacccggccagaatattttcatctggcttcgcagtaaactgtcataatcagagctgtgatgtcaagttcacagtctcacagtcattttcccagaggtctccaaatcaaacacttatgataaattccctccatgcacatgccacacctcttcatccaaatgacatct

SEQ ID NO: 528300 - DNA, 494 bp, Homo sapiens
aaacctccttggccaagtcttttcaaggagtgggtggtaagtgcctgggagctcgcctttctgtttctaatttctctccgattcttggagagcagcgcgtttctggcatttgcttcagtaagcacrctgagaagggtccaactggcatttatttaattaccataaacagatgtagcactttggcttcaatgaggcagcttcttgatgtgctcatcagccctcctgcttacagggaggctcgcacagggcacgggggtggcagagaacagtcaggttcctgcagtgccagcgcctgccccaagtgcccccaggccaccacgctggggggcactgtgacaagcagacatcatggaggacagggaatggtgatgatggcatatcactcatgtctgaggcctttccttaggtttccttttcattccttccattccagtctctccggcgaggcttctgcaccccttggtgacttttcccagacgtcagtgctgtttaat

SEQ ID NO: 528301 - DNA, 494 bp, Homo sapiens
aaacctccttggccaagtcttttcaaggagtgggtggtaagtgcctgggagctcgcctttctgtttctaatttctctccgattcttggagagcagcgcgtttctggcatttgcttcagtaagcacgctgagaagggtccaactggcatttatttaattaccataaacagatgtagcactttggcttcaatgaggcagcttcttgatgtgctcatcagccctcctgcttacagggaggctcgcacagggcacgggggtggcagagaacagtcaggttcctgcagtgccagcgcctgccccaagtgcccccaggccaccacgctggggggcactgtgacaagcagacatcatggaggacagggaatggtgatgayggcatatcactcatgtctgaggcctttccttaggtttccttttcattccttccattccagtctctccggcgaggcttctgcaccccttggtgacttttcccagacgtcagtgctgtttaat

SEQ ID NO: 528302 - DNA, 507 bp, Homo sapiens
tgcaaagcaaacacataagcaaaaagtatgttaattcagggggtaaattagggcattttcatatattcttgtgattataaagtagtatgttcaagttttagtaaattaatattacgttatcaggtatgcaagaggagtgagaaccactaaggtcacatgtttatggacataaaacattgaagggggyatagaaaaatgcaaaatgagggaaagtggaaacagagaaaatgaaagggttaaggttgggattcagaggaaaagagaagggaaaatagatgacttggaggtattggttccaaaagtgtgacaagagacagcacagaaacagggcctcctgagcaaacatgactattattgttgtaggaccttctccttagtccagctaaaaacagggtcattgtcacacaaccatgagagattaggcttgcagacactttgaagggtgagaaaaatggaattttttgggcaaaaggggcaaaaagggaaacaggaggtctcagcaaagcg

SEQ ID NO: 528303 - DNA, 220 bp, Homo sapiens
aactccccggatgggaaactcagcaccttgcctctctcctaacataaaagatggactcattggaagttcctttcctgtmctcctgtgtaaggcaggcaggactgagtgccgggggaggggccgtgtctgtagcgacagtgcctgacagtctctgtgaggatagatctgtccctctgaccactgctgttgggcaggaagagcattgcctgttgtccattac

SEQ ID NO: 528304 - DNA, 613 bp, Homo sapiens
atatttaagatggaattttctaacttatagtaaaaggtcaaacttcttgaataattcagcacattaattttaattaagaaatgagtcattgacataaggcacattcattaattgaaagaagaaatcttgattgtttttgttttgttcgtttgtttgttttagagacaagatctccctctgccactggagtataggggtactggatcatagctcactacagcctcaaatgcctggactcgagcaatgctcctatctcagcctacagagttgtcaggtctacaggcacgcaccaccatgcctaattttttttttaattattttttgcagggacagtgtctcrctttgttgtccaggatggtctccaactgctggcctcaagcaatcctcctacctcagtctcccaaagcactgggattacgggcatgagtcactgcacttggtcctggaagcagaaatcttttcagtcagaattttagcaggaaaacatgccactgggagatgtacttggtacagtgaggcagatcatcttacctgtaaattattcttatttatccatggtatatccatggctataaaatgccactataagtctactgtaatcacaggacaaaaa

SEQ ID NO: 528305 - DNA, 509 bp, Homo sapiens
agctgaactacctcggcagaagatgcagataatctttctaaattctgttaccctggggaattagggaggacatagccctgtgtcaggatcctcaggtgaccattcaacagcttttgattgttttagaagttaggcagcatttcttttttgctacatgttttcctgcactatggaccatgcccctaatatatsttttctctctactgttttgtacttctttcaagagtctcaggtaagtttaaagtgactgacttcgctttgaggttccacatttccttctctaacacaggtagggcagtgctgcttgctgtgttcaagtgccttctttccattatattttcctttgttttttggcccagatattttattttctaatataaccctcctgttttcatcttccataatgaaatgaaataaacacattcagaataccaaaaattttgggtgaatagataaaccaatcttagactcaaactatcactgttacctggatcctctctattaagcct

SEQ ID NO: 528306 - DNA, 665 bp, Homo sapiens
ctgtcaaacagtagacgtttaaaatgtcagtctcctgctcagcagaggaaatatataattacaggtttctagataagaactcttttctcttgctgttctgaatctatatttaatcatttaacgttattctcacctgtcattctatttgacaaaatatttagagaagtctttagaatacaaaaattagattttcattctaatagaatagaaagagcaaacaccactctcattgcaaatgcttgaaagtaattaaacttgtatagtcggatggagaatggaagtctygtttcttggcccattctgggaagagagggtgaacacatcactgagaagcaatgcaatatatggcacgtttatcataaatgaaaatgtgtttcaagcacatgacattcatatttgattcaaaagaaaaaaaattttttttccaaaagagcaagttgttaagtctgctctctgaaccccacctgaactcattgctcattacagaaactgtgacgtaaagataggcacctttctcaaagagacagatttttttttcccctaagtcattccaggttttcccctccacataggaagtcatctccctcacatgacatgattcccctttattagaggatttactgtgatttcaaaacaaaactaaagggttggtaggttggggagca

SEQ ID NO: 528307 - DNA, 601 bp, Homo sapiens
gatccttttgccagttgcagttttactcttttctcttttyctgacgatacttatcattctcgaaaagaatcttacttgtcctcttgtttacttgtttattctctgattccactatactctagaattgaagttccaagctagcagagagcttccctgtcttactgactacagtattctcagtgcctagaataccacttggcacaacaatatctatttgttagatgacaataactacttgttatcatcgtgactgcattattgtttttcacaaggcagagaaatatttctctgtatgcccatgaccttatgtaaaggacttgaggaaagaagttacattcaaagaaacaaaaatccaacagagcttctggtctatttgtatctggtcatttcactgcctgcaatataaaaacaatgggatctaaactgatggtaattaacatgacttttaagatcattcagagagtttagtatggaccactagaagcatatttaaaactattaatttcccagtcatgatccttcctctggtttaagtaaaaggaagaaaatgtatttttttcatttatatttgtttcattgagaagccttaattgtatgtatt

SEQ ID NO: 528308 - DNA, 601 bp, Homo sapiens
gatccttttgccagttgcagttttactcttttctcttttcctgacgatacttatcattctcgaaaagaatcttacttgtcctcttgtttacttgtttattctctgattccactatactctagaattgaagttccaagctagcagagagcttccctgtcttactgactacagtattctcagtgcctagaataccacttggcacaacaatatctatttgttagatgacaataactacttgttatcatcgtgactgcattattgtttttcacaaggcagagaaatatttctctgtaygcccatgaccttatgtaaaggacttgaggaaagaagttacattcaaagaaacaaaaatccaacagagcttctggtctatttgtatctggtcatttcactgcctgcaatataaaaacaatgggatctaaactgatggtaattaacatgacttttaagatcattcagagagtttagtatggaccactagaagcatatttaaaactattaatttcccagtcatgatccttcctctggtttaagtaaaaggaagaaaatgtatttttttcatttatatttgtttcattgagaagccttaattgtatgtatt

SEQ ID NO: 528309 - DNA, 581 bp, Homo sapiens
agaagaagaaaatgattttagacatacttctccattatggtactttctaattcagtgattctcaatttgggctgcatattgaaattacctggggaaattatactgcttccagggttttacccttccctggaaaatctaaaatgattggtttagggtgtggtgtggccactgggagtcttagaagttcccctggtgtttttaaygtgcagccaaggttgggatccacagttctatctactatggataattgatatctcactgaagaagtaaattcaaaaacaatatataactcttgaacgtcttactgaatttgaattatacttcggctccatagatagaattataaattgtattgcttcaatatagatcccaggtactaatgccccttgaaaacttgtattataatcatgccagtataattagaattggaaagaagagtcttttgagagatctaataatgcttttaaatgatgtgaaaatcaagttatgctctagccttttttcttttaaacttatatttaaaaactaatgcagctacaaaaaaataagatatgtgcccaactgccatatacaagaggaag

SEQ ID NO: 528310 - DNA, 580 bp, Homo sapiens
ttgtgtttgaaattatttcttctttccctgatctttttccgcctttcaagacacaagtaaggccaggcgcgtgggctcacacctgtaatcccagcactttgggaggcaggggcaggcagatcacctgaggtcaggagatggagaccatcctggctaacacggtgaaaccccgcttctactaaaaatacaaaaaattagccaggcatggtggcacgcacctgtaatcccagctactygggaggctgaggcaggagaatggcttgaacccaggaggtggaggttgcagtgagccgagatcgcaccattgcactccagcttgggcaacaagagcgaaattccatctcaaaaaaaaaaaagacacaggtaaaactaaaggcttcctgtttgctccccagtgagggtctcagaggccaaatagctcctgccccagtggggtgttggtcctctctccccaagcagcatcacagccttacagcccagcccctggtgtcctgatgcctgaggattcagtaaggaagcagagagccccagcctttctaagggcacgcagaccaccctcccatagaattactcaccgacc

SEQ ID NO: 528311 - DNA, 666 bp, Homo sapiens
ccagcccttgcatcctaagcccaacatcctggagggcatgtttggctcagttctggtggctgaatgtggaaatttaggtccaaaatctgaaataattaactccaaaatgtaacctgaatataacaggcactactcacagacaagcgagctagcatctaactccaaaagcctcaccacacactgagacttcctaaaactccacttgactcattctctctccaaccccacaccacagtcgctgctccagtctttctttctcactctttcctaggctctccttccttccttccttycttcttttcttgtccctcttttctcttgcctcccagaagattcagattcagcactttccaactgtgtgaccttgaacaagttgctcaacccgtttccctacctgtaaaacagaggtgataacaggagagaccccacaggtttgttgcaggattaaatgagatcatgtgcataaggcagctagagcggcccctaacatctagtaagtgctcaataaacatcctcaattctttatacacatggatattttgtgtaccttctttcacatttctgaaatttaaggtcgtggaactggaatatcaggtgtaaactgggcttccggggggtagattacagagtgggctgaaggcagaaaggggttggggtgggaaggga

SEQ ID NO: 528312 - DNA, 653 bp, Homo sapiens
ctgacaaaaggagggatctgcgtgaattacagcaaatcaaatgatttccacattataaaagcaagccatggcttctacagatattttaattccttgggaggaagtttcacctcatcttttttccccagtaaagtaacaatcactgtaggaatttttaagtgcacaaactgcaaaataagagtaactacctctgccatgttcaagcacttgggcaattcagtcacttttagggttgtatcatttaaaaaaggggcaacatttatgaattatctcatcagatgcatggtgtttttcaatccagattcaagagtaactattagagttactcattgagcttaatggaaacatcaaaccgacgagtcctttcatgggtggtaaacatgactgggagacaatggctaacttgccccaggtaaggtggctcttcagtggcagagctagaactagaactagaactcagatgtcttgattcttggggtagtgtacccctcctatggaccagcaagataaayaacccccaaaggacatcacacatactgaaaactaccaaatttgttacatatatatatatacaacgtgtactactgagaatgcaaagaaactactggatttttagaaatagacatgtctctccaggtaggagtcaatggtga

SEQ ID NO: 528313 - DNA, 395 bp, Homo sapiens
ggctctctcataataagctcttgcagacacatattttccctgggggtgggaaagagggagcaattacattctgatccatcacaaaactctctcagagaatgaagagactaagaaactgaccctctgcccagttttacattaatgttctcatatggaaacyctgtctgtatgtgtaattttatccttgtctattggtgcttttgaagactccatttgttttaagcactagatcagttgcagaatgtgaaagaggagagttatactgtaaggataaatggcagaaaaacagattttcaattctactaatgcagggtgtgaggttatcatttcctggtgtcctcagggggctagtactgttccttgtaaaatggaaccatggcacaaaattcatgtta

SEQ ID NO: 528314 - DNA, 651 bp, Homo sapiens
tacatgttcattgtggtactattcacaatagcaaagacatgaaatcagcctaagtgcccatccacagtggattggataaagaaaatgtggtacaaatacactgtgaaataccatgcagtcataaaaagaataaaattrtgtcatttgcagcaacatggatgcagctggaggctgttaacctaagcaaattaatgcaggaacaaaagaccaaataccatgtgttctcacttataaatgggagctaaacattgtgtacgcgtggacacagagatggggacaatagatactagggacaccaaaacagggaaaaaggctgaaaaactacctataaggtactatgcttgctctctgggtgacaggatcaagtgcaccccaccctcagcatcacacaataaacctatgtaacaaatcgtcacatgtaccccccgactctgaaataaaagttgaaattgagaaaaagaaaagtaaaaacaaaacgcttaacaacaaataaagtaaagtaccttcattccttaaagcttttgcttgtgttgtttctttgctccggaaagccacccactcccacctgttctacctactatcacgcatttatctctaaagttctaaatcaaatggcactttaaccttgacattcctgatactttctagtca

SEQ ID NO: 528315 - DNA, 651 bp, Homo sapiens
tacatgttcattgtggtactattcacaatagcaaagacatgaaatcagcctaagtgcccatccacagtggattggataaagaaaatgtggtacaaatacactgtgaaataccatgcagtcataaaaagaataaaattatgtcatttgcagcaacatggatgcagctggaggctgttaacctaagcaaattaatgcaggaacaaaagaccaaataccatgtgttctcacttataaatgggagctaaacattgtgtacgcgtggacacagagatggggacaatagatactagggacaccaaaacagggaaaaaggctgaaaaactacctataaggtactatgcttgctctctgggtgacaggatcaagtgcaccccaccctcagcatcacacaataaacctatgtaacaaatcgtcacatgtaccccccgactctgaaataaaagttgaaattgagaaaaagaaaagtaaaaacaaaackcttaacaacaaataaagtaaagtaccttcattccttaaagcttttgcttgtgttgtttctttgctccggaaagccacccactcccacctgttctacctactatcacgcatttatctctaaagttctaaatcaaatggcactttaaccttgacattcctgatactttctagtca

SEQ ID NO: 528316 - DNA, 573 bp, Homo sapiens
tggtgtacctgtaacagatctaaaattatgagcccaactttgcccccattcccacctacacatatttatatgttatagtttcatatttcactcccttttgacagtatattaattactcttttataaacatcccataattggcttatcatgtaaattcaactatttatttagaggcttcaggcgcatagcactttaaaatcttttgaagtgttttctttctcatcaaattaaacaactatacacagctataatggatcactaaggactaaccttggwtaagatgttgatagcttttaagaacttcaaatgctgtgatcattactcatgtatctaagagtctaaacttcataccaaggggacatgagtactataaactatttcccttgtattaggtgaaaaatcgctcctgatatcccttattacctgctgggataccaactattggtcaatttcagtagccaaaactacttagtcgaatccatacccttaaatactaccattattttttaatgaaataaattaaacatttaactttaagaacttagaaataaagcgatggcacaaacaataaag

SEQ ID NO: 528317 - DNA, 607 bp, Homo sapiens
tgcctcactcagaccacgacttttaattttttattctccatcagggattgtagattttctgatggttacacatttatagatccaggcagggtacctccatgggcttgtaggaaccagacttgtagctgttgtacctgttgctttagatgattaagttcaactatctggcgatcaatattaacaacaggtttgttcctggtktttcttgctctgtcagcatagcgaagggtatttagtttcctctagattggagccagcaggactcacacagcctattataagagtatggttattaccacttagagaaccttgaagcagtcgagccaacttggaatctccgtaggacacaaagtcaccctttttgtcttctccaagagcactgattacatttcccaagcatagaaggcctcggttaatattaataccctcttttagatgatccccttcagccttggttttcttctctctttctgatccagcgaggtctacaagatgtagcttggagcgaaagctgctattcttgtcacttttctttctctgctctatggagattgtaaagatggcatgagattgggatgactgggggttcatagctgtggaggccaca

SEQ ID NO: 528318 - DNA, 641 bp, Homo sapiens
aataaccagccagagaggtaagtcatatgtgtaaagctgtaggaggcaaagaaaagatttaagataaaataaggatatgtgaaacacaaatgaaaggatggattagatgttcaacaatatattgagtgaatggtatttaaagtttgagcaataggacatatccttactattttttaatggattagaccattagagatacagtgtccatctatggctaagaaggacatctgtagccacrcaaactggaataagcctataaagcttctttttctttcctttttaagatataagatcatcaacagaaaataaagaaacccccttatgtctgagggatgtatgctttcaaagtacattgagagcatactgtgtgttactttttggccttccagcaatttgctagtggaagagtctgctaaatgattaaatcccgtatgtccaacttagaagctttttggttcagggtaggtagcatattcctctcgcaccaagtggctcccgaactttattgtaaggtctagtgcttcctatagaaacagcttctggctggacactcaatgatttcacatggaccaagagtgattggtcactcagtttcattcaattctggggactgtgatgagctgtgtgggttatgcttttac

SEQ ID NO: 528319 - DNA, 590 bp, Homo sapiens
aagaaatgaatgaatgaatcgtttagtatctgtctctgtgtcatcccaagatgctagttctgctgactcaycttattcagtttgagccccctttaatactaattttgtttacagcttagattgccttaaaccatttatgtcaatgtgtttatattcatacatcaataagtgttgcacaagggttgttaaatggatgtgtaaccctatcttcttgtttttacctgtctcttaaagtcaacctggccactttaaaattagtaatgcaccttcattcctaaactgattatgaagctcaacttttgttccataaaattctagttttcttcctaacaacctgctataagtctttgactcttgagtctaacagttatcttcatattattattgttgttcatgttataatctctgaatcctacctattaagaaagtaggcttagaagtaacattatggaataagtcttgcctggtgcagtgattcatgtctataatcccagcactttgggaggccgaggcggtcttatcacaaggtcaagagattgagaccatcctggccaacatggtaaaaccccatctctattaaaaatacaaac

SEQ ID NO: 528320 - DNA, 580 bp, Homo sapiens
tgcagtcacatttcatataatggtcgtgactaaaagtctcacaaacctatccttccttaggcttagacagtaatgtccaggccacacagcaaaccccttattccccctgccaggttgatattgatcctggtaatagcattgrttctcagggattttcagcagactacatttgattattttgtagcttactcaccacgtttatattgcagctttagaaagtgagagaaagctgccataactactggattggtcattcttgctagatcttaggtttccacctttacagcaatagacagaaattttatgaaatcatgcagtaatctgaagctgtcatggatgctaacaattaagatagcaatcaatcctttaaacatacttgtaaacctcagttttttatctactccagaaaggtcataaaataacactaattactgtggaaatttttcaaaaccaaggactacagatatcacaagccattccaatatggcatccagttgactgtctggaaaagtgtctttttcacatttgtagttgtgtgttcattggtcaaacctagcctgtacccccacaagtggggacc

SEQ ID NO: 528321 - DNA, 555 bp, Homo sapiens
tgcacaccatttaacaacataaatgtccacactttggacattactccccatctctgcttgtagaagtgtttgtgtgagaggcatcaagtgactaaagatatrtttttaggcatcaactatattcaattcttgtgataagccccaaagtaatacagatgatgtggaagatatgtatttcacgttacttaactaatcatcaggtaggtaaagtatgaggttgctactaaaagattttaacctccatggtatagaaaactcttgtttaatctcagaggtcccatggtctgtaataaaatataattttgatatgaaagaaattatatcatagtcatttaatgctatgctggggaagctggtcaattgcttatcaatttacaacccaagccccatctcagtttctcagacttgccctgtgcattcttgccccttaacatttgtagatgatgttgcttttgcctggatctttcttcctgtcccacccctatttcctacactttttgtagttaactctaacttgttatccttcaggtcacaccactgattattgtatatatc

SEQ ID NO: 528322 - DNA, 620 bp, Homo sapiens
tcggtggtgatacacttaagttcacaatattattgcctgtaaatttcctgtgaatacacaatcaactgacaatcctttattgcccatatcagttctagatatggtaagagatcaaaacaaacatatgacacacatcatcctggaggagcctacaggaatttggtgagacagaatttacagacataaagaattaaaatgcactagaagataataaagaatcaaattttatgaaacatcttgctctatctawccactattgttatccacatttttccccaaaaaacaactaaagtttaccctgtgaagcctttttttgaattttctagcttatagattcctctcttaggcactgtctatttaaatcacatctttatcaattagtatatatctttgcctttttaattaaaaaaaaatatacaacctacttctccgattagtttataagtctcttgctcaaggtccatatattattccttctcatatcttcaaagccagatgctttgttttgcacaatgaaggtactactcattttttccagattatcataaaaatgatgacaattgttaatgaagtatgaattcacagaacaaagcagaacaaagcaaccacaaagacaacag

SEQ ID NO: 528323 - DNA, 546 bp, Homo sapiens
aatcctttattgcccatatcagttctagatatggtaagagatcaaaacaaacatatgacacacatcatcctggaggagcctacaggaatttggtgagacagaatttacagacataaagaattaaaatgcactagaagataataaagaatcaaattttatgaaacatcttgctctatctatccactattgttatccacatttttccccaaaaaacaactaaagtttaccctgtgaagcctttttttgaattttctagcttatagattcctctcttaggcactgtctatttaaatcacatctttatcaattagyatatatctttgcctttttaattaaaaaaaaatatacaacctacttctccgattagtttataagtctcttgctcaaggtccatatattattccttctcatatcttcaaagccagatgctttgttttgcacaatgaaggtactactcattttttccagattatcataaaaatgatgacaattgttaatgaagtatgaattcacagaacaaagcagaacaaagcaaccacaaagaca

SEQ ID NO: 528324 - DNA, 620 bp, Homo sapiens
tcggtggtgatacacttaagttcacaatattattgcctgtaaatttcctgtgaatacacaatcaactgacaatcctttattgcccatatcagttctagatatggtaagagatcaaaacaaacatatgacacacatcatcctggaggagcctacaggaatttggtgagacagaatttacagacataaagaattaaaatgcactagaagataataaagaatcaaattttatgaaacatcttgctctatctatccactattgttatccacatttttccccaaaaaacaactaaagtttaccctgtgaagcctttttttgaattttctagcttatagattcctctcttaggcactgtctatttaaatcacatctttatcaattagtatatatctttgcctttttaattaaaaaaaaatatacaacctacttctccgattagtttayaagtctcttgctcaaggtccatatattattccttctcatatcttcaaagccagatgctttgttttgcacaatgaaggtactactcattttttccagattatcataaaaatgatgacaattgttaatgaagtatgaattcacagaacaaagcagaacaaagcaaccacaaagacaacag

SEQ ID NO: 528325 - DNA, 591 bp, Homo sapiens
ctggttgctaaacacagccatttttttttaaaaattacattgtataagttttaatataggaaaacaaaaacaaaggtaataaatgattaaaactcatcacttcctaattmcttaaatacattttactactctctgtgcttactactcttgatgcttttaaggttatttacatgtgttttacctgtatagtggaaacattatgtaatgatgaactaattcccatcctttcccaactcacatctcacattggtagcttgatatcagccataatgagagtatttacaccatgaatgttgctaaaagctacaaatcagttatttttatattttcagagagttggttataaacataaaccagcacagcattgaaatgctataaagtccattctataggccaaattgggatggctgtagaggaacagaaaaaagttagctggagagatctcttttcttggccctgcattgtacctttcagcaggaagttagagctcaggatagcaagaaaaagcaaataaaggatgctattacaaataatgaaggcagagagatttgaccgggattgtgaagaggggataaggaagacttagatcct

SEQ ID NO: 528326 - DNA, 591 bp, Homo sapiens
ctggttgctaaacacagccatttttttttaaaaattacattgtataagttttaatataggaaaacaaaaacaaaggtaataaatgattaaaactcatcacttcctaattacttaaatacattttactactctctgtgcttactactcttgatgcttttaaggttatttacatgtgttttacctgtatagtggaaacattatgtaatgatgaactaattcccatcctttcccaactcacatctcacattggtagcttgatatcagccataatgagagtatttacaccatgaatgttgctaaaagctacaaatcagttawttttatattttcagagagttggttataaacataaaccagcacagcattgaaatgctataaagtccattctataggccaaattgggatggctgtagaggaacagaaaaaagttagctggagagatctcttttcttggccctgcattgtacctttcagcaggaagttagagctcaggatagcaagaaaaagcaaataaaggatgctattacaaataatgaaggcagagagatttgaccgggattgtgaagaggggataaggaagacttagatcct

SEQ ID NO: 528327 - DNA, 591 bp, Homo sapiens
ctggttgctaaacacagccatttttttttaaaaattacattgtataagttttaatataggaaaacaaaaacaaaggtaataaatgattaaaactcatcacttcctaattacttaaatacattttactactctctgtgcttactactcttgatgcttttaaggttatttacatgtgttttacctgtatagtggaaacattatgtaatgatgaactaattcccatcctttcccaactcacatctcacattggtagcttgatatcagccataatgagagtatttacaccatgaatgttgctaaaagctacaaatcagttatttttatattttcagagagttggttataaacataaaccagcacagcattgaaatgctataaagtccattctataggccaaattgggatggctgtagaggaacagaaaaaagttagctggagagatctcttttcttggccctgcattktacctttcagcaggaagttagagctcaggatagcaagaaaaagcaaataaaggatgctattacaaataatgaaggcagagagatttgaccgggattgtgaagaggggataaggaagacttagatcct

SEQ ID NO: 528328 - DNA, 612 bp, Homo sapiens
tggacagaggcaatggaagtgtmtctaactacttgggagactgaggcccagtgacattcaaaggtctaacaaagaagccaatagcattccctaggagcactgaggggatgcaggtactatattgctcctaactggtccaagagacttcgccattcctaaaggtgccaggccttcctacaaatctagctttgcattgttgtctccttgcgtggagtctccttcctccccaccttcccagttggcaaatgcctactcacccttaggttcctgtttagacatcttttcctccaggaagacttcccagtccaccctcagtaggttaggggcccatctctcagccttgttccctccactccccaccctccatacacatgcacactttatgctttcctctatcacagcatttatcaaattataaagcatttattaaaaaaatctgttcacctattagtctttcccatttgactgtgggatctttgagagcagggactgtgtctcacttgccttagcctccttagcacctcatattaggggctcaaggaactactgtggaatgatagagcggtgagaaaggataaaggaaagaaatgagaggcagacagggaagaacag

SEQ ID NO: 528329 - DNA, 612 bp, Homo sapiens
tggacagaggcaatggaagtgtctctaactacttgggagactgaggcccagtgacattcaaaggtctaacaaagaagccaatagcattccctaggagcactgaggggatgcaggtactatattgctcctaactggtccaagagacttcgccattcctaaaggtgccaggccttcctacaaatctagctttgcattgttgtctccttgcgtggagtctccttcctccccaccttcccagttggcaaatgcctactcacccttaggttcctgtttagacatcttttcctccaggaagacttcccagtccaccctcagtaggttaggggcccatctctcagccttgttccctccactccccaccctccatacacatgcacactttatgctttcctctatcacagcatttatcaaattataaagcatttattaaaaaaatctgttcacctattagtctttcccatttgactgtgggatmtttgagagcagggactgtgtctcacttgccttagcctccttagcacctcatattaggggctcaaggaactactgtggaatgatagagcggtgagaaaggataaaggaaagaaatgagaggcagacagggaagaacag

SEQ ID NO: 528330 - DNA, 581 bp, Homo sapiens
ttttgaatacctgtcttgatagtctgcccagtgagccatgttcttttatccttgatatttttcttttaggacatagaactctaactctaaatttttgccccttttctggggccattagcctttagcacatgcttgattctcactgcaaagtcctggatcccaactctgagctaacatttacctgccctgcccaagggggtctgtatgaaccttcccaacctgatatcataaagctttttcctctctgaaagtctcttttcataaagtttatattcctgccaaggtcttgaccgagaggtctgtggattctaagaaggaaatgctgtagtcaggtggggaggtcatgagaaagatggggtcacagaaatggtggtagcttaataacaggaaaggcagatggaaccatgcctccttcataagggagaacctcacwcaaagatgggctttaaaaagttgcaataaacacagaactcagaattaaggtgagaaagagagaaaaagaaaacatgctctgaatataccacatactgagcaacacgaaattattaatacacatattatctcatttcatgttcccatct

SEQ ID NO: 528331 - DNA, 511 bp, Homo sapiens
cttcttcgtattgatctcctgacctttgtctgtttctcagctggtgtgtagctgcactaagggccaagtgtgtgttctgtctccyttgggtcttgttcagagagcctagtccagagcaggattcctatccctggttctatccttcccttcttctttcttttttctttatttactgagatgggtacttctggggtgttgagccgaatcaacagattccctgggttctccctcagttttttaagaaacataaactgaaaaaccagtctgtgctataacgtgtcacaggtgacttaataaagctaagtacagcatacagtaaagatactgtatggaaaagagggtcacctgcggggagggaaaaggcttcataaaggagatgtctctggaaagatgttcacttgtttgcttcatagacttcgaaagcaattctttctaggcagagagaaggtacaagaaaaggttctgaggcatgaaacatgcaggcaagttcatagaactccatctaatcagc

SEQ ID NO: 528332 - DNA, 579 bp, Homo sapiens
ttcatgtagccagaccagaagggatgctagtcttgtggcatctgaaggagacagtagaagacaaaaggcagcagaagaggggcttccaccttgccttgtctccacccaggagagcatgaggcaagtagaaggtaaagatgaagatcaagcggagtgtgcctagagttcatcgttaatagagatgcttggtgaattccatcccacagccagacaggcaggcttctagacagtctagaagcccatgtctcttccagatctaaacttggggacttatgctgcctagcaggccatggaacacaggagaaagccatgggacctggattccaagagaaggggattcaagtccttctctgctgctagtgtgagaggacttggatagtcacttcctgtgatagtttgttagggctgccttagcagaataccataggctgggtggaggctagaagtccaaaatkaagacatcagtagagttggctgtaatctgaggtctcactccttggcctgtagatttttcttttccctttgtcttcacatggtctttcctctgtgcctatgtgttaatctcttcttttaggaata

SEQ ID NO: 528333 - DNA, 550 bp, Homo sapiens
tctccatcatggtcctgtgtgggagtagtttgtatcttttcttcatctttataattattggtatatacgttttagaggaaaaagcataaatatttgttttaaaaattatatatatatatgtatttttattatactttaagttttagggtacatgggcacaacacgcaggttagttacatatgtatatatgtgccatgttggtgtgctgcacccagtaactcatcatttaacattaggtatatctccaaatgctatccctccccacacccccgaccctacaacaggccccggtgtgtgatgttctcgttcctgtgtccatgtgttctcattgttcagttttaaagctagagacaaacttggtttacaagtttaagtcactatgagtaattagcttaatatttagatatcttatattctttaraagtccataaaatatgggttatgagctcactaataatattatactgattaagtaatatttgcaactcatttaacacaatgcttcacagagcgggtgactaaaatatgtcagtgttatcttctactctag

SEQ ID NO: 528334 - DNA, 507 bp, Homo sapiens
taaattccttactatgttgcattttacaaaaagtgtttcaatttctctcttagtttttcgtgttaaggaatgatctacaatttattaatatggcaataatatgagtagcttcctattaaattgtaaacccactatgtgcttaagcactgtggtactttttatatatgatttcaagtccttacaacacttgtgcaagtaaaatattttaaatcatagttttacrtatgagtgaataaaaggttatagtaataaataactgcgccaaagtcattttagcaatttcctcagaagattaataatcaactcttttaagatggaaaaaccctagtttacccaacccgagtttaactgttctcaaccttgtgtcaaataacaagaaacacagcaactgcgacaagtctaagatatggttaattaaggggaaaaaaatgaacacccattgaataaactatcacctccttagaatttataatttcctggtagatagtccactgccttagttttcag

SEQ ID NO: 528335 - DNA, 595 bp, Homo sapiens
ctgcatgggagaggtgagcaggagcagcaggacaccgtgacggacagttgaaccaactaaggaccctggcgagctgaagayggcccgagggatcaccactatcttctgggccagatgtgcctgcccttccgacatcccaccctgcgggctttcaaagctcaggctgtcgaatgcagacaccacagcaacccactctgcagttgctaaggtaaccacactctaatataagtaacagagtgaaattaatcagggcctgtaacttgggtaacttcctcatgcaccagcgtagcgtctttctgtggtgacaatgtgggcaagccttgtgctctcgtccaatttttgagtgtgaaaaaaatcaccagggcaatggcactgagtacgctgagtttgaattggggtgaccaagtccacgcaggcaggggccattcattctggggatgaagggcacctttgaagaagggcagattttgtcatctgctatcggccttctgtttctaaatttgatcccatcttaaaacttgcaagatagtagattacgaggcacttcccagtctgacctaaaccccactgcctgtgctctcttcatagcagagcc

SEQ ID NO: 528336 - DNA, 595 bp, Homo sapiens
ctgcatgggagaggtgagcaggagcagcaggacaccgtgacggacagttgaaccaactaaggaccctggcgagctgaagacggcccgagggatcaccactatcttctgggccagatgtgcctgcccttcygacatcccaccctgcgggctttcaaagctcaggctgtcgaatgcagacaccacagcaacccactctgcagttgctaaggtaaccacactctaatataagtaacagagtgaaattaatcagggcctgtaacttgggtaacttcctcatgcaccagcgtagcgtctttctgtggtgacaatgtgggcaagccttgtgctctcgtccaatttttgagtgtgaaaaaaatcaccagggcaatggcactgagtacgctgagtttgaattggggtgaccaagtccacgcaggcaggggccattcattctggggatgaagggcacctttgaagaagggcagattttgtcatctgctatcggccttctgtttctaaatttgatcccatcttaaaacttgcaagatagtagattacgaggcacttcccagtctgacctaaaccccactgcctgtgctctcttcatagcagagcc

SEQ ID NO: 528337 - DNA, 595 bp, Homo sapiens
ctgcatgggagaggtgagcaggagcagcaggacaccgtgacggacagttgaaccaactaaggaccctggcgagctgaagacggcccgagggatcaccactatcttctgggccagatgtgcctgcccttccgacatcccaccctgcgggctttcaaagctcaggctgtcgaatgcagacaccacagcaacccactctgcagttgctaaggtaaccacactctaatataagtaacagagtgaaattaatcagggcctgtaacttgggtaacttcctcatgcaccagcgtagcgtctttctgtggtgacaatgtgggcaagccttgtgctctcgtccaatttttgagtgtgaaaaaaatcaccagggcaatggcactgagtacgctgagtttgaattggggtgaccaagtccacgcaggcaggggccattcattctggggatgaagggcacctttgaagaagggcagattttgtcatctgctatcggccttctgtttctaaattygatcccatcttaaaacttgcaagatagtagattacgaggcacttcccagtctgacctaaaccccactgcctgtgctctcttcatagcagagcc

SEQ ID NO: 528338 - DNA, 528 bp, Homo sapiens
aggacaggcaggaggaagggcgagtktgggaaggagacaagggaagtggaggggtaagagaggaacatccagaatgtggcgttcggaggccgcgtcacagagccccaaggtctcggggctgccctctggggaggcccatggtgaaagagagaaggctgctggggttttttttgttttgttttttgttttttgagacggagtctcgctctgtcgcccaggctggagcgcagtggcacaatctcagatcactgcaacctctgcctcccgggttcaagtgattcttctgcctcaccctcccgagtagctgggactgcagacgagcaccaccacgcctggctaatttttttatttttagtagagatggggtttcaccatattggctaggatggtcttgaactcctgacctcgtgatccgcccgcctcggcctcccaaagtgctgggattacaggcgtgagccaccgcgcctggaccagaaggctgctgttttaatggttgcccctttgggccacctgaagtgattgttccag

SEQ ID NO: 528339 - DNA, 612 bp, Homo sapiens
agctgctgaaagaaaaaaaactgccagcctagcattctgtatccagtggaaatatccttcaagaatgaaggagaaatcaagacattctcagatacagggaaactgagagcatttatctctagcaaagctaccctaacaatgtttaaaggaagttctctaaatagacgaaaaaaaataaaagaaggaaccagccaggcatggtggctcacctgaggtgaggagttcaagaccagcctggccaacatggcaaaaacctgtctctactaaaaatacaaaaattagctgggcgtggtggcggatgcccgttaattccagctactcaagaagctgaggcatgacaatcacctgaacccgggaggtggaggtggcagtaagcggagatcgcaccacagtagtccaacctgggtgacaagagcgagactctgtcttaaaaaaaaaaaaaagaaggaatcttggaatatcgagaatgaaaaaagaacccataagcaaaaatatgggtttaaaaaatacttkccctctcaatatattctaactcttgttgacaagtaaagcaaaaattataacactgtctgatgtggttctaagtgtataaaaggatctattttaactata

SEQ ID NO: 528340 - DNA, 599 bp, Homo sapiens
gggtagctaactcctagttgtggtgacagaaataagggatgcagaygcccctgtcaggcagttgtggtcatatcatgtgtcaagatcaagaagtgcaaagaggctgggcgcggtggctcacgcccgtaaggccaaggcgggcggatcacgaggtcaggagtctgagaccagcctggctaatatgatgaaaccccgtttctactaaaaatacaaaaaagttagccgggcatggtggcaggcacctgtaatcccagctactggggaggctgaggcaggagaatcgcttgaacctgggaggcggaggttgcagtgatccgagatcacaccattgcactccagcccgggcgacagtgcaagactctgtctcaaaaaaaaaaaacaaaaaacaaaacgtgtgacgataccaggccaccagttgtcaaggttaacagaaaacaaaaggagctgtaagttagaaccacagtcatgccttgcttaatgacagagctaagttctgagatatgtgttgttaggtgattttatcattgtgcaaacatggtaaagcatacttacacaaacctagacgatatagccttctacacacctaggctagatggtat

SEQ ID NO: 528341 - DNA, 599 bp, Homo sapiens
gggtagctaactcctagttgtggtgacagaaataagggatgcagatgcccctgtcaggcagttgtggtcatatcatgtgtcaagatcaagaagtgcaaagaggctgggcgcggtggctcacgcccgtaaggccaaggcgggcggatcacgaggtcaggagtctgagaccagcctggctaatatgatgaaaccccgtttctactaaaaatacaaaaaagttagccgggcatggtggcrggcacctgtaatcccagctactggggaggctgaggcaggagaatcgcttgaacctgggaggcggaggttgcagtgatccgagatcacaccattgcactccagcccgggcgacagtgcaagactctgtctcaaaaaaaaaaaacaaaaaacaaaacgtgtgacgataccaggccaccagttgtcaaggttaacagaaaacaaaaggagctgtaagttagaaccacagtcatgccttgcttaatgacagagctaagttctgagatatgtgttgttaggtgattttatcattgtgcaaacatggtaaagcatacttacacaaacctagacgatatagccttctacacacctaggctagatggtat

SEQ ID NO: 528342 - DNA, 599 bp, Homo sapiens
gggtagctaactcctagttgtggtgacagaaataagggatgcagatgcccctgtcaggcagttgtggtcatatcatgtgtcaagatcaagaagtgcaaagaggctgggcgcggtggctcacgcccgtaaggccaaggcgggcggatcacgaggtcaggagtctgagaccagcctggctaatatgatgaaaccccgtttctactaaaaatacaaaaaagttagccgggcatggtggcaggcacctgtaatcccagctactggggaggctgaggcaggagaatcscttgaacctgggaggcggaggttgcagtgatccgagatcacaccattgcactccagcccgggcgacagtgcaagactctgtctcaaaaaaaaaaaacaaaaaacaaaacgtgtgacgataccaggccaccagttgtcaaggttaacagaaaacaaaaggagctgtaagttagaaccacagtcatgccttgcttaatgacagagctaagttctgagatatgtgttgttaggtgattttatcattgtgcaaacatggtaaagcatacttacacaaacctagacgatatagccttctacacacctaggctagatggtat

SEQ ID NO: 528343 - DNA, 599 bp, Homo sapiens
gggtagctaactcctagttgtggtgacagaaataagggatgcagatgcccctgtcaggcagttgtggtcatatcatgtgtcaagatcaagaagtgcaaagaggctgggcgcggtggctcacgcccgtaaggccaaggcgggcggatcacgaggtcaggagtctgagaccagcctggctaatatgatgaaaccccgtttctactaaaaatacaaaaaagttagccgggcatggtggcaggcacctgtaatcccagctactggggaggctgaggcaggagaatcgcttgaacctgggaggcggaggttgcagtgatccgagatcacrccattgcactccagcccgggcgacagtgcaagactctgtctcaaaaaaaaaaaacaaaaaacaaaacgtgtgacgataccaggccaccagttgtcaaggttaacagaaaacaaaaggagctgtaagttagaaccacagtcatgccttgcttaatgacagagctaagttctgagatatgtgttgttaggtgattttatcattgtgcaaacatggtaaagcatacttacacaaacctagacgatatagccttctacacacctaggctagatggtat

SEQ ID NO: 528344 - DNA, 652 bp, Homo sapiens
tcagctgtaaatccatctgttcctgggcttttttttggttagtaggctatttattaccagctaaatttcagaatttgttattggtctattcagggattcaacttattcctggtctagttttgggagggggtatgtatccaggaatttatccatttcttctagattttctagtttatttgcatagaggtgtttatggtattctctgatggctgtttttatttctgtggggtcaaaggacatcaccattattttaaaagttcactaaaagtaactttctgagttgcatctgatctatctgtctrtctatctatctatctatctatctatctaatcatcttcaatattgataataatatttagcatcaaagttgtacacatttaaaaactagaagccaagaagtagctgtctggagaattaaattgtctaagaaattattaaagaatactaaacaatagtttaagtaattatgatttctaaaaataatagcagaaagaacaattttatgagaaagtataatgtgaaaactgttcatttagcaaaaaaacaggcatttcagttttttaaaataaactgcaagaactagtgtcaatttttatgtagagaccaatcatcttttcctgatactttaaaggatttagtgaccagaaataa

SEQ ID NO: 528345 - DNA, 600 bp, Homo sapiens
cttgtcaaagtttgcatttaatactatggtctttgccttgggaagtgcacagtctttttttttttttcttcyggtgatgaaaaaaaaggtcatgtaaacaaatagaaaacagtgaatcttaaaaaaaattacttttattattgtagatgagatgttcattagagctgttcccaaatgcttttttttctctttctggacactagatagaatttcacttctctgctgtctttgaggtagatggacccatatgactttctatggacattgaatactaagtaggaatgattttggtcagttctacatttaactgcctgtgcaaatttcagtgttccctttctctctcttggcaagcttggaaccaggaaagagcttctgttagtctgggcattaagttagtgccccaccccatttcatcctgtactacacgtgtaaggtgaggtgttgtatatcagatcactataatccagatcatcatgctcatcagtggatcgatgatgtcatcacttccatggttttttgttttatttgttttaattctgatactaataataagcctgtgttggagaatacattacatcagagaatgagcatatatgattc

SEQ ID NO: 528346 - DNA, 600 bp, Homo sapiens
cttgtcaaagtttgcatttaatactatggtctttgccttgggaagtgcacagtctttttttttttttcttccggtgatgraaaaaaaggtcatgtaaacaaatagaaaacagtgaatcttaaaaaaaattacttttattattgtagatgagatgttcattagagctgttcccaaatgcttttttttctctttctggacactagatagaatttcacttctctgctgtctttgaggtagatggacccatatgactttctatggacattgaatactaagtaggaatgattttggtcagttctacatttaactgcctgtgcaaatttcagtgttccctttctctctcttggcaagcttggaaccaggaaagagcttctgttagtctgggcattaagttagtgccccaccccatttcatcctgtactacacgtgtaaggtgaggtgttgtatatcagatcactataatccagatcatcatgctcatcagtggatcgatgatgtcatcacttccatggttttttgttttatttgttttaattctgatactaataataagcctgtgttggagaatacattacatcagagaatgagcatatatgattc

SEQ ID NO: 528347 - DNA, 600 bp, Homo sapiens
cttgtcaaagtttgcatttaatactatggtctttgccttgggaagtgcacagtctttttttttttttcttccggtgatgaaaaaaaaggtcatgtaaacaaatagaaaacagtgaatcttaaaaaaaattacttttattattgtagatgagatgttcattagagctgttcccaaatgcttttttttctctttctggacactagatagaatttcacttctctgctgtctttgaggtagatggasccatatgactttctatggacattgaatactaagtaggaatgattttggtcagttctacatttaactgcctgtgcaaatttcagtgttccctttctctctcttggcaagcttggaaccaggaaagagcttctgttagtctgggcattaagttagtgccccaccccatttcatcctgtactacacgtgtaaggtgaggtgttgtatatcagatcactataatccagatcatcatgctcatcagtggatcgatgatgtcatcacttccatggttttttgttttatttgttttaattctgatactaataataagcctgtgttggagaatacattacatcagagaatgagcatatatgattc

SEQ ID NO: 528348 - DNA, 275 bp, Homo sapiens
aaggactcatagttactatctttaaaaacwgcagtgaataagcaaactataaactaacaaaaaaaccaagcacaacaaaacaaacagcaaattaggtttaatcataatgcttgggagaatatgtatttggcttaattatattttcttctttttttttttttttttgagatggagtttcgctcttgttgcccaggctggagtgcaatggcacgatctcagctcactgcaatctccgcctcctggattcaagcgattctcctgtctcagcctcataa

SEQ ID NO: 528349 - DNA, 699 bp, Homo sapiens
gggctcagtggctcacgtctgtaatcccaactttgggaggcctaggtgggaggatcacttgaccccaggagttcccgaccagcctgagcaacatagtaagacctycttgtctcctcaaaaaataaaaataaaaaaaattacccgagtattgtgctgaacacctggggccccagctactcaggaggctgaggcaggcaggaggatcacctgagcccaggaggtcggagctgcagtgagctgcgattgcgccactgccctccagcctgggtgacagagcaagaccctgtctcgaaaaaaaaaaaaaaagttacactaagggcaagaaaccagacacaaaaaccacataattccagtcatatggaatgcccagaataggtaaatccatacagacagaagctagattagtggttgccagaggctaggggagggaaggatggcgggtggtggcctaactgggcttccttttgagacaatggaaatattttgaaacttgataatagaggtggtggttgcacaacgttgtcagtgtactaacagctattgaattgtacactttaatatagtttttctttttgaatttttttcttctttttacatatattttgtttattggcctccagctttgcataatgtggtatattttatgttttgtaaattttacctcaatataaataaacatatacattttcaaaacatttt

SEQ ID NO: 528350 - DNA, 575 bp, Homo sapiens
gtctccaaaaggagatcaggagccccactctggtaatcagtagaggattccagtgctgccatcaccacagatacagaaacagcacacatggtagagaccacgaaggtgcctctgatgactgaaaatgttctttcagttccccagcatctggcctgcatgtgagtkactgctctcacttagaatgagtaccaactgggccatcagtttgaagcctgtggatgaaggatttgatgcatttgacattattgctgaggaaagtcagtaactagatttgtttttaatttgttgaagttaaaaatgcaaaatgcttaggcacggatggaggctttcagaaaatgttctatttgtgggtaagagacagggtagtcaagtctacagaaccatctggaaagcctgaggagacaatggagtctcttctccaccactcactcagatgagttttatgaactcaccaggcctgccgagtgtcatatgtaaaagcacaaacaatggcacccgcttttaggtaacttccaacctaccgctctttgtagtgtcctaatgtagggtccatttcattcaacacgaccaaagcc

SEQ ID NO: 528351 - DNA, 661 bp, Homo sapiens
aatagtcatttaggagactggaaatgtgaatggaccaggaaaatatgttaygattgtcaggttgaaggacccagttgaggttcatggccattaatttaaaatgataccagccaacattatgtgtttttgtttttctttttttaaattttattttgtgcatgtagttgcacttcatacaatttcatttgcaaaatgaggcagtgggacagatttggcccatgtgctgttgctgaccaatcctggatctatgttttcactggtcatgttaaggaattcaagcacatttcttaattttcttttaatttcttgaaaaatgcattatgtgttttcacccagtcacattcatctgataggtgcaggtactggtagagggaaagctggatttaacacaggttgtgtttagccaagcaaatctaaaaagggaaaggcccaagagggtgcaggcagggagggattacattgatagccttgagtttaagttgagtaaggagaaaagacacgaagtaggggagggacagcaaaaaaatacttggatcaatacacaattgtccagggagagaagaaatggtaatcagaggatgagagatgaaactgagatcatgaagaggttgcagttattggcaaataataaggtctgcaatgtgaccatgggtgtgagcag

SEQ ID NO: 528352 - DNA, 640 bp, Homo sapiens
ggggtgctactggcatgtagtgggtagaggccagggatgctgcgaggcattctatggtgcacaggacagccccaaccataaagaactatccagtccaaattgtccacgatgtcgatgttgaggatccctgccctagcccaaggtcaccactcccattgggcagatgggcatttgatgtccagagaggtgaagtgacttgcagatgtccaaagggcttcgatgacagtgccataacccaggttgcgtgccccggatcttcagactgggctgcttgtccagacagagaactcaatttccaggcaggagctggctgccaaacctgcccaagtctcggtgtgccctatccttggacaagccagcgtcacagaaattgtctttggatattgcactggtggagttctcgtgggcctggggcctggccctgtttcaccacagtggcccaactgcccattgaggaggctggagccggggcagccctctgcttgttattttcaggaagatatagtgagtacttagtactttttagattcaggtgttccactcaacaagccacgtggctgctgaaagagagagggagtgaggggccccgcgtggggttggaatatgmcctggcatgtttccagctcagcagagcgttggc

SEQ ID NO: 528353 - DNA, 597 bp, Homo sapiens
ataagaacataggcttcttgaaggcaaatgacatattttatccatctttatatccctcacagaataggggccaatgtctgacatatagtagatacttattatacataaatgtctgtcaaagtgcactaaactcaaataaatatgtcagagcttacattctgtataagagaaaaattgataaagtcccaaagcagcaggaatattggaacrtttctctatgtgaactgactcactgacccctctgccaaaccaacaagtgacaattaggtagaggaagaaaggatccctccatgagcttactctgcacttggtccagggcagccaatgagtaagcactataaatgaggttccattccacaggcagctctcactacactgcctcgctcatctccctgcttccttacctcagttttcccttgtgtgtgcacatatccacagcagggctggaaagctggggcagtggctaacttcatatcctcctatgatccccatccctgccttttctccttcctattccacatcctattatcatgtgtttatgtctcatccaccaatcaagcctggctgaaaagccacctgtccatgagaccttccctg

SEQ ID NO: 528354 - DNA, 625 bp, Homo sapiens
ctggccttgaggggaaccaggaattccttgggtatcacctgatgctggctcttggaggctagaggctggcttcttgtcatccaatcatccatctctcccagcacacctgaccctgaggtgactcacactcrgaagggccaaatgacttgctcaaggccaccaccaagggaaggctgtgggacccagacccaggtctttggaatctgggtcttgttttctttgcctctgctgttacccaagcacaatagatgccctgagccatgtctcaggcaagggtgctttgaggacatgttcatttcgttgaaccatgaggaggcattggtttgctaccgtagtgtcaagagtagatgagcatcttctgaaaaactggtctttaaaaaaatctacagccactgtgccttgtgtaagtggcctggctccctcttggatgctacctggaaaggtggagaaaaatgtgtggccctgagtgcaaaggacttttggcttcttcttttcttagcagcttcatgttgggttcagttttaggtcactaccctcattttatatattatcgatgaaggcaaattagaaaatcatcaagtaacataaatgacttagaaagcataatttctggggaagagaactt

SEQ ID NO: 528355 - DNA, 607 bp, Homo sapiens
aaacatttcctgactcccaaaattagagggccacattaagaacattcctaacatctaaaatatttaagtttactctttaagttggttgttctatgtgatttcactttagtaattcaaaagcagaaagtaaaatatcaaggtaaaagtcttaaaacaagtcaggcacacaggatggggggccacagaaagccaatagaccaggagcgtcctggtaacggggcacaggagggaggacacctggcggcagggcccgggcatggcggctccatgcaggacaggccatgtcctgggcatctgccacccagccgagaacccaaaytcagagccccctctgcccaaaatgcacatgctgcagggcagtctccaaaaacactgataaataacacaggcataactgtaatcagcaatacctcagccgggcactgggttctcctcaccaacgttctcttagttcatctccacctacattttcccagtcagctccattttgcagaggaggttgaggttctaaggagttggagagctgcccagggtggcacaactggtgagcaatggagtcagaaattgaacccagaacaaaaatactccaaagcccagccctgactac

SEQ ID NO: 528356 - DNA, 572 bp, Homo sapiens
ttaaccccacaaggactagcagcccaaggatgctaaccgaggacagagccattggcttccttctgacactctcacggagcagggatgctagctggaggttacaccccaccatcagtgataactaatggtgtccctgcctccccctcctttgcctttcctgtcccctccccccacttccaggaaaccactgagaaaagacgaaaatggcaccagcgttgctgagtatcccatgagtgcttcrcagagcaacaaaggagtagacgtgaacaacgcagtggtgtgagtctgcaggccctggacccgctggccagagggacaccttggtggcactggtggacatgggaaagcaggtggacatgagctaaccctgagcttgtccaggacttcattgcctcacaggccctgagcctcccgaaggagaaaccattgtcttcccaggcttgcccctggtcagcctgcgggcccaggcagctcggacaccaggctgagcccggcgcacacctgggcagtgtccccaccccaggccctccacatcctcctccctgtctggtgtctggtctgtcgactgcccc

SEQ ID NO: 528357 - DNA, 642 bp, Homo sapiens
aaaaagatctttttgggccaagagcagtggttcacacctgtaatcccagcaccttgagaggcgaagatgagtggatagcttgagtccaggagttcaagaccagcctgcgcaacatggccaatccccatctctactaaaaatatttaaaaaattggccaggcatggtggcccacacctgtagtcccagctacatcagaggctgaggtaggaggatcacttgagccagggaggcagaggttgcagtgagctaagaccatgttccctgcgttccaacctgggtgacagagcaacatcttgtctcaaaaattaattaaaaataaataagtaaaaaagtctgtgtgaacactgcttgttctcaaaggcartgttgctgctgctatgtgagcagaagggcctggccagtgcaatccacagagagaaatgcaaagttggtttctctttaggagcacagatattttctggctgtgactttgcttgtcttcctcctgggatgtcccagtaacttggtataataagagccacttcattctgatgacagcatgccctgcatccattgctgtcattttccagcaatcactgactcactgagagttcaatgtgtcctagaaagcccttcaaagacaactcaagaccattcattga

SEQ ID NO: 528358 - DNA, 638 bp, Homo sapiens
agtcaaagtaaactactggggaatgtgagatggttgacacaatctggtgacaagcaaggtgtttgaaaagataacagataacaggagttaaaagtgtcggaagtcgggccgggcgtggtggctcacacctgtcatcccagtactttgggaggctgaggcgggcggatcacctgagatcaggagttcaagattagcctggccaacatggcaagaccccctctctactaaaaatacaaaaattagccgggtgtggtggcgggcgcctgcagtcccagctacttacgaggccagggcaggagaatcgctygaactcaggaggcagaggttgtagtgagccaagactgtgccagtgcactccagcctgggcgacagagtgagactcagcctcaaaaaaaaaaaaaaaaaaaaagtgatggaagtcatggagaagccggagtggagtcaccccagaaggaaatgaaatgcttatgttctagttaaagatgcgtattgatgatgatatttctgaaatctactacaacaaaagcagagatcttcttttttttttttttttttaaagcataatcccacaaggacaaaggaaacaagaagaggatgacagcaacaaggtttcagaagccagaaagctgatgaatgat

SEQ ID NO: 528359 - DNA, 681 bp, Homo sapiens
gaggtgagttacagtaaaggacatagataatataataaaaagagaaccagaaatttggggccatgaagaagaggaaaaccatcaaatgccagtgatgaagactaaaggagtggctaggatttactgacttaaggtgtgaatctacttgactaggaggggccctcctagtcaagatcaagtttgcatctggtgatgcccctgtgcccccacccagtgcccagaacacaggaggactcctgtttgctcagggtataaataccaatgtgttttaatgaacytaagttcattgctaaaaacttttggcaaattactatttgattttttttttttttgagatggagtctcgctctgccacccaggctggagtgcaatggtgtgatcttggctcactgcaacctccacctctggggttcaagcgattcttctgtctcagcctcctgaggctgcctgccaccatgcccagcgaatttttgtatttttagtagagggagggtttcaccatgttggccaggctggtcttgaacttctgacctcaggtgatcctctcacttcagcctcccgaaagtgttgggattataggtgtgagccaaggcacccatcctctatttgtggtttatcttaattgccttggggatgaattcttgggcttttgcagccataactaatatatcgctgagcaaa

SEQ ID NO: 528360 - DNA, 646 bp, Homo sapiens
aaatgaaataaagcccatttacagtgacacccaaaccatggcatacctatgaaaatatcttaacaaaagatgttcaagacctctacactgaaaactataaaacattactcagagatagaatacctaaataaatttttggttgaagtatgtggagaaaatctggccttacacagataggtaattggaaaaagggatatttgaatcgtctttgcagttaattgtgagtacttgataccatgcccaaactctgtagtggtcgtggggcaggagaataggaagttagggtaaccaagggctaaggcataagcaaaagaacagcaggtacagccagttctaggcaagattaggcagcactcagaccacagcctcctacctgtgataacaagacagtctccacttcagcctctgattggttgcaggctaatctttcatagggtgcagccaattggaggcctctaaaggtcacctaggggtgttaccaaattcttttagcttagtaaaaaccctaragggggcactcttgaccctggctcaagttggctcccactctggagggtacttttgctacaataaatctgcgctttttttgcttctttcgttgattacttcttttgttgctttgtgtgtttggttccattctttattc

SEQ ID NO: 528361 - DNA, 641 bp, Homo sapiens
caagctctgatcggtgagtgaaaatggtagtcattagccttacagttgtagcaggttgtttcagtagcggttagataaaactggtctcaggctatagcaggcagctttagcaggaaagcttgcagaaaattacattcttggagcagtgttatgtttcctgagtctcttttcctctggcttcttgatttattttagttggttatggcaagagtgacccaattcatatgatcaactttcacacttaccccttttgatcaaaatctttctctgaaagcagcactgatcaaccattttgaagttaggcttaattttccttcagtgccaggatggacctgtcacaattgtgtctgtcccatgttgggggggaatataggttggtctatataagggtcccaggacacatttgaataacaaagaggccagaaggaaaactctcaggacaggtttgtttggaatccagcatcaagttccatatggtcmgttccataggcatcagcaatcatcttgaagcactgggctaatattattctattaagagagtttgctttacaaggattagacaggctgtaagagcaaagcttaaagaactatgctacaaaaaataatcagcaactatataataaatccagtttgtataatag

SEQ ID NO: 528362 - DNA, 533 bp, Homo sapiens
tcatcttgcctttccatctcctttgctgatttggacaacttgtttgyagttgggacagcctgccttgagatagtgtaagagacttcattcaggagatgtgaatggaacatttgccgtgtgctgggcacaggacttggcaggttgggccctggggttggagagctgagcaaaacagaggcatgactgttaggaaaggtggacgctgaatgcaggaatatggggacagaggcagggtatggaaagagacggtcacgggggatccagggccagctttctgaaggtgagatggttgattgtctgtgaccaaagcagccttcaggtgagagcaggccagagagcagtggcggtttgggcactctggggctggagagagccgaatgtggctgtctaagtgagagaggtcagacttctggggcagagagaggacaagggagagagcccagaacggggcatacaagctggggcacggggcttgacctgggcctgttcgctcattggttctctctcctgttagagggtcagctcctgggagc

SEQ ID NO: 528363 - DNA, 533 bp, Homo sapiens
tcatcttgcctttccatctcctttgctgatttggacaacttgtttgtagttgggacagcctgccttgagatagtgtaagagacttcattcaggagatgtgaatggaacatttgccgtgtgctgggcacaggacttggcaggttgggccctggggttggagagctgagcaaaacagaggcatgactgttaggaaaggtggacgctgaatgcrggaatatggggacagaggcagggtatggaaagagacggtcacgggggatccagggccagctttctgaaggtgagatggttgattgtctgtgaccaaagcagccttcaggtgagagcaggccagagagcagtggcggtttgggcactctggggctggagagagccgaatgtggctgtctaagtgagagaggtcagacttctggggcagagagaggacaagggagagagcccagaacggggcatacaagctggggcacggggcttgacctgggcctgttcgctcattggttctctctcctgttagagggtcagctcctgggagc

SEQ ID NO: 528364 - DNA, 422 bp, Homo sapiens
  misc_feature (1)...(422): n = A,T,C or G
nnnnnnnnnnnnnnnnnnnnnnnnnnnnnnnnnnnnccctggtaaacctatcagatcttgtgagactcattcactatcactggaatagcaggggaaagaccggcccttatgattcgattacctccccccaggtgcctcccaaaacacrtgggaattctgcaagatacaattcaagttgagatttgggtggggacaaagccaaaccatatcagtcccactgctaataagttctattgtttctttacgaaatatttgagtcaagtgactgacagagagcttcccatcttgttgctaagtgacctgctgttcacatggctgtgttttgcccatcttgcttagatctgccttgtccatgagaagtcctgcctgggatgcagagcagtttccctcccaggtgcctcccgcaattccccttacagggt

SEQ ID NO: 528365 - DNA, 641 bp, Homo sapiens
taatttttctaaacattagaacatagacatatttaaatacaataattatatcagtactagttaatgtttatgttcagacatttaaayagtttcactgataaagaaaaaaacagaaaataattttttgcacttaatactagctacacctaggaaacactgggcatattggatcataaggctgctattttccaaaaccttcttataaatgcctccagagctactgtattagtcagggttctctagagggacagaataggatacatagatatgtatatttgtaatatatgttatatttatattataaatatacaatatgtgcattatatatttataataaatatatttataaaaacatatttaatatatatttacatatataatatatatattatatatgtgtgtatatatatatgtatatatatataaaggggagcttattaagtattaactcacatgatcacaaggtcccacaataggccgtctgcaagctgaggagcaaggagagccagtccgagtcccaaaactgaagaacttggagtgtgatgttcgagggcaggaagcgtccagcacagagaaagatgtaggctgggaggctacgccagtctcaccttttcatctttttctgcctgctttatattcgc

SEQ ID NO: 528366 - DNA, 641 bp, Homo sapiens
taatttttctaaacattagaacatagacatatttaaatacaataattatatcagtactagttaatgtttatgttcagacatttaaacagtttcactgataaagaaaaaaacagaaaataattttttgcacttaatactagctacacctaggaaacactgggcatattggatcataaggctgctattttccaaaaccttcttataaatgcctccagagctactgtattagtcagggttctctagagggacagaataggatayatagatatgtatatttgtaatatatgttatatttatattataaatatacaatatgtgcattatatatttataataaatatatttataaaaacatatttaatatatatttacatatataatatatatattatatatgtgtgtatatatatatgtatatatatataaaggggagcttattaagtattaactcacatgatcacaaggtcccacaataggccgtctgcaagctgaggagcaaggagagccagtccgagtcccaaaactgaagaacttggagtgtgatgttcgagggcaggaagcgtccagcacagagaaagatgtaggctgggaggctacgccagtctcaccttttcatctttttctgcctgctttatattcgc

SEQ ID NO: 528367 - DNA, 629 bp, Homo sapiens
tggttttagcatctcagctatttgccagtgccataaaacacatgacattccaaaaaggaaagagaaaggagctgcactactttagttgaagggtttatgggaacaaaattaatagtgacattagcatgaaggttcacacattgcacagaaaggagtagaaataaaataaatcaacgcctatgggaagaggagagaagtccctcctatattcattaagttattcaacaaatgttattgaaaggtttctagctgcaggcaccattctaggtcctggacatgcagcggtgactaagatgtacaagacctcccttaccctccaatggatccaacctaggtcattgagaatgtgtgcgcagctgctgttacatcttcagtgtgagaccatccatggttctcttgcrtattaactcactcttctcgtatttgagccacaacagggccaggaaacttggtctatagctggtgatagaacctgcaggatttccaagcgaatgagtggagtgcagatggatggcagtaggttattttgcaggtgagactaggccttgtgggtaaagagagagtgagagataaactcagtgaaaacgttttccccatgggagatgagaggtccagcacccagagttgga

SEQ ID NO: 528368 - DNA, 610 bp, Homo sapiens
ggaattttaaggtaaataacagaggatccactaagtccaygtacagatcagtagcaacactccagcttcctgcccttctcatcactggcgctgaataagttacacattaaacactatcaactcattccttctaccttactttatgaggtacacctaatctctgacctaacagaatcttgccattccagttgaaaaatggcaggttggtgtgacttatcctcttacatacaggaaatagcatataaggaaaaaggaaagttctatatgaatgttagtttctctgattttttttttgaaaaacaattttaatatacaacagagtagagggaaaaacaaaagcatccacatgcctacaaccagatttaataaatgtgaacaactgtcatttaacacattttatttatttacaatttcaatgacaatctttaaaagttatttgaagtgttttccactaaatgtacaacagatcagttccaaatacttcagaaaaaagattccatgagcatctgtttctggtcttagaactgtagtgacatggctacattgtccctgcaccaaatgagaatgtggacaataggtcctgggaaaatgtattctgtggtcaagacag

SEQ ID NO: 528369 - DNA, 624 bp, Homo sapiens
aaaaagcaatcacccacttaggatataataactgatacagagggcagtatcgctaaagcatttttttattattaacgtttttaaataaaatcgacacgactaatgcacatacgctcttttttaaaagttacatattttatttgaasagtttgctcctgctaagatcatctgtcactactgaaaattatgcctctctcccccactctccagttaaactactgttaaaagtactcaatattaaaaaaaaaaaaaaggtcaaaaaaccccagcaataatgagggttgtaatcgcaataaaggatatataaacaatttccttcttttcaccaactcagcaaagcacatacatagaaactgctacccaatgagtaatttcacaacgtatatattttcacctttaagaggatttatataaggatttaaaatcaaatacatttaaagtttagtaagaagtatttttaaatcttttaaaaataagcagaaattaaagcccactctttctgttctttaaaaaggcttctgataagtaaaatgttttaaaaattaccatgcttaagcctgtcttcagtggcttcttttttaatgcactgaaatgtatccttatctctagtataggcttgcaagc

SEQ ID NO: 528370 - DNA, 624 bp, Homo sapiens
aaaaagcaatcacccacttaggatataataactgatacagagggcagtatcgctaaagcatttttttattattaacgtttttaaataaaatcgacacgactaatgcacatacgctcttttttaaaagttacatattttatttgaacagtttgctcctgctaagatcatctgtcactactgaaaattatgcctctctcccccactctccagttaaactactgttaaaagtactcaatattaaaaaaaaaaaaaaggtcaaaaaaccccagcaataatgagggttgtaatcgcaataaaggatatataaacaatttccttcttttcaccaactcagcaaagcacatacatagaaactgctacccaatgagtaatttcacaacgtatatattttcacctttaagaggatttatataaggatttaaaatcaaatacatttaaagtttagtaagaastatttttaaatcttttaaaaataagcagaaattaaagcccactctttctgttctttaaaaaggcttctgataagtaaaatgttttaaaaattaccatgcttaagcctgtcttcagtggcttcttttttaatgcactgaaatgtatccttatctctagtataggcttgcaagc

SEQ ID NO: 528371 - DNA, 442 bp, Homo sapiens
tctcagctcaccacaacttccgtctcccaggttcaagtgattctcctgcctcagccttccgaatagctaaactacacgtgtawgccaccatacttggctaatttttgtatttgtagtagaaacaggatttcaccatgttggccaggctggtctcgaactcctgacctcaagtgatctgcccaccttggcctcccaaagtgctgggattacaggcatgggccactgtgcccagcctattacatgttttaaggtcataaaactgctacttctggaatatttcttaaacttgcttgatttgtgtaaggtctggctgctgggctccctgaaaccttgcacatatcttactgtatgactgtatttcgttttgagtctctggattctggggtttggacagatgaccatagtgaggcctgcagaaatatgcatgtcctcagtgtttgga

SEQ ID NO: 528372 - DNA, 442 bp, Homo sapiens
tctcagctcaccacaacttccgtctcccaggttcaagtgattctcctgcctcagccttccgaatagctaaactacacgtgtatgccaccatacttggctaatttttgtatttgtagtagaaacaggatttcaccatgttggccaggctggtctcgaactcctgacctcaagtgatctgcccaccttggcctcccaaagtgctgggattacaggcatgggccacygtgcccagcctattacatgttttaaggtcataaaactgctacttctggaatatttcttaaacttgcttgatttgtgtaaggtctggctgctgggctccctgaaaccttgcacatatcttactgtatgactgtatttcgttttgagtctctggattctggggtttggacagatgaccatagtgaggcctgcagaaatatgcatgtcctcagtgtttgga

SEQ ID NO: 528373 - DNA, 442 bp, Homo sapiens
tctcagctcaccacaacttccgtctcccaggttcaagtgattctcctgcctcagccttccgaatagctaaactacacgtgtatgccaccatacttggctaatttttgtatttgtagtagaaacaggatttcaccatgttggccaggctggtctcgaactcctgacctcaagtgatctgcccaccttggcctcccaaagtgctgggattacaggcatgggccactgtgcccagcctattacatgttttaaggtcataaaactgctacttctggaatatttcttaaacttgcttgatttgtgtaaggtctggctgctgggctccctgaaaccttgcacatatcttactgtatgactgtatttcgttktgagtctctggattctggggtttggacagatgaccatagtgaggcctgcagaaatatgcatgtcctcagtgtttgga

SEQ ID NO: 528374 - DNA, 542 bp, Homo sapiens
aagttatgtgcccaatgccacacagctagaaagctacaaagctgaagtttgaacccaactcatcttggtccagagtctgtgcacagaagtcctcatacatccagcactcagcctgctcttgagcaaaaggtacatgtccaacttaagaaagcgtttactactagagatcgctgaaaaaatcataagtcatytcaatcaggttgaatgcactgccccagagatgttcaagaagaggttcaaggacttcttaggacggagttttatgagaggcaccaacattgaagacatcaaatccaattgtaaagtccttccaaatggaagattgtaaaagcatctaaaggtctattctggatgggaagataacatgggcaaaggtaatgactatctgggaggagcagaccagtatggctgtaatgagaaattcatggagaagagtggtttccagtaatgctgcaaaaatcggctagaatcagattgcgagagaccctgaatgtcagcaaaatcgggttttggtcttaatcctcttaatcctttaactgatg

SEQ ID NO: 528375 - DNA, 542 bp, Homo sapiens
aagttatgtgcccaatgccacacagctagaaagctacaaagctgaagtttgaacccaactcatcttggtccagagtctgtgcacagaagtcctcatacatccagcactcagcctgctcttgagcaaaaggtacatgtccaacttaagaaagcgtttactactagagatcgctgaaaaaatcataagtcatttcaatcaggttgaatgcactgccccagagatgttcaagaagaggttcaaggacttcttaggacggagttttatgagaggcaccaacattgaagacatcaaatccaattgtaaagtccttccaaatggaagattgtaaaagcatctaaaggtctattctggatgggaagataacatgggcaaaggtaatgactatctgggaggagcagaccagtatggctgtaatgagaaattcatggagaagagtggtttccagtaatgctgcaaaaatcggctagaatcagaytgcgagagaccctgaatgtcagcaaaatcgggttttggtcttaatcctcttaatcctttaactgatg

SEQ ID NO: 528376 - DNA, 520 bp, Homo sapiens
gccttcttttagaaaaagactcaaataactctttatttctagggcagactttatgccaagtctctgataacttttccagtcagtttccaaggaactctccatttcactgtgggctatgaacctggattttctagttttaactatatatttccttcactacttacatawaatataagttggtggaaatcaccatatcctagctatgctctacatgtgggttatggatgattcatttgctattattttgatatgtatggcttttcagagaaggtgtaggaagattcagattcaggtggccaccaatagcctatgagaacctacacattcttaaaaatatgatacaacttgaattctaagttctaaaactgaattgagtggggaatgttttaagaattatgaatttctttacaaatgttttcaagtaagaaacattaaaccaaagtatttatttcaaaactactgtaagttctatgttgactgtggtggtggctacaaatcattactgtagcatagattttta

SEQ ID NO: 528377 - DNA, 288 bp, Homo sapiens
taacgttcttccttcgttcttacctcttttagcactcattcttctcctatgagaaaactgctgttcaaaaatcatttctactagttcgttctcaattgactttgacagctcattagaatcaattcaacaaacaactatctttgctctacagcaggaagagtttaattcttcaatcctgagtgaatgatacttgggtgtttggaggtgatggtggtggtgagatatttaaattttcaatgatggaagatgttwattttctctattgcaaagtctgaattaacttacccg

SEQ ID NO: 528378 - DNA, 592 bp, Homo sapiens
cacaaaaggaaaatttgctaaggttatacccttcacctgacatttttaagccactccttttctcacttatttttattttctcctactttaccagctcttgtccagcatggtaacatttctagagagcatcagtttcaaccacgaccagtgatcaaaaaaagagaactaaggcttttttataaatcactcacattctttctactagatttttctttcctaaatctgtgagactatattgttcttgttcatctgggatattgagtcagccccagtgaattgaatttatttatatgtttctttacattcagctccagttttggagaaatctagtttattcatgacaggttaagttagcgggtaacagamaatccccaaatctaagtggcttaagaaaaagtttttatttcttgcttaaggaagttggcaatgggtctgggtgatgcttcaggggttctgtcttctaacagctcagcattacaccttcatatcaatatttgcttttataaccatatagcaagggtgaaagcgctgaagggtctcacaagtagaggattcttaggaggaacatgagtcacttctggtcatatttcat

SEQ ID NO: 528379 - DNA, 628 bp, Homo sapiens
agactggacaacagaaagaagcactatatcatagaatcaacttttgaaaaacagtatgtgttgtcaaaaaaaggcataatattgaagctgtatttacaggttatatagaaaatggtcacagaggaaacattgctgaatacctactgaartccaggtgtaggaacttagtacatggaatacaaaagggcacaagactaacctttattccaaaaaaaaaaagaaaaaggaaaaaaagaagaaaagatagaagaaagtaaaaaggaaaatgggaagatttattttccttttcaattttgaagaaagttaaagaaacgaaaacagggaaaccatttgaaacttactacttgccaacattactatttgattgaagtgatttcattagaaaattccatttgaagttattttctgttaataaattgatgtgtttgcaactgtaaaacatctttaaggttcctatagttaagagtgccccacaaaacagcaggtataaaataagtagaagctttagcaagaaaaaaaatgtttaagagtaaggactatgctatccatgtttctgttcaaaggggcaatctgattataaccctatcccagatttggaagctatgaaggggtgtggggggaatttaca

SEQ ID NO: 528380 - DNA, 551 bp, Homo sapiens
aaaagtcaataaaaattgttagcaatcagcaatttgattataaactaaataaattgtgtcataatttcaacaagagagattacctgactacattcattttttttctcttgaattctgtgaaatttaattggaccttctaacacctgatgctagtaattatgtgtcttgccttactttgctacattctaactctgcatttctcagaatgtagtaagtataaattttggaaatggtaagtatattcataagtgaagccctaatatccactgtgtttggggtaatattttatcagttaatggcaaaaacaaacaaaacaaaaaattctaaataaaaatgatacaaataaccattaaaaataattaaaattgatttttattttagcaaaaatgcacacatttacttactttttttaacataggtctttttgttaattacaaatcggtagataagtattcctcagaaattcattatttaaaatgttgggttttatttctttaaagtggtccragaatataaagatactagcaaagcaatcagaatacagaaactaa

SEQ ID NO: 528381 - DNA, 441 bp, Homo sapiens
agaggtctatcaatatccttcccaccatttaatatgttcttaatctcagggaaattctaaatcatattcttctcaattgtacagttgactcctgaacaacacaaggtttaggggcatcaaacctccctaacccctccccaccaccccagcacagtcaaaaattcacatataactttggactccccaaaactaaactaagagcctactgttgactggacaatccttaacacatatttcgtatgctgtatgtattttacactgtagttttacaatgaagctagttacagaaaagaaagtgttattaagaaaattatagggaagaaaaaatacgtttacagtactacagtatatttatttctctcataagtttacaatcctgtgtttacaagatggatccttcttctgaaatggcrgcacacacagctgcagacctcaatctag

SEQ ID NO: 528382 - DNA, 448 bp, Homo sapiens
ttagaaaggcacagaaagaagcagtgtttgatgggaacgtgatttttcaagtattttgaattttcaaactcaccacattaactgagtaaaatgaaaaaaatatataaacttcctctgaggcagaaaaaacatttggcattttcaagatagaattataataaaaatatctcgccccaatagaatacaaagaagcatccttaagcaaatagaaggcatctacggaaatatcacactgaagtttgaactaataaattattcatttaagatccagaagaagacaaagtgtcctctttcactattgttctctctactgtatgggaggaattaaccagtgagacaaatcaaataaataagtaaaacatacacagttaagaaatgaaaaatacaattctaaatttttaaacaactccattacctayacataaacttctagtgactgtaaaaatca

SEQ ID NO: 528383 - DNA, 653 bp, Homo sapiens
aaaattaccttgaaatagagcagaatacccaatatgaaacaaagtgggcagattagtgaaatggtgtttgcctagaatggatgtttatggrtctttgagtttgtgagcgacttaaggaatctccgttatttaaccgttactaacatagggcttttactatatgttaggcactatcctaagtactttacaaatattaattcttataatgactttgtgaagttggtactatgatcatcaccattttaaagatgaagaaaccaagcacagagaagttaaatgatttgcccgccctccaatatctgaatcaggcacaccagctccaaagcgcatgctttctgtcagtgctgcctgtcatctacatttgggaatttggaatttaaaagtctggtgctaaaaaaagacaaaacaagacaggcacacacacaaaataaaacattaatctgttaacaggtttttgtgtcaagatttgtgataagatttcacatttgatagtcatagaattttagaactgaaagtaatcttagagatagcttagtaaatacaaagctgttagtaatttataaattagcataacttacaatgctgtgtggtttagtggtgttcagtaatgtgaaggttatttttcctgtggtattagactactgtactttttg

SEQ ID NO: 528384 - DNA, 503 bp, Homo sapiens
gccacccagcccatgcccctgtaccagccctctgtcccttcttcatcccactgtctccacctacggcagaccctttattgatcttaacccaggtctactgtgttgctgtcgttcccacagactcattttcagaatctgttctgccttttcctttgtctgcaactgaagattgtccctttggtctggtcctcattctcgtacccctatctgtttcttatttaggggagttaggagctttacatcatatcttacagatttctgtaaaatcaggaacaaaagggctgaggatgagcatggagactctttttgcagcatagagtcgcagggagccgggtgggtagcgggccatagggaaatcacaagcattgccaggttccctgcagacctctgtggcttgggcatcatttgcagtrggactcagcattacacggtgcacgtctcagcagcccgtgggaccgtggggctggacggccctcctcctcagcaccaccttcttgtcaaac

SEQ ID NO: 528385 - DNA, 551 bp, Homo sapiens
aatctctgtcctgcctttgattctttgggacacaagatgagaggagaagcagggtgctgagaagcctgaggaagacaattcaaagcagaggtctctcggggaaggcggcgcagcttgagctccccacrtggcgtccgcccagacactgctggaaccttccacctccagcccaggcccctcctcagtcctggtgcctggaaaagtgggaagaggtgggaaaaatccttcactcctctgcaggccccggcccagttaactcaccacccctgcagggtgagccagaacgtgcctcgctgccacaggattggctgttacctctcccgagaccggcccggcttcctacctgccttccctccctccctccctttgtttaggtctgtgctcctctgcttcccccagagacgcctcccctgctgactgctgtagctagccttgccccatcccaccccttccctctccatcctcgctcttttctctcctggtttatggtttgtctcttcctcaaatgcaatttgcaaaactctcctgaacgaaacaacagcttctgggag

SEQ ID NO: 528386 - DNA, 546 bp, Homo sapiens
accagcatctcgctcaagctaacttcatttttcatttcagatacattagtagcrtccaattgctctccttccaaccactcatgccccatctaaacagttatctaaatagcaagttttgaaattgtccatctcatcatttttctccctatcttgaaacttttgagtggctcattgccttcaagaataaagaaaaaaactctttagcatgaattatagggtcagcctaatatagttaagaataattatcccaactccagcccctgttttacatgctccacatatgtaaccattcaagtccttaaatactgctttaaaaactttacacatgacattacctttgcattcccatgtgcccctttcacctaaataacttctacacagtcctcagctgtaaactttaaaatcattttctcaggcaagccttgtttgcagccccaaccccattcttagacaaggttacctcatcctcacttgcaataattactcacctggctgatctcatttcgcagaggtcaacccactctctcctttccaagagtgtaaaaa

SEQ ID NO: 528387 - DNA, 598 bp, Homo sapiens
caccaaaattagctttatcaatgtcaccaataacctgctggttcccatgtacaatacactcttttattaaaatctcacttaacctctccatggccttgtaccctgctgatcacctttcctccttgagttttcatggcaccacctttctggttttctgcttacctgtcagctgattcttctctttattcttcatctcatcctttgcatctaggatctgtctttcatactcaactatttgggtttaaatccctttccttgagtagcctcatccagatccatagattcaagtcccagacattgatcctaagacccagaactatagataagacatttccacctgaacaaaccttggagacctaaactcaacaggccccaaactgaactaagcgtctacccttatgccttccccatactgtccaaatcagaaaattaactcctcagktgaagttgatgctattaatctatgaatgaccctttgagtagcaagtctgaaaagcaagaacttttttcatgactccaacactagattatcaagtcttccttgtttatagcccctcgctccgcatcatccccacctccattgccttaattcaagagg

SEQ ID NO: 528388 - DNA, 633 bp, Homo sapiens
tgaccctcagaggaccaaaagacgtgtcagataaatccttactggtatgtgcagttttgaggtgtggttgcttcttatgtggtgtgttgtatattaaccaaaacatttagtgtagtttatttgtccttctctgtcctcccatagccactctgtatgctttaggccagctcttctccaagacaaatgaggaagcaaaactggcaccttgacctgctgccattsaaactttagtcataggggaaaaaacatcctctctgcattctaataaagtttcttaaaaatgtaataacaccctgccttgtactattcctccaaataaatgaagacttcagcccttccccttaagttgttaattctctaaccaaaataattttatccttgacttttataaaactgatgcctacatatatatgtgaacctttatttactgatatgacaatccagtgaagaaacatctgattttctgccatgaacaaaccaactttcaccttgtttaattcagggatcccagctctcttaaaatctggagtaacttgaaaaactatgcaagtagaaataattttattttctcaatgcgtttgtctgagttttgttttgtttgtttgtttgtttgttttttgtttttgccacgag

SEQ ID NO: 528389 - DNA, 633 bp, Homo sapiens
tgaccctcagaggaccaaaagacgtgtcagataaatccttactggtatgtgcagttttgaggtgtggttgcttcttatgtggtgtgttgtatattaaccaaaacatttagtgtagtttatttgtccttctctgtcctcccatagccactctgtatgctttaggccagctcttctccaagacaaatgaggaagcaaaactggcaccttgacctgctgccattcaaactttagtcataggggaaaaaacatcctctctgyattctaataaagtttcttaaaaatgtaataacaccctgccttgtactattcctccaaataaatgaagacttcagcccttccccttaagttgttaattctctaaccaaaataattttatccttgacttttataaaactgatgcctacatatatatgtgaacctttatttactgatatgacaatccagtgaagaaacatctgattttctgccatgaacaaaccaactttcaccttgtttaattcagggatcccagctctcttaaaatctggagtaacttgaaaaactatgcaagtagaaataattttattttctcaatgcgtttgtctgagttttgttttgtttgtttgtttgtttgttttttgtttttgccacgag

SEQ ID NO: 528390 - DNA, 633 bp, Homo sapiens
tgaccctcagaggaccaaaagacgtgtcagataaatccttactggtatgtgcagttttgaggtgtggttgcttcttatgtggtgtgttgtatattaaccaaaacatttagtgtagtttatttgtccttctctgtcctcccatagccactctgtatgctttaggccagctcttctccaagacaaatgaggaagcaaaactggcaccttgacctgctgccattcaaactttagtcataggggaaaaaacatcctctctgcattctaataaagtttcttaaaaatgtaataacaccctgccttgtactattcctccaaataaatgaagacttcagcccttccccttaagttgttaattctctaaccaaaataattttatccttgacttttataaaactgatgcctacatatatatgygaacctttatttactgatatgacaatccagtgaagaaacatctgattttctgccatgaacaaaccaactttcaccttgtttaattcagggatcccagctctcttaaaatctggagtaacttgaaaaactatgcaagtagaaataattttattttctcaatgcgtttgtctgagttttgttttgtttgtttgtttgtttgttttttgtttttgccacgag

SEQ ID NO: 528391 - DNA, 581 bp, Homo sapiens
ctatccatcagctttaattattcaaattaacccaccttctctgattaattttggctttaccccgatgttttgttttacaggaaaaaaaaaaggaggggagtttttttctggatacctgtgcatatctcctcattggttttaaattgaagacctctaaaaggaacactctgtattggtacaaatatcaccagcattgcctgtactgtaaagctgaatgtaaggtgggtggggaggggagaggaggtaagcaaagacatcgtcctctaccaaaatcaatttatctaataggaaatcacaaatatgcatgatgttttgcaatacatacaatctgtgtgctgataggaaaaaaaggcctagaaytagaaataatatgtttatggaatgaccagcttctaataaccaagaaatcagtatgggattcctataggaataaccaaatggcaggagagctatttagaaaatattctgttcggatgctaatgaaagggaatatacaggtatacagctttataaaacagtaagacagggatatgccccttgctctgcagggctgacagaatgatttaaacaggaacactggg

SEQ ID NO: 528392 - DNA, 592 bp, Homo sapiens
caggtggctgccattatcctccagtctcagaatttgatttttcatcccaaccaaagaagaaataaataaattcaataagtagcacatataaaaccacacatgacccaggccttcagcattactagaagacagaatataacaaactttaaattgtttataaatagtaaaatgagcaaagatatagaggatggaacaacagaatyggggttgaaatctttaaagtagattttagaataaaaaatatttaatgagaaaaaggaggaattttataatgacaaagtcacaattcataatgaaaatataataatacttaatatcaatgcatctgataagatcaacctcctacataaggcagaaactacagaagatataagcagaaatcgacagggacatactattgatatagtcttcaaaacaccactctcagaataagatagaacaattgaacaagaaaacaaaatatagagaaccaaatgacataatcaatgtggcaatttttacatctaaatgtcaaatgtctcatcctgatacagatgaaaaatatatcttcttatgtgaagaagatatattctttattatcttcttctcaaca

SEQ ID NO: 528393 - DNA, 648 bp, Homo sapiens
ctgttcgttaaggtagataatgccactcttttaacatgctggtgttggagctttgcagacccatcttagttggcttaaaggtagaacaaatagctattgaaattaaaggtgacaacttgtgaccccaagasctgtctgaagtccagaaccagatatattatgacagtggtatattttatttccttaaaatttaacaaatacatttcactttaattcaggtaatactttttgagtccctctatatgccaggcttgttgaaagagttgaatttgtttggaagtgtaatgtaggaaacttacatgagggccatttgcaggataggagaacaaatgaagaccctgacatttagactacctttatccttctttggatcactccatattagaaaagtgactctctggataggtattatcactaatttgcatgtataaaaatagtttatgtttactgttgcctatgttttgtgctgatttagttaataaagaaacacagaaaggaaactaagttgtcaataaaattccagcaaggagaagtaagggcaatatcaggttagctgttgtctctttaatacatagtagtgtcaagggagaagaaaaaaatcccttgtgacacatatctatactcatttttgttgttgcgaatatgatt

SEQ ID NO: 528394 - DNA, 662 bp, Homo sapiens
cccatgattcagttacctctcaccaggtccctcccatgacacgtggggattattacaattcaaggtgagattcgagtggggacacaaggccaaaccatatcagtgctctctataggtataccattcttaatcttttaaatactattttttactgtaccttttccatattaagtatatttagatgcacaaatacttaacgtgttacaactgcctacagtattcattacagtcacatgctgttaaggtttgcagcctgggagcaataggctactccttgtagcctaggtatgtaagtaggctagaaaatctagttttgtgtgagtacactctatgatgttggcataacaacaaaatcacctcatgatgcatttctcggagcttatctgcttgttaagtgacacatgactggagatcagctttgagcacttactgcatatttttgactgtgctggttacaatagaacgagacatggtcttcccacccaaggagcttactgtctactgggattgataaagcaataaagaccaaatgttgaagacagtgtataaggactaaattgagtgtgggacttgattgcgcttactatagaaaaggcttcacgaaggaggwagggataaagctgaaggatctggaaaggctcagttagacccccttacaacag

SEQ ID NO: 528395 - DNA, 428 bp, Homo sapiens
aaacaggagaaatcgtccttcatcgatgaagtttgtcacagtgggaataacccagcctgcccctcccgtggctagaaaacagccacaagctgaggccaagaggcctgtagaatgtactgcagtgtgtgctatctgcagttggaggatacaaaatgagatttttttaattaaaaaaagttttattctgaactgctcttagacttacagaagttgtaaatagtatagagagcttctgtacaatgctgattcaccttcctttaatgttaacatcctccatgaacatagtacagttatcaaaaactggaaattaactttggtacaagactattaattaaactatacatcatattccaatttgaccagttttttcmctaaagtctattttccattccaggattctatccagtatctcacattgtaattaattg

SEQ ID NO: 528396 - DNA, 499 bp, Homo sapiens
acttcccaggaaatctaacctaagataatcacaagggctttcctgggatcctgcttagctttagtgcttatccacctgcatttctcaagtgggaataagaaaccccagtatttgttttgctaaaattgattatttacaccatcaactcagaactacattagagctgcttttccaatagagctgygtttccaaaaatctcatcatttttactaatcataaaagatggaaaacttgaggctatcacccataattaattagtgcatcaaaaacattaagtatgagaaacatttatctacattttccaaatcagtaaaaataattgtaaaaaattatgactgttctttctctcagatgtctccagaatcatttagtgatatctgggtcttctttgggctgttcaacttcctcttcctctaatgggtatccctcaagggtctctgatgttgccttgttcttttcctaaattggctcatttcctggattttctttgcctcctggt

SEQ ID NO: 528397 - DNA, 572 bp, Homo sapiens
gcaccttgacccaagcatgcttcccccatagggtgctggagatgatggggtgcctcttctcacccttctcccagtgagctccagcccctgccacaatgtttgctggtgttcacctatagcctttgcatgacacccagtgacacattagcccttccagtcctttcctgtggttgtttttcactgaatacattatgactatctttctacataagtaaccattacataggaaaacattgtcttttaagaaatgactgcatagacatactagaaggtaatmaaccaatccctactgactagttgtttccaacttaggtcctttcaatttttcacaattaaaaacaatacagttggcagtaaataatgtacaaacatctttgcatgttttctaatcatttctttcatataagtttttagaagtggaattgctaattcaaagaatatggacttttaaaagggttttgatatgatctgccaagtttttttgtttttgtttttgttgtttgttgttgttgttttgtttgttctgttttgtttttcagaaaaatggtattagggtaggttcccaccaagac

SEQ ID NO: 528398 - DNA, 562 bp, Homo sapiens
cccaagcatgcttcccccatagggtgctggagatgatggggtgcctcttctcacccttctcccagtgagctccagcccctgccacaatgtttgctggtgttcacctatagcctttgcatgacacccagtgacacattagcccttccagtcctttcctgtggttgtttttcactgaatacattatgactatctttctacataagtaaccattacataggaaaacattgtcttttaagaaatgactgcatagacatactagaaggtaataaaccaatccctactgactagttgtttccaacttaggtcctttcaatttttcacaattaaaaacaatacagttggcagtaaataatgtacaaacatctttgcatgttttctratcatttctttcatataagtttttagaagtggaattgctaattcaaagaatatggacttttaaaagggttttgatatgatctgccaagtttttttgtttttgtttttgttgtttgttgttgttgttttgtttgttctgttttgtttttcagaaaaatggtattagggtaggttcccaccaaga

SEQ ID NO: 528399 - DNA, 591 bp, Homo sapiens
tccaaaaagcatgtgttggaaacttattccctaaggcaataatattgggaagtatggcttacagggatgtgtttaagttataagggctccacccgcatgaatggattaatggcaattataaaaaggacttgaatctgcaagcacactctcttgccttcttttgtccttctgtcttctgccatgggatgattcagcaagaaggtcctagccagatgctggtcctttgaccttggacttctcagcttccagagctgtgagccaataaatttctgttcattataaattactcagtctcagktgttctgttatagcagcaaaaacagatgaagacaaataataggtaaatgtggtcatctggatgaaggatatggaaaattggatgaatggcatatggcattttttgtgctgctcttgcacctttctgtgtttgaaattgaaattaaaggttataaaattaaaagctacaaaaactgatttggataaaactcaataatagtattgaggctttatttttattcatttatacttcactacgttctaagtaggattaaagcaatttaaaagcctatctattcaacaaaatttttaaaa

SEQ ID NO: 528400 - DNA, 590 bp, Homo sapiens
ctgtccacccaccgaacttctggcgaaaactgctcttccaattagtcattacatttcctcttttggactyggaattttaaattatgtcatttaacatctcataaccaaaacccacaaatacttacctcccttagaagtccttgaatgtcttagaaataaataaggaacaaacaataaggctctagaactgtatcttagcagcagagccagttagcaattttgccttcttacctggctttgagaagtgtcaaagtactgcctggtgaaagccaagatatcttctgtctcattctgtgaaaggaaagaggaatcttcatcctgcctgaggctcagtaggctgtgtaggtaaaatttatactctttattactcatgttgagctttgaagaacagatctcttcctgatgaataatgtaatagagaaggagaagagaaactctctggaccacttcttctctaagctgatcttcaaaatttcctccagctattagtaatagtgcatctggttcaaagcactgtggaagaaaacaataacaacaacaaaagaaacaaagcttagcaaaatagttccagaacactaatgaccaccagg

SEQ ID NO: 528401 - DNA, 562 bp, Homo sapiens
tgatggcaaggctgacaccaagacccaaaaagcgaatccattgaaataaaagtgtaatgaaaaacttacacttttataaaaagtgtaaataaaaaaatggaaataaaagaggttctttgtacaaaatagcctcctgaaactaaactattggtactattagctacaatttgttggtagccatgtgcccagcaatgtgcagagtatcttttgcattcagttattccttggtgcataatctaattggttttgaaaaatgcataaagtaatgaattttttaataagaaccctatattattattttaagtgtgaaaaacaaaatgtctccagcctatgtaataatccaccaaatatttctaaatatttgatttttataatataaagcaactagaagatcaattactcaattatttaatgcacaatgaattaatggatacatttgtgtacggtatgcaaggatactgcaaagaacacakgaattacacctttcttcatgagaaaagtttactcatagaatgtgtgaaaaccaagactaaagcggataagaaacttgcccaaagctaca

SEQ ID NO: 528402 - DNA, 655 bp, Homo sapiens
gctggccagtcaacagagggtatcatagagtagtggttacgtaaccagaacgtggacacagacttgggttgaaagcctgtctctaccatgtactagctgcatgaacttgggcagagtataaagacccagttttaaaaatctatgaaacagtatgtatatcataagttactgttgaaatgtgatgagataaaccatgtacagttctcagcaccatttctttcacatattggtatatgtatttttaaaaatctctactcctgaacccatcagtaggcactcttagttttctctcctagcctgatttattctgtacagataaggccagagaaagaggtcagtagcttggcccacctattccctggcacactttgttagcctctggccaacttggccctatgaaaacttagcagcactgagaagtaaaatctcttttcctgacatgtgtagaagtcaaaggaaaattttcctgttatcctctgaaggtttgcttaaaaacaaacaaacaaacaaacaaaaaacctgacaaaagccagattaaaatgaaaaaagtcatacaaatgtatgtgcttaggtaagaaccacagagtgattacccyagcccctaatgggtttcagaaacacgtataccatctcgaggttacagaaagaatgggag

SEQ ID NO: 528403 - DNA, 530 bp, Homo sapiens
gcgaaggtcccaaactggttctgcttccttcttcatgctctgcaagtctagcctgggcatctatactggctgagggatggccgtgcagataataaaagcaggagtcccagtacctgcttcatgaccaataaatcacaggtgcttgagaccagtagcaggtgtatccagccaggctgcaactcacacggggaggggactcacagcagaggtgctgtgcaccagggcacataaaatactgcaacagcctcttccgacaaaaacatttcttacataatccatctctagttacagcgtactgacacacggcagcaagggcccagaagggagcctggcacggccagataaagtcagggttttttkttttttttttttttttttaataagactcaagatcagtaacacaaaaagctcagagactgtagaagcttagctcctcttttagcctggaacttccttgagggaatcaaaccttgccagataaaccatcatattcagagaactggttccagcagacgatcagtcccacactt

SEQ ID NO: 528404 - DNA, 602 bp, Homo sapiens
accttacatttgaatgtctgtgtattcgtccattctcacgctgctaaaaaagacatacctaagactgggtaatttataaatgaaagaggtttaatggactcacagttwcacatggctgcggaggcctcaaaatcatggcagaaggcaaagaaagagcaaagggtcatctcacgtggcaggggaactcccctttataaccatcaaatctcatgagacttcactatcaggagaacagcccaggaaaaacccaccccatgattcaatgacctcccattggatcccttccatgacacgtgagaattatgggagctacaactcgagatttgggtggggacacagccaaaccatatcaatctgcatgtaaaggggtatgatttctgctctcttttaaattaggccagatgacacgtgtagctttgattatgtagtgaaacatgtaatctccttgcttgagtcacacgggcagagcctgacaccacatcaaaaggccctgagtacagatgaagtagaaggaggaccgaatggaagaatgcctcttgtcattattcgagtgcacgatcccttgctcgcctctcaacattcatctctctttacgtcttata

SEQ ID NO: 528405 - DNA, 522 bp, Homo sapiens
tggcacgtttggtgattagatttaaccagtctgcagggcagagagaagggaattgtctctgtttaagggatgaggaagagcattcccgtcccattcctcgctttgcaacattgaccatattcctacattgatttagctcctccaactaaccagttgatttccagtcaacatgtttgttaaaatattgagcaagaattggcagcatctgacaatgctggccctggcagaagaatccccacatgatgttttggcaagagcagttcaaaggactcttctgaactggcaccacaaaggtttgcattcccaggagtagtgaagcagaaatcatttgattatttgctgagtatttacccaagcacaattacactcgataggcagatgaattccaagagataaactttsagtctctcactaaagccgagagaaacatatctgcgcattttggctagagacgatctgccagtggaaacccatctctgtttggcttaaggaaggctgtgcagtaagaccaacttagggggc

SEQ ID NO: 528406 - DNA, 613 bp, Homo sapiens
cctgtgcaataccatttgctaagtatattgaatatcatctctgaatgggacccactaggattgaatttttaagaccctggtgttccctcctaaccctctcagttgatatattcccaaattaggaaatacattgttcctcgcatcccattccacacaccctggtctttagggtatcaagttttgatctttaatctgagtagagagttttgttaatctcttatggttttacaatctttacagcagggaaaaaaaagcaatgtgattgttkcatgctaagctgcctaggaattctgttttccccttagaactaggctgaggaagaggaggggtttgagaaactttaaaatctttaccctcctatcccagtcaccaggcaaagattcaaagacagtgtctctgatcagctttttaaataaagtcctttcacttctctttgattcatgacttcacatttcaaatagccctcagacattaatgaaaactttcacactcaaggtatggcctcaatggtgtttctttgtagtggttttattttctaggaaacagttaatttaatgccattagctaaaatcctgcattgaaaaatgaatgaacaaacatagaatagttggaa

SEQ ID NO: 528407 - DNA, 571 bp, Homo sapiens
aaatatcaatctctttccttagagtggtgggacgtgtctgttcttgcattctcaagtttgtggaagcagttttagatgtgcagaaggtttggccatccaaaatagaaaatctagggctgcctttatttaagcagttctttatgttcacacacttcaagtctctcagtccttataagagcataagtaaacagaagagaagcagtggtttaaaaataggtttttgagtcaaatttacctagtcaatggtggcacgggtttgcgattctgagtttttgttctagttatgtataccatactttctctttcattatagtggtagatgttccacgtggactttttgtttgttttcttcctcatatgttatctctcccattactgtctctccttattatgggtcatatatttctgcttctttacatgcctaatcattttttatgggatgccagacacagtgaattttacctttttggatactggatattttcatattcctatatatattattgaactttgttatggcacatgcagttacttrgaaacggttcagttttgtgtgtggtgggactaaagc

SEQ ID NO: 528408 - DNA, 565 bp, Homo sapiens
catccagtgttcttttgagttgcactcattgaacccccttctcaggttttaaaaaatcaatgtacacaattcattcaaagtgtacctgtaggtggctgaatatgacaaatcattatttcacgtattatttgcttagttactgtttcaagacaacaattactagtgtagtggcaattctttgtgtaattggctatgcacacacttggcccagtgctacccagggaagctccaaggctcctgacatgcccctcccaactcytgagctgtcgtgtgaaattgagggaactgcccctctgtactctctgaggggacagagaatgggggtgggatgggactatttccaatcaacagcgagatgcattgaaagcatctcttggtgcttctcttgtgtgtctctgctgagggagtaacctttcaccccaagcccatacaccccacagggtttgccttgcctttccctgtcctcttgtaacaaaggatgggctggaagttgtgggtggtcgttagtggtagagccaggtctgtcccagggcctcacagaatgctgtggagggatagttggttg

SEQ ID NO: 528409 - DNA, 565 bp, Homo sapiens
catccagtgttcttttgagttgcactcattgaacccccttctcaggttttaaaaaatcaatgtacacaattcattcaaagtgtacctgtaggtggctgaatatgacaaatcattatttcacgtattatttgcttagttactgtttcaagacaacaattactagtgtagtggcaattctttgtgtaattggctatgcacacacttggcccagtgctacccagggaagctccaaggctcctgacatgcccctcccaactcctgagctgtcrtgtgaaattgagggaactgcccctctgtactctctgaggggacagagaatgggggtgggatgggactatttccaatcaacagcgagatgcattgaaagcatctcttggtgcttctcttgtgtgtctctgctgagggagtaacctttcaccccaagcccatacaccccacagggtttgccttgcctttccctgtcctcttgtaacaaaggatgggctggaagttgtgggtggtcgttagtggtagagccaggtctgtcccagggcctcacagaatgctgtggagggatagttggttg

SEQ ID NO: 528410 - DNA, 609 bp, Homo sapiens
agtctcttggatgtagctgctatatgggtcttcatcctgttcttggccttgatggtgccctttgtcgtgacccatcccaaaccagaagcctggtttcacattgtgtgtatgttccaggagggctggactacaggttggacagaggcctgcaggttttgttggttctgggtytcttggccacattattatgtcattaagggggtccctctggttgcctcttatttaataacttttcgtctgcattattggtccaggaatttgggaggggtaaacacaccactgctgggaaattggattgtaagtacctcagtctcttctatgtatgccaattaccacaagtccactctagagttttgtctcctcttggtttgcaaatgcatttgtaggccccattcttgagagagagaaaaagagagagagagaaagggagccacaaggcttttgagaagtaaagaaaaagctttctggagccccaaagttcccctttctatcctggccctgagttttagtcacctctgagattcttggctgaggtagtgtctttttctactttcagattaggactgacaactgaatggaaaaaaattaacattgtttcagtgctttctg

SEQ ID NO: 528411 - DNA, 624 bp, Homo sapiens
tcagctccaaatcatacattccttgcaaacaaaattaccttcattttctcctttggttcagcggagctagcagttaaaatgtgccctaacaagctaatcaactaatttttagaatatgttggaaccgtttaatattctaaaagaaaacaagaaaaagttgctaatgggtctgcaggcataaacagaaataaatagacaactggttcattgagcattagcatacttaagtttgagccagtcacggtggaattcattttgcaagtcaaaaaagcagtatctatttgtatccataagccaaacaacttcatttactcggtacatacttgagcagataaccttggagtgaaggtaacaaggagaaagaattcttttgaagagtggtgtgttctctcagagcggggagtgaggggctgagagaggagacatggcwcagagaggggctgagctttgcattctagggttggcctgctcgctctgcagggaagaaatgctcagctgtgtctaggggtggtccaagagctcagagggacccaaagccaagtgcatcccaagggagatgacaaacgactgtttctatggtggccatcagtgaaggagccttggaaagcacctgttgagggccta

SEQ ID NO: 528412 - DNA, 588 bp, Homo sapiens
ttttcttaaatactgagaaaaccagctccttttacggttgcttcataaaaccatttctaatgagacttatgccagagctatgggaagaataatttgctgaccagtttcaacaaactgcacccaagtgayttttccaaagagaaagcgtttgagggcgaaggtaagagaaatcctagggcaggtgggagaacgtgtaacagctgcatggtttttttgttgttgttttgagatggagtctccctctgtcgcccaggctggagtgcaatggcatgatcttggctcactgcaacctccacctcccgggttcaagcgattctcctgcctcagcctcccaagtagctcggattacaggcacacaccaccaggcccagctaatttttatatttttagtggagacggggtttcaccatgttggccaggctggtctcgaactcctgacctcaggtgatctgcccacctcagcctcccaaagaactgggattacaggcgtgagccactgctccccgccaacagctgcgtgttagactcatctttatcaagactcaaatacagttagaagatacttgttctggtatttacaaaactggt

SEQ ID NO: 528413 - DNA, 464 bp, Homo sapiens
cttcatgtttaccaggaagaaagagtgttgattttgcagatttttgataatgttttcacagccagtgttattcccaacccatttttaaatgcaatctgaacaacacccctttccacactggattccttgtacttaaatggttccagctacctcaggcctgagaaacctatttctctctatagaccacacatcagtttggctgagggaagaacagagggaaagcaggattgcaaggatggcaggtgcagggctgaaagaagaaaattaaattcaccagacatgggacacctgggctgaggacctttacaccaaggagcttaagatctccsttggccacatgggaccatctagaaaggactcttttaagtctaaccatctttgggtctgtggttgtactgtattgattccatgttctcattttaagtgagctaacgaaatgcagcaagccatgaaaatttaaaagg

SEQ ID NO: 528414 - DNA, 464 bp, Homo sapiens
cttcatgtttaccaggaagaaagagtgttgattttgcagatttttgataatgttttcacagccagtgttattcccaacccatttttaaatgcaatctgaacaacacccctttccacactggattccttgtacttaaatggttccagctacctcaggcctgagaaacctatttctctctatagaccacacatcagtttggctgagggaagaacagagggaaagcaggattgcaaggatggcaggtgcagggctgaaagaagaaaattaaattcaccagacatgggacacctgggctgaggacctttacaccaaggagcttaagatctccctkggccacatgggaccatctagaaaggactcttttaagtctaaccatctttgggtctgtggttgtactgtattgattccatgttctcattttaagtgagctaacgaaatgcagcaagccatgaaaatttaaaagg

SEQ ID NO: 528415 - DNA, 547 bp, Homo sapiens
caggacagctttgaatgtggcccagcacaaatctgtaaactttcttaaaacaatatgggatgtgtgtgtgtgtgtgtgtgtgtgtgtgtgtgtkttgttttgttttagctcatcagctatcactagcattagtgtattttatgtgtggcccaaaacaattcttcttcttccaatatggcccagggaagccaaaagattggacacccctgccttagccttttggactttcctctgaccataaatgctgctgtcctttgttcagctttgactccattccttcttcctgtggcctagacatgcaaatagggcattccaatgttaggagtgctttgcagccccttaaaagattttctagtgctttcctggctcccaaatttccccaccctctttggaccacagagtttttctccaagctcagataacctctgactcctcatttgcccttccaaaaactttgcttctccccatggtgttctctctaattttaagctgtgactggctttctgggctcccaggcataaccatacagggctgtgttagtgactca

SEQ ID NO: 528416 - DNA, 529 bp, Homo sapiens
gagaactgagttggccaggtayggtggctcacgcctgtaatctcagcaatttgggagagctgaggtgggtggatcacctgaggtcaggagttcgataccagcctgaccaacatggtgaaaccccatctctactataaatacaaaaattagccgggcatggtggcaggtgcctgtagtcccagctacccaggaggctgaggcaagagactttcttgagcctgggaggcggaggctgcagtcagccgagattgcaccacttcactccagcctgggcaacagagtgagactccgtcgcaaacaaacaaataaagcaaagagaactgagttaagtggccagggccacatggcaccccccaccgtggagaacagggtcttcagccacctctgtaaggaagcacttgcttcatctgatcaggctgaggctgggcagctcctctggccacatcctactctggccttggaattgttctgagagctctaagtgcttggtgctaagaacctggagaagaccagagctcctgccagcccc

SEQ ID NO: 528417 - DNA, 565 bp, Homo sapiens
ggactacaggcgcgtgccaccacacctgcaaattttttaaattttattagagaaagggtttcaccatattgcccaggctggtctcaaactcctgagytcaggtgatccattcacctcagcctcccaaagtgccaggattataggcgtaagccaccgcacccggccaagcactcaatactcctgatcactggtactcagggagaacctgtatttctatgccatgctgagaatcaggcttgctaggaacagtctcctcacaggtcagctcagggtctgccactactagacacctgacctcagatacatcactggcctattatagtactttccctgtgtgcctcccctggctgaggcaaggtgccacatccattatgtacctctagagcaccctcactacctgcacctccacacgcactgtatcatactagaaccttcctatttcatagcctgaaatgcactgttgatgtctgttgtggaagacaagagccctgccctctgggtgttcatgaagaaataaacacctgcagggtggggcccatgtctacagtgttgatgagactgctct

SEQ ID NO: 528418 - DNA, 477 bp, Homo sapiens
tacacacacacacacacacacacacacgcgaaagttttatacaaattaaaatttaatttaaaaagagaagaaacacagactcactctattcccagaactcacaatatgggggaggaaacagacaagggaaccagcaatatcaacagaagtagaaagctgaacacaagaagaaaggcatctctttttttgtttgttttttttttttttgagatggagtttcrctcttgttacccaggctggagtgcaatggcgtgatctcggctcactgcaacctctaccttccgggttcaagtgactctcctgcctaagcctcctgagtagctgggactacaggcatgcgccaccacgcccggctaattttttgtacttttagtagagaggaggtttcaccatgttggccaggctggtcgcgaactcctgacctcaggtgatccacctgcctcggcctcccaaagtgctgggattacagctaccgcg

SEQ ID NO: 528419 - DNA, 477 bp, Homo sapiens
tacacacacacacacacacacacacacgcgaaagttttatacaaattaaaatttaatttaaaaagagaagaaacacagactcactctattcccagaactcacaatatgggggaggaaacagacaagggaaccagcaatatcaacagaagtagaaagctgaacacaagaagaaaggcatctctttttttgtttgttttttttttttttgagatggagtttcgctcttgttacccaggctggagtgcaatggcgtgatctcggctcactgcaacctctaccttccgggttcaagtgactctcctgcctaagcctcctgagtagctgggactacaggcatgcgccaccacgcccggctaattttttgtacttttagtagagaggrggtttcaccatgttggccaggctggtcgcgaactcctgacctcaggtgatccacctgcctcggcctcccaaagtgctgggattacagctaccgcg

SEQ ID NO: 528420 - DNA, 512 bp, Homo sapiens
gggtaagtgaagtggccttcctctttgcccccatcccttgtataccatggcccaatgtcagtgcctcttggtaaacgattgggggtgtccaatctcagcagcagatctgagccttcatacacctgtgtgggttcactgctctggcagaagaaaggatgtgggagcatccagtcattcaggtggccttcgaggaatagctccaaggcacagagcactctgatcaggtccttcctgcccaccaaagcgcaggactctaccggtcaatgcagcgcctgcaaacctgccaagcctggctgagcacctctctttccagatctccactttgtggtcatgtaacgacctgagcaatctcaagctaagactggcaaagtaaatgccgtgtaccgcaaagatgacagacggatcggagtaaacyggctccctgaatgcaccagcctgcagaaatctcttcccccaatattacaaggtgccactaggtgaccttcaggcagccagcaccagagaaacccaca

SEQ ID NO: 528421 - DNA, 657 bp, Homo sapiens
tcctgcatccattggcaaaggaagatgaatcctcaagagctttttaaagctcttccacctactccactgattcagtaggagggagaatgaatgtttccaagttctctgaatgacacaaagctcataaagtataacaaaattagttgaaaataacaaaatgagtttagctctcccttcaaaaaaaaggaaaaaaagaaagcatgcctactttcaatgattcacaatgacttcacaatttttcctccactaggatatgtattcttcctcccaaagctaatggttctctctcctcccctccctaagacagtgtagggccagatctccagaaacctgctctatctgatttgagaccccctgaaaaaatctcgacaaagcccagggtaacccatgccagagggtccttccccagtctttgcatttgctgttctctctgcctgcaaagctctttccctttttctcaccacggaaagagagcactcacttttgagagctcagatcaaatatgctttttcacyggggccagcccagactccctaaccttactctcaccagcaaaagctgctttccttgtagaccctctcacaatctgtaattatcttatttatctgtatttccctttagggggtaagaatcttgcccaacttgtttactgcggta

SEQ ID NO: 528422 - DNA, 606 bp, Homo sapiens
gcatgaatccatcctggggtgcctggaaatcagtgatctagaaaactctgacccctggctacctggacagcagggtaggacatacgtctccagccactagccacaggtggcaactgagcccttgaaatatggttagtgtgacttgagatgtgctgtaagagtcatgyacacattggattttgaagactcagaattttaaaaaagaatgtaaaatatctgagagtttttttatgcaattacatatggaaatgataatattttggatatactgggttagaaaaaaagtgttgttaaaattaattttgtctgtttctacttttttaacgtggctactagaaagtcttaaattacctttgtagctcatatcatatttctactgcacagccagactcaaggagacactcatcattctagagtggggattacagtcataactaaaaacgcaagaaggctggccatgctggtttccacctgccaactctatgatgttaaacgagttctcaatctctgatgttcagtttcctcccctgtacacaggcataacatccacaccctgggctgctgctgagcgcacataaaagaagagagctggaagcactaaccacg

SEQ ID NO: 528423 - DNA, 606 bp, Homo sapiens
gcatgaatccatcctggggtgcctggaaatcagtgatctagaaaactctgacccctggctacctggacagcagggtaggacatacgtctccagccactagccacaggtggcaactgagcccttgaaatatggttagtgtgacttgagatgtgctgtaagagtcatgtacrcattggattttgaagactcagaattttaaaaaagaatgtaaaatatctgagagtttttttatgcaattacatatggaaatgataatattttggatatactgggttagaaaaaaagtgttgttaaaattaattttgtctgtttctacttttttaacgtggctactagaaagtcttaaattacctttgtagctcatatcatatttctactgcacagccagactcaaggagacactcatcattctagagtggggattacagtcataactaaaaacgcaagaaggctggccatgctggtttccacctgccaactctatgatgttaaacgagttctcaatctctgatgttcagtttcctcccctgtacacaggcataacatccacaccctgggctgctgctgagcgcacataaaagaagagagctggaagcactaaccacg

SEQ ID NO: 528424 - DNA, 606 bp, Homo sapiens
gcatgaatccatcctggggtgcctggaaatcagtgatctagaaaactctgacccctggctacctggacagcagggtaggacatacgtctccagccactagccacaggtggcaactgagcccttgaaatatggttagtgtgacttgagatgtgctgtaagagtcatgtacacattggattttgaagactcagaattttaaaaaagaatgtaaaatatctgagagtttttttatgcaattacatatggaaatgataatattttggatatactgggttagaaaaaaagtgttgttaaaattaattttgtctgtttctacttttttaacgtggctactagaaagtcttaaattacctttgtagctcatatcatatttctactgcacagccagactcaaggagacactcatcattctagagtggggattacagtcataactaaaaacgcaagaaggctggccatgctggtttccacctgccaactctrtgatgttaaacgagttctcaatctctgatgttcagtttcctcccctgtacacaggcataacatccacaccctgggctgctgctgagcgcacataaaagaagagagctggaagcactaaccacg

SEQ ID NO: 528425 - DNA, 553 bp, Homo sapiens
aaaatactataactgcctttattccaagtgttaatattactctgtgcctagtgctgatttttaaattacttttactttattctgccttatttcatccagcctgcagatggcagaattgtttcatttgaacagcaattttgaaggctccgttttatttagtgtgttctgacattggaatgagaagtgattaaatgaacagtctctctccctattagagaagaagcamattaatgttagagacagggagccacactaagaaagtactggataatttactttttcatttggtctatcttcatttcatgatttttgcatgcttggattataaatgaactagagcctataaatgaactagagcatgatgtttaagctgtaccatatgtaaactgctgaattcccttaattactttagtcagagtaatggagcttaaatctgcttcatattaaccataaagcagtttgttctgcatttgtattttaagagtttgcttgtattaaattttttttttaatctagagaccttttagcattcatgaatcaatcatcaatttaa

SEQ ID NO: 528426 - DNA, 634 bp, Homo sapiens
cctatttaaattaaaattcattctgtagagtgccaggaacgatgattggcaggtaatacgtcacactaaaaaacgtcagtcctattctccatccccgcctccctccaaccttctcccaaaataaggaaaaataatacccggcctgccattttgcatactgttaaatactgcaagaattgtgttaactgcatcaatatcattactaaacaacaattttctataataaatttttggtatgatttatctcctaaatgtttgctctttcaagcgaatatttgcttgaaacattctcctggacctttgtctatcgtgatgccgtaggaatttacaaatttaagtcttccacgagtcatggcgtggggtaaaactcgactggcctcaatgaaaacacctcctaacagagagaggcctagagaataagtaagaactcccaacagtggcttttcaatctcggcaaccttgggcagctttttctcgtccgagacgtttgacaaccctaaagaaacctgagccttgattggaaagggggctgagggaggaragtttgggaaccctctctgcgcctcacaaataacccaaattccaaggcaaggtcacaaagccatacaaaccagggggcctagggcagagtcga

SEQ ID NO: 528427 - DNA, 650 bp, Homo sapiens
tgtcctgagagctgactgaaaggcaacatcccagaccatgggatttttagttaaaggatttaaaagttacacttagctgtaaaaaattaaaattaagaaccttggttgccagttaatcccagttttttccccacaccaatcctgatttgtgtctactgttggtatcttaatcttgttagtctctaccagtctgtgccttagtagcactctctgtaaaaatgggagaaagcaactatttttataacaaagtagatttgccttgctcataattctgaggattaggaataagagtctgtatttaattcattaatctttgaggatttggtgaaatgtaaaataatgattgctgcaccttagggggatcagttctgcaaatttgtgtaagataaactggagcagaaaaagatgagataaggagataaattaataggctcctaaagtaatccatgtaagaggtaatgaatacttgaatgyggttagaagaactaaaagggagatccctgatacagacaacattgtaaggataaagtccagaagcctttgcagattaaatgtggagtgtaggccagagtagcaacaagtaagggaatgaatttggatctggtctaggtgatgatagtttggtctccataaatagaaataatggattt

SEQ ID NO: 528428 - DNA, 597 bp, Homo sapiens
ctcctccctgatcaagtttttcagagaaactatgagagaacaaaaataaatctgtagaataatttttcagactccttctcaaaattgtaactaaactaaaacaaaagccaatcataaaaaagctaaacgtttgtttcattttggttgaattagaaggatttgtgttatgacctggataagaggctcttctatattttttcttttgacttaagacactattaaaatgagacttttaatattctatcctaagaarccttggacacatctataatttatattatgatttttgagaggtttcacctgaagggagtgtggagaccatcagcggtctgttgagctctccttgaaaatgctttccattactaatagatagaacctctttttcttattatttatacaagaccttctttgatttcctgcttgtgacactttggagtgaaaaactggtgactgcattaattaaaaacgaagatgagatggcttattttttttctatccagaaaatcctagccagagtccctgcaagtaggcctcagtgtgagcctgcagcctgcagggccaaacattcaggtttctgtcatttgatctgatacaagc

SEQ ID NO: 528429 - DNA, 597 bp, Homo sapiens
ctcctccctgatcaagtttttcagagaaactatgagagaacaaaaataaatctgtagaataatttttcagactccttctcaaaattgtaactaaactaaaacaaaagccaatcataaaaaagctaaacgtttgtttcattttggttgaattagaaggatttgtgttatgacctggataagaggctcttctatattttttcttttgacttaagacactattaaaatgagacttttaatattctatcctaagaaaccttggacacatctataatttatattatgatttttgagaggtttcacctgaagggagtgtggagaccatcagcgstctgttgagctctccttgaaaatgctttccattactaatagatagaacctctttttcttattatttatacaagaccttctttgatttcctgcttgtgacactttggagtgaaaaactggtgactgcattaattaaaaacgaagatgagatggcttattttttttctatccagaaaatcctagccagagtccctgcaagtaggcctcagtgtgagcctgcagcctgcagggccaaacattcaggtttctgtcatttgatctgatacaagc

SEQ ID NO: 528430 - DNA, 622 bp, Homo sapiens
aagtgcatctactgagaatcttggctgtttctcttctccccatcatcactgccagttgccctagtttaggtatgagctctctctcttttccttttgttttttcttttcatggcttggacaaatgtgatagaccgttatgtctcttttgcttctattccttttccccttagtatgttggggaatgctttgggctacaataaacagcattatttgacctaagctgacttaaaccataaaaaacttactatggaccagacacagtggctcacgcctgtaattccagtactttggaaggctgaggaggaaggatcactcgagcccaggagttggagaccagcctggccaacatggtgaaaccgtgtctccactaaaagcacaaaaattagctgggcgtggtagcatgcacctgtagtcccagctactcaggaggctgaggcaggagaatcgcttgaacctggkaggtgaaggttgcagtgagccgaatcatgccactgcactccagcttgggctacagagtgagactacatctcaaaaaaaagcaaacaaaaacaaaaacaaaacaaaacaaaacaacaccaccaaatttattatgttgaatacctgggagtcgggggtggagctg

SEQ ID NO: 528431 - DNA, 511 bp, Homo sapiens
cttgatagaaaagttatgaaaaaaatatggaactaaattccagcaattgcattctaagctgtgccctgccaggtgacacagactggggacactttttaatcaagtcagaaattaccttagtgaagggaagcaaggaagaaaatgatttaaaaggaaatatggttcttattcttgagaatcttagagtctaatgaggagatgaaacagacttgatggtgtaagaacatgatcaaacaatgtcagtaaatgaaaatacacttaatgaytacctaaaatttattctaagtttttttttttttttttttttttttgagacagagtcttgcactgtcgcccaggctggagtgcagtggcgtgatcttggctcactgcaatctccatctcccgggttcaaggtcccgaatagctgggattacagggacatgccaccatacctggctatttttgtatttttagtagagatgaggtttcaccatgttggcaggctggtcttgaactcctgacctcaagt

SEQ ID NO: 528432 - DNA, 511 bp, Homo sapiens
cttgatagaaaagttatgaaaaaaatatggaactaaattccagcaattgcattctaagctgtgccctgccaggtgacacagactggggacactttttaatcaagtcagaaattaccttagtgaagggaagcaaggaagaaaatgatttaaaaggaaatatggttcttattcttgagaatcttagagtctaatgaggagatgaaacagacttgatggtgtaagaacatgatcaaacaatgtcagtaaatgaaaatacacttaatgattacctaaaatttatyctaagtttttttttttttttttttttttttgagacagagtcttgcactgtcgcccaggctggagtgcagtggcgtgatcttggctcactgcaatctccatctcccgggttcaaggtcccgaatagctgggattacagggacatgccaccatacctggctatttttgtatttttagtagagatgaggtttcaccatgttggcaggctggtcttgaactcctgacctcaagt

SEQ ID NO: 528433 - DNA, 430 bp, Homo sapiens
gtgttgagattacaggtgtgagccactgcgcccagcctatcctaatctcttcatgtaaaaaagactgtcttcccactctagcagaggaagtccatgttgtgcaacccctgtggctctcaaaggtacttgaggctggatctgagagccaagtggactctcattttgtccccacttcttgctagctagatggatttagggaaaatttcttaaatgttctaagcttcaggttttttttttttttctctaaaatggaactaaaatgaatagtctctctttcataggttttcataagcatttgcagaccgtaaggctacacrcagaggacacacatccttgcctcctctccaagactaagtggggactagtggttctgggctggggtgatcagagcttccaaggagaatcaagcttccacatcttcacccacacc

SEQ ID NO: 528434 - DNA, 384 bp, Homo sapiens
agtttgtgcatagttatattaatgtaaatatattgcttgatatcaaacgcaaacataawatgactgtattgtgagggcgtgaagaggaaagaaggcacatatatggtgggagcagtcattttctagagtgggaagtcagtagataataccaaaaactggaaaattgagaaatataagaaattgagaaatgaatgttttttagagacatggaagtagataccaacatgaccagtaaaagaaatgtaaatgattgtttcaggggaaggaaggagggatataaggctcatgaggaagtatctgatattttcaactatgagtttttaaaatttttggtgaaataaaatctaaatataaaaacaaagatggaatgggaatataatgaaa

SEQ ID NO: 528435 - DNA, 384 bp, Homo sapiens
agtttgtgcatagttatattaatgtaaatatattgcttgatatcaaacgcaaacataatatgactgtattgtgagggcgtgaagaggaaagaaggcacatatatggtgggagcagtcattttctagagtgggaagtcartagataataccaaaaactggaaaattgagaaatataagaaattgagaaatgaatgttttttagagacatggaagtagataccaacatgaccagtaaaagaaatgtaaatgattgtttcaggggaaggaaggagggatataaggctcatgaggaagtatctgatattttcaactatgagtttttaaaatttttggtgaaataaaatctaaatataaaaacaaagatggaatgggaatataatgaaa

SEQ ID NO: 528436 - DNA, 384 bp, Homo sapiens
agtttgtgcatagttatattaatgtaaatatattgcttgatatcaaacgcaaacataatatgactgtattgtgagggcgtgaagaggaaagaaggcacatatatggtgggagcagtcattttctagagtgggaagtcagtagataataccaaaaactggaaaattgagaaatataagaaattgagaaatgaatgttttttagagacatggaagtagataccaacatgaccagtaaaagaaatgtaaatgattgtttcaggggaaggarggagggatataaggctcatgaggaagtatctgatattttcaactatgagtttttaaaatttttggtgaaataaaatctaaatataaaaacaaagatggaatgggaatataatgaaa

SEQ ID NO: 528437 - DNA, 384 bp, Homo sapiens
agtttgtgcatagttatattaatgtaaatatattgcttgatatcaaacgcaaacataatatgactgtattgtgagggcgtgaagaggaaagaaggcacatatatggtgggagcagtcattttctagagtgggaagtcagtagataataccaaaaactggaaaattgagaaatataagaaattgagaaatgaatgttttttagagacatggaagtagataccaacatgaccagtaaaagaaatgtaaatgattgtttcaggggaaggaaggagggatataaggctcatgaggaagtatytgatattttcaactatgagtttttaaaatttttggtgaaataaaatctaaatataaaaacaaagatggaatgggaatataatgaaa

SEQ ID NO: 528438 - DNA, 608 bp, Homo sapiens
gtttggagatacagctataagccaacatcctcggcaagccctgtaccaccccaatgccaccactccctgttccagtgggtagacatgggtgggagcagcatgagtgattacmgttagggggctaatatcaccgtctttatttcatcatgtctccaacattctgagaaggacatagtggtcactatccctcaaccaaagaaactgatgagtgcagtaggaacctgctttggagggttcacattgggactcatcaatgtggaaggtaaaaatctgaagatacaattgaaatctagatagccttgaatggtatggacaaggagacataaaatctgcttactaaatcagaataataagatgaaaggtcaataataagcatagaaaggtcaataatggaataataatagtagaggtcatccctagaaggttgaaaacattttcaagtaaatataagaaactccttattgtacgtagtagtgcaggctggaaaaatatacttatttagttcaaatcatgtgacaggcactaggaataaagttagtccctgccctcacagggttcaaggtctaaatggaataatagatatgaaataactcaacaagtaaatagct

SEQ ID NO: 528439 - DNA, 608 bp, Homo sapiens
gtttggagatacagctataagccaacatcctcggcaagccctgtaccaccccaatgccaccactccctgttccagtgggtagacatgggtgggagcagcatgagtgattacagttagggggctaatatcaccgtctttatttcatcatgtctccaacattctgagaaggacatagtggycactatccctcaaccaaagaaactgatgagtgcagtaggaacctgctttggagggttcacattgggactcatcaatgtggaaggtaaaaatctgaagatacaattgaaatctagatagccttgaatggtatggacaaggagacataaaatctgcttactaaatcagaataataagatgaaaggtcaataataagcatagaaaggtcaataatggaataataatagtagaggtcatccctagaaggttgaaaacattttcaagtaaatataagaaactccttattgtacgtagtagtgcaggctggaaaaatatacttatttagttcaaatcatgtgacaggcactaggaataaagttagtccctgccctcacagggttcaaggtctaaatggaataatagatatgaaataactcaacaagtaaatagct

SEQ ID NO: 528440 - DNA, 608 bp, Homo sapiens
gtttggagatacagctataagccaacatcctcggcaagccctgtaccaccccaatgccaccactccctgttccagtgggtagacatgggtgggagcagcatgagtgattacagttagggggctaatatcaccgtctttatttcatcatgtctccaacattctgagaaggacatagtggtcactatccctcaaccaaagaaactgatgagtgcagtaggaacctgctttggagggttcacattgggactcatcaakgtggaaggtaaaaatctgaagatacaattgaaatctagatagccttgaatggtatggacaaggagacataaaatctgcttactaaatcagaataataagatgaaaggtcaataataagcatagaaaggtcaataatggaataataatagtagaggtcatccctagaaggttgaaaacattttcaagtaaatataagaaactccttattgtacgtagtagtgcaggctggaaaaatatacttatttagttcaaatcatgtgacaggcactaggaataaagttagtccctgccctcacagggttcaaggtctaaatggaataatagatatgaaataactcaacaagtaaatagct

SEQ ID NO: 528441 - DNA, 608 bp, Homo sapiens
gtttggagatacagctataagccaacatcctcggcaagccctgtaccaccccaatgccaccactccctgttccagtgggtagacatgggtgggagcagcatgagtgattacagttagggggctaatatcaccgtctttatttcatcatgtctccaacattctgagaaggacatagtggtcactatccctcaaccaaagaaactgatgagtgcagtaggaacctgctttggagggttcacattgggactcatcaatgtggaaggtaaaaatctgaagatacaattgaaatctagatagccttgaatggtatggacaaggagacataaaatctgcttactaaatcagaataataagatgaaaggtcaataataagcatagaaaggtcaataatggaataataatagtagaggtcatccctagaaggttgaaaacattttcaagtaaatataagaaactccttattgtamgtagtagtgcaggctggaaaaatatacttatttagttcaaatcatgtgacaggcactaggaataaagttagtccctgccctcacagggttcaaggtctaaatggaataatagatatgaaataactcaacaagtaaatagct

SEQ ID NO: 528442 - DNA, 499 bp, Homo sapiens
tcctggcaactgactctcaagcacatggaagctgggagttakttgctgctgcccaaaactcagtccccacagctacacttgccaggaacagtagcttcaggaagatagcctggatttcactcatcttccatattgcacatgtgtgtgtttcattgatggaacatgattcacactgagagctttagctgcaagaaagtttgggaaatatgtcttctctgaggcttttggtctttgcagttcaggagcagttaggaggtgggactggttggttgcagagtgagctgatttactgcacttagtctagcttattaaaggatgagcttataaacaccccaggtaatatcataatacataagtgctacctaattactgtgtgggtctgttaccaagaatgtctaagtcaagaaattgaagattgtttccttaagattctgcatcctaatgtagaatctttcctattagagtataagtaaattcttttggtatgttatttaagaat

SEQ ID NO: 528443 - DNA, 499 bp, Homo sapiens
tcctggcaactgactctcaagcacatggaagctgggagttagttgctgctgcccaaaactcagtccccacagctacacttgccaggaacagtagcttcaggaagatagcctggatttcactcatcttccatattgcacatgtgtgtgtttcattgatggaacatgattcacactgagagctttagctgcaagaaagtttgggaaatatgtcttctctgaggcttttggtctttgcagttcaggagcagttaggaggtgggactggttggttgcagagtgagctgatttactgcacttagtctagcttattaaaggatgagcttataaacaccccaggtaatatcayaatacataagtgctacctaattactgtgtgggtctgttaccaagaatgtctaagtcaagaaattgaagattgtttccttaagattctgcatcctaatgtagaatctttcctattagagtataagtaaattcttttggtatgttatttaagaat

SEQ ID NO: 528444 - DNA, 499 bp, Homo sapiens
tcctggcaactgactctcaagcacatggaagctgggagttagttgctgctgcccaaaactcagtccccacagctacacttgccaggaacagtagcttcaggaagatagcctggatttcactcatcttccatattgcacatgtgtgtgtttcattgatggaacatgattcacactgagagctttagctgcaagaaagtttgggaaatatgtcttctctgaggcttttggtctttgcagttcaggagcagttaggaggtgggactggttggttgcagagtgagctgatttactgcacttagtctagcttattaaaggatgagcttataaacaccccaggtaatatcataatacataagtgctacctaattactgtgtgggtctgttaccaagaatgtctaagtcaagaaattgaagattgtttccttmagattctgcatcctaatgtagaatctttcctattagagtataagtaaattcttttggtatgttatttaagaat

SEQ ID NO: 528445 - DNA, 402 bp, Homo sapiens
taaacaatgataagcacacagccacctaatagtctggatcggctgagaccatcctgatttcaaacacccagtccccttgccttcctaagaacccctgtgtttctcagactgaaaatgtgttttgaaytttgttcacgaagtgaggccgctgttgaaattcgtcaagactgggaaagagccaaagtgggaaggagcatgggttgattggcacaaaagtaggtctgctgataaagaatggaagtaaaggggccatcaggtagaagcttttgctgtgagtcagaaggacaatttaaaagttgcctaaagaggcacacgccatctctgctgctgccttccagttggaagggaaactcaggttcttgcctaatggccaaagcccttcacagaatgtcccccacccct

SEQ ID NO: 528446 - DNA, 402 bp, Homo sapiens
taaacaatgataagcacacagccacctaatagtctggatcggctgagaccatcctgatttcaaacacccagtccccttgccttcctaagaacccctgtgtttctcagactgaaaatgtgttttgaactttgttcacgaagtgaggccgctgttgaaaytcgtcaagactgggaaagagccaaagtgggaaggagcatgggttgattggcacaaaagtaggtctgctgataaagaatggaagtaaaggggccatcaggtagaagcttttgctgtgagtcagaaggacaatttaaaagttgcctaaagaggcacacgccatctctgctgctgccttccagttggaagggaaactcaggttcttgcctaatggccaaagcccttcacagaatgtcccccacccct

SEQ ID NO: 528447 - DNA, 402 bp, Homo sapiens
taaacaatgataagcacacagccacctaatagtctggatcggctgagaccatcctgatttcaaacacccagtccccttgccttcctaagaacccctgtgtttctcagactgaaaatgtgttttgaactttgttcacgaagtgaggccgctgttgaaattcgtcaagactgggaaagagccaaagtgggaaggagcatgggttgattggcacaaaagtaggtctgytgataaagaatggaagtaaaggggccatcaggtagaagcttttgctgtgagtcagaaggacaatttaaaagttgcctaaagaggcacacgccatctctgctgctgccttccagttggaagggaaactcaggttcttgcctaatggccaaagcccttcacagaatgtcccccacccct

SEQ ID NO: 528448 - DNA, 402 bp, Homo sapiens
taaacaatgataagcacacagccacctaatagtctggatcggctgagaccatcctgatttcaaacacccagtccccttgccttcctaagaacccctgtgtttctcagactgaaaatgtgttttgaactttgttcacgaagtgaggccgctgttgaaattcgtcaagactgggaaagagccaaagtgggaaggagcatgggttgattggcacaaaagtaggtctgctgataaagaatggaagtaaaggggmcatcaggtagaagcttttgctgtgagtcagaaggacaatttaaaagttgcctaaagaggcacacgccatctctgctgctgccttccagttggaagggaaactcaggttcttgcctaatggccaaagcccttcacagaatgtcccccacccct

SEQ ID NO: 528449 - DNA, 402 bp, Homo sapiens
ccagctcattcacctctttcctttgtctccacagcatacccagygctgggaccgggcgtgaccgcgaaccctggcacctccctgtctgtgttcacggctctgcccttcaccacacccgctcccggcccagcacacgggccgctccttgtgactgcaggggctcctccaggcggccctctggtgctgtctaccctccccagcacacctctggtgacagaacaggatggctgcggcccgagtggggccggggcttccaacgtctttgtccagatgaggacagaggtggggcctgtgaaggccgctcaggcgcagaccttggtcctaactcaggcccccctcgtctggcaggctccaggcgccctctgcggaggtgttgtgtgtccacctcccctactcctggca

SEQ ID NO: 528450 - DNA, 597 bp, Homo sapiens
ggctgtctgggaagtgccctgggagttgggggctaggtgttcgccaaagagagacttccagagtctatgagtgagatgaggactgcatcaggagagggaccgaggctggggaggatgctctgctctttcccaggttgtcctgtcytcccaatctctgctgaactgccctcaccccatgggccaactctgccccccttacccctaacccacctcttagaatctcagatcccagcgtggacaggacccggcacccaccctggttccctcctggccaacaccttcttctccacggtctgagttctgattcctcccccagggcgcttattggctcaggacccctgtgactgccagggcactggtcccagcactgcctgcgtgcagagctgtggtcacggccctgggggctggcccagcagcagaggctggtggggcaaagctgtctggtacacggtggcctggcccctcggccaagtgacaaagggagccatgtttgggtcctctctggccccatctgcccacagaacacagcagtcagcctgacagatgcccctctgccccgtcccttctgctcgatgtgggcagtgtcggaggcctgct

SEQ ID NO: 528451 - DNA, 348 bp, Homo sapiens
ggtttgtctcagagtggggttagcacacggtaccatctccatcccctttaaaagtatttattacatttttctggaaatggaagtctggaaattatatttccctgatagtcttatgagcaggattccaggttgattctgccaaatgtgaggcactcaggtgagactagaaagcagaaagatggtttaaaaaatcatcgttttcttcctttgactctgcacttaygacagcaggatgctcgagactcttgcagtaatttgggcaaagatttccacagtgcaaaatagaaaaaacaactggcaaatagctgtacaaattacagtccattttcatcatggaatgtcagtttg

SEQ ID NO: 528452 - DNA, 319 bp, Homo sapiens
aactccagtctctgtcttcatcattgcatggtcttctccttgtgtgtttctgtcttcacatggccatcttctaataaggccaccagtcataytggatcagaggcctaccctactccagtatgacctcatttttatttaactaattatatctgcaatgatcctatttccaaataaggtcacattctgagatactgggggttaggaagatatgttgaagagcatgtcttttttttcggtgggggttggggaggatacaattcaacccagaattccagacaggggctttgtggatagagtttataatcttaaggaagcacat

SEQ ID NO: 528453 - DNA, 319 bp, Homo sapiens
aactccagtctctgtcttcatcattgcatggtcttctccttgtgtgtttctgtcttcacatggccatcttctaataaggccaccagtcatattggatcagaggcctaccctactccagtatgacctcatttttatttaactaattatatctgcaatgatcctatttccaaataaggtcacattctgagatactgggggttaggaagatatgttgaagagcatgtcttttttttyggtgggggttggggaggatacaattcaacccagaattccagacaggggctttgtggatagagtttataatcttaaggaagcacat

SEQ ID NO: 528454 - DNA, 113 bp, Homo sapiens
agccccgtccccagtgacctcctttcctccctcctcctccccaggaggaagtagcaactcccctcctctctgagtgggagctgacrgcccccaaaggggccctgcctttgctc

SEQ ID NO: 528455 - DNA, 113 bp, Homo sapiens
agccccgtccccagtgacctcctttcctccctcctcctccccaggaggaagtagcaactcccctcctctctgagtgggagctgacggsccccaaaggggccctgcctttgctc

SEQ ID NO: 528456 - DNA, 552 bp, Homo sapiens
gctggcccccttcagatgatatggtttggctctgtatgcccacccaagtctcaccttgaattataataatccccacgtgggatcaattgtgggaccaggtggaggtaattgaatcatgagggtgtcttctttccatgctgttcttatgatagtgaataagtcttacaagttctgatggttttataaaggggagttcccctacacaggacctcttgcctgccaccatgtaagacgtgcctttagccttccaccatgattgtgaggcctccccagccatgtgsaactgtgagtcaattaaacctctttcctttatacattacctagtatcgggtatgtcttcattagcagtgtaagaacagactaatatgctgcttctacagtttattgaatttaacttttaaatcaagttgtgattttattgttgttgttgtctttgagtcttgccatccaaatcaaaactgggctaatttgtggaaataatatctattgggttaaggagagaattgttagatgcagcctaaaagaaagaatttagtgttcactgtatctatc

SEQ ID NO: 528457 - DNA, 552 bp, Homo sapiens
gctggcccccttcagatgatatggtttggctctgtatgcccacccaagtctcaccttgaattataataatccccacgtgggatcaattgtgggaccaggtggaggtaattgaatcatgagggtgtcttctttccatgctgttcttatgatagtgaataagtcttacaagttctgatggttttataaaggggagttcccctacacaggacctcttgcctgccaccatgtaagacgtgcctttagccttccaccatgattgtgaggcctccccagccatgtgcaactgtgagtcaattaaacctctttcctttatacattacctagtmtcgggtatgtcttcattagcagtgtaagaacagactaatatgctgcttctacagtttattgaatttaacttttaaatcaagttgtgattttattgttgttgttgtctttgagtcttgccatccaaatcaaaactgggctaatttgtggaaataatatctattgggttaaggagagaattgttagatgcagcctaaaagaaagaatttagtgttcactgtatctatc

SEQ ID NO: 528458 - DNA, 552 bp, Homo sapiens
gctggcccccttcagatgatatggtttggctctgtatgcccacccaagtctcaccttgaattataataatccccacgtgggatcaattgtgggaccaggtggaggtaattgaatcatgagggtgtcttctttccatgctgttcttatgatagtgaataagtcttacaagttctgatggttttataaaggggagttcccctacacaggacctcttgcctgccaccatgtaagacgtgcctttagccttccaccatgattgtgaggcctccccagccatgtgcaactgtgagtcaattaaacctctttcctttatacattacctagtatcgggtatgtcttcattagcagtgtaagaacagactaayatgctgcttctacagtttattgaatttaacttttaaatcaagttgtgattttattgttgttgttgtctttgagtcttgccatccaaatcaaaactgggctaatttgtggaaataatatctattgggttaaggagagaattgttagatgcagcctaaaagaaagaatttagtgttcactgtatctatc

SEQ ID NO: 528459 - DNA, 553 bp, Homo sapiens
ctctgtttctacatcagtaaaatggggtgataatatctgcctcataggattattgtgaggattaaatgaaattattaagaaaaagctcttatcgcagtgcctggtatgtcataaggccttggcaaacgtaagctcttggtggttattccaggctgggggtacttgcaagaacaaaagcagagataagaaagtccatacaccttgtagtagtagtttgtgttgacttcttgtttcttgtttctggaactaagggaatatggccgtagttacttcctggccttttccagtatgtgtgaatggcaatagagaggctagtacttargaagcagtgagggtggctgggagcttcctactatagagaatttcccaggacttcccagtgggcttggcgaccctgaggctatagtcattgtttgcaacttcttgggagagttaacctcctttgtataccccagaggttctagtggagaggtggctgaaagacttggccctatctgtcaaccagttgtcaggctaggctcagctctgggtactgtagattagcccagttgtc

SEQ ID NO: 528460 - DNA, 544 bp, Homo sapiens
gctccagctgaaggagaatggagataagtaagcaggtgagccaagacagcaccactgcagcactccagcctgggtgagaacacaagactctgtctcaaaaaaaaaaaaaaaaaaaaagagtmcctaagtatatcactgtgagtagaaaaataggggacagaaatccggtattgcagtttgcagtttttccattttcattttttgtgtgaattcttttttttttttagacagagtctcgctctgtcaccaggctggagcgcagtggcacaatcttggctcactgcaagctccacctcccgggttcatgccattcctcagcctctcgagtagctaggactacaggcgcccgccaccacacccagctaattttttgtactttttactagagatggagtttcaccatgttagccaggatggtctcaatctccgatctcctgaccttgtgatccgcccgcctaggcctcccaaagtgttgggattataggcgtgagccaacgtgcccggccttttgtgtgaattcttaatataaatgtagggatgtaaa

SEQ ID NO: 528461 - DNA, 544 bp, Homo sapiens
gctccagctgaaggagaatggagataagtaagcaggtgagccaagacagcaccactgcagcactccagcctgggtgagaacacaagactctgtctcaaaaaaaaaaaaaaaaaaaaagagtacctaagtatatcactgtgagtagaaaaataggggacagaaatccggtattgcagtttgcagtttttccattttcattttttgkgtgaattcttttttttttttagacagagtctcgctctgtcaccaggctggagcgcagtggcacaatcttggctcactgcaagctccacctcccgggttcatgccattcctcagcctctcgagtagctaggactacaggcgcccgccaccacacccagctaattttttgtactttttactagagatggagtttcaccatgttagccaggatggtctcaatctccgatctcctgaccttgtgatccgcccgcctaggcctcccaaagtgttgggattataggcgtgagccaacgtgcccggccttttgtgtgaattcttaatataaatgtagggatgtaaa

SEQ ID NO: 528462 - DNA, 410 bp, Homo sapiens
tctggggacgtggacattgacacaaacacatctgttcctcctgtgattagggctgggggacaggatagacaaggggtcaaatgctgccaaggggagggggaagtggtcactgaggctagtacatggccactgtgtttcatctccaccaccatgctctagtccaagccacctccctcatctggacrctgcagtgacttcccttctgggctccctgctttcaaccctggctgccctctaatccattctccacacagagctggaatgatcttttaaaagtataaatcaggctaggcgcagtggctcatgcctgtaatcctcgcactttgggaggctgaggcgggtggatcaccgaggtcaggagctccagactagcctggccaacatggcgaaaccctgtctctactaaaagt

SEQ ID NO: 528463 - DNA, 596 bp, Homo sapiens
ctacaaattcaaaactaattttcgcattaataataaaacacatgggtaaaatattcactgaaatttcaagctaaattaatgaatttttattataacagactttttactgggatgacatttacactgatggcccagatgttatggaggggaaaactgctggtatcttagcactagttcttagcaccagttaaagccatggtgccaaattatacactgtsttcttcatcaccatctgctgccagtaaagtcagttatacctcaaaatgactttgataaatcctcaaaaattattaatcatattaactttcaagtcattagtacaagtcatttttatattctgtgaaatatgcatataaagcatctttgtggaatactgaagcacgtgttgtcttatggaaaagcactgagattgagttgcatgctaaatgagccactttttcatctcggagcagaacttgtatttgaaagaattactgacagaaaaactatggttctttacactagggcatttggcagacattttcataaaaacaagtgaagcaaggctcttaaatcaaataaaacacctgatagtatctattgctgatgagaaactt

SEQ ID NO: 528464 - DNA, 531 bp, Homo sapiens
gagactacaggcatgtgccagcatgcctaatttttgtatttttagtagagacrgggtttcgccatgttgaccaggctggtctcaaaatcctggcctcaagtggttcatctgccccagcctccccaagtgctggaattacaggcatgagccaccatgcccagccattagcaggtattttttgtagcaactcatgtctatcatgttgaaaggtgatggtgtcgctctccatttatattacatgctttagaaattatataaagcccacccaataagaaatatttattgagcacttgttatgtgctagacaagattctaaatgctttctcgattttttaataatatgataatgttacaaagtcagaattatttcctcatttcacagtggagaagatgaagtcacagagagatggcgctgtaaatcaccaaagggtgcaatctgatggagattttcaactttggctctgttgaccatacggttttgcttcactaaagttaaaatatgcagacataaaaaagaatgagttcatgtcc

SEQ ID NO: 528465 - DNA, 582 bp, Homo sapiens
ctttacaatttttatctgttatgagagcaacactctcataacataataaatttctggctgtaaaggtctgaaaatgtccgtttatcacattaagcctcatcctgcaaacatctcaagatatagacaggcagctgtgatgctggaaagagaaaggaatgcaggactcagggcacctggagttcaagctagactctgctgctttctagctatgtggctttgggagagtcaggcagattcagtttcctatttacgaactgcagtaagtgtcactctcagaatgtgtatgagaattaaatattacgatgcacatgaaaatacattgtagactgtaaagtgctatgccaagctatttgctacacaatcttcagctttctgctataaattctggttktggcttttccccgctgaccttaggaccacattccctaacagcttggcctgccagggagctggatctaacaaaggcaggctccgatcccattgtgagcatttggttaagacttagaaagagtaaaaagtgactgccatagtttctgttttcatggcttaccaattctgccattttgaaaacttctttctttt

SEQ ID NO: 528466 - DNA, 476 bp, Homo sapiens
aagctggaaatcacatctcctctaaattgttactccccaaataagtcccttggaaggtctgtggggcaggatgcaaagttttgtctttcataattagggagtgattaattatttaatcagagcagagagcagcccaaacaatgacacctcctctcatttgttgggctacaggcctccattaatcacagatcctgacattctgcatgcaaaagggacaggtggatttgaagcttggtgytgcgataacctcactactgctccctgatctgcttccaaatgctgccaatgtgttacggcaaacatcaccatcagcagcccaggcttcattcctagatgaacgtcttaggaaggggaacgttatatctgcacatcaaggcatttcactctgtcccttctcctcgttcaggtacctggggtttggccccaccattccgtctcctgctggtaacaggttctgttactgcaggtgtagtttt

SEQ ID NO: 528467 - DNA, 588 bp, Homo sapiens
agagcctgttgcaatcaccaaagcyacagtgccacttgaaatcaacaataaacaatgtttttttttccaaggagatttcactccagtcctcttctactcaataccatggcctgattctgcagtggggagggagagggatggagagaaacacaatttgagtgggacggggtcatatatgatgggaatcacatttgaatatcatttgtaagaagtagcttctaatttctaagtatctgttcctactcttgatttagaatatctgctgttacagatggcctggtttctctatttctctctctctctcactctaatcaagtcaagtttctcacatcttctgctctccaaagatgattctgatgattgggcaactggatagacatcacttaccttctccaggtacgctcagcaggggccaagcttggctacgcatttcgcacgctagagagcacctctacttccacgttcaaagctacactcacgttgaataatgagaccttttgctaagcaaggctcactgaggtttgttgataattattcggccctgtcgacaaagaacccaaacatacaggagtttcaagtgatttcaca

SEQ ID NO: 528468 - DNA, 668 bp, Homo sapiens
cttctattggtttcctcatttccctgaggcagacagggaaaaatacccaagtaagaaaactaagaatgggccaggcacggtggctcacgcctgtaatcccagcactttgggaggccaaggtgggcggatcatgaggtcaagagatcgagaccatcctggtcaacatggtgaaaccccatctctactaaaagttcaaataattagctgggcatggtggcccatgmctgtagtcccagctactcaggaggctgaggcagaaggatcgcttaaacccgggaggcggaggttgcagtgagctgagatcacaccactgcagtccagcctggtgacagagtgggactccgtctcaaaacaacaacaaaacaaaacaaaaccaaaaaactaagaatggaaatgtcagttcaggaaaagacactctttaaaaaaaacctttatacacacagcgcaattttttcctgcagctattttctccaaatttgagttctagtggtgtgttggatttgtttgccttttttttaatgccatgtgagagatacctttactgctgtacagatgcacagacacacaacatctgattgctttttattgtgcttttaaaagataaaaatcacttaagaaattaagtgaattttgtggaaagctaggagttctcttttaagaagattttt

SEQ ID NO: 528469 - DNA, 668 bp, Homo sapiens
cttctattggtttcctcatttccctgaggcagacagggaaaaatacccaagtaagaaaactaagaatgggccaggcacggtggctcacgcctgtaatcccagcactttgggaggccaaggtgggcggatcatgaggtcaagagatcgagaccatcctggtcaacatggtgaaaccccatctctactaaaagttcaaataattagctgggcatggtggcccatgcctgtagtcccagctactcaggaggctgaggcagaaggatcgcttaaacccgggaggcggaggttgcagtgagcygagatcacaccactgcagtccagcctggtgacagagtgggactccgtctcaaaacaacaacaaaacaaaacaaaaccaaaaaactaagaatggaaatgtcagttcaggaaaagacactctttaaaaaaaacctttatacacacagcgcaattttttcctgcagctattttctccaaatttgagttctagtggtgtgttggatttgtttgccttttttttaatgccatgtgagagatacctttactgctgtacagatgcacagacacacaacatctgattgctttttattgtgcttttaaaagataaaaatcacttaagaaattaagtgaattttgtggaaagctaggagttctcttttaagaagattttt

SEQ ID NO: 528470 - DNA, 668 bp, Homo sapiens
cttctattggtttcctcatttccctgaggcagacagggaaaaatacccaagtaagaaaactaagaatgggccaggcacggtggctcacgcctgtaatcccagcactttgggaggccaaggtgggcggatcatgaggtcaagagatcgagaccatcctggtcaacatggtgaaaccccatctctactaaaagttcaaataattagctgggcatggtggcccatgcctgtagtcccagctactcaggaggctgaggcagaaggatcgcttaaacccgggaggcggaggttgcagtgagctgagatcayaccactgcagtccagcctggtgacagagtgggactccgtctcaaaacaacaacaaaacaaaacaaaaccaaaaaactaagaatggaaatgtcagttcaggaaaagacactctttaaaaaaaacctttatacacacagcgcaattttttcctgcagctattttctccaaatttgagttctagtggtgtgttggatttgtttgccttttttttaatgccatgtgagagatacctttactgctgtacagatgcacagacacacaacatctgattgctttttattgtgcttttaaaagataaaaatcacttaagaaattaagtgaattttgtggaaagctaggagttctcttttaagaagattttt

SEQ ID NO: 528471 - DNA, 668 bp, Homo sapiens
cttctattggtttcctcatttccctgaggcagacagggaaaaatacccaagtaagaaaactaagaatgggccaggcacggtggctcacgcctgtaatcccagcactttgggaggccaaggtgggcggatcatgaggtcaagagatcgagaccatcctggtcaacatggtgaaaccccatctctactaaaagttcaaataattagctgggcatggtggcccatgcctgtagtcccagctactcaggaggctgaggcagaaggatcgcttaaacccgggaggcggaggttgcagtgagctgagatcacaccactgcagtccagcctggtgacagagtgggactccgtctcaaaacaacaacaaaacaaaacaaaaccaaaaaactaagaatggaaatgtcagttcaggaaaagacactctttaaaaaaaacctttatacacacagcgcaattttttcmtgcagctattttctccaaatttgagttctagtggtgtgttggatttgtttgccttttttttaatgccatgtgagagatacctttactgctgtacagatgcacagacacacaacatctgattgctttttattgtgcttttaaaagataaaaatcacttaagaaattaagtgaattttgtggaaagctaggagttctcttttaagaagattttt

SEQ ID NO: 528472 - DNA, 593 bp, Homo sapiens
tctgtgctcctggtaggccactcaccccctgcctacaggcttggaatgtcaaggccatgatgacctctggcctcccctgaacccagagctttccctttacaaggaaggggagactgagacctggagcagggctaagaaaggcacagtttgggactctggcctcttctcatgcacctgtatctgtcccatgcctggttcccattcccggatccttggaagatccatattgatgaaacagtaaagggtgatgggcactgaaaggccgctaagttgctccctgaactttttcccctcccaaactctcctgtggtcttcagtatttaacaggaacctcttgacactctggaggggtgagcttctcataggaggcccgtggtagggaggctgtgggagaggtcaggcactgtataccttcccaccatctgtgaatggttccatttccaaggccacagtaaatgcagggttgaaggattcctcccggaatccttcctttyctcttcctcactttccttgccttgtggcctcatcactccaatatctctgctgccgtcttcacatggcatcctcctctgtgtgtctctcctgacactttt

SEQ ID NO: 528473 - DNA, 413 bp, Homo sapiens
tccctcaaattcaaaataattgtatttattgtgatttttagtgattctgtccctcctgataataaaagtaatatgttcacttattgaaaaatacaggaaattctcaagaagagaaaaatgagcatccatcatcttaccatctggaaagatacactattaattctttcygttttttttcctatgcttttctccatttataattgaagtccactagataacatttttcattttaaattatattcttaacattgtgttggactcatttttctgcattaaaaaattccaccaatatgtgtttttcaaaaggctgtatataaccttttaatgattaaaaaaaaaaagcaatactcaacacactagaaacaggagggagtatcttcacatgattaagggcacttgtgaaatacccacag

SEQ ID NO: 528474 - DNA, 651 bp, Homo sapiens
ctctgcaaagggacatgaccatgccttgcccccatggagtcgtgctggtggatgcaacagcagacacaaatgccacagtgtccggcatccatgagtgctgtggaggaagggatcatttagggaccatcccagggatggctgggtttcctggcaggacctctctgcccagagttgaaggaagcagcctggagaaggcagcagaaaggcattctgggcccagagaaactcaagggtgatgagctggtacagaggtgaccctggcttgcaggtgaggctgaagggtgtggcaggagcragacccaggctgtgatgggccacttgaactccgagagccatgggaatctccagagcatcatgcccagaaaaccatcagtccaagagcaccagctgaggtgtggagagtggggcaaccgggaggaggctaagcagagacccactgaaaggctgttagtgactctcagtgatggtggagctggaggaagatggcagtgacttgagctaggttcatggcagcaggatagaatgtcagggccagatctgggacatgtgtgggatggagagctgcaagcactctaaggacagcacccagagccgtgtggcctgagccgtggccaggggcagggtgagaaggcaaggaagcctgtgtcaggg

SEQ ID NO: 528475 - DNA, 484 bp, Homo sapiens
ggtcacgtagaattggggtgcttggaagggcatccaggtatcactgaacccttcccttccttgaaggtggaaagtagccccactccagacagtaggccaggcagggagttgggatgggagtattcagcatttaggacatctaccgggtcagtgagggagagattgttatccccattttacagatgagcaactgagacttaggttaatcatttgcccatggctcatagagagtaggtgcattactctggatggaagccaggtctttgggcatcgggaacaaggttctttccatttcatcgcayagcctttcaattctagtcataataatggtgattaagataaaaacaaatggttggtcacagaaggccaacaaaaataaccgtgtgattgagcacttcctgagctcccactctgtgcctgagctcatcacttcatctcatttttccttgaaacaaccctgtaagatacatgctgctattctcat

SEQ ID NO: 528476 - DNA, 484 bp, Homo sapiens
ggtcacgtagaattggggtgcttggaagggcatccaggtatcactgaacccttcccttccttgaaggtggaaagtagccccactccagacagtaggccaggcagggagttgggatgggagtattcagcatttaggacatctaccgggtcagtgagggagagattgttatccccattttacagatgagcaactgagacttaggttaatcatttgcccatggctcatagagagtaggtgcattactctggatggaagccaggtctttgggcatcgggaacaaggttctttccatttcatcgcatagcctttcaattctagtcataataatggtgattaagataaaaacaaatggttggtcacagaaggccaacaaaaataaccgtgtgattgagcacttcctgagctcccactctgtgccygagctcatcacttcatctcatttttccttgaaacaaccctgtaagatacatgctgctattctcat

SEQ ID NO: 528477 - DNA, 445 bp, Homo sapiens
gcttctctgctccctgaaatgcctgcacggggcactcaggaagggctggggactgggtgaggaggtgtggacagaatgtcccctggaaactgccccaggggcagcttgagtggcctgagcctgtgtctgtcctactgaaggttggagccccagagaaaagcctctatggaggcacccacttttcagaactgctgcttttgcgggagaacacctttttccaggtgttgtccttagggtagcagggaagactgggaaaaactgaggggcaagagctgttggaggggggagttacatttattgagtgtctattacatgccgggtgctgctgaaggtctgcgggtcctacccggatctccttttagmccctcacatccctgtagattacacgccgttcacagatgaccctgaacccagaagggctgtctaggcccagggcccagctagt

SEQ ID NO: 528478 - DNA, 305 bp, Homo sapiens
ctgttttctgagaggcttacctgggtgatattcattatcttgggtagttgtctagggtctggtccttagcttacatgcttggaaattttattttctcatgtatccaacagaactttctggggcaaactcacatgaattaagtttatgcaactaatatataaaaagaaaatggcaattccttaatkgataaagacaaatagaagagttttatcttctggaatactcaatttaaaatgtttagcacacattctccttgtaggcaaacctaatgggaaatcaaataatgctgagaaagttgattccta

SEQ ID NO: 528479 - DNA, 626 bp, Homo sapiens
ctgcaataactcctgctggtgatttaatcctgtgacttaggaactcttcgtgtgtgcttgagtgaatgaataaaagagagacagagtgagagagagagagagtgtgtgtgtgtgcacgtgtgcacacatgcacacacattcatgtgaacaatttctattcactcacttgtgattaccaatgggccacattctatttaggttttggagscttggcatgaagcatgttttgctaggatgatttgttttttggacaaggaagctaacatggtaagtcatatgataatttagtttatgtcttcattgttgcagagtttggctgatagcaagggcagtcgagaatgatagtctcatatagaccttaatcccagctcctaaagtagaatggaattgtggaaatcaagttttctggtctaaaataaatgttttgtggcattcttataaaaggaacaggttgaaaagtccctgtggaatcttaattttgccactgcagattattgaagaccccaggtgagcaaatcaactgtgaggaggtgatttttatcagttggcattgaacagaccacagcatagctatcacctgcatggccttcctttgcctttgatgatcgtgtgtgtcagtgggatgg

SEQ ID NO: 528480 - DNA, 644 bp, Homo sapiens
caaaaatttgttatgcttatataaatacagactatagatagacgggtgattgtaaaacatagctatggccaggtgcagtggctcacaccgtaatcccaacaatttgggagggcgagrcaggaagattgcttaaacccaggagttcaagaccagcttggacaacatagagagaccctacggtttctacaaaaaatttaaaaattagccaggcatggtgccatgtgcctgtagtcctagctactcaggaggctgaggttagaggatcacttgagccagggaggtcaaggctgcagtaagctgtgcttgtgccactgcactccagcctgggtaacagagaggaacactgtatcaaaaaataaaataaaataaacaaataaataaaacatagctacacaatgtttgacattttttctatcaagaggtggcgtttatgttcccttcccttgaattggtgcaggcttgtgactgctttgaccagtggaatacagtgggaatgaaggttgtgacttatgaagcagggtcctaaaaggcgtgaagcttccaccttgatccctggggacactagcatttgaagcatcaggccaccatgaaagaagtatgactaccctgaggacatgatattggggaggacacacataggtcag

SEQ ID NO: 528481 - DNA, 627 bp, Homo sapiens
atttattaagaaaaatattagcaaaaaatcaacaaagccattttccatgaaaacctaaactggacaaacctggaggaacaagctttgagtctcactttcccagtcaaaaataatattagccaaacattatttagtattgttgagctctgcagaagaaataattttaataggaaatttattgctgttactatgtgccaggtattgttctaaacacttttcatatttttaactcatttaatcctcacaacaatcctgtaagtactattattatccctgttttacagatgaggaaactgaagcacaaaaaggttaactgacttgcctgaagtcactcaactagtatgttggtggagctggaatataaacttaggtagactggcttcagagtttttttctatgtgttattaatatactagcatattatataaactaatgagcaataaaatgaatcagggtgattgtgttaactcagctacaaacaaaaccatataacctgaatcacttaacctcttttcccatttgggtaaaaaaggaagttgagctaaataakcttaaaagttccttacaagtctaacattccatgatttatgatccagaagccaaacaccaaaactgtagcacagcaaa

SEQ ID NO: 528482 - DNA, 172 bp, Homo sapiens
accctatactcacacaggacctttcttctcaaagccctgcygctgggcagcacaggaggcccgggccgccaggatgtacaggaagacactcatctaggcaggggcagagggcatggggtgctcagtggggacaaacagcttccacccagcccacagggccccgtggcctcag

SEQ ID NO: 528483 - DNA, 429 bp, Homo sapiens
attattaaaccagggacacaggatggtggccatgtcagtgtagcatggcctttaccatccaggagccctggctcactcccagctctgtcacttgctggacttggctaatcacttaatatctctgtacctcaatttccttatctgtcatatgggaataataatggttctagttgtgatgattccctatgataatgcaggtagagcacacagcacaatgcccaacagccagtcagacctcagttaaatattaacaactcttttgaaattaatattatgcataaaataatgtatgttacacaaactggagacctagaaagactcatgcttggagatgtaggcacaagagctcatttgcagaacaggagtttccaggagtaccagttgggccaygggtacactgtggcctgtgtctgggctctcaggaaggtc

SEQ ID NO: 528484 - DNA, 511 bp, Homo sapiens
tgatctttttttgctccactacacggcttttcaatatagaatgcttcagtttgaggtagatcgatttatctgtcttttggtggtttttatttcatgaatccgaatttattgctattttgagatcagatttacccatattttcttgttagtattattgttattctaacactgaaattattaacgcatttatgtttggaggtcttttgtaactagaacttagtcctttgcagaacataataagtgtggctaataagtgtgtgtgtgtgtgtgtgtgtgtatgtgtgtgtggttttatttcagagttgctttattttaatttatgatgaatttcagtttctattagagtagtgcttttaggttgagatacatttttttatccatcaatctttgtaccawcactgtgaattaatttaatatcatgactgcttttcaaatgaagagattggggactgatatttgaagtgatttatccaatgtcacagagctctttaagggatagaacaaggattcc

SEQ ID NO: 528485 - DNA, 611 bp, Homo sapiens
cagcctcatcacattccagtctttccctggaagcagagctcattgtgattattacctcattgcatttaatcggcaaatgaggagttagaatttaaaatgtctgttgaagggcaggaggagtggactagaattttacagtaagaaggagttgctgcattgtgcaactgcatgaacataataaaagaaatgaaaatgaaaaaacagtaaatgagggaaagggaaaataatgatggcaaggtaaggaggagttagaaggttatgcaaaactagagttatgcaaaactaggagctagaaggttatgctagaggttatgcaaaactcatgctataagtcctcttcaaggcttggcactgtggctcatgcctgtaatcacaacactttgggaggctgaggcaggagaattgcttgaagcccaagttcaagaccagcctgggcaatacagggagaccctgtctctacaaaaaaatttttttaaaaattaactgagcatggtggtgcatgtctgtagtcttagctacttgggaggctaaggtgggaagatcacttgagcccaggaggttgaggctgcagtgagctgtgatcrtactactgcactccagtccaacttggg

SEQ ID NO: 528486 - DNA, 529 bp, Homo sapiens
gtgcatctctttgattatttatatccttccttatacaggttgagcatccttaattcaaaaatccaaaattggaaatgctccagaatctgaaactttttgagcactgatacgttgctcagaggtcatgctcggaggaaatgctcgttggagcactttggattttggattttcagattgggaatccttaactggtargaatgcaaatatttgaaaatctgaaatcccaaacacttctggtcccaaacgttttgaataaaggatatacagcctgtatgacagtttgcactgttccacacctcctgactcttagcataccatacgtgccttaaaagaagatccacaagctgactaacctttcactctcacttatcacctagcacagggactttttgctcagtagctgtgtgttgaatgagttatcttatcttacatttgtctagtgtatctcagtgaggtcttagctgaactttttctttttttttttttttaatgattataagcactgttctagtagaaccttatttgcttc

SEQ ID NO: 528487 - DNA, 610 bp, Homo sapiens
tggttccattgcccatggagaatatgaaatatagggaattttaagctgtttctttttcctactcagattaaagacaaaaaatcaacagaggatgataatatataatgcaattgaaggcaaacgaaatccgacctatctttggcttatgctgcactatcaagtttgggtttgagtccctcacgttatagctgttatgaccttcaggaggttattcaacttctttgattctcaatttcctcatatctgtgataggggtggtaatagctaccttatggttgtcttctgtggattaagacaatttgtggatagtgcctggctcagtcagtcagtgcatgccatgtaagaaacactgtacattattattcttcctcttactcgattctratattgttgtggagagagactgggagacttgatagtaatcaaactgaatacatcatgaaataatactatgagaagtgcttatatgattttagctgaaattatggggtctttgattaatcaagtattttttattctaccctccccctcccccaccaattagcttgttattcagtctttcatttttgtggttactctagagataagaacacgtatcagtgatctgtta

SEQ ID NO: 528488 - DNA, 644 bp, Homo sapiens
ctggtgccctacgattctctgaatcccttgcctggcctcaaaatccctcacctcatggcttccaccagtcctggactactgtgttccttacacaaccctaaccaagcccccacattgacacacccaccttaaagagaactgctaggcttcagaaaacccaaccttgcctccttcctcccagacaggccaaagccctctggaatcagcrccctcccttcggcaagtgagtaataaactcagctttgccttaccaacaagtttgtagatgatatctggggagctggcatttgacagtctctacaaaaatgcttggaatcaaattgacattcaatttggtatctgcatcatttacaacagggcagacctccgagcttggaggaaaaagggttaaaacccttagatccgttactcagccaagtctcaaagccagagagaagtataaaatagtgtgacacccaccacccacgcatcttttcttaaaaaaaaaaaaaattactcgaggaatcactcaaaggaaataagaattgtaccagaataagtaattcaaaaaaggacaatataggatatccaagaaacagggagaaataataaaagcagaaaaaggtgaagtgaagtctaaacaaatgttgataatcatgatccta

SEQ ID NO: 528489 - DNA, 644 bp, Homo sapiens
ctggtgccctacgattctctgaatcccttgcctggcctcaaaatccctcacctcatggcttccaccagtcctggactactgtgttccttacacaaccctaaccaagcccccacattgacacacccaccttaaagagaactgctaggcttcagaaaacccaaccttgcctccttcctcccagacaggccaaagccctctggaatcagcaccctcccttcggcaagtgagtaataaactcagctttgccttaccaacaagtttgtagatgrtatctggggagctggcatttgacagtctctacaaaaatgcttggaatcaaattgacattcaatttggtatctgcatcatttacaacagggcagacctccgagcttggaggaaaaagggttaaaacccttagatccgttactcagccaagtctcaaagccagagagaagtataaaatagtgtgacacccaccacccacgcatcttttcttaaaaaaaaaaaaaattactcgaggaatcactcaaaggaaataagaattgtaccagaataagtaattcaaaaaaggacaatataggatatccaagaaacagggagaaataataaaagcagaaaaaggtgaagtgaagtctaaacaaatgttgataatcatgatccta

SEQ ID NO: 528490 - DNA, 488 bp, Homo sapiens
  misc_feature (1)...(488): n = A,T,C or G
gcccccttagctaagaggggaagcctggtgacccagggtcctccggggacccagccaggcttctggtctagatctcaacctgccccactcttgcccagtgctaccccattcttnccaccccatccccacctccaccagttsagagattcagccagacagaaaggctgtgccaaaggaaattgtgtgccacagggcccacttggtctgctgtggtgttcttcctttttttggactttgtggctgtttgagtgggtacctttttccatagaaagtttccattgcatcagttatttacattgtcaccacctatatgtgggctctggtttcgagtcggtgaaccagagcaggccctgtggggcccaacactgcttacagggggtgacaggagccagttgctacggcaagaggacctgcagctctgggtcaaccctcagagccacccccaaccctggcaggtccactcttagtgtgctcagtccctttgggat

SEQ ID NO: 528491 - DNA, 593 bp, Homo sapiens
cacaattaaaatataacttccttcttatattactgccgacctytttgatttctacatttatccatgaatctcagtatatgaaatttcagtagtagaaatttaaatcacaaccctggcttccccttgctgcaaagtatcagcatctgtccgaattctgaaaatgtttatgttaatattttcttgctcctccctcagcatatcttaaacaagtatagcaccaatactgtgaaaggaaaagaaggtatattttgaaaaacaccaaaggaatgattgtgagaggggagcagtacttatattgcattatgtaaggcaataagtaccatattgctacagcctacaatattacacaagaaaatttacagtagaggcacagacttattgtttctgaagactatattataagtcctcagattcttttttatgtatcatgataatactcaaaacaagctcaagaaaataggaatggcagaggtttttatgttctaaggccacatccatcaaactccatcagattccagtataacaattctgtcctcaatggcttttcatttgctcattcatttatgttgtaaataattcttgattgcagatta

SEQ ID NO: 528492 - DNA, 608 bp, Homo sapiens
tcacaattaaaatataacttccttcttatattactgccgacctttttgatttctacatttatccatgaatctcagtatatgaaatttcagtagtagaaatttaaatcacaaccctggcttccccttgctgcaaagtatcagcatctgtccgaattctgaaaatgtttatgttaatattttcttgctcctccctcagcatatcttaaacaagtatagcaccaatactgtgaaaggaaaagaaggtatattttgaaaaacaccaaaggaatgattgtgagagggragcagtacttatattgcattatgtaaggcaataagtaccatattgctacagcctacaatattacacaagaaaatttacagtagaggcacagacttattgtttctgaagactatattataagtcctcagattcttttttatgtatcatgataatactcaaaacaagctcaagaaaataggaatggcagaggtttttatgttctaaggccacatccatcaaactccatcagattccagtataacaattctgtcctcaatggcttttcatttgctcattcatttatgttgtaaataattcttgattgcagattatgtattaggactac

SEQ ID NO: 528493 - DNA, 574 bp, Homo sapiens
agagtatgaaaaaaaattactccaaatagatctgagaaaatgggcaccaacayagatgtttctgtgtgggagcctctggccttcctcccttttccaaatatacagcactgagtggtggctgtcagggtcaggagaggaggaagttctcagatgccagtgcaaagcaataatcttcaagtggatgccatgccaacagggatatggtgttagttacaaggaagtcaggaggccgagactgagagtcaaggaaagttaaaaacaaaatcagtaagaggggaagggtcacagagggaagcaaagatgacagtcagaaggaaaacatctgcagacattgcaagagctaacaggaaggggaggggaattgggaagaacacatttttttcttccctttctcttacacatggcacggttttgatatcctcccatttttttcacaatattcacaactccagactactaatgtgtggtgatgagttactctttctaaattgaagatcactaagcaaatgttaccactcgcttactcctccagtgctgtgcccttgtttcttttaccagaagcccagcccccgtc

SEQ ID NO: 528494 - DNA, 549 bp, Homo sapiens
gatctgagaaaatgggcaccaacatagatgtttctgtgtgggagcctctgsccttcctcccttttccaaatatacagcactgagtggtggctgtcagggtcaggagaggaggaagttctcagatgccagtgcaaagcaataatcttcaagtggatgccatgccaacagggatatggtgttagttacaaggaagtcaggaggccgagactgagagtcaaggaaagttaaaaacaaaatcagtaagaggggaagggtcacagagggaagcaaagatgacagtcagaaggaaaacatctgcagacattgcaagagctaacaggaaggggaggggaattgggaagaacacatttttttcttccctttctcttacacatggcacggttttgatatcctcccatttttttcacaatattcacaactccagactactaatgtgtggtgatgagttactctttctaaattgaagatcactaagcaaatgttaccactcgcttactcctccagtgctgtgcccttgtttcttttaccagaagcccagcccccgtcaaa

SEQ ID NO: 528495 - DNA, 574 bp, Homo sapiens
agagtatgaaaaaaaattactccaaatagatctgagaaaatgggcaccaacatagatgtttctgtgtgggagcctctggccttcctcccttttccaaatatacagcactgagtggtggctgtcagggtcaggagaggaggaagttctcagatgccagtgcaaagcaataatcttcaagtggatgccatgccaacagggatatggtgttagttacaaggaagtcaggaggccgagactgagagtcaaggaaagttaaaaacaaaatcagtaagaggggaagggtcacagagggaagcaaagatgacaktcagaaggaaaacatctgcagacattgcaagagctaacaggaaggggaggggaattgggaagaacacatttttttcttccctttctcttacacatggcacggttttgatatcctcccatttttttcacaatattcacaactccagactactaatgtgtggtgatgagttactctttctaaattgaagatcactaagcaaatgttaccactcgcttactcctccagtgctgtgcccttgtttcttttaccagaagcccagcccccgtc

SEQ ID NO: 528496 - DNA, 528 bp, Homo sapiens
gcagcatctcagtaatgagagcttgcacaagctacttaactgttttccagcttagctttcctcactgtaaaatgggaatatgatgggmaaaggccagcatattcttaaaataaataagagagtgtatttaaatgctcagccttgtatatctgaagtattccatgaaagttatgtatctttattgttaaagtaatttggttcctcaaatatatgttaagtgaaggcagaaaatgtcctctttagtattgaacagactcccttgtattaaggagggtgaaagcaacagaaagaggacaggaaatcatgttgaaccttatattgctgtgttagcccagtggatcattgcctgacttctactagattccataaacgtttgatgaatacatgatggatggatgaaggaataagagtgctatgtcagcagtagcaccagcatgattcagagagatagggaagcccaaatcaggcaagagtatattatgctcacacatcctattgaaggtagaacttggaaactcattttccatt

SEQ ID NO: 528497 - DNA, 528 bp, Homo sapiens
gcagcatctcagtaatgagagcttgcacaagctacttaactgttttccagcttagctttcctcactgtaaaatgggaatatgatgggcaaaggccagcatattcttaaaataaataagagagtgtatttaaatgctcagccttgtatatctgaagtattccatgaaagttatgtatctttattgttaaagtaatttggttcctcaaatatatgttaagtgaaggcagaaaatgtcctctttagtattgaacagactcccttgtattaaggagggtgaaagcaacagaaagaggacaggaaatcatgttgaaccttatattgctgtgttagcccagtggatcattgcctgacttctactagattccataaacgtttgatgaatacatgatggatggatgaaggaataagagtgctaygtcagcagtagcaccagcatgattcagagagatagggaagcccaaatcaggcaagagtatattatgctcacacatcctattgaaggtagaacttggaaactcattttccatt

SEQ ID NO: 528498 - DNA, 544 bp, Homo sapiens
ctgagtgcaggtagataaggccagtaatctggtaatgaaaactagtaatgaaacgtttctgggatgtgagattgacttataagaattcatttggattagtcatttctccttaccgaatttaacaaatatgtctctcagtgagtccttggagcaatttgctctgaggctgctaataggctcatttggggataatatattgtgctgggatattttgcgtttttaccctacagccttgattggagaggctgtcagaaagtcattctttacaaggaccacacatatgaattcagaaagatacaggaaaaaagacataaccaaagctgamactgaatagcagggcctcagggaagaaatgagatgggatgcaagaccatctaccaagtgccaggaatgatgcatctattatttcatttagtcctcccacacactctgttgagttaggcatcattatccctatttagagatgaaacagaaatgcacaaggctcagttgccttgtccagggtcacaaagcttgggaagaagcagaggttgtcttccaaacc

SEQ ID NO: 528499 - DNA, 574 bp, Homo sapiens
ctagccaacgctctcagttcttagaccaccagttaaggcaggtacaggtctacacatctggctcacttcattcctctgcctggaactttgtctgccttttctttaccatcaattcaaatacagaactgactttaaagcccattttaatccaaccttccatggcacctttggaacctactcyaccccaaagggaagtgcctttgcttctaactcactgtctataataaccattgaaaattgcatacgtgctagtttatgtatagataatgctcttgcatcagggtttatattgcgttggctttttctaaccctgtttccactttagactgccaactaatatgaatttcctcaaaactctttgtattctagaaccccagaagtactaaggattaaataaataatgtcttcatcagtttatttcttctgaggaactacagctatattacctagcttacactattagtgtttcattcatttactgttcaacaaacatttattgagtacccgtgatgttctaggaactgcgctacttactgctacccctacagctactattactactaataacagcagc

SEQ ID NO: 528500 - DNA, 632 bp, Homo sapiens
gctgatcttgaacaaaggacaacccctctcagcttcgatttccctatcagttaactatagataataatagcaatgatccaaaaggcttatgatgaggctcaaatgagaaaatgcatcaaagttcttagcatggtgattggcaagaagaaaacatttagtcaacattatcagctattactgctatgattactattattctcatctttatccttattgttgtcaccattgccatatttattttgatgggaagcattattccttctcatatttgcaataacttttctgagcacttttatgtcacttatttaacaaattacatataggctactgtccctaatacatcaagtcctaaattctcatcctgacatttgaggccttcttttatttatctttaaccagaatggttccaccttacttcccacgttatttaaccctactcacctgcctcacactccaaagttccctcctcacacctagcctccatactttcattcaagctgkttcccacccaccacagaatgtcctccctcttgactgtaataaaatatgttgagtgcttacactgtgccagccatcagggtggacacttcatatatatgatgccgttaatcgtcaacccaaagtaactgaga

SEQ ID NO: 528501 - DNA, 489 bp, Homo sapiens
gacagcaactgaactgcaaaaaagactgtcaaatcagacttaacagtcatcacagatcttacctggtatcaagctttataaataatttcaatgacacacagggcccaggacatgcctagtgccttctcaggcccttccttcccacatcacacacgccatcgagcttagaataaaatgtgaggtcttcaagtgagattccatgaggtgatcttatatagtaggggagtgtttcatttatgaaacatctccattttaaacttgaaattaygtgacattttatagggatccatgccttataattctatagattctaggtttatttattacaggcagtccttaatcaagaagatctgctaagagaatatcataaatgaggaccttcttcctagcaagtatcattgctttatttgacaggatgtccagttaccagattagacctggtaatctgcttttccacaagagtgtccctgccccacctctctactcctc

SEQ ID NO: 528502 - DNA, 489 bp, Homo sapiens
gacagcaactgaactgcaaaaaagactgtcaaatcagacttaacagtcatcacagatcttacctggtatcaagctttataaataatttcaatgacacacagggcccaggacatgcctagtgccttctcaggcccttccttcccacatcacacacgccatcgagcttagaataaaatgtgaggtcttcaagtgagattccatgaggtgatcttatatagtaggggagtgtttcatttatgaaacatctccattttaaacttgaaattacgtgacattttatagggatccatgccttataattctatagattctaggtttatttattacaggcagtccttaatcaagaagatctgctaaragaatatcataaatgaggaccttcttcctagcaagtatcattgctttatttgacaggatgtccagttaccagattagacctggtaatctgcttttccacaagagtgtccctgccccacctctctactcctc

SEQ ID NO: 528503 - DNA, 522 bp, Homo sapiens
ttgttcacccaatttctaaacagattgagaaatatgacaatggagaggcaaaaatatcagcttagcttagtgagaagtcaaaggagcatgttatcagatctcagaaatagtcaatcatgatcacccagatatagaaaatactacactgagctttttccgcacaggaggagagcttctcttggagagcaaaacacattcttccagaacactttcttcccaagaagggagttaaatcactccacttcccctagtagagaggaagtgaaggggttgagaaaacccaggagggccacatcatagagctacttccaccaagaaggaaatagcaataaacagtatcccctaatatttatagtattcaaccttygcattcataaacatatatatcactccatttatttcatgtctttgaataaatatttgtaattttctccataaagattttaatcatctttggttagatttattgttgttttaattgctttttaaaatagtgtcttttttatattttcctaattgttt

SEQ ID NO: 528504 - DNA, 400 bp, Homo sapiens
gggggttgggcctgtgcagtgcctctcagccgcccacgctggtggggctctgcagtgttagcttcttgtttctctattttctacctaggtttcagtttttcacttgggtttgtttcccctttgtctctggttcagcttccttttcctgtttggttttaagtaggctataaaaatcaagttgctgtcttcagagggtctgtkgtcctctgatcaacataggctggtgggagtacaggactcgcctcctcagggttccctgtgctgccacttttcagccatggccacaaggtgagtattggaaccagtgcaggggacagagggatgtcaagaggaaacctagaatcttaacggtgaatgggctgtagaaattatctcaggtccccttagtatactgatcgag

SEQ ID NO: 528505 - DNA, 597 bp, Homo sapiens
ttgtggacttaggctattgctgttgagcacatgtgtgaataccagccagtctacaaaccgcactcctcattgagattgttctctctaaaggtgagattacattttggacctgcctctcccctgccctacaactctgaaagatyatagatgataggacagacagacttttatcctgtggggtttggggcatttgtttgattgactcatgacagctttgttttttagcataaagtaacaatccctcactttgaaaattatttcacaatttccaaagtgccatttcgccagttttcttatttgaatcttttagccgtgttagattgatgagaacgctgtcatcactcctgtttcgtagctgagaaaacctctgaaaagttgtggggtttgtccaaggtcacatggcaggttggggaaggaatggaaccagggtttaacgaggttggcctcatccggtggttttcgcagcacgctacacaggcacagaagcagcttgcagtgagttgttaaaattgacgtggtgataggtagaacttgtccagggctgcttattttccagttggctttatttctgatcctgtcattttagtaactttcctt

SEQ ID NO: 528506 - DNA, 597 bp, Homo sapiens
ttgtggacttaggctattgctgttgagcacatgtgtgaataccagccagtctacaaaccgcactcctcattgagattgttctctctaaaggtgagattacattttggacctgcctctcccctgccctacaactctgaaagattatagatgataggacagacagacttttatcctgtggggtttggggcatttgtttgattgactcatgacagctttgttttttagcataaagtaacaatccctcactttgaaaattatttcacaatttccaaagtgccatttcgccagttttcttatttgaatcttttarccgtgttagattgatgagaacgctgtcatcactcctgtttcgtagctgagaaaacctctgaaaagttgtggggtttgtccaaggtcacatggcaggttggggaaggaatggaaccagggtttaacgaggttggcctcatccggtggttttcgcagcacgctacacaggcacagaagcagcttgcagtgagttgttaaaattgacgtggtgataggtagaacttgtccagggctgcttattttccagttggctttatttctgatcctgtcattttagtaactttcctt

SEQ ID NO: 528507 - DNA, 542 bp, Homo sapiens
ttttatatttctatttgtttctgttttatacttccaagctatctgccaaaattatcagtcttgtcttttacctcctttaacatagtatgtgtaattatcttaaagtccatgttcaattatggcaatctgttagttgtttccagtgtctgtttctgttgattttcattcatattgtcttgtctccttatgtgcctagtgttttttttaatgtgtggtaaacatcatatttgcaaaattatttgtaggaataatttgaggcctaagatgatgcttttttcttccagagataattaatatctgctgttataaggcacatgggagcacttasaattggcgttgccttcagtacagtttcagggattgaaatatctctaagctgagctgcagttcttgtgaagacaaacctgttctgttcacttttcctcctaatgttctcttcttcaccagcacctttactctccaccccagcgccaatcttttagcattcccttcagaattgataaacacccttcaggaaaattagcctcaaacactgagctcac

SEQ ID NO: 528508 - DNA, 581 bp, Homo sapiens
acgttgtatgattctattaacatgacattttcctaaagacaaaactgttgagatggagaacagatcagtggttgctgggaattggtgggggcggatatgactacaaagggagagctgagggagcttgggagtgatggcactcttctgccttctgattgtggtggtggttacaccaccaatctaygtaggtgttacattcatggaaatgaaataaaagcaaaaccaaaccaagcaaaaaggtctgagaaacaaaaactccagtaatttaagtggtgaagtagttttgcattattatgttcctttggatttatttgatttgtaattaaccaaatctagctaatgtgtcctatttttctttaaatgttccttaaaaccattggaaatcattgataggaagcagaaggtttggaaacatatagcttgggaaataaacagttctcaggtcaagttcataggcttgcctcaaagcgtgtgagtgtagttcaagttcaaggaattgcctggaagccaaagagcacatgtactgcaactgtgtattctagggaggccttttttgtcagcagcgcccttgcttcatttta

SEQ ID NO: 528509 - DNA, 355 bp, Homo sapiens
atggatctattaaatatttgctaacattatcaacctcttcttttctaaaccataaaagtyctttaaggacaagtacagtcgttctcaattttttgtctgtgatttctaacacagtgcatgcttcttagtgagttctcagtagattttgaaagaaagattggactggatcttaccttcatgagaaccctgtggagataggcaaaataagtataaccccattttacagttgaggccacccacttaataaacaagtgacaaagccaagtttccagtattcctcaagtgttttcctttcaggctctaaattgctgacttaaatgtcatcattagagagagttgtctcctcggtagaagt

SEQ ID NO: 528510 - DNA, 682 bp, Homo sapiens
tccataaaatatatccccagcttctgaattctttttatagctttctgtagaataattttttctgcctgttctgtaacatttatccatttcttcttaattgcaaccctcaaaattattcataataaggaattattatatttgatatattctaaggtagaattattacttaaaggaaaggtacaaataaaccatagcaaaaaacaaatatgtttaaatggtagcatctctttttttgcrtctaaattttaaatttgcatttactaattaattggagcattttgtagctaatggtgatcctaactggaaaaaacatcacattacagttgttcggtttgaccatttcctacatgatccaaggtcatcttgtccaaccagccagctcttccattcatttagccaatatttattgagcattttcaatttgtgtcaaggataccaacctatctatctgcacctgtctatctatctatcactcccacacactcttcattctagaagagttatgatttggttagaaagtgttaagcctgtattggaattataacatgaacatacaatgggtcttaacctgcctgggaaggtataaaacacagaaaaccagaggggaaaccatgcaacatgttagccaatgatgtgagtgaacatatagcagatactttatatgttttatgcagatgctgca

SEQ ID NO: 528511 - DNA, 488 bp, Homo sapiens
tggttttgcaggcagtatggccatcatctcccaaggggagagagcacagggggagctggctcctccgctcacctctttgtgggatcccggcaggcctgcccaccgcatcccaggagagcagccatggagcccgattctgtttccaggccagctcgaagggtgctgggaagcactggcagagctcctgcagatgcagatgctcctctgcctctttcgtggcagtccagggaccagatgtgtgtctgcacaagccctcatcacttacacgtggttgaacaggcaggacttggtgaattccttctcagttttgtcctgagaggcagasagcgtgcccctggcagccttgaaatgaggggtcatttggggatcctgaaagctgaggttctagcccaggaagtgccccagagcccggccatcctgacacactgactctccttccatgctgggagacagcagctctgccctgcccacctgcccagaagtggcca

SEQ ID NO: 528512 - DNA, 542 bp, Homo sapiens
tcaaatttctcatgcaaaccactcctgctccaaagagtcccagatgcaactttgggtggttttgcaggcagtatggccatcatctcccaaggggagagagcacagggggagctggctcctccgctcacctctttgtgggatcccggcaggcctgcccaccgcatcccaggagagcagccatggagcccgattctgtttccaggccagctcgaagggtgctgggaagcactggcagagctcctgcagatgcagatgctcctctgcctctttcgtggcagtccagggaccagatgtgtgtctgcacaagccctcatcacttacacgtggttgaacaggcaggacttggtgaattccttctcagttttgtcctgagaggcagacagygtgcccctggcagccttgaaatgaggggtcatttggggatcctgaaagctgaggttctagcccaggaagtgccccagagcccggccatcctgacacactgactctccttccatgctgggagacagcagctctgccctgcccacctgcccagaagtggc

SEQ ID NO: 528513 - DNA, 542 bp, Homo sapiens
tcaaatttctcatgcaaaccactcctgctccaaagagtcccagatgcaactttgggtggttttgcaggcagtatggccatcatctcccaaggggagagagcacagggggagctggctcctccgctcacctctttgtgggatcccggcaggcctgcccaccgcatcccaggagagcagccatggagcccgattctgtttccaggccagctcgaagggtgctgggaagcactggcagagctcctgcagatgcagatgctcctctgcctctttcgtggcagtccagggaccagatgtgtgtctgcacaagccctcatcacttacacgtggttgaacaggcaggacttggtgaattccttctcagttttgtcctgagaggcagacagcgtgcccctggcagccttgaaatgaggrgtcatttggggatcctgaaagctgaggttctagcccaggaagtgccccagagcccggccatcctgacacactgactctccttccatgctgggagacagcagctctgccctgcccacctgcccagaagtggc

SEQ ID NO: 528514 - DNA, 612 bp, Homo sapiens
tttttgccaggttctgccctctgcagccccagagctacacctgtcctttcttagaagctgccaatggccatgagtgtccaggmcactctgggaaggactgtagtaaaatagtcaatgtgtttaatccatgtttcccactggcccacccatgcctttgacccacaggacagtggccacgcatgtgcttgggaaaaccaccataacaggtccagacaagagtgctggcctgagcatgggtcacgctaacgtgggtggctcaattaaggaacagggatggacttcctgtcctgtcgcccccacacactcctgcttcttctagtggccatttctgtgtgaggctggagcacagtggaaggtctgtgaacctgtattaagcaaaatagaaactaaatgtggacttggactgaaaggaaattgagttagacaatgaaaatggatgggaatggaatggaattcggatttgaactgaatggaattgaattggaagtggattaaaatggaattgaactataatctaaaccccagtagggcagaaaaaaatggacaggctgagccaggggagctgccctcaccccatctgttccctgccctggggaaccctctggtcaatac

SEQ ID NO: 528515 - DNA, 477 bp, Homo sapiens
tggctttttgccaggttctgccctctgcagccccagagctacacctgtcctttcttagaagctgccaatggccatgagtgtccaggacactctgggaaggactgtagtaaaatagtcaatgtgtttaatccatgtttcccactggyccacccatgcctttgacccacaggacagtggccacgcatgtgcttgggaaaaccaccataacaggtccagacaagagtgctggcctgagcatgggtcacgctaacgtgggtggctcaattaaggaacagggatggacttcctgtcctgtcgcccccacacactcctgcttcttctagtggccatttctgtgtgaggctggagcacagtggaaggtctgtgaacctgtattaagcaaaatagaaactaaatgtggacttggactgaaaggaaattgagttagacaatgaaaatggatgggaatggaatggaattcggatttgaactgaatgg

SEQ ID NO: 528516 - DNA, 612 bp, Homo sapiens
tttttgccaggttctgccctctgcagccccagagctacacctgtcctttcttagaagctgccaatggccatgagtgtccaggacactctgggaaggactgtagtaaaatagtcaatgtgtttaatccatgtttcccactggcccacccatgcctttgacccacaggacagtggccacgcatgtgcttgggaaaaccaccataacaggtccagacaagagtgctggcctgagcatgggtcacgctaacgtgggtggctcaattaaggaacagggatggacttcctgtcctgtcgcccccacacactcctgcttcttctagtggccatttctgtgtgaggctggagcacagtggaaggtctgtgaacctgtattaagcaaaatagaaactaaatgtggacttggactgaaaggaaattgagttagacaatgaaaatggatkggaatggaatggaattcggatttgaactgaatggaattgaattggaagtggattaaaatggaattgaactataatctaaaccccagtagggcagaaaaaaatggacaggctgagccaggggagctgccctcaccccatctgttccctgccctggggaaccctctggtcaatac

SEQ ID NO: 528517 - DNA, 577 bp, Homo sapiens
ctgcagagcccgccgaggccatggagggcaagaagtctgaccaggacgcggagggcaaggccgaggagacagagggcaagaaggatgccacggctgccaaggaggagaccccgaaggaagagcccgagaagacagagagcgcgcagaggccaaggctgaccccccgagaaagagcaggcagcccccgtccctgctaatggyggcgaggcccccaaagctgccgaagtcaccacggcccgggccaagagcgcggaccctaccactggggaggagcccagcaaggaggaagggaaacctaaaaagactaaggcgcctgcagctcctgccacccaggagaccataagtgacgggctccagcatgatacgcaaaccgcagcagctcggaggctgccccctcttccaaggagaccccccgcagccaggaagcccctagttccacacccaaggcccgggcccccacagcctccgcagaagagcccaagccggcggaggccctggcagctaattccgatcaaactgtagccatgaaagagtgacaaggacagcctatgggaaaaataataccacttaaaacagt

SEQ ID NO: 528518 - DNA, 491 bp, Homo sapiens
atcccagagcagaggctgtcagggctggtcccagacagcctgaaggttgcctagtgcaccagctaaagggtccattttttctcggcccatgcccggagtgagggttgcagactctgggcactgcacygtggcggcatggaaagacaggtagtggggtactcccctatctgctctacacaaagcccaggttgtcaggagtcagatcttgatcccagcatgccccagtctcatccttgggcagcccagagcacaggggcccactcaatcctggctccataacttgtgccaggcaggcacagagccccagagtctcagcacctttgtctgtggctgggctaaactgggctgtcctctgcaccttgaccatctgcccaagtgggcacagcctccagcacaagtccccagacagctccagggttcttcctccctggccccttcttctggctcctggtcccaacagcaaaccacctccaccctaggcagcccatctg

SEQ ID NO: 528519 - DNA, 491 bp, Homo sapiens
atcccagagcagaggctgtcagggctggtcccagacagcctgaaggttgcctagtgcaccagctaaagggtccattttttctcggcccatgcccggagtgagggttgcagactctgggcactgcactgtggcggcatggaaagacaggtagtggggtactcccctatctgctctacacaaagcccaggttgtcaggagtcagatcttgatcccagcatgccccagtctcatccttgggcagcccagagcacaggggcccactcaatcctggctccataacttgtgccaggcaggcacagagccccagagtctcagcacctttgtctgtggctgggctaaactgggctgtcctctgcaccttgaccatctgcccaagtgggcacagcctccagcacaagtccccagacagctccagggttcttcctccytggccccttcttctggctcctggtcccaacagcaaaccacctccaccctaggcagcccatctg

SEQ ID NO: 528520 - DNA, 441 bp, Homo sapiens
gcagcccatggggacacttacttctacagggggtggagagccactggccagtgcccaaggcctttacctatgtcacatcgccakggctgtctccagctatcaagaacgtctctctctgacactacaggtgcagcccccaagttaccatccagtcatgccagatgtctaccccagatcattctgggaatactgggagatgactgacaactgggaggttcccctcatgtttactgacaggtcctagtttattttgagtgggaccgaactcaaggcgcctcttaatcattaactcctcctggtttaaacacagagacacaaacacaggcagccatgtgcccaccatgcacacaaatgagaacggctcttggctggcttctgggggcccaagaactgcatctggaaaggggccattgccaccccagccaggttctctggaccctc

SEQ ID NO: 528521 - DNA, 441 bp, Homo sapiens
gcagcccatggggacacttacttctacagggggtggagagccactggccagtgcccaaggcctttacctatgtcacatcgccagggctgtctccagctatcaagaacrtctctctctgacactacaggtgcagcccccaagttaccatccagtcatgccagatgtctaccccagatcattctgggaatactgggagatgactgacaactgggaggttcccctcatgtttactgacaggtcctagtttattttgagtgggaccgaactcaaggcgcctcttaatcattaactcctcctggtttaaacacagagacacaaacacaggcagccatgtgcccaccatgcacacaaatgagaacggctcttggctggcttctgggggcccaagaactgcatctggaaaggggccattgccaccccagccaggttctctggaccctc

SEQ ID NO: 528522 - DNA, 441 bp, Homo sapiens
gcagcccatggggacacttacttctacagggggtggagagccactggccagtgcccaaggcctttacctatgtcacatcgccagggctgtctccagctatcaagaacgtctctctctgacactacaggtgcagcccccaagttaccatccagtcatgccagatgtctaccccagatcattctgggaatactgggagatgactgacaactgggaggttcccctcatgtttactgacaggtcctagtttattttgagtgggaccgaactcaaggcgcctcttaatcattaactcctcctggtttaaacacagagacacaaacacaggcagccatgtgcccaccatrcacacaaatgagaacggctcttggctggcttctgggggcccaagaactgcatctggaaaggggccattgccaccccagccaggttctctggaccctc

SEQ ID NO: 528523 - DNA, 653 bp, Homo sapiens
ctggctctgacctcttcttatgctcagagatcttgactgtatttaaactgtgtgatcactttctcagctttttggggttttttttactacctaagaggtttcatttacataaaaaggctgctttcccagcctctctctctgggctattaatttaaaattttagagagatcttattctaagtaagtaatgaaaagaacagattttgaaaaggacacatagcagtgtcgcagcaagccttaaaaattctcttgataaaactaagagcaaactgtatggcctaaaacagatctggtagttaaaattctgtgacagtgtttkccacctaaaatgtgctacagaggttgtgtctatgatactatttggtttcattgcaagagtaccaaaagtaaactgggtagaatccaaaggaaattgtatacaaatctaacagtcagtttatagcatttttgttgccaaattataagtaaattgtaggtatttattaatatcattccaaggaatgactagcagtgcaaaaaataggtactttagtggtaacaattatttgctaataatccagaacctacaaataacagaaggaaacagcacactcttaaataaataatgggacaaggaagaaactacaaagtcaattagaaaatactttaagatta

SEQ ID NO: 528524 - DNA, 550 bp, Homo sapiens
gttcatggcaatttaggttttttctagcattaacttcaatactgtgccatcctctctccccattacctggttccaaaatccacgtccacgttttwgggtatttttcataacaacaccttacttctctggtaccaatttttgtcttagaacatttgtgctgctataatagaatatctagctattttaataacagagactggataatttataaagaagataaattaattctcttacagttctggaggctgggaagtccaaggtcaagatgctgacaaatgatgagagctttcttgctgcatcctcacatggaagaaggtggaagggcaagagagaagaaactaatgctaggaaatgcctcttttaaaagggacttagtcccattaacaaagaagcaggtcttatggcctaatcatctcataaaagcaccacctcttaatactatcacattggcaataccttgattttggaggggacacattcaaaccatagcagagaccactaagtatagggaagactaaacccgagaaccaagtggccagaagcctgcact

SEQ ID NO: 528525 - DNA, 550 bp, Homo sapiens
gttcatggcaatttaggttttttctagcattaacttcaatactgtgccatcctctctccccattacctggttccaaaatccacgtccacgttttarggtatttttcataacaacaccttacttctctggtaccaatttttgtcttagaacatttgtgctgctataatagaatatctagctattttaataacagagactggataatttataaagaagataaattaattctcttacagttctggaggctgggaagtccaaggtcaagatgctgacaaatgatgagagctttcttgctgcatcctcacatggaagaaggtggaagggcaagagagaagaaactaatgctaggaaatgcctcttttaaaagggacttagtcccattaacaaagaagcaggtcttatggcctaatcatctcataaaagcaccacctcttaatactatcacattggcaataccttgattttggaggggacacattcaaaccatagcagagaccactaagtatagggaagactaaacccgagaaccaagtggccagaagcctgcact

SEQ ID NO: 528526 - DNA, 505 bp, Homo sapiens
attctgctattagacttagataaagtatgagccttttgctactgaatcaacagaaaggctgcccgaaagcagtgagtctcagatgcctcccatgaagttcacacatcacaccagggacttctactcatacgtgaaaagctagagaatcatgtttaggtaggcaaggggagagaggtcctggacaggttattgaaggactgattttaaattacaaaatacctctttatgtttagtttgcaaacaaaaggagtcaattagtgaaggcttggctgagctgatttcagaaacagtagggacccactttttgcagtagttaggaagcctcaggatctttttaaatgtatcctaattactagcctaggaaagtcttaaaagagctatagtttgttgggagaaagrgatttgccttctttagaaaaatctatctttggtaatgcacttggttttgacaaaaccaagtgcattggttttgttactttcctttaaaaattctatctttttaaaa

SEQ ID NO: 528527 - DNA, 606 bp, Homo sapiens
gtaagaggtaggcagggactctgtggccctgggccaggctctggttaagtgccttaggtatgctagttcattttgttttcaccagcaaaatactttgaacctctctgacctcatctagcgtttccctctcttgatttcctccatcacaatggctgcgttcttctgcagtgggcctacatactcctgctgtaggctggcactacctcccctctcctccctcagatatccctctggctgaccccttcacctccttcaggtcttgaccatctcaatgagacccacctgagtaactgcgtgtttcacactgaaacttgtgcttgctcaccatattttcccccatcctgatcttattacccaccccacgaagtactttccatcttgtgacacataatgtaatttactaygtttattgtgctacccctattagaatataaggtccctgagtttattatatctaaaaaagttaaatttaatgtttcattttaattggatggaaagaagaaaggaaggaaaaaagaaagcaaactacactagagcctttctatgggattaccttagaggccatgtcacaacactggctcaaatagacccccttaggatagggtc

SEQ ID NO: 528528 - DNA, 606 bp, Homo sapiens
gtaagaggtaggcagggactctgtggccctgggccaggctctggttaagtgccttaggtatgctagttcattttgttttcaccagcaaaatactttgaacctctctgacctcatctagcgtttccctctcttgatttcctccatcacaatggctgcgttcttctgcagtgggcctacatactcctgctgtaggctggcactacctcccctctcctccctcagatatccctctggctgaccccttcacctccttcaggtcttgaccatctcaatgagacccacctgagtaactgcgtgtttcacactgaaacttgtgcttgctcaccatattttcccccatcctgatcttattacccaccccacgaagtactttccatcttgtgacacataatgtaatttactatgtttattgtgctacccctattagaatataaggtccctgagtttattatatctaaaaaagttaaatttaatgtttcattttaattggatggaaagaagaraggaaggaaaaaagaaagcaaactacactagagcctttctatgggattaccttagaggccatgtcacaacactggctcaaatagacccccttaggatagggtc

SEQ ID NO: 528529 - DNA, 285 bp, Homo sapiens
gggagagcagggacttgggaatcgcagagggaagtgagtcagagctggccctgtctccaggtgcttcgccaacatgatgtgggtttttttgttaactgcagcatcctaacaaataaaatacaacaagagtcctcatataatgtagataataaataaaccatgctagaaacagaaatattatactactccctatcccaatcatttcatatggaagaaacgtgtttaattactaccrccctaataacatcaaagggctcctgcaccaccacatgcagaagaaaaccc

SEQ ID NO: 528530 - DNA, 496 bp, Homo sapiens
ggagacgcctcccagcgcccctgtctctcgctctcgccgtctcccggtgcagcccgcacccgcctccctccaaacgctggcggcccgcgctgcaggcgcctcccctcctgggggtgctgaggcttgagcgaaatcccactggacagtaaccggcttcagcggagcgaaaactcagccgcactccagctacgctccagggcaagctgcgccgggcaccgtttcttccttgtgacgttcaaaagaatgcagatgggttaccaactacaggagaggttaaacttgagggcgtgctttttaaattcattatcaacgttttcatggaaagaaccggctaaggagtcgatctgtcttccagttttatccctagactcaaattaggacatgggctggctctcagtgagcactcagtaaacagcaagwctcctcctgccctttgaaaaagcgtttcggatcatcttggcattgtaagcgattttcatctagttccagtccaagt

SEQ ID NO: 528531 - DNA, 601 bp, Homo sapiens
ttatggatgagtaactaaagtttgaaaggttaagtgacagtgtaagattatataagtgagctgtctcagggtcattaggggattaactataaagtagaaaatactaaaggccataagagagggaagcaaaagacccttaggaatttagaagctcttctggctggggtgggtaggaaaggcttgctgatgtccatgaagaagcaatgaagaatgtgcaggatagggtcagccttggtaagtgtccatccagccattttaggyagagagggctcaagtggagtaaggggtagtggaggaggtagggtgtggctcctcctacattttgcttccggtatagagggcatggtcagaggccagaggagaaaaaaatctgaagaggagacatctgggcatggcagccatgtggggagcagtcagtagtagttctgtggtatgtgcaggagtatagtgtgtgggagagagaggagagcctgcagtggcaagacaaggctttggacctgtgttccaaaatacctattcacaaagtccatgaatatttggctactgctctgggcccttagaatccttgattgattagctcaggcaactttatcagattaac

SEQ ID NO: 528532 - DNA, 489 bp, Homo sapiens
tggatccccttaagccagttatagacctctgctctggcgtttacctgtaactgagccatgactccgatcttgatcaaccatgttatttagcagggtgtggtggtcctcagcatatatatatatatatatatatatatatatacacacacacatacatatatatatgtatatatctgtatatatatgtgtgtatatatatatacatatatatatgtgtgtgtatatatatatacatatatatgtgtgtgtatatatatatatatatatatatatatctcacaagtgttcactgcctcctatcaaggctagaaggtgagcggtatcctgggaagaagaggctgaggccagtgcccccccaggggctggagttgagttgaagtcatggctgtcagcagatagaaatgtcaactagtggtggcctccagtggaaacatcttgcagggagagrctgtaccccagccagtccctggagttttggaagacaaaaca

SEQ ID NO: 528533 - DNA, 584 bp, Homo sapiens
tgttctgtggagaattcctcctcctacattcacctgtccctccttatggtgttgtttaacttgcacctttatccttcaacatttctgtaaactggaagttaattgtaaagtcttcgtagattcaggttaagcctttgggccacactcgtgacgggttttaaaaccagacaggaaggttagatctgcagcacttccagctttggtgcacgcacgaatatcccggggtgggggccttgtgaaaaagctgattctcattcagcaggtccaggttaggtggtgacgcccaggctgccggtctacggctgacacygtgagcagcttagggagatcctgcttggcggagggagggccagagggggtccggtggaggcaggagctcagggaggagtgtggaggaggaggggacccctccagggtcagtgagtgctcacccccactggtggactgagagttgggcgtggtgttgggttggataacgtcaatgctgtcacacgcttcttatctctagggacactccaggcagtggcttgtcccaaggtgctggaacattctgaccagccagtgggattagagcctctataacc

SEQ ID NO: 528534 - DNA, 584 bp, Homo sapiens
tgttctgtggagaattcctcctcctacattcacctgtccctccttatggtgttgtttaacttgcacctttatccttcaacatttctgtaaactggaagttaattgtaaagtcttcgtagattcaggttaagcctttgggccacactcgtgacgggttttaaaaccagacaggaaggttagatctgcagcacttccagctttggtgcacgcacgaatatcccggggtgggggccttgtgaaaaagctgattctcattcagcaggtccaggttaggtggtgacgcccaggctgccggtctacggctgacaccgtgagcagcttagggagatcctgcttggcggagggagggccagagggggtccsgtggaggcaggagctcagggaggagtgtggaggaggaggggacccctccagggtcagtgagtgctcacccccactggtggactgagagttgggcgtggtgttgggttggataacgtcaatgctgtcacacgcttcttatctctagggacactccaggcagtggcttgtcccaaggtgctggaacattctgaccagccagtgggattagagcctctataacc

SEQ ID NO: 528535 - DNA, 449 bp, Homo sapiens
taacgcttgcaaaagccctacaaaggagatactctttctgcccccatttgacagatggggagactgaggtactcgtataactcagtcaggtgaagaaatttacccaagtaacactgccctgaaatgagccactggggctcaagccctgggcctaagcactgcagtgtgctgccacagtggagaggatggggatcttcctcttgcctgatcttctccccgcaggcactcagccttttctctggtccccataacggccctcccatccggggtacaacccctgggaccctgcctttaccttcagcagycccatctatgccctgctctgtcttcctcctgccttcatccttaggtgaaatctcagactgtcagacccctagtagaacttagaatatgtcctatccacccccgctcttccccacccactagccatagggaaacagagtcccaga

SEQ ID NO: 528536 - DNA, 612 bp, Homo sapiens
tatttttagtttttcagtagtttgataatgatgtgcctaggtatgttttcctttgtatttttcctgtgtaaataaacttttgaagctttatatctctcaccaaatttggaaaattttaactatttttaaataaatgatttcttttgaaatacttttagatttaccaaaaagttgcaaacatagtatagggagttcccaattcatcatccagcttctcttcatgttcttataatcatggtatatttattaaactaaaaatgtagccctggcataatgcttttatctacagtttttccactaatgtcctttttgtttgtttgtttgttttaggatccagtctaggataccacattrcattttatcatatcccctggacacctccattctgtaacactttgtcagattttacttgttttttatagccttcacacttttgaagagtactggttaggtatattttagaatgtccctcagtatgggtttgtctgatgtttcctcatgcttacactgaagtttcaggaatactacagaggtaaggtacccttctcattgcatcatcctagaggataatgataacaatatgacttatcactggtgatattaaacttgatt

SEQ ID NO: 528537 - DNA, 430 bp, Homo sapiens
atcacttgttctcacttataagtaggactaaacattgggtacatggacataaagttgggaacagtagacactaggaacttcagaaggggaaagtggggtggggaaagtgttgaaaaactatctactgagtattatgttcaccatttgggtaacaggttcaattaaagcccaaacttcagcattacacaatttacccatgtaacaaacctgcacatgtccctcctgaatttaaaaatttaaaaatttaaaaaaaatttaaaagaagcataaggccatggaatatatttaaatcaccattatccagagagtccttctagctcttggatggatggatgatcaacatcttaaccctatacctgaagagcaacaggtgggaagggttagggaaggaagcactgtgtttggyctctgacatatattttctgtttct

SEQ ID NO: 528538 - DNA, 664 bp, Homo sapiens
ctcagttgtctcattacaatattgaaaaagaagggagtgtaaaacctcaaataacatcagtagctaagggacatggtgtagttacactgatgattaatatcaataatgccattactaagtattacactagtcaatggataaaatattactgctgcatgatagcggcaaaagtgataaaactgtcaagagataagatattcaaagcaaaaagtcactcacgactctgtacctatgtttagaggctttctcacctttcacagtggatactgtatttattatttttaatttctttcctaaatttcagtatggtattattaattttaagctaaactaacattatttttgtaaagtacattttaacaattgtattggaggctgcaataaatttgtcaggtcattctaattgttcattttgcctcggagatgtactctgaagtatgtggaagcaactggtatcacaaaataagagtcatatacataatgaaawacaaacataatgaagtatcatattgttccattacagaaaaaaggagaaacttttatcttttgtgactggtgtaaggaaaatggacatttttcataaacaaaccctagtggtttttattattattattattattatttttttttttaaaagcccaggcctccctcagcctcccaagca

SEQ ID NO: 528539 - DNA, 570 bp, Homo sapiens
atgttagtattcttttcaaactgcaaagtgacttttcagcaattggggttgttgtttgaaatgtttttgaatggcttgtcttctatctttccctcataggaaaagaaaaatacgacacatagccatgattgaagacgtgtaccttcatctgagaagacatctgcaaatattctggtcactattaaactatatccaatttttaagttgtttatttttaagtgagggctgtttttatagataaagtttaaaaagtctggcattgttgacatatattttacattaacctttgcttttggaagaaccagatattcccaatgttagtgtaatcgatcgtatttttttgattgttatgtggcagttgcatgtattacgtttttaagttgtcataataacctggtgagagaagtactattattatttgacttttgtagatgagaaaattgagagacagaaaagttaagkgacttgcccaagtttatacagctagcaagtagaaaaactgagatttaaactcgggatggacttgttccagagcccatgtttttaaccacagcattatactgacccgtc

SEQ ID NO: 528540 - DNA, 491 bp, Homo sapiens
ctgtgttggtgcatgcctgtggtcccaactactcgggaggctgaggcaggaggatggcttaagcccaagaatttgaggctgtagtgagctgtgatcgcaccactacatgccagcctgggcaacagagtgagattctgtctctaaaaaataaataaaaattaacaacaacaacaaacttaaaaccataaaagcaagcccatcaccttgatcactgctatatactcagctttaaagcagtgcctagcacactgttggcattaaatattygagagcaaatgaaataattttaaaaatcaagatactgtcttgcttttctaaaatttatcgagttaaccaagactcatagtttatagcttaagcaaaatcattttttttttaacctcataacagtagaacatgctgtggacactccaattttagacccctggcccatggtgcagcatggaaaccttatacctgaagttgcataatcactgccagtaagtaaaaga

SEQ ID NO: 528541 - DNA, 491 bp, Homo sapiens
ctgtgttggtgcatgcctgtggtcccaactactcgggaggctgaggcaggaggatggcttaagcccaagaatttgaggctgtagtgagctgtgatcgcaccactacatgccagcctgggcaacagagtgagattctgtctctaaaaaataaataaaaattaacaacaacaacaaacttaaaaccataaaagcaagcccatcaccttgatcactgctatatactcagctttaaagcagtgcctagcacactgttggcattaaatattcgagagcaaatgaaataattttaaaaatcaagatactgtcttgcttttctaaaatttatcgagttaaccaagactcayagtttatagcttaagcaaaatcattttttttttaacctcataacagtagaacatgctgtggacactccaattttagacccctggcccatggtgcagcatggaaaccttatacctgaagttgcataatcactgccagtaagtaaaaga

SEQ ID NO: 528542 - DNA, 497 bp, Homo sapiens
actcaattagcgcgtgcgccacgtggccagacacccgagaggccccaggagagagctcattacgccggctgcacatctggtgccccagagccctggggaattagctctgggcgtgatttacagccacgtctccttgtcctttcctgaaggagacaagattctttggaccccagagaagagggtttctgaggagatgcgccgctgtcccaccgacggcgtggcccctccgcttcggcagyctcagtggcccacctgctcctggggagtctcctccagtgatcgagggggacttagtcacccccagcccggcctctgtgtccacaggtcacacaggtgggagggtggcttcctgcatgggctctgatgtcctcaagggatgctgttgccccagggcctccccagccagagcccacagcaactgtgtgctggccactgcaggggcgaagagccctttctggcccagcttgttgggtattgtgggggccaaggcggccaaa

SEQ ID NO: 528543 - DNA, 499 bp, Homo sapiens
taatataaggacctagagggaaatatgaccatatctctcagctcaagagtctgagcctccatgatgggcttgccaacatctgtcccataacagatcttgagcatgccttgtcttagttccagtccttcctgctgcagtggggaaacaatcctatctgtgcacaagcatgctggaaaattcatacccacacccatctaagccaacaatattggctcaccactgtcatctcacagaatatcccaaggaagcccagtctcagctttggccctcccacagcagttggataactgtaccatctgtttaagaacctgctgggagaaacatgcgcctctgagccaatgaaactgggctctccaacctccatcccacagcagattttgaggtggcctagtctcaattstggctccacttatgctagttgagaaacgacccctcctgtatagaaatttactgggaaacacacgcttgtctgagtcaatgagacaggcttgccagcagc

SEQ ID NO: 528544 - DNA, 657 bp, Homo sapiens
ctgcttatctccatacatcttatagtgtgaggggggaagtgttcaagttcctataaattaagttacctgtcaatagaagcatccttacaggatatagtaaacgttccaggaaagagaccagaaagcaaattattctgagagaaaagaagggatcaacatgaatattaaagagctggtgagtgtgaaaatgtaacacgaatgttaggaaaataccagcaaagagaggatttctccttatctaatcatgcgctctctctccattcatcccagagtaatactactatttatttatcacattcagatcttttccattggctttctgtttcggcagatgaaaataactcttaatacctcttcccaacctagtctttctatatcctccccatatgttcacattacaagttttaattagtgattacagtttacattattttgactacataaatgatacctacttcagagtcaagtggtatacagtggataatggatacacattgtcttttgtataattttrtctttgtagtcctccagtatggactagctactctctaggcctgatgccccatggtcgtcaggtactcccttttgtagctgtctcatagtagataaatattctttgggttctgtagctttgtttcacttagtcttcttcttgtt

SEQ ID NO: 528545 - DNA, 517 bp, Homo sapiens
tgggcttcagttacactatctattaaaatgaagagggtcaggttagattatctctaagatcattatgcaagggtactttattgttcataaatgtaaaatcacacaaggcattttaattaaaattcttgcaattttagccattaccagagaatggaaacagcaggaaaaggaagaaaatatagaaaaaaactgagtaaaggggattttcttcagaaggtgaattttctaaaggactgcgctgtctctagcaatatcaaaaactgtaaggaaagtatctcctacctccactaaaccttgcagaattctgacacacatgacgcatccgtaatgcactctggctgcagagggaataaacatgttcagagtcgatgttaagaagatggcagctccaaagaccctgggggaccaaagcattgtgttattcggcaggtctgctgatggatgtgctrcttcagctaagcaccagaaacaaacctaacagttcatgaaagatccctgtggaaatccctgtggaaag

SEQ ID NO: 528546 - DNA, 689 bp, Homo sapiens
acaaatgtctgcctagctacagatactgtcagaagtgaccatggaagagctggcatartcatgaaatggtggctgtcatcagtcatcagtgctcactgggtgccaagtgctttatctcccatgtgccatgccctctgtgatgaataaaagtcatcgctgccctcaaggagcttccaatctggtagaggacacagataggtctaaaatcattcgctcattcatcatttatttattatgaaattcaggcctacccagctcccacataattagatgcttaaatttggtggtggtaggtaggggggctgtggagtggaggtgggcaagggaattagggaggcccctctctcagaaataatgacaaactgcttactgtttctttcccttccaggtgggtctcttgtcagcagtcccacacatggttatgacaatcgttgtacctattggaggacaattggctgattatttaagaagcagacaaattttaaccacaactgctgtcagaaaaatcatgaactgtggaggtactgtggatttcatagatggcttaggcagcttttgtagaattagggtaaactgaactgcagagcatatattaagaagtgacatttagtcattggagtggatcttaaagacctctaagtctgtccctcagcagacacttgagtgttgtccatcacagtgctgccaag

SEQ ID NO: 528547 - DNA, 643 bp, Homo sapiens
tcctagcccaacaaatttacgtggagttccacaaacacatcagactctttcatccctttctgcctccacatatgttgttcctttttctggaacattcttctttctaccttcccttaatgtctgctcaatcttcaaatcccaattcaagcctctgatcctttgagaagcctctcgtggcccttcccacacctttctagccactccctcctccctggcacttggagaccttgtcatatatccatcgtcaacaatgtcataccaaattacagttatttatttacacatctgtatttcctgtccatctgtgagaaactgggtgcatcttgatgtgaatgacaaggtgttgctttccagcaagtgccacgatcaccggcacagaggasatgcatagccagtgtctgttgaactgagggaactgtacaggtgtttttatagttcttattaggctaggagtttgatgtgaaaggaaccattcaacaaatatttattgagcacatactatgtgtgaggcactgttctaagcgttaagaatggaggagtaaacagaagagacaaatgtctctgctgtcattgagcctaaagtttactctttaagccggacagtcatagactcagctaaaaattctattactagggaaaaaga

SEQ ID NO: 528548 - DNA, 643 bp, Homo sapiens
tcctagcccaacaaatttacgtggagttccacaaacacatcagactctttcatccctttctgcctccacatatgttgttcctttttctggaacattcttctttctaccttcccttaatgtctgctcaatcttcaaatcccaattcaagcctctgatcctttgagaagcctctcgtggcccttcccacacctttctagccactccctcctccctggcacttggagaccttgtcatatatccatcgtcaacaatgtcataccaaattacagttatttatttacacatctgtatttcctgtccatctgtgagaaactgggtgcatcttgatgtgaatgacaaggtgttgctttccagcaagtgccacgatcaccggcacagaggacatgcatagccagtgtctgttgaactgagggaactgtacaggtgtttttatagttcttrttaggctaggagtttgatgtgaaaggaaccattcaacaaatatttattgagcacatactatgtgtgaggcactgttctaagcgttaagaatggaggagtaaacagaagagacaaatgtctctgctgtcattgagcctaaagtttactctttaagccggacagtcatagactcagctaaaaattctattactagggaaaaaga

SEQ ID NO: 528549 - DNA, 400 bp, Homo sapiens
caccattgtacatcacacataataaaaagcatagctactgatgactgagcacagcaattcatgcatcatgccagacccagaggcaataacaatagtgtttaaggacatgaactttggagatagcaagatgggttcaaatcccaatctgtcatttgtttagcagaatgatctagggcaagttacttaaggtaacatctcattgtttttcatctttaatatgggcataataaaamcccttcattgaattgttgcaaggattaatgaaacaacaatgaaacagttttgtacactttaatgtacaaaaagtgcttagcattttatgatgtaacagtgatatctgttacatcatgagctattattaagttaaagtcataactactgtggctgtattagccttttt

SEQ ID NO: 528550 - DNA, 622 bp, Homo sapiens
aagcagtacaactttagaaaatatcaagtactaccagaaatggagagcataattcatgaagaggctgtgcccaagggaaggcaggcagttcagggagactcacacaggatgcttgttgtacatgactggcagaaactcatccactggcagcatcttcccaaaaggattggctccaaccagcttctgtgctccttccagagagatgacgtagcccagggtccagtaggaatagtcggcttcgaccaggtttgccacattgggcactgctttctctggctcctttacttgcatcctcttcctaccaatataactgtaaggaaatrgcagaggagaaaaattccaccttgactattatgccatgataaggatgaagcacagctttggtttacatagatacctctgaaatcctggactgactctgtctgtcattaaatgatgtatcacatccaaaagtggatccaatcgccagtcaggactgccatctgccatcactggggccattttgctagctccatttatcaacacccccactattcctgcctagtggatggttttcaagacggaaagtaagatgtcgtaagattaaaagatctttcagatcatttcttaaagatgggatggg

SEQ ID NO: 528551 - DNA, 622 bp, Homo sapiens
aagcagtacaactttagaaaatatcaagtactaccagaaatggagagcataattcatgaagaggctgtgcccaagggaaggcaggcagttcagggagactcacacaggatgcttgttgtacatgactggcagaaactcatccactggcagcatcttcccaaaaggattggctccaaccagcttctgtgctccttccagagagatgacgtagcccagggtccagtaggaatagtcggcttcgaccaggtttgccacattgggcactgctttctctggctcctttacttgcatcctcttcctaccaatataactgtaaggaaatagcagaggagaaaaattccaccttgactattatgccatgataaggatgaagcacagctttggtttacatagatacctctgaaatcctggactgactctgtctgtcattaaatgatgtatcacatccaaaagtggatccaatcgccagtcaggactgccatctgccatcactggggccattttgctagctccatttatcaacacccccactattcctgcctagtggayggttttcaagacggaaagtaagatgtcgtaagattaaaagatctttcagatcatttcttaaagatgggatggg

SEQ ID NO: 528552 - DNA, 496 bp, Homo sapiens
aatgcttgggaactttctgcttcattggagagaaattgaaagtgtcatttgttttaaaaagaaaatgagagagagaaaggaggaggcagaggaggaagaagaaaaaggaaagaggaagggagagagggagaggaaaaatgaaagggaagggaaggaaaaatgaaagggamgggaagaaaaaagtagaagccactcaattcccagagagtagacaaagaacattaactaaatgtcagctcagagccagcactcccttggtgagcctggttttcctgcatcagcctcagacccttccccaaatctagttgtccatgttcttcatgtttgtgcagccccatttcccaacagaggagctccctggctgaccctctaacctcccaccttctcggaagctgcagaggcaacctgctgtcccgggagctgagtcttaaatatgacacaggactttagagcttgaataaatggcctcttctccagcttcacacccactccatgt

SEQ ID NO: 528553 - DNA, 541 bp, Homo sapiens
tttgttactctatcatattggcttattacggaaaaagaaaaccagctaagtgaatttattctttcacagccctcctgtgaggaggcttactgggttcacagtagagtgaggcttcaggacagtgtctcccaagggctttcttttattttgcggggtctgatctggctccaaaattctccaagtcttcaaactttgtgttattaggtgtctactcagtcaagaatgaatttcagaagttgagtatataagaaaatgcgacatgctgcctttgcggtggttaaacaagtgtttgtcataatcgtgaatagttggggagacttttcattttagaactctactcagtcaataggtgcattatgaaaactggatacattgcatcactgtgaagggcttcagtctgcggtttgcaaaagcagaataaattttcttggggttgtaccgttatgtacacacacacacacacacacacacacacacacacwcactcacaggctcattggcagacagggccacaactcgcggctctagggaaggccacaga

SEQ ID NO: 528554 - DNA, 616 bp, Homo sapiens
ttaatttcagcctttctctttgatactatcgatcttaaaaaaatacaggcctgtcatttataaaatattccactgcttctccaatgtttcctcatgattagcttttgtttatccatttggaatactgtataagtcacgkgtctttggtatcacatctgaaggttgacgtctgtttgcccctttctagtgatgttaattttgatcacttggttaatgtatttccaacttctctagtgtatagtagtattttccttttgagattaataagtaatttttcccattagacttttagttcttagttagcaggaagcattctgtgatcctagttcatgtccagtgccaagcgtgggccctggtaatggggggtgatgaatatttgtttaataaaatggatctgtttatgtattctactttaatagttctgagagatttttattgagaaagatgaggtaatgttggtagaggaaagattaaagaaaaacagtagggtagagctcttttcaaaatgtttgaggaacctgggataagcttgaggaccctgggggccatggccactgtgaaccaatttcacagagctccacaccaaatggaactgtggtcttggttcttggagcag

SEQ ID NO: 528555 - DNA, 616 bp, Homo sapiens
ttaatttcagcctttctctttgatactatcgatcttaaaaaaatacaggcctgtcatttataaaatattccactgcttctccaatgtttcctcatgattagcttttgtttatccatttggaatactgtataagtcacgtgtctttggtatcacatctgaaggttgacgtctgtttgcccctttctagtgatgttaattttgatcacttggttaatgtatttccaacttctctagtgtatagtagtattttccttttgagattaataagtaatttttcccattagacttttagttcttagttagcaggaagcattctgtgatcctagttcatgtccagtgccaagcgtgggccctggtaatggggggtgatgaatatttgtttaataaaatggatctgtttatgtattctactttaatagttctgagagatttttattgagaaagatgaggtaatgttggtagaggaaagattaaagaaaaacagtagggtagagctcttttcaaaatgtttgagkaacctgggataagcttgaggaccctgggggccatggccactgtgaaccaatttcacagagctccacaccaaatggaactgtggtcttggttcttggagcag

SEQ ID NO: 528556 - DNA, 625 bp, Homo sapiens
caccaccaccctcaaactggttttctacctggatttcttggctttccggggaatcctttggaatctaggtggacttagctagatttcctcacggctttgctggtagtagtacatactataccaggacccactgtagtcacacctggggcagccaaggagtatcatgatggagggcaatgagcagagccttgaggggtgcagggcatcaagtgcagaggtcttgagaacacccatggccactcctttgaaatcactctgtttccccaggaccttgcactcttggcctgtgatgggagtggcaactctgctactcttcaaaatgcctttgggatcatttttccattgtcctgatgaatagcacctrgtttatacgcacgaatctccttactgaatggtttactggtcacacccttgatgttctctccacaacatgctttctcattttaaagaataagaacaacctgagaattttctaaaatttgacttctgcttctcttttgattaaaaattcactatttaatttttcggtattaaatttctaagcagtgttgagggtaagccaagccatgccctctatactgcttagaaatttctttggcaaaatatgtatttcactactcataag

SEQ ID NO: 528557 - DNA, 625 bp, Homo sapiens
caccaccaccctcaaactggttttctacctggatttcttggctttccggggaatcctttggaatctaggtggacttagctagatttcctcacggctttgctggtagtagtacatactataccaggacccactgtagtcacacctggggcagccaaggagtatcatgatggagggcaatgagcagagccttgaggggtgcagggcatcaagtgcagaggtcttgagaacacccatggccactcctttgaaatcactctgtttccccaggaccttgcactcttggcctgtgatgggagtggcaactctgctactcttcaaaatgcctttgggatcatttttccattgtcctgatgaatagcacctggtttatacgcacgaatctcsttactgaatggtttactggtcacacccttgatgttctctccacaacatgctttctcattttaaagaataagaacaacctgagaattttctaaaatttgacttctgcttctcttttgattaaaaattcactatttaatttttcggtattaaatttctaagcagtgttgagggtaagccaagccatgccctctatactgcttagaaatttctttggcaaaatatgtatttcactactcataag

SEQ ID NO: 528558 - DNA, 473 bp, Homo sapiens
gcagagtgccgggtcggaacgctggtcagcctcacactcggtttccaggggagttgctgatacattagtggaagatgtgggggtgccggcttggggatcccctgaattggaaggttcctgatgagtttaggggctgactttgctgtgctctgttgcattatggacaggatctgagtcactgggctgcccacaccgggccattgttgggaaaggtagtggtggcccggcgtggccctgcctgcatggggtgagcacaggcctcgggccccaccaccctccctcaggccttcggggcgatgtgacgttggcgtaaggatgggcaaaacgttcaggatgtccctggacatgggtgctgtgtcccacgtggatttggggcagagataggttgggccgttggcgtcygcgaatcgggaccctggtcgagaaaggctggtgggcaggatgggagctcgggaagcagcgcccagtgcagc

SEQ ID NO: 528559 - DNA, 380 bp, Homo sapiens
ctacacccttcctaaggacacaaagttcagaaagcattgtttcatcgaccaatatgaggctctgcgccatggcactgtgctgtctcgttgctgtgattcccccraccacccctgcaccccaccctgcccccaaagcaaaggtttcctgtctgagagtcctccagcagcgaggacctggaggagtgactgtgcaggttccagatgcaggtggacagcctggcctccggcctgaccttgagccaagacagggacgcagctgcctccggaagcctgggccagcggggacaggggctgcagtcccagagtaggccccagccaggcagtgggtaccacgctctgctcccagaattcaggcagcgagtgtggttcctgagctctct

SEQ ID NO: 528560 - DNA, 536 bp, Homo sapiens
tgcgttaatatattttctgagagcaccgtgactacatgaacagccaaacaagtaacataatttgagtaacataatctaaatttgacaggtctatttgctgagaataaaactcatctcctacttaygaagtctttcttaaagtgaacatgatatataaaggtattaaaaaacccagcatattaaatttcatagtaaaatgccgcatgtgcacatgtatacagatagtatgagttctaagaaattcaatgcactgtaatcagaataaagtgctaccactgctcccagctaaaatcatctcctcttccaaatataaggaaaaacccttgaattgtaaggaaaatgactgcattgcctgccaacacaaggccgcaggctccccatttgatctgaaagacaagaaaagaaggattaaatccttacttccttcatattgtactctttgcaatccctattattttctgcattagaaacatccaatgaaatgttacacaaagctgctaaaaggcttaataatgtaacaggagacaatgaactgt

SEQ ID NO: 528561 - DNA, 557 bp, Homo sapiens
ctgacctttagtacaaaaatatcaaaactcagatgaactggtactctacctacgttctatccttatccttaaaggaaataatttggtttgactagaaagttaaaaattcaccttggcaaccttgttatttcatgtygttcagatggtctgatctgcaggtatctacacacacacacacttttgtctgtaatgtgtctctacttgaatcttctttgtcccttgctcaaaatgtccttcatctggttcctgagaccatgcaaagcatatggcaaggttgttaaatatttccattggattcttttgtaattattgtttaaattctctcatcagcctactagtcctttagttccttaaacggtagacccacaactttcccatattttatcatgagagcatgtcaattttaggaacttatgcatttgtgaaagattaaaatgtaaataaaaggaacaatatatgaacaccaactaggtttaaaccagaagacctagtgtacctatttactgatccatcataaacattaagctagtttaaggacggtttaaaaatatatctgt

SEQ ID NO: 528562 - DNA, 557 bp, Homo sapiens
ctgacctttagtacaaaaatatcaaaactcagatgaactggtactctacctacgttctatccttatccttaaaggaaataatttggtttgactagaaagttaaaaattcaccttggcaaccttgttatttcatgtcgttcagatggtctgatctgcaggtatctacacacacacacacttttgtctgtaatgtgtctctacttgaatcttctttgtcccttgctcaaaatgtccttcatctggttcctgagaccatgcaaagcatatggcaaggttgttaaatatttccattggattcttttgtaattattgtttaaattctctcatcagcctactagtcctttagttccttaaacggtagayccacaactttcccatattttatcatgagagcatgtcaattttaggaacttatgcatttgtgaaagattaaaatgtaaataaaaggaacaatatatgaacaccaactaggtttaaaccagaagacctagtgtacctatttactgatccatcataaacattaagctagtttaaggacggtttaaaaatatatctgt

SEQ ID NO: 528563 - DNA, 636 bp, Homo sapiens
cttgaaatacaactttgaagttctgaaccactttgtaagaagtctagctataatgaagttttggtgcagcagagaccactttgagatagaaatgcccagggatctccagttgttctagctctcagccatttgagtcaaacctctagacaggtaagtcagaagttttcagaagattcttgcmctcaaccatgaactccctcagccatgatgagtgaaaaagaaataaaatatcctcacagagccctctccataatgccagtttttgtgatgtaagcaaaatacatgatgttttaaatcactaagctttaggtttgtggtgcagtcacagcaactgaaacagagatgtctactccatacaattaccctgattgagtaaatatggcaaagaacagctacataattcattcattcacacatttccacaaacacttcttaagtgcatacatgtgccagtaactatgcctccaatggctgtataatggtaagtagaacaggcagtttgggcccccatggaatttaaaacattcaaaatgtgctcataataggcagacctataaacagtctgatattctaccacagtggcaattattagaagaattcagataaaagccattgatatggaaatggtaatggaaa

SEQ ID NO: 528564 - DNA, 622 bp, Homo sapiens
ctgggggtcctgcaccccaacccagcctagatgatatttccatttgttgtacctaaaagcagagctttttacatctttacatctttacctcatgacagaactaaaaaaatgatgtttgttctacagtatggcacggagatgggtaaaaaagtgaaaagaataagccacaagcccccgtgctttgaggagatgatcatagcctgctcctggggaactatgctagtggctggatagcaagcactgacctagaggttgctcctaggaataaaaaattaagattatccatagaagacaaagaaaaaaatacttcgctaatagtggataccaaaaatctgaggtagtgcaaaagataagaaaggaaaaaagaataaaaagcgcaactggaatacatacatacaaactttcaagacgttttctcttatactcttcagtaaaattctatstaattttcattctagtatttaaatagttctggattttacaactaaacctatcattaaaaggttatggaaaatagaaggaataaaaaagatgaaatagaacatcaggcaaatcaaaaactcaaaagctgtatccaaaacaatggtggacacctgccgtatttgctttaaaatgggtggca

SEQ ID NO: 528565 - DNA, 668 bp, Homo sapiens
actccatctcaaaaaacaaaaaacaaaaaaaaacaaaaaaaacaacatgcatatatgtgtactttggtaccttattcagtaatcctaaactactattacttactctttaactctggatttattggttattctttttagtaattatgtaagatcttattgataagctaattttaagtgctttcatattttgattaaaaaatgtttaggttccaaagtacacatatatgcatttatttaattgttcattagctttacactgatactttttmgtgaccttactttttcacatttatgccccagtgaaagtttcctgaagaattaatgatacttatttgctttcataagctgaaattcatgtctcctttctattataatgtctagataccgacatttttcaattggctaaagcatgctaccataccttttaaaaaaagcttggtataaatcgtcacacctgtaggaatactatttgtaggagagtgtgaagagtacatttcatctctaccaatgtttctgaatagatcttggactttttactccaacattaagacaatgaactgaaaggtgaaaatttattttttattaaagaaagaactcatctcacttttaatgtcttcaaacaacctagtggcattctgaacctcaaactgcaatatgactaagatgca

SEQ ID NO: 528566 - DNA, 605 bp, Homo sapiens
acctctaccaagaccttatggcaggaatgtcatgtttccataaccttgaagataccaagtatattatctgctctgcaaagagataaagtacacaaggcctccttgtttcatcttagaaacttcagttaatagagatcagtaaagctaattggagctcattagttgtagaggccaagtattctcatagaaaaattattcccaggccacaattagagaatgtcaatgctagaagatattgaagggtgattttttaaaaattcaaccccctttttttttacagatgaaaaacaggcccagaaaggggaagtgactggctgcaggtcagccatgtcacccacttctgattagacctagagtcaggaactagctggaagtcagggctccatcacagctaaccacagcaagccatggtgcaagacctgggcaaagttctagaaatccacacagaaaatatgaaagaaaagcagtttccctggtgtggcttggtcctcgactgggagggagaactctgcacttttgccacacaaagcctggttgctcatcttttccccataggaaacyacagaagcccctttattgttgggagctggtggggacccaatacg

SEQ ID NO: 528567 - DNA, 588 bp, Homo sapiens
tgcctatccagccaatatgaaattgatactgttcttaaatgaaatctgagttttaaaagtacaatattaagtttttatgaattttcgtgtgcagtgtttagcttgcttttatccaatgttttagaatggtgtgtgtttagcattattttaacttgatttttactatgcgtataaaaatattttaaaagtatcaaatattccatcttacttgtttttaagttttatgaatattcttatgaaatactcttattaatascagcatttcattacattaaaataaaatccttaggtatgcatattatatgttttggggttttgtggtttcttgtgctttggaattgcaatcactaaaacatattatctcttctatccagtagttcatgatttagcagagagacaatctatctaaactgctgctagagatcattgagctttaacaaagtcttgaaaggtgtatgagttagagagtgacatcccaggaggaggggacagcaggggtaaatacagagaggcaggaaatggcaagcatgagcactggaatgaaactaggagcaagcaatggcagattctacaggtgtggacatacac

SEQ ID NO: 528568 - DNA, 468 bp, Homo sapiens
gccatgcctcactataaaatgtttgtttctggacagccatgagataaatacaggaattaaaaggaagtccagaaaatgttttagagatttgacattgctgaaacatccaagcatcaaccaatatggccatacccttagttawatttataaaattttagttttctagtgattcatttttattgtatttttattgattaggaatggattggaggcaaaacctggtcctttatattgttcagtagtcctggacgtgccctgggcttcagggggctggaggtggggctcactgtgtacccatcccttacctcccaatagctgctcatcctggcacttccagcagccaggacagggggacttcctctgcccagatggagggttctgttcataagggaccaggaggaccaggagtccaatctctggcctgggacagagagcaaggaggggatgcagctagggtaggcaccaatg

SEQ ID NO: 528569 - DNA, 468 bp, Homo sapiens
gccatgcctcactataaaatgtttgtttctggacagccatgagataaatacaggaattaaaaggaagtccagaaaatgttttagagatttgacattgctgaaacatccaagcatcaaccaatatggccatacccttagttaaatttataaaattttagttttctagtgattcatttttattgtatttttattgattaggaayggattggaggcaaaacctggtcctttatattgttcagtagtcctggacgtgccctgggcttcagggggctggaggtggggctcactgtgtacccatcccttacctcccaatagctgctcatcctggcacttccagcagccaggacagggggacttcctctgcccagatggagggttctgttcataagggaccaggaggaccaggagtccaatctctggcctgggacagagagcaaggaggggatgcagctagggtaggcaccaatg

SEQ ID NO: 528570 - DNA, 468 bp, Homo sapiens
gccatgcctcactataaaatgtttgtttctggacagccatgagataaatacaggaattaaaaggaagtccagaaaatgttttagagatttgacattgctgaaacatccaagcatcaaccaatatggccatacccttagttaaatttataaaattttagttttctagtgattcatttttattgtatttttattgattaggaatggattggaggcaaaacctggtcctttatattgttcagtagtcctggaygtgccctgggcttcagggggctggaggtggggctcactgtgtacccatcccttacctcccaatagctgctcatcctggcacttccagcagccaggacagggggacttcctctgcccagatggagggttctgttcataagggaccaggaggaccaggagtccaatctctggcctgggacagagagcaaggaggggatgcagctagggtaggcaccaatg

SEQ ID NO: 528571 - DNA, 468 bp, Homo sapiens
gccatgcctcactataaaatgtttgtttctggacagccatgagataaatacaggaattaaaaggaagtccagaaaatgttttagagatttgacattgctgaaacatccaagcatcaaccaatatggccatacccttagttaaatttataaaattttagttttctagtgattcatttttattgtatttttattgattaggaatggattggaggcaaaacctggtcctttatattgttcagtagtcctggacgtgccctgggcttcagggggctggaggwggggctcactgtgtacccatcccttacctcccaatagctgctcatcctggcacttccagcagccaggacagggggacttcctctgcccagatggagggttctgttcataagggaccaggaggaccaggagtccaatctctggcctgggacagagagcaaggaggggatgcagctagggtaggcaccaatg

SEQ ID NO: 528572 - DNA, 564 bp, Homo sapiens
ggatcaaataatgtcttcagttctaaccctccccacccaactcttcatttaggttttctctgtattaattttattctcaggaagaatcttgcatcaagatgataaaaatggcccttggcagctcaaggacagagcccttgcttcctagaatctatgtgtttttctgaactctgattgatcttgcttcggattatatgcttactcctaactagtcactgtgtgcagcaattaggtactctaattggctctcctgggcacatgcccacctcatgatagtgtcctgtgattaacagtctgtttggagcttcgcaaacattttgacctctgtccctgccttaaaagtaccagctttccaggatcctgtccttggtaagcatggattctgtagacatactgtcttgccttaagtttcagctccattacttcctaactgtgtgaccttggggaagttattctgagccttaattttctcatctkcaaaagtaggataataatggtatctacctcatagtgttattgtggagtttacctgaggaaacatgcagagaacacttagtgtctgac

SEQ ID NO: 528573 - DNA, 564 bp, Homo sapiens
tgtgtgtgtgtgtgtgtgtgtgtgtgtgtgtgtggtgtagcacttaattctttagtaataacaatgaaagttagcgtaattggaaaatttgtttctccatcaatcatttagaatgtttggtggaaaagtgatttttctggactatgcagataactatctcatcaaggccttgacatgtgtggacatgacctcacccatggtggtttccaggatttggatgggaaccagtttccgcctatttcaccacctcaggagaaatgcgaggtattcttcccgggggcacccagtcagcgytgcatctacccgagagtccctgcccagccatgcaatcatttctgaaactaatgagatcagcagcttttcacgaaaccatgagtcatacctattggtgaggctttccaggcttgaggagtgccttgaagtgccggcttcaccagatgttctggcatcaccaatccttcccctaattctgagtgccacatctgacccactgccaacggtcacaaggtcgccagcggccaaaaatcaccttgggcttcaggtaaggacctgtaaaatcaaggc

SEQ ID NO: 528574 - DNA, 398 bp, Homo sapiens
gaaaagaaaagcttatgcatctctactaaataggtcaacagtagcaacacaccaccttggatatgctatgtgccaaatactctggagtccttgtctgaaaagcttcaagaagagtgacataactgttaattttctctaccttagtggtgtaacaccaaaatgagaatatccaccgytctcattactgccacatttccccaaatctccaaaagacatctaagtgtcatctggtcccacgatccctccctagacccaccacatttgctctgagaggtcctctagtccctactggaacacagtcgggaatgggaactcacggcctccccaggcagcccctttcatctttgcatggctcagagataaaattattctgagcctggatctcatgccctgtggtt

SEQ ID NO: 528575 - DNA, 556 bp, Homo sapiens
atcccatgtctttggttattatgaaaacaattcagacttcccctcacactcataggatataaagagaacaaataatgaggagaaaataatagggacagcatatccaaactccctgctgaccatggctcctgcttagagaaactgagtgagaaactatatggcaaagagtctttgaaggtgagacatatyctgcagcactcttggtgatcttgagaggctggcagactatccaaaaacggtgactggctcaaaagccttacccaactggacattcagtactggaagacaactggctgatttcatcagttctctgtttagagaagactatttattgttaatggaaaataagataagcagaaatgtgtacacattaagaagacaaaattaggaagccatgggtagcagaagacatgtataagatgtcatatggtaactgagtagaaacagccaataattgagcgaaataaagacgagaagcctgagaagtggtgattggcagcagtaggaagtgactgagtcaccatattggtgccacaaaagtagctaccagctcatg

SEQ ID NO: 528576 - DNA, 556 bp, Homo sapiens
atcccatgtctttggttattatgaaaacaattcagacttcccctcacactcataggatataaagagaacaaataatgaggagaaaataatagggacagcatatccaaactccctgctgaccatggctcctgcttagagaaactgagtgagaaactatatggcaaagagtctttgaaggtgagacatattctgcagcactcttggtgatcttgagaggctggcagactatccaaaaacggtgactggctcaaaagccttacccaactggacattcagtactggaagacaactggctgatttcatcagttctctgtttagagaagactatttattgttaatggaaaataagataagcagaaatgtgtacacattaagaagacaaaattaggaagccaygggtagcagaagacatgtataagatgtcatatggtaactgagtagaaacagccaataattgagcgaaataaagacgagaagcctgagaagtggtgattggcagcagtaggaagtgactgagtcaccatattggtgccacaaaagtagctaccagctcatg

SEQ ID NO: 528577 - DNA, 647 bp, Homo sapiens
cacaatttattcctgccttactgactactaggtcattgcctagagttctgaaccccgggttggaagctgttaaaatttaataaaaactactttagagaaaatggtcactctcccttcatcctctctcacctccctctggctccttgacccccatccctccctgaagatgctggtcgctaaggctcttttaatagacttccttattgtcccaggtttctgggaattcatcagtgatagctgccatgggtatgttgagaggatactatatgctgagaactccacatctgatattttacttaatttccccacaatattatgaagtagatgttattttccccattgtacaataagagatggaaagctagagaggctaaaagcagaacaagaatttgaacccaaatgcctgtgactgtaaccaccatacatatagcctacctgtttccwtgttgttctagcaggatccttgttttcttccttcttacagtaaaatctgactgatcactgttgagtaacggatcttaattaggtcgagatgcggaaggagtttgctcctgtaatttcaggaggtctttgcatatacctattattgcaaatagatttcgctttattggaaaaaggctatcagtattccctggggactctatttt

SEQ ID NO: 528578 - DNA, 635 bp, Homo sapiens
aagcactggattggagataataccctgccaagtgggtgccatcctccaagatgtggtattctccctaaatcagtgaccattaaatggcaccatgtcctcagtagctagaacacacaggtttgcrtaccaacaaagagaagcaggaatgcccttgccttaccataacatctggggaaatttgtgctcttggccttggttgcccagggcagtacttagtcattatcttattccttcttggcttcctccctcctctgtgtcacttcctagtacctcgctgtactctcctgacattccctccaaaataagctacttgcacctgaatgtatgtctcagaatgtgttttggggagatccatgctgaggtgtggggttaatgctaatattcatctcacagatttgttaggaggaacaaatggagaatgtaccaagcaccacgtctggctttgagtaagtgcttggtaaatgacagttatcattgttggtgacatcattatcattatcctctcgcaaagagagctgaggctgggcttattcaaagttctaagagaggcaacattaacacaccggcttactctttccacatcttccctccaataagtaaattattgattatattagtagctgtcttttgtctac

SEQ ID NO: 528579 - DNA, 645 bp, Homo sapiens
actggattggagataataccctgccaagtgggtgccatcctccaagatgtggtattctccctaaatcagtgaccattaaatggcaccatgtcctcagtagctagaacacacaggtttgcataccaacaaagagaagcaggaatgcccttgccttaccataacatctggggaratttgtgctcttggccttggttgcccagggcagtacttagtcattatcttattccttcttggcttcctccctcctctgtgtcacttcctagtacctcgctgtactctcctgacattccctccaaaataagctacttgcacctgaatgtatgtctcagaatgtgttttggggagatccatgctgaggtgtggggttaatgctaatattcatctcacagatttgttaggaggaacaaatggagaatgtaccaagcaccacgtctggctttgagtaagtgcttggtaaatgacagttatcattgttggtgacatcattatcattatcctctcgcaaagagagctgaggctgggcttattcaaagttctaagagaggcaacattaacacaccggcttactctttccacatcttccctccaataagtaaattattgattatattagtagctgtcttttgtctactctgctaggtactg

SEQ ID NO: 528580 - DNA, 645 bp, Homo sapiens
actggattggagataataccctgccaagtgggtgccatcctccaagatgtggtattctccctaaatcagtgaccattaaatggcaccatgtcctcagtagctagaacacacaggtttgcataccaacaaagagaagcaggaatgcccttgccttaccataacatctggggaaatttgtgctcttggccttggttgcccagggcagtacttagtcattatcttattccttcttggcttcctccctcctctgtgtcacttcctagtacctcgcygtactctcctgacattccctccaaaataagctacttgcacctgaatgtatgtctcagaatgtgttttggggagatccatgctgaggtgtggggttaatgctaatattcatctcacagatttgttaggaggaacaaatggagaatgtaccaagcaccacgtctggctttgagtaagtgcttggtaaatgacagttatcattgttggtgacatcattatcattatcctctcgcaaagagagctgaggctgggcttattcaaagttctaagagaggcaacattaacacaccggcttactctttccacatcttccctccaataagtaaattattgattatattagtagctgtcttttgtctactctgctaggtactg

SEQ ID NO: 528581 - DNA, 415 bp, Homo sapiens
gcttgaacataaattttcaattttaaatgtacatttgaacagactctttagaagactgtggagaaagattgtactaaagagagaaagtgaaaataggtttgctgtatgtcatggagaaagttcacaaagttgttcttctttaacctttccttctaggattaccagggttggacatgtaggaaaaggcattgtcaactcagtgkgagattagaagaaagttgtgccaattagggcctatgagtacagtttctaattaacccaggtgtaaagagatttacaggtcaaaactaaaactcatgaatagggtgacatgaagtttagcctgcccactatacatacattcatattactgaaatctttttctttcttagcactacagtgtgtctaatttgatgagaaaataaaatcacaaaat

SEQ ID NO: 528582 - DNA, 619 bp, Homo sapiens
tgttacttatgtgcattttgtcattacattccagatttaggttaagtaaacagaagaattagaaattatctctcagctaccagatctaaatatcttgtagaaattattgctgatgtcagatgatgcsagtggtgtagtatgtctatttgtcattgtttttttaaatacaactataaaattccctgtcaatattttttcctgaaaacactaaatcagtttctaaggattgatctatgtaatttcatattggaaatcaccaaagaaaactcccccccaaaattaattgatggaaaaataataaagaacgtatttctaaacaaggcatgataaaatcaaaggcaccaagttataagacagagtagggtatgatgtgaactctatctccacatttttagcatgtgatttgtaagacgaggtgttgaaagaggtgaagctataagttagtaaggtcttgacatggagcatcttaaaggtctcatgaaaaaacatgatctttgacctggatatgatcaaagttgactactgaaggttggctttatttataacgttaaaatatgttcaattaatatgttaaaaatatataaatctgtccaaagacttagaggaaacagaagttgcc

SEQ ID NO: 528583 - DNA, 348 bp, Homo sapiens
gtatgtactagggggaggcatttacataccaagggttgttcagaacagtaaaatgttttatgtatatttatatatatagatatatatatgctttatgtgtatatatattttatgtatatatatagatataaatatgctttatgtgtgtrtatatatatattcttaaaattatctatttgcctaatatataatgtaacagtttgccaccaaatttgtttttttttaaaccagaaagaactattaaactggccaaatctttatacagtatgaagtcaagtagtggaggggagtagtttagtgatatgctaaatctatttacttttgtcaggagatataatatgagcaaaa

SEQ ID NO: 528584 - DNA, 640 bp, Homo sapiens
ttgtcccagccggtgagtcacctctggatgcggcactgcaatcctgataaatcaatctgcaatagcagcatgttttcccttcagagaggaaagggaacccgttggcatttgcaaagaccttccttaaacccagcctttcccaggactagagaacgtttccaatctgagcccccacctgaggaatacatcacaccattcacacactcatgtaaaaggatatttttaaattccagctcattaaacagttcagggaaaccagtatggaaaagacagtgacgtatttggcataacaaacaaggtggccaccaatgtatcacttaggcaccggcttttggtattgacaatcctataaaatgcagtttctacctcacattgctatgcctaatttaatttgttaagtcatggtggaagactatttcaagtgaaataaaagcaatacttggcaataacttttcactgcagtgtacttacataatctagcatttatttcaaactcaatttactaaggcaacacaaatacaaaaattaatgctatacttatgctttacagtcaccactaaataagtgsctttgacaaatatatgtcatagttgtctttttaccatcaacactgacagtttgtaaagtaatggaagtaata

SEQ ID NO: 528585 - DNA, 529 bp, Homo sapiens
ctggcaacacagtacttgatacaatgcacatgactgatgcactttcctaataagatttcagtatgctgtagatacaaatatagaaacacacacatatattgtgaccaaaagttccgacattttttctctrcttaatatcctgactcgtattttttataacacggctggtccttggatatgccacccattggaatgccacagcattcttcatttgaattactttctttgttggactttgtttatctttgaatgcccccgagtctactgcaatatctcacctggaggaggctggcatcatcaaatgtttgctggctgaaatgtgataaaacacactcttatagcaccctttggatgacagctaatgcctacaagaaagaaaagaaaaaaagcagtgttgtcttgaggggtaggtcaggtgcaattgtagatgggggcaaacagcagaggcaggcaccacacaaagacagagagacacactttgctgtctggttgtaggctgctttctcatcactgggtgggcagcgtaaga

SEQ ID NO: 528586 - DNA, 512 bp, Homo sapiens
gctcttactatatgctaagtgcctgaggtatgttatctaatccttgcaaaaattttaacttgtatttttgagaaggtaagcaactattcaaacacattaacaactaagtggcagaacctggtctcaaacctaggttttgtctraagtcaacacatgtggctttaacctccattgtgtacgtagctaggagcagggattacttctgaagtcagataaaagaaatccataaatataatgctatatacaccaggaacattattgactaataaaacggatcctaaatttcatcacaaaatccttttgtggtaaaaataatccatcctcataacttaccaattttataaacttggactttcataaattgcattttattaaaagtacacacctatatgctctaggacggccctagaactccccaaatgtgcaaataattgaaagacacagaaatgatgtaaaaggaaaccagccaaggatctcagactaaacaatttcccattcccctggaaacggtg

SEQ ID NO: 528587 - DNA, 548 bp, Homo sapiens
ttacatataaatactctaataataagaaaaataagaatttcttcttaatgtgttgagctcttactatatgctaagtgcctgaggtatgttatctaatccttgcaaaaattttaacttgtatttttgagaaggtaagcaactattcaaacacattaacaactaagtggcagaacctggtctcaaacctaggttttgtctgaagtcaacacatgtggctttaacctccattgtgtacgtagctaggagcagggattacttctgaagtcagataaaagaaatccataaatataatgctatatacaccaggaacattattgactaataaaacggatcctaaatttcatcacaaaatccttttgtggtaaaaataatccatcctcataacttaccaattttrtaaacttggactttcataaattgcattttattaaaagtacacacctatatgctctaggacggccctagaactccccaaatgtgcaaataattgaaagacacagaaatgatgtaaaaggaaaccagccaaggatctcagactaaacaatttc

SEQ ID NO: 528588 - DNA, 614 bp, Homo sapiens
ctcctggcaatgcatcacaaagctatttctgtactaccatagtctgtctactgtaatgatcttggctacaagtaaacacaatacccaactaaaagtggctgaaacaatgaggggtctattttctgagggtggttaatacagcacaaaagttgctacaattcttgatgaattgatctgttctcctttagtttctcaccgtgggtgaagatggccgcctaagccatctttggcygaacattatgtcttcacacaactacatccaaaggaagacagggaaagagtccatcccattagagtgctctttctcttttttaaaaaatagggaggaaaagttttctaagaatataccccctagcagattttttcttaggtaccacgggccaggagagggccctgtgcctgtgctctaccttcagtgaagctgggaaaagtgatgaagttgggaaaagtgagtgattggcttctatggtggaagtggactttatgtgtaaagaaggaagaggagaaaagctgtggggtagtcaaccacagccattgaataccttcctgaagtgcagcagtccaggaatagattatatttaatcatttcacattgccatcacatggaccacacc

SEQ ID NO: 528589 - DNA, 574 bp, Homo sapiens
ctcaagttgcagccacagggggcccagggctgctgactgtcctgctgctaagctgtgagctgcttaaactaaatgacatcctcttccaggaacctgcaccttgtgtctccactggaagataaccagacccctgcctacaaccttccccaggccagcacggcttccaatccgccatagctggctgatgcctcagccagaccacatggtacctgattacaaagggaggaggggggttaagacatgggccctgtggtcaggctcagccctaagctgaagagataaaatgaacacttctgaaatgccccgaataatgacatgttgaactcatacaagttgggagttctcattaagggactcatatgaggcatcatgagatgagaaggatgagtaggcttcatggaggagacaagactggctcgtccctcagaggacagggagaacctatactgtgcgggcatttcagggagcgggttcagcatgggcaaaggcacaggggtgggaatgagcagaatgggcctgcagagtggagtgggtaactgagyggaaggtgacacactgcctacacccaaggtga

SEQ ID NO: 528590 - DNA, 640 bp, Homo sapiens
tagtttcctacagtgatatccgctatccttgtaagaacaaactacatctgcatgtattaactacaaaatacaaattttgtaataattttggtggttctrcatagaagctaaatgctcaaatatttgcatctaaaactgtcattgcataatataaaaaagaatagttaaattcatattaataatttttatttgattattttattttcctttcaaatagtattaaataacaaatgaaaaaacacactatgacaagtcaaaggagagattatggaatatcagaaaaagcttcatagttaagtacctttagctacacttacttttggctttttgaataaaagactccacattttcattttgccctagaatctgcaaattatgtatctggttctgcctgtggaaaacaggatccaactcagagagttcaataaactttagtgaagaaactaaataaatttgggcagaaggcagggaactggcagggatttaaagcactgagactagcaacagtgaagagtcattaccaccctggacctgaagaagcaggggataacatattttcatctcagactatgagagtgagtagttgggaaaaacacatcctgacctctgtctcccctgcccttggatctctttcctgtac

SEQ ID NO: 528591 - DNA, 640 bp, Homo sapiens
tagtttcctacagtgatatccgctatccttgtaagaacaaactacatctgcatgtattaactacaaaatacaaattttgtaataattttggtggttctgcatagaagctaaatgctcaaatatttgcatctaaaactgtcattgcataatataraaaagaatagttaaattcatattaataatttttatttgattattttattttcctttcaaatagtattaaataacaaatgaaaaaacacactatgacaagtcaaaggagagattatggaatatcagaaaaagcttcatagttaagtacctttagctacacttacttttggctttttgaataaaagactccacattttcattttgccctagaatctgcaaattatgtatctggttctgcctgtggaaaacaggatccaactcagagagttcaataaactttagtgaagaaactaaataaatttgggcagaaggcagggaactggcagggatttaaagcactgagactagcaacagtgaagagtcattaccaccctggacctgaagaagcaggggataacatattttcatctcagactatgagagtgagtagttgggaaaaacacatcctgacctctgtctcccctgcccttggatctctttcctgtac

SEQ ID NO: 528592 - DNA, 640 bp, Homo sapiens
tagtttcctacagtgatatccgctatccttgtaagaacaaactacatctgcatgtattaactacaaaatacaaattttgtaataattttggtggttctgcatagaagctaaatgctcaaatatttgcatctaaaactgtcattgcataatataaaaaagaatagttaaattcatattaataatttttatttgattattttattttcctttcaaatagtattaaataacaaatgaaaaaacacactatgacaagtcaaaggagagattatggaatatcagaaaaagcttcatagttaagtacctttagctacacttacttttggctttttgaataaaagactccacattttcattttgccctrgaatctgcaaattatgtatctggttctgcctgtggaaaacaggatccaactcagagagttcaataaactttagtgaagaaactaaataaatttgggcagaaggcagggaactggcagggatttaaagcactgagactagcaacagtgaagagtcattaccaccctggacctgaagaagcaggggataacatattttcatctcagactatgagagtgagtagttgggaaaaacacatcctgacctctgtctcccctgcccttggatctctttcctgtac

SEQ ID NO: 528593 - DNA, 671 bp, Homo sapiens
tcctccggcaccccctcaggtggctttgcagtgagtactaaggcatgacactgccctgtagacagcttactctgacacccccagagagattcatagaggcccccacttgtgcaactcatcaacaaagttctccaggaaaccatgaccccagctcctctaatgaaggtcacarccgttgtgtgtagaggaactcttctatcaacactctagctcagcccaagaagtggtggctactttttatatttgttatttctgcattctttagaattatcttcatgcattactagccaatccctttttacccaagtctcttgttaaagtttaataatttctttatattgatgttttcatattcaaattaccagatggtttctgtttgctgattggatcctgatacatcatttttaaaatcaccaaactctttgctaattgcaatatgtgggtcatctatgagtaggtttttttcctgttgatttcatttttcctttgactctgaatcacagttttctttgtcttcagaaatctattgattttttattgttagtgggtattgtggataatactttgtggaagctctaaattctcttatcttccaaagaataatgaatctgaaagttttgccttagcaaacttccactaaattagtggaagatctctttgatattgtgcag

SEQ ID NO: 528594 - DNA, 660 bp, Homo sapiens
ttagatggttggctgtttaaacatttgtattaaaatttaagaaaatgctgtgtttcaaaaatatctaaatttacttgtgatatttagatgattatttaaaattataaaattctgtctttttcttgctggagttacaaatattgtttgggctgatgtttttcattagcggtagtaatttgtgtgttytattgtttttgaaggaaacatatgggacagtgctttgggattatgttgaccctacttttggtctaaatattgaattaaatttcaatgtggaaaagtaaaaatatcataaagacagtatcattcttatatgtgagggtctgtgtctacaaatttaataaaaatcaatataagaacaattatctaaatagtgtggctgaacacatggacccccaaattcttaaaacctaaatgttctttgtcattcgtattccatgataatgtatgcatcaaagacagacttggttgatttttgttcccttcaattattcactgagacctcaactttcagtcagatcagttgcttcccactcaactcttgcagattgcaaatcttccctgttgagttgcacagcaactgccactcaacctcacctgcaaaaggttagtccaacatctttttttaaaatatatttttgtggctctagaaataagcaa

SEQ ID NO: 528595 - DNA, 411 bp, Homo sapiens
gcagtattctaaaccaagatgctcagatcttgttgttaagtgtaacaccattgccttcctaatttttgcaactacaagagtacaataaaaagwacgttctataaggaagaagggagcttgaaatctaagcttatctctgccagttactggccatatgattttataattatctcccttccccttttttagcttgcgtttttttatttctaaggtgaagtagttaaatgagatgatcgtttggattgcttccaggtctgacattctgatgatcacatgaaataaaacctttgtgagtgcactgtgctaggtggtcttatataccactccaaggctgtttcattatgcaatttatggtgtcaatattccttatactgtattctatagtaacggtgccttctggaggacattgca

SEQ ID NO: 528596 - DNA, 411 bp, Homo sapiens
gcagtattctaaaccaagatgctcagatcttgttgttaagtgtaacaccattgccttcctaatttttgcaactacaagagtacaataaaaagtacgttctayaaggaagaagggagcttgaaatctaagcttatctctgccagttactggccatatgattttataattatctcccttccccttttttagcttgcgtttttttatttctaaggtgaagtagttaaatgagatgatcgtttggattgcttccaggtctgacattctgatgatcacatgaaataaaacctttgtgagtgcactgtgctaggtggtcttatataccactccaaggctgtttcattatgcaatttatggtgtcaatattccttatactgtattctatagtaacggtgccttctggaggacattgca

SEQ ID NO: 528597 - DNA, 524 bp, Homo sapiens
cacaattttcccaataggaatagtgtttattttttaaaaattcctctttttagcagggatcacagtgtatagcacatattacttgtttaataaatacctgttgaagaaattagtaagtacaaatacatttttgattccataacttgcttagtctcagagacttaagaaaacaatggtgggatataaaaaccatctatattttcactgagtggaaattatcttgacaagagtttgacaggatatgaatatcttgaatgaaacattatttactctytgaagaatgtgtatttttaaataaaaagaatcaagtaaaagacaccctggtccccaatatattaaagcctatttcttgttcagtagtaacaggcaacatctaatttatgtatcataataactatcccagttttagaaatgaatttaacccctgtaaaaatttgtaatatgaaacacactaaaggtagttagaaacagcaaaatagaccttaacacagtgaccgtatcatattagtgtttttaggcagtgg

SEQ ID NO: 528598 - DNA, 524 bp, Homo sapiens
cacaattttcccaataggaatagtgtttattttttaaaaattcctctttttagcagggatcacagtgtatagcacatattacttgtttaataaatacctgttgaagaaattagtaagtacaaatacatttttgattccataacttgcttagtctcagagacttaagaaaacaatggtgggatataaaaaccatctatattttcactgagtggaaattatcttgacaagagtttgacaggatatgaatatcttgaatgaaacattatttactctctgaagaatgtgtatttttaaataaaaagaatcaagtaaaagacaccctggtccccaatatattaaagsctatttcttgttcagtagtaacaggcaacatctaatttatgtatcataataactatcccagttttagaaatgaatttaacccctgtaaaaatttgtaatatgaaacacactaaaggtagttagaaacagcaaaatagaccttaacacagtgaccgtatcatattagtgtttttaggcagtgg

SEQ ID NO: 528599 - DNA, 456 bp, Homo sapiens
agattgttgcaactctggattctgttttattcttccagggactgttaatgtttttctttgtaggcacatactttgcctggtctcacactgtaaagtctgtctccttcactcagagcagtcacagatatctatactgaagtttcatttgtttgcttatttgtttactagctccctagttctctcccttttgctgttgtaattagcagtcaaccactgatgtggacagaggttgtgctcagcaatatgaaggcrgtaaatcctttacccactgttgcttaagttttatgtgggttgaggaattcatttagatgtgtgggttgattcctgagtgtcccagggctttgaatttttaccagactccctcctttccatgtatacattattttaaaaatcaggtagaaatgtatgaagagtatattctttcagcccttctacagctctctctaacttcaattt

SEQ ID NO: 528600 - DNA, 673 bp, Homo sapiens
aaactgggcctaggtgggttaaattaattgccagcactccacacagttttctatgactccagaggtgaggcttcacaagttacattggagatcctggcttgagactgttcccgagattcatagatatgtcaaagattgatagtagttccaatacctttgactccaccgaattcagaatgaatcaayacattttaaaatgctatcacttaatatatatggcaagagatgacaagtttggcaaaatttctttaacatttaaaaatttgtctcacttgtcatttttcttcctagatgaaatcaaataattgattagactcatttttgtattgaagaagtgaaaatataagctttcttttgcaatatagatatgttttcccacaagaccacatgagcacttctcctaagtacaatggagagttgaaccaatctattagatgtccagtgttctttaggtgcctctagtatgagtttcctttcaccactgaagtctcaatcataacatggccagttcacttcctacatgaacatagactatggggattgaggctactgtccatcacatggagcctaaacatagaagcaatacagaggaaccagaatgaagtcatggaaaaagggcacatggtctcagtcaccacttgaccctctgtactcaagttctgtgggaaaccag

SEQ ID NO: 528601 - DNA, 673 bp, Homo sapiens
aaactgggcctaggtgggttaaattaattgccagcactccacacagttttctatgactccagaggtgaggcttcacaagttacattggagatcctggcttgagactgttcccgagattcatagatatgtcaaagattgatagtagttccaatacctttgactccaccgaattcagaatgaatcaatacattttaaaatgctatcacttaatatatatggcaagagatgacaagtttggcaaaatttctttaacatttaaaaatttgtctcacttgtcatttttcttcctagatgaaatcaaataattgattagactcatttttgtattgaagaagtgaaaatatargctttcttttgcaatatagatatgttttcccacaagaccacatgagcacttctcctaagtacaatggagagttgaaccaatctattagatgtccagtgttctttaggtgcctctagtatgagtttcctttcaccactgaagtctcaatcataacatggccagttcacttcctacatgaacatagactatggggattgaggctactgtccatcacatggagcctaaacatagaagcaatacagaggaaccagaatgaagtcatggaaaaagggcacatggtctcagtcaccacttgaccctctgtactcaagttctgtgggaaaccag

SEQ ID NO: 528602 - DNA, 580 bp, Homo sapiens
gagaaaagagaaatggagggtagtagaagacagagaagggagaggaaaataaaccagatgaaagagccccyagcagccactgcaccctcagggcccatagcagccactgcaccctcagggcccacagcggccactgtgccttcagaacccagcagcactacgtccctcatgaatcaatgcattttaccacctttactgagttcctactatggcctaggcccagaagatacaatgatgaacaaaatagacatagttgctgttcaccatagtgagaataacagacatggaatcagtgtgataaagcttgcaagggagatggccggtcatcaggatgaaattgtagggctaaagagattgaggccaccccaccagcaaagcagggtctggcttgcagcccttctgcaaggggacataggtgggggaaaatgcaccttcctcacaccaaacctgagccctggctttgggccacagcccatgagtctcgtgtcaactgctgccctgctcacagatccacctctcccttagcctctcactgtgctgtccatctctcaggatttgggtgttttttatcttgtcattg

SEQ ID NO: 528603 - DNA, 580 bp, Homo sapiens
gagaaaagagaaatggagggtagtagaagacagagaagggagaggaaaataaaccagatgaaagagcccccagcagccactgcaccctcagggcccayagcagccactgcaccctcagggcccacagcggccactgtgccttcagaacccagcagcactacgtccctcatgaatcaatgcattttaccacctttactgagttcctactatggcctaggcccagaagatacaatgatgaacaaaatagacatagttgctgttcaccatagtgagaataacagacatggaatcagtgtgataaagcttgcaagggagatggccggtcatcaggatgaaattgtagggctaaagagattgaggccaccccaccagcaaagcagggtctggcttgcagcccttctgcaaggggacataggtgggggaaaatgcaccttcctcacaccaaacctgagccctggctttgggccacagcccatgagtctcgtgtcaactgctgccctgctcacagatccacctctcccttagcctctcactgtgctgtccatctctcaggatttgggtgttttttatcttgtcattg

SEQ ID NO: 528604 - DNA, 580 bp, Homo sapiens
gagaaaagagaaatggagggtagtagaagacagagaagggagaggaaaataaaccagatgaaagagcccccagcagccactgcaccctcagggcccatagcrgccactgcaccctcagggcccacagcggccactgtgccttcagaacccagcagcactacgtccctcatgaatcaatgcattttaccacctttactgagttcctactatggcctaggcccagaagatacaatgatgaacaaaatagacatagttgctgttcaccatagtgagaataacagacatggaatcagtgtgataaagcttgcaagggagatggccggtcatcaggatgaaattgtagggctaaagagattgaggccaccccaccagcaaagcagggtctggcttgcagcccttctgcaaggggacataggtgggggaaaatgcaccttcctcacaccaaacctgagccctggctttgggccacagcccatgagtctcgtgtcaactgctgccctgctcacagatccacctctcccttagcctctcactgtgctgtccatctctcaggatttgggtgttttttatcttgtcattg

SEQ ID NO: 528605 - DNA, 610 bp, Homo sapiens
tgaccggagcccatgcctggtgcagatcctgctgcctgcaagcatygctctattttgtcataatgctcggcttctggttccccccgagtggctgcttcctgggacagattgaaaggcatctcggtgccctgcatggggcatggtcggtggagctgggtgggccgtctctgtgtggccagggtggggccgggcgcctgccctccatttctggcagggcccagtgtccttgggaggggcgtggggtctgcaggtgcacggtttcctgcttgcccaggtgtctctgagcctgtccctcccccgccccccgccgcaggttccccttgcccaggccctcagccagcacgggtgcccctgtgctgcctcatgagcgtgctctgctctgcttctgggcctttgcagggatcgtgtctccagcctgagccatgattcctctgcaacctcctcttccagtcacattgacacctcttccaggaaggcttcctggttctccctgagtccatagaccgtcaggacctttctcgccccatgttggggtccctgctgcactgtctccttccaggccccaggcaggctcctggtgtgaacattgattggaattaatgagagttgg

SEQ ID NO: 528606 - DNA, 594 bp, Homo sapiens
ctcagccttgtccacagctacaggtgggccacagtgtattagtccattctcacactgctataaagagctgcccaagactgggtaatttataaagaaaagaggtttaactgactcacagtcctgcatgtctggggaggcctcagggaacttacagtcatggtagaaagggaagcagccagtcttacatggcggcaggagagagagaaaaactaccattaataaaaccatcagatctcgtgagaattcattcactatcatgagaacagcatgggggaagctgcccccagcatccaaccacttccctccctagacgcgtggggattacaattccagatgagatttgggtagggacacagagccagcccatatcaagcagggaaagctgagccctgggagaggtgagccgcagtggctggggagaaatggcttccctgtccaggcctggagacctggcmtcagcagacagtgcccaggcctgccaattccatggactctgcagtgagcaacagctcagcagcacagccgcccgcaggccaggcccagagctccttggcgaagcaccctcctagaacgggaggaccacagctcgaggcc

SEQ ID NO: 528607 - DNA, 594 bp, Homo sapiens
ctcagccttgtccacagctacaggtgggccacagtgtattagtccattctcacactgctataaagagctgcccaagactgggtaatttataaagaaaagaggtttaactgactcacagtcctgcatgtctggggaggcctcagggaacttacagtcatggtagaaagggaagcagccagtcttacatggcggcaggagagagagaaaaactaccattaataaaaccatcagatctcgtgagaattcattcactatcatgagaacagcatgggggaagctgcccccagcatccaaccacttccctccctagacgcgtggggattacaattccagatgagatttgggtagggacacagagccagcccatatcaagcagggaaagctgagccctgggagaggtgagccgcagtggctggggagaaatggcttccctgtccaggcctggagacctggcatcagcrgacagtgcccaggcctgccaattccatggactctgcagtgagcaacagctcagcagcacagccgcccgcaggccaggcccagagctccttggcgaagcaccctcctagaacgggaggaccacagctcgaggcc

SEQ ID NO: 528608 - DNA, 551 bp, Homo sapiens
ttcgggaagctgggcacacagccctactgggtgccaggtgggcttggcctgcagcaggagcagggtcagggaaggtgaggacagagcgccaaggagggaggggggcgggtcctgccctctctgagcctcagtttccccatctccccacctccaaagtgaggacaaactccccactttccagggctgttgtgaccagggccttggtcacccagaaaatgctttaggaggaagcagccacttcctcctttcttttggtgtgaagaggctctaatgcagggcatgggtggaggaggccaggccgactttgctccctgagcaaagggtggtgagcaggaatccttggagatttgasccggggtccacctctggacaagcacaggactgtaggcccaggttccagggcctgggatccaggaggtggcatcatggcttttgcccattatgggggatggggaaggtcaggtaccatggtgccctccaaggtgagcaacggagcctttgaggtccaagggcagggcagagacccctgtgtgggtcagtgggggcatttg

SEQ ID NO: 528609 - DNA, 503 bp, Homo sapiens
ctgccactcggctaagctcccctgaccgcagggtgaggacagagcacacaccaccaggtcagaggctcccgccatcctgtggatgagagaaggcactgggtgctgggatcagggtgacggggggaagacggaccgagggagcggcatcctggcagtgccccgggagggctgcccttgcctttgcctggtgaagtcccctttgaagcctctttccaggcaccccgtttgttgagccttgccctggattttcactgcttaacaaagtctagttagtagctgccttcagacaggctgggtggggcttggcccctgcacctgcagtgtctgccacagtcgcatctgtggttcattctggaaaaccatcagccggagccacctgcagttttcttctctttttcagatgcgactaacactgcccttgtcaggaccgcccttgtcaggacagcctgcagggtccttagtctcaggtggcktccctgcaaagcagaccccgagacaagggt

SEQ ID NO: 528610 - DNA, 652 bp, Homo sapiens
gaggaggtaaaacagtggctttagacagctcttgaggagttttgctaaagaagggaggcgagagaaggtgtagtagctagaagaggttatgtagtgaagaggttttttaaagatgagtgtattagtctgttctcacgctgctaataaagacatacccaagactgggtaatttataaaggaaagaggtttaatggactcacagttccacatggctggggaggcctcacaatcatggcagaaggcagagggggaagaaagacacgtcttacatggtggcaggcaagagggtatgtgcagggaaactcccctttataaaaccatcagatctcgtgagacttattcactattatgagaacagcataggaaagacccgcccccgtgattcggttacctcccactgcatccctcccacgacgtgggaattacaggggctacaattcaggtgacatttgggtgaggacacagccaaaccacatcgatgggcaataaagactgttaagcatttctgattatctgcaagggagcaccatttgtttagtggtggcccctcagtttgtccaagtcatatttccctaacccttaccacctccctcctgtratcctagtttctgtttcttagaactgatgcttccagcttgtcaagcttcaaata

SEQ ID NO: 528611 - DNA, 614 bp, Homo sapiens
agtagtatatttccagcctctgaaatctagaatccttaagacctggtctcaggaagttttctagtttatggaagaaaataagtttccatgttcataattcccttcccttttcagtttcctttgcatattggcccctccaggtcttcgggactgatttggtggccctctcccttcatcccctgcattttctcwttctaggggatctcatccattactgttttgtatctgcaccaagacatcatttctggacgtcaacggccaatcttgacctgaaggtctacgtgcatgtccaaggtgatgtgcctgttatgggttgaatttttgtctcccaataaaagatcttttgacatcttaaccctcaatacctccaaatgtgaccttactgggaaacagggtcattgcagatataattggttaagattcagtcatagtggagtagagtgggccccttatccaatatgaccagtatctttataaaaagatgaccttgtgaagacacaaagacacagagataccctgtgaagatggaggcagaggttggagtgatgctgccacaggccaccagaagctggaaggggtaaggaaggagcctcccctccaggtttcaaaggcag

SEQ ID NO: 528612 - DNA, 614 bp, Homo sapiens
agtagtatatttccagcctctgaaatctagaatccttaagacctggtctcaggaagttttctagtttatggaagaaaataagtttccatgttcataattcccttcccttttcagtttcctttgcatattggcccctccaggtcttcgggactgatttggtggccctctcccttcatcccctgcattttctcattctaggggatctcatccattactgttttgtatctgcaccaagacatcatttctggacgtcaacggccaatcttgacctgaaggtctacgtgcatgtccaaggtgaygtgcctgttatgggttgaatttttgtctcccaataaaagatcttttgacatcttaaccctcaatacctccaaatgtgaccttactgggaaacagggtcattgcagatataattggttaagattcagtcatagtggagtagagtgggccccttatccaatatgaccagtatctttataaaaagatgaccttgtgaagacacaaagacacagagataccctgtgaagatggaggcagaggttggagtgatgctgccacaggccaccagaagctggaaggggtaaggaaggagcctcccctccaggtttcaaaggcag

SEQ ID NO: 528613 - DNA, 507 bp, Homo sapiens
cacagctgtgaatacttgcattagtgccaattaatgtaaggtggtaccaactcagagaggccctgaatttgctctaggggataaaaatggaggtgggggaggtgaggaaggagaaaggaaaaatagagttttccctgctaaatggaaacatctctaggagagtccagcagctggatgacttggttaagaaggagtgacctgcccactttcttcaattagrcattttactttccccagctaaaccacaacaacaaacagaaagacggggacaaggaatggtttagaagcaggatcactgatgttgcagaaaggagcaccgtgaatcaggacctctcaccacgcatgcctcatggggttcagagcatttcagcccaaatgaaaatgaggcagcagctaaaaattccaacactgccttcccctcccacccacatccaggcccacgtgtgaggcgaggcaattcaggtatggtattacaaacaagcccctcataactcttcatttttaaaa

SEQ ID NO: 528614 - DNA, 590 bp, Homo sapiens
aacatcatccaggaagtattgcaacccaaaagctgccatcttctgagggattcctccacaaagaaggattgatgtattggctaacacaagatggttggttatttgctctaacggtctcaatctgtgtctcctaaaaagagaacagatataataacaaaggagtaamgaaaattccccacaatccctattccagtctgtgtaaagataatcacacccattgctacatcaatagatagcattccctcagtgactgagagatgatgcttttgctcagatccaggaacctggagaaaaatggaaggaacacatgaatttcttcaagtgaaatgaaatgtacttaatttctttcaaatctccttcctgggacccctatgctattgtcacacataaaaatcccatccatgaaggttttttctcctcaccacctagtatatctttcttggtacctataacaacagaaattatcttactggattatcttatttctattgaaggaagaccatttcctccaatggaaagatgaaggtcatgaaggcagacatcttgtctaccctgttttcagcccataactaaggtttagaacaacatac

SEQ ID NO: 528615 - DNA, 499 bp, Homo sapiens
ctgcagcagaggaatggccccagtagggaggtcagatattgagccgagaatgaagctttacacaagaaagcgcagaagtgcccccgagtgttccccaggrgggcagctacatgttgagaaccacagcgtcctcagagctctgtccccagaaaccagctccaaactggttgtactggttgaatcgattcctcttccttttacttccttcctatttcgtgtgaagtgagggaaattgtggctatggagggagggtgctttcaaacttagtctgcgctccaagaaatgcctggagtctcacgcttgccgtatccttctccagtcgtatttttatccaaaagaaggacctggaggaggatgagagcgttactgctgcacacctaaagtcaagggtgagtttgtgctttgtatttgttcaagacatgcgtttttgattttagaatattgagatttccccttaaattttcagtgaaactagggggatatgcaaattgattcgtgc

SEQ ID NO: 528616 - DNA, 538 bp, Homo sapiens
atgatatagcccccttttcgggacaaatctttcatgtgaaaatgaggcttgagsaaatatttcgcagtggaagaccactgggtttggagcagagcagttttgcttttggcctatcagctgactcccttatgcaagtcatttaacttctgggggactcaacttttccataaggtcaagggagattaactccaccagccccaaactaactcatagacttgtgacttaggagaataacaaaaacgaatagacttgaagacctttaaaaacattgaaaagaattacacactgtagcagatattattggttgccatgtcaaaatcttttggccatactcttagttttaacaaagatatgtacagaaaataatagttttcctgcagaaaggaatagcacttcaaagactcaattaagtacattgacaattaaaaggggaaggtcatggacttgggaaagacacaaatctgtgtttgagtccaatctgtataacattgggcagattatttaacttcagtctcctcaaatgtaaaatggggaaatg

SEQ ID NO: 528617 - DNA, 538 bp, Homo sapiens
atgatatagcccccttttcgggacaaatctttcatgtgaaaatgaggcttgaggaaatatttcgcagtggaagaccactgggtttggagcagagcagttttgcttttggcctatcagctkactcccttatgcaagtcatttaacttctgggggactcaacttttccataaggtcaagggagattaactccaccagccccaaactaactcatagacttgtgacttaggagaataacaaaaacgaatagacttgaagacctttaaaaacattgaaaagaattacacactgtagcagatattattggttgccatgtcaaaatcttttggccatactcttagttttaacaaagatatgtacagaaaataatagttttcctgcagaaaggaatagcacttcaaagactcaattaagtacattgacaattaaaaggggaaggtcatggacttgggaaagacacaaatctgtgtttgagtccaatctgtataacattgggcagattatttaacttcagtctcctcaaatgtaaaatggggaaatg

SEQ ID NO: 528618 - DNA, 538 bp, Homo sapiens
atgatatagcccccttttcgggacaaatctttcatgtgaaaatgaggcttgaggaaatatttcgcagtggaagaccactgggtttggagcagagcagttttgcttttggcctatcagctgactcccttatgcaagtcatttaacttctgggggactcaacttttccataaggtcaagggagattaactccaccagccccaaactaactcatagacttgtgacttaggagaataacaaaaacgaatagacttgaagacctttaaaaacattgaaaagaattacacactgtagcagatattattggttgccatgtcaaaatcttttggccatactcttagttttaacaaagatatgtacagaaaataatagttttcctgcagaaaggaatagcacttcaaagactcaattaagtacattgacaattaaaaggggaaggtcatggacttgggaaagacacaaatctgtgtttgagtccaatctgtataacattkggcagattatttaacttcagtctcctcaaatgtaaaatggggaaatg

SEQ ID NO: 528619 - DNA, 616 bp, Homo sapiens
catttctagcacctagaccaaagtctggctgtgctcaagtacttaytgcagagttacaggaacatcaatgccaactgcagtcagcttatttctctgatgttcagatggcgtgttcagatggcctgatgtccagatggcctttcaagagtggagtgctaatattaatttctatttgaggtaatgaacaaaagacaaccagaggggtcacaaactccgggcactgagcaacaatgtgagcacctatcctcaatctctgctgggatttaagaagcaacgtgccagacaataagatacaaaaatgtactatgtctatgtaatacgaactttttgaacaaatatgtgaatatgtaatacttctatgcacaaaaaacaatatcaaatataaaaagcacaattgtttactagagttcaagagcacaaccgcaattgtagtggaagattttgatatacttctcaaaaagtctttgacagatcacaataagatatcatctcataccaattgggatggctactgtgtaaacattcagacagaaaatatcaactgttggcaaggatatgaagaaattagagcccttgtgcatggttggtaggaatgttaaatggtacagcctctatg

SEQ ID NO: 528620 - DNA, 616 bp, Homo sapiens
catttctagcacctagaccaaagtctggctgtgctcaagtacttactgcagagttacaggaacatcaatgccaactgcagtcagcttatttctctgatgttcagatggcgtgttcagatggcctgatgtycagatggcctttcaagagtggagtgctaatattaatttctatttgaggtaatgaacaaaagacaaccagaggggtcacaaactccgggcactgagcaacaatgtgagcacctatcctcaatctctgctgggatttaagaagcaacgtgccagacaataagatacaaaaatgtactatgtctatgtaatacgaactttttgaacaaatatgtgaatatgtaatacttctatgcacaaaaaacaatatcaaatataaaaagcacaattgtttactagagttcaagagcacaaccgcaattgtagtggaagattttgatatacttctcaaaaagtctttgacagatcacaataagatatcatctcataccaattgggatggctactgtgtaaacattcagacagaaaatatcaactgttggcaaggatatgaagaaattagagcccttgtgcatggttggtaggaatgttaaatggtacagcctctatg

SEQ ID NO: 528621 - DNA, 616 bp, Homo sapiens
catttctagcacctagaccaaagtctggctgtgctcaagtacttactgcagagttacaggaacatcaatgccaactgcagtcagcttatttctctgatgttcagatggcgtgttcagatggcctgatgtccagatggcctttcaagagtggagtgctaatattaatttctatttgaggtaatgaacaaaagacaaccagaggggtcacaaactccgggcactgagcaacaatgtgagcacctatcctcaatctctgctgggatttaagaagcaacgtgccagacaataagatacaaaaatgtactatgtctatgtaatacgaactttttgaacaaatatgtgaatatgtaatacttctatgcacaaaaaacaatatcaaatataaaaagcacaattgtttactagagttcaagagcacaaccgcaattgtagtggaagattttgatatacttctcaaaaagtctttgacagatcacaataaratatcatctcataccaattgggatggctactgtgtaaacattcagacagaaaatatcaactgttggcaaggatatgaagaaattagagcccttgtgcatggttggtaggaatgttaaatggtacagcctctatg

SEQ ID NO: 528622 - DNA, 393 bp, Homo sapiens
gctgctcacatggggatgtcagggactcatttcctttgtagtattctcctggtcctccacccccataatttttttaaaaagtgtttctaaagtatctttattgaactactgactcaatggagccagacagatggtatggaaaagttgctaggtgaagagaagtgcaagcctccacagaaataaggctgccaagtcgtggggacccatcttcctgcagagcccagtgacttaatacacagaaaatgtgagatgcccaacgatggcttgttgacagactaatgatcttasaggggcagagtgtcagcagtacaggaagatgggataacagtggtttgagacagatatgcaaggaacctggaaaaatagtttctggcagaaatgggagtaggagag

SEQ ID NO: 528623 - DNA, 393 bp, Homo sapiens
gctgctcacatggggatgtcagggactcatttcctttgtagtattctcctggtcctccacccccataatttttttaaaaagtgtttctaaagtatctttattgaactactgactcaatggagccagacagatggtatggaaaagttgctaggtgaagagaagtgcaagcctccacagaaataaggctgccaagtcgtggggacccatcttcctgcagagcccagtgacttaatacacagaaaatgtgagatgcccaacgatggcttgttgacagactaatgatcttacaggggcaragtgtcagcagtacaggaagatgggataacagtggtttgagacagatatgcaaggaacctggaaaaatagtttctggcagaaatgggagtaggagag

SEQ ID NO: 528624 - DNA, 536 bp, Homo sapiens
attgaattttgaatttcagaaagaagagcctcattgcagaaatacgcatcaactgcagttaggaaaaggatctttctaacagctagagttgtcaggagactctgaagagggtcgtgtttggtgggaaggaggctgggtgtcccctgagttcccttctataataacgaactctaaggcttggtagtagcctgggttctctgatgtgacwccctcagaagacaaagcgatcacatggccacgggatgcagatttgtccccatcaggcccagggcatgaaaggacccagcccgggcatggcaagtggtgttgtcattagcattgtgccattatttcagtgagtgacattaccccccttattcatatccattttcatggtcactttgtggcaaacttgggaacattctgtagtgaacaaaaattgcacagttatcacacatatggccacctcacatctggtgaacgatttccctttggtaaacttggacgtccgccattgcgttccccttccccacagtagaagccaggactctcttttc

SEQ ID NO: 528625 - DNA, 634 bp, Homo sapiens
gctgctgtttgtgctacaagtgtcaggaaatgttcacataataccagatatctagtagaatacccaggctgttcaaaaattcacatcctcacacacacacacaggtgagaagatatgtatcaaagtaaccatctctgagtagaaaragtataagcaatttttgttttttgtacttttttatattcttccaacattcattttcaacaatgaatccattactgtaataatttaaaaagcaaacagctatcctagacttgaaacatttttcaagtcagcccggcccatggttaatcaaaactgttgagtcccctgaacttccttccagttaatggtttttccctattacatggccctagtctctgatcattcatgggtagtagcttaatatttctgcacattatgttcttcagatactttcctttggttgcattagaactgtgattctgaactctccccgcatgctagagtcatttgggagattttgaaatatactggctcctcattagaccaattaaatccaaatatttggagatgggccctgagctttggtattttttaaaggctcacaaggaaatcctaatgtgtggcccagtagtgaacaacaccctgcatttgatactaccatttcctgcct

SEQ ID NO: 528626 - DNA, 525 bp, Homo sapiens
attatctgtggatttaacttaaaaaaatttttttattatactttaagttctggggtacagagtagaatgtgcaggtttgttacataggtatacacgtgtcatggtggtttgctgcacccatcaacccgtcatcracattaggtatttctcctaatgctatctctcccctagcccccaaccccccgacaggccccaatgtatgatgttctcctctctgtgtccatgtgttctcattgctcagctcccacttatgagtgagaacatacgatgctttgggttttttttaacagtagagatggttttctcagaactatctatgtaacctttatcccaatgtcttgaataaaggaaatttctgtctcctattcaccactgtgtatttgatttgcctctgaagtgatggggaatgctgttctctctcctgaatgtttatctcctggtttgacttccacttcctgtgaagaaaaaggttccaactagtctggcctgaaattacctggcctgatgcccatgcgggctgggccc

SEQ ID NO: 528627 - DNA, 589 bp, Homo sapiens
tgatgtaatagacattatggaaaatctttatgcaagtgaagagccagcagtttatgaacccagtctaatgaccatgtgtcaagacagtaatcaaaacgatgagcgttctaagtctctgctgcttagtggccaaaaggtaccatggttgtcatcagtcaratacggaactgtggaggatttgcttgcttttgaaaaccatatatccaacactgcaaagcatttttatgttcaacgaccacaggaatatggtattttattaaacatggtacgtttctttccgatcagttgggtgctatgtgctcagctttcctgctgcagcttcatttaatgcagagtggtgtttgaatttggcttagatgggctggcaggcatgattttaaaaaatgtaatcatcagtaagaagtacttccatgttaaagatgcaaaaaaaaaagtcttcattaaaatttctatttattaattcttgatcatattttagtagttttccgcaaataggtaattaagaagaatgtattttggccgggcgcaggggctcacgcctgtaatccgtgcacttggagaggccgaggtgggtggatcacttgaggtc

SEQ ID NO: 528628 - DNA, 509 bp, Homo sapiens
ccccgacctccaggagggcaagatccaagccatcagcgactcggacggggtgaactacccctggtacggcaacaccacagagacctgcaccatcgtgggccccaccaagagggactccaagttcatcatcagcatgaatgacaacttttaccccagcgtcacatgggccgtgcccgtcagcgagagcaacgtggccaagctcaccaacatctaccgggaccagagcttcaccacctggctggtggccaccaacacctccaccaacgacatgatcatcctgcagacgctgcactggcgcatgcagctcagcatcgaggtgaaccccaaccggcccctgggccagcgcgcccggctgcgggagcccatcgcccaggaccagcccaaaatcctgagcaagaatgagcccatcccgcccagcgccctggtcaagcccaatgccaacgatgcccaggtcctcatgtggcggcccaagtaygggcagccgctggtggtgatcccgcccaagcacc

SEQ ID NO: 528629 - DNA, 498 bp, Homo sapiens
acctaaatcttctgacttttaggctgaaaaacgttcaccattacactattttcttagaattcaaaacaartaagaacatgtcacatagttaacacctatgagcttcaattttctcatctataaaatgggcataatattaactctcctacccacttcacaaattataattaaatataagttaaatctccaaactatatgaattatcttttcacgaaacagtttatagatttttttgaagtcccttctttttactgcatttgcatccaaattgattatgtagagatttgaaaattgaccaagatttaacagtttccatgctcacattttacatataataaagcccctccctctaatgttgactttattaattttaggatttgacttgaaatttacttttcttttgaagctcatatttttcataagtggcatatgtcattactataatcaagagcattaaaattttaaaaatagttatttcaagtattttagcatatgtca

SEQ ID NO: 528630 - DNA, 571 bp, Homo sapiens
ggaacctaaatcttctgacttttaggctgaaaaacgttcaccattacactattttcttagaattcaaaacaaataagaacatgtcacatagttaacacctatgagcttcaattttctcatctataaaatgggcataatattaactctcctacccacttcacaaattataattaaatataagttaaatctccaaactatatgaattatcttttcacraaacagtttatagatttttttgaagtcccttctttttactgcatttgcatccaaattgattatgtagagatttgaaaattgaccaagatttaacagtttccatgctcacattttacatataataaagcccctccctctaatgttgactttattaattttaggatttgacttgaaatttacttttcttttgaagctcatatttttcataagtggcatatgtcattactataatcaagagcattaaaattttaaaaatagttatttcaagtattttagcatatgtcataagtggcttcaaattacttactgctttgattttaatactttctctgcaaattggaaagactgttgggtg

SEQ ID NO: 528631 - DNA, 504 bp, Homo sapiens
ttttctctttctcaccactttacggtctyacacatcttctgttgtttacaaaatgcccttgagctctcagtctccacttcaaaagcccactggacacttaacaaaatatttctttcaaacaatcacagggttttcactgagaaattcagatggacatttgttttcaccatcttattcctgtgtcgtatcactaaaatctctttgaagatgttgagtgcacaaagcaacacaaatgctttgtatcatatgaaacaacaaaatggaacacaaatttagatgtaggacatttcccctccttcagagaggtaatgcttgtagcacagaactgagctattaccatcagcagtgacaacaggagacagccacagtggcctaatctagactagtttctactggtgtgacaaccagaaaaccagggtttataagaccagcaggaggaggacaacagctttctttccttggtgttgagccctagcagtgatattgggaacagaaggagaccca

SEQ ID NO: 528632 - DNA, 606 bp, Homo sapiens
tgcttgttttgtcagtgactcatgagttctcttttcataccagcttcacccttggcattctttaccttaggagtaactccctctactctgtctccttgcattgacttttggaagacctctgcgttatgccaggtcaaagttcaaagtgtcctgaaaaaaaatttttttttttttcagttctgctaccctttctcggattttttttttattcagtgactttactatatgaaggctcrtggtgtaccccagagagattccccttagctttcttattccaccttgccactgactaacactaggggagccctacaaattacaggaggagagctgtcaaaattcctgtcttgctctggcccttggggtgttgcatccatgtgcttagtgaggtgtcatgggaaagtgttggcaaggagatgcagattcacgctgtactttctagtgattctaatctctcacactagcccacatgtggtcattatgagtttgtaaaagttttgctgtttcatctttttaaaactcctctgcctctccaacagcactgtaaacagctatcagtttccttccctaaaattcatcacattctgaaattgtatttttcctcagttc

SEQ ID NO: 528633 - DNA, 291 bp, Homo sapiens
agggggagggagagcattaggacaaatacctaatgcatatggggcttaaaacctagatgacaggttgatakgtgcagcaaaccaccatggcacatgtatacctatgtaacaaacctgcaagttctacacatgtatcccagaacttaaagtaaaataaaaaataaaattaaattaaataaagagctttgctactgaattgaagacaggaaatacatgtgtggccacaatagtcttgctaatactttaccttctacttagacaaacttagttcctagtcatggcatggctgaa

SEQ ID NO: 528634 - DNA, 615 bp, Homo sapiens
tgtaacatgtgtgaaataattaaacttcaatcaagctatacctcagagcactccagatccagtatcattyagatggacacagaggtagaaaataaaagtagtttttgggactgaaatgtccccactatgcatcctggaaatgttttgtaatcttaaatcaattaaagtggcctgacaacctgattggcaactgtgtttctctttcttctcttaggagaattctctatatgctcgtattacctgaattgttctttggtggcaatttaccctggcctttggtgtgaagacaaaattcttgatcaaatttattttgaaatcttcaaatattaattttaaagggtgaaaatgacatgattacgtgaaaaaatagtagtgaaattgaggccacctataaatacctggtaatgtttggtgatacaactataaaacattgaatgatttccagttgcagtgataatctctgaagtcctatgcctcatcccatttctttgtgttttgtatttcttgggagtagggagaggtggttacaatgttatgtaattctactgtcttttttaattcctacataccctttgataactgttatgtgatgctggggctgagaacttgcaaact

SEQ ID NO: 528635 - DNA, 618 bp, Homo sapiens
caagttcctgaccacccaaccaccattactcatgaattgatgcagatacatacctcttgacatctctgctttctagcgtaattaacagccaggcacactaactgaagttctgctgactggcagattttcttttaccactcttcttcaaattgatgatggcatgcttgcccaaattgctggttgggtgagacaacactacatttataatggggatctcagattatactgtaatatggtgtgccatggctaaaagttgtgccatggctaaaagttgagtatctattaggtctcagtaggaaaccagaagctgtttctcaaaggataataagtgttttccagagcataattttgtgccaaaattctaaatctgtgaattgtataaaggcataccacagtattgctgtctgccatagtcacttaatataccatcagatctgccagctaacgtgtgctattaagaggcatgtaatgcacccatatgttcattgyagtgctattcacaatagcaaaaacatggaatcaacctagttgcccatcagcaatggattggacaaagaaaatgcgctacatatacaccatagaatactatgcccccataaaaaagaacaaaagcatgcc

SEQ ID NO: 528636 - DNA, 629 bp, Homo sapiens
tgggattaccaagggggcaatggtggtggtggggttctcatgggaatgggatgagtcaggcaacggaccaatatgatgggagcctcaaaaatgctagttagagttatagraaaaaatcacacgggagaagcaaacgaattggtgagaatggagttcaaaagtggtaaaaatcttcagtagtctgaagagagcaagatgaattgtcaatttccgtgaatgagttgatgatttgtcctcaggctgtagcaatggggaagaaaatatggataaaagcgatgggggaagagaacaccagtatgagagcccagtagatggatgtgaaagatgaacagaaggaggagttaaagaacaagtcaagatatttaactggggacaaagtttctagattcataagttgaatagcgtcagattcactttcaatgagtctatgatgttttcacttccttttccagccagattagcctcagactcagactgacttatctaaacccaaggtggcaggtggcagagcaccgcggggccagggccagaatgagacacagggtattctgatacctggccctgcaggtgtcccactcccctcacctcagacctggacattaactcatacattgccatggatgaagaca

SEQ ID NO: 528637 - DNA, 637 bp, Homo sapiens
gcagcacaggctgcaaacaagggctgctctcaacatttttaagtggaagagggcctgtctttccctgcgcccccatcctcctctcaatctggggctttctgaaaatgcactttatcttcccagacatttatgcaagagtaaaatgagttaacagaggccagtagcatcgctaagctccaaccaggaagtgttcagacgttaggaaacacgggtgagcaaatgtttactgactgtgtaattaatacgatgccttgccctgtctattggtccttagtaccatatttcctgttcaaggcagtggaaagtgaaaatattagttgctgtttgaccaaaggaacaagtgtcttccaaacgagcacatgatctattagcagtcctgccggttcttcccatgggaacaggcattttactttgttttacagctaatttctttcttacagcaggttcccagacacatcaaatgccttgcatttgaggctaaagtcaagatttatagtccaggcccatgtaattcarcgtcaaacaattctgataacataagggctggaagtcaaccattttctcatgagttcttattaaaaaaagtcattttagccaaattgagtttgaagggtgggtgtgtctctgtgagctaatg

SEQ ID NO: 528638 - DNA, 656 bp, Homo sapiens
tccctgtcagatcaccctctcatccatagcttcggccttggaattgccctcaggcatggcttgtgactggtggaggaaaatcagtcttgttatacttatagtcacacttcatttttkatctaaattcacaccgcccactttcatcacccatctcatttatacaattgatacttaatgatgactggtcacttccaaaagccaaatccatactcacagactgacgaatatgcagaatatagaagaaagtctcccaatacctgaacaggaatttcccaagtttttgtattaacagacagaatatgttataatctcccagagtgatgcctttaaataaatctcttctaaaatatttaaggttgtcaatgtttttaagaaggcagccagattattttccagacttgcttgatatacactaatttgtgactttttaggggaaataaaactgtatggtacataaattcctgctgctggtgatgctacacaagctactctgcatttataaactgatagtcgggacatcattttatagatcaggagaaaggactgcagagtgactttctcaagagatgcttctgtgttattctggcatcccagtgagtgcttactgtagacattatggaagaaaggcccaagcacctgtttactctgccttgcta

SEQ ID NO: 528639 - DNA, 656 bp, Homo sapiens
tccctgtcagatcaccctctcatccatagcttcggccttggaattgccctcaggcatggcttgtgactggtggaggaaaatcagtcttgttatacttatagtcacacttcattttttatctaaattcacaccgcccactttcatcacccatctcatttatacaattgatacttaatgatgactggtcacttccaaaagccaaatccatactcacagactgacgaatatgcagaatatagaagaaagtctcccaatacctgaacaggaatttcccaagtttttgtattaacagasagaatatgttataatctcccagagtgatgcctttaaataaatctcttctaaaatatttaaggttgtcaatgtttttaagaaggcagccagattattttccagacttgcttgatatacactaatttgtgactttttaggggaaataaaactgtatggtacataaattcctgctgctggtgatgctacacaagctactctgcatttataaactgatagtcgggacatcattttatagatcaggagaaaggactgcagagtgactttctcaagagatgcttctgtgttattctggcatcccagtgagtgcttactgtagacattatggaagaaaggcccaagcacctgtttactctgccttgcta

SEQ ID NO: 528640 - DNA, 482 bp, Homo sapiens
tggtagggaacattcacatcatactttccatgaacaaaaaataaacttttattgttttaaactactgagactagggtattggtagtgtttgttatagcaagctagtgttacttactccaacaatccttytcccaccaaaaaaaaaaaaaaaaaatttagaaaatagatcagaaaagaggtctgtctatacaaagatatttgtaagtggcagtaaaccaaacctagcctgtggacacaacaattaatatatttcaaagtgttttaaggaatgctttgcaaaattatagggtgcaaacaaatgtcagtgattgctactattatatctagcagccaattaaagttaaaaccacctactaaattataaagatatggtgtagccccatagaattgtcttaataattcctctgagttaatagtttctcccaaagcagtcctggtttcatctagtaattagagtctagcattaggactacataaaatag

SEQ ID NO: 528641 - DNA, 649 bp, Homo sapiens
tgacaataggaatttaccaactctagtttatgctcccaaaaaattcatgctcatcattaagagacaagattggagatctagtcaatcaccatttgaaaattaccatagtaataattgttataatcaagaaccatcaatggatgctaaaaaaaatgagagaaaaatttttgagaaacagtattatcaagcaaaatcaccattaagcaatgaccacagtaataactgttgcaagtaaaatccatcaatagatgctataattgatggcgaaagtttcaggagaaataatatatttgcatagtctcaaagtatctcccctaggatattgatcagttccaaaaggggaaaatagtaactttatagtggagaaacccagcagacactactcagcaaaaygagcaaggttaacatcaccagcaataagctatatgaacatgatgttcccctgatatcacacactgagaacacattgtcacttctgtggcattcctgccgcaaatgcataacctcaatctaatcaaaagaatacagaacacaaaccctaattgagagaaagtctacacaacaaataacccgcactcattaaaggtttcatcatcatgaaagacaagaaatgacagtgagaacaaccataggttggaggagactaaga

SEQ ID NO: 528642 - DNA, 417 bp, Homo sapiens
cccttcgccactcctcaggcttaaaagtgtgtatgccagtagtgcaattcaccctctggaggacaaactgagagaagagtcccctgcaggccctaagaaggactaagggcagttttagcagtggatcctggtcaaggttactccaagcatattctgaaaggacagtgtgggttttaggtgggtatgttccctagccttgtgaacttcttgcctccatgaggagcaggatgaatggggagaaatgcaaatctaacagrcatggcctgttagagcacagggtacagtgcagaggccccagtggcccaactctgattatagaacttgctccatagccaggaaatgattgaggcaggacttggctccaaatccctagaagccctaattatttgacaccattattctgttaaagcatcattt

SEQ ID NO: 528643 - DNA, 607 bp, Homo sapiens
caataaggcagaagtctctttattatagacctgtggtaattccaggagaagaaaatgatggtttattttacacctmccaatgtttgcgtcccacacccagagtttctaattaaattggtctggattgaggtgcaggcattacagcccttaaaagattcctccagtgagtccagtgagctgccaggattgagagccacccagtggttttcaaagcatggtcccaagatcagcagcatcagcatcacctaagaacatgttaaaaatgcaaatgtttagactccactcgatatctactatatcaaaaattacgggagtggggcccaaaaatatttaacaagctttccaggtgattctggtcaacactgagcttgagaagctctgcactaaagtatactaacattacaaggaggcaattagtttctgccaagaaagtgagacagattccaacctccgcaagtgttctaagaaagttgtgagctagagatttcagaccacagagaaggggtaaaatctaagagaagaagaacctccaattcacctagcccaaagaagcatgcaatcaagtacacatgcggtcagaatccaccagtgtccctggggcagtgag

SEQ ID NO: 528644 - DNA, 540 bp, Homo sapiens
gcatatgaattttgaggaggatgcaaaacattcagtctgttacactacctcatagggttaatgttaggattaattgagctaartgccaagaaaatacttaggaaggtccatggcacataattcgattttgaaatgttagctattgttattgaagttattttgggtataaaatgcaggattaccatcaatttcattgtcttgccatttatatgatataattttatgcctggagttttgaattgagaacaatggcatacaattaaaagaatctaaaaataagatccgactacatttgttattctacaaagcagaaaaccaaaatccacagatgaaagtttctgacattgttctctaagtgatgaaactacaagatcctgggatatgatcttattccaggattttatgtcagaagaaagttgtttttttccaggatatgcctcattttcagtcctgctgttggcaagcccaatgatgcaatgatgcacggtgtaatttctcccagggtggcacatgatcagagtagtggctgcacaaaaacgg

SEQ ID NO: 528645 - DNA, 540 bp, Homo sapiens
gcatatgaattttgaggaggatgcaaaacattcagtctgttacactacctcatagggttaatgttaggattaattgagctaagtgycaagaaaatacttaggaaggtccatggcacataattcgattttgaaatgttagctattgttattgaagttattttgggtataaaatgcaggattaccatcaatttcattgtcttgccatttatatgatataattttatgcctggagttttgaattgagaacaatggcatacaattaaaagaatctaaaaataagatccgactacatttgttattctacaaagcagaaaaccaaaatccacagatgaaagtttctgacattgttctctaagtgatgaaactacaagatcctgggatatgatcttattccaggattttatgtcagaagaaagttgtttttttccaggatatgcctcattttcagtcctgctgttggcaagcccaatgatgcaatgatgcacggtgtaatttctcccagggtggcacatgatcagagtagtggctgcacaaaaacgg

SEQ ID NO: 528646 - DNA, 537 bp, Homo sapiens
tccttgtgttttcactaagagcaacgaagccaatacaaagctcaatgaaggacagagtaaacatggggaaactgcttaccctctgtgggtttcagcttctttgcctataaaatgagggcctagagattactctctctagtctattttcagcccaacaacctggagtggtgctgacttgccaggctcagtggctgtctcaccactatcctcaggtgaatgcatttgcagatagaagcctgctctcttggagaaatatccttgcattctgatgtcatgggaagaacacataagtcctctcttcagtaataacctgcatacagtaaatactcattgagcatggattttagacaagagctggtgggagaacatgaacttcatccttgaaatactygtattttggcagaagcaataaaacatgaatgcaacagcattgatagaaactgtagagactttaacaccctataacacagcatctgcagcttcagagtgaacagttctccctcggggacaacagcagaattgtgtgtagttcaacag

SEQ ID NO: 528647 - DNA, 635 bp, Homo sapiens
aacatttaataatctaaaaacaggccaggttctagaaattctctttacctcttcaccgtctttgttttattgttctttgagttttgtgtgtgtgtgtttgtttttattgatacatcatattttgcatatttatggggcacatgtggtatttygttacgtacacagaatgtgtagtggtcaagtcactgtatttgaggtgcctgactttaccttatttgtgtgttatttacttagctattgtctttctactccaaaaaaaagtaggcataggcttgacgagggtcagtacctttctccttctcttctcccctgtattttaaacgcccagaaaaagccctgacatgttaggtgtttgatcagtcaacatttagtgactgaataaaacccagctttccccttctccttgaaaatatccattttctctttgttactgcctaagccaccctaatgggtgaagggaatctcagcagtgcttgcatttttaagaggatctgtgtcccctaagatcctagctgacagcatttcaggtgctggatagaataaggtgtagggagaactttctggagtattttgagactaggtgaggagcggcgtgctacaggcagtcatccttgatttgctgggaagcctactgg

SEQ ID NO: 528648 - DNA, 635 bp, Homo sapiens
aacatttaataatctaaaaacaggccaggttctagaaattctctttacctcttcaccgtctttgttttattgttctttgagttttgtgtgtgtgtgtttgtttttattgatacatcatattttgcatatttatggggcacatgtggtatttcgttacgtacacagaatgtgtagtggtcaagtcactgtatttgaggtgcctgactttaccttatttgtgtgttatttacttagctattgtctttckactccaaaaaaaagtaggcataggcttgacgagggtcagtacctttctccttctcttctcccctgtattttaaacgcccagaaaaagccctgacatgttaggtgtttgatcagtcaacatttagtgactgaataaaacccagctttccccttctccttgaaaatatccattttctctttgttactgcctaagccaccctaatgggtgaagggaatctcagcagtgcttgcatttttaagaggatctgtgtcccctaagatcctagctgacagcatttcaggtgctggatagaataaggtgtagggagaactttctggagtattttgagactaggtgaggagcggcgtgctacaggcagtcatccttgatttgctgggaagcctactgg

SEQ ID NO: 528649 - DNA, 635 bp, Homo sapiens
aacatttaataatctaaaaacaggccaggttctagaaattctctttacctcttcaccgtctttgttttattgttctttgagttttgtgtgtgtgtgtttgtttttattgatacatcatattttgcatatttatggggcacatgtggtatttcgttacgtacacagaatgtgtagtggtcaagtcactgtatttgaggtgcctgactttaccttatttgtgtgttatttacttagctattgtctttctactccaaaaaaaagtaggcataggcttgacgagggtcagtacctttctccttctcttctcccctgtattttaaacgcccagaaaaagccctgacatgttaggtgtttgatcagtcaacatttagtgactgaataaaacccagctttccccttctccttgaaaatatccattttctctttgttactgcctaagccaccctaatgggtgaagggaatctcagcagtgcttgcatttttaagaggatctgtgtcccctaagatcctagctgrcagcatttcaggtgctggatagaataaggtgtagggagaactttctggagtattttgagactaggtgaggagcggcgtgctacaggcagtcatccttgatttgctgggaagcctactgg

SEQ ID NO: 528650 - DNA, 635 bp, Homo sapiens
aacatttaataatctaaaaacaggccaggttctagaaattctctttacctcttcaccgtctttgttttattgttctttgagttttgtgtgtgtgtgtttgtttttattgatacatcatattttgcatatttatggggcacatgtggtatttcgttacgtacacagaatgtgtagtggtcaagtcactgtatttgaggtgcctgactttaccttatttgtgtgttatttacttagctattgtctttctactccaaaaaaaagtaggcataggcttgacgagggtcagtacctttctccttctcttctcccctgtattttaaacgcccagaaaaagccctgacatgttaggtgtttgatcagtcaacatttagtgactgaataaaacccagctttccccttctccttgaaaatatccattttctctttgttactgcctaagccaccctaatgggtgaagggaatctcagcagtgcttgcatttttaagaggatctgtgtcccctaagatcctagctgacagcatttcaggtgctggatagaataaggtgtagggagaactttctggastattttgagactaggtgaggagcggcgtgctacaggcagtcatccttgatttgctgggaagcctactgg

SEQ ID NO: 528651 - DNA, 565 bp, Homo sapiens
gtccaggtgaaatcctggtctggatgcgaaaaggacccctcaaaacagctacaaaatattcgaatcagggggaatcctagacatccccctaatgcactcaaccttgtctcccaattcccacttctgggatttttcagtccgacttcactgttgggkgggtctggaaggtgagcatgaccctggcagagcaggactaggtagggtgaatgacacaacgagattcagtggcctctctccagtcttttctcctacaagggacaacctcatgggttcctaatatccttgtgtgccagcgaccacctgtcctcgattactgcaagaaaacagaagaacagaaagatggagagaactcaggaggggaggaacacactgatgaccaagcagacgacactggccaggaagaagtcagtgcacccaagggtttctagggagctggcccggaacacttctcagtcagatcccctaaaactcacctttagatatggacccaaatcggagtgcttagggctctcaatattaatgattagggcctaaaatatgatatgaacgtttggaaaccttcata

SEQ ID NO: 528652 - DNA, 565 bp, Homo sapiens
gtccaggtgaaatcctggtctggatgcgaaaaggacccctcaaaacagctacaaaatattcgaatcagggggaatcctagacatccccctaatgcactcaaccttgtctcccaattcccacttctgggatttttcagtccgacttcactgttgggtgggtctggaaggtgagcatgaccctggcagagcaggactaggtagggtgaatgacacaacgagattcagtggcctctctccagtcttttctcctacaagggacaacctcatgggttcctaatatccttgtgtgccagcgaccacctgtcctcgattactgcaagaaaacagaagaacagaaagatggagagaactcaggaggggaggaacacactgatgaccaagcagacracactggccaggaagaagtcagtgcacccaagggtttctagggagctggcccggaacacttctcagtcagatcccctaaaactcacctttagatatggacccaaatcggagtgcttagggctctcaatattaatgattagggcctaaaatatgatatgaacgtttggaaaccttcata

SEQ ID NO: 528653 - DNA, 537 bp, Homo sapiens
agataagagattgagattcccaagaacaagaaagaaatggattccagggccccaggggaggtgagcctcagacaggaactraggggcttctttttttttttttttttctaagacagactcttgctctgtcacccaggctggagtgcaatggggcaatctcggctcactgcaacctctgtctcctgggttcaagcgattctcctgcctcagcctcccgagtagctgggattacaggtatgcgccagcacgcctggctaatttttgtatttttagtagagacggggtttcaccgtgttggccaggatggtctaaaactcctggcctcaagtgattcacccaccttggcctcccaaagtgcttggattacagatgtgagccactgtgcctggctggaactgaggggtttctttcgttgtgaaagaaaagaaggatgagaggatggattcagataaagtgaggcgtgcagccctgtgatccccaggtgggggcagttctgaatcgggaaacttgtactttctcagggaagcaggaggcaag

SEQ ID NO: 528654 - DNA, 395 bp, Homo sapiens
gccttttctccctttttgcctttcctaaatttagttttattctagcacccagccttgtgcatgcctattgcccttcttccactgtacattaagctaggcaaaactacccctcttgttagatttcttaaagtcttattccaggaccaccaatctgttattgtttccagatgaaaacctttactaagctttgaattgakttctttattgagaaccatagactgggaaatcatgtatggaatctagaaaatagtgtcatttatagaaggagttactctttcttttgattgatattttatttgtcttcatttcatttgcttttgaccttttaaatgagtgtgcacatatttcttctattataaaagtgttcattttacatgacaggaagtaattgacaa

SEQ ID NO: 528655 - DNA, 373 bp, Homo sapiens
tgccgaacaccaaagctggggctctcagcaaatccttcaaacagcaagccatgttcacttttataatttagttgaatttatttaaatgtgatttgtatttgtagctcatggcacataggtgatgtgcaatatatgctagtcataattcaaacatctattgtggtgatacatttctaattccctgaattggacatttccagatttttaatttcttacaaattctcactgagaagcaaatttttgcatttgggggggaaaaaaacaacaaaaatcaagatagctattttttttcaactctttaaaaaacaaagccagtgaaagattttgtaagcttctggccattcaataacrtctcccttatgtgcagggctgg

SEQ ID NO: 528656 - DNA, 711 bp, Homo sapiens
acttctgcttatctaagatgtcaacttaatactctcccctcactagtattctacttttatgtaaaagaattacatgataaattgacaagaagaatttttgaagtgtcagaatatgactacagttcagagaatacattcagtttaatgtcctctatcttcaatgtgtacaatttaatggatgataactgaggttcacaagtaacttttgaattagcaccaaagactgaattatatttactatacctttggagttctatattttattggttatcaaacaataatcactgcgaaaaggcttgaattagccagggtgtctctgtgttcttttttttttttttgagacagagtctcgctcagtcgcccaggctggagtgcagtggtgtgatctccgctcactggaagctctgcttcccaggttcacgctattctcctgcctcagcctcctgagtagctggtgcccgccaccatgcccggctaattttttgtatttttttttttttttagtagagacagggtttcactgtgttagccaggatggtcttgatctcctgacttcgtgatccacctgcttcagcctcctaaagtgctgggattacaggcatgagccactgtgcccggccactgtgttcttttttgaaagagacaggattggaaatsgaggctttggatggccattggggttgactaccttttacctgtgtgatctggcaa

SEQ ID NO: 528657 - DNA, 639 bp, Homo sapiens
atattacaggaacaggaaaccaagtactgcacattctcacttctaagcaggagctaaacattgagtacacatggacacaaagaaaggaacagttgacaccagggcctactcgagggtgagggagggaggagagaaaggatcggaaaactacctatcaggtactatgctcattacctgggtggtgaaatcatctgtacacccaacccctgtgacatggaatttacctgtgtaacaaacctgcacatatgcccctgaacttaaaagttaaaaaaaaaataactgagaaacaaaagtctgttacagtactcttttcatagatgagacagcgaagactcaggatagctggtccttgaagattagtgtmttgggttgaatggtggcctccccccctaaagatgcgcccaacctctggaacctgtgaatgtagatttatctggaaaaagagtccttgcagatgcaattaaggatcttgagttgagatcatcctgtactacctggtggaccccaaatctaataggtgttcttgtgagagaaaggcagaggggcatttaagatgctcggaggaggagaggatgcgaccgtggaagaagagattggagtgatctgactacaaggccacaagtcaaggaaggctggcag

SEQ ID NO: 528658 - DNA, 639 bp, Homo sapiens
atattacaggaacaggaaaccaagtactgcacattctcacttctaagcaggagctaaacattgagtacacatggacacaaagaaaggaacagttgacaccagggcctactcgagggtgagggagggaggagagaaaggatcggaaaactacctatcaggtactatgctcattacctgggtggtgaaatcatctgtacacccaacccctgtgacatggaatttacctgtgtaacaaacctgcacatatgcccctgaacttaaaagttaaaaaaaaaataactgagaaacaaaagtctgttacagtactcttttcatagatgagacagcgaagactcaggatagctggtccttgaagattagtgtcttgggttgaatggtggcctccccccctaaagatgygcccaacctctggaacctgtgaatgtagatttatctggaaaaagagtccttgcagatgcaattaaggatcttgagttgagatcatcctgtactacctggtggaccccaaatctaataggtgttcttgtgagagaaaggcagaggggcatttaagatgctcggaggaggagaggatgcgaccgtggaagaagagattggagtgatctgactacaaggccacaagtcaaggaaggctggcag

SEQ ID NO: 528659 - DNA, 672 bp, Homo sapiens
tgtctacctgttacctataaagacccaggcaagtggctgtgcaggatactagggcagatcttcagtgagaatgcttcgtgaatgtctttgattaaggtaacagtgtctgtcctgctgcccctatcagccgggctcaggtcagtggcaaatcaatactccccagtctcagaattggagtgcagtggtgagatcaaagctcattgcagcctcaacttcccccggctcaagcaatctgcccacctcagcctccagagtagctggactacaggtgtgcactacactgcctggctattttttgtagagatgggatttcatcatgttgctcatcctggtcttgaacacctgggctcaagctatctgcttgcctcagcctccgaaactgctgggattycagatgtgagcccccatgcctagcctccatcctggtcagattctatttttcttgcaacaaacaggaaatgtaacttcttggatgcaacactgaaataggaagctccagctgtgggcagaattacaatacaagggaggttgtcttatcctcaggaccaagcaccccaggccaacttctgggatcctggagctccttgctacatttaaagcccaattcacagggcatgcaacagagagttttctgcattttcctccctagtttcccctcagtcttcgaaattg

SEQ ID NO: 528660 - DNA, 647 bp, Homo sapiens
gaagtgacttgagctaagccagggaccaggaacttgaaggtaaaacagcgcctcacgctgcgggctgatgaaatatgcagtcggcggatgtaaaggactacgtcgtactagaataataatacaatacgggggctttattgcagtggtattaaataaatacacacccaatatcactagaggcaatgaagtagtttttcctttccaaaaacatagtcgtgtaactgttattatagattgattctgatacaaaatgtgcacacagaatgaatatttaagggtaattcatttataaggtgttattcagaaacggcacttacaaaacagaagatgtagatacttattacaggaaactaagcagccaatcaaccaatcggtatgtaccgaatatttctgcaggcagtgcacgttgttacactgtacggcaggtgagacagtgtacactgtggttaagagtacagtctttgaggccagacagmctgagtttgtattatttattagctatgaccttgggcacattgctgcatctctctgggcatcagtttccttgtccgtaaaacgggaataatcatacctatctcatagggttattgtaaagagtcagtctttgtaaagcatttcaaatatagccttgaacacagttaagagct

SEQ ID NO: 528661 - DNA, 621 bp, Homo sapiens
caaagccatcctgtccaatcccgctctcatttagaaaggtttccattggagcagaaaggtggtaatggctgacagccaatctgcagtggaaaaaatgcaagcctgtgacctagaaggcactggtgttcaaagtcctaattactcagatgtcagaagtacaagattacaggcttttataatgtcaagataattaagatagtttgcaaaattgcacctggtaaattctaaattcaagtgaccccagtggtctgcaaaagaatataaagatgtccttggtagccttctgcctgtatctcagtggtactctcttcctgcctttatctcagtggcactctctttctgtccctaataatgcacactgtgatcccaaacctgtacctgtgagtcgagaygaacaagatggtgcaccagctcatgggcttctgagaagaaaaggaaaacaggagcctgtccccatcccacactgtgctggagactttcttagacactgaaccacacttccacccattgtgttgaagacaagaatacggggagccagagacgctgaggaaacgtgcccaagccggcggcaaagctgagatttgcagcagccccattagtctagtagactctgactgacat

SEQ ID NO: 528662 - DNA, 666 bp, Homo sapiens
atgctcatccatggatgcaagtggcaagcacctgtctcgtgatccttgctctatctgctctccatttggaagtctcttctctcagatagccatgatctatttctttatctttttcaaattttgtctcaagcttcatcttttcagggggtctacccactgctctgatcaccctgcttaaccctgaaacctcccccacccagayacacacagcacagcgctctgcactctcatcactctgtcctactgttctccataattctgttcacttttaccactctgtactgcccactttattgtgtttattgttgactacctgcccctccctgtgaaaaacaagcaccttgaggatggagatctttgtctcttttgctcactgatttgctgaagcacagaaaacttatgagcagtgcttggctcatagcaggtactcaggaaatactgaatcagtgaatataaactaagaagtcaatgatggcttaccatgagtggaaagatgcccatcatgtgggaagcaagtaaatctttacgtgtgcaaaatcagggctttgtcacctgtttagagcaaccatttcttcctgtgcttagagacattaacaggatatgagcaggtgtttagtagagaatataatcagtttagtttttcagagcagatgatacaaaaatatt

SEQ ID NO: 528663 - DNA, 625 bp, Homo sapiens
gaagtctcttctctcagatagccatgatctatttctttatctttttcaaattttgtctcaagcttcatcttttcagggggtctacccactgctctgatcaccctgcttaaccctgaaacctcccccacccagatacacacagcacagcgctctgcactctcatcactctgtcctactgttctccataattctgttcacttttaccactctgtactgcccactttattgtgtttattgttgactacctgcccctccctgtgaaaaacaagcaccttgaggatggagatctttgtctcttttgctcactgatttgctgaagcacagaaaacttatgagcagtgcttggctcatagcaggtactcaggaaatactgaatcagtgaatataaactaagaagtcaatgatggcttaccatgagtggaaagatgyccatcatgtgggaagcaagtaaatctttacgtgtgcaaaatcagggctttgtcacctgtttagagcaaccatttcttcctgtgcttagagacattaacaggatatgagcaggtgtttagtagagaatataatcagtttagtttttcagagcagatgatacaaaaatattctcctcatacagattatgagatattga

SEQ ID NO: 528664 - DNA, 607 bp, Homo sapiens
cagctgcaagtgcaaactatgtcctggatttcacagatttagagtggaaaagaatgcaaactctcttattacgtgtttaattgatgatttgttgaygtgagatttagatatatcgaagtaagtaaaacgtattattaaaattaattccacctgtttgtgttttacttttttaatgaagccactaaagacaacttacccatatgttccaaataattgaaagtaggatcttgaagaggcattttcatgtccatgttcatagcagcattgttcacaaaagccagattttcaatagctgaatggataagcaaaataaggtctatctgcataatgaaacctcattcagccataaaagataatgaagtactaatacatcctacaacatgcttgaaccttaataacatcgtggcaggtgaaagacgtcagtcacaaaagaccacatactctatgattctgttcacatgaaaatccagaatggaggggtccacagagacagaaaggaggtaaatggtttcttagccatggtgatgagaagatggggccatttggaaagagttctaggtttctttttgaggtgataaaaatgttctaaaattgactgtggtgatgt

SEQ ID NO: 528665 - DNA, 607 bp, Homo sapiens
cagctgcaagtgcaaactatgtcctggatttcacagatttagagtggaaaagaatgcaaactctcttattacgtgtttaattgatgatttgttgatgtgagatttrgatatatcgaagtaagtaaaacgtattattaaaattaattccacctgtttgtgttttacttttttaatgaagccactaaagacaacttacccatatgttccaaataattgaaagtaggatcttgaagaggcattttcatgtccatgttcatagcagcattgttcacaaaagccagattttcaatagctgaatggataagcaaaataaggtctatctgcataatgaaacctcattcagccataaaagataatgaagtactaatacatcctacaacatgcttgaaccttaataacatcgtggcaggtgaaagacgtcagtcacaaaagaccacatactctatgattctgttcacatgaaaatccagaatggaggggtccacagagacagaaaggaggtaaatggtttcttagccatggtgatgagaagatggggccatttggaaagagttctaggtttctttttgaggtgataaaaatgttctaaaattgactgtggtgatgt

SEQ ID NO: 528666 - DNA, 607 bp, Homo sapiens
cagctgcaagtgcaaactatgtcctggatttcacagatttagagtggaaaagaatgcaaactctcttattacgtgtttaattgatgatttgttgatgtgagatttagatatatcgaagtaagtaaaacgtattattaaaattaattccacctgtttgtgttttacttttttaatgaagccactaaagacaacttacccatatgttccaaataattgaaagtaggatcttgaagaggcattttcatgtccatgttcatagcagcattgttcacaaaagccagattttcaatagctgaatggataagcaaaataaggtctatctgcataatgaaacctcattcagccataaaagataatgaagtactaatacatcctacaacatgcttgaaccttaataacatcgtggyaggtgaaagacgtcagtcacaaaagaccacatactctatgattctgttcacatgaaaatccagaatggaggggtccacagagacagaaaggaggtaaatggtttcttagccatggtgatgagaagatggggccatttggaaagagttctaggtttctttttgaggtgataaaaatgttctaaaattgactgtggtgatgt

SEQ ID NO: 528667 - DNA, 413 bp, Homo sapiens
ctgaggtcccagcctacaaccagtatcaaccaccagacatgtgagtaatgatgtttccagttgattccaaccaacagcctttgggtcacctccagcctttgratctttgcatctgaaatgccacgcatgacagagcagatacaagcatttctgctgtgtcctgtccaagtctctgactgatagaatctgggcttgttctaggcacctgagtcttgaggttgtttgttacacagccttagtaacttgaacaacggttatgcaacacttgagctagaccttgaaagatgaatggggatttttgtctagcaaaactgtttggaaaaggcttaatattttaggagaaaagttaaaaggtaagtgtggttaacacatgggttgtgggagagaatcaggagatgagatgaaaaaagttg

SEQ ID NO: 528668 - DNA, 632 bp, Homo sapiens
attccttttatgtaaagtttcaaaatatggaaaactcaaaattatcttctgtagggagaaaaacatacattcttagaatatattaggcaaagacttttacttgtttctttttcagtttaaggatctgctgttctacttttgcaatttttcaatctacacgatccatactttgtattaactcttcgtttgaaagttttgaaggtaaagcattttgatcatctccacatggttgccccgaaattggagaggatggagcttcatgtttgcctccraatgctggatcctttagagaataaaaccaagaaaaacaattcatttctcactaatagagtccagattgccttaaatgaaacagtcagttttaaaccacagcagagccatgtgtaatatgtgtctaatgaaacctttagcagtaactttcatatttacatatatgcaaattctcacctcacttttatagtttagatataccatgtactattctgaagagcctaaaagctatacaaagtcaggtgagttagtgctgatcagcctctagtgtaacaatactgaaattatagagaatttataggtaaataatgcaatcatgacgaagataccaacttctcagccatttccttgcaatggctctt

SEQ ID NO: 528669 - DNA, 632 bp, Homo sapiens
attccttttatgtaaagtttcaaaatatggaaaactcaaaattatcttctgtagggagaaaaacatacattcttagaatatattaggcaaagacttttacttgtttctttttcagtttaaggatctgctgttctacttttgcaatttttcaatctacacgatccatactttgtattaactcttcgtttgaaagttttgaaggtaaagcattttgatcatctccacatggttgccccgaaattggagaggatggagcttcatgtttgcctccaaatgctggatcctttagagaataaaaccaagaaaaacaattcatttctcactaatagagtccagattgccttaaatgaaacagtcagttttaaaccacagcagagccatgtgtaatatgtgtctaatgaaacctttagcagtaactttcatatttacatatatgcaaattctcacctcacttttatagtttagatataccatgtactattytgaagagcctaaaagctatacaaagtcaggtgagttagtgctgatcagcctctagtgtaacaatactgaaattatagagaatttataggtaaataatgcaatcatgacgaagataccaacttctcagccatttccttgcaatggctctt

SEQ ID NO: 528670 - DNA, 612 bp, Homo sapiens
tacttccataaagcccacactacagcatacgtaacatttccttagccaaaaacatcccactgcacctccaaatcagcagagctgtagcagaatgaaagccccttcacccaaaatccactccaacacacatccacacacaccctattaatttccagtctgctgtaaagatataagcaatattataaaacataaagtttagagcactaattttacttagactatcagaaacctacaatgagggtagttcacaggattacagaaccctaaaatgtattaaataatgattaaggaactgtgaaaagtcaatagttctgagccaagaatgcctacaggagataactggacagttgcttcaaaacaccgtagtacagatatttcagctaatatacactgatgaaaagcctcatattctgtaatagtatgcactgaatctgagaggccttctgggaaaataagattatggctataccctaaaacctgtacagttctgtaaggaaagcaccaataaaagcaataacaattctaatagacttaatagagttaaagctccagtatccyttgcatctggcatacaatcaatctttggcagctttaagccctagagtttatgat

SEQ ID NO: 528671 - DNA, 169 bp, Homo sapiens
acactgttgtcaggagttaagaactggccctactcttttgcargacaatctggaaatacccactgaaccttaaaaatcaacctggtctgtaattaattatactaaaagaaatctaccttaaggaaacaagtaagaatgcatacagaaaaaacaagctaaataatgtacg

SEQ ID NO: 528672 - DNA, 659 bp, Homo sapiens
gacttttacaaagggcaagcctgaaagcaaacttgtcgatgttgaatgagatttcctcagtaccaagcagtctgcatgtggtgtagctgtttatgaattgcctgggaacaggaactgccccagaacctggggtatccctgggacttgtggggaaaaaggggctatgaggatatcagtgctacaggtcgcttagtgtcacatggtccctatttccagggacccagtgttgaggattctcagtgagcatgtgtttcaggcaagtcagagcgagcgtctggagccactttgcgacaatccacttattgctccttctacaatccagcactgttctcatrttgtttggtaaattttgttttttaatatctcagctggagaatgtgtgttttgtggaagaaatgaccaactagtagaatgccttccatttgtaataaaatccttgctgggtttgagttaataggcctccaaggaagagcaagttaaaatagaactggacagagtgctaaataaaatactgtccagcataatctactgccctcaagggagagagccaaatgactcaatacgggttttccatcttcaatttcaatagcccgatgtcaggatcaagcagcagaacatgctgactacctcagtatgctccctgcattcaaagtttcttt

SEQ ID NO: 528673 - DNA, 659 bp, Homo sapiens
gacttttacaaagggcaagcctgaaagcaaacttgtcgatgttgaatgagatttcctcagtaccaagcagtctgcatgtggtgtagctgtttatgaattgcctgggaacaggaactgccccagaacctggggtatccctgggacttgtggggaaaaaggggctatgaggatatcagtgctacaggtcgcttagtgtcacatggtccctatttccagggacccagtgttgaggattctcagtgagcatgtgtttcaggcaagtcagagcgagcgtctggagccactttgcgacaatccacttattgctccttctacaatccagcactgttctcatgttgtttggtaaattttgttttttaatatctcagctggagaatgtgtgttttgtggaagaaatgaccaactagtagaatgccttccatttgtaataaaatccttgctgrgtttgagttaataggcctccaaggaagagcaagttaaaatagaactggacagagtgctaaataaaatactgtccagcataatctactgccctcaagggagagagccaaatgactcaatacgggttttccatcttcaatttcaatagcccgatgtcaggatcaagcagcagaacatgctgactacctcagtatgctccctgcattcaaagtttcttt

SEQ ID NO: 528674 - DNA, 569 bp, Homo sapiens
accctcttctctctcacaccattgcaccacccagtctaactcatgaaccatttcctcaagtactgtaatgacttcttaactgtttctgtttttgcccacttataatcccttttccacagaggaaacacaataatctattttaggtataaataaaagcaagtcattctttggttaagccttccagtagcttcccattcctcttggataaaaytcaaactccttactatgttccacaaagccctgtattatctggctcttgtttatctttctatttttatctcctgccacactctgcctggcttaccgcatctgcgtcacattgaccttctgtgagtatttcaaatgctcttcattcctcaccacaatccaagctcctctccttgcctgttcctcaccacactccaagctcctctccttgcctgttcctcaccacactccaagctcctctccttgcctgttcctcaccacactccaagcttctctccttgcctgttcctcaccacactccaagcttctctccttgcctgttcctcaccacactccaagcttctctccttgcctgttcctca

SEQ ID NO: 528675 - DNA, 542 bp, Homo sapiens
caccctcttctctctcacaccattgcaccacccagtctaactcatgaaccatttcctcaagtactgtaatgacttcttaactgtttctgtttttgcccacttataatcccttttccacagaggaaacacaataatctattttaggtataaataaaagcaagtcattctttggttaagccttccagtagcttcccattcctcttggataaaattcaaactccttactatgttccacaaagccctgtattatctggctcttgtttatctttctatttttatctcctgccacactctgcctggcttaccgcatctgcgtcacattgaccttctgtgagtatttcaaatgctcttcattcctcaccacaatccaagctcctctccttgcctgttcctcaccacactccaagctyctctccttgcctgttcctcaccacactccaagctcctctccttgcctgttcctcaccacactccaagcttctctccttgcctgttcctcaccacactccaagcttctctccttgcctgttcctcaccacact

SEQ ID NO: 528676 - DNA, 666 bp, Homo sapiens
acccaagagcttccaggctggacaagttgagactcagttcttgcagttcccaaattcacagttctcttgggacatggttatttatcgagctcctgaagatgagaaatyccacccaggaaattctgtttataaaagattattcacatctaattacctcaggagacattaacacagcaatgttgaaaattttccattaattgttaatccacggagaaaaactgaacgattattttttaaaatatgaaaagcttcatataatacaaattaaactcccacatgtgattcaatttctagtcattaatgccagagaagttaataattacgaattgccagtgttaaaaaaaataaatcattcatcattggagaagtgcagaaggtttaaaagagataagaattagtttttggctttgaggcgttttatgctttccagaaggttttgctcttttttttatttttgctcatggctttctctctctctctctctttctttctgatttcagtttcttttgatttctcctgcttagaaatggtagagaactttggatgtggaacgtggagtatgaggaacacgaagtgaaggtccgcacttcgggtggtcagcactgccatgcccagcaaaggcactgcctggtccacatcccagaggggtctctgagccccagtcgg

SEQ ID NO: 528677 - DNA, 666 bp, Homo sapiens
acccaagagcttccaggctggacaagttgagactcagttcttgcagttcccaaattcacagttctcttgggacatggttatttatcgagctcctgaagatgagaaatcccacccaggaaattctgtttataaaagattattcacatctaattayctcaggagacattaacacagcaatgttgaaaattttccattaattgttaatccacggagaaaaactgaacgattattttttaaaatatgaaaagcttcatataatacaaattaaactcccacatgtgattcaatttctagtcattaatgccagagaagttaataattacgaattgccagtgttaaaaaaaataaatcattcatcattggagaagtgcagaaggtttaaaagagataagaattagtttttggctttgaggcgttttatgctttccagaaggttttgctcttttttttatttttgctcatggctttctctctctctctctctttctttctgatttcagtttcttttgatttctcctgcttagaaatggtagagaactttggatgtggaacgtggagtatgaggaacacgaagtgaaggtccgcacttcgggtggtcagcactgccatgcccagcaaaggcactgcctggtccacatcccagaggggtctctgagccccagtcgg

SEQ ID NO: 528678 - DNA, 666 bp, Homo sapiens
acccaagagcttccaggctggacaagttgagactcagttcttgcagttcccaaattcacagttctcttgggacatggttatttatcgagctcctgaagatgagaaatcccacccaggaaattctgtttataaaagattattcacatctaattacctcaggagacattaacacagcaatgttgaaaattttccattaattgttaatccacggagaaaaactgaacgattattttttaaaatatgaaaagcttcatataatacaaattaaactcccacatgtgattcaatttctagtcattaatgmcagagaagttaataattacgaattgccagtgttaaaaaaaataaatcattcatcattggagaagtgcagaaggtttaaaagagataagaattagtttttggctttgaggcgttttatgctttccagaaggttttgctcttttttttatttttgctcatggctttctctctctctctctctttctttctgatttcagtttcttttgatttctcctgcttagaaatggtagagaactttggatgtggaacgtggagtatgaggaacacgaagtgaaggtccgcacttcgggtggtcagcactgccatgcccagcaaaggcactgcctggtccacatcccagaggggtctctgagccccagtcgg

SEQ ID NO: 528679 - DNA, 666 bp, Homo sapiens
acccaagagcttccaggctggacaagttgagactcagttcttgcagttcccaaattcacagttctcttgggacatggttatttatcgagctcctgaagatgagaaatcccacccaggaaattctgtttataaaagattattcacatctaattacctcaggagacattaacacagcaatgttgaaaattttccattaattgttaatccacggagaaaaactgaacgattattttttaaaatatgaaaagcttcatataatacaaattaaactcccacatgtgattcaatttctagtcattaatgccagagaagttaataattacgaattgccagtgttaaaaaaaataaatcattcatcattggagaagtgcagaaggtttaaaagakataagaattagtttttggctttgaggcgttttatgctttccagaaggttttgctcttttttttatttttgctcatggctttctctctctctctctctttctttctgatttcagtttcttttgatttctcctgcttagaaatggtagagaactttggatgtggaacgtggagtatgaggaacacgaagtgaaggtccgcacttcgggtggtcagcactgccatgcccagcaaaggcactgcctggtccacatcccagaggggtctctgagccccagtcgg

SEQ ID NO: 528680 - DNA, 497 bp, Homo sapiens
cacagcaatgttgaaaattttccattaattgttaatccacggagaaaaactgaacgattattttttaaaatatgaaaagcttcatataatacaaattaaactcccacatgtgattcaatttctagtcattaatgccagagaagttaataattacgaattgccagtgttaaaaaaaataaatcattcatcattggagaagtgcagaaggtttaaaagagataagaattagtttttggctttgaggcgttttatgctttccagaaggttttgctcttttttttatttttgctcatggctttctctctctctctctctttctttctgatttcagtttcttttgatttctcctgcttagaaatggtagagaactttggatgtggaacgtggagtatgaggaacacgaagtgaaggtccgcacttcgggtggtcagcactgccatgcccagcaaargcactgcctggtccacatcccagaggggtctctgagccccagtcgg

SEQ ID NO: 528681 - DNA, 449 bp, Homo sapiens
ttcaacagtgtgggatctaggctggaacaagactcctagtcttaagcaattctttctaggttcagtctctggaaataatgctttgtatcaaatgtgtgagaaaattaatgggttttaaagactattctatgtcaactataacatttcatttggggatttctgtcccttataatatctacctcattttggatggattccttgaagcctggtttatttttctcttcctttctacacatcgctgctcagagtgatgaatggagttgtattttgaataaaatagctaagcatccttttgtgagcaaggagcatgatggtacttagacctaccacttctcrttatggtggttacagttacagtggggctggggtgtttacctggagcctggacgtccactgggacttgatacccactgggatttttttgtgtcaacctggtctctgatgtccac

SEQ ID NO: 528682 - DNA, 629 bp, Homo sapiens
caaaaagaggccggtattatacaaggagctgcacaaatgattaagcataactgtgacagaacaagctgctgaaggacaccaacagaggctcaagttcatctgggccagggtcaggggtccagggaaggaytcctttggggaatctatatttgaaaatgaaagatgagtaggactttaacagaacaaaataggtatgcattagtccattttcactgataaagatgtacccgagactgggcaatttactaaagaaagaggcttattagacttatagctccacatggctggggaggtctcacaatcatagtggaaaatgaaaggcacgtctcacatggcagcagacaagagaagagagcttctgcagggaaactcccatttttaaaaccatcagatctcgtgagacttattcactatcacgagaacagcatgggaaagacccacccccatgattcagttatttcccaccgggtccctcccacaacatgtgggaattctgggagctacaagatgagatttgggtggggacacagagccaaaccatatcaaggtacaaagggcgttacagaaacataacaagtgcacctcctggtacagcaaggaggggcacggaaggagacactgcacagggg

SEQ ID NO: 528683 - DNA, 629 bp, Homo sapiens
caaaaagaggccggtattatacaaggagctgcacaaatgattaagcataactgtgacagaacaagctgctgaaggacaccaacagaggctcaagttcatctgggccagggtcaggggtccagggaaggattcctytggggaatctatatttgaaaatgaaagatgagtaggactttaacagaacaaaataggtatgcattagtccattttcactgataaagatgtacccgagactgggcaatttactaaagaaagaggcttattagacttatagctccacatggctggggaggtctcacaatcatagtggaaaatgaaaggcacgtctcacatggcagcagacaagagaagagagcttctgcagggaaactcccatttttaaaaccatcagatctcgtgagacttattcactatcacgagaacagcatgggaaagacccacccccatgattcagttatttcccaccgggtccctcccacaacatgtgggaattctgggagctacaagatgagatttgggtggggacacagagccaaaccatatcaaggtacaaagggcgttacagaaacataacaagtgcacctcctggtacagcaaggaggggcacggaaggagacactgcacagggg

SEQ ID NO: 528684 - DNA, 489 bp, Homo sapiens
gtgggtctaagacctcttccaagaagcttcattggattcatcaaattctcaaagagcaccatgaccctgaaaggattacgaacaactactgcatagaaaatattattacattaaaatgtagctttgggctgstcatggtggctcacatctgtaaccccagcactttgggaggccaaggcgggtggattacctgagttcaagaattcgaaagcagcctggccaacatggcgaaaccccatctctactacaaaatacaaaaattagcccaaatcaacagaatatacattcttctcagtgccacatgacacttattctaaaaccataaaaaccccggaagaaaacctaggcaatactattcaagacacaggtatgggcaaggacttcatgacaaaaaagccaaaagcaattgcaacgaaagccaaaattgacaaataggttctaattaaactaaagagcttctgcacagcaaaataaactatcataagagta

SEQ ID NO: 528685 - DNA, 621 bp, Homo sapiens
tgagatcaaattatgtttgtgaaaaatgaagctttactactagcaattatttttaagcaatgaaatgtagcagatattaacttatggttttcttcctgttaacactaagactgtattagatgaaatttatagttgtttaacaaaacaaaaactattatgtcagccttagaagcagtaattcatcaatttatgtagagcaaacaattcatgccagatgagtacagagaaataaatttcctactcactttgcaaccattattctttccaccacggaaagatggggtaatcygagactaaaaagagagagagagagagacagagagacagaaaaagagaaagaaagggtggtgtaataaaatagggccttatttagacactaaatataaccacaacctagagttcacttatccaataaccataagctcttgatgatttctgtcagtatatccagtatttcaataaccccaataaaataaattactgagatttaaaaccagtccgaaatgcccctttcaataaccactcctcatcaaaattcttatttctttagaatattttctgccggaagagaaagggagaagcaatatttcattaccattttagaatgattttgtaagcagg

SEQ ID NO: 528686 - DNA, 509 bp, Homo sapiens
aaagccattctttcgtaggctctccagccagcccagcctactcatttctgaattcyggaaacccctgccatttaggatataataaatcactaggaaaagttaggtgagttatttgcgtcactgattgtgaaattccacagtcttcccttcccctggggcagcccggccttgggtctgtcctcaccttttagctaaattcctcaagtttaagcagccaccacaggccgtccaccagggggcaggagagggccatgaccaaggacacagcagccctgtctgcagcagccctgtgcccccacaggcccttaatcggctaagcctcgtttccttatctacaaaggagtaacaggacccggctcctaacggggcagtgggaaccaatgcacgatccgtgtaacacagcgtgttgcatggtgtctggtgcacagtaagtgcctggtcccctctggcccatcactggttctgtccccagagacgcaacctgtcccctcggggggccaaactcaatg

SEQ ID NO: 528687 - DNA, 509 bp, Homo sapiens
aaagccattctttcgtaggctctccagccagcccagcctactcatttctgaattctggaaacccctgccatttaggatataataaatcactaggaaaagttaggtgagttatttgcgtcactgattgtgaaattccacagtcttcccttcccctggggcagcccggccttgggtcygtcctcaccttttagctaaattcctcaagtttaagcagccaccacaggccgtccaccagggggcaggagagggccatgaccaaggacacagcagccctgtctgcagcagccctgtgcccccacaggcccttaatcggctaagcctcgtttccttatctacaaaggagtaacaggacccggctcctaacggggcagtgggaaccaatgcacgatccgtgtaacacagcgtgttgcatggtgtctggtgcacagtaagtgcctggtcccctctggcccatcactggttctgtccccagagacgcaacctgtcccctcggggggccaaactcaatg

SEQ ID NO: 528688 - DNA, 593 bp, Homo sapiens
gcctttgtgtgtggcctccagctctgtgggattgagctggggaaggcccctgtttttcccattcctcacgggcaagtcccaattaaatcattcaagttggcaggacctttctcagcccagaccttccttttgccacatgcaggcacttctgccgttggcatgggccctgcctttgatcaacgccctgggcctgttctgtttcctaagagccttgggcaagagtcagaagtccagggtctacyccaggcgctcctggagcttgctgaggcctgagatgaactggggaagtgctctgaggcttggcttgtcaccctctgccacagccttgtcatgatgctcggaagacaaagtgaagacactcctttgtggagtcctccttccaagcattgccaccacgcagggtctgtcactgcctgcattattctcaggaccgacttccatgagtcaacttgggtgctgcatggcaggtgaggtgcctgctgccaaatatccttggctctctttagtgctttgaagggagacagttgtccctgtcttcagcccacatctcctcccacatccctacagctcagaccccttgcccagcatccttc

SEQ ID NO: 528689 - DNA, 473 bp, Homo sapiens
acgtaaattgctgtgggagcagagggtaggagagattaatctacttgccatgggggtggagtgcaggcctcctaggggagagggcatccaagctgggccttgaaggactcctgtagtagtctccaagcagagaagtgaatgaagggaacagcaaggggaacagcatccacaaaggcccagaggcctggaagagcatggcatttctggaaggcttcaaggtggctggggtgggagtggggatggaggcagataggatacctcatctctcctccctctccaggggtgcccatttcaactgaagccaggactgcagcyccttgccaagacaacactttatagctcacgtggacttttcctctttccacaagggattgcctagccctggcttcccaaagtgctgggattacaggcatgagccaccatgcttggcctttactttattttattttattttattttttgagacagagtct

SEQ ID NO: 528690 - DNA, 405 bp, Homo sapiens
agtgactggggactctgccctgaagcaaggcagcctgaccccggtgtyactcctgtccccagaactggtagggaggttggccttcctcccctcctgctgcactgctgacccctgctggctaccctcgcacaccctccccacacaggcatttctccacaaggatctgctgcttgaatgctcccagcacagggggctcagcaccttgcacagcctgctccagtgagagacacttctgcctctctgaaaagttctttatcattagctgaagtctgaatattagttacttctatctgttattcttagttatactgtctgtagtcacatgttttcataataacaataacaacaacagatactgtctgtgtgccaggcgctgtccactatgtcatttaatccattcaacag

SEQ ID NO: 528691 - DNA, 607 bp, Homo sapiens
acagacaccatcctaaccaagatagttttacgccctgttcatcaggcccccagtaatattaatataatgcttagtattttattgactgaatagcatgtggcaggagctttatatgcattatcttaagtctttatgacaactccaacatgtagaaagtatccgcattttctcaggtgacaaattagggttgaggcataggtatgaagggagggggctgtggaaactgactgctttaacaggaatcccagagctacctataattgctatgggactgaccttggataagttttgaattttcaaaacttgaacatagccacttcagtagaatgacagaaccttacataaaagggatgatgagattaatatggcagatgggaggcaagactgtctggcagcttctactcagtcagatagagtagcatgtggagacccacaccttgaacttttgctccaagaactaccacagaaacatrgcaggaaagccgaaagaatccacagatccttgaaggaactatatcaccactgcaggctccctgagatgccaaaaactgtgagtctgcttggtttctcaatggggaggcttgtggtctggggcaagttctcagcc

SEQ ID NO: 528692 - DNA, 580 bp, Homo sapiens
accaagatagttttacgccctgttcatcaggcccccagtaatattaatataatgcttagtattttattgactgaatagcatgtggcaggagctttatatgcattatcttaagtctttatgacaactccaacatgtagaaagtatccgcattttctcaggtgacaaattagggttgaggcataggtatgaagggagggggctgtggaaactgactgctttaacaggaatcccagagctacctataattgctatgggactgaccttggataagttttgaattttcaaaacttgaacatagccacttcagtagaatgacagaaccttacataaaagggatgatgagattaatatggcagatgggaggcaagactgtctggcagcttctactcagtcagatagagtagcatgtggagacccacaccttgaacttttgctccaagaactaccacagaaacatagcaggaaagccgaaagaatccacasatccttgaaggaactatatcaccactgcaggctccctgagatgccaaaaactgtgagtctgcttggtttctcaatggggaggcttgtggtctggggc

SEQ ID NO: 528693 - DNA, 314 bp, Homo sapiens
attatcttaaaaccaatggtagcaaattaaaaattcataagatatttaaataatatttctgccaacacatggcagaatagttctgatctagcatttggtgaccattatagttgtaccatgtattttgccaggtacatagaaagacttttatgaatayttcttgaatgaatgagtgttcaggccctagataatgtttgttaaaagaagcctggcatacatactttcagattaccctgatgcaatagtctgttcaagtcagaagtcatctttgacatgtaatctcattttagtagccctcccttcttattccatca

SEQ ID NO: 528694 - DNA, 660 bp, Homo sapiens
ttattaaaatttagtttatatgtttcttcttgtttattttcaatgtggctactagaaaactttacagtatatgtgtaccttacatctgtggctctcattctatttcttttgaatatttgtggtctaagagaatgtatgggctgcccatgattgtatgatcctctataaaagcctatttctgaacaatggtgagttcaaatgatgctcccygacacatttctctgatgagtacttctacgtgcagggtgagggaaagagccaggtgttttagcagtctgctaaaatgagagtagcattaatgtgctcttgggaaaagcaagaagcctggttagtttatgaactaaataaaaggctataccaccttgataagagtgagatcaaagaaggaacatgaattaatctgcatgaagtggagtataggtgtgtgtgtccttggatgtctgcatgtgtgtatgtgtgaatgtccctatgtgtgtctttctacatagctccatgagtgtacgtgcatatgcacacctgtgtgtgttcttacatgtatgcctgtgtgccagtacatacccatgtgtgtgtatgcgcatacatgtgtgccagggtgagtatatacataaatgcttgtgtatatgcacccatgtgtattcctatgtatatgcgcatcatgtg

SEQ ID NO: 528695 - DNA, 467 bp, Homo sapiens
ctacttgattgaaagctcccagaggacaaggtcgtcgtctaattcagcttcttatttacccaggaaatgagaggatgcaaggtgaggactccatatttatttaataaatacataaatggatagataactttgatagactacatggtatgaattcatttttgaatgtagtaaacaacaatataatcagctaagatctaaagttatatggagaaaatcatctaatttcagtcacctgaatttgtgaccagaggtcacaaattctaaaatatacaagaaaccagaacatgrgcatttagtattttaacatgctcatttaaaaggaactcagaaattatttgatagagatgccagatattgccagttgtcatactacattgagaagaatgttcagaccaaatctgtgctcagcaacaaagaatagtaaaatgttgatgagtagaggcatacctttgaaatatccaatcaga

SEQ ID NO: 528696 - DNA, 654 bp, Homo sapiens
tctctagttctccgtgcctctcccaggtcctgggaccatcctgccaagctacttttccagttactcccagaggaactttttttgtggccagctctggacaagtcatatccttgctttaaaaagtcacctctgcaaggccaagcacggyggctcacacctataatcgcagcactttgggaggctgaggcgggtggattatgaggtcaggagatcgagaccatcctggctaacacagtgaaaccccgtccctactaaaaatacaaaaaatgagccgggcgtggtggcgagtgcctgtagtcccagctactcgggaggctgaggcaggagaatggcatgaacctgaaaggtggagcttgcagtgagctgagatcgcgccactgtactccagcctgggcgacagagcgagactcagtatcaaaaaaaaaaaaaaaaaaaaaaaaaaaaaaaaaaaaaaaaaatcacctctgcaaatcttgatttcctcatttgaagaatgggattaggaatatccacccagcagtgccattgacctggttcatgagggcaagcatggccagtgagttggccaaacaagccctgggctgccaggggccccagagtagtgagccagtgtcttgaggtctgagacagcatcagtggctgtgcttcatgttc

SEQ ID NO: 528697 - DNA, 590 bp, Homo sapiens
gcgtcactgtgcactgatggggatcgccatacatgcagcggtatcttctctgtctgcccctccaaatctaccctcttccctgctctgtgccccaaggaggctgacgctgtgcagcacatcagccaggttccttgttgtctgggttcaaccagggggaggcttggccaggagatcagagggcagggagggatgggacaggttggctccttccccatggggctgtggctcgggtgctgtctctctcccacagccacaatttccactggacaatcctctccaaagccacagctcttaccagctcctgcaattgttcactcccctggacccttcaggcctagcactctccgctatggccagcccccaggtgcttcgctgtggctttggggtctcccttagccctgccctcacccttgtaaatggccccttgataaaattttcctcaccttgtttgtgctgattgttccctgctggggtcctggctgagacagcccgtgcatacatgtgggtaygtgtgcaagtgttcaaagtgcatcgcttgaatgggtctgcacacatatctgagtgtatttgtgcacacatctgcacgtgct

SEQ ID NO: 528698 - DNA, 545 bp, Homo sapiens
ccttcaccccatccttggttwcctgggctgtccagtaacgagcctgggacctctttcccatcagagtgagaggacccctttgtagcagggcagcctcagagacccccatccatgactcgcttccattctctgagcctcctcctgaatcactttactccttggggtccctctgcccagcccaggaggcaggaaccctcagagccacatgggcagggtggctgtttgctgccctgaggaccaggtcccggcagcctcccttaatgagcgtgccttcggtgacacattcattattcctgctcggtcacttcgagtcaaaactgattagttacacttaccaccgcaaagatgtaatgattttattgtttatcttcaatttattttgattaacatctccgttcttttcattgcaagtgcaattaggtgcaatctaacagcgactactttaattttgttgaaattaagatgaataagtgacggcttatggtgctttgtttaaccaataaatcatagttaagaggagtgtattagtaataaatgaaaaaaga

SEQ ID NO: 528699 - DNA, 545 bp, Homo sapiens
ccttcaccccatccttggtttcctgggctgtccagtaacgagcctgggacctctttcccatcagagtgagaggacccctttgtagcagggcagcctcagagacccccatccatgactcgcttccattctctgagcctcctcctgaatcactttactccttggggtccctctgcccagcccaggaggcaggaaccctcagagccacatgggcagggtggctgtttgctgccctgaggaccaggtcccggcagcctcccttaatgagcgtgccttcggtgacacattcattattcctgytcggtcacttcgagtcaaaactgattagttacacttaccaccgcaaagatgtaatgattttattgtttatcttcaatttattttgattaacatctccgttcttttcattgcaagtgcaattaggtgcaatctaacagcgactactttaattttgttgaaattaagatgaataagtgacggcttatggtgctttgtttaaccaataaatcatagttaagaggagtgtattagtaataaatgaaaaaaga

SEQ ID NO: 528700 - DNA, 629 bp, Homo sapiens
cgcccagggaggcggtttcagaattgttcagatcgctgcagggagaagaggaggaggaattgggcttctctctgcctgcaacaggccaagccacttatctattctaatgtcacagacacggggttcctcttcggaaacaactaaggctccactaatttttattgycgatagcggtgataagcagattttctgtgtagtgtgaccaaggcaatgagctgatttcgtaaagaaagagatagctatgcctgaactgatttactgctgactgacagcctctcgcatcaatataaaacactccctgctttgctgaatgaggcccacaagcctgggaaaggtgtgtgtgtgtgggtcctcattgaagatacagagcttttctgctctccctgtgactcagcctcaccccaccctttcttggagataaccctaaccctgcattcctgtgcagtggcaaggaatcacccttcctctgccttacaaacaggagacagaggttagagagaaggggaaagtgcaggaagcatatcccactgggggtttcctgggggcatgcatgctactctggagatggacttttgcatgttggtggctttgttcagtccctgccactctaaccagaattgggattgtga

SEQ ID NO: 528701 - DNA, 557 bp, Homo sapiens
ctgcttgggagtctgaggtgggaggatcacttgagcccaggaggtttaggctgtactgagccgagaccgtgccactgcactctagcccagataatagagtgacaccctgtctcaaaaaaacaaacaaaaaatccccacaaaacgacaaagagattccattttatacccctcagattcacacaagttggaaggtttgacactattaagttggtgaagatgctgggaaagctgaactactacattcgaagatactacaatttgacgatacctatraaagtcagaaatacgcacaccatgtgactagtagttctgctgctaagaatgaactctaaaaccctagcacattggtcaaggaagcattgtggacgttaaacttggaataactcacatgtctgtcggcagaggaattaaataaatctgttacctatttatttatttatttttatttttactttttttttgggatggagttttactctgtagcccaggctagggtgcagtggcgtcatctcagctcacagcaacctctgcctcccaggttcaagtgattctcctgc

SEQ ID NO: 528702 - DNA, 464 bp, Homo sapiens
ctgctattttgggggaggtaaatacctgtgactctcattttaacaacattcaaataatgtttgaattgttaaaaatagacatgcattaccttagtgagaaggaaaaaagtacagacttggggggaaaaactgatgctgattatttttgagactcttcagccatctggaatcaaggctgttcaaagagccagatcttccttcttgaagacaaagtttcttccaccaggggctagactctcaaacgggaaagaatcacagtaattagggaacggagggggttcttggaggccarcagtgaatggagtgtgaacttcaacgctgggaaggggtgggcctaatcccagctctgccattctctggctggtgatctgggtaggtccgtgggcctgttttctcacctgtaggagagacataatgatctctttctgataggagtgtttgctgattaaatgaactgcgacatt

SEQ ID NO: 528703 - DNA, 572 bp, Homo sapiens
tggagtagaaaccaattccagcatgggggaagcccccagagcagctgtatagggcaggcacatggtgctcctggatctgaaaggaagggaaaaggatggaacaattcagtgcacttctaagttatccaaaacaatgtgagtcatttaacaaatatttgtttcgctcctactgtatgcargacagaggttgtcagtgtgttcaagccaaagatcaaatacccatgcctcaaacctgggctcagatcccagctctgccactgattttctgcatggacgtgggcaaattgcttctcctttctgggccgaagtttctccattggtacaatatgggtgttagatttgaagattttgatcatgatgtcctgctctcatattctgcaattctgacttgctctgtgatcttgggccagcccctgcccctgtcttggcctcagtttcctcatctgtaaaatggaaggtaggaagagatttagcttgagatacatggagcctgtatcttggtcacccgagccttccctacacccagcccagggtcctgagctactctccccacccccagcacactctagctt

SEQ ID NO: 528704 - DNA, 622 bp, Homo sapiens
ctgtgaacagtatcagtggtatctatttttccccagtcattaatgtgtgkttattagtgcaggctatggtgaaattttgctggggacagatatacctatgtggactattttttttttttttttttttttttgcccccgtagttgcagtggtgaactaagcatgcctgttcttgggcttcagggtggcatatgctggaaccagtgttgtcatgaccaagcaggccaactcctgggcctccacgtagcttgctcaggttctagtagtggtagcagtaagctgagtggttaagcaatttctcaggtctctcagcaggtagcgtggtgtgggtgatggcagcagcagtgggaggacaaccgtctgggttctgagttatgcacactaatgttgacagtgactgctatttgtggtcaccactcacaaccccagacatgcagctattgagctcacccactctcagtggcagtagcactgtagtattgcatggaggagagggactattccctttgtgcatgaacccaagcatggaggccacactgccagtggtagccattaacaaccccaaacagacagcccttcagcctaaccaccctagctgctggtggcagcaacagcagcagcacc

SEQ ID NO: 528705 - DNA, 622 bp, Homo sapiens
ctgtgaacagtatcagtggtatctatttttccccagtcattaatgtgtgtttattagtgcaggctatggtgaaattttgctggggacagatatacctatgtggactattttttttttttttttttttttttgcccccgtagttgcagtggtgaactaagcatgcctgttcttgggctycagggtggcatatgctggaaccagtgttgtcatgaccaagcaggccaactcctgggcctccacgtagcttgctcaggttctagtagtggtagcagtaagctgagtggttaagcaatttctcaggtctctcagcaggtagcgtggtgtgggtgatggcagcagcagtgggaggacaaccgtctgggttctgagttatgcacactaatgttgacagtgactgctatttgtggtcaccactcacaaccccagacatgcagctattgagctcacccactctcagtggcagtagcactgtagtattgcatggaggagagggactattccctttgtgcatgaacccaagcatggaggccacactgccagtggtagccattaacaaccccaaacagacagcccttcagcctaaccaccctagctgctggtggcagcaacagcagcagcacc

SEQ ID NO: 528706 - DNA, 602 bp, Homo sapiens
gcttctactcagccatattggtgcttcttacagagtaatgtcttaaaaacaggattttctatttaagctacatcattaatgttatttaacatcctaattcctgatgtgctccttttttaatccttcatagtgacagttgtcataactatatctaacaattatttattctgcatttttattgatttgacatattcttcataattcatcatcttgagtagaagtctattttatctccatgtcaaataataatgacacatatctttaaaacaaaaatggatgttggaattcggaattctatacaacagattggatagtccttgttgctgagactttctgcctaatagtttttgcttaattgtatcaaccaaactcttaagttttaggtgtcacatagggcttagtcaccctgtactcataatggtaccttgaagagaggaatcagcartaataataataataataatacattgatataatgcttattatgtgtcatgaattaagtagtttatgcacattaaatcttttaattttcataaaccatcctatgaggcagatctgattgtcattacccacatttagtaaatgggctatggtggcaaagg

SEQ ID NO: 528707 - DNA, 580 bp, Homo sapiens
ttctgttgttaattatattggatcatttaagtatgaacctgyctttcattgccagtataatactcccttggtcatagtgtgttttcatttttatatactgaattagatttgctgatattgttaatgatttcacctgtgttcatgagggatgttgatatattgtatttctatttgaaagatctttgatcttggcataaaataattttgaccttacaaatgtgttggaaagtatgccctcttactctcattttgtgcagtattggttgtatttaattaaaagcatttcataaaattccctggtgaggccatctttagctgaaggctagtatgacagcctgtttggggagttatatgcacttgtgggttctgagctcttgtccggtgtccaggaaaaatgaagtgaatgaggaggattttattgaacaatgaaagtggctgttagcaggaagaagagctagaaaaggggatagaacaggcaggtaatcttcccctccagtccagccatctctggccggactcttctccgaagtcaagccattgatctgtccctctgaagtcacattgcttctctctgatgtcc

SEQ ID NO: 528708 - DNA, 625 bp, Homo sapiens
cagttttcacccctacgcttaatggcctgtgatcactttaccatgctgatgtgtcctatgaggcaataaactaattgaactcccttctaactcatttaactcttcgttagcctggatctgatgctaaacwaagaagctgaacagtttggtgtttgttcatttggagaggaaaagtgaagtccagaaaacatttcctgtttcagggatatctaagtggggtggcaagtatataaatagttaaaatcaggtgggctgagtgtcagtttccaagtattcatgagcaggtgtggaccagagaggaggggtctttgtgcacggtggagagtgaggagcatcttattagaggtggcttgagctgagtctcaaaggagcagtgggattatccaggcagaggaggtagagaaccatgctccaggcagaacggctagcatgagcagtcactgagacgactgaaggatcaggacttatttgagaacctcaagtagttaaggagcttgtggaggagtggggcagagcaagggtcagcaaacttgttttatgaagagtaagtattttatttaggctgtgtgaaccatatggctcatcacaaagactcttgctctgctgagtaggtagtgcaaaagca

SEQ ID NO: 528709 - DNA, 611 bp, Homo sapiens
gctgaactaaatcaatgaattttctgtgaacttcaagatttcctaaaaataatctttaagtatctgggggcctctgtggatgtggacagtgctcctgggtagttacaagttctcccatttgttcscagaagctcaggagcagatgtgctctttgagttagtaccaacagtttgattccagggtacccgtttagcttgtggcatttggcagggattctccagaatcagactggttttcagagtagtcaaactaactcaattcagaggtaatgacatgtttcaggtcttcagaactttggcagcacaactcaaaacaggaattaagagtaaaccgagcaacattaaagagtctaatagcagcacggtttagagttcatcagttcaaacctcacaatagcagttagggttctcttaacacttctggggttctggcaggagaaatccagtgtctagccaaactcaagatcaggtggtaagaaataagtccttgttggataattctgttactggcatcctttcttattttctagttttgattgttaagtagctctctaaatgttgtctttgtattgggtaaagagcttgagtctcaatgagtttgggttatatcta

SEQ ID NO: 528710 - DNA, 611 bp, Homo sapiens
gctgaactaaatcaatgaattttctgtgaacttcaagatttcctaaaaataatctttaagtatctgggggcctctgtggatgtggacagtgctcctgggtagttacaagttctcccatttgttcccagaagctcaggagcagatgtgctctttgagttagtaccaacagtttgattccagggtacccgtttagcttgtggcatttggcagggattctccagaatcagactggttttcagagtagtcaaactaactcaattcagaggtaatgacatgtttcaggtcttcagaactttggcagcacaactcaaaacaggaattaagagtaaacygagcaacattaaagagtctaatagcagcacggtttagagttcatcagttcaaacctcacaatagcagttagggttctcttaacacttctggggttctggcaggagaaatccagtgtctagccaaactcaagatcaggtggtaagaaataagtccttgttggataattctgttactggcatcctttcttattttctagttttgattgttaagtagctctctaaatgttgtctttgtattgggtaaagagcttgagtctcaatgagtttgggttatatcta

SEQ ID NO: 528711 - DNA, 641 bp, Homo sapiens
  misc_feature (1)...(641): n = A,T,C or G
nnnnnnnnnnnnnnnnttctagccacttgacttgcaatgtttatcagcaggtaacatggtaacactatgggatccctgggagtcctgtcccttaacagggctcatacagaccctgtgcgaggacccttacttctcctccctcacctacctcttaggcaagggctatgttaccagatcctgggagtcttatccttcctaatatggcctatgtaatcccttaataggaggaccctccttcaccttttgcccaccacataggcaaaagcatgtgcaaccagatgccaaggaatytatcttttcacttaaccaggactgtgcagctccatgttttctaaaaggacactataaatttactggcttcacattgacacaaaatttgtcaggctcacaagtaataataaggcaaagccaaggcctgactgatttgactagtaaaaattcaacaagctgcttttagatttaggcagtttagtacttacatagacagtgaaagaaagattagccaaaggtgccagatccctgtgatccttgtctcacacaccaaaaaggatgacaccaaaagggactaggagactacaacacaacttgtacagtactttgttactgaggagctaaatctagatagcagttaagtgattcta

SEQ ID NO: 528712 - DNA, 570 bp, Homo sapiens
tatttacggttgttgtactatggtctcactcactgtcctataaatttcttgaggatggagatcaaattttattcattaatgtatcattagtaactaacatcttcctatctatgtctggcatagggagatagaaaataaatattttatgggccagtggaatgatgaatggatggatggatggattagacgaatttgcttacaactttcagctttgtttcctcagggaaaataatggttatcatgtgtagsatatggcctttgctaaccattatgtattgtcctgactaccatgtttatatgttatagtaaaaacataggtttcaactccctccaaccaagaaaaaaaacaattaatccaagtgattaataaacaaccccaattgtgaaaaacacagtatatttctatctttctggtcaaccattttcatcagttattactatttctcttttatatcctccaaaagattatttttcaatttttttccaacaagagatatcaaataattctaggattttatttcaaaatatgttctaaagtatagtttttaaaaactcttttaaacaacgtaa

SEQ ID NO: 528713 - DNA, 646 bp, Homo sapiens
taagttgagggacatgcaggaatagattattgaagtaattcaagcatattaattaaaaataaaagaaaaccttttcagaaacaattactgaagaacttcataacatctatatccccaaccygaaccatgtgtttcaaattctttaatcaataacagtatatttttcattgtctgatttttgtaacaaacaggccaatatgttggaaaaatttgttttacattcctacaaaagcccaaagttatggctgtctcttcctgtattgccaccatcacctaacacatgtcttttcttcattctgtgggtcataataacagatttcactctttgagcacctactatgtgccagactgtgtcacacgcatttccaatacaataactttctgcaaaacagagtactagtctcattttatgaacaaaacgtagaaagtttatgtgaggaaaatttaacatggtaaaacaacatgaaagaagttgacccaggatataaaccaagtatttttaactaataagcccatgatcctcatagaaaacattctatattatgcattttattctttttccgtctttggtttatcttgtgtttatatctctattctattaactatatttttctgatgatttgattggcaaacttagtcaaaatga

SEQ ID NO: 528714 - DNA, 646 bp, Homo sapiens
taagttgagggacatgcaggaatagattattgaagtaattcaagcatattaattaaaaataaaagaaaaccttttcagaaacaattactgaagaacttcataacatctatatccccaacctgaaccatgtgtttcaaattctttaatcaataacagtatatttttcattgtctgatttttgtaacaaacaggccaatatgttggaaaaatttgttttacattcctacaaaagcccaaagttatggctgtctcttcctstattgccaccatcacctaacacatgtcttttcttcattctgtgggtcataataacagatttcactctttgagcacctactatgtgccagactgtgtcacacgcatttccaatacaataactttctgcaaaacagagtactagtctcattttatgaacaaaacgtagaaagtttatgtgaggaaaatttaacatggtaaaacaacatgaaagaagttgacccaggatataaaccaagtatttttaactaataagcccatgatcctcatagaaaacattctatattatgcattttattctttttccgtctttggtttatcttgtgtttatatctctattctattaactatatttttctgatgatttgattggcaaacttagtcaaaatga

SEQ ID NO: 528715 - DNA, 646 bp, Homo sapiens
taagttgagggacatgcaggaatagattattgaagtaattcaagcatattaattaaaaataaaagaaaaccttttcagaaacaattactgaagaacttcataacatctatatccccaacctgaaccatgtgtttcaaattctttaatcaataacagtatatttttcattgtctgatttttgtaacaaacaggccaatatgttggaaaaatttgttttacattcctacaaaagcccaaagttatggctgtctcttcctgtattgccaccatcacctaacacatgtcttttcttcattctgtgggtcataataacagatttcactctttgagcacctactatgtgccagactgtgtcacacgcatttccaatacaataactttctgcaaaacagagtactagtctcattttatgaacaaaacrtagaaagtttatgtgaggaaaatttaacatggtaaaacaacatgaaagaagttgacccaggatataaaccaagtatttttaactaataagcccatgatcctcatagaaaacattctatattatgcattttattctttttccgtctttggtttatcttgtgtttatatctctattctattaactatatttttctgatgatttgattggcaaacttagtcaaaatga

SEQ ID NO: 528716 - DNA, 476 bp, Homo sapiens
agactaaatgtgatggttaatttttctgtcaacttggatgggccacagtgctcagatgtttgatgaagcattatgctggctgtttctgtcaaggtgtttttttgtatgagattaacatttaaattagtagaattagagtaaagcagattgctctccataatgtgggagagcatcatccaatcagtggaaggcctgagtagagtgaaggctgacctctcctgagcaagaagcaatagtgcctgtagactgactttggactcracgtgcaactcttccctgggtctccagcctgttgaccgactctgcagattgtagacttactaagtctgcaatcatatgaaccaattccttaaataaatctctctctatgcacatcctattggttctgtttctcttgacaaccttgacttgacccacaaggcctttcacacctgctgttcccactctaggaatctcttctagctaactccttctca

SEQ ID NO: 528717 - DNA, 625 bp, Homo sapiens
gctgtaaataggctaacattagcccttatgaaggctgtgttaggttctggttgaagataagtarggtaaaggagaagtgtgcaaattagaactacctcctcttgtgaagcttatacatagttggctggtcaagttgtaaacacttgaaaataaagatgatgaggcaagactactgctatggctttaagtgtccccagaaatttaagtgttaaaaacttaattgctgttacaacagcattaagaggtggtacctttaagaggtgattaggctatgagggatcttctctcatgaagggattagtgcccttattgttacagtgagttagctaccctgaaaatgggctcctgattaacaaaaaagtttggccccattgctctctctgtttcacatgcttacttgccctcctgctatggaactgtgcagcaacaaggccctcaccagaggtcaatgccatgctcttagaattcccagcctctggaactgtaagacaaatgcacttctgttccttataaatatctcattctttggcattgtgttacagcagcagaaaacggactaagacaactgttgtcatattcccaccacccaatttatcaaccttacctccacagatacttaaatgca

SEQ ID NO: 528718 - DNA, 625 bp, Homo sapiens
gctgtaaataggctaacattagcccttatgaaggctgtgttaggttctggttgaagataagtagggtaaaggagaagtgtgcaaattagaactacctcctcttgtgaagcttatacatagttggctggtcaagttgtaaacacttgaaaataaagatgatgaggcaagactactgctatggctttaagtgtccccagaaatttaagtgttaaaaacttaattgctgttacaacagcattaagaggtggtacctttaagaggtgattaggctatgagggatcttctctcatgaagggattagtgcccttattgttacagtgagttagctaccctgaaaatgggctcctgattaamaaaaaagtttggccccattgctctctctgtttcacatgcttacttgccctcctgctatggaactgtgcagcaacaaggccctcaccagaggtcaatgccatgctcttagaattcccagcctctggaactgtaagacaaatgcacttctgttccttataaatatctcattctttggcattgtgttacagcagcagaaaacggactaagacaactgttgtcatattcccaccacccaatttatcaaccttacctccacagatacttaaatgca

SEQ ID NO: 528719 - DNA, 495 bp, Homo sapiens
ctagagaaatttccttcattagaccacaggcccttaaccccacatctgtaaaaattctaaagcatccattgctgcaaatatttgtagctattcattctacttccaatagcctttgatttcttccataacaatttaccacagacagtggtttaaaccacacacatttattaccttatggttctatggatcagaaatccaatctgagacttcctgggataaaatcccttctgcaagcagcagggctrcattcttttttgaaggttctagggaagaatctatgtctttgtctctcatagcttctagaggccactcatatttcttggctcatggtgccatttcatcatctttaaagccagcaatgaagcaagtgtctgatcctgtttctattattatttctttctctgcctctgtccttctgcctctctcctacattcaagggcctttgtgataacactgagccaactctgataatctagtataatctccttaccttaa

SEQ ID NO: 528720 - DNA, 592 bp, Homo sapiens
cctgtcctgctcctctccttcttgaggttcactctctgggtaggcactgccctgagcaaagccaaggtaagcrcaaaatctgagctgatcttctaccaccaagttcttatggaaacagactgcatcagtgtcatctgtacagcaaagacaacacatctaggaattaaaggggctaagtggcctccaatatttactttctgttaatatagctccattctccatggaattgagcttctctgccacccagtgtgctagaagagtggtctccagtctttctccctgagcttcccacacctcctcaccgtatcagggagagaggtatgctgctcttaggcaggcagcctatgtgttgtgaggcacttcctcctcagactcagaggtatttgctattgttttagtacagaagagaaaagagaattgaatttaaaatgaacaatctattaaaattaatttaggatttacaattaattctaacaaagacctatcaaaagtgggaaaaaagatatcctagtaaccttagactatcattaaaagcaaaaaaagagacaaagaaagtttatgatgaattatcttagtgaaacaaaaatcaagg

SEQ ID NO: 528721 - DNA, 592 bp, Homo sapiens
cctgtcctgctcctctccttcttgaggttcactctctgggtaggcactgccctgagcaaagccaaggtaagcgcaaaatctgagctgatcttctaccaccaagttcttatggaaacagactgcatcagtgtcatctgtacagcaaagacaacacatctaggaattaaaggggctaagtggcctccaatatttactttctgttaatatagctccattctccatggaattgagcttctctgccacccagtgtgctagaagagtggtctccagtctttctccctgagcttcccacacctcctcaccrtatcagggagagaggtatgctgctcttaggcaggcagcctatgtgttgtgaggcacttcctcctcagactcagaggtatttgctattgttttagtacagaagagaaaagagaattgaatttaaaatgaacaatctattaaaattaatttaggatttacaattaattctaacaaagacctatcaaaagtgggaaaaaagatatcctagtaaccttagactatcattaaaagcaaaaaaagagacaaagaaagtttatgatgaattatcttagtgaaacaaaaatcaagg

SEQ ID NO: 528722 - DNA, 560 bp, Homo sapiens
ctgtgaattttcgttcagatgacagatgacactttgaagagtctgcttacttgtgaagagtataacagaaaagcattattagtaaaagtgggcttttagcaattcagaaatagttactacttcccagttacattgttttaggagacaattgtgaaattaaattataaatatgtggtgttaactatggtagctatttatcaagggagaccttcctgggagaaagcagtaacttaaagctgttgagttcattataacttccatcacattgtttatgtaatcttttctcagtggtttagcgttttcttgttttttggtagttgggaaggtaactttcacttcactttgactttcacagtaactttgttgctttttataagaatgcataggcaatggggttgttgtggtaccctttaatcagactagaccatcaactaaatttactattttaagaaatgcttttataagyaatagattttgatctactaaatttttcaataagaagttgacatgtactcttagtaataacatatttgagtactttttcttatgtaaggaatgaa

SEQ ID NO: 528723 - DNA, 596 bp, Homo sapiens
taaaaggatcagtggtttccaggaggtggggttgagggggatgaataggtagagcccagaggactttgagggtggtgtaactactccatatgagaggataatggtgagtacatgtcatacatttgtcttaatgtgcattaagagtgaaccctaatgtaaactatagactttgggtgataagtgtccatgtaggttgatcaattgtgacaaatgtaccgctctggtgtgagatactgatagagggggaggctggggagagatgagtggcatatggggtgtatgggaattctctgtgttttctgcttaattttgctgtgagcctaaaactactctaaagacgtcttttaaataactgcacacataataaaagtaaatagcaacgatattcaagattcaacgttttagttaagagactttatttgcaataacaggttagcttctgttttagttctcccagaacaaaattccataagtcaatattttactaatcctttctcacaatgttaatagaaaaccctgagtggaaatcagaattcaatcgtcaagtctgtgcaagtkgaaaccctgaattgcagggtagcttaagtgctttacac

SEQ ID NO: 528724 - DNA, 553 bp, Homo sapiens
aaaaggtggtctggattttgaatccactgtctttagcctttttcaagtaaaaaaaagtccttcaaaaatccagtgaaagctatatcccatctcccagaaaaacacaaaaayctgaatataatttcagtgtattcacagattccctaaacttatccatgtacccaagatcaagaatcacaagtttacacggatgacattccattgagcagaatctttaagcagtcattgtttgaaagccaccaaccacccaaaaaactaagttaatgagattttatgaaatatttctttttcttcagtaggaataaaatctgaggaagaagacaagtcagaagaatacaactcattggtaccagattgtacattacctgtatcctttccttgagtgccttaggatagaagtcatagccattttttatgccaatatgatatttgcctgagggatttgtccagcttgcaggaatctacagaaaaaaaaagagtaacctgttcattcactaaatgctttccaattccaatgatacactactgagcaaaaaagtatattacttctact

SEQ ID NO: 528725 - DNA, 553 bp, Homo sapiens
aaaaggtggtctggattttgaatccactgtctttagcctttttcaagtaaaaaaaagtccttcaaaaatccagtgaaagctatatcccatctcccagaaaaacacaaaaatctgaatataatttcagtrtattcacagattccctaaacttatccatgtacccaagatcaagaatcacaagtttacacggatgacattccattgagcagaatctttaagcagtcattgtttgaaagccaccaaccacccaaaaaactaagttaatgagattttatgaaatatttctttttcttcagtaggaataaaatctgaggaagaagacaagtcagaagaatacaactcattggtaccagattgtacattacctgtatcctttccttgagtgccttaggatagaagtcatagccattttttatgccaatatgatatttgcctgagggatttgtccagcttgcaggaatctacagaaaaaaaaagagtaacctgttcattcactaaatgctttccaattccaatgatacactactgagcaaaaaagtatattacttctact

SEQ ID NO: 528726 - DNA, 582 bp, Homo sapiens
atgaaaagcattattactttgtaataaagccccaaatgagttgatagctgtcattgttctaagtctttaagttattaatacaacgacaactatataactccagttaccgggagggaattcagtacctgatcctcttctgattcacaaaagrtgtgctgtactccagagtggtgctgaagaacacacaccaggaatcaagattcccaggggtttctaagcagattcggccagactccccctcgttacttccaaaatgctacctcaataatcagaaagcacgataaaggatccagaagggaagggacattgtggggaggaggatgagtgtttagtgtagaaaggaggataagatagccaggggctgatcaacgagagatcagcatacagtaggattagtcagggatgctgggagatggatcttgaataacggtgaaattttattactggatttcagtaaagggttaaaagtacaaaagttaaactttagagactttaaacagaatgcttttaacgagagacaacatactttcaaaaaaactaccttctggtatgataccttgaatctacagattttaaagttgc

SEQ ID NO: 528727 - DNA, 541 bp, Homo sapiens
catcgtaatttgtgttttaaacaaagatcctgggtgattcttgtcatcaggaagtttggagaacactgacctaaactgtatttatttgctgtacttagtgctggtatagcactacagtccggataattaaaactgggaagtttctctaagatatttttatgccatggagcagtgtgccagttgtcagcttcctgcctctcctcttcaaatgtaccttctctgctctgcttttgatactggagctggaccctgtaaacttgtctcccttcctagatggcacaaggttaagctttgagcatttttgacttgtgttttctctaatttaacccctcttattttcttaagaatcyattaggatgaggttcacctttgaaactgtctgttcaaggacctccacactgctaactctgaaagctgagcctcatgtttttatttgaccattgtccatagcatttgacacagttgagtgctgcttcttcctcgagagactgtctttggttttgagaacactgctctctcctcatgtctcatgtttcatggc

SEQ ID NO: 528728 - DNA, 634 bp, Homo sapiens
tgtaagttcaacatctcacgtcatctggccttttgaatgaaatgagtgagccaaccagtagctgagaaagctttaacrttttctttgtcctaaggaacataacataaatgtctttggctttcagcctcgaaacaatgctgtccacatgctttttaaatcagtggttatctcatcaatccatgttttccatagtgatatggtttggctctgtgtccccacccaaatctcatattgaattgtaatcccttcattacaattcatacaacccttttcctgcataatacttagcaggcattttttaaaatatatattgagggagtagaaaagatatcggccttaccctgggactggtcaatggcagcttctttttccacagggttagggaagactgaggaaataaaagttgtttggaaaaattgttgagggagggatctggtgggaggtaattgaatcataggggcagtttcttccatgcagttcttatgacagtagtgagttctcaagagatgtggtggtttaaaagtgtggcatttcctcctgccccacttcctgccaccatgtaagaggtaccttgcttcctcttagccttccaccatgattgtaagtttcctgaggcctccccagccacatggaa

SEQ ID NO: 528729 - DNA, 634 bp, Homo sapiens
tgtaagttcaacatctcacgtcatctggccttttgaatgaaatgagtgagccaaccagtagctgagaaagctttaacgttttctttgtcctaaggaacataacataaatgtctttggctttcagcctcgaaacaatgctgtccacatgctttttaaatcagtggttatctcatcratccatgttttccatagtgatatggtttggctctgtgtccccacccaaatctcatattgaattgtaatcccttcattacaattcatacaacccttttcctgcataatacttagcaggcattttttaaaatatatattgagggagtagaaaagatatcggccttaccctgggactggtcaatggcagcttctttttccacagggttagggaagactgaggaaataaaagttgtttggaaaaattgttgagggagggatctggtgggaggtaattgaatcataggggcagtttcttccatgcagttcttatgacagtagtgagttctcaagagatgtggtggtttaaaagtgtggcatttcctcctgccccacttcctgccaccatgtaagaggtaccttgcttcctcttagccttccaccatgattgtaagtttcctgaggcctccccagccacatggaa

SEQ ID NO: 528730 - DNA, 538 bp, Homo sapiens
caacgagactgcaaaatgagacggtagtgatggaacaaaaggactctagtgttgaccatgatgttatgtgaggaggtcatacagaggagccttcagagaggagctgcagaggacctttccaacctccacctctgggggctgacccaggagggtgtccctgagggtgagctcctggacctatagattgtagtggatagggcatgaaattcttcatccttgaccactggatccttctttaaccagtcttatcagaaggaaagacgcaattagaatttgggaaaggggtgagaaatggcattcaagagagcatgtctgtataattttgtatgtcagaactttctacaaccagacattttgaacttttaaaactatatatgtatataggtatgcatctgaatcaggcaggagctcaaggaagagggaggactcagataagtggccgaatagacccaggcaaggatgtaagwgtgcattcttgttctttataaattaattctgcccactttcctcccactcttggctctaccccacataagta

SEQ ID NO: 528731 - DNA, 629 bp, Homo sapiens
atctgccctggacagcaactctgacacacatcactcgagataaagtgcttccctgcagacatgaggaattaaccctatcctcttgcagtcagcccagttcataaatggagtaacagctaatgcattyttttcccccttcatctttagaatactaatgtgggaacaggtattcagagtttattagtgtaacacattttacaacaacaataacaatttctgtaagttcctactggtcagaaaagaaacatgattcatttgaaatgattcctatttatttatatttttatgtacttattcttaaccttgtccagaaaggatttgagctaacttactgaaacttttggtttaactcacaacccttaccactagataaggaagatttagttacccaagtaattctttcaaggtgtctgttttgcagagtctaaaactgggatgcaatctgctcagcctgtactttaaaacccttcaaagtctcctcatcctccatcaagtcttttaatgtgtcatacacactttgtgccttcacctcttcctgctgccaaagtttcatgtttgccctggcaatatatgacttggccagaaaaacatgtaattaaatataatattttcaaaattattttattgga

SEQ ID NO: 528732 - DNA, 599 bp, Homo sapiens
agtaaaattaagtaaaccttttattatcagcaggattaatacagacttccagggagatggtagctgaatattttgcccccttcctcccatttgtgcatcccaaagtcactaacaggctttggtggaaaatcacctccgctgttcccctgctggtgcgaccactgtgatgagacagagccttggacacccagtggtcagtttgctgtacctgcacacctctgtcttccaaaagtttatttcctcctgtgttcccaaatggctgctgtatctacaatataacatgctacattgtggtgagtagtgaagtcaatttaaatttccctaactgaattgtgaatcctttgggagccaagtctatttcactttctcattttcaagacccttgggacagtagcttgcgyattgtgaataaaagagggtagtggaactgcattactattgaccctgttttaagcatttgccaacagtattgttggggtatcatgagggagacatgagctcgtgaagcgagcttaaagaatttcccacaaaacctttgcaagcttagtaagctgactgtctcttttgggtgtggagctacattaacctagctcaagaaa

SEQ ID NO: 528733 - DNA, 520 bp, Homo sapiens
cctgcttcagcctcccaaagtgctgggattacaggcataagccactgcacctggcctcaatttcgaattttaatatccaaagatataactcacctatattaaaaagagattgtcttcctatacaatatatttacagaaatttgtatcacaagattcttttaatgattctgatgcatttctcataaattgagctttgtcagcataatttcttacctggaataatcactaatgataaaatatgttttgtagtgtcacagaattaactagagcctgattggttttaattatgtacatgcttgacatctaaaaagagagtgaggaaaaaaagagagagaraaagagaaattacaaaaacacaaagctcttgttaattcacatcttaatgtcttctttccagaccatacctggagttctaaacagccctcaatttgacacctactttctggggttacagacagttgcattccttaaaaccagtgacagtcacaatgaaagagaaaagattctcaggaggaagtag

SEQ ID NO: 528734 - DNA, 548 bp, Homo sapiens
cagagtgtgctttctgaataacaaatctgatcttgtcactcacacaattaaaatcctccagtggatcccagccacttacagcatgaaaattcaaactccagagcacagccacaaagactgtttttgatctggctgctaggtctttcatcagcaacccaggacaatccttcctgaacttctcacagtttggccccgcgtaaygctctcttgtgtttctccggctttgcacgtgcagtgttcatgcctggaacagcctttctcttttctaccccctaaacacctactcatccttctagatgtcgttcagtggcacctgttctgtgtagctcttcctatgctcatctgtgcatattctcagtagcaatcacatgcacatccatataataggttttacttcattgtattttaattctgtttatatatttgtttccccctcctttctgtgaattcatttgagcattgtctttgtattcccagcatctagcagagcgcctggcagtagagtagggactcagtgcatgtttgctgaatatgaatgaataccaagg

SEQ ID NO: 528735 - DNA, 548 bp, Homo sapiens
cagagtgtgctttctgaataacaaatctgatcttgtcactcacacaattaaaatcctccagtggatcccagccacttacagcatgaaaattcaaactccagagcacagccacaaagactgtttttgatctggctgctaggtctttcatcagcaacccaggacaatccttcctgaacttctcacagtttggccccgcgtaatgctctcttgtgtttctcyggctttgcacgtgcagtgttcatgcctggaacagcctttctcttttctaccccctaaacacctactcatccttctagatgtcgttcagtggcacctgttctgtgtagctcttcctatgctcatctgtgcatattctcagtagcaatcacatgcacatccatataataggttttacttcattgtattttaattctgtttatatatttgtttccccctcctttctgtgaattcatttgagcattgtctttgtattcccagcatctagcagagcgcctggcagtagagtagggactcagtgcatgtttgctgaatatgaatgaataccaagg

SEQ ID NO: 528736 - DNA, 343 bp, Homo sapiens
ttgactgccctagctaaaaaggtgatgcatccataacgctcccatctcctatccttctctcccccatcagtccccttcctgccaagtcccagtgctctcactttggttgccccaagtacttcgcttaagtgctccacgctccagaatcatctctactccctctcccctctcccatccacccaaatcctgcttcactcagttcaccccgtctctccaccttccctttacctgaccccagagaagcttggtttggcctttcggagtgtagggcctgccgttagtagaggattctttcctctagggtagactctgtgttctytggacacagtgaaattaaatacca

SEQ ID NO: 528737 - DNA, 534 bp, Homo sapiens
tgcatctacatgagataccaacttagagataagcaatccaaggcagtggacgcagtgtgaaagtgatgtatcaggcaaagctggtaacacaggcaaacagcttagaaggagcaaaggttactgggctgtggccctggtatgagaaggggcaacatcgcaaaccatcacatccagagctctaggggggcarcagcagtggtttccactgcaggccaggtctgcggtgggcatagggccttgttgcaggaagctattcacggcattccacctccccatccagcaagtagaagagtcactctacaaccttttaatccttttaatcaatctcttctgtgcttctgttgattacaactaaaagcctggcttatttgcaactctcctggcccctggagtagatgatacaccaactacattcatcctcataacaaaggaccagatgccatttatgttggcatggaggtctcctgtgggcctccgctgaaacttctattccatccctcactcatttcctccggggatgcccccctacccaca

SEQ ID NO: 528738 - DNA, 620 bp, Homo sapiens
gcaaatatggcaaaaccacttttattctattctagacgtgttgtaaatcccgctttccagaccccacctgataaatgggtcacagaactcttttcaagtatcataagtgctgcttctaaaatccagagtaacctttcatcacttgtgcttccttttgagtggcaggaggtatgacatgcaaaactctttctcatggtttacggtgtcaacataaacagcacacagacagaggggctcactaaaagaaaatgatatttatttgagattgagcattgcaatggtaacatggtgggcatatttagggaagtaaaggaagacaagcgtttttcaagtaaagattaaggaaatttacatagttttgagacaattatccttggcagaatcattatttgtataaatttgtggctatctttgtgcaagacaatagtttttgcagtcttttgtgatagatcttattatsaggcatatatgcataagaaccctttcttgagggccttccctagctccctttgtcagggtttgacacaagtgactgggttttgattctgacagttttcacaagggaatgtcctgacatgctccagatcagctgattcttaaaaccttcaccactgtggcaa

SEQ ID NO: 528739 - DNA, 504 bp, Homo sapiens
attttgggagggtagcattatccagatgcatgagcctacctacatggctctatatattgtatttatatttactataacttcataatccatagtatactgtgttcatagctttactctgtggcacttctattgttcttgcattagctattgctcaacgttcctgctcaagatcctatgtgtataagcagtcatgattttgttcagttctgaaaacttctcagccattaactctcagaatgctgtattcccttcattctctcaatctgaaattcctcttaaataaatattcagaagtgttcattttgaggctttctaaccctgcagtagattttcataaatatactacaataagccctgatcttaaaaaaacacaaaagtattttttgactctagggaatagtggatattttcagaattgctcatcctccctttagaacaytttaggccccttatgctttggagaggcttctggaactgttgtctttctaacttttattggattca

SEQ ID NO: 528740 - DNA, 551 bp, Homo sapiens
gatacattagatgctgggaatcctgagaactattgtagaatcctgcctaccacaacagagtrtagtttcatttattctttcactaatttcctgcaggaaaaagtgagatcatgctattgctctcagtgaaatttactattatttgaagataatgaatctggagtaaaaataaatatgatttacagtacactcacatacacccacaaatataaatcagtagtcatatgagtgaatgcttaagaaatatcaccatcaaaaatcaaaagggaaatgagggaagcagggaagaaggtggcagaaattaagcctacacccttcatgccccctaaggaacagcaaattttaacaactatctgcatacagaaaagtactgccacaagaaccacaagacaggtgagtaatcacagtacatggttttaatttcatattgccgaaagaggtattgaggagggcaggagaaacaggcttgaatctttgatgccaccccatccacatcccccagcatcagccgggcagtacagagagtctgtgtactggggaatggagaatgc

SEQ ID NO: 528741 - DNA, 551 bp, Homo sapiens
gatacattagatgctgggaatcctgagaactattgtagaatcctgcctaccacaacagagtgtagtttcatttattctttcactaatttcctgcaggaaaaagtgagatcatgctattgctctcagtgaaatttactattatttgaagataatgaatctggagtaaaaataaatatgatttacagtacactcacatacacccacaaatataaatcartagtcatatgagtgaatgcttaagaaatatcaccatcaaaaatcaaaagggaaatgagggaagcagggaagaaggtggcagaaattaagcctacacccttcatgccccctaaggaacagcaaattttaacaactatctgcatacagaaaagtactgccacaagaaccacaagacaggtgagtaatcacagtacatggttttaatttcatattgccgaaagaggtattgaggagggcaggagaaacaggcttgaatctttgatgccaccccatccacatcccccagcatcagccgggcagtacagagagtctgtgtactggggaatggagaatgc

SEQ ID NO: 528742 - DNA, 526 bp, Homo sapiens
gtactgaacagaattttataaktttaatgatttaaaaggtgtttatctcaaaaccatcatttcagtattgacttcataatctggatgttacctgaagctctcgctctttcggaaattctttgttcaggagcacttcccactgtcacccaatgaaacaataactccgtgccaatatatcctctcctgatcttcattacaagactagttctgcatttcaaactaccaagatttcttccacttaaaatgtaagatgcctaaaatagcaatttatccatttctggctctcaattccctgtttttccttaaatcacattcactttgcattcacagccacgttttctccttgttcttgactgagacacagaataagggtcctttctattatttttccccacattattcactcaaggtatatgtgtagcaagagatgtaccaaggaaagtttatgttgtaccaacaagatactcttaaaatatactagttctgtagaaaaccctgatcttggagtcaagtagaaaccctgcag

SEQ ID NO: 528743 - DNA, 526 bp, Homo sapiens
gtactgaacagaattttataattttaatgatttaaaaggtgtttatctcaaaaccatcatttcagtattgacttcataatctggatgttacctgaagctctcrctctttcggaaattctttgttcaggagcacttcccactgtcacccaatgaaacaataactccgtgccaatatatcctctcctgatcttcattacaagactagttctgcatttcaaactaccaagatttcttccacttaaaatgtaagatgcctaaaatagcaatttatccatttctggctctcaattccctgtttttccttaaatcacattcactttgcattcacagccacgttttctccttgttcttgactgagacacagaataagggtcctttctattatttttccccacattattcactcaaggtatatgtgtagcaagagatgtaccaaggaaagtttatgttgtaccaacaagatactcttaaaatatactagttctgtagaaaaccctgatcttggagtcaagtagaaaccctgcag

SEQ ID NO: 528744 - DNA, 407 bp, Homo sapiens
tgaaatagatgatgaaagagattaatctaccagctgggtgattgatcttgctagtaaagattataacatctgttttctaaaaaaattattggcataaataagtgaaaaatataatttgatttgatccctttttttgattttctgaaatccaggtgagattttccttgtcacttcaccctcracacttctcatggttgtttaagctgctgattcactgtcataagtcccttactcattacatgcctaaagtcgctgctgactaacaagccttatttagccttggagttaggtaagtaattacaatatgagttatactacagataaaaataattccacagtcactgcccatactctctgtttttcactgcatgttcacatttgtttaatgccttgtgaagtaacaagtt

SEQ ID NO: 528745 - DNA, 526 bp, Homo sapiens
gtactgaacagaattttataattttaatgatttaaaaggtgtttatctcaaaaccatcatttcagtattgacttcataatctggatgttacctgaagctctcgctctttcggaaattctttgttcaggagcacttcccactgtcacccaatgaaacaataactcygtgccaatatatcctctcctgatcttcattacaagactagttctgcatttcaaactaccaagatttcttccacttaaaatgtaagatgcctaaaatagcaatttatccatttctggctctcaattccctgtttttccttaaatcacattcactttgcattcacagccacgttttctccttgttcttgactgagacacagaataagggtcctttctattatttttccccacattattcactcaaggtatatgtgtagcaagagatgtaccaaggaaagtttatgttgtaccaacaagatactcttaaaatatactagttctgtagaaaaccctgatcttggagtcaagtagaaaccctgcag

SEQ ID NO: 528746 - DNA, 272 bp, Homo sapiens
gtgtgtgtgcgacgcttcccagaccggacctgtgcagaacccaggcccctctcctctacccctccctcccttcctccccagcccctccttccagcccatcccagaatctacccctccctccctccccagccccctccttccagcccatcccagcrtctacccctgccttcctccccagccccctccttccagcccatcccagaacacgtgcaggagccaccgcccacgtggcctgcaggatggttgccggatcctcttcaggggccctcacc

SEQ ID NO: 528747 - DNA, 515 bp, Homo sapiens
ggttttgcttttggagaagatggttccaggtccagttctcataaagctctgcagataaatttaaccacaaatccagtttttattacttgcaagaaggtagattttggtaacaaaccttgaggctaatttatctgattgcagcactgatgtgtgcagatacacttttctgattactttatgacccctccaatgaacacaagctaatcaactgcaaaagaggatgaagtctgggtaataattstcactgcttttttctaaacttatttacaatgcaatcacacaaggcaaagcatgaggcggcggccgtgctgggacagtggcgctgcagagtcccagcgggcgtggttttcgcaggtggttaagttgggccgtccgcggcacccagggggccacagggcctgacatcctggcttttgtgtctcaaatgcagtggcctcgtggtctatgcggacggacctctgaacttggaccgcaaggtggaagacatgtccgagctgttccggcccttccacacg

SEQ ID NO: 528748 - DNA, 654 bp, Homo sapiens
taaactcatactgttgtttgcaacataataaaggcagaaaatgcagttggttcatcaaagtcactccctttgtcataactttatatggagggrtattacactattggtgccaactttatagaaggacaggctgttgcttggatgtttgcatgtatatgtataatggtgcagcaagaattatgttaggactctcatgggtacattctatttagactatgagaagacaagagctcggattatagagctaaactgcatggctttgaattgttgttctcacagtagctttgtgaccttgaataaactacatagggaaactgaggctcacagttgatgtgaaaagtggaaaaaataacaagctgtgtaattcatagggtggttatgagaataaaatacttgcgaagtatttagaaaagttcctggcttacagaaagtgttcaataagtgttagctgctgtgtttgttattgttgattactgttgttatttttactgccagaaataatagtagtagtagttggaggaggaggaggaagaggaggaggaggaggattataggtgtgtcacagactgaaaatgagtggggaggcaatgtcctatagtgcaaaattttagctttagaggctgaaaggcctgggtttgattactgcttttatta

SEQ ID NO: 528749 - DNA, 667 bp, Homo sapiens
gccagtcatttttataaactcatactgttgtttgcaacataataaaggcagaaaatgcagttggttcatcaaagtcactccctttgtcataactttatatggagggatattacactattggtgccaactttatagaaggacaggctgttgcttggatgtttgcatgtatatgtataatggtgcagcaagaattatgttaggaytctcatgggtacattctatttagactatgagaagacaagagctcggattatagagctaaactgcatggctttgaattgttgttctcacagtagctttgtgaccttgaataaactacatagggaaactgaggctcacagttgatgtgaaaagtggaaaaaataacaagctgtgtaattcatagggtggttatgagaataaaatacttgcgaagtatttagaaaagttcctggcttacagaaagtgttcaataagtgttagctgctgtgtttgttattgttgattactgttgttatttttactgccagaaataatagtagtagtagttggaggaggaggaggaagaggaggaggaggaggattataggtgtgtcacagactgaaaatgagtggggaggcaatgtcctatagtgcaaaattttagctttagaggctgaaaggcctgggtttgattactgcttttatt

SEQ ID NO: 528750 - DNA, 622 bp, Homo sapiens
actcataatttgatagacatggcagcatcaataatttttgagtttgggcactacatagtcctcatgcaattgtttggctttcagcaagtcactttgagcaccagtttctttaaatgggtctaatggcaacattgctggttgagataatgtatgtgatatgtctcacttagtgtctgatacatggtagatgataactatcagtagcttwcattttctagtacttttaaggtttacattgcagtttgacaagtaaaattgtattaaattcttatagtgtccctataagcttatattttttactttttcataaaccaagttaactggggtccagatatgttaagtttcttaagttcaagattgccaatcaggtcctaaaacttgtatttattcatacagctattccaacatgtaaatataaatttgttcaaaagaaatgagtgataagatatgaaatgagatggctttaaggaatgccgtagcacaacagaaaatcgtcaaatattgatgcctatgtggagggaagacaaagccaatgaactatgtttgtattaggcactgagtgatccaagcctttttattgttcttgacttagtccaatgagcagcaccagtgcctgcagtaa

SEQ ID NO: 528751 - DNA, 582 bp, Homo sapiens
ctgcattcagctaaaaataattcctatgccaaatgtcatattttggcatggcatattctgatcttcattacaggccagcaggttggagactcaggcaggagttcattctggtgtgttgagacagaatttctccatcttcaggaaacctcagattttggctcttaaggccattctccagactggatgaggcctacccatattattgcaggcaagctcatttacttaaactcaaccgattatagaggttagccatatctatcatctacaaaatgcccaaattcatgtttgattaaatggcggsttactatagtctaaccaccgcactttccagtatttctccttcttcctacctaacctgcccccaccaacccgccgtagctcctttgaaatccctgccacctgctgggaacctccctctgtctctcctccttgctgtccacagtaacaaggagaaagatttaagctcctgactcctcactttcctctctatccctactcttgtcattattctgagatgggtcaaagtggtgccggtcaagggaccccagatgaagacttgtctggcccatagttagttgcctg

SEQ ID NO: 528752 - DNA, 641 bp, Homo sapiens
ctacgtgtaggtgctttcatcaaagtgccacctgtgcctccccgcagcagtgtcaggccaccagcttggacaggcagctccagcctccagtggaggcttcagaggacagcatcaaacagcatccacaaaggagacccaccttgtgaaaagcgcctagccaagccctgcccaaatccctggcctgtgcaattgtgagcaaagcaattcaatttggagtggttttatgctgcagtaggtgaccaaagcactatggaagtgaatatcaggagcccctcactgggatgtcagaagacattcaaggaaggtttcctggaagatttagtacctcaggtggtacaggagaaggygagatggagagaaagcaaccccagtctgaagacgcagtggtaagaaagggtcattcccctgggcatgtgtggtctgctgggggatgacagccgaggtgaacttgaagcagaggacactcagacaagctgcactctgaatcccgctacgctgaccgcagcacttgctgaagaagccgcctcgccacgcccaagccctgcagagggaaggactgaggaaggcagctcagaggcctcaggcagccacagtgtgcatgcttgtctatgactcacagctacgacgtggcctgtgctgct

SEQ ID NO: 528753 - DNA, 641 bp, Homo sapiens
ctacgtgtaggtgctttcatcaaagtgccacctgtgcctccccgcagcagtgtcaggccaccagcttggacaggcagctccagcctccagtggaggcttcagaggacagcatcaaacagcatccacaaaggagacccaccttgtgaaaagcgcctagccaagccctgcccaaatccctggcctgtgcaattgtgagcaaagcaattcaatttggagtggttttatgctgcagtaggtgaccaaagcactatggaagtgaatatcaggagcccctcactgggatgtcagaagacattcaaggaaggtttcctggaagatttagtacctcaggtggtacaggagaaggtgagatggagagaaagcaaccccagtctgaagacgcagtggtaagaaagggtcattcccctgggcatgtgtggtctgctgggggatgacagccgaggtgaacttgaagcagaggacactcagacaagctgcactctgaatcccgctacrctgaccgcagcacttgctgaagaagccgcctcgccacgcccaagccctgcagagggaaggactgaggaaggcagctcagaggcctcaggcagccacagtgtgcatgcttgtctatgactcacagctacgacgtggcctgtgctgct

SEQ ID NO: 528754 - DNA, 589 bp, Homo sapiens
ctgtgccaggcactatctgtcccaaaagcaatctattgagtctccaggtcccagaccggttaaggcaattccagtttgctctcagactttagggasaaatctgtttagttcctcccttccatccctgactattcttgcctagggcaatattcaggctttctagctggactggacagtagagatgtaggcggacacagaggtaaaaccttctcttttggaccttgatcagaatgaaagcaagataactgggaggcaggaattcataagatggttatttggagctagaccaagggttgtgaagcagcctggcaatattcctgctacatttttgggggcaaaagtgggccaaattacagttgcttcaacgaataggaagcgtaatatgaataggaataattctgtgccaggatattgggagaacacaattttgttgtaattataaaaggtttcatttccacagagattttgtgctttgcttccactctaatattctcttgttcctgatcttcttttcataatacgtatcgagcatcctcttcataacaggaactatatttcatgctgacaataaaaagtgatataacaaaat

SEQ ID NO: 528755 - DNA, 613 bp, Homo sapiens
aaatatgtaatagtaaatattttaaaaggatgcatttatttaaaaatatttaaactccacaaaaatgaaactcaaatattgaagacatgactaggttacaattatttctacagttcttctaagtcaataatgttttagtagaagtattccytgaagaaatattcataaactaattgaatttccaataaattaaataaaacataaatattttaaatttcacattcccatagaaatatgtggaaaataattaagaaaatcttacaaagaacaccaacttattgtttgaaaatcaaaaatttatttcattggaaaaataccatttttactgtgaagattaattttatttgtcaacgtgactgcaccatagtgcccagatatttggtcagacattatgctagatatttttgtgaaggtgatttttggaagagaataacatcaaaattggtaccctttgaaataaaacagatttccctctataatgtgggtaggcctcacctataagttgaaatccttaatagacaaagactgaccttccccatgcttgaaataattttgccagaagattagattgcacttggacttgaactgcaaatctgccctgagcctccagaca

SEQ ID NO: 528756 - DNA, 613 bp, Homo sapiens
aaatatgtaatagtaaatattttaaaaggatgcatttatttaaaaatatttaaactccacaaaaatgaaactcaaatattgaagacatgactaggttacaattatttctacagttcttctaagtcaataatgttttagtagaagtattccctgaagaaatattcataaactaattgaatttccaataaattaaataaaacataaatattttaaatttcacattcccatagaaatatgtggaaaataattaagaaaatcttacaaagaacaccaacttattgtttgaaaatcaaaaatttatttcattggaaaaataccatttttactgtgaagattaattttatttgtcaacgtgactgcaccatagtgcccagatatttggtcagacattatgctagatrtttttgtgaaggtgatttttggaagagaataacatcaaaattggtaccctttgaaataaaacagatttccctctataatgtgggtaggcctcacctataagttgaaatccttaatagacaaagactgaccttccccatgcttgaaataattttgccagaagattagattgcacttggacttgaactgcaaatctgccctgagcctccagaca

SEQ ID NO: 528757 - DNA, 559 bp, Homo sapiens
ttgggatgctgggataggaaaaggcagagggggaaaaatagaatcctagacagtggagcattgtttattttacaggagagacactccctctggtaccaggactgccttctrtttctagctcacacaaccatatcatcaagctctctgcagtgagagtattcttacaagggctttgaattcttctaatcttatcttcccctcaataaatcaattctttgtccaggtgtttctccatcccctggtggtgtttcatactacttgcttctgtgattatcaaccaaagttgggtttgctaatgcaatgtcctttgtcctacacaagctgctctctaaccagcctcagactttcagtatcatactctagtaaagcagacaggccctgtgttttctctagggattctggaggggtcacaaaaacatgcataaatcaaattattccaaagcagtcttaagaaaaacaatgattatttggttttttttcttctaactcagtatggacctcctatttttggaagctaggaaactaagctatttcttgtcttctcttttgtaagaaatat

SEQ ID NO: 528758 - DNA, 528 bp, Homo sapiens
ggagcattgtttattttacaggagagacactccctctggtaccaggactgccttctgtttctagctcacacaaccatatcatcaagctctctgcagtgagagtattcttacaagggctttgaattcttctaatcttatcttcccctcaataaatcaattctttgtccaggtgtttctccatcccctggtggtgtttcatactacttgcttctgtgattatcaaccaaagttgggtttgctaatgcaatgtcctttgtcctacacaagctgctctctarccagcctcagactttcagtatcatactctagtaaagcagacaggccctgtgttttctctagggattctggaggggtcacaaaaacatgcataaatcaaattattccaaagcagtcttaagaaaaacaatgattatttggttttttttcttctaactcagtatggacctcctatttttggaagctaggaaactaagctatttcttgtcttctcttttgtaagaaatatcagaataggaagtggaaaagcag

SEQ ID NO: 528759 - DNA, 597 bp, Homo sapiens
gcgcatcatcaaattagagcctgaataggctgcacaatcatcaactggtgctgagattccctttcacattagagacctcaaaatgaatttccaagtggctgagtgaaaggtatctttgatcccatctcacaagtgagacagctgaagtagagcaatacaaggtgaataatatgttggtgagagactttcagcttatatgataaagaatgagattttagaaaactaaagtctaattataaaattaaatagccaacaaaaatattagtaatggtagcaatggtcctggttctggggtctggttctyctcccagttaggcccagcctccaaggaaatgatgaggtgaacaattcttatatagagggattttccacacccccaactattctgtggtctgtttttctaattgcctacccagaatcacatccccttacaggctttctttcagctagctgccccagacagaaagcaagctgatgaatgtagtaaccattcattcatttgttcacccataagagcatttattgagttgtgtctaatcactgtactagactctcaaggttcaaaggataatacagcaatagcttgcccttaaaaac

SEQ ID NO: 528760 - DNA, 584 bp, Homo sapiens
tatttttccaaacgattctaagttgttaggcctaaagtacttattaagtgtttggacttaaacagaactgctaggtgtttcttttggccttgggtgaaattaaagtttccttgagttgagaaccctgagctggagggaaggtaataattccttaggcttcaggtgaaggatggaaaaactttacatggtttcccatttataagaaaaatgatgtcttctgactgtaatattaaccagcgatttggccataacttttatgttttcataataagatgctctcttgctttcctcaaagatcccctttgagggaaagagtatgaatgtcagggggtggtrgaggtagaactggctggagttcagagcacatatgctcagctatagtatttggggattggaagtgctctcaggaatgttctaatattaattattaaaattgtctcattttagagaggagggagcagacctacagagggaaagtaatttgtggaaggtcccaacaacagtgttcggtctaagcctagagcccccaccttcctatctgcttttcaagcatatccttatgtgccactgggggcatggcagct

SEQ ID NO: 528761 - DNA, 563 bp, Homo sapiens
atgagtgtctggccacatggagctgctttctggggaacaataaggttcagaccagtatttaggggactgagaaagcacaggcttcatgagtgtgatgaaatctcaccaaaagtgtccagaaatcggctaagatagggctcaaaacaggagattcctctccttttactgtgtcttgtattaagtacaggctttaataatttaattttttgtagaggaaaatctatagattatgtataagagaaacataattgggattacaacctttagtatttatttsgttttgaacattaagagacccataagtttatcagctatttacaacctttatttcatcacaatctatggcttgcaaaaaacaaaaaaaaaaaaaagaaaaaaaacttttgtaattttgtgtgtttattcaccttctcgcctagtatctcataaagattccatggtaggtcttgtcaccttggcggtgcataacaggttgtgtttgaacctagtaggggagtaaacaggctttattactttggtttaatttgaagtgttttaattgtgaagtcaaaaacttggatcaa

SEQ ID NO: 528762 - DNA, 563 bp, Homo sapiens
atgagtgtctggccacatggagctgctttctggggaacaataaggttcagaccagtatttaggggactgagaaagcacaggcttcatgagtgtgatgaaatctcaccaaaagtgtccagaaatcggctaagatagggctcaaaacaggagattcctctccttttactgtgtcttgtattaagtacaggctttaataatttaattttttgtagaggaaaatctatagattatgtataagagaaacataattgggattacaacctttagtatttatttggttttgaacattaagagrcccataagtttatcagctatttacaacctttatttcatcacaatctatggcttgcaaaaaacaaaaaaaaaaaaaagaaaaaaaacttttgtaattttgtgtgtttattcaccttctcgcctagtatctcataaagattccatggtaggtcttgtcaccttggcggtgcataacaggttgtgtttgaacctagtaggggagtaaacaggctttattactttggtttaatttgaagtgttttaattgtgaagtcaaaaacttggatcaa

SEQ ID NO: 528763 - DNA, 563 bp, Homo sapiens
atgagtgtctggccacatggagctgctttctggggaacaataaggttcagaccagtatttaggggactgagaaagcacaggcttcatgagtgtgatgaaatctcaccaaaagtgtccagaaatcggctaagatagggctcaaaacaggagattcctctccttttactgtgtcttgtattaagtacaggctttaataatttaattttttgtagaggaaaatctatagattatgtataagagaaacataattgggattacaacctttagtatttatttggttttgaacattaagagacccataagtttatcagctatttacaacctttatttcatcacaatctatggcttgcaaaaaacaaaaaaaaaaaaaagaaaaaaaacttttgtaattttgtgtgtttattcaccttctcgcctagtatctcataaagattccatggtaggtcttgtcaccttggcggtgcataacaggttgtgtttgaacctagtaggggagtaaacaggctttattactytggtttaatttgaagtgttttaattgtgaagtcaaaaacttggatcaa

SEQ ID NO: 528764 - DNA, 563 bp, Homo sapiens
atgagtgtctggccacatggagctgctttctggggaacaataaggttcagaccagtatttaggggactgagaaagcacaggcttcatgagtgtgatgaaatctcaccaaaagtgtccagaaatcggctaagatagggctcaaaacaggagattcctctccttttactgtgtcttgtattaagtacaggctttaataatttaattttttgtagaggaaaatctatagattatgtataagagaaacataattgggattacaacctttagtatttatttggttttgaacattaagagacccataagtttatcagctatttacaacctttatttcatcacaatctatggcttgcaaaaaacaaaaaaaaaaaaaagaaaaaaaacttttgtaattttgtgtgtttattcaccttctcgcctagtatctcataaagattccatggtaggtcttgtcaccttggcggtgcataacaggttgtgtttgaacctagtaggggagtaaacaggctttattactttggtttaatttgaagtrttttaattgtgaagtcaaaaacttggatcaa

SEQ ID NO: 528765 - DNA, 495 bp, Homo sapiens
gatcttttaaaatataaattggatcatgtctcttcccagcttcagtagcctttcattgtacttggagcaaracccaaacttatcaacatggctataacagccaggatgaactcacagaattctccccctttgtgtgggaagatgcagctacactggatttccagttctttctttagttcctgagaagtgtcagctgttccagaacgtttgcataggccgatgttttttcacagtactgcttcccccaacccctttcaccctcactccctttcactcaccactcctctcaccctagtgctttttctgacatgtgcacacacacacacctccatctaaatagacacacacttccatctgaatacacacctgcatttccatctaaatacgcacacacacccctctgtctaaatacacatacttccatcttaatatatacacacttctatctaaacatacatatacgcacatactctcttccaaatacacacacaccac

SEQ ID NO: 528766 - DNA, 495 bp, Homo sapiens
gatcttttaaaatataaattggatcatgtctcttcccagcttcagtagcctttcattgtacttggagcaaaacccaaacttatcaacatggctataacagccaggatgaactcacagaattctccccctttgtgtgggaagatgcagctacactggatttcyagttctttctttagttcctgagaagtgtcagctgttccagaacgtttgcataggccgatgttttttcacagtactgcttcccccaacccctttcaccctcactccctttcactcaccactcctctcaccctagtgctttttctgacatgtgcacacacacacacctccatctaaatagacacacacttccatctgaatacacacctgcatttccatctaaatacgcacacacacccctctgtctaaatacacatacttccatcttaatatatacacacttctatctaaacatacatatacgcacatactctcttccaaatacacacacaccac

SEQ ID NO: 528767 - DNA, 609 bp, Homo sapiens
  misc_feature (1)...(609): n = A,T,C or G
aattgctttcaaaataatccttatgccaaagtggcataaggagtggcacgtacattaattttcttcaaacaggtaaaaatcataaatctttagataaaacaggcattgacaaacttgtctgtaaaaacacaaatagtacatattttaagctttgtgggacataagatctctgttacaacttttcaaccttgctgttgtagcagcctagaaccagagaccatttataaatggatgagttgtggctgtattttaatcaaatttatttatgggcactgaaattcgacctagatctacttttcacgtgtcataaaatattaatgtaccttataatttttcaaccatttaaaagtgtaagaaacktctttagctcaataactttataaaaattggtaggggccagatttggcctgagaaatacagtctgnctactttgaattaaaatattgtgccagtgttgacacttctcttctacctcttatatgtattttattttatttaatttttattttggttaatttttgcctttttttgtttaatcatattactatagaatttctcacataaaaaactatatttatcctattattaaatggatatcacctaggggta

SEQ ID NO: 528768 - DNA, 609 bp, Homo sapiens
  misc_feature (1)...(609): n = A,T,C or G
aattgctttcaaaataatccttatgccaaagtggcataaggagtggcacgtacattaattttcttcaaacaggtaaaaatcataaatctttagataaaacaggcattgacaaacttgtctgtaaaaacacaaatagtacatattttaagctttgtgggacataagatctctgttacaacttttcaaccttgctgttgtagcagcctagaaccagagaccatttataaatggatgagttgtggctgtattttaatcaaatttatttatgggcactgaaattcgacctagatctacttttcacgtgtcataaaatattaatgtaccttataatttttcaaccatttaaaagtgtaagaaacttctttagctcaataactttataaaaattggtaggggccagatttggcctgagaaatacagtctgnctactttgaattaaaatattgtgccagtgttgacacttctcttctacctcttatatgtawtttattttatttaatttttattttggttaatttttgcctttttttgtttaatcatattactatagaatttctcacataaaaaactatatttatcctattattaaatggatatcacctaggggta

SEQ ID NO: 528769 - DNA, 613 bp, Homo sapiens
acaaaaatattttctttctttatatccttatttcattagcatttttctatctttgttaaattttttaacttttaaaacttttttgttaaaaattaagacacaaaaagacacatgagcctaggtcttcatagagccaagatcaggatcatcactatcaggtcagtcagatgccaccccgctatttccttcttcatttttatagatgcccagaccattcaggtctagaatttgttggcactttttctccatccacttgtagtttggagttcctgggtacatcttgttgcctaattttgttgtgaattgtcatgtgtattctttgttgttgcttactaggcaagaaaatgtatcttagaaatgtttcaatgagagaataattaaaagagtggtttgttgagccttcactacaatagccagcacaatgtctttttttgaacattctgacttaactgagatataggatcattggatttycatggttttttttgttgttgttctcactaactagttattctgtccatttttatgttggtattcagagagactggaatagtatgatgttcctaatgtgtccatcttctgagaatcttggaaatagcatttagaagccaaa

SEQ ID NO: 528770 - DNA, 454 bp, Homo sapiens
ccgcctggacactgctgggggcctgcacagagtttgctcctgccggcaaccaaaactgctcacactggctcctgcacccacccactcacctgtgtgttccctcccatgaggggtggagtgcagcaggtccgaatgagtggagtttgatcctgcaggcaccaaagcagttggccaattccagtgctcgtgcactccagttcccgcctcagtcgcttgcgcactccctcccacgagaagttcaaagtggtgagctgagtaaatgaggcacccctgtcgggagtcccatgcaggggtgggggaaatatcctgcttccgaggggtggggctcaattttgcaaccactaatacagytgtgaacatatcctctttcagctgagtgtgtgggtgggtgcagggactgggggacagagagcagcactaaaagaaagatacgtggtccttggctaggtaaact

SEQ ID NO: 528771 - DNA, 454 bp, Homo sapiens
ccgcctggacactgctgggggcctgcacagagtttgctcctgccggcaaccaaaactgctcacactggctcctgcacccacccactcacctgtgtgttccctcccatgaggggtggagtgcagcaggtccgaatgagtggagtttgatcctgcaggcaccaaagcagttggccaattccagtgctcgtgcactccagttcccgcctcagtcgcttgcgcactccctcccacgagaagttcaaagtggtgagctgagtaaatgaggcacccctgtcgggagtcccatgcaggggtgggggaaatatcctgcttccgaggggtggggctcaattttgcaaccactaatacagttgtgaacataycctctttcagctgagtgtgtgggtgggtgcagggactgggggacagagagcagcactaaaagaaagatacgtggtccttggctaggtaaact

SEQ ID NO: 528772 - DNA, 454 bp, Homo sapiens
ccgcctggacactgctgggggcctgcacagagtttgctcctgccggcaaccaaaactgctcacactggctcctgcacccacccactcacctgtgtgttccctcccatgaggggtggagtgcagcaggtccgaatgagtggagtttgatcctgcaggcaccaaagcagttggccaattccagtgctcgtgcactccagttcccgcctcagtcgcttgcgcactccctcccacgagaagttcaaagtggtgagctgagtaaatgaggcacccctgtcgggagtcccatgcaggggtgggggaaatatcctgcttccgaggggtggggctcaattttgcaaccactaatacagttgtgaacatatcctctttcagctgagtgygtgggtgggtgcagggactgggggacagagagcagcactaaaagaaagatacgtggtccttggctaggtaaact

SEQ ID NO: 528773 - DNA, 596 bp, Homo sapiens
agtgtgtgggtgggtgcagggactgggggacagagagcagcactaaaagaaagatacgtggtccttggctaggtaaactgaccaattttctaaaaagcccacagacaccaaaacctccttgatttatttagaagaacaaacatgtaaacacatacttgctcccttcatgtaaacttgctcttccttattgtcatccacatttcctaaggtgttcgcactgtggtagtgacagagaaaagtacatggcaaattggaacacaggctagtggaaaatcaggcttataatgagaaaatcacaacaaatttggataaactttgtaataaagttaaccacggggttctactgaggcctgaggagaactgaytgaaatagggaagttgaaacaaggtttccaaagcaaagattcttgagccttccttgagctaaacacacaacctaacagcaaagtaaaaaaacccagttgttgggtattaaataaattagttcagcattactttcaactggataagctttaatgaaaaccaaatgtttgggctttagtaaatccatggtaaccacagaattaacacaattcttattgtggagttgaggaatt

SEQ ID NO: 528774 - DNA, 580 bp, Homo sapiens
tgtaatccaatctttatattttgtatttttatttttgatttcaatttattcttaaatgcccattgtcgtataatgttattcaagagtgattttgagaaatatttctaaatttctaaacataatggagattctctatgtttatttatgttgttgatttttagtttagttgcattgtcatcagaaatatactcttgtttcaaacctttagaatttcctgaggctggttttatggtccagcatacagtcaattacaaaaaaaaaaaaaaaaaaaaatctatgtgtgctttgctttaatgtgttttctgtgtcagctatgtataatattctgcataggtcaattcaagcatatttctggctgsgtgcagtgactcacgcctgtaattccagcactttgggagaccaaggcaggcggatcacctgaggtcaggagttcaagatcagcctggccaacatggtgaaaccccatctctactaaaaatacaaaaattagtgggcatggtggtacatacctgtaatcccagctactcaggaggctgaggaaggagaatcacttggacctgagaggcagtggttgtagtga

SEQ ID NO: 528775 - DNA, 652 bp, Homo sapiens
gctgtataattttctcaaaacaaagagatttactttgtttaccttgattttaattctgagctcagcaaacacttcaggatctttgtaaaaactccaaaccacccctggagggagaaagggggtatctaaaacaccagaagcgtgctcctgctggggtcgggggagggagggaggtaaaagaaaacaagggaaggaaaaaattcttatcaccccatgggttccttccacatcccaaataattgaaaatggatgttttttcttcattcgaaaaaggcattttgtaaaaatgacacagaccctrtaagtgatgctcattacatcactgaaaaagatttaaaccagccagaaaggacaaaaaggaaaataaaattactccatatcacacctcccagctacttacacaagtgcgtttatttgtatggtcactgagctacgcctaagaagtgagcactctgctgtcatgctatactttaataaaaaatcgcaccacccagagaaagctcttgatgtcatcttccagagctcacatctgcctcttgcaaggtactaattcttcagcctagtcaataactatttactgagtgcctactctgtgccaggctcgcctggatcctggggatgaagggtggagctgtcttcacgggacagacat

SEQ ID NO: 528776 - DNA, 652 bp, Homo sapiens
gctgtataattttctcaaaacaaagagatttactttgtttaccttgattttaattctgagctcagcaaacacttcaggatctttgtaaaaactccaaaccacccctggagggagaaagggggtatctaaaacaccagaagcgtgctcctgctggggtcgggggagggagggaggtaaaagaaaacaagggaaggaaaaaattcttatcaccccatgggttccttccacatcccaaataattgaaaatggatgttttttcttcattcgaaaaaggcattttgtaaaaatgacacagaccctgtaagtgatgctcattacatcactgaaaaagatttaaaccagccagaaaggacaaaaaggaaaataaaattactccatatcacacctcccagctacttacacaagtgcgtttatttgtatggtcactgagctacgcctaagaagtgagcactctgctgtcatgctatactttaataaaaaatcgcaccacccagagaaagctcttgatgtcatcttccagagctcacatctgcctcttgcaaggtactaattcttcagcctagtcaataactatttaytgagtgcctactctgtgccaggctcgcctggatcctggggatgaagggtggagctgtcttcacgggacagacat

SEQ ID NO: 528777 - DNA, 514 bp, Homo sapiens
attacaggcacgtgccatcaggcccagctaatttttgtatttttagtacrgacagggttttgccatgttggccaggctggccttaagctcctgaactcaggtgatccacctgccttagcctcccaaagtgcttggattacaggcgtgagccaccacccccagacaaaagttactgttaaagttaaatgtgggtcacccacgtctgctttgaaagaacactgggatgaagactgcatcagagcggttaggagctcaggccccaggggcaggcaggcctgtctgacgagctgtgtgtcctcagacaagtcacttcacctctctgagcctcagtgtctttatctgtaaaggggaggtaaacaaattttctcctttgtaagcccaaatgtgaagcctttagcagggtaccctgaggagacacaaaatctctgggtaatggggcattcggtggcattgggagtaaaaaaggaaccaaatcaccccactgtgcccaagtaaactgtgacttcaggccagc

SEQ ID NO: 528778 - DNA, 514 bp, Homo sapiens
attacaggcacgtgccatcaggcccagctaatttttgtatttttagtacggacagggttttgccatgttggccaggctggccttaarctcctgaactcaggtgatccacctgccttagcctcccaaagtgcttggattacaggcgtgagccaccacccccagacaaaagttactgttaaagttaaatgtgggtcacccacgtctgctttgaaagaacactgggatgaagactgcatcagagcggttaggagctcaggccccaggggcaggcaggcctgtctgacgagctgtgtgtcctcagacaagtcacttcacctctctgagcctcagtgtctttatctgtaaaggggaggtaaacaaattttctcctttgtaagcccaaatgtgaagcctttagcagggtaccctgaggagacacaaaatctctgggtaatggggcattcggtggcattgggagtaaaaaaggaaccaaatcaccccactgtgcccaagtaaactgtgacttcaggccagc

SEQ ID NO: 528779 - DNA, 510 bp, Homo sapiens
ttacaggcacgtgccatcaggcccagctaatttttgtatttttagtacggacagggttttgccatgttggccaggctggccttaagctcctgaactcaggtgatccacctgccttagcctcccaaagtgcttggattacaggcgtgagccaccacccccagacaaaagttactgttaaagttaaatgtgggtcacccacgtctgctttgaaagaacactgggatgaagactgcatcagagcggttaggagctcaggccccaggggcaggcaggcctgtctgacgagctgtgtgtcctcagacaagtcayttcacctctctgagcctcagtgtctttatctgtaaaggggaggtaaacaaattttctcctttgtaagcccaaatgtgaagcctttagcagggtaccctgaggagacacaaaatctctgggtaatggggcattcggtggcattgggagtaaaaaaggaaccaaatcaccccactgtgcccaagtaaactgtgacttcaggcc

SEQ ID NO: 528780 - DNA, 510 bp, Homo sapiens
ttacaggcacgtgccatcaggcccagctaatttttgtatttttagtacggacagggttttgccatgttggccaggctggccttaagctcctgaactcaggtgatccacctgccttagcctcccaaagtgcttggattacaggcgtgagccaccacccccagacaaaagttactgttaaagttaaatgtgggtcacccacgtctgctttgaaagaacactgggatgaagactgcatcagagcggttaggagctcaggccccaggggcaggcaggcctgtctgacgagctgtgtgtcctcagacaagtcacttcacctctctgagcctcagtgtctttatctgtaaaggggaggtaaacraattttctcctttgtaagcccaaatgtgaagcctttagcagggtaccctgaggagacacaaaatctctgggtaatggggcattcggtggcattgggagtaaaaaaggaaccaaatcaccccactgtgcccaagtaaactgtgacttcaggcc

SEQ ID NO: 528781 - DNA, 217 bp, Homo sapiens
ctgtctgacgagctgtgtgtcctcagacaagtcacttcacctctctgagcctcagtgtctttatctgtaaaggggaggtaaacaaattttctcctttgtaagcccaaatgtgaagcctttagcagggtaccctgaggagacacaaaatctctgggtaayggggcattcggtggcattgggagtaaaaaaggaaccaaatcaccccactgtgcccaag

SEQ ID NO: 528782 - DNA, 615 bp, Homo sapiens
ctgtttgggaggctgaggcatgagaaccacttttaccagggaggcagaggttgcagtgagctgagatcgtgtgccactgcactccagcctgggcgacagagactctgtctcagaaataaataaataaagacaaaatcaaaattaatcctctccagtgcttaaggttttattctataatttgaagtttttaaacataaaagtgtttaaacttttatgtttcaaagtgttcaagtgtttctgaacatgagagtagaaaaatgcattatcttagtatgggaaagatgtttctaaacattgtaaaaactaaagaagcagtgtaagaaaatagtgccaaatttgattatacacaaattttaggccaggtatggtggctcatgcctgtaatcccagcacttcaggaggctaaggcacgaggataacttgagcccaggagtttgagactgcaagacctcctctctacaaaaaatagcaaattggctagggcatgatgttatgtgcctgggacctcatttacttggaacgctgaggtgggtggattgcttgagccctagaggttgaggacacagtgagctgmtgattgcaccactgcaggaaaataaataccataaacaaaat

SEQ ID NO: 528783 - DNA, 567 bp, Homo sapiens
gccccaagagtcagggagggcacagagcatggggctgcagcaggagcctgagttgrtctgtaaggttgttttccaggaatgccggggctgatggaattggacccctggttgtccagttttggtggaagtaaagtgtattgggctgctttgggacaaagggtcttagagcccctggggaccatggggccagggaagccctactggaagttagtatctaagtaattgtagcaggtcttaatggtggattgtccacgaggtgggcacccttggtgttcccaatctgtagatgaaaaaccgaggtttagaaacctgcccatggccgcagaaccccactatggagccatgttttcaatcatgatgtctgtagagggtcactgggagactttttaaaaagaaattgacaaaataattccaatttcatcttgaagaatagacaggtgaatatgcagcagagttgcatcttacagatctgtgttgacagtgaacttgcaattaggaaatatgtggaaaaaattactactgcaaacccctgtatcaggtttccatcaccaagacaggctccctgca

SEQ ID NO: 528784 - DNA, 570 bp, Homo sapiens
tctaggccaatgacagcctagcaccataacagatcaacggcccccagcagccaggctaggagcatagcaaaatgagccgaatgatctgaaacttaactgcttcacatcctgcaggattcaaacttattcctaaccagctatacagacattttaagaagagagccccaaacatctataaataaaaataccccaaaagcaaaagtctctgcttagaatggatattgctaagtcccagccaatgagctactcactttaagcaaaattccaaataataaaatctcaggatgaaataaagacattttgaagtttccttggagttaatgtttgaccyatttatattcactgtatgtgaactagagcttatgaatattataatacagcaaatattatataaccctaaggggtatgacggactgcttaactcaaggattcactggagcaagttcagtcttcaaggaatgttttataactcttgaatctaaaataatttattccaactcatttttcacttaagaatgaaacataaaaggaaggcattaacattcattgaaaacaacccacattttccaa

SEQ ID NO: 528785 - DNA, 620 bp, Homo sapiens
ggtttaaattgtagatttgctgaaaatattacgctaaacattgggtgagaaaatgagtgggttcaaaktttggctctgttatctcttagctgtgttattacctgtacaaattatttattttcctcttggttctgtttcttcacttataaaataagcaacaatttattattggtgtggagaataaatgacacatatagcagtgtacgtaacatattgcatataaatgatatgtatagtatatgtaaagtattgtgtgtaaatgatatatggtattgtatgtaaagcacttaggatggtcctaggcaagagttagctattattaacattttagaattatagaaatgtaattatatataataagcattacaagtgaataatttaaaaatttgcttcctaaatataagttaaatgtaatttcacataaagggtagtaggtgagataaaaaaatgtaaaaaccttctaaccacaaaagattgttcttcattatttaaatggtttcacacttccttgtggtcaatggaattatatccactcatttttgtgtcaccgacttgacctgagcatttattaaatagaagatgttcaataaatgttgacctgaaataatctgaattctaac

SEQ ID NO: 528786 - DNA, 620 bp, Homo sapiens
ggtttaaattgtagatttgctgaaaatattacgctaaacattgggtgagaaaatgagtgggttcaaagtttggctctgttatctyttagctgtgttattacctgtacaaattatttattttcctcttggttctgtttcttcacttataaaataagcaacaatttattattggtgtggagaataaatgacacatatagcagtgtacgtaacatattgcatataaatgatatgtatagtatatgtaaagtattgtgtgtaaatgatatatggtattgtatgtaaagcacttaggatggtcctaggcaagagttagctattattaacattttagaattatagaaatgtaattatatataataagcattacaagtgaataatttaaaaatttgcttcctaaatataagttaaatgtaatttcacataaagggtagtaggtgagataaaaaaatgtaaaaaccttctaaccacaaaagattgttcttcattatttaaatggtttcacacttccttgtggtcaatggaattatatccactcatttttgtgtcaccgacttgacctgagcatttattaaatagaagatgttcaataaatgttgacctgaaataatctgaattctaac

SEQ ID NO: 528787 - DNA, 620 bp, Homo sapiens
ggtttaaattgtagatttgctgaaaatattacgctaaacattgggtgagaaaatgagtgggttcaaagtttggctctgttatctcttagctgtgttattacctgtacaaattatttattttcctcttgsttctgtttcttcacttataaaataagcaacaatttattattggtgtggagaataaatgacacatatagcagtgtacgtaacatattgcatataaatgatatgtatagtatatgtaaagtattgtgtgtaaatgatatatggtattgtatgtaaagcacttaggatggtcctaggcaagagttagctattattaacattttagaattatagaaatgtaattatatataataagcattacaagtgaataatttaaaaatttgcttcctaaatataagttaaatgtaatttcacataaagggtagtaggtgagataaaaaaatgtaaaaaccttctaaccacaaaagattgttcttcattatttaaatggtttcacacttccttgtggtcaatggaattatatccactcatttttgtgtcaccgacttgacctgagcatttattaaatagaagatgttcaataaatgttgacctgaaataatctgaattctaac

SEQ ID NO: 528788 - DNA, 606 bp, Homo sapiens
ttctttgtggcagggagggcatcttcacaaaggtaaatttatgccctgattttaagcacatgatacgaagacagaaaacccttcctgcatctgttgattttcaattgctttcagctcaaaaaaacggttatgccagagtggtgtatattggggtggcatgttctaatacccctcactatacggagcacaacttccctttgttatggccttattcctcccacacttgcttctttctctcttcctgcaaacatgttcaaatttttctcatgtcaatgatccttccactggcccttccatattcactcaaaataatatttattgagtgcttaccaagggcaagcattgttctagatgctgagagtattgtgagcaaataatgcagatgtaatctctgtcttcctgaaatgtatagtctagcgtcaccatactctctagctaccatccaatcttatttcctcttcatctgaacctcasagtaatccatgctgcctgatcttcctcctgtgatctcttcttaaattagtgccatcctatcatcgaagccaaaaacctaggagctcatcctagtttcatcctgctccttacccttcctatcaccaaatccag

SEQ ID NO: 528789 - DNA, 561 bp, Homo sapiens
gcattatatgctgattatgtacaaagcctaaaaccaggcaaagtacctagcagaaaatacccatgcattattcaactaatacaaatctgttgtttttctaatttgctcttccaaacatgtcttttcaagttcttttgagttgcagttgttttgaagtgggggagaagaaaagtwttctctcttttcagggacaaaaactcaaataaaagaggtacccccattcagctaatcatggcagctttaacaatatatgggcaaaatatacaacttacaaaattagaggctttatgaagagcctccctttataaccaagttattttagaacagagaaagataaataatctacttatcaggctaggttttccaggctttcccattccaagtcactctatgttttctttccttctttttctatttctcccttttgcctttcctaatccatatcgcaagataccatgtgcaacacgctcacccctatttaactgcacctgttcacagtattctacagtcaaaagctctacttttgcagcaactttttattgatgaatgcattttatcctg

SEQ ID NO: 528790 - DNA, 449 bp, Homo sapiens
atacccatgcattattcaactaatacaaatctgttgtttttctaatttgctcttccaaacatgtcttttcaagttcttttgagttgcagttgttttgaagtgggggagaagaaaagttttctctcttttcagggacaaaaactcaaataaaagaggtacccccattcagctaatcatggcagctttaacaatatatgggcaaaatatacaacttacaaaattagaggctttatgaagagcctccctttataaccaagttattttagaacagagaaagataaataatctacttatcaggctaggttttccaggctttcccattccaagtcactctatgttttctttccttctttttctatttctcccttttgcctttcctaatccatatcgcaagataccatgtgcaacacgctcaccmctatttaactgcacctgttcacagtattcta

SEQ ID NO: 528791 - DNA, 633 bp, Homo sapiens
tctgtgaactaggaggagggccttcaccaacaacccaaccaggctggcatcctgatctcagacttccagcctttacaactgggagaaataaatgtttgttgctaaaaccacccagtctgtggtattttgttacgagctaaccaagacrctctctcagaataattgagtctcacaaggtctggcactcgatctgataatgggagttaaagaaattgaaaaacctgcttattaaaaaaaaaaaaagcctgatttttaagacttattatagactttgatactcagtgactctttttcctaggtaggatctgtcctcactttgcctagagtaatgagcctcacagcttagccatgaagttgaaagactgcaagggaacgtgatttagggaggaaataaaactacattggtttactatgtcaaatatgttatatctgtaaccatactcacactatatctcagaagtgttagttcatgtaaccaatttcttcctttctaatgtaattgtaatatagtgattacctcttattcctgccttctcactctgaaaatatggctctttctggaggtctccagaataatattcatcgatatgtgatactggtagtaaaagtgtgaaaattccagagacttaggca

SEQ ID NO: 528792 - DNA, 611 bp, Homo sapiens
agctaggagagtgacatggaacagcaatgttatcatcccaagggcatggccagaatttcgtggcatcagtgatgctgtagctcacgcctccgaacttgcttcacacagtcccagagtaacttctacaccccgccagctttctggtgctccatgttttgtgggccagacaccaactggacagtaccctaaagctgtcctattctccctccctactttgacttggtgctgagcctggcctgtgggtttctgcagcagtgagacaggatggggctgaaggcttggcatttcctcaggcatgagggataacaatggttattgaagaagaatgtctaatgacagaaaagtgctcatggttcatttgttcattcattcaacaaatattaatattacttgagcacmcactctgtcacaggcactgtctcaggcactggaggtagagcactgctggtgggaatggggatgagccagtccagggatcctggggctctagggttggctgagattgttctgtggacccctgagcatttttgcagtttcttaatctctaatggagatggtatagttactcccagcaagatcacttgggctgacatgtcaccttcctttgcagg

SEQ ID NO: 528793 - DNA, 433 bp, Homo sapiens
ggcacaggggtgacactcagtgagtggtcccagtgktgtgtccaggagctggacagagggccctaggtaggagaagctgggagtgagtgtccatgacctggccagagttttgaagggctggggtaacatcagttctttacctgttccatcctcctcttagccccaaggagaagagccaggtaagagccgggtgttgctcatctgtgcctctggctgggaggttgctctgctgagaagctgacagctcctccctattcacattgaccctaagtgcccattgcagcctttgtcctactgcacaggaaggaaagatccttctctgcatctcagggattccatctggtttttattttcaatgtgtagcagtgacgaatgttgctccaaaaaaacccagaaagaggcaagagaccattcctcctcctgcatggggtgt

SEQ ID NO: 528794 - DNA, 480 bp, Homo sapiens
tcttctagtccaccgtgaatgccatggtttcttcattctccaggctgctgggagtgccgccaggacttgtccttggctgcaatgagatgaccaacccaaggacacaatcttcctgaagcagctgtatccaatgactgttgaccattgatacgggtgtattacaacccagccctcactcaactctgatggccatcccagctctagatcacttggagggtggctgagacatttgttgggactgcattgcagctcagcttctccctctgccccctcctgcatcggtcactcccccatgatgtaggtcccaagtgttatcctcaagaatcttcttgaacacagatctccttctcagaacctgcttcccagagaattgtcctgggacacrgtctagtaggcaagaaaggttttcacagaggatgcaaagacaaccccataccacactgtaaacatccatgggagagccatcaagagggcccaagg

SEQ ID NO: 528795 - DNA, 670 bp, Homo sapiens
cgaggcatgtgggtggtgcagcacagagttccaccatcgctcatggactgtctgttgggatgtttccacctggcattttcttgccactggttcatccaatctttgggtacagaggctgtagaaagaagggaaacatacctgctttcaattccatttaaattaacatggatttcctgaggacttcctatatgttggaccctttaaggcctgacaaatgaagaagagaaggtctttatcctcaggaaacttcagtccaagtggagagatgcaacttttgcctgtttgaggagtgaaatggtcatccaaaggagtgggtgtcttgatgactagtgtttatcaagcacttactatgtgccaggtacaatgttgagtactcaacccatttatcttctcgtaacaattcatgatggctttagagtattttagcttcatttcacagatgggttaagtggctttcccataaatactaggaagtggtcaaaatgggatttgtaatttgagcattctaactccaaaagcctgagctctgaagaatcaccttccactgtgtgcgtgggaactgagaggatgctgcaactttttgcagagtaagatgaggattatcagggaagactgcctggaggtggtggtacctggaaktggtggtactgacagcatgtgtgttagggga

SEQ ID NO: 528796 - DNA, 475 bp, Homo sapiens
tgcctttctactcctgcaaaagtactttaagtgctaccttgaaattattgtatttttttttgagatggagttttgctcttgttacccaggttggagtgcaacggcaygatctcggttcactgtaacctccacctcctgggttcaaacaattctcctgcctcagcctcccaagtagctgtgattataggtatgcgccacaacgctcagctaatttttgtagtttgaatagagatggggtttcaccaccttggccaggatggtctcaagctcttgacctcaagcaacccacccacagcagcctcccaaagtgctggcttacaggcgtgagccaccgtgccggtcaagttttgaaattagatgtcagcagtgcctgccctcgaaataaataatgccacagaaatcataaactctgtaatccaacccaaagagaataacaccgatgatgtttattccataccgcataaaatactctgtt

SEQ ID NO: 528797 - DNA, 533 bp, Homo sapiens
tgctctttgtaattgagaactactcccaaccatggccgtgaatgttctaagacacgagaggtctatgggaaaagtgctttgaaagttggttatcgtttgcacagcctgggtcctctgggggcccctctgcccccggggaaagtctgcctctggggcaggactcctgcaggacacacgggccaggaggtagggaagggaggagggttgccctccagcacttactttctcaggacggctatctcattctctatgctgctttccttgcccttcagcgccttcttagggatacacttcacagcaaagagcttgccagttgccttctcttcagctaaaaccacttcggaaaaggccccgctgtgaacaaagaaggaaaaaagaacacttagatgcagaagtccagtttcacaatggctccattcaccctaccaccgaagtttgagtaaacaataacgacggcacagttgtaagcattactgttacttttatccaccktggctccttgctaaacatctttgtgcaaagaaatacacagg

SEQ ID NO: 528798 - DNA, 632 bp, Homo sapiens
agttcttgttaacttctaggttgcagaaaatactgagattagaaaaactgttttttcagcttcttaggactttgtatatgttgggttttctcgtcaggttttcttttgtaaataagtggttaccacagtagcttttccaccagaaacatgactctgggtggatcctgttgtcatagtgatttaataaactaagttgagttttttagaatttttagtaagcagtgaataattagatagaatacttttttcagccttagtgaaaaatsacatctatgtaactttttttttttttttctcttgagacagagtcttgctctgtcgcccaggctgaagcacagtgtcgagctctcggctcactgcaagctccgcctcccgggttcacgccattctcctgcctcagcctcccgagtagctgggactacaggtgcctgtcaccacgcccagctaatttttatatttttagtagagacagggtttcatcttgttgaccaggttggtcttgaactcctgaccttgtgatctgtccgtctcggcctcccaaagtgctgggattagaggcgtgagccaccacgcctggcccatgtctatgtaactttaaaaaatacggtattttagtgatagagctggtggca

SEQ ID NO: 528799 - DNA, 613 bp, Homo sapiens
aactcatgtataggtgggaatttctatgaaggaaaataaggaaaatggttctgtgcagatgctggggatttgagaaatgctgatttctgtgtttttgccagaatcacctggccccatgcacacttggttgtaactgcatcactggagggtatgagagtatgtgtgtgtgtgtgtgtgtgtgtgtctgcgtgcatgtgtgtrcaggtgtttgaagacagaacctcaggctttgctaggaaatccctgggaacatttggctgtgctgttctgctgtgtaactgatggtgattaattgagttcattgggctggatgtggtggtcttcacaccagtgacagaggttgaaccaggtgatagtgcttttgccagaagcacctgtatttattttattaacccctttttattattagaaaatgactgctgcctcatagtccagggtcattcaaaaaatatttttggaggtgatacaaaaataaggaaatgtatatatatttttttgttgtgagggggtgggtggatgggaatttccttgtatgaaagaaaattctaccagaatagaagatcctgtaagtcagccctacgtgtcctgttgagctgcaggcagtgggcaggtt

SEQ ID NO: 528800 - DNA, 613 bp, Homo sapiens
aactcatgtataggtgggaatttctatgaaggaaaataaggaaaatggttctgtgcagatgctggggatttgagaaatgctgatttctgtgtttttgccagaatcacctggccccatgcacacttggttgtaactgcatcactggagggtatgagagtatgtgtgtgtgtgtgtgtgtgtgtgtctgcgtgcatgtgtgtgcaggtgtttgaagacagaacctcaggctttgctaggaaatccctgggaacatttggctgtgctgttctgstgtgtaactgatggtgattaattgagttcattgggctggatgtggtggtcttcacaccagtgacagaggttgaaccaggtgatagtgcttttgccagaagcacctgtatttattttattaacccctttttattattagaaaatgactgctgcctcatagtccagggtcattcaaaaaatatttttggaggtgatacaaaaataaggaaatgtatatatatttttttgttgtgagggggtgggtggatgggaatttccttgtatgaaagaaaattctaccagaatagaagatcctgtaagtcagccctacgtgtcctgttgagctgcaggcagtgggcaggtt

SEQ ID NO: 528801 - DNA, 613 bp, Homo sapiens
aactcatgtataggtgggaatttctatgaaggaaaataaggaaaatggttctgtgcagatgctggggatttgagaaatgctgatttctgtgtttttgccagaatcacctggccccatgcacacttggttgtaactgcatcactggagggtatgagagtatgtgtgtgtgtgtgtgtgtgtgtgtctgcgtgcatgtgtgtgcaggtgtttgaagacagaacctcaggctttgctaggaaatccctgggaacatttggctgtgctgttctgctgtgtaactgatggtgattaattgagttcatygggctggatgtggtggtcttcacaccagtgacagaggttgaaccaggtgatagtgcttttgccagaagcacctgtatttattttattaacccctttttattattagaaaatgactgctgcctcatagtccagggtcattcaaaaaatatttttggaggtgatacaaaaataaggaaatgtatatatatttttttgttgtgagggggtgggtggatgggaatttccttgtatgaaagaaaattctaccagaatagaagatcctgtaagtcagccctacgtgtcctgttgagctgcaggcagtgggcaggtt

SEQ ID NO: 528802 - DNA, 447 bp, Homo sapiens
tcgctgcttccactatgaggcaagagggtgatggaacacgttatagattgctagcacactgctaaccctgcacacacatatattgcttataatatcacactacttattatgcaaattcrgtagcaatgtgggtctcctttgggccacatttggaagtgtgtgcatcaagtaaataaaaatttctaaggtagcacagagcacttaccaccacaatgatgaaaagaataatgtcccttcagttctagcctagatgctacacactgccctgtgggttcacactagtgaatttaattagcaagatgacatggtgagatagagataggagtgttatttcctttttacagataaggcctaaagtcaagaagtatgtggggcaggcaggatttcagctcgtagtttggccttgcctcaaagtctgtattattgataattatgttttagtaacaa

SEQ ID NO: 528803 - DNA, 426 bp, Homo sapiens
tgaatctgacataacattcttatctcaacttaaacattcctttctgctgactccaagttttagacagagccttattcctttaaccaattacaaatgaaataatctctgaatccacccaaaatctgtaagccctgsttcaagatatgtcaccttttcaagccaaaccaatgtctaacctccatgtattgatttatgtctttacctgtaacttctgcctccctgaaatatataaaaaaccaaactgtaacctgaccaacttgggaccacttacacaggctttttgagtttgtcttttctgcaggctgtgatcactcagattggctcagaataaacctctttagaatattttacatagtttttccatgaacaataaaaagaaaagaagacataatttctggtgtataaaatgaagacaaatagccaagc

SEQ ID NO: 528804 - DNA, 605 bp, Homo sapiens
atccatttatgaccgtagtatgctggacaagttatcctgaccaactttttctgcaagagacctaaatttatagaaaaactataaaaattcaktgttaagtacatcagtgggctgccaagactgtaagaaatatgaatccagataaatattaagtcaattgaggaatgtagagtagtaaacagagcaccaaagccagtttagccttgaatgcagttaacacatctgatgaaactgaacattgctcttcaagattctcagagcttacaggaaaagaaagaaagtaacatgcccactgaatgacaatactctaataagagaccctcggtaataagcagaataatggccccacgcaaagatatctaagtcttaacttctggagcctttgagtaagttatattacatgatgaaagggaattaaggttgccaattaattgatcttagagaaacattcctggatcattcaggtgaacccaatgtaatcacaagggtgcataaaagtagaagaaggaggcagaggagtcaaggttagagtgatgtgctataaggaagactataccagctatttctggctttgaagatggaaggggccacatgccaaggaatct

SEQ ID NO: 528805 - DNA, 605 bp, Homo sapiens
atccatttatgaccgtagtatgctggacaagttatcctgaccaactttttctgcaagagacctaaatttatagaaaaactataaaaattcattgttaagtacatcagtgggctgccaagactgtaagaaatatgaatccagataaatattaagtcaattgaggaatgtagagtagtaaacagagcaccaaagccagtttagccttgaatgcagttaacacatctgatgaaactgaacattgctcttcaagattctcagagcttacaggaaaagaaagaaagtaacwtgcccactgaatgacaatactctaataagagaccctcggtaataagcagaataatggccccacgcaaagatatctaagtcttaacttctggagcctttgagtaagttatattacatgatgaaagggaattaaggttgccaattaattgatcttagagaaacattcctggatcattcaggtgaacccaatgtaatcacaagggtgcataaaagtagaagaaggaggcagaggagtcaaggttagagtgatgtgctataaggaagactataccagctatttctggctttgaagatggaaggggccacatgccaaggaatct

SEQ ID NO: 528806 - DNA, 524 bp, Homo sapiens
ttcctccctttacaagcaaaagttttctgtttaaagatggctaactccttctggatgcacagtcagatttagcaataccccatgcttaaaagtagcctccgttgctctaaaagatatcatctyttactgtagttctttgcatccacagttcttcagtggcttgatgctggcaaggcactggaaaaaagggaatgcttatacaccgatggtaggaatgtaaattagttcagcccctgtgaaaatgagtttggagatttctcagaaaacttaaaactaaactaccatttaacccagcattctcattactgggtatatatccaaaagacaatacattattttaccaaaaagactcatgggcttatgtgttcatcgtagtactattcacaacagcaaagacatggaatagacctagatgcccatcaatgataaactggaaaaagaaaatgtggtatatgtatgccatggaatactacacagccatgaaaaataactaaatcatattctttgcagcaacatggatgcag

SEQ ID NO: 528807 - DNA, 486 bp, Homo sapiens
tgctgcaaaaagcatgatttctttcctttttatagctgcatggtattccgtggcatgtatttaccatagttgctttatccagtccactgggcatctaggttgattccatgtctttgctattgtgaaaagtgctgcaatgaacatacaaacatatgcatcttttttctagaacaatttattttgctttgagtatacactcaatagtagggttgctggatagaatggttgttctgttaatgatcactgactttgtatcagtcactcttctaggttcaggaaatatataaattaacaaaataytcttgtcaataccctctaatacctacaatccatacattctagtggaccaaaatattgatttttgaaatagccactcagatatagcatgtttaaagtatttgacctggagacagaaatacatttccataagtttcacaatggatctgccatattcagttgtaattattttaaaaatgttgatcgaac

SEQ ID NO: 528808 - DNA, 364 bp, Homo sapiens
taaaagaaaagttatttgaggacaagagatataatttttaaaattaccagaattgacaggttctgaggtcctctaagtccccctttcagacaaagggcatttattttgttatcattattatttaagacatctttctctttgaagccmttgaaactaatttatttctttctccctcctttccctccctccctccatccgtctgtcccttcctcccttcctgccttcctccgttcatattattctgatcttctgactaggggaaaaataaatagactatgcatccccagctcttacattattaggacacaattcgtatttcttcagggtttttttttgaaaaatttttaaaagaaggagagtatga

SEQ ID NO: 528809 - DNA, 628 bp, Homo sapiens
ctaatacagagagaaaacgagaaagagagaaaaacaaacagaaaagaaaggaagagaaaagactgatttttaattttctattatgatataaaaacctcagcttactcaaacctaggaatcatccttgcttctttttttctcacctccattttatttccctcacaccccacttctatttcataattattctgtctaagaaaccaccccaaaagrcagtggcttagtacacacacacctgttcccaggttatgctgtgaaagtaatttctgtagttccaactggatgtctttaatttttcccaggaaatttgtcaccagttgtcttttatttctctcaggaaaattgtcacagaacctttgtttattataaagcgaggggtgataagaatccttctcgtgtgctttcgcatattttccccaaattcatgttgagttcattctgaccaacacattgttgcttaatatgagaggactggggattggaaaaagggtccagtatctgaatcagtacattcagcccactgaggacatcttcatcctgccacatcactcctgcagcttacagatgtatagcttcccttctctattaggaattaaaggagaagtttgtatcctgtgaacaaagtgtg

SEQ ID NO: 528810 - DNA, 614 bp, Homo sapiens
agtaaatgtaactgtattcacacagatctattcctttgtttacaaagatataatgaccaaatagactatatcaacttagacacaaggaagaaagtcaaattacacataaagagctaccacatttgacttagaacatacatcattaattatttctgaaaataaaaatagccaaagaagctatatagcaccctaaactgaaacgtcaggttgtcaggacccctatggaaactctcttgtcattccaacaactaccttctacttattccaggacctggttcatcctttgtggatgggaagtatgagtcagacttgagcaatcgacagctacactttgatgtcccatgccattctccacccattccagcactccctgaccaaaagaacgttccaaagtgggcttcgttatgccaactctggttcccttcagcatctatgatattaaactgtgasgtagagagaaaacattctttctgaatttaggtggaaacaatttagttatacaaacacacaggtccacaagcatgtctgcccccgctctgccatacagatgcacatatctccagaagaaaagcactaattgtgcataagcgcacagccttagtcagagagcttca

SEQ ID NO: 528811 - DNA, 509 bp, Homo sapiens
actgccatttaacagcacccacatgagacgtcaagcaagactgcccaactggcttgctttctcctttcattttttaaaaatataattaagaacttacgagtcaatggatttcaatcaaccayagtcattattctaattgatgatcaaaatgtcacattttaagccaacagaagagccttcatattggatcttgtgtccttctgacacagtcccattagtctttgataggttccttgctttctgacccaagattgccagaaccacttcaatatgtaaaatgaaaatttaaattttagttttgatcacatttttgtaatatacatattatatatttatatgagaaatgctgtttttgacatatgcataaacccgtatgtatataggaaaaaagtacattcctaaatgtaaatgttaagtaagtaaataatataattatataggttgtgagattggggcatcattttttctttttgcttgtcaatgtttcctaatcctcaaataaaaatgaa

SEQ ID NO: 528812 - DNA, 666 bp, Homo sapiens
tctttttagttctttctagttctcaggtctatgacttctacacatacaacaccccacttatgcagtcaagcactgtcaaccttcaggagcaaaccatgaacttaaaaccaatttctaaaacctgtaattgtaccaagggaaatttgttgtgatcagttgttgtactaactaaaagaagatccactctgattaatgatgatggctataaaactaacccctgctaccataaaataaaaccataaaatttggaagaagtggcaaaaaagggaaagagaagacagcaaagaagaaaaaagacaaaaaagagagaagaggaaagaaatcagtaagcagccaatctctacaatggcagagattaaaagaagcaccaagaatggcaagtagggaaaaacagagagagaaatgaaacagaggtagcaaaaggaaaagagtgtcaaacacctgctggaacttgaaggcaataggaccattcagaaaatgtggaagctgaggttcctctccctcaatagaactggagagagcttcctcatatcacagcaggayggaattggggccgttagtgccaacccccaggtgcattgcacttagtaaattcaatctactctgcttatcagatgactgcaaaacatggaagctgaggttcttctacttcagtagaactgcaga

SEQ ID NO: 528813 - DNA, 561 bp, Homo sapiens
taacatacttggcagaataatgtagtggtggatacaggagtaaagaacaatataatccaactcctcaagtttaaatctggattgaactgcctactagttcttactctgggctggttacttaaatcctctgtggctcagttgccttctccataaaatggaattaatagcaggatctacctcatggggaagttgtactaattaaatgagataatacatgcaaagcactagaggagtatctagatatagcgccatggcacacttgagagcacaagccactgttcttactattacaagttcagcagctaaatgacattaccaggcacacagcacttaccattccaaattgatagcatctataaatatgtacctatacatcctcaatcctagtatacaatcttataaaaatataagagaaatttatataaaatgacattttagagagaactgaaaaaagatctcctaaaaaagtattmtttctctacattagcagggttctagttaaatatgaatagatacctgttaattaattgatgtttcaatctgagtaagaacatctgcaaa

SEQ ID NO: 528814 - DNA, 572 bp, Homo sapiens
ctcttatattacaaaccaagcaatgttatggttcatactgcaatgtgtatttttgtctcagactgcttgactacttccagtaagcaaaatccctgaattcgttagcaataataaatttttctttttatgattatttaatggaaaaggcattttgccaggcaccactcccaaccacgtccagaagaaaaacaaatccagtatgcctttctatttagcatagagtcatgaatcgaatctttaaaacatcggaatcctaacttcagaaataaaagaaattgaatttaaagtgaaaaatgagaacatatgactaaaataatgagatatcaattaagttgagatgctactgaatttctgtaattctgtatattaagctagaaatgtgatttaaattcacatccacaaatttgaccgaatctaactaaagaaagtctgtaaatatagaagagtatatcttttggtatttctttttattcaccacacagaaaattgccaatttataagtgagttgttttctcagagtttatttacatgtcatatttttgraacttaagatgaatattaccctagaagta

SEQ ID NO: 528815 - DNA, 461 bp, Homo sapiens
cctccatcttgttgagttttaattaaattaaatgagctaacacttcgtgggctgtctcaggcggccgtggctggggccagaatcttgccctgctgggcagcttgtctctccctcctcctgctgggcaccaaggggctgtgaggctggtgggaattgatggggaggggctggcatcccagggagtgggagggcacctctgaagcctgcaggcccctgaaaggggcaagagtcatgtcctccttttcatcattgacatcacaactgacaggcagaaggggctctggccggcactggccatcctgcccgaggccaaccatcccatagctagcaggagggcttctgaagcaaagactattggtccaggccgtgctggcagcagatgcagaatgcagccaagctgattctgagcctcttttccygcctgctctgttcccacaaaaactgaatcaattatcctggca

SEQ ID NO: 528816 - DNA, 598 bp, Homo sapiens
ccccccactgctgctgcgcattrgaaacacccggagtccccaagctgcacacgcagatcccacctctgagcaacaaattcagcctttctgagggcagccgggttgctgtttgaagagctccccgggggctccagcacccaggaggggtgaggacgccgctcaccatggccagcaccgcagcacttcatgcacattaactgttaaaccacacagccctgtggggaaggtcctactttcacccccattctatagggaagcaaagtaaattaccccagatcacactgagccaggttttgaactcacgtcctctcaactgcaaagcccatgcccttggccaccctctgagccccagaactttgctgtccccaaactcctgaggtgagaggcacatgccaagttgagctgagaccctgggattggaagtcagcctgtttacaatctgcctataccactgactggaggaaagtcgcttcacactctgggccttggtttccccatctgtggagagggagctatcctcttagctctcctggcttctggggaataaaaagcactaatggacaggagatgggttttgcaaaccatgaaaggccatgtg

SEQ ID NO: 528817 - DNA, 607 bp, Homo sapiens
acccaggagtgtgggcttccactctgccaactctgtagggtgtgggactcccactgggatcacctgtgccctgcccctgccagctccatggagcatgcagccctggctatgactcccctgctacagccggtgtcctcacagtggctgctccagacaggccactgccactatcaatgctttrtacatttttttctggaagaaagaattaattctttgttgtcaggggctatgtttttttcttcttattccatggtcctctcagcagtttcctacagcagagcttcccaccaatgtggtgctgtagcctagtgagctacaagtgatctgcaagtttccagagatattgatccccagactctggcagccactcaggaactcttagcctctaaggaagttcttacagctaccgcagcctctttatgtttattccagtattacagtgttctctcacagaagagattgggaaacatgggctcatcctatctttgttcctaactggaatcctaacttgatatacatgtttctctcctataaagaagctctttgaaatgagacctgaatcagctatatgttgtctccacttccttcctcctagacaattgcagtg

SEQ ID NO: 528818 - DNA, 625 bp, Homo sapiens
tcttatagcatatataagtatatatagtatacatatatagtacatataatatacataatatctgtattctaatattatgtgtgtgtgagggaaatggatgaatgtggctataaggaaacaagaacagtacatctgtttggggatgaatcatgtgaaggatgagttgtgtttgttgaatattcggagttaatggaagccattgtgcctctgttacctataaactgcagttgatatctagtcatgaaattgctaggatttgattgagataacatgtgtaaatcatttggcacattgctggaacagarttggatctcagtaaatggttgtcatattttcttataattatcaacctcattcctgctatcaatgacatcatcataactattttcataatttcaaccatttaataataaaaatataagcatttcaaaaacaaatttatagctgtttgtcattaaaaaattcacatctcagaccccttactcttctcataaaacttgtcacaggactcccaaggctgggattctacaaaagagcaatatgtgattatatctctgataggatttgatgggcctcctgatccaaattatctactcaactgaggtgcaatacctagagaatcaat

SEQ ID NO: 528819 - DNA, 631 bp, Homo sapiens
aattacatttcctggggttctcttcaatgggcggtggtcttgtgcacacggcattatagatactcatccttggaacctggcttgttgaaggttctccagargcaagaggaagttaaaagataaacttggctgtgtatatcctatttcataactgcctaaatagtaagcatgctgactggcaagaattagaactataataaatgcaattaaattgcctattacttgcataattgagaactataaatattttaaataataaaattgtgaaaaatttctctactaatgctctgggaatgtcttaaatctgtaaaggccaggggattcatagggatggctgaatatgaaatctttccattcatctctttgagatcaaatatttttcatgattatttcaaaaggctccaaaatggaaaagagtgaatatgtgagccgccatgagaaaggaagcccagaagagtgagtacagggtagtttttctgggaagatgtatttaggaaatggggcaagagcaaagaataaagaagtgcaaaaatagaactaatttgacactgcatatgtgtccttctccgttgctgtacatccttttttgcttccaaagggcataatttgatgtgattaaataaggccttct

SEQ ID NO: 528820 - DNA, 636 bp, Homo sapiens
aagtgttatggaattaggcagaggtggtggtggttgcacaattttgtgaatatacaaaaaaaaaaaaccacactgaattttacactttaaaatgattaatattatcttatcttatgtgaatttcatctcaatgaaaaaggagattgagccagttatgttgctaagtttggaggaggtcaaagcaaataaggtcttctctttaccctcaaataactcatactgcgcagaggggacttccaatgggcccagcaccgtggtgtggmccagcctccaggagcaataggatttcctctcagatgaggatctgtgtaggatcaaggcagaaatctctactgaagtctgtttgtgtcacacacttgtgcatgcctgccttggagtctgagctctagctttgtcccagtcttgtcgccttctccaccatggggactttgcacttgtactcctttctgtgggaatcctgtttctttactcctcctgtctcgttaattcctcccaccttgcagattttagctcacgtgccattgccccagagaaatcttcctaccccgaccttcatagtcaggttcaatcaccaactgtccattctcttgctctcttgaaattctcctttgcaacagcttttaccagtttcccaca

SEQ ID NO: 528821 - DNA, 641 bp, Homo sapiens
gctagtcaggggagacttcaagaaggaggaaggaattctacacaatcatttgcatctgaatctcactccatctatatagctttttagctaagaactttagtttttaacctctctcagaggtggtttcccagacagtgaagattgcactaaaatactcacaccactgcattgtcatggggatttagggtagcaaggcctgatgggcagtaacctcataacagtgctattattattactgtcagggctatttttataatcaggtggggcagcaatgcagggactgagtgtggccacatccctgctctgtggaccccaggccctcttcatgactgtaataaacacaagaatcctccccacttacctggccatggctgcctgtcatcaggcaggttcttctggaagcaagcagtttattcaagagttagaggaaacaccaacaatggaaacacaaggtgggaaagggagatagggaagagaagaagctgagaaagagtttgtggctaagccaccagtgttgctacactgtgatgacggtgggtaacagggggtcgatcytgctgggtaccctgaggaccagtgtacaacacacatctcagagctcccacccaaggggctagggagctggggtatttatctgccag

SEQ ID NO: 528822 - DNA, 594 bp, Homo sapiens
cccaatagcaacccctggcccctggccaagtccacacsaggggcttctctgaggtgggctggcctcaggtcagtcctccaggctgaacccggcaatgaccccaggctcccctcggctcctccctccatccacagggctgtctcccggggcctgcagcacctctgaggctgcacggagaactgaggctgggatgtgcttgtgagtttagctcttccttaaaccattccaaactcaccagttttctcccatgagcaagtacatacataatcaatgtgtgtcatggcggaagacggtcctgctacacttgcaaagacctctgacgggcaggcaccacagctaccacctccccatcctggggctggacccgggcccttacgtacttcctgcctcagtgttccgaatccacaggccgacaggccacccagcacggcccgacctccccttctagacccgcttccttgagggcagaggtgcctgtaacttcttccacaaagccgggaaccataaagacctcacttctcaaatgtctgcttccagagcaactgtgtgagctctaagcctggaccgggatgggcgctgtccagggatgtgaga

SEQ ID NO: 528823 - DNA, 586 bp, Homo sapiens
ccaagtctgagctgaaggcacaggtgcagtgggcccaggtgcagtgggcgcaggtgcagtgggcacgartgcaagtgcagtgagtgcaatgggtgcaggtgcagtgggtgcaggtgggcaccggtgcagtgagtgcaggtgcagtgggcaaaggtgcagtgggtgcagatgggcacaggtgcaggtgggcataggtgcagtaggtgcaggtgcagtgggtacaggtgggcacaggtgcagtgagtgcaggtgcagtgggcaaaggtgcagtgggtgcaggtgggcacaggtgcaggtgagcacaggtgcagtgggtacaggtgggcataggtgcagtgagtgcaggtgggcacaggtgcagtgagtgcaggtgcaggtgggcacaggtccagtgggtgcaggtgcagtgggtgcagatgggcacaggtgcaggtgagcacaggtgcagtgggtgcaggtgggcacaggtgcagaaggtgcaggtgcagtgggtacaggtgggcataggtgcagtgagtgcaggtgggcataggtgcagtgagtgcaggtgcaggtgggcgcaggtcgagtgggtgcaggtgcagta

SEQ ID NO: 528824 - DNA, 373 bp, Homo sapiens
cactgctttgggcccagtggtccgagaagacccaggtgaggaggctgcattgagctgagatgtaattggttcattgagaaaggcagggaagagcatggcagcagtgggaacagccctcgaaaaggcagcgagctggggaaggcacgtctgtgcagcagtgaaaggccgggggactrgagcagagtgacctccgtgacctcaggggggtctctgacattctccaggcctgctgaccccagcagtggaactggaaggctgaggtttgtcttctgaggactctgggctctttggcctactccaagctgtgccgtgtgagttcaccagcaagatgctctggggaccctgcaagggcattggaggtctcgaggttttt

SEQ ID NO: 528825 - DNA, 593 bp, Homo sapiens
gcttattagcagttagtgacatttgtcatcatgctggggataacaagaggtgacacaagtggctgcctgcatgcagggttggggagcgtgctctactaatgactgcacattcatttagcttacttagccctggaagcagcccccggagrtctcacgcccatgatgaaatgctggcacaaaagtcgaataactggtccaaatgactggaaacagagggcaatgtctttgacatcaggccgacctgggtttgagacacacggctgaactccttactgagctgtgggaccatgggcaagtgacttaacctttctgattatgtttgatcaactgtaaaatgaggatagtagtcacactgacctcccagggtcgctaaaattaaattaagtgatccccaggaaagacttatctccctcctaacccacaccgagcacttggaaagtgtctgctgctgctactgtagcatcactgttactctcaccatcatcgttgtcatcgtcattgtcatctgttgtcttcattgtcaaaaacaacccttggaaagggacgcactaacacgcattatttagctgcctacagatgctcccagagaggcc

SEQ ID NO: 528826 - DNA, 638 bp, Homo sapiens
ctggcttattagcagttagtgacatttgtcatcatgctggggataacaagaggtgacacaagtggctgcctgcatgcagggttggggagcgtgctctactaatgactgcacattcatttagcttacttagccctggaagcagcccccggagatctcacgcccatgatgaaatgctggcacaaaagtcgaataactggtccaaatgactggaaacagagggcaatgtctttgacatcaggccgacctgggtttgagacacacggctgaactccttactgagctgtgggaccatgggcaagtgacttaacctttctgattatgtttgatcaactgtaaaatgaggatagtagtcacactgacctcccagggtcgctaaaattaaattaagtgatccccaggaaagacttatctccctcctaacccacaccgagcacttggaaagtgtctgctgctgctactgtagcatcactgttactctcaccatcatcgttgtcatcgtcattgtcatctgttgtcttcattgtcaaaaacaacccttggaaagggacgcactaacacgcattatttagctgcctacagatgctcccagagaggccatctctctggtagcaygtgtgttttgggatgtggggccacct

SEQ ID NO: 528827 - DNA, 327 bp, Homo sapiens
cttccatactctctctcttgctaaatgattgtggaccagggactagagtggcctgaaacacagtctctttccttgagagggaaaatgcactcctaaattgatgccatgacattttattgagggcccactctgtgtcagggtctgtgctagctgctgaggacacaggtgagcaaaatactgttctgaacgcacatccagtggggccattaggtaatcccacaaaaagccggcaactcacraccacagtgagtgcagtgaaggatgcagcaccctaagatcatgagacaggacctgacctggttctcggggggccgggagatgtttgag

SEQ ID NO: 528828 - DNA, 310 bp, Homo sapiens
ttgctaaatgattgtggaccagggactagagtggcctgaaacacagtctctttccttgagagggaaaatgcactcytaaattgatgccatgacattttattgagggcccactctgtgtcagggtctgtgctagctgctgaggacacaggtgagcaaaatactgttctgaacgcacatccagtggggccattaggtaatcccacaaaaagccggcaactcacaaccacagtgagtgcagtgaaggatgcagcaccctaagatcatgagacaggacctgacctggttctcggggggccgggagatgtttgag

SEQ ID NO: 528829 - DNA, 590 bp, Homo sapiens
attccgactttgatgcaggaaggttgaaaagccaagagacagaaggaagcggggagtgacttccagcccacaggagcagcaagcacaagtccccgcggtggaaaggaccttgagatggtgggttgggttggaggaaaggaggaaggaggaagcaggaaagggagaggggcttgggtcaagacgcctcccgtcttccctgcccacacaccggctggggtggcagaggcatgaccacgctgctgcgggagcctggggcggccacagtgcgagtgggtgggatctrcgaggagcccgagtgtctctgcagggaaatatcagggaccgggcagcaggggttgctctgggaggggacttggacttgcttttcgcagtcgactcttctgtgctgcttgaatcctttactgtgtgccacctgtaatcaacctgtaatcaacgtgctgtaataacgggatccacgcagatgcttggccacaggctcccggctaaatccttccctgcaccgcagtttccgtcctgcactagcttcaaaaatgtcttttctcactgggtcgacctgaggtcagaccctgtctgtccctaatcctcctggt

SEQ ID NO: 528830 - DNA, 592 bp, Homo sapiens
tgacgtgactgtgacttgctggccgagggccctgccatcctgcagttgggtaactgagccatttattttgctctccaagtgctgagcccctcagcattaaggtgcaaacccagggatggcaagtgaagggccagaccctcagaggctgcagcagccgagcttcaagagacggaaagcaccaggtccttccttatgccytgctagtgcctcctcttctgggaaggctgcctgtcagacctagggacccccggctctgtggcccctccatccatgggtgtgccccgttcctgggctcacggtgccatgtgtggtcatctgcgtggcttcctcagagtgtgagacccctgggggcaaggactgtatcttactaacctccaccttgccagggtttattacagtgccagacacgtagccggtgataagtaaacacctgtttaatgcctggctgagggtcaaacggtgggtgcagaggtgagttggttctctgcagccatgacaacccctgcatctcagagacctacagcaatcaccgtttgttgtcccctgtctgggttggcctgtgatctgccccgtgggtctgctgactccagcc

SEQ ID NO: 528831 - DNA, 549 bp, Homo sapiens
cttgctggccgagggccctgccatcctgcagttgggtaactgagccatttattttgctctccaagtgctgagcccctcagcattaaggtgcaaacccagggatggcaagtgaagggccagaccctcagaggctgcagcagccgagcttcaagagacggaaagcaccaggtccttccttatgccctgctagtgcctcctcttctgggaaggctgcctgtcagacctagggacccccggctctgtggcccctccatccatgggtgtgccccgttcctgggctcacggtgccatgtgtggtcatctgcgtggcttcctcagagtgtgagacccctgggggcaaggactgtatcttactaacctccaccttgccagggtttattacagtgccagacacgtagccggtgatmagtaaacacctgtttaatgcctggctgagggtcaaacggtgggtgcagaggtgagttggttctctgcagccatgacaacccctgcatctcagagacctacagcaatcaccgtttgttgtcccctgtctgggttggcctgtga

SEQ ID NO: 528832 - DNA, 613 bp, Homo sapiens
gctttcattggtgaagagggagatgggaactgcttcctcttgacrttgacaatgtcagcagccagggccccttactgggtgtttcttgtgtccgggatgctggtctaaggttgtgacaagaaaggttttatcctcacaggagccccatgaggctgatgacatcatagtccttattttacagatgtgtaaactgaggcatagggaggccatgtaactggccatggtcatgcagctcgttggtgccaggctgggacttgaacccaggctgccagcgccagctttccgctctgtgctagaccctctctgaggatgagtggattaatccatgtcagcccttggcacagggcctggctcagggtgcacctcggagagcacttcttcctgtcctcaccagccacacggggaggataggacagcccctggggaggagagcctctggcccagaagggtctcccagcttgactttcctttagggcattgttaggccatccagatgcagtgtcctcacgcctggcgttaaaggtataatgcagtcattttatttaaacacagaagaggatgggaatctgcatttcacctctcgggagcctcaggcctggcccggatatgacct

SEQ ID NO: 528833 - DNA, 613 bp, Homo sapiens
gctttcattggtgaagagggagatgggaactgcttcctcttgacattgacaatgtcagcagccagggccccttacygggtgtttcttgtgtccgggatgctggtctaaggttgtgacaagaaaggttttatcctcacaggagccccatgaggctgatgacatcatagtccttattttacagatgtgtaaactgaggcatagggaggccatgtaactggccatggtcatgcagctcgttggtgccaggctgggacttgaacccaggctgccagcgccagctttccgctctgtgctagaccctctctgaggatgagtggattaatccatgtcagcccttggcacagggcctggctcagggtgcacctcggagagcacttcttcctgtcctcaccagccacacggggaggataggacagcccctggggaggagagcctctggcccagaagggtctcccagcttgactttcctttagggcattgttaggccatccagatgcagtgtcctcacgcctggcgttaaaggtataatgcagtcattttatttaaacacagaagaggatgggaatctgcatttcacctctcgggagcctcaggcctggcccggatatgacct

SEQ ID NO: 528834 - DNA, 613 bp, Homo sapiens
gctttcattggtgaagagggagatgggaactgcttcctcttgacattgacaatgtcagcagccagggccccttactgggtgtttcttgtgtccgggatgctggtctaaggttgtgacaagaaaggttttatcctcacaggagccccatgaggctgatgacatcatagtccttattttacagatgtgtaaactgaggcatagggaggccatgtaactggccatggtcatgcagctcgttggtgccaggctgggacttgaacccaggctgccagcgccagctttccgctctgtgctagaccctctctgaggatgagtggattaatccatgtcagcccttggcacagggcctggctcagggtgcacctcggagagcacttcttcctgtcctcaccagccacacggggaggataggacagcccctggggaggagagcctctggcccagaagggtctcccrgcttgactttcctttagggcattgttaggccatccagatgcagtgtcctcacgcctggcgttaaaggtataatgcagtcattttatttaaacacagaagaggatgggaatctgcatttcacctctcgggagcctcaggcctggcccggatatgacct

SEQ ID NO: 528835 - DNA, 637 bp, Homo sapiens
tgtgttagcctcttgtggctgttgtaacaccttatcatctgctgggtggcttatgaccacagaatttactcttctgcagttctagaagctagaaatccaaaatcaaagtgtgggtagggtcgtgctccctgcgagtgctccaaggaggagccattctcttccagtttctggtggttcctgcattcttggcctgagaatcccagcyctgcctccgtgggcacatagctgcctcctctccctccttcctctccccttcatatgaggatagtagtattgcaggcagggcccatctggataatcctggatgatctcctcatctagagattaacttaattacttctgcaaagatccgatttccaaataaggtcactttcacaggttctggggatttggacttggcacatcttttagagaaccccctttcaaccccctgattccactcctcttggttaactcgttcctcttctcattgagctaaagctaggctctgggatttgacccacaaagtcccctccatccctgagatctctgtggctgggccggtccatggcctccaacagaatgtgctgtgaagcttggacttggccctgggcaggtccctcccctgtccctgccccatttccttgttgtcagacga

SEQ ID NO: 528836 - DNA, 412 bp, Homo sapiens
ctgtaatcaatgtcagcaatgcctgtgagtacctctgttgcctagtctgcagaagtctgtggcaatagtggtagcaagctatagtgttagtttcctcattggctgccaaatactttttctatgtacattgargtaattgtgtgctttccttttttcagtttgtgaattttggtaaattacactgttgctttttgagcgataaactaatcttgccttcctgaaataaaaactccacttggtcatggtgtatcacaatttttataaattgttgggtttgatttgcttttttttttagagttttacatcagtgtttttcaggaatattggtctttcattttcttttcttggaatattttctagttttactttgtcagagtaaattctggcttcacagaattatttgtagtctctc

SEQ ID NO: 528837 - DNA, 597 bp, Homo sapiens
tggcactttgctgacccctgatgtgctttatggttcgcactatttgtaccgtgtttaaaaatcctccccagcctagaggtcatcagaattttattcacttctgttatttgcggttgcctttacctgtaccagttaataatggttttctatttgatagtcaaaccaagttctttcaaattaaaatactaagtgaattgatctaaacaacaaaaaaaaaggtaagtaatggaagatagtacatgtggttcaaaaaacaacaaaaattatggtggggcttggaatgagagatgcctggggtccccaccgccgactgtgaaggttgagaggaagttggsagaaggttgggctgccggggataccccaaacgcccccctatgtaagaagtaccaaaaacatgggccctgtggcttgtttttactccattacttactgaatctggaactaattttaaaccttggactggaatgtagtagctccctgctatttgtcaccatgtttaaaaacctggaattagacacagagaaaacagcagcggagtagcagcatcccaggaggtcagacatggcttcctggaggcgccatttgttttccctacag

SEQ ID NO: 528838 - DNA, 570 bp, Homo sapiens
ggtctgggacccccgggaaagtcagggtcccatttgaaagagtgaagctctatgctgattttcacccctctctgtgtaggagctmagcttacctttaaaacctgtgtggatgcatcagcagagtatgagaggcccgcagctcctgcacggtaggtgtgcactggaaattatgcacagaggcacgggctgttttgcctccatcctgtctacagccaccatctaaggagagcagtgggaagcacctgctgccggctttcagcataggtgccggcgatgtgcttgacgtctgccttactttctttcatttatctagtcttcacagtaacccagtaaagcaggtggtactatcatctccattttacagatgagaaaattaagccttggtgagaaggtaactggcccagggccacgtagcttgcagaagctgccgtgcagtgagataggccatttgttagagccctagccctgggcctgggagaagcattctagacacgaaagcactgtggctccttgtttatcttaggcatggctttgaattttcttatattggtttggctttgatcagggtat

SEQ ID NO: 528839 - DNA, 562 bp, Homo sapiens
ggctccttgtttatcttaggcatggctttgaattttcttatattggtttggctttgatcagggtatccgctggcaactgggcaatgcaccaggtgtctcgggcaaaggacttcacacttgctctaaagcagtgcagaatgttggccgggtccggtggctcatgcctgtaatcccagcactttgggaggctgaggcaggcagatcacttgaggtcaggagttcgagaccagcctggccaatatggtgaaacctcgtytctactgaaaatacaaaaattagccaggcgtggtggcaggtgcctgtagtccaagctactcaggaggctgaggcaggagaatcgcttgaacctgggaggcagagtttgcagtgagccaagatcatgctattgtactccagcctgggcaacagggcaaagacaggggggttgggggtggtggcagtgcagactgtcaacacagcatggagcagtggggggttggacatcctcagggggaacatatagaaagagacactgcccagcaagggctctggaacagtgcagcaagcaggctagagccccagc

SEQ ID NO: 528840 - DNA, 521 bp, Homo sapiens
tgtcactcagatcctgtgggccatcacccctggccacatgtcaggccattgtggccagaatttccaagagaaaccgaagatttgatttttttggtgaaatagccttcatgtaaatgttgagagcctcttcctatttttaaaagcaatgtgtgcacccagaaaacatatttgtggaccagatttggcccgggaccacccactggccacctctgatgtgaagtcacttatgcacttgtattgggagaagtacatgtttctttacactgaggttaagkggattttcaactcttgagttagcagggaaaataaatgggtcatcctgtaaagtgactgtcagcagcggaagcctccagggctaccactgtcagtatcctagggagcctcagcgaacctgtctccttcctcgcatatgtgagggggcccttgtgtgcggccctctcagctccacccttgctctaaggaagccgcacagtgcaccgctgagaagtcaggatggacagaatgcctcggttcccagccag

SEQ ID NO: 528841 - DNA, 561 bp, Homo sapiens
gggctaccactgtcagtatcctagggagcctcagcgaacctgtctccttcctcgcatatgtgagggggcccttgtgtgcggccctctcagctccacccttgctctaaggaagccgcacagtgcaccgctgagaagtcaggatggacagaatgcctcggttcccagccagctctgcagttttccagcatgtgggcatggggaagtcacctcctgacatgcgccttactttcctcctctgtaaaagggatgtgactacaacagagcctgtcttttggggccacgggaaggatgcaatgagccgtcacacgtagaatgcctggaatcatgcctggcagagaggaagctctccaggaagaaaaggaagaaatctgagttccatgaggatagggaatttgtctctttcagttttaacagctttgttgagacataattcacacaccacatgcttcacgcactttaagtgtcmaattcagggcttccaacatactcatagagttgtatttccatcagcacaatcgattttaagatattttcctcactccaaaaagaagcctctccctc

SEQ ID NO: 528842 - DNA, 613 bp, Homo sapiens
aactggggacaatgcaattacttgaaaagagaatttatgatgaccaaaactttgcagtagcattttttttttttaaacagcagctaaaactattttagaagcattggcttgactgtgtaaacaaacactgactcatttaagtaattgtaactactgaattcaatatttacaatgctaaatttaaagacattcattagtaatgtgtagccttaaaagaagtatgagtcatttactttatctcttaaaagacaaaacttctcctattaaaagataagaaaacatgcaaatcaaattttatagttaaactcatacattcttaaaatgtaaaagtaatatatgcacagtaaacaatatttggacatgaaaggaaataggagaaagattcgccaacagctttggtgcttcactgatatcactaygtttaatattttggttttttttttgtgcatgtttctttttatatattataattttaattatacatatatgtaacatgtatatgttgcttaaattataaattatgaaatgtttcagacctctagaacaatatagaaaataatataggccacatcatatgcttattacctagatttcagaggtaagtttggacatg

SEQ ID NO: 528843 - DNA, 613 bp, Homo sapiens
aactggggacaatgcaattacttgaaaagagaatttatgatgaccaaaactttgcagtagcattttttttttttaaacagcagctaaaactattttagaagcattggcttgactgtgtaaacaaacactgactcatttaagtaattgtaactactgaattcaatatttacaatgctaaatttaaagacattcattagtaatgtgtagccttaaaagaagtatgagtcatttactttatctcttaaaagacaaaacttctcctattaaaagataagaaaacatgcaaatcaaattttatagttaaactcatacattcttaaaatgtaaaagtaatatatgcacagtaaacaatatttggacatgaaaggaaataggagaaagattcgccaacagctttggtgcttcactgatatcactacgtttaatattttggktttttttttgtgcatgtttctttttatatattataattttaattatacatatatgtaacatgtatatgttgcttaaattataaattatgaaatgtttcagacctctagaacaatatagaaaataatataggccacatcatatgcttattacctagatttcagaggtaagtttggacatg

SEQ ID NO: 528844 - DNA, 622 bp, Homo sapiens
tttgcctctaattcgggttctaaatggaagaaatactaagaattggataatgtgacatacaattgtatgaaaaacaaacaaacaaactgacttccacattttagaaacacactggttctttactatgtgggtcagggtatcacttttactgccatgtcctgctttctggggtctttatagccttctacttttcctgctgctgggtcttctctaagcttctaagagaccrtacaatttgctgattacaaatgtaaacttcagaattacaatggattcctggctccttaatagctatgtgaccttgggcatgttacttatcctctccaaaattcaaattctttatttataaatagggttgttatagggaggcaataaaatcatgtttgtaatatgcttagcagaacacctgatacataaaactatacactattattagctattatttattcaaaataattgggtgattcactgagaccatccctggtttacacaaactgtgttgttcaaaagttcctttggatctctttgcggtataaattacctccaacagttctcattcactctaaaaatatctttcctaaatgttcagtctgagagcagctgaagaaaggagggtcctggc

SEQ ID NO: 528845 - DNA, 597 bp, Homo sapiens
ctggcaccagggtgccagggagagacagtctcctgatgatccatagctgttaacattattgtgttaaatgaatgcagatgtgagggggaagcaacttcctgggcatgcacattaagagacaaaatggtgaagtatgaccttccgggggacactccactggaaaagggaagaacgcctcagatggggatgcatacaacttcctaaacacattgcacgtgctcacctcctaagggtcaggarggcactgcacatgtgggcagcccagcccacactaaggatgaatcataagagaggggagaacatacatgactgttccagttgctccatatcttcatcagcctttagttttgttctttttaatcctcacctttctcagatgggtgtggtggtccatctctttatggctttaatttgaatttccccgatgcaagtgatgttaaacactttttcatgtgcttattggccattcatatatcaccttctgtgcagtgtgtattcaggcctcttgtctatttaaacattttgattgtttgacattttattattgatttataggaatttgttatgtattttggatacaggttctttgccagatgt

SEQ ID NO: 528846 - DNA, 534 bp, Homo sapiens
atagtgaataaaataaggctgagaagcaaccttcatktgctttttcctattgggaactgcattttctttctagttatgtaattatctttctgttcttcatttacttagttaaactttgtaacctttagaaacaaatgtataaggaaaagtagggaaatgcttatatatctagtatatgagaataatgatgggtttcatctaagcatgtttaaaaattaattgagcagtattccattaaatattaaaatctctcaaatcttatttaaaaatttatatcatttgaacctatagcatttcataaagcacagcatcttctgaacattatgaagaagtagaatgctcaaattatgaggcttaattagcacccctcagaggattacaaggtgatgaccaggatacatagtcacctttttttttctcagattggccacatataacaggtatatgtgccttatttattcattcagctaatgattattgaatatctgccatggatactgaactagattctggggatgcaaagataattaaact

SEQ ID NO: 528847 - DNA, 534 bp, Homo sapiens
atagtgaataaaataaggctgagaagcaaccttcatttgctttttcctattgggaactgcattttctttctagttatgtaattatctttctgttcttcatttacttagttaaactttgtaacctttagaaacaaatgtataaggaaaagtagggaaatgcttatatatctagtatatgagaataatgatgggtttcatctaagcatgtttaaaaattaattgagcagtattccattaaatattaaaatctctcaaatcttatttaaaaatttatatcatttgaacctatagcatttcataaagcacagcatcttctgaacattatgaagaagtagaatgctcaaattatgaggcttaattagcacccctcagaggattacaaggtgatgaccaggatacatartcacctttttttttctcagattggccacatataacaggtatatgtgccttatttattcattcagctaatgattattgaatatctgccatggatactgaactagattctggggatgcaaagataattaaact

SEQ ID NO: 528848 - DNA, 534 bp, Homo sapiens
atagtgaataaaataaggctgagaagcaaccttcatttgctttttcctattgggaactgcattttctttctagttatgtaattatctttctgttcttcatttacttagttaaactttgtaacctttagaaacaaatgtataaggaaaagtagggaaatgcttatatatctagtatatgagaataatgatgggtttcatctaagcatgtttaaaaattaattgagcagtattccattaaatattaaaatctctcaaatcttatttaaaaatttatatcatttgaacctatagcatttcataaagcacagcatcttctgaacattatgaagaagtagaatgctcaaattatgaggcttaattagcacccctcagaggattacaaggtgatgaccaggatacatagtcacctttttttttctcagaytggccacatataacaggtatatgtgccttatttattcattcagctaatgattattgaatatctgccatggatactgaactagattctggggatgcaaagataattaaact

SEQ ID NO: 528849 - DNA, 529 bp, Homo sapiens
tcaaagggattactgctaagttagaagaaatatatttaatgtatctgagaaaactgtagaatatttgtgaggtgacatgtaagcactgatcaaatttgtcagttgcaaatgacaaaaactcagcttaattagtttgaggaaaatgggtttatggtctacacagcttagaaatatagaggacaaagctacctctggctagatggatgccattaggccacttactctctctccattcrtcttctcttctttttcctgtgttggctttaatttcaggccgtattttcctgaatggtagtagggttggccattgaaggaaagttatatactcattttatcttcatagctagcagtttcaatacaaaaaaatatgacttcttttcccctgttacttgcagctaaagccccaaggaaggttgtgattagtctgtcctaggttatgtgccatccctgaatgtccctgtgaccaattttagggtgctctgattcacccattttggatcataaactaatccttgtgggaatgggggat

SEQ ID NO: 528850 - DNA, 558 bp, Homo sapiens
cagctgttaccagttgttgaccttggacaaattatgtaacttccatgagcttaacatgaaaataataatacctataacaccggatcttatatgaataacataatagatataaagtgcttaatagtgcctggcacatagtatgatataaaatatgtgttcttcacacaggctccacttccccgacayatactgtgttgaactgctggccttgcctgtgatggacaaagcactgaaatccaaatgtcagaacctatcctacttcaggtataaaggccctgctgtgctgcttgtgtacagcctattgtccaggtacagtacctccagtgggtcatattctctgcacattgtatactaccacagtcaccacagtcgttaacaatgattggttcccttgaaatttaacctacactggctgttttaccttgatagagacatgctacggtttacaaggaatgttaagtacagagtacaaagaaaaaataatgcattttgaagggcctctgtggagaggcggcacaagaaactcttgtttgtggagctacctccaatctttacttt

SEQ ID NO: 528851 - DNA, 604 bp, Homo sapiens
cacctctgttaaataacagcaggcaggacggaagcttaatgcttgtgggtaagaaggatttactggctcaggttagggctctgtataacctggagccacttgctgagcttctgtttcctccgatgtcaagtggcaggaaatattaataatagtacctaggtaggtcttgggctgttatgaagactgcatgagaaaatagatgtaaagcgctatgcacgtggcaatcaacgaatattaaactgttggctgttattaagcccttgcatttgtayagcccttcagttcgcagagtgtatgcacgtaatcgtaccttctgagtctgaggtaggcagcctggcgtccccatccacaggagaggaactgggggcctgaggtgtagtgagcaggagaaggagattccagtctaggtctcccgtggccaatcgttttttgttcgtgcatcatcacagttgaacggcaaaaagcactccatttatgtgtttctagtttaaattcccttttctcctgttagaccatttagcaacactgtacagtgttaaataaaagtgagatcataagcactctccattcaggtttgcaccacgttttataaatatggagattt

SEQ ID NO: 528852 - DNA, 604 bp, Homo sapiens
cacctctgttaaataacagcaggcaggacggaagcttaatgcttgtgggtaagaaggatttactggctcaggttagggctctgtataacctggagccacttgctgagcttctgtttcctccgatgtcaagtggcaggaaatattaataatagtacctaggtaggtcttgggctgttatgaagactgcatgagaaaatagatgtaaagcgctatgcacgtggcaatcaacgaatattaaactgttggctgttattaagcccttgcatttgtacagcccttcagttcgcagagtgtatgcacgtaatcgtaccttctgagtctgaggtaggcagcctggcgtccccatccacaggagaggaactgggggcctgaggtgtagtgagcaggagaargagattccagtctaggtctcccgtggccaatcgttttttgttcgtgcatcatcacagttgaacggcaaaaagcactccatttatgtgtttctagtttaaattcccttttctcctgttagaccatttagcaacactgtacagtgttaaataaaagtgagatcataagcactctccattcaggtttgcaccacgttttataaatatggagattt

SEQ ID NO: 528853 - DNA, 477 bp, Homo sapiens
ctgccgatactttttttttaagggccaatgaaaatcctattacaaaatgcttcatgactctgttgatatcagattttctacactgaatatttgtgtacattcactgtgtrctttggcactatgggtgttagtgtcaccacccaaaataagataagggagtctggaatcccagtttgtaccttcctctcatcacaaccaagtggtcaactatgcagttctgagataagctccaggcagacacaaacacttcggcaaggagctccatggagaccctgtaagcaaacctggatctccccacccatgagataactgggccctgaggggaggagaatgcaggtgatatgtggtgcgttcagagctcttcctgtttggctacttccagacaaaaagagtcaggtagtctcagtgattcagatttcattccgttttttcgagacagagtctactctggagtgcaatggtgtgatctcggctcac

SEQ ID NO: 528854 - DNA, 533 bp, Homo sapiens
atatgaatatactttttatatatttattattattaaatatttctacttaatgaatcaaaattttgttttaaagtctactttatgtaaataagaacaggttttggggaaaaaaatcttatgatttctggattgatatctgaattaaaactatcaacaacaaggaagtctactctgtacaattgtccctcatttaaaagatatattaagcttttcttttctgtttgtttttgttttgtttagtttttaatcctgtcttagaagaacttatctttattctcaaaattaaatgtaatttttttagtgacaaagaagaaaggaaacctcattactcaatccttytggccaagagtgtcttgcttgtggcgccttcctcatctctatataggaggatcccatgaatgatggtttattgggaactgctggggtcgaccccatacagagaactcagcttgaagctggaagcacacagtgggtagcaggagaaggaccggtgttggtaggtgcctacagagactatagagctagacaaagcc

SEQ ID NO: 528855 - DNA, 501 bp, Homo sapiens
ggaatcacatagctccttatctgactcagaatttcccccaaataataaaggtgaaataaaaacagaaggacaagagctcataaccgtaataaaagcccccacctcctttggttatgataaaccacatgtgctagtggatctacytgtggatgatagcggtaaagagtccttgattggttatagaccaacagaagattccaaagaattttcatgagatcagctaagttgcaccaactttgaagtctgattttcctggacagttttctgctttaatttcatgaaaagattatgatctcagaaattgtatcttagttggtatcaaccaaatggagtgacttagtgtacatgaaagcgtaaagaggatgtgtggcattttcacttttggcttgtaaagtacagacttttttttttttttaaacaaaaaaagcattgtaacttatgaacctttacatccagataggttaccagtaacggaacagtatccagtactcctggttccta

SEQ ID NO: 528856 - DNA, 501 bp, Homo sapiens
ggaatcacatagctccttatctgactcagaatttcccccaaataataaaggtgaaataaaaacagaaggacaagagctcataaccgtaataaaagcccccacctcctttggttatgataaaccacatgtgctagtggatctacttgtggatgatagcggtaaagagtccttgattggttatagaccaacagaagattccaaagaattttcatgagatcagctaagttgcaccaactttgaagtctgattttcctggacagttttctgctttaatttcatgaaaagattatgatctcagaaattgtatcttagttggtatcaaccaaatggagtgacttagtgtacatgaaagcgtaaagaggatgtgtggcattttcacttttggcttgtaaagtacagacttttttttttttttaaacraaaaaagcattgtaacttatgaacctttacatccagataggttaccagtaacggaacagtatccagtactcctggttccta

SEQ ID NO: 528857 - DNA, 501 bp, Homo sapiens
ggaatcacatagctccttatctgactcagaatttcccccaaataataaaggtgaaataaaaacagaaggacaagagctcataaccgtaataaaagcccccacctcctttggttatgataaaccacatgtgctagtggatctacttgtggatgatagcggtaaagagtccttgattggttatagaccaacagaagattccaaagaattttcatgagatcagctaagttgcaccaactttgaagtctgattttcctggacagttttctgctttaatttcatgaaaagattatgatctcagaaattgtatcttagttggtatcaaccaaatggagtgacttagtgtacatgaaagcgtaaagaggatgtgtggcattttcacttttggcttgtaaagtacagacttttttttttttttaaacaaaaaaagcatwgtaacttatgaacctttacatccagataggttaccagtaacggaacagtatccagtactcctggttccta

SEQ ID NO: 528858 - DNA, 567 bp, Homo sapiens
ctgacagtgacatttatctgaaaatgccttttttaaaggtcatttttgaaaaaggtatttttttgttgcttacagaatataagattggaaactattttccttcagcaaattgtcttcttgtttaaattgttgctgttgagaagtctgcttttcactctctgataatattttgaaaataattgctttaaacattttctcttgcctttrgctagcataatttttattagtatttgttattttatcatatttatttgaggctagatgaggacgtctttgtacttagtgtgcgtcccatatttgtgaatttctgatttttaattccagaaaattctcagatttcatcttctcaaatattgcctctctcattctctttctttagaactccacttatttgttagagctcactttattctcctcaccttcttaccctccttctatattttgcatctctttgtgtctcaataatacaggctagatgaaacattctcccctatgtttcagttaactaattttatctgtggtagaatttaatcttttgttaaacacatccaacaaatttttaaagtt

SEQ ID NO: 528859 - DNA, 567 bp, Homo sapiens
ctgacagtgacatttatctgaaaatgccttttttaaaggtcatttttgaaaaaggtatttttttgttgcttacagaatataagattggaaactattttccttcagcaaattgtcttcttgtttaaattgttgctgttgagaagtctgcttttcactctctgataatattttgaaaataattgctttaaacattttctcttgcctttagctagcataatttttattagtatttgttattttatcatatttatttgaggctagatgaggacgtctttgtacttagtgtgcgtcccatatttgtgaatttctgatttttaattccagaaaattctcagatttcatcttctcaaatattgcctctctcattctctttctttagaactccacttatttgttagagytcactttattctcctcaccttcttaccctccttctatattttgcatctctttgtgtctcaataatacaggctagatgaaacattctcccctatgtttcagttaactaattttatctgtggtagaatttaatcttttgttaaacacatccaacaaatttttaaagtt

SEQ ID NO: 528860 - DNA, 567 bp, Homo sapiens
ctgacagtgacatttatctgaaaatgccttttttaaaggtcatttttgaaaaaggtatttttttgttgcttacagaatataagattggaaactattttccttcagcaaattgtcttcttgtttaaattgttgctgttgagaagtctgcttttcactctctgataatattttgaaaataattgctttaaacattttctcttgcctttagctagcataatttttattagtatttgttattttatcatatttatttgaggctagatgaggacgtctttgtacttagtgtgcgtcccatatttgtgaatttctgatttttaattccagaaaattctcagatttcatcttctcaaatattgcctctctcattctctttctttagaactccacttatttgttagagctcactttattctcctcaccttcttaccctccttctatattttgcatctctttgtgtctcaataatacaggctagatgaaacattctcccctatgtttcagttaactaattttatctgtggtagartttaatcttttgttaaacacatccaacaaatttttaaagtt

SEQ ID NO: 528861 - DNA, 493 bp, Homo sapiens
ttccctgtcgggctttgctgccagctgttatttaaacttgtatgctcctgcctagtgagagtcagcagctgagagtcttgtattagcaggaaaccagggcatttatgatggagttcctgttattgacttattcttagacaaaatgccaagtttctttggacagtacagtaggcccactgtggaagcacagtgtgaatactggtgtgacatttaggctatgattttttttttatgtgtccagattttttaaataacttttaaaacaatgttttctgtaatgatttggagacagtggttaacrctacgaaaaaaaaatgtgtttttaaaatagaatctaactggtataccaaagaaatataagtagtttacgctgattccaataactctaccaggttttcttcacaggtgggtacattttagtagaaaaccttgctgtaggctgggaggaaggcaggtgaaacatcatcgcaatagcacagggaatgaaaactgt

SEQ ID NO: 528862 - DNA, 594 bp, Homo sapiens
ttgattgatcacaggttcacattattgctaacaggcttcagatatgcctattcacaagaaacacttgtgcctgggtcgtgactgccctcagcattccttctgggtggcagatgcagtttgtcagttttccaatatcctgctttcatgagtaaacagtttgctgtttactcatatggcctccattggtatactgagttgatcacgaccctcattctttcagccttcaacagtgttatgtatttttcactgccttggtgacttgtaatatttgctttctctaggataaactatcacagagacttgctcttcwccatgattgaatgtaacttaaagagctgctgcttctgtttacttcacttgcctctgaagcattctttgtgtgtatagataagttgtactccacttacactaaaaatactatgtatgtcagaatgcttttttgcctatacactatttatatataatgctttcttttgccttgctgtacttttcaatacattaagaaattccagggagtttccatcttgacagattttatatatagttctatatatattatatgtaaaagtgtgagggatgtatttttgacagagc

SEQ ID NO: 528863 - DNA, 587 bp, Homo sapiens
ctgcgggccacatgtgggccaggatggctttgaatggggcccaacacaaattcataaactttcttaaaacatgatgagaattttttgtgacttttttttttttttttttttttagctcatcagctattgttagtgttagtgtattttatgtgtggcccaagacaattcttccaatgtggcccagggaagccaaaagaytggacaccctgacctaaggtaatggggatgtgggagtgtggtctgaggcatggagagaatgtgggatgttccaacaggaaattcagaccatcttccttctgttgctgcctctgaaatgggtgccttagtccttcccctagctcatgtgtggcgtcatttgcaaagaagcacctaacatgtaggaagtactcacgccgatttcaagaacagacggggaaagcgttttatttgcaaagaataaaccattaatttacacaaacttacatcccagtttatatacattatatatagtttatatacacagtatctcacactggatgctgacccccaaaagcagcattgggcctgctccaggccattctcacaacaaagcccaccccccaatccca

SEQ ID NO: 528864 - DNA, 540 bp, Homo sapiens
atactttctgtcttgcaagattgtggccagtgttgaatgagaaaatgtgcataaagcactgagtacagtatcacagtacctggaacagaacaactgttcaataaaggttagctaaaaaaattttgccagtactattgtattaccattactattattattataatttataatttttatattaccaatgataacaaaacagcagacaactggaaaggcagtgggtgtggaaacaggaggtatgggtttcagccctcactctaccatttaacctatggttgtggatgaatcagtttacttttctgaacctcagtttccttctctgtaaaatggggataataagacctatttattcatctctctcaagcttattgtaaacattaagcagttatcgtctgggagagtgctttgaatagtataaagtatattagaagaattggattattattatcattttggttaattttttctgctgcaatkctgtatacccagtctgatgttaaggggaatgacatgtccagaacgtaagatgcagactaaatg

SEQ ID NO: 528865 - DNA, 445 bp, Homo sapiens
cagttcattctgacacctggctaccaagtgaaggatccaatgttaagaagttggccatcaataactacaaaaaccacttgtggttatttcagtattcctaaaatacgtgggtttttttgtttgttggttttttttttgaccctgtaggctcccagagccaggctataagttaaaggtcatccactctgctcccaccatgctcccaactatcaacaacagttgcctcaaccatggttttgaccgggtgatttcagcctccacttgaatactcctcataataaggagctcactacctgtcttaatctgtttgtgtggctataaaagaatacttgagactggatcatttacgaagaaaagaggtttatttagcgtatagttctgcaggctgacaagatcgagggcgtggccrtggctcctggctttcgtgctgcatcacaacatggtg

SEQ ID NO: 528866 - DNA, 549 bp, Homo sapiens
atattaagacaatgtgctctaaacttcttactaaggtgtgagtgactgatgttagaaagaagatcaggagaatgtatgttcagcaccttacatacattctcccattaatcttcatagtaactaatcatgcagagtgtgtgccattattaccactgagcgggttattttttcaaggccagagctcactatgcctagagtgagcctccaaggcctagtccccctccttcctcctacagaggggaccccaatttcatgccttctctattgatccctccagcttcaatggagcccatcatgagctctgacaatactaagccttgccaatcccaccttcaccaggacagcaagayattgtctgcacctctataccctggaacctgtgctggtccattctacagatgaggctcagccaggtacaatgctcccagggaaggaggcagcccatgagtgactgacatgtgggtacaaaacctcgagccccctgcttcacgctggagcaactctggcatccttcctagtctagagctccctatgagatcagattaacac

SEQ ID NO: 528867 - DNA, 578 bp, Homo sapiens
gccaagattttgccactgcactccagcctgggtgacagagcaaatctctgtctcaaaaaaamaaagtaaatgccatttttgataaatctaggagataactataattatgaaccacaaaatacaaggagggactatgggagagaagaattctcatggctgtggagtctagattaaggcagcagaggatagttctccaaagtaggaggcacaccttgatttgagaggcaacaacctgtttggaatgatagaaatatggtgggcaagctggcagcagaagctttcctgcaatctcactgccttctgcccttttagctccaccatttctaggtcactctcttacgtaccctaactccaagaatccttcaaacaacctccttctggaacaaaccattcattctgatctggttgccctcacccacctcatatcaccttccttgtttacccagtttaaatttcttgatcaattattgtatcagttatttgcatacattcttaatttccttgcccttttttcacttcctcttactcacctgggaaaattccaaccctgctttatcttagattctgagctttgactt

SEQ ID NO: 528868 - DNA, 578 bp, Homo sapiens
gccaagattttgccactgcactccagcctgggtgacagagcaaatctctgtctcaaaaaaacaaagtaaatgccatttttgataaatctaggagataactataattatgaaccacaaaatacaaggagggactatgggagagaagaattctcatggctgtggagtctagattaaggcagcagaggatagttctccaaagtaggaggcacaccttgatttgagaggcaacaacctgtttggaatgatagaaatatggtgggcaagctggcagcagaagctttcctgcaatctcactgccttctgcmcttttagctccaccatttctaggtcactctcttacgtaccctaactccaagaatccttcaaacaacctccttctggaacaaaccattcattctgatctggttgccctcacccacctcatatcaccttccttgtttacccagtttaaatttcttgatcaattattgtatcagttatttgcatacattcttaatttccttgcccttttttcacttcctcttactcacctgggaaaattccaaccctgctttatcttagattctgagctttgactt

SEQ ID NO: 528869 - DNA, 271 bp, Homo sapiens
tttctagaaggaaaacacctgctttccctctgatcaactctcatgacatagagataaagaggtacagcctcaaacctcagraggataaggcattcagggaaaaaaagggggaaggagaagagaaaagtctagttaaggacaaattatggacatttggaggtatatggccaagcaggagtagaagttaaaatggagaactgtttcatgcagcattttctggtccagttgtgtattttgtagttgaaatggaaatacacagtattccaccaca

SEQ ID NO: 528870 - DNA, 639 bp, Homo sapiens
atttgaatgaatgaatgaggccctttggcagccgggaagcccgtcacagccgttgtctccaccctctcccgggctacaccaggccacgccggtaaagttgtttctcctctaggagaaacattcgctaggccttgttgccaacccgcaggcggctgggcgcttcatcccaccctcacccctttccagccaaggtggctgatsggagtcaggctctcgagggcgcattgccacgaaacagcgtgtgtgagcgcgttgtccccggcccccggcgccacttcccctcggcctagcagcctggactggggaaggacgggtctgctgtacccgggaggtggaaggaaaagccgaaagcggagaagtgtgcgggaggggagtctccgcgcggaggcagcccggcctcctccagtgcaggctgcgcgctggggagccagccagggtgagtcactcccggccgcttccctggagggcggcggccacacacacacccgcccatctagtgagggccgggcccagcgctggcgcctagctccagccgggcaccagcgtttcgcgaggcgccgccgccttaacttccttgcgcgctcacgcccaggggccgtcccaggaatctccacgcgcgctcgccggcttcccgagagg

SEQ ID NO: 528871 - DNA, 445 bp, Homo sapiens
tccagccaaggtggctgatgggagtcaggctctcgaggkcgcattgccacgaaacagcgtgtgtgagcgcgttgtccccggcccccggcgccacttcccctcggcctagcagcctggactggggaaggacgggtctgctgtacccgggaggtggaaggaaaagccgaaagcggagaagtgtgcgggaggggagtctccgcgcggaggcagcccggcctcctccagtgcaggctgcgcgctggggagccagccagggtgagtcactcccggccgcttccctggagggcggcggccacacacacacccgcccatctagtgagggccgggcccagcgctggcgcctagctccagccgggcaccagcgtttcgcgaggcgccgccgccttaacttccttgcgcgctcacgcccaggggccgtcccaggaatctccacgcgcgctcgccg

SEQ ID NO: 528872 - DNA, 374 bp, Homo sapiens
gaagctttgcccacagatgtggactgtttatctgtggtttgctgtgttttcttttttccctaggacaggatgggggagatggtggratggatagaaagcaacaacgacaacagaaatttaattggttagtaagacaggaaagccagcagggaaagctgacttcccttaattgccaagaatgttgaaaattgtttctcaaaattaccccaactcctaaattctatccagtgcctctttactgagaacctttacagtgccttgtttgaataacgggttcagtgatggagaagagcctctttactgaggctaaattctattcagtgcctctttactgagaaccttatacagtaccttgtttgaataacgggttcagt

SEQ ID NO: 528873 - DNA, 476 bp, Homo sapiens
tgaagtttttcttttaacactatgtagcttggaaagtcactttccttcccagagcctgttttctcatctgtaaagtggtcctaataacctctgtctcagagggttcttgagaggattacatggcatggggaagctccttgcacaagatctaactctgagtatgcaatttctctccctggtcagatgaacttttgacaaagggctgcctccagacayggctgccaggttgggccttgttctatttctccatgggaatggctctgccttcctgtgtcctcagctcagcaggagctgcccaggaggttggccggcaaacaatgccacagcctcctccctccccgcctccgccccttacccaaaaaagggttccaaatgccttctatagcttctttcctgggcagagagggagggtgggagtaatgagaataagagaggagactgacagagttggtctctgccatgggcttcatcatgga

SEQ ID NO: 528874 - DNA, 476 bp, Homo sapiens
tgaagtttttcttttaacactatgtagcttggaaagtcactttccttcccagagcctgttttctcatctgtaaagtggtcctaataacctctgtctcagagggttcttgagaggattacatggcatggggaagctccttgcacaagatctaactctgagtatgcaatttctctccctggtcagatgaacttttgacaaagggctgcctccagacatggctgccaggttgggccttgttctrtttctccatgggaatggctctgccttcctgtgtcctcagctcagcaggagctgcccaggaggttggccggcaaacaatgccacagcctcctccctccccgcctccgccccttacccaaaaaagggttccaaatgccttctatagcttctttcctgggcagagagggagggtgggagtaatgagaataagagaggagactgacagagttggtctctgccatgggcttcatcatgga

SEQ ID NO: 528875 - DNA, 476 bp, Homo sapiens
tgaagtttttcttttaacactatgtagcttggaaagtcactttccttcccagagcctgttttctcatctgtaaagtggtcctaataacctctgtctcagagggttcttgagaggattacatggcatggggaagctccttgcacaagatctaactctgagtatgcaatttctctccctggtcagatgaacttttgacaaagggctgcctccagacatggctgccaggttgggccttgttctatttctccatgggaatggctctgccttcctgtgtcctcagctcagcaggagctgcccaggaggttggccggcaaacaatgccacagyctcctccctccccgcctccgccccttacccaaaaaagggttccaaatgccttctatagcttctttcctgggcagagagggagggtgggagtaatgagaataagagaggagactgacagagttggtctctgccatgggcttcatcatgga

SEQ ID NO: 528876 - DNA, 715 bp, Homo sapiens
taatattttaaaattccttgtgcatataaaatataatttgtggttccagaggtactcactatttagtactaattttctatatatgtattttttaaaattagaccttacaatattaaaataaatatattaattttaaattaaatatatacatagttttatatacacacacacgcacacacatgcacatgcacgcacacacgcacacacacacgcttagaccttagacctgggtaagtgtggtccatgccttagatcccacaattcaaagtgttcggcatttcataaacacacataggcaaatagttattatgaagacagtcacttctgttacttgcgacctggtgttcagtgctgcatagcgtaaccctaaacattaacttgggactaacatcatcaagacccaggagatgtgtctccaggtcttgtcctctgtctttgagacaaaagggactgaatccyaatgccacaacaccacgtgggctgtgctgtggctgacatcagagatggacgacgcttcagagtacagggaaaatttgagcagtggacgtgcttaagcatgtaagagaatagacaaattaatttgtcaaacacttcctctcaggtagcgtggaatgcaacattttcttacataacaaagtatagtctcccagcagtgccaagtgtccatttccttgcttttcttcatgttctaattcatggttccagaggaacctaa

SEQ ID NO: 528877 - DNA, 715 bp, Homo sapiens
taatattttaaaattccttgtgcatataaaatataatttgtggttccagaggtactcactatttagtactaattttctatatatgtattttttaaaattagaccttacaatattaaaataaatatattaattttaaattaaatatatacatagttttatatacacacacacgcacacacatgcacatgcacgcacacacgcacacacacacgcttagaccttagacctgggtaagtgtggtccatgccttagatcccacaattcaaagtgttcggcatttcataaacacacataggcaaatagttattatgaagacagtcacttctgttacttgcgacctggtgttcagtgctgcatagcgtaaccctaaacattaacttgggactaacatcatcaagacccaggagatgtgtctccaggtcttgtcctctgtctttgagacaaaagggactgaatcccaatgccacaacaccacgtgggctgtgctgtggctgacatcagagatggacgaygcttcagagtacagggaaaatttgagcagtggacgtgcttaagcatgtaagagaatagacaaattaatttgtcaaacacttcctctcaggtagcgtggaatgcaacattttcttacataacaaagtatagtctcccagcagtgccaagtgtccatttccttgcttttcttcatgttctaattcatggttccagaggaacctaa

SEQ ID NO: 528878 - DNA, 715 bp, Homo sapiens
taatattttaaaattccttgtgcatataaaatataatttgtggttccagaggtactcactatttagtactaattttctatatatgtattttttaaaattagaccttacaatattaaaataaatatattaattttaaattaaatatatacatagttttatatacacacacacgcacacacatgcacatgcacgcacacacgcacacacacacgcttagaccttagacctgggtaagtgtggtccatgccttagatcccacaattcaaagtgttcggcatttcataaacacacataggcaaatagttattatgaagacagtcacttctgttacttgcgacctggtgttcagtgctgcatagcgtaaccctaaacattaacttgggactaacatcatcaagacccaggagatgtgtctccaggtcttgtcctctgtctttgagacaaaagggactgaatcccaatgccacaacaccacgtgggctgtgctgtggctgacatcagagatggacgacgcttcagagtacagggaaaatttgagcagtggaygtgcttaagcatgtaagagaatagacaaattaatttgtcaaacacttcctctcaggtagcgtggaatgcaacattttcttacataacaaagtatagtctcccagcagtgccaagtgtccatttccttgcttttcttcatgttctaattcatggttccagaggaacctaa

SEQ ID NO: 528879 - DNA, 715 bp, Homo sapiens
taatattttaaaattccttgtgcatataaaatataatttgtggttccagaggtactcactatttagtactaattttctatatatgtattttttaaaattagaccttacaatattaaaataaatatattaattttaaattaaatatatacatagttttatatacacacacacgcacacacatgcacatgcacgcacacacgcacacacacacgcttagaccttagacctgggtaagtgtggtccatgccttagatcccacaattcaaagtgttcggcatttcataaacacacataggcaaatagttattatgaagacagtcacttctgttacttgcgacctggtgttcagtgctgcatagcgtaaccctaaacattaacttgggactaacatcatcaagacccaggagatgtgtctccaggtcttgtcctctgtctttgagacaaaagggactgaatcccaatgccacaacaccacgtgggctgtgctgtggctgacatcagagatggacgacgcttcagagtacagggaaaatttgagcagtggacgtgcttaagcatgtaagagaatagacaaattaatttgtcaaacacttcctctcaggtagcgtggaatgcaacattttcttacataacaaagtatagtctcccagcagtgccaagtgtccatttccttgcttttcttcatgttctaattcrtggttccagaggaacctaa

SEQ ID NO: 528880 - DNA, 296 bp, Homo sapiens
cccccctgcccggggaccagggagctgaagtgcattcacagaggagaggtcggggagagaaagctgtgaagggggcactggaggactgcagccctccctgccccaccccaagccccactaaggggttctgtctttaccttcagggccagagggcctttggacacagccagatttacatttgtaaaagagcccttggtccacagsgtgggaaatagaaatccggcaggaggcaggtgactccttcagaggaactaaggtatggtgagctcgccagccgaatgggggaagtgaaccca

SEQ ID NO: 528881 - DNA, 562 bp, Homo sapiens
cattccctttcatcagtttgatacaaattggtgtcatgactgtggaaaccagaggttgaagggacagggcaaggaggtgaaggagcctgggtccctaaaccaacactgaagaaggaccacccacctatctagagttgccagaattaacaaaaaygaaaacaaaacatctaggtaggtttgaacttcagataagcaatgaatgccttcttagtatacatcccagcttaggggcagaggcaaccccagccacctttctgaaccagtcctagatgcttagaaagcctgagtagagagttatcacttggaaaaaattatttgtggtttctctgaaattcaaatttaactaggtgtcatattttatctagcaaacctatacctatcagaacatgtgtgtggtactttacaagtgagacataaacatctgttgtttgagccatcatataattaggagtttgttatagtagccagcattaccttagctaataccctatcactctcctgaggcatcagatattacatagtccaggcagatgagcttagtctagcctggtcgatgtacatg

SEQ ID NO: 528882 - DNA, 623 bp, Homo sapiens
gcaagcatgttttacaccaatatgtttgctgaatataaacatcccagtgcaaactcttgcaccccagaactctgggctgcttgtggacagtctttggcaaagtctgaatttataaactgataatacatataattccataggctccatatggttcgtgttatcctggggggaactatacacatttgccttgccccaggatggaaagataaataacagatgtggataatttttatcatacttgtactgaacaataataaaaaaattagaaatgaaggagcagagagagaagtaaactcatgaaaacaaagctcaaatcaattrttctacgttatatctttgcatttttaagaatccaaatacacagtagtactccatagaaaaacctgtcatacagttctccatttctaagggagactatctctagagtgatgagacataatattaaaattgtatgttaataaagttaatcaatttgttattagtgataaaaagtaaaatctacatagagcttactgtgtaccagacactgttctaagcactatacaagtattaacttatttaaccctcattataatcctgagacaaatcctattattatccttattttacagatgaagaaactg

SEQ ID NO: 528883 - DNA, 586 bp, Homo sapiens
aactgtcttcaactcactttataagtattatataatccttgtaccaaccaggcaaggacagtataggaaagcaaaggcatcagccgatcatactaaattcattaatgtttgtagaagatatcatgaccaagttaactcagaaatgtaaggctggcttaacactcaaaaaaatcaaagtaaaggaaaaactacagtaacaaaaagcagatccatgstttactggggctggagagaaggtgagtattaactgcaaaggggcctgataaactttttgtggtgatggaaaagttctaaacctgtttattgtgttattcgcatacatttaccaaaacttactggactggatactctaatagggtaaattttattatatataaattatgcctcaataaacctgattttaaaatatcaaaataataaatctttatactaatttttaataatcatgtgatcatctcaatagaaatgcaatggagaaattttgataaaatttaacattgatctataataaaatctcttaataaactagaaatgaaacaaatctcttaacctcataaagactctctacagaaaacttacaacaaac

SEQ ID NO: 528884 - DNA, 586 bp, Homo sapiens
aactgtcttcaactcactttataagtattatataatccttgtaccaaccaggcaaggacagtataggaaagcaaaggcatcagccgatcatactaaattcattaatgtttgtagaagatatcatgaccaagttaactcagaaatgtaaggctggcttaacactcaaaaaaatcaaagtaaaggaaaaactacagtaacaaaaagcagatccatggtttactggggctggagagaaggtgagtattaactgcaaaggggcctgataaactttttgtggtgatggaaaagttctaaacctgtttattgtgttattcgcatacatttaccaaaacttactggactggatactctaatagggtaaattttattatatataaattatgcctcaataaacctgattttaaaatatcaaaataataaatctttatactaawttttaataatcatgtgatcatctcaatagaaatgcaatggagaaattttgataaaatttaacattgatctataataaaatctcttaataaactagaaatgaaacaaatctcttaacctcataaagactctctacagaaaacttacaacaaac

SEQ ID NO: 528885 - DNA, 609 bp, Homo sapiens
tagtgaaagagatgagaaagagagagagagaaagagagagagagagagaaaaagagagagagcacttcctgaaggaaaaccaacgctgtcatgatgagaaaaatcagccgctacaccagggctccacaaatgtgatccagtgctttgtagtggtccctgatgagatggaccactcagctcattagagcaggcatttgaatacttttatagctatctcatagagtaatatgatgtcagttgaagctaataataaaaattgaggcttctgttttgtaggtattcttttttctagtaacttcaaaaattttgttttacaaactatctatgatagacaaaaaaattctgcagtttcagaacagacaatttgagaagcactgtgaaatatatacattaaaatacaaaaaagaaatggatactggttattttctttggttttagaggtaaataagttgtctggcacaggaacataaggatttggcgctgtgtaaagattaataaaaatggaaggaacaaacttctaattcttcagagaacatggataacaactccaagatgcaaaatgacaayacgatcccgctttcactgatgagtgtatcaacagagacagag

SEQ ID NO: 528886 - DNA, 609 bp, Homo sapiens
tagtgaaagagatgagaaagagagagagagaaagagagagagagagagaaaaagagagagagcacttcctgaaggaaaaccaacgctgtcatgatgagaaaaatcagccgctacaccagggctccacaaatgtgatccagtgctttgtagtggtccctgatgagatggaccactcagctcattagagcaggcatttgaatacttttatagctatctcatagagtaatatgatgtcagttgaagctaataataaaaattgaggcttctgttttgtaggtattcttttttctagtaacttcaaaaattttgttttacaaactatctatgatagacaaaaaaattctgcagtttcagaacagacaatttgagaagcactgtgaaatatatacattaaaatacaaaaaagaaatggatactggttattttctttggttttagaggtaaataagttgtctggcacaggaacataaggatttggcgctgtgtaaagattaataaaaatggaaggaacaaacttctaattcttcagagaacatggataacaactccaagatgcaaaatgacaacaygatcccgctttcactgatgagtgtatcaacagagacagag

SEQ ID NO: 528887 - DNA, 447 bp, Homo sapiens
tggcatgctgctcctgctagtaagttcaaccttttatataaatattactgccaccactgttgttactatgtacatctcgtccatctactcyccagagaaaatcatcaacacctgtactgttcatatggctagaattgcatattaacaagtaccattagagatatccctacttattttcttctcacctatagatttgttatcagaaatgccttaagaaggcatgaaattgcctgatttactttgtattataaaagcagtattgattcatggtaaatattttagatattcctcatcatgtacaaggaaaatcttccacaaatatgctgtccttatagtataaatatctaaatttcacagtgttaaatacaatcaagaaaagtgtgctttttctttttcagcatgcacattcttggcacttagtgtacaaagctatgtatttctatttta

SEQ ID NO: 528888 - DNA, 447 bp, Homo sapiens
tggcatgctgctcctgctagtaagttcaaccttttatataaatattactgccaccactgttgttactatgtacatctcgtccatctactctccagagaaaatcatcaacacctgtactgttcatatggctagaattgcatattaacaagtaccattagagatatccctacttattttcttctcacctatagatttgttatcagaaatgccttaagaaggcatgaaattgcctgatttactttgtattataaaagcagtattgattcatggtaaatattttagatattcctcatcatgtacaaggaaaatcttccacaaatatgctgtccttatagtatraatatctaaatttcacagtgttaaatacaatcaagaaaagtgtgctttttctttttcagcatgcacattcttggcacttagtgtacaaagctatgtatttctatttta

SEQ ID NO: 528889 - DNA, 597 bp, Homo sapiens
ggcccagtgctgggactttcatcagcagcaatgcaaggctaaggacaggtgatagcagatgctgatgagagaagccctgttggaatgggcaggcaggcatcaggctgagtgggcacgagggatgccagcaagagccagagctgagggatgggagagagcagcaaacgatatgttcagcggctactggagagcacctcatgggctcttccggcccctccccycttggcaatgaaaaggaaaaagagtttcttctgtgaaaaatatttagattaattagagaaacctcttcaagaaggtacaattggtgaagccatccctgggacgcgtggggtaggattttgccaatggcctcatcacctcagagggagacacagaaagaaacatgtccacaactctttcaattcttggagagccaatcctctgggggaaggaagataccactctggaatgttctatctcttcactactcctttttatgaggcccggggaacactctgcctggaagcctattcctagccttccctgttacttccctgaaatttcagaaatccctcctaccaggtcttcctggaccccctgtcaggtccatattcatgt

SEQ ID NO: 528890 - DNA, 597 bp, Homo sapiens
ggcccagtgctgggactttcatcagcagcaatgcaaggctaaggacaggtgatagcagatgctgatgagagaagccctgttggaatgggcaggcaggcatcaggctgagtgggcacgagggatgccagcaagagccagagctgagggatgggagagagcagcaaacgatatgttcagcggctactggagagcacctcatgggctcttccggcccctccccccttggcaatgaaaaggaaaaagagtttcttctgtgaaaaatatttagattaattagagaaacctcttcaagaaggtacaattggtgaagccatccctgggacgcgtggggtaggattttgycaatggcctcatcacctcagagggagacacagaaagaaacatgtccacaactctttcaattcttggagagccaatcctctgggggaaggaagataccactctggaatgttctatctcttcactactcctttttatgaggcccggggaacactctgcctggaagcctattcctagccttccctgttacttccctgaaatttcagaaatccctcctaccaggtcttcctggaccccctgtcaggtccatattcatgt

SEQ ID NO: 528891 - DNA, 513 bp, Homo sapiens
catttaatgaaagcagagaagagtgaatatcactgtagaatatcctgcctgtaacatggttaaaacaaaattaaatccacttaacttacagaaggttaagcttgggttatatgaatatgatctcatggggacccwacttccccaaggtgttcaatgaatgagtcttttcattgtattttgtagtcatgtgcatgaagttctgtattttattcccagctgataaaggcctattaaaacacaatgtacacaggacttcgacttctggaaagatggcatagttacacttttccctattcttactgctaagtaccactaaaggccctgtacattatatataaaacacacataaggagaataaaaagtaaagggaagaaagccaactgaccaaagaccttggaaatcaaactgtaaatttgttgggttttctttttgcctcataaatcacaaacttggagttcaagaagctggctactggtaaacaccaatgagtaccaaaaaaaaaaaaaaaaaaaa

SEQ ID NO: 528892 - DNA, 603 bp, Homo sapiens
aggaggagctggccactgagtggggaggatagcaggattaacagacaccagtgtgaacctggatccatgacatgtttgctaagcagagatgttcacagtcacagggacaaagaacagtggatggttctaacggggagatcaaggaaggcttcctggaggaagcagctttggaaggggagagtttgaagggttgggaacagagaggggattgtattctaggcacaaagaacccacaggagggctgagagttggctcctgggtgctctcctctgagtgtggggaaaggctgactgtagaggcagctcacccgagacactgtctcccccataagaccatgcactcctccagagtcttcctcagggcatggcacaggcagggcttggggagggacggagrgagggaggctggagtctcgccaccctggatgttgagagaggagacaagaggctggctgaggctcagtcgggtctcagggcacctcagggagagcagggaatgaggtgggtactctcgaggggccccagcatggcacgtgaggcagctctgtcccctgcgtcctcacctgttcccatgtctccctctttctggaactcagagaacccc

SEQ ID NO: 528893 - DNA, 631 bp, Homo sapiens
taaactgaaagatcagaatgaatatttagaataaataacactgaaacaaaaagaaaaacacaacagaagagatggaaaaaaacatggaggatgcagtgtgagggtttaagaatgtcagagttttaggccaggcgcagtggctcacgcatgtaatcccagcactttgggaggccgaggcaggtggatcacgaggtcagggattcgagaccagcctgatcaaggtgaaaccccgtctctactaaaaatacaaaaattagctgggtgtggtgatgtgtgcctgtaatcccagctacttaggaggctgaggcaggagaattgcctgaacscgggaggcagaagttgcagtgaaccaagatcacaccactgcactccagcctgggcaacagagcgagactccatctcaaaaaataataatatcagagttttagaagagagggagaaaattggacagaaaaatcatttgaaaagtggttaaggattttccctgatccttttgtatctcataaacatgatgattgggttttcacacacacatgtaagatgtgtcaccatcaatccttgttatgacatcagcacattacccatctaacatgattgaaaaaaaaaaaaaaagaattttccccaaatggtg

SEQ ID NO: 528894 - DNA, 633 bp, Homo sapiens
ttcgcctctcactggaattacaggtgtgagccactgcacccagccaactgtgttgttttgaaatatttaacatattgttgactataggcaccctgttgggcaatagatcacaaaagttattcctccttttatgaaactttctaccctttgatcaatgactcctcattctctccctcccacccccatcattctattctctattctgtatgagttctcttcattctattctctatgagttcaatttcattagattccacagataagttagattacrtggtatttgcctttttgtgtctgccttatttcatttagcataatgtcctccagattcatccacgtgtcacaaatgacagcctttctaaggctgaatagtattccattggggaatatatatatataaataataatatataaatggataaagaaaatgtgatgtatatatcatatatatgtcatatatatatatcacattttctttatccattcatctgttgatgaacacttgggttgtttccatagcttggctcttatgaataatgttataatgaacatgggagtgaagatatccctttgacatattgatttgtttctttggatatatacccagaagtgggattactgggttttatgcga

SEQ ID NO: 528895 - DNA, 593 bp, Homo sapiens
tagactctgcccatgccccctgcccccccmaaaaaaaaaacttgtgagaattttattttaaaaaattatcaaggaaatgataagtttatagcaggtaatgaaatagaactatactactattaagtagtcatgatgaagttgcaatatttttcacaaatttaaagtatctgggtttttttttttttgctgatcttgaaagtaatacttgcttgtctttaaaaaacgcaaacaatgtagaagtgtataatgttgaaaataaaagccttcttgccatcattcctaattctataaataactactgctaatagtttgatgaatctcatgtatgacaaggacttggtacttctgtcaccattttttattttctcccttatgacaccaataattcatcatagtattcttttcccttgagcttggatattctcaattggccattcttggcagctatttttgatagactagagttgatgtttatgatgaaaccagttgaccatccttggtatatataattttaatcctttacacataaatatgcacattatttaggtgatttttagagactgttgctgttggaatattagtggaaagttgtg

SEQ ID NO: 528896 - DNA, 582 bp, Homo sapiens
gaccacggcccccatggctggctgcctgtcattttattaccagatccagcaggggaatgacaatgtcttttccctttacactcgggatgtggctggcctttacgaggaaatctggaaagcagacaggccagggaatgctgcctggaaccttgcggaggtcgagttcartgctccttaccccatggaggtaggtgtactggtgcgcaccagctgttcactggcactctttagacatgccacccacacacagggctggagatggagaggctgtgcagcctcacactcagtctgtcttttctgctgtgcctcaactgtattctttctcatcctcagcccctctcctgctctcccttcctctgtgtcccctttgcctgcctcctttatcaccttcatttcctagcaagagtcatttttatgagaacaaatatggctaaagccagttaaccaactagacttcttggcgaccctctccttctgaaccttgcactgtggtcacagagggttcaaaagaggagatcagaaccctccaagtaaaactcagtcttgagctacccttcctgagagcagttttgaaggttttcc

SEQ ID NO: 528897 - DNA, 629 bp, Homo sapiens
ctggacctagcattttcttccytcatctccctaataggctaagacaggaatcatatcaacatacacagcatcttgttcccaccatctggttgcgtttagagttaatccagtctcccggacctgagacccatctcatagtcacaggtactcaacagcaatgtcatgtggccctccaatgaactgccccccacacccggtgcttccagaggaccgtgagaccatcccccacttccttctccatccctttgccccctcactctccccctgcacaaccacatctgtcccaaagtttagaagatgggagcaagccttccttttggtctgtaaatctttgaatgcctaagaggtgatcccattcacttctagaatcctgccataaagcccagcctcaaactgagagctctactgctctgccatatgcagacccaatctcctttctgggcttgggtccaccccacacccagtgactgggtatatcctaacactcatgggaacgcctctcagagaatcactacctaaatcccaatattggccattcactgacaacacattgccccaacctcctgtctgtttggaaacccaggcccaattactgcctaggctacagctaaggttgccccagcctttct

SEQ ID NO: 528898 - DNA, 629 bp, Homo sapiens
ctggacctagcattttcttccctcatctccctaataggctaagacaggaatcatatcaacatacacagcatcttgttcccaccatctggttgcgtttagagttaatccagtctcccggacctgagacccatctcatagtcacaggtactcaacagcaatgtcatgtggccctccaatgaactgccccccacacccggtgcttccagaggaccgtgagaccatcccccacttccttctccatccctttgccccctcactctccccctscacaaccacatctgtcccaaagtttagaagatgggagcaagccttccttttggtctgtaaatctttgaatgcctaagaggtgatcccattcacttctagaatcctgccataaagcccagcctcaaactgagagctctactgctctgccatatgcagacccaatctcctttctgggcttgggtccaccccacacccagtgactgggtatatcctaacactcatgggaacgcctctcagagaatcactacctaaatcccaatattggccattcactgacaacacattgccccaacctcctgtctgtttggaaacccaggcccaattactgcctaggctacagctaaggttgccccagcctttct

SEQ ID NO: 528899 - DNA, 504 bp, Homo sapiens
taagttcaccagtcataatgaattacagcccaccctaacaatcccattgtgacttaattacctcctaaaaggttctatctycaaatacagtcacattctagtacgtgggttagggcttcaacatacctctttggagaagacacaattgaacccactcccaggatttagggcaatgggttgaacattgaaggaacagggtaaactcttaagttaaatggctgacaaccaagccctgtcctgctcctcatgtcattatgctaaaataatgttatagtctgagcttgcttgactagtagaccatgtcctaccttctcctcataaatacacagtctatgaaaatctaacaaaagcacatatagtagatattaaattgctcctaattctactcctgtatttacattatttctgggttatgtggacacactttagctaacatagtattgctttgtctaaagaaaataatttggttgtgtttgctttgtcttcttaaaaactttgaaagat

SEQ ID NO: 528900 - DNA, 411 bp, Homo sapiens
aaaaattcttaacttggcatttctgtaagacatgcgtagggaccctgkgctcctgctgctgtgccacacggattcctctgacctccaagtggacatgcagcacctgggaagttcccaagtcctgattcgagatgccctgggcatgagtcagtaagtccttggaactcaagttatctaaggcaagagacatgccagtgaaatggctctgaggttggctatgcttcctctggaccaactttaactggctcaacatctgatttttaagatatgatgatttaggagtttgaggaactgatattcttggtgggaaaatttcagtttcatgagaagtgcttcttttcacgtttgtcactaagcagcttcctgacttgctggttgtcaagttgttcctagtttgtgattgaagagtac

SEQ ID NO: 528901 - DNA, 624 bp, Homo sapiens
attccatttccttgtcatagggattgatacgaatttaagtcaattagaggatggcacttccctagctacagaaataggatcagaatctatggccatatcaccctgcgcatgcttgatctcagaagttaaacagggttgggcctgggaagtgcttggatgggagaaataggatcagggtagtccaatcagagtgaagcttgggacttctgtatggaggtcctaaaaactggccttggccttagctctgtgttggatgtgaatgagaaaccatcacgaatgctgttagcagtcattttatgaggccagcctgagaacaaagccaacatttagaggcagaaaaaactgagaggattgcaggaaaaattgagccagagcctggaccaaaccatccctggatcaagccatgaaaagtcctgtggacttttcagttacaggagccagtaaattcccttaattgtttaagccagytgaatagcttttctgttacttgacacagaaataatctcaatcgatagttcctttgttgtgcttgagtaatttaggcttaattgaaacaaacaggcctcattaaaaaagggtacatttatagcttcagaatataaaatacatttattgtttttgtta

SEQ ID NO: 528902 - DNA, 638 bp, Homo sapiens
tctttcatactaacaggagactatttaaggcttttatttctcccatttaatgtgactttcctaagttttgctgcagatgtaacacttttaaaacaggctgctgcccagacactgcagagggtgatgtgtggaatctaccacgtgcgccatgctgcctttctaaaggccaaacagttttaaaatctagcctgaaggtttcagatcagggatttcggcctgtatatcaagagttagagttggccgggcacggtggctcacacctgtaaycccagcactttgggaggccgaggcgggcagattgtttgagcctcaggagttggagaacagcttgggcaatgtggcaaaagtctgtctctacaaaaaatacaaaaattaggcaggcgtggtgttacacgcctgtagtcccaactactcgggaggctgaggtgggaggattgcttgaacccaggaggcagaggctgcagtgaaccgagatcatgtcactgtactccagtctgggcgacacagcaagaccctgtctccaaaaaaaaaaaaaaaaaaagttgggggaagcattccatgtgcagatggagggactggcccgagtcaaggtgggaggcgtgcaaacgcaggctctcacagtgcgtggccagcagcgt

SEQ ID NO: 528903 - DNA, 536 bp, Homo sapiens
tgctgctgattgactgagtggctgggtaactctgcgcatcactgacccccagcctccccctctgtacagtgaagattgtccagcctgaactgtatcactctcgggggctggcatgatgcagacagggccctgtgatggtacccaacaatgaactacaaactaggccctttctgagccccggtggaccatactccaatagaggagaggtcagatgggtgtataggtgctgagaactattaaccctgcactctcccctctcagagatgccctagttccaattggtctcctccccgtttacttgattttgcctccataaaactgttgtgccataaattgtagtgtaattctaggttcgtacaccccaaaagagttttccattacactacmgcagtgagcccaaatgtgatcaactatcagaatcacctagtagcttttttttttttcccagaaccacctcatatcctcccatcccatcctatcctttcctattccctctctatgcagagaattgctgtggggtaggggtaggggagatt

SEQ ID NO: 528904 - DNA, 473 bp, Homo sapiens
gatttccttctagtctcttttctcagtgcaatacagcagcgccattcaaaacagagccccacatttatttagcgcttctgccttttgtctaatggctccatttgtgaaccactctgccatgggagcccagacacggattctccccaaggtctggagactctcaggctggaagttctctgtgcccaagatcagagcccagaaaggagctcaggccaaagagtttgccctggggggttatctgtaaggttgtcgggaatgacagcaaagagccaggctgcttgatgaatccaacgaacagaaaaatctgtcaaaacacgcagaacgttcattgcagggatcgtggaaacattgcctatttgtttggagcgcgtttaattatttttaaacatatgcagtctgtagttcagtgaacatgtcagkaataatagaggaagaaaagcaaacgaggggagggcggcgctgttcccagagcg

SEQ ID NO: 528905 - DNA, 632 bp, Homo sapiens
tgctaaaagaaattttaaagccaaggaaaaataaagtagtatgcatattaattgctggacaaatcagatttctatacacatttccctgcagtttcactaagaaataaccattcaaatatttccttacctctgcaaataggaggtgatgtccatgttccattttctaaacaaacactcctcaggaaaccctccaacatgtatccactgtaacatgagtaggtgatcatgtctccatattgataatgtacgcctcgagcaattgcattttctacgtgagctggtggaccacatgagatttctacaggataacaaaacracaattaagcttgtgctattaacacagactgagaacacagtctcatctctcagaatgaattaaagagcaaaaataaaatacataagggaaacattttcacctacttatctagaatagtaagaactaaaagaattaactgctgctgttgagaaaaattggacacacaaagatcaaaggttttttgtcttctgattcaaatgttgaaggtgagcctgttttaaacctaaggaaagcagtctgtaggacaccaagaattagctcttgtacctcatcaaataaatggctgcaagagactttcaaaacaggatgcttatta

SEQ ID NO: 528906 - DNA, 632 bp, Homo sapiens
tgctaaaagaaattttaaagccaaggaaaaataaagtagtatgcatattaattgctggacaaatcagatttctatacacatttccctgcagtttcactaagaaataaccattcaaatatttccttacctctgcaaataggaggtgatgtccatgttccattttctaaacaaacactcctcaggaaaccctccaacatgtatccactgtaacatgagtaggtgatcatgtctccatattgataatgtacgcctcgagcaattgcattttctacgtgagctggtggaccacatgagatttctacaggataacaaaacaacaattaagcttgtgctattaacacagactgagaacacagtctcatctctcagaatgaattaaagagcaaaaataaaatacataagggaaacattttcacctacttatctagaatagtaagaactaaaagaattaactgctgctgttgagaaaaattrgacacacaaagatcaaaggttttttgtcttctgattcaaatgttgaaggtgagcctgttttaaacctaaggaaagcagtctgtaggacaccaagaattagctcttgtacctcatcaaataaatggctgcaagagactttcaaaacaggatgcttatta

SEQ ID NO: 528907 - DNA, 632 bp, Homo sapiens
tgctaaaagaaattttaaagccaaggaaaaataaagtagtatgcatattaattgctggacaaatcagatttctatacacatttccctgcagtttcactaagaaataaccattcaaatatttccttacctctgcaaataggaggtgatgtccatgttccattttctaaacaaacactcctcaggaaaccctccaacatgtatccactgtaacatgagtaggtgatcatgtctccatattgataatgtacgcctcgagcaattgcattttctacgtgagctggtggaccacatgagatttctacaggataacaaaacaacaattaagcttgtgctattaacacagactgagaacacagtctcatctctcagaatgaattaaagagcaaaaataaaatacataagggaaacattttcacctacttatctagaatagtaagaactaaaagaattaactgctgctgttgagaaaaattggacacacaaagatcaaaggttttttgtcttctgatkcaaatgttgaaggtgagcctgttttaaacctaaggaaagcagtctgtaggacaccaagaattagctcttgtacctcatcaaataaatggctgcaagagactttcaaaacaggatgcttatta

SEQ ID NO: 528908 - DNA, 614 bp, Homo sapiens
agtctgtaggacaccaagaattagctcttgtacctcatcaaataaatggctgcaagagactttcaaaacaggatgcttattaaattaggagagaaagcatgatgattgtagtctactgtttcagagtaaagatcattaattgtagtrctgcatattgtatcagggctattttattaatgcctagcatttattagtgcctagcatgcaacatgctcttgaaaatgagtcagtgaatgaatattgtctctagtctatagatgctcagtgaatacaacttgatgaggtttatgaaattcaaggtttcatgttagttttcctcttttcaatactgtaaaagagtgactttctgcttttgggatctgtgatagattggatgacaatcctctcttttaaaagggacatatgcgtatatttaaatagaaatttttataactgatattgttttgagaattttacaagaagcctcaagataattagaattattctgtggtgggcaagggttagattggtgtcaggattctaatcagaatccagtttgttcaacttttgaatgaagagtccttataagccggcgtctaaaagatcactttgttgtcataatactaccataaact

SEQ ID NO: 528909 - DNA, 614 bp, Homo sapiens
agtctgtaggacaccaagaattagctcttgtacctcatcaaataaatggctgcaagagactttcaaaacaggatgcttattaaattaggagagaaagcatgatgattgtagtctactgtttcagagtaaagatcattaattgtagtactgcatattgtatcagggctattttattaatgcctagcatttattagtgcctagcatgcaacatgctcttgaaaatgagtcagtgaatgaatattgtctctagtctatagatgctcagtgaatacaacttgatgaggtttatgaaatkcaaggtttcatgttagttttcctcttttcaatactgtaaaagagtgactttctgcttttgggatctgtgatagattggatgacaatcctctcttttaaaagggacatatgcgtatatttaaatagaaatttttataactgatattgttttgagaattttacaagaagcctcaagataattagaattattctgtggtgggcaagggttagattggtgtcaggattctaatcagaatccagtttgttcaacttttgaatgaagagtccttataagccggcgtctaaaagatcactttgttgtcataatactaccataaact

SEQ ID NO: 528910 - DNA, 515 bp, Homo sapiens
tttttgtttttgtttttgagacagggtttcactcctgtcacccaggctggagtgcaatggtgcgatcttggctcactgcaacctctgcctcctgggcttaagtgatcctcctccctcagcctcctgagtcgctgggactacaggcacattccatcacgcctggccattttctgtattttttgtggagactgggtcttactatgttgcccagcctggtcttgaactcctgagctcaagtgatccaccctccttggctttccaaagtgctgggattacaggtgtgagtcacgacacccagccaaaacctacctttaaataccattrtaacaataaaaataaaaaagagtttcctgaataactaaatgacaacatggtgtaatgtaaaataggcctcttaaatttcaaatttagtgatacggtaatgctttcagcaaaactgattgatctagctctcccactaaagtaaacagagacctaggtgctgcggaagggattttaatattacaaagcaacag

SEQ ID NO: 528911 - DNA, 515 bp, Homo sapiens
tttttgtttttgtttttgagacagggtttcactcctgtcacccaggctggagtgcaatggtgcgatcttggctcactgcaacctctgcctcctgggcttaagtgatcctcctccctcagcctcctgagtcgctgggactacaggcacattccatcacgcctggccattttctgtattttttgtggagactgggtcttactatgttgcccagcctggtcttgaactcctgagctcaagtgatccaccctccttggctttccaaagtgctgggattacaggtgtgagtcacgacacccagccaaaacctacctttaaataccattgtaacaataaaaataaaaaagagtttcctgaataactaaatgacaacatggtgtaatgtaaaataggcctcttaaatttcaaatttagtgatacggtaatgctttcagcaaaactgattgatctagctctcccactaaagtaaacagagacctaggtgctgcggaagkgattttaatattacaaagcaacag

SEQ ID NO: 528912 - DNA, 580 bp, Homo sapiens
taagcagcagaattgggatcagaatttggttgatcagtttccaacacctacaccttttccayaacactgctctctgtctctctgttttgaaagtgaagaaggttagatcatactttctgggtgtcctgggcaaactgtattgcagtgtcactaatacaaattatttgacccacccattagcaaagattaattcattagttatcaaatatttctcctgagatctcttttagttttataaagcatcagctattatagagaggttgaaattccttcatcctaactgacaatatttatgaaatctataagagacagagaaatcaggaaaaaaataacagtgtatcagcagagctatatgcagccaccttacctaagttcacacatcatgctatggatggaagtggtctcaaaatgaatactcagacattcccaatagttgagtacagcccccagttagggcctgctgcatttcgttgctttagataggctcagttctttgtatgaagatctgaacttagcttggaataatagcctatcaatatcacagtgatgctttagaagaacacatcttaggataaactgg

SEQ ID NO: 528913 - DNA, 511 bp, Homo sapiens
ttctttacactgcagacataatctttacaaagcttaagcatgcattttgctttaaattattctttataactttttttttgcttgcatcctatttcatggagtagatgtatcagaatttacttagcctttttacttaaagacattgagattgctttcattttttaaaactagatatagtgctacaaatattattatatatgaaactgtttttttttccttgaggtatttctgtaccgaaagttcccaggaatggggtaattgtgtaaaacggaatragcattttgtgtctcctacatatgtttgcaaaatcgcctttcataaggtatggaaaattgccaatgcccccggccatgtaagaaagtgctagtttccaccaagtgcggtggcacatgcctgtaatcccattactttgggaggccaaggtggatggatcacttgaggccaggagtttgagaccagtctggccaacatggtgaaaccccatctctactagaaatacaaaaattagctg

SEQ ID NO: 528914 - DNA, 551 bp, Homo sapiens
tcacagcccacggggcctagaaagtgccttatatcctcctggcatctctcgcccaccctctgccaggcattctgtgccctgcccatcccgctaccccactgtggccgggcagaggagactggtttgtgtccttgtgcgggcaccaatgggtctcgtggatcccctatagctccctgcatttctcacggacaagttcatttccctctctgctttggtctccctgttctttttctcccatcctccaaacctcccatcagaaaaattcttccaaactctagtgagctgaatcgtgtctccatcaaattatctcctcctggaacctcggaatttaaccttacttggaaagagggtcttcactgatgtcattgaagtacggattgagatgaggtcacgttggattaggatggacccyaaatccaatgagagtgcctgtaagagacagaagaggacagagggagacacagggcagaggccgacgtgaggatggaagctgagattgcagtgttgtgtccgcaagccgaggaacaccaagggttgccggccaccagcag

SEQ ID NO: 528915 - DNA, 671 bp, Homo sapiens
ttccattctattgtgtaagctgtggatgtttaccatattctttgtcccaagatgatgatgggatactggcacaggatctaaaggaactacattttcaggcttyatacaataacttctgacttcctccctggagtagagaggaggcatctgaaaacatcacactgggaacattggtcctgactgaaaaccccaggagatcaattctaaagtatgtttggccctgaaactttttttaacagtatctaccaaatgccttaaaattatactctttcattccttatctcaaatggcttcagttcaaagaaggaaatggtatttctttccatccctttctatcttgcttatggagagacaacctgagcccttaacactgtataactgtataaacttaggctaattgtcaggggattgatcactttaatgtcacggtcatgccaatccccgttcttccaaggttcagtccctacctcttgagttccatcctaccaaaaatgttggtaaataaaatcaagataatatttattttagcttaattcaacaatcacagtataattcatgaataccctgccacccttggacatcatttttaagtgcttaactttctgccttccaagttgtcataggaaaagtccaaatcaatgtatgcctatcacgtgcacactatataatag

SEQ ID NO: 528916 - DNA, 562 bp, Homo sapiens
tttagatcccacagataagtgataacatacagtgtttctctttctgtgtctgattcatttcactttatacataagtacttcgaaaatcttgagtactgtgcctataataaggtaacatttcaactttcaaactcacattcaaaacccaagtaatcactggtaatcactgcattgctacagctcaaacaattgacacacytgaaaagaccagaagagtgaaatagggaaaacattacctggttccagagagaaaactgactgggcaagggaggtgcgttggaaaagcactatcacatggtcattcgtgtttccacttattgagctgtgcccagttctttataattatccattttctcttttcctcctcacaatcaattcctctgcagagattaacgcccactgcatgacaagaacagaggccccaagaggtggagttggcccccacctactgattattgccaccgctcaaaagcaatattgggaacagccctacagtctccagcagggcccagaccccatatttcaaaacaacggttcatagaaaagttaaaaacatccatca

SEQ ID NO: 528917 - DNA, 623 bp, Homo sapiens
caggcatcagatgcacacattagcagcaaagaatagtgacagccatccttccagtggaagatggactgtaccttggaatctttcttactccaacattctggacaaccactaccaactggcagaggccagcaactaagataagaagtatctgccaacccttctacagagtcagagagtccaagcttcagggttaagggaagtctttctagaagagctggagactttctggaagaactgccctctgccgtgaggatgggcagttaatgaaccaygcgaggcaggaaagattgtttgaggtagcagcacaggtgaagctctagaggggagatgggtgaaatgagggtcccctggcactctcaatgaggagagatggtgcagtgacagaggagacagaaaaagggaggcagaacaggtgttaaggaggtcaagttgattagacaggattgtgtgggaattaaagaagaagcagtgaaagaggacatttgagttttctgcttgagcggagtctagaggatgctgacattcaggaactaggcaggaggaaggaaggacaggtctgtggggtgacatgaggtcagggctggatatgagcagtgtgagctgctgtggagccacacagggca

SEQ ID NO: 528918 - DNA, 285 bp, Homo sapiens
tgagggtcccctggcactctcaatgaggagagatggtgcagtgacagaggagacagaaaaagggaggcagaacaggtgttaaggaggtcaagttgattagacaggattgtgtgggaattaaagaagaagcagtgaaagaggacatttgagtttkctgcttgagcggagtctagaggatgctgacattcaggaactaggcaggaggaaggaaggacaggtctgtggggtgacatgaggtcagggctggatatgagcagtgtgagctgctgtggagccacacagggc

SEQ ID NO: 528919 - DNA, 611 bp, Homo sapiens
ctattctaatgacagactcaaagagatcaacacatctaaaagaggaaaataatactgtataataacattgctaataatagaaacaatataccccattttaaatgtacaatatcttaaagaactgaattctcattactgccattctggcaaatgtagtgaacatgggtgtaggtggacctcaaaaaaacctctatatattcatatacacataaattctgaaaacacttgctgtaaaacataatgctattaaatttttacattgattttcattatatgtatatgtatatacacttggaataaagacttggccaaaggagaaaaatgtaaacagattaaagactatagccaatactgtaaattcggatacttaacagaaaaattatttctctgtaaaaatcagtaaaatttcaaataagtcatmtatactgaattacaaacagttccactggtacttatctatgggaactggtgatgcactccatggatggctgtccttccaatttggtatgaagcattttcttgcctccagaaacaataattcctttaaaatctccttactatatagctatattatctaaagttggttatcctaggctatctcataaatcttt

SEQ ID NO: 528920 - DNA, 544 bp, Homo sapiens
atgtccgggatgaacggtgtgatgagtaagcaatggtggggattgtgggaggcactgtgggctgtctactcaatggcaattctctcctatcttcacggtaatagaatcctgactttgttccccttccccaagtgatcacaaccttttaggaaggttggactcctccctggccctagggttgaaatctggatggatctaagccagtcatgatggtctcattcttcttgacaaatgaatggtttggatgtggacccatgtgttgcaaggggaggtytgctggggagccttttagaacattttcattgctcatgaaaaggaacaccaaagccccaccctggcactcacatagatttcttaagggatgttactatgttcatgtggctctcagaactgcagcggccagcttaggcctaggtgggaatctcacctaagaggatgagtaaacagactgaggataacaaaatgaaaagagggaaataacctgattccttgaagatatgattgggcagctaaattaccaaccatggaatcagtctaactccaa

SEQ ID NO: 528921 - DNA, 599 bp, Homo sapiens
aaacttataactatataaattgctttacactgtccatgctataattgtcatatatgttacatctgtatgcattgaaagccctaccagatgtagtaattttkatcttaaaatcaatcatattttaaagaactcataaggaaaaaatatatttaccctcgttatagatacccaagtgttggttgaattgtgcccttcaaaaaatagatatgttggagtcctaacccccagtacctcagaatgtgcttatttggggataagggctttatagaggtaatcaagttaaaatgaggtctttaggaaggcctctgtccaatatgaaataggaaaaatttgggcacaaagatacaagcacagggagaacgccatgtgaagacgaaggcagagatcggggggatgcatctccgctgacaccttgatcttagacttctagcctccagaatgatgagacaaacattttctattgcttatgccacccagtgtgtggtactttgttatggcagccttagccaatgagtatgctaaatatttcccatttctgttgttactccctcattcctgaggtctcaagcttccctcttatttttcccttcagactgagc

SEQ ID NO: 528922 - DNA, 607 bp, Homo sapiens
tttaggatgtcatggtaactaaaggtggaaattgagtgcaggtttcctagaaaagtaagttgtagtattggctaattatgtaagtttgtgttctaaaatgtttcacaaaaacaaaagctatgaggataaaggagataatacccaatgataactatttaattggctgaagaaaacttaaggaagacaacaaattttagtcctttgcacaatgtgattaattgtcatctttcctggtatcattctttaatatgtatttttaaaaaccactgtggctaccttgagaagaatagattgaaggatatcacaactagagaccaagaggccagatgagagactgttagagtaatccagatgatggatgacagtgactttgattgaaattttagtaatggggtggaaagaatgacccttaagggagtcttagcaakacatattagtaagaagtaatgattgagtgggtaaaatgactaaggatcaaagaatactcccagattagtggcttaagcatctgggtgtatttactaaactaaggaaacttggcagaggaccagattcttttggtttgtttagaggtaggaagaaaatgtgttttagagcctgtggaaca

SEQ ID NO: 528923 - DNA, 626 bp, Homo sapiens
tgtcccaggagcaagaagaggacaggctgggggtctgggtcattccttggcatatccccagagcctagcacagtgcaaggcacccgggatgcccttgatgaatatttgcgaaaggaatgatttgctctgggagtactgaggtttaggggaagaccaagaagagcatctcatattgagccattatcataacgccctgctgcctttgtcattcttatttttattttttgagagggtgtctctgtcacccaggctggagcatggtggcgcgatctcagctcactgcagcctccgtctcctgggttcaagcgatcctcccacctcagcctcctgagtagctgggactacaggcacccaccactatgcccggctaatttttgtatttttagtagagagggggtytcaccatgttggccaggctggtctcaaacttctgaactcgtgatccatccgccttggcctcctaaagtgctgggattagaggcatgagccactgtgcccaggctgttctttccacctactaaatatatcacaagtctccttcctcctcttttcaactttaaaattacttgtttcatgtaggcccttttaatctttaattaggtgactctagtaaaaacctcgcagcc

SEQ ID NO: 528924 - DNA, 617 bp, Homo sapiens
ctggttcaaggggcgttccattattttagttatgaagaagaattacaaggctctaactacaactaatagcaggccttaagattttaaaaatgtcagccgggtgtggtggctcatacctgtaatcccagcactttgtgaggctgagtcaggcagatcacttgaggccaggagtttgagaccagcctggccaacatggtgaaaccctgtctctacwgcaaatacaaaaattagctgggggtggtggtaagtgcctgtaatcccagctacgcgggaggctgaggcaggagaggcggaggttgcagtgagccaagatagcaccactgcactccagcctaggcaacagagtgagaccctatctcaaagaaaaaaaaaaagtcacctccggaggaaccatattatctactcaatgggtctctcatttctgcctatcaatgagttaaacattttttcccagaagattcaacttctgggaaatccactggatttagtgggaaaataaattaatagtaaggcttttaaaatcttacttatttctccagtgtgtattcatgttggataaatccttaaggagaagacaggttaactgaaaatttattaacatttctaaaggagttgag

SEQ ID NO: 528925 - DNA, 617 bp, Homo sapiens
ctggttcaaggggcgttccattattttagttatgaagaagaattacaaggctctaactacaactaatagcaggccttaagattttaaaaatgtcagccgggtgtggtggctcatacctgtaatcccagcactttgtgaggctgagtcaggcagatcacttgaggccaggagtttgagaccagcctggccaacatggtgaaaccctgtctctactgcaaatacaaaaattagctgggggtggtggtaagtgcctgtaatcccagctacgcgggaggctgaggcaggagaggyggaggttgcagtgagccaagatagcaccactgcactccagcctaggcaacagagtgagaccctatctcaaagaaaaaaaaaaagtcacctccggaggaaccatattatctactcaatgggtctctcatttctgcctatcaatgagttaaacattttttcccagaagattcaacttctgggaaatccactggatttagtgggaaaataaattaatagtaaggcttttaaaatcttacttatttctccagtgtgtattcatgttggataaatccttaaggagaagacaggttaactgaaaatttattaacatttctaaaggagttgag

SEQ ID NO: 528926 - DNA, 617 bp, Homo sapiens
ctggttcaaggggcgttccattattttagttatgaagaagaattacaaggctctaactacaactaatagcaggccttaagattttaaaaatgtcagccgggtgtggtggctcatacctgtaatcccagcactttgtgaggctgagtcaggcagatcacttgaggccaggagtttgagaccagcctggccaacatggtgaaaccctgtctctactgcaaatacaaaaattagctgggggtggtggtaagtgcctgtaatcccagctacgcgggaggctgaggcaggagaggcggaggttgcagtgagccaagatagcaccactgcactccagcctaggcaacagagtgagaccctatctcaaagaaaaaaaaaaagtcacctccggaggaaccatattatctactcaatgggtctctcatttctgcctatcaatgagttaaacattttttcccagaagattcaacttctgggaaatccactggatttagtgggaaaataaattaatagtaaggcttttaaaatcttacttatttctcyagtgtgtattcatgttggataaatccttaaggagaagacaggttaactgaaaatttattaacatttctaaaggagttgag

SEQ ID NO: 528927 - DNA, 625 bp, Homo sapiens
tgtaaaattcctctctttgtgctctttctctttatttctcagacccgccgacacttagggaaaatagaaagaacctacattgaaatattgggggcgggttcccccaataccacasactccaactctagctatcttgaactgcatttccaatttattggaatgagatggcagatggacgaccaggcttggaaaaaacagccaagaagtctggggaagctagagagctggaatcacacaaaagagcacgctgtgtctagtccataaatcatcaaccatgtggccgtgaacatgaacctcagacatctctctaccttcctaacactcactgaagatttgaagtccaaggaaagagtcctccatccctgactgctttgtggtagaaagaggaattgtctgttacttagatttcagtagaaagacttccacactatgggagatttcctaaaagggagaatagggtactaacaggagaatagtgttgctgttggacgatgctttggatgacattatatgctcaacattcaaggacaagcttatctaaaatagagaatataatatattcttatatttaatcttatctcttgttataagtaaaatgtttattcagaaacagaatgcttgttcc

SEQ ID NO: 528928 - DNA, 658 bp, Homo sapiens
cctggaaaaacccagtgaaagccagaagactgtgagtcaaagctgggacccgcttcccatctgggctccrtcctcccagcaccacacccatgaaacaaacaaaataaccaagcaacaccacccagcaacaccccaggctcacaggtagcccacaaaaaaggtattgcacccagattctcttatgtgccattatctgtggctctgtggcacgaccatgcagagatgtcatgtgtggagaccaagtggactcttgtcatgtggaggaggaaagagaaggaagtgtgtgctggtgtgttcatgtgtgtgtgtgtgtgtgtgcacatgtgtgtgtgcatgcgtgtgcatgtgtatgtgtgtgcacatgtgtgtgcttctacatgccacacagagcctagtttggagttcagcacatggcaggagcccggtcaatattttgttgacttttgtgcattttgacttcttatgttagagtctcaaaagcaaagcctggcttgttataagcctcctcagcagtgcatttaaaacagaattctatttccagagatgcttcataaacactttggattgacaaaataaaccccagccctcagctcatgggaggtcctcatagtttccttggtgtaaacgtgactgtgtatgttcatgcatgtgtgagagg

SEQ ID NO: 528929 - DNA, 611 bp, Homo sapiens
ctactatcattcttgctttaaagttaaactataaaccaaatttctcccaaggccagcttggtctatacccaggaatgatcaaggacagcttggaggtttgaagcaaaatggagtaaactatgtcaggtttcttttactgtcataattttgcaaaagtggcttcaaaggtcaaaatggtattttctgcatctgcccaccatggaacgttgtgatgaaacacatgtcaaatttgactttgcgactgctttagacacacaatagaatgccaaatggatgacttcaaagcacttaggtttaatttagtcaagataagagatgcactggatggttaagcaatgacaagaggtcctcaaataaagaatacgtcttggtcttttatgaaaaatcagtgttgaattygtgatactgtcagttacaattcttataaattattgcttgctgttaataatgttagcaaaatcaaaccaaaaaaaaagtcaagtagatcatagtttctctatttttactttttaaagaactttaaatatttttaaattttcaagagaaaaaatccacatggaaaggatatcaggaaagtaaagttacattccaaaaagcatatcagaaaatta

SEQ ID NO: 528930 - DNA, 611 bp, Homo sapiens
tgtttgtgactcagctcctcccagcctgagggcatctgggccctgcaactccatcctttgctcccctttcttcccgcggggaccctttcatctccctggcaggaccctgtctccacccgagggcacrttctctgacctcttctgcggagtaccctggcttgatgacgcttcctgttccttcccagggttgtgctgggggcatcagtctttgaacagtccctccctgagggctgccgtgtcccctcagtgcccaggcacatcaagcactgctacaaacccagacattcacagggacccctccacctgaagtccaccataaggtagaagcttccggaaggggtgatgcaaaggggtcaaacatttagactacgcctcagagctgcatgattccttcctctaactgtgaagcaaatacagcgatttctctgggtctgccatcgaggccttcttccctctgctctcacctcaggtgccttcctaatgtgcaggtgacgattgcctctgagctcaggcatgcagcttctgggatgcactctcctttcacggcaaagcattctgcataggaaaaaccgtctctgcgtctccaagctgtggcctagcccttcattcat

SEQ ID NO: 528931 - DNA, 684 bp, Homo sapiens
ctgacaggttatatcaaacctgatagaaatctgttagagagacattcggatattaacagcaaacatctccccctaaccctatcacccctggataaaattagtgttcatgargaaaggtctcattcccaggcaggtctcgttcctcagcttccactggaatgggtctcttaccagcgatgggagaatgaggaagaactgaatgttggagaccctcctcagtaaagggcacagcaggtgcttctcggggctgcctgcgaggatgtgatgaaatcatgcagagaaagcagcctgttcgggcggggcctgcgattcctctcccgcccttacctaaagccctccctgaagcaggaggtgaccttgggcctcagtttacctccattattcaacaacaatcaggtacaggggaatgcggaccaccacatctgggtgccgtccttaaagagccttgccccacccagctctgttatcttagccgagtcccgtaactttcgtatgccttggtcttttgtttatgacatgaccaatctatctcccagggccattcaaatattttttaagagtcaaaatctaaaaagattaatactttaaaatagcaagataagattccaaaactttcgatattttcaatgcaacagaacaatttccttttcctgagcagcttataagatcagagcagcatttggt

SEQ ID NO: 528932 - DNA, 624 bp, Homo sapiens
atttttaaattttttgtacaggtaggatgtcactatgttgcctaagctgatcttgacctcttggcctcaagggatcctccctccttggcctctcaaagcactggaattagaggcgtgagccacctcacctggcctcgcaccaaactctttattgacttcttggttattgtcgcctgttactagtcgctacgctagttcagaaaggctttgcacagaggtctgttttgagacttctgtgccttacctagatctcagatcaagaaagtcctgtgatggctgaggacggtggtgggaggtcagtgggattggggctcaggaccatcgctgatttaggtcttcacactgggccttctgtgatctcagaacatcacacacccataaataaacctccaaggaccagtgtctgcaacttattgctaacaaaaaatttaagatgcagaacaaaaacagtttttgtttatatatttttaatatagggtcttgctccgtcacccaggctggagtgtagtggygcaatcatggctcactgcagcctctacctcctgggctccagtaatcctcctgcctcagcctcccaagtagccgaaactacagggatgtgccagtttttttccttttttaatg

SEQ ID NO: 528933 - DNA, 640 bp, Homo sapiens
gctgcggcttaagtgcacataacagatacttttattaattctgataacctcctgaatggtggaaagaagtttccaaacagttcccttgaacatttacaaaatacacaactccgggacaagcagtatctttaacaatgtcaggttctgaaaactctgattgaaaaatactttgtgaaaaacaccagtccaaaaatatatatccatttccctggtgcagtggtgttgttggacgtgaccgtgaggctcctctggcgtctccccactcagaacaggccttttgctttcttcaggttcacctgcttccaggcgggcagggcgttgtattcatccctcgtcatgtctagtgcaaactggaaacattgggagaagcgccccgcggctcagtgaaaggagccgggcgtgcgtgtgttgttttactcccatccccaccccaccggaagaaccgcttacctcgaagtcttcgtcggtgagatagatctcaagcttcagaggatcgaccccctcygggagtggcctggccaggaggtcggccagcgggtaaatggttttacagagcttggctaagacgtcttccacgagggtgatctgattggaaacttccgtgtcctagagaagaggagggggcagagaggagagctcg

SEQ ID NO: 528934 - DNA, 483 bp, Homo sapiens
caaatgtctggctcactttcccygggcctgcaaggaccagtggcaaagagcctcggacctagggcaggggagaaaccgttggcacctggagggaaggctggtcacgcccaggagaagagaaaaaccaccttccttccagctcctgacccagaacttcccacagggagaaaagggatctgaggggccctcttggtgccctgagaaaaagatctgtcatctggagggggtggcagatcactccaagtgtgcaacagagtaatttcttcaaaatatttggtgaggccaggtgaatggctcatgcctgtaatcccaacactctgggaggactgtttgaggtcaggatttcaagaccagcctgggcaacatagcaagaccccacctctaaaataatttaaagaaattagcctggtgtggtgttgcacacctgtagtcccagctacttgggagactgaggcaggaggatcacttgagcccaggagtttg

SEQ ID NO: 528935 - DNA, 478 bp, Homo sapiens
atgaggcccctgagaacaacagagcattaacacaattcctgccctgaagacgttgtgtctcctcttaggtcaagagccaataagcacataattggcccttaattgtatgaactgtattcccggtgcttttcacagcacatggcattgcgtaagggtcaacatggcttgctgatttatgtgttgatctctctctctctctgtgtgtgtgtgtgtgtgcgygtgtgtgtgtgtgtgtgtgtgtgaagagagagaaggggatttggcagtgatgggaggccacagcaaggggggcaccaagaattagataactcctataatcagtgttgtttactattcattagcaagagaaaatacaattgcaagaaaatccatttatgattatagaggagaatggaactatgcattccagatttttttccaacaaaacattcagacacaacttacattcacacttttcccctagaagtaataattagca

SEQ ID NO: 528936 - DNA, 564 bp, Homo sapiens
cctggggaggagggagggaagaggccttccagctcctgctgctactcgttaccctcactcccactgcgcagataaagcaccacaaagggttagcgactctttcatttaaaaggtgattcaggtgaggtttatttttcattccattaaataaacgttgcaaaaatgttggagtcaagagagtaaaatcagaagctgaaacaaaatgacttaattgctttgccatatagaggcatatttagaaatgagaggtgcaacaggraagattgcatcactgagattttaaatccttggttactgcaagcaaacacagccacaaacctggatcccaactctgtccaagttgaaataaaagcaagattggctttattacaaatgagtagaggtatgggtttattgggatgggcagcttttgaattctttttgcctgatgtcgttttacagagatggatagctgggcattccaagcccaaggatagggactcggattaaaccaagtgtgtggtttggtttttaagctgtgctggaggtccttttacctaatgacccggcctctgctctctgcaa

SEQ ID NO: 528937 - DNA, 660 bp, Homo sapiens
ctgcggtatttgattttagcacattcaggagcgtattaccttaaatagtcttttctcacaactgaacacaaaacgtctggtatccacgctacccttgatactatagcaataacamtgctaacattttctaagtagtgttcttagaacacttagaacaatgcataacgtgccatgctaagtgctttacatggattttttacttaattctcttaacagccctagaaagtagtactatattttctcccctttgcaggtaagaaaactcaagctttaaaagttaatttaaccaaggttgcatggcaagaaagagctggagccaggactcagtccaggcctggttgagtccaaacccctatattttcgttatttccgcagctctgcaaaaaccaatacgtatctggacagagttgagaatttctctctatagtgagagggttgattttgtatctttctgacttagtgagtttatcagcagggatctgggatctggtgctctttagaaagcctaaccctcctggtttctgtcaggaaggagctctgcaggagggtgagctcatggaattttccatgtgcatagaaagtcatgctttgattgagatgaagtatagaaataagagtcactgctttttttttttaacatttgaagttgaatatctatgt

SEQ ID NO: 528938 - DNA, 563 bp, Homo sapiens
ggggccagtgtggcttccctgagcagtgagaacccatatgccaccatccgggacctgcccagcttgccagggggcccccgggagagcagctacatggagatgaaaggccctccctcaggatctccccccaggcagcctcctcagttctgggacagccagaggcggcggcaaccccagccacagagagacagtggcacctacgagcagcccagccccctgatccatggtgagccctccctctccactggcaggagcagcagagaactgggacaagggaggcagaaaaacagaaggaacagagggagaagagaaggcatgatgtggcatcaagagtgaggcctttggggtcagcttcgggctcaaatcaggcatgacggggaggcgacgtggcctctcagagcctgtgtcctcatctggagaacagtatggtgtacctwcttcgcagagctcaggatagaagtggggtcgtacagcatcagagtggtggagttggtacccagaaaagtagggagccaggcaggtgataaagtctcctcatatcctgggaggtgggcgggctgagg

SEQ ID NO: 528939 - DNA, 620 bp, Homo sapiens
ctggacacatgggtcagcagtgcctgagaggttaggggtggagttgtgactttgggtgaagttgtgactttgggagctgctgatgttctggcataattaagtcctggcaatgaaagagacccctcaaggaggcagggagtataattagagaagaggagagggctcaggatccagccttacaggttgtagaggatggcagggaaacctgagcagccagcagagaggtaggagagaatgggagtgatgcctgcacaggcacctggataggacaacatggaggtcatggtggccttagcagacaccaactgtgtgctgtggcaggggcagatgtgggctcgtgtccggtagagagtgatggctgatataggaaggtgtagggatttagaggaaatcctatctaatggcttttatttctgaagaagctacgaggtgagatcattagtgagcataagaaaggggtgtggaaggggaaaagagctgtgctgtgtgacaggtaactayctgctaaagtgcagagagcccatttccatccaggcatgaagtactacagggcagcgctcttttagagcagggcttctcaaggtgttgtccttggaccagcaacttcagcatcatctggg

SEQ ID NO: 528940 - DNA, 566 bp, Homo sapiens
gttgctggggtaccagctgggcagcaccacctcctcctctgagggactccacctctatagggtccctttcttgcatttttagattctcacaacctcaactcgcctctttgttcccccagcctaggggagttagcttcttcctgcagatatctctgtgttacttagtgttctctttttgcttctcaaccctttcacaccagtaaagtcaatcccttatattcaattatctctctgtggaaatacctagagtggtttctgttttcctaaggggacgcctaacactcacaccatagctgtgtatggtagtaggtattaaatgccctgtgggtggtatagagatcagaaagggcatcacggggaagccacagagaccaaggatgcagaggagggaatggggacagatgtgaaggccagtctcagaagatgcaagtcccaggcttggtggtgggtgacacagtacaagctggcagatagggaagagtctagactgaytgaaacatgggctttgtattaggctggggcatatcatgatgctggaaaggcaggttgcagctagaagtagaagg

SEQ ID NO: 528941 - DNA, 458 bp, Homo sapiens
atgggagcagagaggaagttagcatgggtggatccggtgactgagggatagagaggtaggagatgagatcagaggggtgagggagggggsccctgtagactcttgtatgcatttgaagttttattctgagcgagacgaggtggcactggagacttacaagctgaggggtgacatggcctggcaagtttcgggaggagcaatatttcacatgaaatgatggcagcctgggtcagggtagcagaggtgggtgcctccaggaggcatgaggagggtggaagtctcctcagaaggtggagctgctgggtttttgtgggattggatgaggagtgtgaaaagatggacttgtcattgactgagttgagaaaagttctaggaggaacacatccaggcaggaggcaggtgatcaggagttctgttttctacacgtgcagttcagcatggagatgtcaagtaggcag

SEQ ID NO: 528942 - DNA, 627 bp, Homo sapiens
ataaaaatggtatgtctcaatattttcagctgtgcattgcctcttaagtattctcatattttatttcatatcttttatgttaccaaagagattatcttagaaataatttattttaatgccctcattgtacatgtaagaaaactatggcccaatgaagttaaactgatttccatgattagaaagataaatggtcaaggacttaagttcctttgattttagcttagtaatcttttcataattataagtaagttctgtcatatttgaaaacaaaacaataaaaccatggaagaacctaagattttccagtgcccacaaatgtagagcaagtatcactcttttatcctaagcaacggcagtctgtagatgaagattacacagtcttgacaaaagctaaaatgaaatggaaaactactacaatcatttggaaatctgacagctagactcattcagtkgactatcatcatcagtgaccagattttatacatacatgtatgaatcattcacatacaagcatttcaaatatgacacacatgaatacatatatgcacacatacacaaacatgcatgcatacatatgtatatgttactctcaaactaagctaggagaagtctttgattaggataata

SEQ ID NO: 528943 - DNA, 610 bp, Homo sapiens
cggctaatatcaatgccccacttgtttgaacctaggctgtgcttcagttttarcagaggctacttacatcttcccttagcaaggataaagagatacctgagttaaaatgtaagcaacctctgattataatttctgaaatgtcatatgctttttaaaattctttaaaatgtttctacaattttaattttgtgatgtctctagatttcccttccttttattacctcatctttagtcaatatcataactaagtagggtaacagaaataacttaaaattgtactgtctcaccagcttcattcatggacatgaatgaggtcacattcatgaacttattttccgcaaagaatataactataatctctcagttctacctttaaaaatgacctctctgctggcatattgccaggagacccctgggagattcccacattcagaaattccatccaggaaaaccaactgttctacccttccctgctgagccacaccctgagccacgactgccattattatactgctgcttttcagtctccctgctgtaatgctgcaatttgggccttgcctggacaatccacaggacctaggtgccagtaactctgccactgccgtggttg

SEQ ID NO: 528944 - DNA, 347 bp, Homo sapiens
ttgccctttttggatcctgtccttttaggacatattacagtctggcttatcttaaaactaattgtgttatgtgggtgtggagtaggggcagggaagtagccttccctttgtgagctccatgaggttagaagctgtgtcttactcatatcttccatttccaagaccttacacggaaccaggcacagagtaagtgttcagtgaatatttattgagtaaaattatcttgggtttgtaatagtaataataagtatttagaattttaaggagagtcttcctactcctgtctctggttaggcaacagcattataggaatgtaagtrtttcttaatttactaaaagtttaatat

SEQ ID NO: 528945 - DNA, 636 bp, Homo sapiens
aaatgtaaatatttcctatttgacctatcaagtagactctatcaagcacaaagataagcattattattttttatgaaatcatttttcagcaagaacatcaatagacttccaaataatgtacaccaaatttattttcataaataaatttcagtggaagaaagttaccacatgtagacttgaaattctgtaaactagaagtgtctgtattaataaacttgatggttttayttttctagcttctcctgatattccattaaaaagttcttttcattatacagatagaagctattttagtagagttggatctcgccatgctggccaggctggtctcagactcctgatctcaggtgatccgcctgcctcagcctcccaaagtgctgcgactaaagctctaagccaccgcgctgggccaggagcaaattcttaaagtaactaaagcatgaaccaggttgacttctttctccacagatttaccatagtaggtggagtcttctgtctctagaattcacagcagaagagacacaatctcccgtatactttgtcctaggttctagctcatcacataccataaaccaccacaaaggtctttttcttctgaaagctttaatgataactacttctaggtgccgataggcc

SEQ ID NO: 528946 - DNA, 636 bp, Homo sapiens
aaatgtaaatatttcctatttgacctatcaagtagactctatcaagcacaaagataagcattattattttttatgaaatcatttttcagcaagaacatcaatagacttccaaataatgtacaccaaatttattttcataaataaatttcagtggaagaaagttaccacatgtagacttgaaattctgtaaactagaagtgtctgtattaataaacttgatggttttatttttctagcttctcctgatattccattaaaaagttcttttcattatacagatagaagctattttagtagagttggatctcgccatgytggccaggctggtctcagactcctgatctcaggtgatccgcctgcctcagcctcccaaagtgctgcgactaaagctctaagccaccgcgctgggccaggagcaaattcttaaagtaactaaagcatgaaccaggttgacttctttctccacagatttaccatagtaggtggagtcttctgtctctagaattcacagcagaagagacacaatctcccgtatactttgtcctaggttctagctcatcacataccataaaccaccacaaaggtctttttcttctgaaagctttaatgataactacttctaggtgccgataggcc

SEQ ID NO: 528947 - DNA, 636 bp, Homo sapiens
aaatgtaaatatttcctatttgacctatcaagtagactctatcaagcacaaagataagcattattattttttatgaaatcatttttcagcaagaacatcaatagacttccaaataatgtacaccaaatttattttcataaataaatttcagtggaagaaagttaccacatgtagacttgaaattctgtaaactagaagtgtctgtattaataaacttgatggttttatttttctagcttctcctgatattccattaaaaagttcttttcattatacagatagaagctattttagtagagttggatctcgccatgctggccaggctggtctcagactcctgatctcaggtgatccgcctgcctcagcctcccaaagtgctgcgactaaagctctaagccaccgcgctgggccaggagcaaattcttaaagtaactaaagcatgaaccaggttgacttctttctccacagatttaccatagtakgtggagtcttctgtctctagaattcacagcagaagagacacaatctcccgtatactttgtcctaggttctagctcatcacataccataaaccaccacaaaggtctttttcttctgaaagctttaatgataactacttctaggtgccgataggcc

SEQ ID NO: 528948 - DNA, 550 bp, Homo sapiens
gaaagtggaaaagtgcttatgaatgaaagtaaaaggaaatatgaattctgtgctagtgttactgggtagactgccagtaaaacactctcttagtaaaagaagacacaagtagataagaaggagtcaggatctatttctctcattttgtagatcttgccaaattcaaaatgtgttaagtcatgcacaataaacctctataatcctacaaaaagagccattctagcaaacataatgaacacactttttgtttgtttgtttctygctgaatgactatatttccaaagacttgcacctgaaagtatttccaaggcatgtattcccacggcagtggtcaaagatgtattatcctagtctaacaatgcaaatgttcccatatgaagaaagatttcatgtggtctctaaagacagcttgtaaattagttgcggcagcttctttaatgttttgattcattcattcaaaaaatatttattaagtgccttctgtgaggcaggcactgtgaaatacaatcctcaacaagacagaaacagagcctatcttaatggggtttat

SEQ ID NO: 528949 - DNA, 607 bp, Homo sapiens
catattgccaagaaatgtttgaatggattattttttkaagaatgataaaaaatctatattctagattaataggaagctagttcttttctgtttcattcaaaatattcgaaagacaagtcagaatcattttagaaaaaaatgacattttatatcaaaccatttcaagcagtttttacttcttttctcaatcccctctaggcctttacagcatagggttatagaagacagtcattttcagtctcttctatttttataaaagatggaagtagtcatatgtaaaaaataaaagtgactcttccttagaaataaggctaaataattctaaaaagatttcaagctaagcatggctctcaaatgcttttcagttctagaagcgctgcatcattcattcatttatggataggaaaaagcgattgtattattcttccaattctttttttattgctgttgtttcccagaaggtaatgctagtagtaagggacttcttttttagaaatgcattaaaaatagtaagccttttaaaaatccagtgtagaaaactttgttcagtttcaccttttaaatgttctgccatatttgagagacaattgtctaccctattgtgaag

SEQ ID NO: 528950 - DNA, 619 bp, Homo sapiens
cctagttgctccatatccttgtcaacttgtggcattattagtcttttgaattttagcaattgacataggtgtatggaggtatttcattttagttttaaatttgcacttacctaattgcatcaaataagttttagaaattcactctataaatgatagcttctgtgctatttaatttttaatccattatatatgtgtagatataaatatataactatacattcatatcctaaattcatagagtttctatgagaacgtcttcacattttttattaaaggtacatttttttwaaaaggcttaatttttttagaatagtttcaggttgatagcaaaattgagaaggtacagagattactcagctatcccctcaccctgcacatgcattgcctcccccattaataacacccttcatcagagtgctacattacaagtgataaactcacattaactcatcattattacccaaagttcatggcttacatgaggggtcactcttggcattatacattctatgggtttgcacaaatgtataataagatgtatccagcattatagtatcatagagtagtttcactgacctctgcattttgcctgttgatcctttcccccttcctgctgcta

SEQ ID NO: 528951 - DNA, 435 bp, Homo sapiens
gggctaagatactggctacacagagattttcrttaccaagatatctggagagccttctcttggaccaattatgtaaccttagagtctatcatagccaaactgctcatctgagacttcagacccatgaggctagttatcttatgtccatggcaaagtccaagaaagagcctatgacatcacagagattttgaatatcagttattcaaattgattatttgaatatcagttattctcagtaatattagattattcctgccataagtcttaagactcatctttttcttatcattcccaacagcctaactcaggcccatatcattttatacttgagttacgacagtgcttccctgtgtctgctccctgctatagtccatcttgagtcccctgtcaagttaatttttagaaaactccaccttttatcacatcacatcacta

SEQ ID NO: 528952 - DNA, 585 bp, Homo sapiens
ttagcaattccatatgttactcacaaacattattgtggaaaaaatcaatgtgtcatgtttgcaatgtctggttctttaattagtacataaaatgtgaacaatattraaagaaaaaatatttaagagaaaagaggtagaactggaattacacacattttctatcgagaaatgaattctactgattaaaaccagaaaatagagattagtttcctaccttggattcttcatcccagtgatatggacagaaggcagggaaattctgggcagaagaggccaagtccttggcaagggccccaccctcaagctgaaaagcctaataccgccacccaaagtgaaaagttacatccctgttttcctgatcaaatgttgccttttccaaaaccacccatggcccaccctacccctgatcctgtgcccataaaacccccaggcttagccagcagagacagcagaagcagttggacgttggagactatagttggacattggagagaagcagcttgaattcagagggatagcttgatggcataacttcagagaggagtccagccagggatggccagacaccaggggaagattaccttc

SEQ ID NO: 528953 - DNA, 613 bp, Homo sapiens
agagccactttcatcagcaataaaatcccctgcatttaccaccttcaattggttcatgccacctcattcctcctggacaccagttaagaactcaggtgccamaagtgtgggtgcaaaaggttgtcacactgaccctccactgagctgttaacactcaagccatctgtggatggcaatgctaaaagggtgctgtaacacttcctctggggcttcaggggtcatgggcaccctcccctagatgctgcaacagggccagtacagggttggctcttgctggtgcccaaaagcgcccaccccaactcctgtacccactcatctgcactccccctctcatgaggggtggagcagcaagtgagtagagttcaccactgccagtgcccatgcatgccagttcctaccagtgaaggggtcaggaaaatatcctgcgttaccagcctggcctattcgatgagctagtaagtggtgtctcatcatccccttttggagagtaaaagaattccaactctgaaagaagaaggaaaagtcagggctttggaattaacaaagaacatgtagaaaataaaaatggacacttgggtggcatgccagacccctattgactccagtaaggatg

SEQ ID NO: 528954 - DNA, 407 bp, Homo sapiens
tgtggcagtaatcccagcactttgggagtgtgaggtgggtggatcacttgaggtcaggagttcgagaccagcctgaccaacatagtaaaaccccgtctctactaaaaatacaaaaattagccaggcgtagtggcatgcacctgtaatcctagatacttaggaggttgaggcaggacaattgtttgaaccagggaggcagaggctgcagtgatctgagatagggctactgtcctccagtctgagggaaagccagacttcgtctcaaaaaaacaaccaaaatmaacaactgcttctgaatacacaatggaaaaaaatccccaggggttgtgccagggtgaggggaagtagggcttcctgtgtgacttaccaggaatcttggagctggcccatgcaggggtgtgggaggt

SEQ ID NO: 528955 - DNA, 566 bp, Homo sapiens
gtcacagttggtctgtatatgaaaggcatgctcacagaggagccatctgaggtgtctaggaattaactagcagccctggaaggagcaggctgtctctggcctccaagatgtcaaagcgtcctaaaatatagaaaatcaaaagcatgtttagtgcccagggatgctcagaggcagtggagtagagtcagtcaaggaaatagattcacagttmtgggctaaacccttggggacctcacttcaattgtctgagcctcaatttccttatctgtaaaatcaacaactgttattcattgaacaagtgactgtttaaaaggacagacaccgggcctgccaaggtcattgatgggtttagagagatagaggatagtgcttggcacaccagaggtgctcagtgagtggcaggtggtgtccttgtgccacagctccagggagcagcagagaaagattggtgtggaatggtggggtctagggccatttctttggctgtttggagcccttggagcagaggctatgggtggacagaaccctcaggaatgttcttgggattcagagttgctgctggacaa

SEQ ID NO: 528956 - DNA, 566 bp, Homo sapiens
gtcacagttggtctgtatatgaaaggcatgctcacagaggagccatctgaggtgtctaggaattaactagcagccctggaaggagcaggctgtctctggcctccaagatgtcaaagcgtcctaaaatatagaaaatcaaaagcatgtttagtgcccagggatgctcagaggcagtggagtagagtcagtcaaggaaatagattcacagttatgggctaaacccttggggamctcacttcaattgtctgagcctcaatttccttatctgtaaaatcaacaactgttattcattgaacaagtgactgtttaaaaggacagacaccgggcctgccaaggtcattgatgggtttagagagatagaggatagtgcttggcacaccagaggtgctcagtgagtggcaggtggtgtccttgtgccacagctccagggagcagcagagaaagattggtgtggaatggtggggtctagggccatttctttggctgtttggagcccttggagcagaggctatgggtggacagaaccctcaggaatgttcttgggattcagagttgctgctggacaa

SEQ ID NO: 528957 - DNA, 542 bp, Homo sapiens
ctgctgcatcatctcagggctgaatccttgaggagggaacagggacagctttggcttcctctcaccccagcctagccctggatcctggaaggggctccagcagaggcagcccacgagcagaatgcactttgaccccacttcaatggcctcctgaaagtagggggagtgttcctggcagagggtgaagagctaatttctgatcatcctgagagaaggcttgggaggtgacagaatgtccctgcctttcctacctgcccacccaccccttccaccctgtcccaaccttctcactggtgggaagttctcagtaggaaagagatgagggtttggtcaaaaattccctttcaagagtaggtgttattggttaattttactaatcacaaattgagaatcagagaagtaaaactgtcagaggtgtgtgaaccagagcaactccatcttgaatagaagctggggaaaataaggctgaaacctactgggctgcatycccagacgcttaaggcattctaagtcacagaatgagataggaggtcagcacaaga

SEQ ID NO: 528958 - DNA, 496 bp, Homo sapiens
ctgcaggctgttgcttcaggtgactgtgaaatcttcttcatagaagtcagttgaaattatgctcgtagtaatcgtattgaatttaccctgaaaatagaacaaataaatatggataggatcaatttttacattcaattaaatatttgcattttattcaagtaattaacatgaggatgaaaattatcttgtgaagcacattatacacatttctatagcatgcgttactttaccggagttaaaatattaccattatgcctgayagcacatgtggaagcaaatcctaggaatgaagcatttatagtaaacatccatatgttttagtaaacacaattgcaggctttccagagtaagcaaatgtgtgaattctttaaatgatactaaagaattaaaatagtcccacttttcatatgccaaaaggaaaaaaaaaataacactatgtcacatactttgagattgtaacaaaatcataacgatgaaaatagtaacaagcactttt

SEQ ID NO: 528959 - DNA, 474 bp, Homo sapiens
ttttttttttgagacagggtctcactctgtcacctaggctgtaatacgatggtgcaatctcagctctaatcacctcctaaggtcaagcgattctcccacctcagcctcctgagtagttgggattacaggtgggcaccaccatgtccagctaatttttgtatttttttggtagagagggggtttcaacatgttgcccaggctggtctcraactcctgacctcaagtgatcctcccaccttggcctccccaagtgctgggattacaggcatgagccactacacctggcacaccgtgactcttataattacaattttcctcaaacatctcaaacacctgagacactgctcccagcagtacattccttccatcagcatcctattctaagtccaattccccactggtggaagttttatcattgccttgctatggcatgtcaagagctagccacactccaaccactaacagtgatggtta

SEQ ID NO: 528960 - DNA, 563 bp, Homo sapiens
ggtttcaataaggggcacctaattgtggttacatgtcaatatacaatctagcactactggtactattatcactcttctttatatgacaagacatttatatttacctttccttttctattcatgagagtacagaatacatcataatttctgcatccaatttttatattaaatgactggtaaaggaaatataaacactttgctgtgattttcaatattttttctgcaaaaatttatgaaacatctacaatatgtaaaagacattttcaaaatatttggggagatattttagaggaaatcgtatggtccctgattcaaaagagtttacaacctgaaaagtaatattaacacctcagtaacattacaagtccaacctgtgtacaagctgtgtccaaatagaaaaaaacctgagaagtcacccaaccacttagagagcaatcagactattggatgtcagagacataaaataactattgtcttcacccttttactttcaggcaattgtytcctaaacactgttatagtcactaagtctgcatactttagaaactccagatcgtcactaa

SEQ ID NO: 528961 - DNA, 583 bp, Homo sapiens
acagagaatcaaataaagacagaggagtccgtactgatatagatacatgaatgagtaaataattcaatggcagagaagagacacttccttacagaagaatgtaacacacataagtaatccccaaccaggaggtggagctgagtcttaatcaatgcccccttcctcccctctcctttttttttttttttttttttttgagacagtgtctcactctgtcacccaggctggmgtgcagtagcgcgattttagctcactgcaacctccgtctcctgggttcaagcgatttttatgactcagcctcccgaggagctaggattacaggcatgcaccaccacacctggctaattttttgtatttttagtagagacggggttttgccatgttggtcagactggtgtcaaactcctggccccaagtgatccacccaccttgacttcccaaagtgccagaattacaggtgtgagccaccatgcctggccaggttatttaattaaaaaacaaaaacaaaactcttttaagggacctttgagttaccagaaaaaaataatacaaaatccacatggaaccactaatgtcgcttatt

SEQ ID NO: 528962 - DNA, 668 bp, Homo sapiens
gaatgaataaatatgcagggggaagcccctgccacccttctgaagcccggcctcctgtcctctgaggactgctgggctgacctgtcctcgccccaggatgtcggcttctctagtcccctgcccaggcctgaacaccacctccatccctaccaccacccctccatgcttgtctttrgtcaaactcttgtcattaacatgaacccaggacacaaacttgctatcagacagaccccagtgaaacccaggctggccatgagctggaacagcccatgcccctcaccaggctttgagagatcatctgttgctgttagctgatatctcaatgaaaaacaaaaaatcctaaactgagagcaaagctgacactcagaatcagtggagccgaagttgccaaatcttaattggatcctctgtccctcaggatgccactgttatctcaagggtgtgcaaagttcttgaaacccaattccgtatcatccattttcatttcaaaaacagaaaatcaaatacccaataacttagggttttatgatataatttcctgggctgagtaagagagttgtacattgcaattaaacagtgatgcggcattaaaaatactgtccctgaaaaaaaaaaatagatgtttctagattacttgtgcttcttggcagtgcctacagttaaccttt

SEQ ID NO: 528963 - DNA, 483 bp, Homo sapiens
agctgccagaattaaatgcaagcctgggggctccggccttctcatcatgggaagaggaatccagaaggatggggtctgagtcacctatttctataatatccccagctctactaaatcatttttataygtaagttgtttttatcacacaagtacagtcatgcatggctgaacaatggggacatgttctgagaaatgcattgtcaggcaatttcatcatcctgtgcacatcatagaatgtgctcacacaagcctagatagtgtggcctacttcacactcatgctctatggcacagcctattgctcctaggctataaaactgtatagcatgttactgtactgaatttggtaggcaactataacataatggtaagtagttgtgtatctaacatatctaaacatagaaaaagtacagtaaaaacatagtataaaagataataaatggcagatgtattagtccgttcttgcattgctagaaagaactac

SEQ ID NO: 528964 - DNA, 559 bp, Homo sapiens
atgttaaaaatgatatctccaggctgagcatggtggctcacgcctgtaattcccagcactttgggaggacaaggcaggcggatcacgaggtcaggagttcgagaccagcctggccaacacrgtgaaaccctgtctctactaaaaatacaaaaattagccaggtgtggtgtgggcacctgtagacccagctactctggaggctgaggcaggagaattgcttgaaccagggaggcagaggttgcaagtgagccaagctcatgccattgcattccagcctaggcaacaagagcaagactccatctcaaaaaaaaaaaaaaagatacatcccttcccctaaaaaaaggtgtagtgggtgattaatttgattctaatttggttaattctgcctaaaaataaagcaaagttgtataaaagaggtaatatttgagctaaaccctaaattattggtaggattttgatggagaaaggaaaagctgtattctagcttatcctaaaatgtattctacaaaaggacaatcatttgtaggcatgcaaaccaaaagccaattacaccttccag

SEQ ID NO: 528965 - DNA, 559 bp, Homo sapiens
ctatattgcaagttgtcacggccaggtattgggaaaagttttcaattagcaataattactcctggataaacctcattggctacaatactgtcactgcatgaagctcatttcttctatttttaagtctttttaaagttgttctaacttccctggaattttgttgtaactcacagccttcctctctctcatcctttcatcaacaatatcaatcctataccctctgggaatctttatcccacacattgaaaagatgaggttcccctaggtgatgatttctcagtagtacttccctattcaatcatcaatccactaaatatacttcattttgtgtgtaaaacttggcttatttggaaatacccaagtcaagactgttccctgtcatacaagttatgtaactgatgcctgggtactttgtgacctggtgaamccagtaaattagccctttaaagattccaaaatcttaccagggacagcaatgagatggcctccaagaattctgaacaagaacgttaagattattctgtgaatactagattttttttttttttgagacggagtc

SEQ ID NO: 528966 - DNA, 647 bp, Homo sapiens
cttgagcaaagatgagctccatctcaagaagaaaaggataattgtctccaatgcagactggctaaaatagagaagaaagaacttacagagatttacgaggactgattcagtgcctcctgtattcagaaattatgtagggaacagtttatgctcccaaacaaaaaaattattatgtggtgtaaaacacaaagacacttaaaattattataagatattcttataaattcaccttaataaatattacataaatcaactataatataaaacccatgaagggagggaaatttgtcagtttttttcacaggtatatttctagggcctattacatagtatacactcaatacatttttgctgaatgaaccaattgcgtgtgagctcaggacctgctaagtycactcatgagagacattccatagtgtctgctttttgaaccttggtgatgaggatgagggtaatgtagacggagatgtggaggaggcatttttcaggaataaggaataacacaaaatgaaaatggataacattccccttcagaagaggaaggaattttccactgggtttgcactatcctatgttagtgctatgagcagttatcagagtaagcatttttgttctcacaaggagagcaagaaagaaatctagaccca

SEQ ID NO: 528967 - DNA, 647 bp, Homo sapiens
cttgagcaaagatgagctccatctcaagaagaaaaggataattgtctccaatgcagactggctaaaatagagaagaaagaacttacagagatttacgaggactgattcagtgcctcctgtattcagaaattatgtagggaacagtttatgctcccaaacaaaaaaattattatgtggtgtaaaacacaaagacacttaaaattattataagatattcttataaattcaccttaataaatattacataaatcaactataatataaaacccatgaagggagggaaatttgtcagtttttttcacaggtatatttctagggcctattacatagtatacactcaatacatttttgctgaatgaaccaattgcgtgtgagctcaggacctgctaagttcactcatgagagacaytccatagtgtctgctttttgaaccttggtgatgaggatgagggtaatgtagacggagatgtggaggaggcatttttcaggaataaggaataacacaaaatgaaaatggataacattccccttcagaagaggaaggaattttccactgggtttgcactatcctatgttagtgctatgagcagttatcagagtaagcatttttgttctcacaaggagagcaagaaagaaatctagaccca

SEQ ID NO: 528968 - DNA, 530 bp, Homo sapiens
attctttaataagctggtcttagaaaaaaagaatagactattatttaattcacaaacataatttaaactttactattttagttttacaatttccaatttctcttttgcttattaatcaaaaactgttctctttcttggcttggagaagatgatgctaacaaaatgtaatgtaattgtttagaagtaattttctccagcgatctaggaagcttaagtagttgagyttcctattactttttgccccctgggttttacattagttctgcactgacttgtctgtgtatttgtaagagtaaacgattaggtaggagaggctccaggggactgttcttggcagtagcaggttgcgtttaactaccttctgcttgcatgcacctgatgatgtcggttattaacagagtttttaggaatcaatgactacaatatctctttgcttaataggtgtacgcaaaggaaaaaaaaagtaataacacttacccgcaggtgcattctatggtcttaatccaagaaacagaattttgtagtgttgt

SEQ ID NO: 528969 - DNA, 418 bp, Homo sapiens
gtggcacagtgaggaggcagcattgtgcacaagacagaataacaagtgtgcagccaatgggccttggctggggcctcaccctgccactcattagaygttggaaatgaagtttctcttctttaaagggcagatagtcatacctacttcacttggtcgctatgaggcataaataagaaagcatcttataaatgttaaagcactctacaaacaataaggagaaaaacaaagtctttataactactccaaagtagatgggacaagtgttattacctcaatttcacagaaaaactcaatacagctatgtgatggacaaacttagtattctgtaacatccaaattggtaaatggctgactctagattgcttcttttacagcacaatttctcatttttattatgagttactaagatcatatattt

SEQ ID NO: 528970 - DNA, 476 bp, Homo sapiens
attctccatctctataattttgtcatttcaagaatattgtataagtgggatcatatagtatgttaccttttaagcataattcccttgatataagtygggagttgtttttttttttttccaaagatttgcaaaaagggtctaatacctttcccactggctacctgctgcttgttgccatttagcaaagaaggcaggaatgagcagtagaaaggcaaagggtgcttctgttgatggttttccctaaggaagactggcatgtgaagtaagagtatcccaatactcattttattcttaagagattctcagaggagaagtgggaattctttttctgatcaacgtatttgtcttttggtagaaaacagcctttttaaagggcatggtccatctctgtaattatattttatatccaaagaccattctagtcagttccatcttccatcctccctctttctttcccgtcatttttttccatcctg

SEQ ID NO: 528971 - DNA, 476 bp, Homo sapiens
attctccatctctataattttgtcatttcaagaatattgtataagtgggatcatatagtatgttaccttttaagcataattcccttgatataagtcgggagttgtttttttttttttccaaagatttgcaaaaagggtctaatacctttcccactggctacctgctgcttgttgccatttagcaaagaaggcaggaatgagcagtagaaaggcaaagggtgcttctgttgatggttttccctaaggaagactggyatgtgaagtaagagtatcccaatactcattttattcttaagagattctcagaggagaagtgggaattctttttctgatcaacgtatttgtcttttggtagaaaacagcctttttaaagggcatggtccatctctgtaattatattttatatccaaagaccattctagtcagttccatcttccatcctccctctttctttcccgtcatttttttccatcctg

SEQ ID NO: 528972 - DNA, 334 bp, Homo sapiens
ggcccttatgacctaatcatctcccaaaggccccacttcttaataccatcttattgggtgttaggtttcaacatataaattttggggggacatcaacattcagaccatagcactggatgcaatttttaaaattaactttcttgttcctccctggggtaaatagcaaaagcaattagagaaccaccatgcccggctaattttatatttttagcagagatagggtttctccmtgttggtcaggctggtctgaaactccggacctcaggtgctccacccatctcggcctcccaaagtgctgggattacaggtgtgaacctcagcctcccaaagtgct

SEQ ID NO: 528973 - DNA, 334 bp, Homo sapiens
ggcccttatgacctaatcatctcccaaaggccccacttcttaataccatcttattgggtgttaggtttcaacatataaattttggggggacatcaacattcagaccatagcactggatgcaatttttaaaattaactttcttgttcctccctggggtaaatagcaaaagcaattagagaaccaccatgcccggctaattttatatttttagcagagatagggtttctccctgttggtcaggctggtctgaaactccggacctcaggtgctccacccatctyggcctcccaaagtgctgggattacaggtgtgaacctcagcctcccaaagtgct

SEQ ID NO: 528974 - DNA, 506 bp, Homo sapiens
gccatcatgtttctgtatatatttggccactgatatcctaccaagaatcatggcatcactttttaagggactaatggcctaaccacctcccaraaaaaaatttaaaaaccaagtcagggtaatcatttaaagaaccagataccctgataggtggaaaaaaaattgctctacattctttttttctcaagtctattttggcttggttatttcagtgtggatcattcctactcttttatttatgcctttgtaaagcttcattcagtggcttgcagagatttatagcagggaaattcaagcaattgtgggaaaaaggaaatctcttagaaaacctgtgggaaataagatttcttgagatatggttacaaaactattggggagaatatgctagtctctcttttaaagattcttctttttttttttttttcagtgttgtccttttattagtttaaaaaaaaaaagacgtacctgagtttgccttttcagatgtaaagtacttaaggacattt

SEQ ID NO: 528975 - DNA, 506 bp, Homo sapiens
gccatcatgtttctgtatatatttggccactgatatcctaccaagaatcatggcatcactttttaagggactaatggcctaaccacctcccaaaaaaaaatttaaaaaccaagtcagggtaatcatttaaagaaccagataccctgwtaggtggaaaaaaaattgctctacattctttttttctcaagtctattttggcttggttatttcagtgtggatcattcctactcttttatttatgcctttgtaaagcttcattcagtggcttgcagagatttatagcagggaaattcaagcaattgtgggaaaaaggaaatctcttagaaaacctgtgggaaataagatttcttgagatatggttacaaaactattggggagaatatgctagtctctcttttaaagattcttctttttttttttttttcagtgttgtccttttattagtttaaaaaaaaaaagacgtacctgagtttgccttttcagatgtaaagtacttaaggacattt

SEQ ID NO: 528976 - DNA, 228 bp, Homo sapiens
gtatataggggatgggtataacagtagatcataaggatttgagggatgtcaaataccagagataaagacaaagaagagctggagaagaaaggcttttttgcaaactctaagctgaaagtggagacaaaagaagtgccaggtatgtctgccaactccgtggcagacagactcacaccgcggkctgtatgctggataaggaacgaatgcagaagacggggtccaagatga

SEQ ID NO: 528977 - DNA, 503 bp, Homo sapiens
ctccaaggttgccatacccaaaaaagagagccacagaggaaccacactggctcttcactgcctcaactcagaagatctgctcacacccattggccagaacaaatcacatggccctgaactaactgctagggagattggggcatataaaaatgcacaccataagcattaactatctctcctgcagaaagaactaggttcttkcccccattccactccatttttctcctgcagaagtgataggaagcaaacagataagctgttcaagcaaagggtctgctgtgaggtgtgttacatggccaggggtgaaaaaaatatgaaaatctggccacggtgatggagacacctcagtatttatggaaggaattttggagcactgctctcaatgacagtattcctgtacccaaatctttacacccaaaaagctctgaatatgttccagtgtactgaacatgtaaccaaggggtggaaataggaaggatcacacttgtcatcactcccagtga

SEQ ID NO: 528978 - DNA, 473 bp, Homo sapiens
ggtacagcttcagaaggagacaaagccatgccttagggccccaacagggcctttgtggcttataaggttcctatgttttgggccagggccagcactcaacccagagctgtattgacccgggcatgggatcctttgcttagaacatggtcctggactcaccagaaaatgcttttgtctgaaagagcagagccaccagcatgggatctattgtgggtagagagacaaccctcatgttccaaagaagttaatacaaactatatattggtttgcaagtcagaagaaaacactgctagcatcygctgttgctctccccttcccatcttttgtctatgaatatatcaaggtatggtggtttcatgcatggattctggaaccaatctggattctgctgcctgctgaccgtgtggccttgtgtaagttacacagctttccttggtctcagtcccctccttttcaaaatggcctgtgttaaa

SEQ ID NO: 528979 - DNA, 543 bp, Homo sapiens
aggccaattgctccaatcattacactggctttcaggaagctttcactagctcttttttctttttttcattcagcatttctctcttgcttggatctttcccactgacatttacttactcaagtttctcccatctacaaaggaaaaaaacaaaataaaacctccttataccttctaaccagtcttcctacattgatacttgctgccttcccaatctgttctccaccctgcaatctttgtgttctttacaaattacacagtcaccacccccctccacaaccgtgccccacttaaatctcttcagtggtttccctaacccttcaactgacaacccaaacccttcacacgccttacaaagtcctgaatgacctgacatatgcccatattttcagctttattttgcaccactctcttccctcactctctatactacagcctgactgttctgttcacagtccatcaaacgtaccacagccctctgtccccaaggcccttgcacatgctgcycaagaagttacctgtggcctcattctgttaacctctccc

SEQ ID NO: 528980 - DNA, 586 bp, Homo sapiens
tttcatactaagccttatttttaataattttatttcaaattaattttacttcagtggtctccattgtctctcattcctagtttctcatattaataataataatagctatcatcaagtgaaacttaaaataatccaggcatccttccaaatgttttgcagggattttaaactctacctatgaagtagctactattatcataaawatatgcagttatatctataaactgaggcacagaagggtcaaacaacctgacagagctagtaagaggcagaccatcatcttctgtattaatacttgggattccaccatcatacttctcactaactctattttctaaagcagagatagtaggactcaccaaatgttccatatgctcctctgtacttctcaggtgccttgcagtaggcagggccatgtgactggttctgatcaataacatatgagtgaaagtgatatgtgaaaataagcactgttatgccaaagcatccctgtgttgagagggtgacatcatatgctggagggagcctggatcccagagtctctgcctagagaagaattgctctagaagattgcctgacctgcatt

SEQ ID NO: 528981 - DNA, 510 bp, Homo sapiens
ttaattacatgcacctggaggcaggacacaatgacccacrctatgatcaaatggtaatgctacaagagtcactcattaaaaaggctaagcatatgtgagtttagctttttccaagtaaagactaataaagtgaatattttatatatttaatcacacgctattatgacactgataggcaaagagacataattggtaagcaattacatatgtagctggtgttactttcatacatgaaaattatacttttactgctccgatcttctcacttttggtccacacgacagtatcataaaaaagcaaggttgcagtgaggacaacctaggtcaaaagttgccaggagggcagaggattcatgaaaatagaccccatgcttctgttgattggagggaggtcttggttgagagtgagaggaaaaaagaccagatgctaagagtgagtaaaaggaacattgttcctgttgagccaggaaggaacaggataggaatcgagaagggcaattttaaaaaggca

SEQ ID NO: 528982 - DNA, 537 bp, Homo sapiens
taaaaaaaaagatgttcatgacataaaaatgtacattaataaagattcattggtaaactgggaaaatatatataataagtgaaaaaagcgtgatacaaaaatttatagagtattatcacaactgtaatactaataattgctaacattaattaaatacaacagtgccaatcactgacctgaatgctttacctgtgtgatatactttaatcttcacaatgagacgaatattgtcatctctcttttacatataaagaaactgaagctcagaaagtttaagtaactagaccatgatcacacagccaatcagtggtggagctcatggggttctatctggtactgactgacaacaaagctttgtgatggtcctgctgccttttaacagtgaatatacctargcagagagatttagggtgatttttcccctacttttttacacttacactttttttaagaataagcaaaactaacatactaactaatgaagtaatcaaataaaattaataaagagggctgagtagctcttttattcatggcatg

SEQ ID NO: 528983 - DNA, 438 bp, Homo sapiens
cgggcggactgcgcggaccccacccgtttacctcttaacggtttcacgccctcttgaactctctcttcaaarttcttttcaactttcccttacggtacttgttgactatcggtctcgtgccggtatttagccttagatggagtttaccacccgctttgggctgcattcccaagcaacccgactccgggaagacccgggcccggcgcgccgggggccgctaccggcctcacaccgtccacgggctgggcctcgatcagaaggacttgggccccccacgagcggcgccggggagcgggtcttccgtacgccacatgtcccgcgccccgccgcggggcggggattcggcgctgggctcttccctgttcactcgccgttactgagggaatcctggttagtttcttctcctccgctgactaatatgcttaaattcagcgggtc

SEQ ID NO: 528984 - DNA, 403 bp, Homo sapiens
tcctccctcaagcaggcttccgcgtccccggtccccctcgttctgcccatgcaagaactgtcatctgtaagttcccacttctagatgagaacacgcggtatttagccgatctttgctktcatcttcggtggtggcggtgaaagaggcatgacactaaatcgacccttaggacgccgtttatgttgaagtcgaggagcttatcggggaaataggagaagtacggacgccacacgtggccgagagaaaagtctgaaaatgcccctcgcatccaagcggggacccggcctcgacctcccgaaatcatacaccgagtggggaagcccagcaaggcccgcctgtctagattcctctcggcctctctaagcaccgaagcacgcgcttctcactttcatgggaggggcag

SEQ ID NO: 528985 - DNA, 403 bp, Homo sapiens
tcctccctcaagcaggcttccgcgtccccggtccccctcgttctgcccatgcaagaactgtcatctgtaagttcccacttctagatgagaacacgcggtatttagccgatctttgctttcmtcttcggtggtggcggtgaaagaggcatgacactaaatcgacccttaggacgccgtttatgttgaagtcgaggagcttatcggggaaataggagaagtacggacgccacacgtggccgagagaaaagtctgaaaatgcccctcgcatccaagcggggacccggcctcgacctcccgaaatcatacaccgagtggggaagcccagcaaggcccgcctgtctagattcctctcggcctctctaagcaccgaagcacgcgcttctcactttcatgggaggggcag

SEQ ID NO: 528986 - DNA, 403 bp, Homo sapiens
tcctccctcaagcaggcttccgcgtccccggtccccctcgttctgcccatgcaagaactgtcatctgtaagttcccacttctagatgagaacacgcggtatttagccgatctttgctttcatcttcggtggtggcggtgaaagaggcatgacactaaatcgacccttaggacgccgtttatgttgaagtcgaggagcttatcggggaaataggagaagtacggacgccacacgtgrccgagagaaaagtctgaaaatgcccctcgcatccaagcggggacccggcctcgacctcccgaaatcatacaccgagtggggaagcccagcaaggcccgcctgtctagattcctctcggcctctctaagcaccgaagcacgcgcttctcactttcatgggaggggcag

SEQ ID NO: 528987 - DNA, 587 bp, Homo sapiens
gcaccccctccccacacacaccctcattcccgsaccccctcctcaaacgcaagaaaggaagaaatgaaagtaagagatgagcctgcaaggcggtggaggcgggggatctcagagggcgagcaagcgatggcggtcgggggatgtgtcggctgaggtatcaaaaataggggacccagttttcagccccaacacaccccctaatcctcagccgcagccagcctctgggtggggttgcgcctgtcaaagcttccgaatggagagaagcccaaggctacggaaggcatcagctccaactccaggaagggaataaggctctgtgcatacgaatggggctttgaaaggcgttgccgcggcttccaaagcgatgcgctgtgcctcgcctcgcctcgccccgccccgcccagagcgagactccgtctgaaaataagtacacaaataaatcataagataattcatcaataaatgaaagaaagaaagaaagaaagaaagaaagaaagaaagaaagaaagaaagaaagaaagaaagaaaggatcagtagagcgatggtggtcgtgaatcattccccggagtccaggcgcagtggctca

SEQ ID NO: 528988 - DNA, 544 bp, Homo sapiens
ctgcactgtggaagctttgttgtttcactctttgcagcaaatcttgctgctactaactttctgagtccacactgtgtttatgaggtgttgtactcacyatgaaggtctgcagcttcactgttagaaccagcaagatcacgaacccagcaggaggaacgaactcgagacgggccgccttaacagctgtaatactcaccgcgaatgtctgtagtttcactcctgagcttctgagaccacaaaccttaccagaagaaagaaactcaaaacacatccaaacatcagaaggaataaactcaggacatgctgcctttaagaactgtgacactcactgtgaggatccacagcttccttcttgaaaatcagtgaaaccaagaatctactaattctggacacactttaacataaccatcatccttttaggttagggccagctgcaactaaatctcctatctccaagtcaaaaccacattatgagcctgaaagaggacaaaatataattaaaagatatcctcccttggtatcatacagttgacctttcttttat

SEQ ID NO: 528989 - DNA, 544 bp, Homo sapiens
ctgcactgtggaagctttgttgtttcactctttgcagcaaatcttgctgctactaactttctgagtccacactgtgtttatgaggtgttgtactcaccrtgaaggtctgcagcttcactgttagaaccagcaagatcacgaacccagcaggaggaacgaactcgagacgggccgccttaacagctgtaatactcaccgcgaatgtctgtagtttcactcctgagcttctgagaccacaaaccttaccagaagaaagaaactcaaaacacatccaaacatcagaaggaataaactcaggacatgctgcctttaagaactgtgacactcactgtgaggatccacagcttccttcttgaaaatcagtgaaaccaagaatctactaattctggacacactttaacataaccatcatccttttaggttagggccagctgcaactaaatctcctatctccaagtcaaaaccacattatgagcctgaaagaggacaaaatataattaaaagatatcctcccttggtatcatacagttgacctttcttttat

SEQ ID NO: 528990 - DNA, 544 bp, Homo sapiens
ctgcactgtggaagctttgttgtttcactctttgcagcaaatcttgctgctactaactttctgagtccacactgtgtttatgaggtgttgtactcaccatgaaggtctgcagcttcactgttagaaccagcaagatcacgaacccagcaggaggaacgaactcgagacgggccgccttaacagctgtaatactcaccgcgaatgtctgtagtttcactcctgagcttctgagaccacaaaccttaccagaagaaagaaactcaaaacacatccaaacatyagaaggaataaactcaggacatgctgcctttaagaactgtgacactcactgtgaggatccacagcttccttcttgaaaatcagtgaaaccaagaatctactaattctggacacactttaacataaccatcatccttttaggttagggccagctgcaactaaatctcctatctccaagtcaaaaccacattatgagcctgaaagaggacaaaatataattaaaagatatcctcccttggtatcatacagttgacctttcttttat

SEQ ID NO: 528991 - DNA, 544 bp, Homo sapiens
ctgcactgtggaagctttgttgtttcactctttgcagcaaatcttgctgctactaactttctgagtccacactgtgtttatgaggtgttgtactcaccatgaaggtctgcagcttcactgttagaaccagcaagatcacgaacccagcaggaggaacgaactcgagacgggccgccttaacagctgtaatactcaccgcgaatgtctgtagtttcactcctgagcttctgagaccacaaaccttaccagaagaaagaaactcaaaacacatccaaacatcagaaggaataaactcaggacatgctgcctttaagaactgtgacactcactgtgaggatccacagcttccttcttgaaaatcagtgaaaccaagaatctrctaattctggacacactttaacataaccatcatccttttaggttagggccagctgcaactaaatctcctatctccaagtcaaaaccacattatgagcctgaaagaggacaaaatataattaaaagatatcctcccttggtatcatacagttgacctttcttttat

SEQ ID NO: 528992 - DNA, 478 bp, Homo sapiens
ataaatatatacaattatactttgtcaaaatacaataaaaattttaaaaccaaattattctttgataaagtgttatagccattctcaaagaagaaaatcaccagaaggatgtaatgactttcaccaaagagtaaagcaatgcttcatctttccaagatttctccacatctccttcccagagttcttttttgtttttttaaagatggagtctcactatgttgcccaggctggacttcaactcttgggttcaagtgatcctcatgcctcagcctcccaagcagctcagactaccatcacacatcaccacgtctagcttcctttccagagttttattttcctccaacacatgaatttctatgacactgtctactacttttaattttttattaaattttatcttatagttatytgtgaacaagtcttatattcccttttatttatttattgagacagagtctcacttttatttatttattga

SEQ ID NO: 528993 - DNA, 373 bp, Homo sapiens
cctgactcaacactttgcacagagaatgaaagayggaagaaatgaagtagtggacaagcaaacatcaatgtggagacagattctcattttccccatttggtcttggctgcttaagaaaaggtgaaaagcaggagaagatgcttcccggtactgcaacgtagggcaaagtggagctgacaaatggaaagaatgtgaccttgggaatgagattcttgccttttctgaggtatgactactaagtagtattgcataagaaaaagtgccttgcttttataattgatgaataataactatcatgattgttcctggagagagcacttgctcacagatagatgggacatccagactccaggcctggttttgctacaggctg

SEQ ID NO: 528994 - DNA, 373 bp, Homo sapiens
cctgactcaacactttgcacagagaatgaaagatggaagaaatgaagtagtggacaagcaaacatcaatgtggagacagattctcattttccccatttggtcttggctgcttaagaaaaggtgaaaagcaggagaagatgcttcccggtactgcaacgtagggcaaagtggagctgacaaatggaaagaatgtgaccttgggaatgagattcttgccttttctgaggtatgactaytaagtagtattgcataagaaaaagtgccttgcttttataattgatgaataataactatcatgattgttcctggagagagcacttgctcacagatagatgggacatccagactccaggcctggttttgctacaggctg

SEQ ID NO: 528995 - DNA, 579 bp, Homo sapiens
gctggtggggatgtaaattgataatgacagctttggagtgcaatttggcaacacctcaaagttgaaaataagtacaccttrcaacctcgtagttccatttcccagtgcgctgtcacatatacaagtaaagacgcatgcacgggagccttcattagcattgtttgtaatagcggaaaatagaaacaattcaaatacctaccaatgaagggttgcagaatcaagctctagtgcatatatatcatagaatactatatggcaccaaaataaataaattagattccctgggaaagaaatgtatttacaaaacacatgccacaggattttttaaagggagatagagttgaaaaaaataagatgaccctaagggttcctgctatgcacagtgcaaggtttgactcccctgctagagctgggtcatgagttggcactaaagatttagcggccaatgtaaaaaaggaaatgtgatcaatgacagaattagactgtgttataaaaacatgcaactattcctggcactaagatcagagaaaaatttcctccagaactttcataaagaggccaccatgcaaggtgggtggt

SEQ ID NO: 528996 - DNA, 564 bp, Homo sapiens
ctggtggggatgtaaattgataatgacagctttggagtgcaatttggcaacacctcaaagttgaaaataagtacaccttgcaacctcgtagttccatttcccagtgcgctgtcacatatacaagtaaagacgcatgcacgggagccttcattagcattgtttgtaatagcggaaaatagaaacaattcaaatacctaccaatgaagggttgcagaatcaagctstagtgcatatatatcatagaatactatatggcaccaaaataaataaattagattccctgggaaagaaatgtatttacaaaacacatgccacaggattttttaaagggagatagagttgaaaaaaataagatgaccctaagggttcctgctatgcacagtgcaaggtttgactcccctgctagagctgggtcatgagttggcactaaagatttagcggccaatgtaaaaaaggaaatgtgatcaatgacagaattagactgtgttataaaaacatgcaactattcctggcactaagatcagagaaaaatttcctccagaactttcataaagaggccaccat

SEQ ID NO: 528997 - DNA, 564 bp, Homo sapiens
ctggtggggatgtaaattgataatgacagctttggagtgcaatttggcaacacctcaaagttgaaaataagtacaccttgcaacctcgtagttccatttcccagtgcgctgtcacatatacaagtaaagacgcatgcacgggagccttcattagcattgtttgtaatagcggaaaatagaaacaattcaaatacctaccaatgaagggttgcagaatcaagctctagtgcatatataycatagaatactatatggcaccaaaataaataaattagattccctgggaaagaaatgtatttacaaaacacatgccacaggattttttaaagggagatagagttgaaaaaaataagatgaccctaagggttcctgctatgcacagtgcaaggtttgactcccctgctagagctgggtcatgagttggcactaaagatttagcggccaatgtaaaaaaggaaatgtgatcaatgacagaattagactgtgttataaaaacatgcaactattcctggcactaagatcagagaaaaatttcctccagaactttcataaagaggccaccat

SEQ ID NO: 528998 - DNA, 477 bp, Homo sapiens
ggacaggtccatatgtgccttgtgaaggggttaccaggaagtctctttgcttcaccccctcaaggctgcctgtgaagctrgaatgctgctcagcctggcagaggcacacgttgtaagtgtgaggaagtcaaagcccttgagagcaaccacctaacagtggggaaaagagttggtggagaagcaccaccatcttgccctccttgagtgggaacttttaaagggatgtcccacatagttcctcaggacaccctgcatagctgatttccagtaagccacagcagtagttgtcatgtcctttaatcaatttctttctctttctcatttcattctttttactccctcatttctgctttctgaaatcacttcccaaatatattatctccatccaaaatattttctctggctctgatttgggaggtcacctaatggaagatataccattttgaaaagaaagtttcctcttctgaacattgtatc

SEQ ID NO: 528999 - DNA, 651 bp, Homo sapiens
cctcctttattgctcccaagaccactctcaaagagctagaaagcagtggttctgcccctgtagacttagatttgtattcagtgaacatggaatcagtgtgggacagcrtatttccagctcgtttagtcctttttctaactctgtgaatgatggatcgtatttccatttctgagataggaaatggaggcattgagtgtagtaagtggcaaagctgagacttaagtttaggtctatcaggttaaggctgcccctcagggaaagggggacctgttttattgagatgtgagctgtgcttttctttgcatcattgatgatgacttagctattctagctactcttgagttccctccttatttccagtctttcctttttagtgggtgggcatctgctttttaatcatacaggaaggatcttgcctaactgtgttaagtatagttttctgggagaatagttgattatttttgagataattagaaaatctattatcggtgtatgtcaaaatggattttagtcttactgcttaagatatatggttcagggaaatggaagactgaatggtatagtcttttctgcagacatggatggttgaaggcagttcttcctataaactggccggagaaagctgggttattctcagtgtggagtttgtgg

SEQ ID NO: 529000 - DNA, 651 bp, Homo sapiens
cctcctttattgctcccaagaccactctcaaagagctagaaagcagtggttctgcccctgtagacttagatttgtattcagtgaacatggaatcagtgtgggacagcgtatttccagctcgtttagtcctttttctaactctgtgaatgatggatcgtatttccatttctgagataggaaatggaggcattgagtgtagtaagtggcaaagctgagacttaagtttaggtctatcaggttaaggctgcccctcagggaaagggggacctgttttattgagatgtgagctgtgcttttctttgcatcattgatgatgacttagctattctagctactcttgagttccctccttatttccagtctttcctttttagtgggtgggcatctgctttttaatcatacaggaaggatcttgcctaactgtgttaagtatagttttctgggagaatagttgattatttttgagataattagaaaatctattatcggtgtatgtcaaaatggattttagtcttaytgcttaagatatatggttcagggaaatggaagactgaatggtatagtcttttctgcagacatggatggttgaaggcagttcttcctataaactggccggagaaagctgggttattctcagtgtggagtttgtgg

SEQ ID NO: 529001 - DNA, 612 bp, Homo sapiens
gtccccacactgctttctgtgattaatcttccttgaaacgtctgtggatgtaaaagcccatgtaaaaaggagtaaatgggagtaagaggagattggtaactacyaggcactcacaggctgcattaactggaggaaatacagttggagctttactagaggaacccttagcctgggcttcagactagacagcctgaggtgagctgagtgacaccaaatgaaagctgacatgtttcccatgacaaaaaccagatggtttggtgaagaatgctgctccagctttctgcctctctcctggtttctgcaaatcaattctgtaagatttagaccaaaagcctaaactaaaagaggcatcaaatgctgattttataaatcttgcatttgatatctcttagttttatgcaaataactatatgtttaggtttgtaaatgcattataatccagaaaagtgaaggcacaagaaccacagggacagcctgtcaatcagagatgatgctggttcaacacagagacagcatccaatactccagtgaggtagagatgtttatctccttctggagaagcaatgggctccctcatttgggcatttccttaactgaatacaggattcatca

SEQ ID NO: 529002 - DNA, 612 bp, Homo sapiens
gtccccacactgctttctgtgattaatcttccttgaaacgtctgtggatgtaaaagcccatgtaaaaaggagtaaatgggagtaagaggagattggtaactaccaggcactcacaggctgcattaactggaggaaatacagttggagctttactagaggaacccttagcctgggcttcagactagacagcctgaggtgagctgagtgacaccaaatgaaagctgacatgtttcccatgacaaaaaccagatggtttggtgaagaatgctgctccagctttctgcctctctcctggtttctgcaaatcaattctgtaagatttagaccaaaagcctaaactaaaagaggcatcaaatgctgattttataaatcttgcatttgatatctcttagttttatgcaaataactatatgtttaggtttgtaaatgcattataatccagaaaagtgaaggcacaagaaccacagggacagcctgtcaatcagagatgatgctggttcaacacagagacagcatccaatactccagtgaggtagagatgtttatctccttctggagaagcaatgggctccctyatttgggcatttccttaactgaatacaggattcatca

SEQ ID NO: 529003 - DNA, 538 bp, Homo sapiens
cccttgcttgtgccgttagccttacatgctcctctgaaagtaataccttccttcaactctctttacttgaaccacctaggtaaactcttgctgggaccatggctgttatgtgaagttcgaattgccctacctgtggggctgtgctggggctgtcagcagatgtgatgaagattgtagcactatccctaccatttcccttcacatagtagcacctttggatgagcttagttttgttatcttgattttatgctctcattcagaaaactgcagaagtctgcagaacttttgtagttgaggggaacattattagcagtttctcaattaataatgtccttggggatcaacatcatttaagtatttactgaatcactagccctgttttaggaaccttacagtgttttgtgtaattttctcaatctatggcaaagagattttagtcctcattttattagccaagrgcagtaaagtgaaatgcccaggctcacgcatctcaggccagtggctaagcaatgtctctctgtccttggagacattataa

SEQ ID NO: 529004 - DNA, 591 bp, Homo sapiens
gtggcttaacctagtgcctcaagaatccacacacacaagcagctattgaaagagaccagagaacacaccaagcacttgggcccccaattatgagccagcatgctgccctggtgaacagcaggcacctcagaactggatgaagcctcactagaatgttgtatgatttggtaccagttgacccaggtgaagtcaaattgggggacattgcatttaataaacacccctcctgagcctctctggactccaacattagtgagaaggacagaggaaattgtcccagtgtaagatttctcccgccgccctctgaaatatttgagcttagtctgtctgcagtgaaggctgacaagctacatccattctggtgattctgaggcaaacaatcgagaaccacacattgaaaactggtgctcaagactgcctaccccactagcacagagcaaacatctgtctctatcccrtcatactcaagtgcacaaccagtgtgtcagtcaatgtttctgagtgaatgaagaagatgcaaaagcacatcaacatctgagctcccttttggaggaggccttaatcatatgaattggaatactgtgctccttc

SEQ ID NO: 529005 - DNA, 560 bp, Homo sapiens
tcttagaatgagtgtgcagtagactagggtaggggtggaagcagacggaatttaactgcacctgtaaaaatcttcatcttttaaaaggaggcgacaattgtgcattgcttatttaagtaaaactttacctaagtaaattgaggttttgcagtgattcccaatagaaacactaccaattgccaagatacattttctaaacttgcgggagggtttgttggttgaggcaatgctttggggcatggctatcagtgaatgggtagaaaatggggtgctggatgtcctgaaaatgcagggacacttgcccacatgagagaatcgttctgtgtcctgctacacatttacatataaaaacaaatgggctgggttggcatgattttaatatatattggatttttcaggaatgcaacctttgtgtctataagttatgggaagattgtaytttatttgggtcagaactttcctgtgagttttcaccttactggaaaattatgtcaccaacagcagcacccctctccatatttgagccacccatcgaacatgctaaaggcctttggtgggct

SEQ ID NO: 529006 - DNA, 600 bp, Homo sapiens
ccgcgcgctgaaaagcagacgctgcctgcccggggaacggcgagagagagcgagaaaaaaaaaagcctgaaggcggcgcggcagccagcgagmggggagaaacagattcacacccaggggcctccgggcagggcccacgggactcaggccgtgtcccgcttggaatgtggagcaggcgcggcctcggcgtcagcagagctcccctgcatctcctcctgggggtgtgggggccgagtgggagaactggcggacagaggaaaggggcctcgctcgcaaggcccgggcggggaggcctggcctcctgctcagtcggtgcaaatggaaaaagagacgtaagtgccaagtcccaaaagagcaagtcatgggccccggctttacaatctgtttcatgagttattcctccaagcatgcctggcagtcgagtttcttcattagtgctgcagcaagcagatgggaacatgagcgcccgagagcatggaggcctcgcaggcaagcaggtggcagcccccaacattctgggcaggctctggggtcgagggagcacgttctgatgcttaaatagcctcaccttttatcctgactggggtagtcctgtgtggt

SEQ ID NO: 529007 - DNA, 600 bp, Homo sapiens
ccgcgcgctgaaaagcagacgctgcctgcccggggaacggcgagagagagcgagaaaaaaaaaagcctgaaggcggcgcggcagccagcgagaggggagaaacagattcacacccaggggcctccgggcagggcccacgggactcaggccgtgtcccgcttggaatgtggagcaggcgcggcctcggcgtcagcagagctcccctgcatctcctcctgggggtgtgggggccgagtgggagaactggcggacagaggaaaggggcctcgctcgcaaggcccgggcggggaggcctggcctcctgctcagtcggtgcaaatggaaaaagagacgtaagtgccaagtcccaaaagagcaagtcatgggcccsggctttacaatctgtttcatgagttattcctccaagcatgcctggcagtcgagtttcttcattagtgctgcagcaagcagatgggaacatgagcgcccgagagcatggaggcctcgcaggcaagcaggtggcagcccccaacattctgggcaggctctggggtcgagggagcacgttctgatgcttaaatagcctcaccttttatcctgactggggtagtcctgtgtggt

SEQ ID NO: 529008 - DNA, 571 bp, Homo sapiens
tggctcgggaacagggcctttctttggctggcaggcttgaggcagcataatttggaagcggatatgagaaagggcataataatgtgaaatttgactgcctagtgggggagaaactttgaatattatgaggcggttatgaaagtatttccttcttatggcttcaatggcactgcctctgagcattagtgtttgtcctcaggaggtaagtgtggggactgtatcagcagttactacctagataagcayggtgtataggggtaacatggtttatagagcatgcaagccttcacctctttgctagatgagatatggaacctaaattcggagaccacgtgacccctgaggcatggggaggtggggtcagaaagcgttactggccatgatccagacccaggcgtggagaaacgacctactggggttttcagggagcaggaaggtggggcaggtacagagtatattctgggggacagtttcataaaaagtgagtagatctccacaacttagtttctagactaaatggactaagcatgttccgccctattcttcctactaacaataacaaaaagctctg

SEQ ID NO: 529009 - DNA, 280 bp, Homo sapiens
cccttactccacactacttayggggacatataagttttatctacgtataaaaatagtccaaattggacattgaaaaataagcatccagaagcgtttttgatcaaaactacaagaagatactacctcatacccattaggatggctactatcaaaaaaattttttttaacttttaaaaacaaaataaaaagtgttattaagaatatggagaaattgaaactcttgtgtactgttggtgggaatgcaaaatgctgccaccaccatggaaaacagtacagtagt

SEQ ID NO: 529010 - DNA, 280 bp, Homo sapiens
cccttactccacactacttacggggacatataagttttatctacgtataaaaatagtccaaattggacattgaaaaataagcatccaraagcgtttttgatcaaaactacaagaagatactacctcatacccattaggatggctactatcaaaaaaattttttttaacttttaaaaacaaaataaaaagtgttattaagaatatggagaaattgaaactcttgtgtactgttggtgggaatgcaaaatgctgccaccaccatggaaaacagtacagtagt

SEQ ID NO: 529011 - DNA, 422 bp, Homo sapiens
tatgactgcagatgagcccagacgtcagcccggatgatggttgaggtgaagttaagtggtctttgatgctccctgccctctcatttctrtgatttttcatgggctcaatgtctttcttttcactcatcctctctagctgcctttcccactccctgcagttctgggggattctgtcttaaagatgtgtgtgtgggcaggtgccaatgcagtgacccaataaattttttctcttcgctgagtcactcagagtcagttttctttttaaaatccgtcttcctgtaataaccctttcctgagacaatccttgttgaccggtacaactgatgcccacctgctgtgagaacaggccaggatagaagaaactccaaggctggaggaaggcattttaagtcacctgacattaaaccaggctgacttccctt

SEQ ID NO: 529012 - DNA, 576 bp, Homo sapiens
tcttcggagtactcagtcaccaagtctaggctgctagatgagagatgttcctggattttaactctctggtacttttggtctacttgtgcctgcaaccagagaaagccctgaggagagagcataaggctggcagtaagcagcctctggtgtgtccaagaacagcaagtactgaggggctacgggtggggcacccacaaggtttagagagcagatgctgcagccagactgcctgagtgtgaatttggctggattttctgccgctgagtacaactcggggcagggctgctggggtcttctgatataggtccagctcagcttgcttctagaccggcttcagaaacctaaaagagtcaagttacctgtcgggagcctgatatcatyattactcaccacattttggtcacttgctgtgtgtcagacattgtacaagatgctttctacgtgacagaaacccctgcctctccacacaatctgctctctccttacaatctgctctctccgtcctcagtggatgggggctttgttactccggcattaagtggcacagatgagttagcctcactcctgaaggttctc

SEQ ID NO: 529013 - DNA, 672 bp, Homo sapiens
ctgtgaggttaaaggtgataacatatgttgatatggtttggctctgtgtccccacccaaatctcatctcaaattgtaatccccatatgttgcggggaggagcctggtgggaggtgattgaatctggggggcagatttcccctttgctattctcgtgatactgagtgggttctcatgagatctggctgcttgaaagtgtatggcacatctccattccctctttttctttcctgctctgccatggtaagacatgcttgcttccccttcaccttctgccatgattataagtttcctgaggcctctcagtcatgcttcctgttgagcctgtggaactataagtcaattaaacctcttttcttcataagttctctatagcagtgtgaaaatggactaatacctatgtaaaatgcctagtaccgaagctgtggcaaatagtaggtgtttgataaatgttaggttttacaactactagactgaaaagttcaagtggttgtgccmttgaataatgggttgggccagagagtgttaatttcaaccacagggacagagaaagccaaagggggctcactgagtctgatggctgtggtttctctattacttaacacagaccttaaagacacagagaaaggattaaactgcagcaggtatcaagctttatcatacattaaaaatc

SEQ ID NO: 529014 - DNA, 537 bp, Homo sapiens
atggcctctgataaacagcaagtgcttaggaactgctattcagaaagggttgctatyattatggaagtagatgacaggaaattcttctcctaaattactgaaaagaagattgatatttaaaatagaattgatgcctagcacctgcaggtgcagaccttggtggtaaagggattgctcagatatttcaggcacagattccaaattgccataaagggtggcatagaggaacgaatctaagaaatgactgtgtaacattgagcctgccaaaaatgaattatgatatttttgagtacttttcaaggtgagtgaaggagttatttttaacatgtttcaaggcaactttaaaaaatatactctcttgtggtctcttgtggtctaaacccttaaagtgttgtatttttacatagctacagatatttgtatagttaaaaatctcagaaatagcaaactgctcaaatcgtgaggcacctacgtcaaaacctagtatataattttaatatagtttagcttggtctgaaatttgcaaaagagtaccag

SEQ ID NO: 529015 - DNA, 405 bp, Homo sapiens
ccagagaattccctggaaacagttataaataaggacttgtcacatggacaatcacaacaaagccctgctcaaaagctagtcacaattctaaaattgtgcraatgcttaactggaaggggtatttctcaaaggctagctagctagtccacagttattgccccaaacatctttgtctttattatacttccttaaattgtacaacatgaaagtgacataaatcacatatattattcttattttccagtgggaggggagagacccttgagagtttgaagaggccatgcctggcttctaccagatctgaggttactgagctggctttgagccttttagatggagtaccagaattaggtttaagccagacttggcttgtcatggaggtacctgtcgaaggatgcaacttta

SEQ ID NO: 529016 - DNA, 245 bp, Homo sapiens
ttcataagacctaaagaagagcaaayggaggacacaagtggttagggcagattattatgcagtttaaataaattctacttcacaattgtgatctttacataaggaaatatattttcctttaatattctaatctttgtaaataattacataagaaataatttgtttcatgcttaaaatgttctgccctggaaaagctagccatcactaaagctaattggtcttcatcatcacattaacaagtggta

SEQ ID NO: 529017 - DNA, 493 bp, Homo sapiens
agaaaattcctagccaaaaggtataaagcaaggtatcagaaaaggaattaaaggaactaaattcaaatcaacatactagggaaaacctctctaaatcaatatttgatgcccatgattcttaatcaagaagccaattagtaattaatgggcatcgaaccatacctaatgttgcattaggggctcaatgaagaaggctaaaaatattctttgtgaattttcagtcttcatcataagctagaggtagataaagtctgagaacttactctgtacccagatcctgaactagagataaaattsaaactaggtcagcctgactgtaccacacgtgctcccaatatctagattatactgactctttcctaaagaaaaacagggccaataatgctcaaaatataccccgccatatacataatgatcatgatcatgatcatcataccaggctctgctctgaatgtcagaaaattaaaaaaagcatcagggaagtagaaactag

SEQ ID NO: 529018 - DNA, 657 bp, Homo sapiens
tggtcacatcctgcccggggctggattttgtatggcctatgaggtaagaaggttttttacccttgttaaggattgttaaaaaaacaaacaagaacatgtgacagagaccataagtggcccgcaaagcctaaaatatttacaatctggcccttttgagaaaagtttgccggctccttccttaggttataagttacacatgaaaggaatccaaaatttcataggataagctcaaactgatgacttcaattccagaatgtcttaacactttgaaagagtgacttacctgttgaatcaggagaacacatttttggtggtgaaatgaagacttgatcgaaagactgccttgtatgatttgacagtacagtcagatggtaaaagaacttctgtactgtatgatgtttcagaatagttctgtaaagtgtctgaatgtactctggtaccaytgttgtgtttaatttgtccgaggcagcctcaggtaaacactagaatctgttgcagcaagatatgcaaagtaaaatgaaatatgtatgtgagattgtattattttattgtattttgctggacttctgaagggacttttttttctacttgcaaaaaattaaaacccttgagtgttagatgttagaaaactttttgaattatataatttctttattt

SEQ ID NO: 529019 - DNA, 617 bp, Homo sapiens
ttctggatcctgtctaataaatatttgtctgctaggtcttgaagatattctcctatgcttttcctagaagttttatagtrttaatttttacatttaggcctataatccaccatgaatttacttttatatgcaatgtgagatatgcttccaggtatgttttattctgtacgtatatgtaactgttccatctccaattacttaatgacttacactttcccattcagttgctttggtgtctcacttgtaaataaattgaccatatgaatttaggtctatttctggactctttattctgttccattgattttgttttctatatttatgccaataccatgctaacttttcagttgtagctgtatagaaagtattaaagtaaggtagataggctctttagctttactgttctttttctagattgttttggcaactgtaaatcctttcaatttccatatacatcttagaatctgtcaatgcctaccaaaaatgctacaattttgataaggattggatgaaatttataaatcaatttgggggaaatttcttcttatgaaaagttagaaataattcttgttcccttatgtaatgtgtcatttctttctgtctgctttcaagatttt

SEQ ID NO: 529020 - DNA, 617 bp, Homo sapiens
ttctggatcctgtctaataaatatttgtctgctaggtcttgaagatattctcctatgcttttcctagaagttttatagtattaatttttacatttaggcctataatccaccatgaatttacttttatatgcaatgtgagatatgcttccaggtaygttttattctgtacgtatatgtaactgttccatctccaattacttaatgacttacactttcccattcagttgctttggtgtctcacttgtaaataaattgaccatatgaatttaggtctatttctggactctttattctgttccattgattttgttttctatatttatgccaataccatgctaacttttcagttgtagctgtatagaaagtattaaagtaaggtagataggctctttagctttactgttctttttctagattgttttggcaactgtaaatcctttcaatttccatatacatcttagaatctgtcaatgcctaccaaaaatgctacaattttgataaggattggatgaaatttataaatcaatttgggggaaatttcttcttatgaaaagttagaaataattcttgttcccttatgtaatgtgtcatttctttctgtctgctttcaagatttt

SEQ ID NO: 529021 - DNA, 590 bp, Homo sapiens
taaccaggataagatagattatccccaactccaggtagcttcacaagttgccaaccttatagaattaatttgcatgtgagttttaggataaaattatcatgtaactgaagcagtttagcatgaccagtagctcatatagcacaagcacctctgtgtaagtcagtttaggttttagtaaagtttaaattttctttttaagaagtgtaccactgtaasagaaggaacttagagaaagccaagacctttcttttgtggggtgggggtggggggaactatctcagggaagaatgtagtcattgctgatggagtattttcatattaattagaagccttagatttgtttttgttgccttaggataagcaaagcatacatctcagactggtatgtaaatatctatataaataatgtttgattttcaacatgtgtgagtattaaaacatcaagtttatatgtaagttacaagaccaatctttgcatgtcttgtcactatagggttagattcaaatatggatggtcctgaaccttctaaaattttggaaaacttttaaagagtaatacacaaaattatcaatataccattagataaaag

SEQ ID NO: 529022 - DNA, 599 bp, Homo sapiens
taataaacaaatgaggggtctagataagatggaaataagaagaaggrgtagatatcagcctggcaaagcctatgacaaaagagaaagagttggtagaacaacgctccaggcagagacaacaatttcctgtgcaaaatttgaagacgaaagaatctgccagggataaggcaatgcagcagctatcaatgttagagatgagagattatgagggtgaaatcatgatataaatgtttatatttgaagcttttaacctaaggcttagcatagaataaacataaccatttaattcacaaataaaccagtatataaagaacgaaatatacataacacatggtatattttattgctgttgatatttttggatttttccaaaagtttttgaatgtatgtgacaatgaattatataaagttttcgctgaaaacatccagggaaaacttattatcaaggaattaggagcatctttgtcaaactgcactgcatgatctttgactactcagacagcagtccaggaacttgcagtagctcaggcccatcattatgatcatagattatcagtgaactgaaaaatgtgcaagtccttgttaacagaaattcccag

SEQ ID NO: 529023 - DNA, 547 bp, Homo sapiens
atgctagctgtctacatagcatttagtaaaaacttactaataaaagtatacaatattgtatctacaggaaggagtgaagcactaagagagaaacaaggacaaactacggccccakgtacatttaccttctggaacttgtctaatttctggtgataaaaataacgtgaaaaataaagtgcccaaaccacaataaaattaattttggggacatcacaggttttaaaaaaatcaattatattaggcaaataacatagcgtaatacatttgtaattataattaacaagggtaaaatatcaaaatccaaaccttcaaatacaaaaaacaaagtgttctttgtgtcacattgtttataagggaaaaaaatcaaagagaagtaagctagcatcaagaaaagaatgggatagaatgggataatgaacattcagggcaaagtgatctactagagataaacggagaattcctggctagcaagaacgcatgcttagcctaattgaataatcgtcctaaccccactctgtcaggggaatcatacagtggtcttcagaaa

SEQ ID NO: 529024 - DNA, 583 bp, Homo sapiens
tacatggagccctctaatcagaagttgtggccctttgaggtattggagcaacttayagaagcaatggccagcctggctctaagtatgagagattatagggtgtcacttgttgggatgggtgtcatcagacagagggtttggatgacacaagaggcagtctaaagtaggttgtgtgtgaaagagaaaatcttcttctcccattttccatgtcttattttcctctgcaagtatcagctcacttcaaacactgtaacaacctgcattgcttgacagagcacagtgagagtggagcagggtgggaggagttgatctgagactgagacctttcatttcacataaaactgttggttttgggagatttcctcccagcttctcccagtgagttcctgctttctggggatatgctgcttgacatcttggcatttgagtccctctcacaggaaatcttcaaagtcacacagatcccacattaccaaccaagggaatgcccagcatcctatacagagggagtgcctgtggctggtctccattccagtgggaggaattggagttgacatggtggtaactcacattaagtctggaa

SEQ ID NO: 529025 - DNA, 626 bp, Homo sapiens
atgatggacttctggctcttttctactttttggcaattatgaataaccctgccatgaccgttcaagtaaaagttttctgtgaacacgtttcaatccttgcatatayacctagaagtgaaattgctgggttatatggcaattccatctttaactttttttaggaatagtcaaactgttttccaaatgactgtactattgtactcccaccagcaatgcataacagttccaatttgcccacttcctcgccaacaattgttactgtctgtgttttttattcgagccattttagtgggtgtgagtggtttctcattgtggttttgatttgcatttccctgaggaatatgttgagtatgtttttatttgcttcttggtaatgcaagctcttattaatctattcattcattcatgtatttcagtcccagctttatcagttatgtgtggtcttggacaagttattttacttctctgaactcagttttctcattcataaagtggaaataataatctctatcttatgggattgttgaaaggactagaatgaatatatgcaaagctcttggtagaaattgagaactcaatgaagacagaagagatgtaagtcaatatgatgagtaagtcaaatgatg

SEQ ID NO: 529026 - DNA, 626 bp, Homo sapiens
atgatggacttctggctcttttctactttttggcaattatgaataaccctgccatgaccgttcaagtaaaagttttctgtgaacacgtttcaatccttgcatatacacctagaagtgaaattgctgggttatatggcaattccatctttaactttttttaggaatagtcaaactgttttccaaatgactgtactattgyactcccaccagcaatgcataacagttccaatttgcccacttcctcgccaacaattgttactgtctgtgttttttattcgagccattttagtgggtgtgagtggtttctcattgtggttttgatttgcatttccctgaggaatatgttgagtatgtttttatttgcttcttggtaatgcaagctcttattaatctattcattcattcatgtatttcagtcccagctttatcagttatgtgtggtcttggacaagttattttacttctctgaactcagttttctcattcataaagtggaaataataatctctatcttatgggattgttgaaaggactagaatgaatatatgcaaagctcttggtagaaattgagaactcaatgaagacagaagagatgtaagtcaatatgatgagtaagtcaaatgatg

SEQ ID NO: 529027 - DNA, 623 bp, Homo sapiens
gcaaagcaggctgcatctagctgtcccatagcaaagcattcatcaggaggcagttttttaaggcagatatctgggtcaaccaccttgagaaattgggaataggtgggtaactggaaactgtgtcaatggtgactattctttgcttcgggtataagaaggtccaaattgtattcaaaatagatgctgaagcaacataaaattataggaattcactacatagcttgagtggattaagacaagtaggaatataccaaagattgcaaattcagacgtgtacactgctgaccaggcaacataaataagtaaagcaggctgaattttactcttttaacacaaacacacatcacatataaaatatgcccagcccctgctagtctatatgaaggctttgagcaaattagaaaatgatgtcccctctgggctsatgctgccccaagccaggggtaagtgtgcactgtataccagccctgacttgtgctgtttgtgcaggacacaaattacacaaccattaggcaatcttgcaaatatgttctgttccatttttcttcaaacagatggccttttctacctttcattcacagacaacagaagaagcagcaggaaaataacagcagactttcagc

SEQ ID NO: 529028 - DNA, 666 bp, Homo sapiens
gcatgaaaactgacagggagatgtaccaaaaccattaagagtggcagctaactcgtagcatttatcatcgacacactgtgattagaattgtcttatttaatttaacccacaaaacgaccccacarggcaactaccatcatcatcatcatcatcatccccattttacaaatgatgcttcttcttctgttgaggctcacagagaacctgctcaaaagacaagccaggcggtagaggaagcagaatgctagtcagtcagttgaccaaaactgcggctgcatgttgcttttgtgggtactttattcccgaagcccccaggctctaagaacactgttgaattttttatgttcttctcaattaaaaggggctcaatccagggtcatcaaaccattaatctaaatatgctaaagtctgtgcttagaaaggatcttacagtagtaaaaactacaggctttaaatttatttcaaatggttttgggcaaacttatgttatcccagagggtggtctaggtgtgtggagttgagacaaaaatagggattattcttcccttttgggacaaaactatacctctgcatataatggatgctaaaacaaatataaagatattgccctcttacaagaaacacattacattaaggcttaaagctgaaagtatttctggaaataaa

SEQ ID NO: 529029 - DNA, 486 bp, Homo sapiens
ctgttctatgtattttcttctatgtatgttgtcacttttayaagcactacaaaatgtaccgcatattcacagagccacgaaatatgcaattgctggcattccagccaccaccccagtttgcactctaagttctattttagaacttgtatttctgtgatttcacttcctgaagctgcatttaccaaaggcattctgtcaactcagagtgggaaaggtggtggggctagtgagtcagagaagatgctggtgttgagccttaagaagtcaagagatggacaaactgagattattctgtactctgagattcttgacgtcaacaaggcccctgatctccgtgtatggcctttcctcttccagggcacctctccccagcatgtacccttagctgtttctttctaccctcatttcagggtagctcttagccagtaggcaaaacgaagggtttctggatcaatgagttgattctgtacattctttgagacatcc

SEQ ID NO: 529030 - DNA, 486 bp, Homo sapiens
ctgttctatgtattttcttctatgtatgttgtcacttttataagcactacaaaatgtacsgcatattcacagagccacgaaatatgcaattgctggcattccagccaccaccccagtttgcactctaagttctattttagaacttgtatttctgtgatttcacttcctgaagctgcatttaccaaaggcattctgtcaactcagagtgggaaaggtggtggggctagtgagtcagagaagatgctggtgttgagccttaagaagtcaagagatggacaaactgagattattctgtactctgagattcttgacgtcaacaaggcccctgatctccgtgtatggcctttcctcttccagggcacctctccccagcatgtacccttagctgtttctttctaccctcatttcagggtagctcttagccagtaggcaaaacgaagggtttctggatcaatgagttgattctgtacattctttgagacatcc

SEQ ID NO: 529031 - DNA, 486 bp, Homo sapiens
ctgttctatgtattttcttctatgtatgttgtcacttttataagcactacaaaatgtaccgcatattcacagagccacgaaatatgcaattgctggcattccagccaccaccccagtttgcactctaagttctattttagaacttgtatttctgtgatttcacttcctgaagctgcatttaccaaaggcattctgtcaactcagagtgggaaaggtggtggggctagtgagtcagagaagatgctggtgttgagccttaagaagtcaagagatggacaaaytgagattattctgtactctgagattcttgacgtcaacaaggcccctgatctccgtgtatggcctttcctcttccagggcacctctccccagcatgtacccttagctgtttctttctaccctcatttcagggtagctcttagccagtaggcaaaacgaagggtttctggatcaatgagttgattctgtacattctttgagacatcc

SEQ ID NO: 529032 - DNA, 394 bp, Homo sapiens
tatgactacagagatgcaagtagaagcattcttcagcctcctccaatgagagatacaacctagacccagaatggagaggctgagggcagccagggagcctaagaagcctattcagaattcctgcatttggagcctaggaatttatttaatgtcattgttattttatacacttggcatttgtttatatgcaaatagtgcataccagttatgaatctcagtccacaaactattttttctatttcctatagcttaacttgatttctcagagttttccttgtgcagactgttaggcaacaaaacaaacaaataagaaatcagaccttcccaaggtacctctccatgmgtgataccaagattatgaggctttatacaatgccaaggtaccaaatagtgg

SEQ ID NO: 529033 - DNA, 442 bp, Homo sapiens
agagaaactgaaaagaggaggaaagtcagggcttctgcattccttagggttctgctcactgtttctgctcacagattccatggggtgttccagtattctcaccaaaactcccttttattcatgctggtttgagttgaatttctgttgcaaaccaaaatttctctaataatagaaggggactcccccacttctccttcctgtataggcagcagaaaaagaaatctgactatattccctggtctggcaagatgttygataagtctaaacctggaaaaaaaccccaaagagtccctagggttgcatcaaaatataacctggctctgggcccaggacagagcagctctggcttcctagcgaagggttaggactgtgggaaggaatgaaaggaaggaccggaaaggctgaggtcctggactggagggggaggtgagagcatctgcag

SEQ ID NO: 529034 - DNA, 607 bp, Homo sapiens
gcattgactctggagttcaacttagagtgtattgtcatcttaacagtactaagtctttcaatccatgaacataggatgtcttyccatttaacatagtaaaattgagacttatagattcttaagactaaaattagcattacaggtaagtcttcctttggataacagcttaatttgctaacagttgaataaaaacccattttttaatatcaaatcactttttcatagctaatattaataaatgttcatagaaattcttggccaccctccacccatacatacaatttaaaatgatgcaaggccacatgccaaaagcatttcagttaaattgaaaaggtagaacaaatttaaaaaattcaaagtgaaggcaaataatcttggaaagggaatgactttctaagcataacacaaaggcaaaaagctgaaagaaaaatactaatgtattgtactacttaatgatctaaagtttctattcttcaaagtttctcataaacaaaattaaaagtacaatttaaaaagaggactacatagaagatacttgacaaagtgaataatttcgatatataaagagctctttaaaaatgacaaaaaatgaacacttcaaattttt

SEQ ID NO: 529035 - DNA, 570 bp, Homo sapiens
gaaaaaaacaaacagactggcaattacaacacaatgtgataaattcaccaatgcagccttgcccctggtgcttaaggggcttggattccatatggaaaaaaaattcccaaaacctcttcccaccattgaatattccactcttccactttcttgtctaaagtagtgaagtgatcactgtagcaatgagactatgtaaaagtcaaatgagctaaaggaaatcatagctcctttggaggcatgaggacatggaaaatctccattcccaagaagctgtgagatcatgtctgatttaaatcccaatcctaaacaaaccaggcctcacrctgggtttcatgtgtagaatttcatgtcctatccctgtaatgaggtgataaggcctgtgtcacagtaagtcagtagcaggtgatggcaattaacaggattgcactaacctggagatgtgccaagctgtcaaaaaaaggattagaaagtaaatgaagtgaacaaccacgaaccagcaaatagggcttaatggacagtacaagtcagtgaggcaaaaatgggccaatttgctctcattgattttcactg

SEQ ID NO: 529036 - DNA, 565 bp, Homo sapiens
acatgcctatctgaatcacagtgcatttactgcacctcttttctttttttttttgagacggagtctcactctgtcgccaggctggagtgcagtggcatgatctgggctcactgcaacctctgcctcccggkttcaagcgattctcctgcctttgcctcccaagtagctgggactacaggcgcccaccaccacgcccagctaatttttgtattttttgtagagtcgaggtttcaccatgttggccaggatggtctctatctcttgaccttgtgatccacctgtctggaactccaaaagtgctgggattacaggcgtgagcccctgcgcccggcctattgcacctcttaatacaattggcattgtccaaggattcatctaaagagaatgtcacaattgtggatactgtgtgtattcttattctacacaactgaatacaaaggtcagcagcctttagttgagaaaactcccaaatcacttcacttgatcaatcacatactaagctgaattattaatgtattatcagatatttattgagtttataatatgtgaaaggcactgttttagg

SEQ ID NO: 529037 - DNA, 626 bp, Homo sapiens
tgaagtgaaatccttttgtgaccttgaacttggatttttatatcaacatcaaagatttattaatgaaggctcaagatttccaataaaaacttttccaattaaatgtttccagttgtcttcctttcccaggtgaagtggccaacttcactaagcccagtggctgccttttgcccaagctctctattcttgaaatagaggtaagttgtctttgagtgaataatgggaggcattctagatcagaatgcctgggtctggcatttactaagtcattttaaaccagtaacttatatgccctttgcctccatttcctcatctccaaaatagaacttgccacactgggttgataagaggatcaaataagataatgggtgaaaagtgcttaaaaccgtacctggcaaatagtaagttatcaagaaatgaaatagttatcaatattagcatcattatcrtaacttgattggtgtagtaataaaacaggttattggataggaaatttggtggtatccaaccccatttttagaaatcttcctgaaagaaatatgacataggtacaaagctttttgcataagaatgatcatgtagcattgcttttaagggcaaaaaatgtggtaatgacgtcagtattc

SEQ ID NO: 529038 - DNA, 551 bp, Homo sapiens
cctggccagagttcccatggccatgaggacccaaggatgctccctcaagactatatgaatttgtacttattgttygcagccaaccctgtagattggctaacccgacacccatccagagctcctagccaccagttctgtggccatgaaacacacttctggctaaggagacaagcataaatctttaggttggggcttctagcgaagcccttgcttcccttataaattaggacagactctgctggtgtcaaccttcattctctttttgcccttcccctttatccgcttagaacaaagatgtgatgcttggaggtgcagtgaccgtgagacagcaagccaatactctaagtgtggcaaagcaggaaaaataaatagcttgggtcctacagaatcattgagctgcagtcctggactgcttaattctgaatttgtataaaataaataaacccctttctgtttaagccacaggtaggtaagtagtctgttacatacattcaagagaatttgtatctggagggaaccttcggattgtctgttccagcttattgccatgt

SEQ ID NO: 529039 - DNA, 648 bp, Homo sapiens
tgaaaaatatcaacatcacctccacttgaagagtgcttagtgctttttcaaagaatttagcaatttgaatgctatgtgagtaagagagcttggggaggaagtgtcataactggagtttgctcctgcattcatccttctacagttattcacagcctctcattgagtgcttagtaggtagagaagagagtttgcttttctcagcctgcttttaagcataatttctaatgatcagaacagttaatagcattcattaagtaccttcctcaggccagacaccatacattacaaggtgcctgacactcattgatcacccatcgtgtccacaccagaaaactagatgatgttctctccttttggctgataaggaaactgaaccacagagagtggagaggagcaggtactgagttcacagctggttagaggaagatctggatgcaaaagctcaatctccatggcttttaagaaaacaataatagaacacaaaaacgtaggtgccttaatttgtccacaggcaygtgtttctagagatggggacattggtccagccaaaaattcctagactgtgcaaagcactgatatttcactggcagaggtaaggagacacagaggcccttcaggacagggatattctagcaacagtgttattcc

SEQ ID NO: 529040 - DNA, 597 bp, Homo sapiens
aaattgtccactgggggggaaaaactattattttcactgtatacgaaaacttcgcctcaacaaaaaatgaactaaaaaagaaaaaaaaggggaggggggctggcgacgttgaaaagtaacgctaaactatgtaaggatttgataattggggtaagccttttctttaaaacgtctagtaaagaaaacattccaagaaggtctgctagattctgtgactaaacaaggacattaaaaagccctgaatccagcttggtcaacgtagtgaggccctgtctctacggaatttttttaaagttagccaggcgtagtggtgcgcgcctatagtcccagctactcgggaggctgaggtgggaggatggtttgaacacagcagctcaaggctgcagtkagcagtggtcggtgcccactatactccagcctaagggacagaaaccttgtctcaaaaaaaagaaaaaagaaaaaaaaaaaaagccttgcgagctctgggggagatttcccgcagcccagctttgccagggacccagcctcacccctcgggctccaccgcccactcccgcccttcacctgacgtgagcaccccgactgctccactccttc

SEQ ID NO: 529041 - DNA, 597 bp, Homo sapiens
aaattgtccactgggggggaaaaactattattttcactgtatacgaaaacttcgcctcaacaaaaaatgaactaaaaaagaaaaaaaaggggaggggggctggcgacgttgaaaagtaacgctaaactatgtaaggatttgataattggggtaagccttttctttaaaacgtctagtaaagaaaacattccaagaaggtctgctagattctgtgactaaacaaggacattaaaaagccctgaatccagcttggtcaacgtagtgaggccctgtctctacggaatttttttaaagttagccaggcgtagtggtgcgcgcctatagtcccagctactcgggaggctgaggtgggaggatggtttgaacacagcagctcaaggctgcagttagcagtggtcggtgcccactayactccagcctaagggacagaaaccttgtctcaaaaaaaagaaaaaagaaaaaaaaaaaaagccttgcgagctctgggggagatttcccgcagcccagctttgccagggacccagcctcacccctcgggctccaccgcccactcccgcccttcacctgacgtgagcaccccgactgctccactccttc

SEQ ID NO: 529042 - DNA, 538 bp, Homo sapiens
cacccatcccactaggtgcagaccatgctatgcagagagcgagcagcaatgcggccctactgctttggagtgagagtcgagagcgatggaacctgcctgcacmacatccatcctgcccgcgctggacccagcccagttctccaaatccttcatgtcgtcgtcttcctcttcttggcaggttttgatggtagggctatagagggaacatttggtagagggactgtttcggggccactgacttccagcaaattcttgtctggttcctcctgttctagttcttctaattccgccatgagctcatcctcgtcagacttttctccaaaccctacaggtttcgaaattgctgttgaaatctcctccccaagttcttgctggtcagcaatgtcctgcattaactcatcaactttatcgatgtccatgttgtcgtgggccgccttcttggccttggctgcagagcccatgttcttgagcacctcggtattggtgttggcattctccagggcctgctgctggaactcgatggttgataatgtaccgt

SEQ ID NO: 529043 - DNA, 535 bp, Homo sapiens
tgtctcaaaaaaaaaaaaaaaaaaaagtaaatgaaacataaatgaattccgtgtttcaatgtgggtcccatctccaagatatctcattacgtatatgtgaatattacaaattcaaaaaaaaaaatccaaaatccaaaccacttctggtcccaagcatgtaagataagagatactcaacctgtagtacaaacatcaaattgttttgaacagggttgtagggttacaaacaaaatcacttatcctttaaaaattcttagtaactagtgtggaaatttcgttaggggcttasaatcattaaccctatcagagtaaatgctcctgagggcaaacactacactttccaatacagttatctgtattattccataaagtagaatttcagcaacatagactaaagggacattcaaacatagaagactgaaagtaggcacactattaatatttggtaagtaaactgagcaggagtttaaaaacaaatacaatgcacaaggaaataaaattaaaatttagcattatttcaagatatctacaccac

SEQ ID NO: 529044 - DNA, 671 bp, Homo sapiens
tataatgtaatagggggatgaggtgtctttggataagggccagcatcttaattcctgctgaaagaaatattgctgatagaaatattgactgctaaattattctgaagcaagaacacgttcttcttttctctatcacygtaggccctgatatagtaagccatcatcttctacctttctctcagactgctgtttttggcagggaggcagcactctttctctcctattactaccaagaaacttgttttcaccactgtctttatgacaaaagacaaggagacctaggttccaaaagttctgaaaaaaagtattctcttttctgctataaaatacaatcatatcaaatgaaaaatactcacaaatataaccattttcacctttcttacaaagcaattgtattcttaaagaatgaatctctttccagtatccttagcacaatccttcccatctctaatttcctcacatacagattctgtgaatacttctgtatttctcttttttttaacacaaatcattctagatgacatctgaagaataaaattctttccatggaacaacattcggctgacagatgaccatatgacacccttcagacagtacagtatgtcactatcagaatgcgactgctggggagtgtatattcaaggtaatatttaatgttcaagtcaaaacat

SEQ ID NO: 529045 - DNA, 683 bp, Homo sapiens
gtattgcaagtgattattaatatacacaggtgtgagctaaaagaatattaaatcatcaaaggaaactaaaatgcattatttaatgaattttgattatgccaataaagagaaagccaagactgctatatgtggcagacaaaaagmccttgtttcccaatattttttttttttttttacagaagccattgcctccatcatcactgaggttgaactttctatctggcaagtgagaaagagatttttttttctggaatttcaaaaatgtttatataaactttgtccttagtactcagaagaaaatactaaatgctgacctcaacttgctccccttagctctcctctcatttttattcctctctgagacagtctgctttgaggttttcagattctgataagacctatatagtcactttcattttcttgaactaacttacttttattcacttgcaccattgctgttaagtcactattttcttcaaatttttacccaaaattgagatgaagtaagctttatatattgttgcaagtttattcccctctcatactggttttactttttttagaaataatttcttccattgttagtatcagcatatgtctagctctgtcctctacaatatccatcaaagaatcttgaaatgtttattctggaagtattcaggaacacttaaaaagatgggaag

SEQ ID NO: 529046 - DNA, 647 bp, Homo sapiens
aataaattctgaaacaaacaatagttctaccatgtaaaacttaatggattgaggagccaatagagaacgctgtagtatttaaggtcaaaataagataacaaaggtattttccttgaactgaaatcacccacgtttaatcctcagcactgctcagagtcaggaccattaaatcaaatgggactatgttaaaggcacagggaagagagaagaattttgcatcaaaatctgagagttgaatcatcttgtacttgattcagcaatggctgtgatgtttacaactcaaatgagctgagactcagccttcattatagatattgccagagtctgctaatctgggttaaaagttatytgtcagctatttatctcaatgaggttcacaaagtcttcactatccctttctcaggcttcctccccacaacaccttgaaacaagcccaagtcaaaggttaattggatgtcctgactactttgggtggggctggagggaatgggggcaaagccacttaagagagacaaagatactcatccagaactaggaggcacctggtctaggaaggaaccgctgggccttcaagtccatttgcttataatttatctggggagataagatgaaatgcagaataattagtgctatggaaagtgcctgat

SEQ ID NO: 529047 - DNA, 473 bp, Homo sapiens
ttgttcaagtccatagagtcaggaaatgaaaaaggaactgaactcaaggagttcataattatttatatacaagtaataaagacaaattcattgactatggaaatgtactgagtattttgtcttgtttacataatggtttttatttaggttgtaagaaaataacatataaccaggcacggtggctcgtgcatgtaatcccagcactttgggaagccaaggcaggcrgatcacttgagaccaggagttcgagaccaacctggccaacatggcaaaaccccatttctaccaaaaaaaatacaaaaattagccaggcatggtggtgcacgcctgtaatcctagctacttgagaggctgaggcaggagaatcgcttgaacccgggaggtggaggttgcagtgagccaagattgcaccactgcactccagcctgggtgacagagctggattttgtctcaaaaaaataaaaagtaaaaaa

SEQ ID NO: 529048 - DNA, 473 bp, Homo sapiens
ttgttcaagtccatagagtcaggaaatgaaaaaggaactgaactcaaggagttcataattatttatatacaagtaataaagacaaattcattgactatggaaatgtactgagtattttgtcttgtttacataatggtttttatttaggttgtaagaaaataacatataaccaggcacggtggctcgtgcatgtaatcccagcactttgggaagccaaggcaggcggatcacttgagaccaggagttcgagaccaacctggccaacatggcaaaaccccatttctaccaaaaaaaatacaaaaattagccaggcatggtggtgcacgcctgtaatcctagctacttgagaggctgaggcaggagaatcgcttgaacccrggaggtggaggttgcagtgagccaagattgcaccactgcactccagcctgggtgacagagctggattttgtctcaaaaaaataaaaagtaaaaaa

SEQ ID NO: 529049 - DNA, 579 bp, Homo sapiens
ctggttttatgtgtgataattatagcacctcttcttgcaaacatttatgtaaagggaggattttactaaggacgaccaacatctaaggttcccaaagtgaagaactttaaatattcccaaactggtcttctcrtatgctaaattagagaagttaggtttctgcatcaaggaaaataaatgagggttgtattttagctggcacctaaaaacatccaaaagtagaaatgataaacttatttctttccagaaaggtaacaacaaaatatttgaaactacctcagaattaaagaaaagtagcaaaatcagcttctaaaatcaggaagctgccagaaactgtctcttctttttcttctcctaaacctctgctttctaaacttccttgcctggatgatttcattttttttctctttctcctccctgtattccttcttaaaccacaaagggtccagaaatagctacaggagaagacaaaatagtagtcatttcttttaaaacaaaacccacaggaagagtgggttcaaacataagatatacaccttacaccaagtcagaattaagtgctctgatgtttggatttcc

SEQ ID NO: 529050 - DNA, 649 bp, Homo sapiens
ctggttttatgtgtgataattatagcacctcttcttgcaaacatttatgtaaagggaggattttactaaggacgaccaacatctaaggttcccaaagtgaagaactttaaatattcccaaactggtcttctcatatgctaaattagagaagttaggtttctgcatcaaggaaaataaatgagggttgtattttagctggcacctaaaaacatccaaaagtagaaatgataaacttatttctttccagaaaggtaacaacaaaatatttgaaactacctcagaattaaagaaaagtagcaaaatcagcttctaaaatcaggaagctgccagaaactgtctcttctttttcttctcctaaacctctgctttctaaacttccttgcctggatgatttcattttttttctctttctcctccctgtattccttcttaaaccacaaagggtccagaaatagctacaggagaagacaaaatagtagtcatttcttttaaaacaaaacccacaggaagagtgggttcaaacataagatatacaccttacaccaagtcagaattaagtgctctgatgtttggatttcctgatctgactcaagacaccttaggtttgccaaggaattccaartaatgcttaagacctatgattcagggt

SEQ ID NO: 529051 - DNA, 644 bp, Homo sapiens
tgttttgaaattccattagtgattattttaattccagaagctctatttgtttttttcttaatccagctatttatttttccatatttcaaattgtacttaatgattgttttgcacataaaattaatgtatacatgattaatgctttaaaggaactaagcacccaccagactcaagaaaaaatgatgccctatgatacatctgaaaaraatttaatctttctattaaatacagttatgcaaattaagataatatgtatttttgtctagcaaaataaaatataggtatcagttttggtgaagctaaagcataatggacattaatttgccgattggtgctgaaagtataaattgattcaacattttgcagggatgttagtcaatatgtgtgaaaattatacactaatatgtctttacacagtaattaaagtgctaggactttttgaaaagaaaacatgtctcaatgtgcccaaatttgtttctgtgaatatgtttataaaaaatgttgttcattgaaagcaatacagtatttaacaatagagagagtaagcctgtaaatcatggaacttattcaacaggggatgtctgaagagggtctaaaaataatctatatgtttaaataaataaattaaaagaaatttattttaa

SEQ ID NO: 529052 - DNA, 644 bp, Homo sapiens
tgttttgaaattccattagtgattattttaattccagaagctctatttgtttttttcttaatccagctatttatttttccatatttcaaattgtacttaatgattgttttgcacataaaattaatgtatacatgattaatgctttaaaggaactaagcacccaccagactcaagaaaaaatgatgccctatgatacatctgaaaaaaatttaatctttctattaaatacagttatgcaaattaagataatatgtatttttgtctagcaaaataaaatataggtatcagttttggtgaagctaaagcataatggacattaatttgccgattggtgctgaaagtataaattgattcaacattttgcagggatgttagtcaatatgtgtgaaaattatacactaatatstctttacacagtaattaaagtgctaggactttttgaaaagaaaacatgtctcaatgtgcccaaatttgtttctgtgaatatgtttataaaaaatgttgttcattgaaagcaatacagtatttaacaatagagagagtaagcctgtaaatcatggaacttattcaacaggggatgtctgaagagggtctaaaaataatctatatgtttaaataaataaattaaaagaaatttattttaa

SEQ ID NO: 529053 - DNA, 485 bp, Homo sapiens
ccattcaggcttcactgagacaaaagrtatgcattcaactcagaataacagtaaggaatcaacttatagggaaaccagatctagccatgttctttaaatatgagagataaccccgttggctcatgccactgtccttatttataacagcccctatttgcctttctacttctctgaactcattatccttcaaatctacaatcttttcaaaaacccaaacacagagtcacctcagtcaccactacctgcccttctcctaccccacccaatgcctgtggctttcaggtcatttattttgcaataaacttgttatctcaattttactggttctcttttagattcagacagctgagattatgatagattcattagtaagctgaatggggaagaaaaggatatttacattcccaggccaattttcaatgctttttggaagattctgttaaattcacaatttccagaactggcaaggaataggtaaatatata

SEQ ID NO: 529054 - DNA, 485 bp, Homo sapiens
ccattcaggcttcactgagacaaaagatatgcattcaactcagaataacagtaaggaatcaacttatagggaaaccagatctagccatgttctttaaatatgagagataaccccgttggctcatgccactgtccttatttataacagccmctatttgcctttctacttctctgaactcattatccttcaaatctacaatcttttcaaaaacccaaacacagagtcacctcagtcaccactacctgcccttctcctaccccacccaatgcctgtggctttcaggtcatttattttgcaataaacttgttatctcaattttactggttctcttttagattcagacagctgagattatgatagattcattagtaagctgaatggggaagaaaaggatatttacattcccaggccaattttcaatgctttttggaagattctgttaaattcacaatttccagaactggcaaggaataggtaaatatata

SEQ ID NO: 529055 - DNA, 485 bp, Homo sapiens
ccattcaggcttcactgagacaaaagatatgcattcaactcagaataacagtaaggaatcaacttatagggaaaccagatctagccatgttctttaaatatgagagataaccccgttggctcatgccactgtccttatttataacagcccctatttgcctttctacttctctgaactcattatccttcaaatctacaatcttttcaaaaacccaaacacagagtcacctcagtcaccactacctgcccttctcctaccccacccaatgcctgtgrctttcaggtcatttattttgcaataaacttgttatctcaattttactggttctcttttagattcagacagctgagattatgatagattcattagtaagctgaatggggaagaaaaggatatttacattcccaggccaattttcaatgctttttggaagattctgttaaattcacaatttccagaactggcaaggaataggtaaatatata

SEQ ID NO: 529056 - DNA, 601 bp, Homo sapiens
  misc_feature (1)...(601): n = A,T,C or G
tgctctgagaagccagcctttctcaggtgcagagattatcccagagatagacatayggttcaagacaggctagttaaccttcccctgaatttgatcagcaaagactgagagggtggtgggagaagctcagactgtgaatctatagctacagcagctggattttttttttccatcctatattccaagactttttctgagagaatctagtctggaacccagagagaagcagagagttgagagagtcatcagaacttgggagatccctgagaagctgtccacctctactttttgagactgtttttcctagactcccttgcagctctgtgtgactgtatgatgaactttgagctcatgagaagtaagtaggaatgtattaagaccataaaaatctctttaattttgtaaaaaagtgaatgtgaactcttccctctccttttgctgctagctgcaatggagatgtgagggctggagaccatgccaccatattgaaccatgagtagaaagtcacatactaaaatagtggagcaacgacattcaaaatgcctgacatcttngatctgtacaataacctggaccccttgttctggccttctatcatatc

SEQ ID NO: 529057 - DNA, 601 bp, Homo sapiens
  misc_feature (1)...(601): n = A,T,C or G
tgctctgagaagccagcctttctcaggtgcagagattatcccagagatagacatatggttcaagacaggctagttaaccttcccctgaatttgatcagcaaagactgagagggtggtgggagaagctcagactgtgaatctatagctacagcagctggattttttttttccatcctatattccaagactttttctgagagaatctagtctggaacccagagagaagcagagagttgagagagtcatcagaacttgggagatccctgagaagctgtccacctctactttttgagactgtttttcctagactcccttgcagctctgtgtgactgtatgatgaactttgagctcatgagaagtaagtaggaatgtattaagaccataaaaatctctttaatttygtaaaaaagtgaatgtgaactcttccctctccttttgctgctagctgcaatggagatgtgagggctggagaccatgccaccatattgaaccatgagtagaaagtcacatactaaaatagtggagcaacgacattcaaaatgcctgacatcttngatctgtacaataacctggaccccttgttctggccttctatcatatc

SEQ ID NO: 529058 - DNA, 601 bp, Homo sapiens
  misc_feature (1)...(601): n = A,T,C or G
tgctctgagaagccagcctttctcaggtgcagagattatcccagagatagacatatggttcaagacaggctagttaaccttcccctgaatttgatcagcaaagactgagagggtggtgggagaagctcagactgtgaatctatagctacagcagctggattttttttttccatcctatattccaagactttttctgagagaatctagtctggaacccagagagaagcagagagttgagagagtcatcagaacttgggagatccctgagaagctgtccacctctactttttgagactgtttttcctagactcccttgcagctctgtgtgactgtatgatgaactttgagctcatgagaagtaagtaggaatgtattaagaccataaaaatctctttaattttgtaaaaaagtgaatgtgaactcttccctctccttttgctgctagctgcaatggagatgtgagggctggagaccatgccaccatattgaaccatgagtagaaagtcasatactaaaatagtggagcaacgacattcaaaatgcctgacatcttngatctgtacaataacctggaccccttgttctggccttctatcatatc

SEQ ID NO: 529059 - DNA, 601 bp, Homo sapiens
  misc_feature (1)...(601): n = A,T,C or G
tgctctgagaagccagcctttctcaggtgcagagattatcccagagatagacatatggttcaagacaggctagttaaccttcccctgaatttgatcagcaaagactgagagggtggtgggagaagctcagactgtgaatctatagctacagcagctggattttttttttccatcctatattccaagactttttctgagagaatctagtctggaacccagagagaagcagagagttgagagagtcatcagaacttgggagatccctgagaagctgtccacctctactttttgagactgtttttcctagactcccttgcagctctgtgtgactgtatgatgaactttgagctcatgagaagtaagtaggaatgtattaagaccataaaaatctctttaattttgtaaaaaagtgaatgtgaactcttccctctccttttgctgctagctgcaatggagatgtgagggctggagaccatgccaccatattgaaccatgagtagaaagtcacatactaaaakagtggagcaacgacattcaaaatgcctgacatcttngatctgtacaataacctggaccccttgttctggccttctatcatatc

SEQ ID NO: 529060 - DNA, 311 bp, Homo sapiens
gctggcggctccacctcggctcctacacacagaggtgaaagacaccctgttaactgttcccagctcttccaccggtttttacaacccggttttcagttacattgttttgtttttgcctctctctgggagaagggtggagtccctggttgggaacgttggcctctgaggctccggggccacgcagtcctaatggaagagtcacaccaagtggttagtttgctggtgacccagttgctaggtgagggtgaggctcygctaagtggatttatgtcatatagtgactgtctcattaatgatttactgatgtcatg

SEQ ID NO: 529061 - DNA, 548 bp, Homo sapiens
tctgttgtcttacagtggcataagcataaaacagatttttttttgacatgtattatagcacctgctggctttatttccctcccttataccataatattgcttgttgatttgtatcaacggatttgcatcttctgcccgccacacacacacacacacacacacacacagacacatccaccccactccccccactagtgactaggtacacttgaattcgaagtaaatagcacacacaagagatatgtccagcamgtgattttcacaggcctgatttcacagcggtgctggaggcaaacctcgcagcctctagcctgtgcagaccgcatcatgacaaattgtataaatatgtgcaaattgtccagatgatgtcatgtgtgccccagcctgctctccaagtgggcagaacgcttcagggaaggtcagggcaggccttgctctgaattcaattgaggtaattgcattcaatttgcttaaatgtatcacagataaaagccctgtctgttgatctcaatcgtattaagaagtttattttccggccagggccggac

SEQ ID NO: 529062 - DNA, 504 bp, Homo sapiens
gttgtcttacagtggcataagcataaaacagatttttttttgacatgtattatagcacctgctggctttatttccctcccttataccataatattgcttgttgatttgtatcaacggatttgcatcttctgcccgccacacacacacacacacacacacacacagacacatccaccccactccccccactagtgactaggtacacttgaattcgaagtaaatagcacacacaagagatatgtccagcacgtgattytcacaggcctgatttcacagcggtgctggaggcaaacctcgcagcctctagcctgtgcagaccgcatcatgacaaattgtataaatatgtgcaaattgtccagatgatgtcatgtgtgccccagcctgctctccaagtgggcagaacgcttcagggaaggtcagggcaggccttgctctgaattcaattgaggtaattgcattcaatttgcttaaatgtatcacagataaaagccctgtctgttgatc

SEQ ID NO: 529063 - DNA, 548 bp, Homo sapiens
tctgttgtcttacagtggcataagcataaaacagatttttttttgacatgtattatagcacctgctggctttatttccctcccttataccataatattgcttgttgatttgtatcaacggatttgcatcttctgcccgccacacacacacacacacacacacacacagacacatccaccccactccccccactagtgactaggtacacttgaattcgaagtaaatagcacacacaagagatatgtccagcacgtgattttcacaggcctgatttcacagcggtgctggaggcaaacctcgcagcctctagcctgtgcagaccgcatcatgacaaattrtataaatatgtgcaaattgtccagatgatgtcatgtgtgccccagcctgctctccaagtgggcagaacgcttcagggaaggtcagggcaggccttgctctgaattcaattgaggtaattgcattcaatttgcttaaatgtatcacagataaaagccctgtctgttgatctcaatcgtattaagaagtttattttccggccagggccggac

SEQ ID NO: 529064 - DNA, 548 bp, Homo sapiens
tctgttgtcttacagtggcataagcataaaacagatttttttttgacatgtattatagcacctgctggctttatttccctcccttataccataatattgcttgttgatttgtatcaacggatttgcatcttctgcccgccacacacacacacacacacacacacacagacacatccaccccactccccccactagtgactaggtacacttgaattcgaagtaaatagcacacacaagagatatgtccagcacgtgattttcacaggcctgatttcacagcggtgctggaggcaaacctcgcagcctctagcctgtgcagaccgcatcatgacaaattgtataaatatgtgcaaattgtccagatgatgtcatgtgtgccccagcctgctctccaagtgggcagaacgcttcagggaaggtcagggcaggccttgctctgaattcaattgaggtaattgcattcaatttgcttaaatgtatcacagataaaagccctgtctgttgmtctcaatcgtattaagaagtttattttccggccagggccggac

SEQ ID NO: 529065 - DNA, 582 bp, Homo sapiens
tcaattgcttggttaatacatgctacattaaatattttttcttacacacatctagtgaaagatgtgaaaacataatcattcatagtgaagggtatacttatgctttgttacttcatcatgttccatagctttaaaaaaatcacaagaagtctgtgtatctctttttttctggccctacacttttcttctgccacccctatagaactgtcagcctgcacactgaaactgttctcagaaaacaaaggcatcatcaacttctcaaggttaaggtagtgatttaaggctaacagaccccacactcatgtgataataattagttaagcaattacaggtcacaagcagtcacctgaccagtgacattttaaatctctagtcattgactttgtcattggtttccttttgcacctgggaaaagttgaaaattccttagcatggaatcaaaactctcacatcagtgtggttcttgtcaggttattcagccttatctttctccacttaccatactctgyacctttgttctagcatccagccaaactagactacacagagctccacagtgatcgtcctcacctccagctcttc

SEQ ID NO: 529066 - DNA, 434 bp, Homo sapiens
agaacacttcactataccattctggcccttcaataaatgtctggcattttctttctttctttattttttgagatggagtctcactctgtcacccaggctagagtgtggtggtgtgatctcggctcactgcaacctctacctcccaggttcaagcarttctccttcctcaagcctcctgagtagctgggattacaggcatgcaccaccaggcccggctaatttttgtattttaggagcaataccatgttggtcaggctggtctcaaacacctgaccttgtgatccaccagccttggcatcccaaagtgctgggattacagacgtgagccaccacggccagccatgtctggcgttttctaacccttcaggtatggccttacatattttctcatcaggagacctttccttagtgctcccagtgaaccatcatctctc

SEQ ID NO: 529067 - DNA, 434 bp, Homo sapiens
agaacacttcactataccattctggcccttcaataaatgtctggcattttctttctttctttattttttgagatggagtctcactctgtcacccaggctagagtgtggtggtgtgatctcggctcactgcaacctctacctcccaggttcaagcaattctccttcctcaagcctcctgagtagctgggattacaggcatgcaccaccaggcccggctaatttttgtattttaggagcaataccatgttggtcaggctggtctcaaacacctgaccttgtgatccaccagscttggcatcccaaagtgctgggattacagacgtgagccaccacggccagccatgtctggcgttttctaacccttcaggtatggccttacatattttctcatcaggagacctttccttagtgctcccagtgaaccatcatctctc

SEQ ID NO: 529068 - DNA, 434 bp, Homo sapiens
agaacacttcactataccattctggcccttcaataaatgtctggcattttctttctttctttattttttgagatggagtctcactctgtcacccaggctagagtgtggtggtgtgatctcggctcactgcaacctctacctcccaggttcaagcaattctccttcctcaagcctcctgagtagctgggattacaggcatgcaccaccaggcccggctaatttttgtattttaggagcaataccatgttggtcaggctggtctcaaacacctgaccttgtgatccaccagccttggcatcccaaagtgctgggattacagaygtgagccaccacggccagccatgtctggcgttttctaacccttcaggtatggccttacatattttctcatcaggagacctttccttagtgctcccagtgaaccatcatctctc

SEQ ID NO: 529069 - DNA, 434 bp, Homo sapiens
agaacacttcactataccattctggcccttcaataaatgtctggcattttctttctttctttattttttgagatggagtctcactctgtcacccaggctagagtgtggtggtgtgatctcggctcactgcaacctctacctcccaggttcaagcaattctccttcctcaagcctcctgagtagctgggattacaggcatgcaccaccaggcccggctaatttttgtattttaggagcaataccatgttggtcaggctggtctcaaacacctgaccttgtgatccaccagccttggcatcccaaagtgctgggattacagacgtgakccaccacggccagccatgtctggcgttttctaacccttcaggtatggccttacatattttctcatcaggagacctttccttagtgctcccagtgaaccatcatctctc

SEQ ID NO: 529070 - DNA, 597 bp, Homo sapiens
tggataatccagggtcatttcatctcatgattcttaaactaatcacatctgcaaaatctttttagccatgacaggtttttacagatttctagaattaggatgtggatttttttttgagggggggaagggggtgcttactctgtcaaccacatggggattaggatgtagacatccttggggccattatcctgtctgctacctagtattaggacatggacatctttgggaccattattctctgtatcacatgaggattaggacatgggtatctttgggaccattattctgtctcccacatggggattaggatgtggacatctttggggccattattctgtctgccaygtggggataaggatgtgtacatctttgaggccattattctgtctaccacatggggattagtatgtggacatctttggggtcattattctgtctaccacatggggattaggacgtggacatctttggggccattattctgtctgccacgtggggattaggatgtgtacatctttggggccattattctgtctatcacatggggattaggacgtggacatctttggggccattattctgtctgccacatgggga

SEQ ID NO: 529071 - DNA, 523 bp, Homo sapiens
caggctttggcccaaggaaaggcttggtactgaagggcctgagagcacgtgacctgacagccgtcgacctgggcaaggaacagygacactggagtgggaggttgggggaaactgggggagtcagaggagttgtcacacacaaaaacaatgggagctggaaaaggagggaaggaaaatcagacatatcatgtagtagttgagaatagcattcatgagcccatgtgaggcttcttccttcaccccaagacagtccctgagatatgggggagattgaacgggagggggcagtctcccaatggaggagagacaaaagccagaagagcgctgttcatgaaagtgatgtgaccggtttttttttttttggtgtgacctgagaaacatcggatgcctttgtaattattaactgcaacttttaatagtatccagaaagtcccaaatgctttcatgtagctaatttcaattgtaaaacaatggtaagcaatggagtgaagctgtgagacaattcaacatagccttgccagta

SEQ ID NO: 529072 - DNA, 626 bp, Homo sapiens
ctaaatcaaagtgtgtttgatggatggggcatgagcaaggaatagatcatatgaaacctttttgtgccccacctcttattttcttggcccttcttttttactccagctatgactgtgcacctacctgctcatactgctaaactggaagcatcttccctcatatatatgtgtatatctcagggcttccttcctactaccacatgaaccaacttccctcttaccaccaaatctaaaagtgcaagagagttaacaatcaaaggtcacatgttaaccactaggaacagaaggctgtgaatgggtaaatgcccactctttctgtctcaaggcatggacaactttgaggagcattctgcatggttccttagagatctgtagtaggaccgactccccattgcccataacagtggtgagctcaacaagacaccttggactgactttctcccattccttgttctacagtccctagttccccatccctattatttggaatcacttaacaaaataaactatctgctccaaggtattatctcaggctctggttagaggggggaagctaggctaagacagatctytcttgcatttttattctgagctttttacatgcactcctcttttgttggctgtcc

SEQ ID NO: 529073 - DNA, 407 bp, Homo sapiens
accatttcataaagagatccagagtgctattcatggacttaacttaagaatccagggatacagaggggattatgccagcaaaatactgccagtttggactaaagagaacagagaaggaaggatgaatgaaggaacactgtcagactatttggattctacaggaccagatgatagagctatgcaagaaatcgaagactgaccctgaaggcaagtcagagatcatcagagctaccaagcccaccacagacccagaggacaaagctatttcctrctctgttttaataggtagagtcatcaatctggttttagcaggctaggaaaatgctgctagtgcctcagagattggtatgccctcatggagggctgtgtaggcaggcctttcttagggaggaggtgggaccttgcag

SEQ ID NO: 529074 - DNA, 621 bp, Homo sapiens
ttcttagttctgaggaattgcagaaatcctttcctcttgctttaagtcattatgacgtattcagactgctcaagcaatgagattctgacatgaaaatacagccttaactcattcaatttaggtcacgtccttaagctgatgcttttgacacaagtatttgttacagtggtggacacgttttctttataaaccaactctgacatggattttcatgtctgaatgagccaaaactcgaatttcagattgctgagtatgcacttcagcttataaatcttgattacaataatatatttgtccttattctgcatcataaataattaaaattaaacaaatatttgaattagttgggttgtgcatatgattttgttattccaggttatttgttcttgaatcttctctaaatagtacattcattcaagtttacatgttgcttatagtactttgtgcagcatatatattcctgagaaatcttgtataaatccaactattgcagatggaattgttttctaaaagcataagaagagcttggatttaaaggaatcctgaagaatyatttttcttagtaagaatcttttttataatatgagtcatcactttttatttcatctgtggaaaagtcag

SEQ ID NO: 529075 - DNA, 580 bp, Homo sapiens
aatgttctaacccaggtttcaggttgagtatgaacctcagctcatacttgattctctgtgtttaacagaactatcttcttagtatcatcacctcttgccagagctttagaaacaaatgaatgacttgttctcctattattaagtccctttgattgctttgaataactctccagagctttcttctttcttctgcttctttcttcactaacattttagaagaaaatgccatggaaacaggttactttcatcatagacagtaatttaaaactttagaaaaatggttatttctctgtataaaattcacaatgattaatacattcttacactagttctctctctgttaaaacaacttactagtctgaatgggcctttggtctaaggattataagaatatcttaaactcctattatatacctcaggatgataatagaagcctaagtactatatcaacctgcttattattgtaataaagtaayacaaaaacttacatctaaaatctaaaatataaatccatgtccatcagcaagtaacaccgatcattctggggttgcaaaacgccaaggcagaatggtggtactca

SEQ ID NO: 529076 - DNA, 641 bp, Homo sapiens
caaatctttaattttggtggttgttatatgatttcatatatttatccaaactcaaataattgtatactaatataggagaattttactgtatgtaaatcatrcctcaatacttaggcaaaagggactccaaagtgtatggagatttaaatgcaggaagcttctacctcactatgggctgaaaaacaaagggaaacttagaattattaaaatttagaagatagaagagagctccagaaagctagaactcaaatctttgctgtagagaagagctagctggtgctctgaaatcatgtgatgatattttctctaagactataggaaaaaccacacactggaatcaactgttactcttgaatgaagtgctgctgcctaggtgaagaggcactgctgggatgatagaggtgacagcgtgctggcagtggtgacagcgtgctggcagtggtgacagcatgctggcagtcctcacagccctcgctcgctctcagcgcctcctctgcctgggctcccactttggcggcacttgaggagcccttcagcccactgctgcactgtgggagcccctttctgggctggccaaggccagagctgtctccctcagcttgcagggaggtgtggagggagaggggcgagtggaaccgggg

SEQ ID NO: 529077 - DNA, 641 bp, Homo sapiens
caaatctttaattttggtggttgttatatgatttcatatatttatccaaactcaaataattgtatactaatataggagaattttactgtatgtaaatcatacctcaatacttaggcaaaagggactccaaagtgtatggagatttaaatgcaggaagcttctacctcactatgggctgaaaaacaaagggaaacttagaattattaaaatttagaagatagaagagagctccagaaagctagaactcaaatctttgctgtagagaagagctagctggtgctctgaaatcatgtgatgatattttctctaagactataggaaaaaccacacactggaatcaactgttactcttgaatgaagtgctgctgcctaggtgaagaggcactgctgggatgatagaggkgacagcgtgctggcagtggtgacagcgtgctggcagtggtgacagcatgctggcagtcctcacagccctcgctcgctctcagcgcctcctctgcctgggctcccactttggcggcacttgaggagcccttcagcccactgctgcactgtgggagcccctttctgggctggccaaggccagagctgtctccctcagcttgcagggaggtgtggagggagaggggcgagtggaaccgggg

SEQ ID NO: 529078 - DNA, 580 bp, Homo sapiens
aatatttttggattacactgagtcgactgaaatgggagagcatggctagcttgctccgagcagatggatggctcagacgatgggatcaaaagtcaagagaagtatatcaggtgcaaaataaagcaaaatccttgtttgcaaacatctgattcattaaagtaaaatttatacttgttacatgttggaggagtattcgttgcttcttttggagcatgtgagaattaactattcagaagatatagatttagacagagttccagttcctcaattctaggggaggaaaacccaagataaaaattaacattaaatagggaaggatgtgcagcagtagaaaaatgaaaaaaatatattgytttctgttttagacttttgcattaaatcttctcttcagttcactgaactctctcaaatgaatcccaaaggtggattcacccgcccttccagataccccctcctctgccacccattcacatcaagaattgtgaataattactgtgagaagaaaaacagaaatgagcaaatatcgctcaggatttgaaagatatttgcagggccaatgcttcttccaggagagatgtga

SEQ ID NO: 529079 - DNA, 642 bp, Homo sapiens
gaggcccttcacagtgagcaaggacaaaacatgtgaggcaaaacacatgagctcttgaacacrgcctgtttctttccccgcagctctgtaaaatcaaagttggaggcaccacaggagctcttttaaaatgtcctggccagcttgctgcagcccagatgttgttccagtcattttgctgcaagctccagtaatcgcatgacttgagctgctcctctgcagacccgctagcctccactggcactgctcctgtagatgttacagatgccacaactcatttctttgaagtcagtgtgtttttttaaaaaacaccactttcaacagatttggcccaaattctcattatataagctgatcttctggaacatctgtcactgttgtggcttcggcctccatcctctactgaagtatgataaattgacattaataaataatgaggcagtggtgagtttaacatacatattatgaggcattgaggctaaaatgacagactttcatctttcagaaagaccaaaagcatagattaagcaaacaaaggaaacacagctaggttccagatgacaacctccaactattgctggcttaaaaaaattataatgtacctcacataattgactgtctctaaataatacaaattgacacaag

SEQ ID NO: 529080 - DNA, 571 bp, Homo sapiens
tcctttctacccatcagcctctggggctgaacctgcctctgctccctcactccttcatttctgcccatcaccccatcaacctctggaactgaacctgcctctccctcctcactccttcctttctacccatcaacctctggggctgaaactgcacctcttctctcactctctcatacttattaaccacagcgacctgttgatttttttttttttttcagataatctcagaaatcactctcaaacgtctataggagcctggcagataaaataaaacaggctggaattggtggaagggtatgtggtcaggtggggagcgtatgttgtctaaaaagakcatatgcttcttactgccaggcaaggtattgtcatgaggaaatgtggctcagtactgcaaatctactatatttctaaagaggaggtagaaatttaggttttatgtagtcttcggattttatgatgttgtcaatgaattcaagtaaaaacaaactcatattgtatacttcaaacaagtcatttaagacaaagttgggtttgtggtgttgtcagtttatggcatcttttctaatactat

SEQ ID NO: 529081 - DNA, 571 bp, Homo sapiens
tcctttctacccatcagcctctggggctgaacctgcctctgctccctcactccttcatttctgcccatcaccccatcaacctctggaactgaacctgcctctccctcctcactccttcctttctacccatcaacctctggggctgaaactgcacctcttctctcactctctcatacttattaaccacagcgacctgttgatttttttttttttttcagataatctcagaaatcactctcaaacgtctataggagcctggcagataaaataaaacaggctggaattggtggaagggtatgtggtcaggtggggagcgtatgttgtctaaaaagatcatatgcttcttactgccaggcaaggtattgtcatgaggaaatgtggctcagtactgcaaatctactatatttctaaagaggaggtagaaatttaggttttatgtagtcttcrgattttatgatgttgtcaatgaattcaagtaaaaacaaactcatattgtatacttcaaacaagtcatttaagacaaagttgggtttgtggtgttgtcagtttatggcatcttttctaatactat

SEQ ID NO: 529082 - DNA, 495 bp, Homo sapiens
ctaggttagaggcccactgtcacctatttataattaattataggcagattcaggcttcctgatgttccaggtttactgtagtacttagaagagtttcataatactaacctggtatgcttcccctccaccttgctgcactctcacacccctttgctgctagagagagcagctttgagactgtggggcagtgtgagcagaggaatttgcagcctgattggaccttaaagaggactaggttatagcctgactctgtcattgccttgctgcctgaggattaaagagggaagtagttcatgatttctttatctggaaaattgggttagtagctgttcctgctacccatcctattccccgttagtaggttgaataaccctaactcactatgacactcgccaactactgcrcagccctggttatgcatcagaattgctggggaagctttcaaaaaatacaggtgcctaagccccaccccagatctattggggcagaatcagg

SEQ ID NO: 529083 - DNA, 546 bp, Homo sapiens
tgctctgactgctcggaaagtcaggtttttaaattatcaaaagtggccgggcacggtggctcacacttgtaatcccagcactttgggaggtggaggcaggtggatctcaaggtcaggagtttgagaccagcctgaccaacatggggcaacccccgtctctactaaaaatacaaaaattagctgggtgtggtggcatgcacctgtaatcccagctactcaggaggctgaggcaggagaatcgcttgaacctgggaggcagaagttgcagtgagctgagattgcagcactgcactctaccctcggtgacamagcaaaactctgtctcaaaaaaaaaaaaaaaaagtatcaaaagctagactgatctggtgaacatcaccttaatcaaagaatcaaagcttaatggccaggcgtggtggctcacacctgtaatcccagcactttgggaggctgaggtgggcaggtcacctgagatcaggagtttgagaccagcctggccaacatggcgaaaccccatctctactaaaaatacaaaaaaattagccaggc

SEQ ID NO: 529084 - DNA, 435 bp, Homo sapiens
tggtgaggaacccgggtccacagcccaaagcaccaatttgccacctgtgactcatctactgagtaggtcctccagtccctagttgagcctcctagctgatcctgcatggagcagacatgaactatccccattgagccctgtctgaagtccagattcatgagcaaatagatgacggctgttgttttaacactctaatttctgtctatccaaaaaatgcagagactaactcatcttcctaatatctgccttacccttcttccaaaattatggtattttagctgtgaatatggccatcaggactaaacattgcacctctcaactttctgtacagcaargtatggccattagactaaatttctgccagtgaaatataagtagaagtgttacagatcagtttctgggacttgccttcagaggaactggcatatgctcttg

SEQ ID NO: 529085 - DNA, 442 bp, Homo sapiens
ctgctaacacttacagcatgtggagaaaacatggggtattataaaaatttggttgtagggaattaacaaaaaaacmcacttagttaagcaagtaaactctttatctaattcattctttaatctatttgattttaggtggtttgatttatggggaccctgagttaggagcatataccaaattcttggtgttatcccaacagtcataagagtctccctgttgcactgtacttactcaaatgttttaagagtttgcatgcaggcatctctaaaatatcaaatggtatctcttcaactggaatgacaagagattaaaaaaaaagggcaaccgtaaggacaccataacctatgagtgacatgctaaaccggaaacccaaaacaatgggggtgacatgctaaaccagaaacccaaaacaatgggagtgatgtactaaaacgggaaccc

SEQ ID NO: 529086 - DNA, 442 bp, Homo sapiens
ctgctaacacttacagcatgtggagaaaacatggggtattataaaaatttggttgtagggaattaacaaaaaaacccacttagttaagcaagtaaactctttatctaattcattctttaatctatttkattttaggtggtttgatttatggggaccctgagttaggagcatataccaaattcttggtgttatcccaacagtcataagagtctccctgttgcactgtacttactcaaatgttttaagagtttgcatgcaggcatctctaaaatatcaaatggtatctcttcaactggaatgacaagagattaaaaaaaaagggcaaccgtaaggacaccataacctatgagtgacatgctaaaccggaaacccaaaacaatgggggtgacatgctaaaccagaaacccaaaacaatgggagtgatgtactaaaacgggaaccc

SEQ ID NO: 529087 - DNA, 582 bp, Homo sapiens
tgctaacacttacagcatgtggagaaaacatggggtattataaaaatttggttgtagggaattaacaaaaaaacccacttagttaagcaagtaaactctttatctaattcattctttaatctatttgattttaggtggtttgatttatggggaccctgagttaggagcatataccaaattcttggtgttatcccaacagtcataagagtctccctgktgcactgtacttactcaaatgttttaagagtttgcatgcaggcatctctaaaatatcaaatggtatctcttcaactggaatgacaagagattaaaaaaaaagggcaaccgtaaggacaccataacctatgagtgacatgctaaaccggaaacccaaaacaatgggggtgacatgctaaaccagaaacccaaaacaatgggagtgatgtactaaaacgggaacccaaaacaatgggagtgacgtgcactaaaaccagaacccaaaacaatgggagtgacatgctaaacaagaaacccaaaacaatgggagtgacttgctaaaactggaacccaaaacaatgggagtgacgtgccaaaagcggaaat

SEQ ID NO: 529088 - DNA, 442 bp, Homo sapiens
ctgctaacacttacagcatgtggagaaaacatggggtattataaaaatttggttgtagggaattaacaaaaaaacccacttagttaagcaagtaaactctttatctaattcattctttaatctatttgattttaggtggtttgatttatggggaccctgagttaggagcatataccaaattcttggtgttatcccaacagtcataagagtctccctgttgcactgtacttactcaaatgttttaagagtttgcatgcagkcatctctaaaatatcaaatggtatctcttcaactggaatgacaagagattaaaaaaaaagggcaaccgtaaggacaccataacctatgagtgacatgctaaaccggaaacccaaaacaatgggggtgacatgctaaaccagaaacccaaaacaatgggagtgatgtactaaaacgggaaccc

SEQ ID NO: 529089 - DNA, 582 bp, Homo sapiens
tgctaacacttacagcatgtggagaaaacatggggtattataaaaatttggttgtagggaattaacaaaaaaacccacttagttaagcaagtaaactctttatctaattcattctttaatctatttgattttaggtggtttgatttatggggaccctgagttaggagcatataccaaattcttggtgttatcccaacagtcataagagtctccctgttgcactgtacttactcaaatgttttaagagtttgcatgcaggcatctctaaaatatcaaatggtatctcttcaactggaatgacaagagattaaaaaaaaagggcaaccgtaaggacaccataacctatgagtgacatgctaaaccggaaacccaaaacaatgggggtgacatgctaaaccagaaacccaaaacaatgggagtgatgtactaaaacgggaacccaaaacaatgggagtgacgtgcactaaaaycagaacccaaaacaatgggagtgacatgctaaacaagaaacccaaaacaatgggagtgacttgctaaaactggaacccaaaacaatgggagtgacgtgccaaaagcggaaat

SEQ ID NO: 529090 - DNA, 622 bp, Homo sapiens
gctaacacttacagcatgtggagaaaacatggggtattataaaaatttggttgtagggaattaacaaaaaaacccacttagttaagcaagtaaactctttatctaattcattctttaatctatttgattttaggtggtttgatttatggggaccctgagttaggagcatataccaaattcttggtgttatcccaacagtcataagagtctccctgttgcactgtacttactcaaatgttttaagagtttgcatgcaggcatctctaaaatatcaaatggtatctcttcaactggaatgacaagagattaaaaaaaaagggcaaccgtaaggacaccataacctatgagtgacatgctaaaccggaaacccaaaacaatgggggtgacatgctaaaccagaaacccaaaacaatgggagtgatgtactaaaacgggaacccaaaacaatgggagtgacgtgcactaaaaccagaacccaaaacaatgggagtgacrtgctaaacaagaaacccaaaacaatgggagtgacttgctaaaactggaacccaaaacaatgggagtgacgtgccaaaagcggaaatgaaaacaatgggagtgatgtgcttaaaccagaacccaaaac

SEQ ID NO: 529091 - DNA, 666 bp, Homo sapiens
attatatttttataaagttgtttccatttgctactaactttttcttttgtatgtcagtttcctgatttctacatttcctgcaggtcacctggaacatcaaaagaaaaagaaaagctgtaatattgatgggtggcctactgtgcaacaagattttcatatagtgtttttggtgttatatggatgtttcttctcgcagtggatgtgtagagtcagagcacagatgggcatactctcaaacyttaataactgtgccacattgccctttgagtttattctaaaccttagcaagtcagagatcacactgtatggaactaacttctatctaaattgcatgattgattgataggagatttccaaataacatttggactgccttacatccagtaaaagaactcagcaaaatacaaataaatatgataatatcttagacagcaaatcttctcatcccacaagaggcaggaaactgctagaggaagctgccttggagaggattctttcctcccctcccgaaaggagctgaactcaaaatctctccatttcacaatagacattggagaacattttcaacagtggatttgcaccggtgttttgtgtcctagaaaaacgttcccttcaggtaggttctaataagccccttgaacaatttcccaaattgatcatcctgcc

SEQ ID NO: 529092 - DNA, 510 bp, Homo sapiens
tgaaaatgtaaacaataaagttagttacactttaaaatattatttagaaaggattttatatgtacacaaagtttgcaagaatagtataggccaggcactgtggctcacacctgtaatcctagcacatttgggaggccgaagtgggcaaattacttgagatcaggagttcaagaccagcctgggcaacatagtgagaccctgttctattaaaaaagaatagtataaagaactctttataacccgtacccagctacatcaattaacattctcagtatgtacatttatatatagttttatttttctcactgtacttytgagagtacattgtagtcattatgcccattaaccctgagtactttagtgtgcaaagatcaaggacattaactcacagtaagtttaatgttggtacaatgctataaataatctaatttatgaacctatcaatttttttcatattttcaacaattctttaatgatattttcttttttggtctaggatctgaaagagaa

SEQ ID NO: 529093 - DNA, 572 bp, Homo sapiens
agtctgtgacctggtcttttgtggcatcattgctttcaactacacttgtacttaagtttatggcatagattaagaattggctttttgcacttaattgaaaaacagaggttacatagtggtgtctcatcagttcagcagcaatgcttcaatcagaggtgcacgtgtgtgtgaaagtgtgagtgtgtgtttgtgtgaatcactttgcagtgacaagctagatgcaggccrtggaatttctcttcccatttactctgccttaatagaagcattggtttagagagaatattgatatgctgattctaaattggagaccctcccaaaagaagaaaaagtctcgagtttcttttcctgtctttttatatgaagagtgtttccttcaaaggagaacaggaaagaaggtgctgaatttgggtgtgtgggctctttgctcgcttaaggcccagggagtcaccacagccatggctgacagtgccagctttcctgcatgcggccgctggcccatgggtttcactttcctgttttacattgtagaaatggggacagagagaccgaatgacaggcacgtggccacg

SEQ ID NO: 529094 - DNA, 530 bp, Homo sapiens
cacttgtacttaagtttatggcatagattaagaattggctttttgcacttaattgaaaaacagaggttacatagtggtgtctcatcagttcagcagcaatgcttcaatcagaggtgcacgtgtgtgtgaaagtgtgagtgtgtgtttgtgtgaatcactttgcagtgacaagctagatgcaggccgtggaatttctcttcccatttactctgccttaatagaagcattggtttagagagaatattgatatgctgattctaaattggagaccctcccaaaagaagaaaaagtctcgagtttcttttcctgtctttttatatgaagagtgtttccttcaaaggagaacaggaaagaaggtgctgaatttgggtgtgtgggctctttgctcgcttaaggcccagggagtcaccacagccatggctgacagtgccagctytcctgcatgcggccgctggcccatgggtttcactttcctgttttacattgtagaaatggggacagagagaccgaatgacaggcacgtggccacg

SEQ ID NO: 529095 - DNA, 483 bp, Homo sapiens
gcagctgcttaattaatcaatgtcacccggagggaggatttcaggggtgaccctgcccttcacagtcttctgctggatgaagtcatagagttattaccaaacttgcagatggaggtaggaggaacagagggtttgytgatggatggactcaggatttacaactatctttataggttcaggcctataaagaggcctcatcaactggagaaggtaagatagggagatgtcaggttctgcatcagagccccaaatcaacagtaaaaacggccactggggggatttgtagctttggtaggtgtcaaacactctgagttaaaagtgtgaagcaactgtcaaaagtcttaaagctctctgagaagccactgtagatgtaggtgaatagatgcatcttatctgagagctgtaagctgcctctgtgtaaacccactcccaggattccaggtaggacaccttcagagagctgtgagcacactgggaggatga

SEQ ID NO: 529096 - DNA, 349 bp, Homo sapiens
ttttcttcagacaatctgctgtaaggcatggggttgaggaatgaactgtgtctagaaaaatgggtcgctggggtttgctctgtgttctcaataacttccctgttctggttatgagttcttagattgtgtagaaacataaacttcatagcagtaagcactaatcagtacctagagaaagagtagccttctctgcttagaggttgtctttctcagtttctaargaagcctaagtttgaataccatctgttcatttgtttatttattgagttattcatggggatacaaagttagataagaaggggtccagactcctaagatgctcacagttgagtaaagaaggcagatgcag

SEQ ID NO: 529097 - DNA, 618 bp, Homo sapiens
actcaaaccggagagtggaggagggagacgacagatatgggtttggycccaagatcaaccacagtttgggggctgtaatttgtcttactttcttcttctgagttttctttagggaagagggatacatgggaccacgggggctgcaacttgcaactgtggagagaagcagttacgtggcatgttatggattgaactgtgcccccaaaattcacatgttgaaatcctaacccaagcacctcagaatgtgaccgtattcggaggcacagcctgtaaagaaggggcctaaggtgaaaagatgtcattgggggggccctactcctataggactggtatccttataggaagaggaggtgaggacacagacacacacagaaagaagaccatgtgaaaacacagggagaaggtggcatctgtatgccaagaacagaggcctcagaggaaaccaaccctgtgacacctggatcttggacttccagcccctggaactgtgagaaaatgaagttctggtgttgaaggcacccaggctgtggaactttgttatggcagccctagcagactaatatatggcacaaggagaggaccgtggtgccaagaaaaatgtgcctgtcacttctccag

SEQ ID NO: 529098 - DNA, 569 bp, Homo sapiens
tgggcgtggaggctcgtgcctgtaagtccagcactttgggagcccgaggaggggggattgcctgaggtcaggagttcaagacctgcctgaccagtgaaaccccctctctactaaaaatacaaaaatcagccgagtgtggtggcaagagtctttaatcccagctactagggaggctgaggcaggagaatcgcttgaacctgggaggccaggttgcagtgagccgagatggcgccactgcactccagcctgggcaacagagagagaytctgtctcaaaaacaaaaacaaaaacaaaaacaaaaacaaaaaaaaaaaacaaaagaaaaaagaaaaaggaaaagaaaaaagaaagaaagctgagagttgcattctattagcaggttgcaaaatcaatttagaagggtgtggccagcatctttaacaaatcaaatggaataaaatagaaaataacacagtgtttcacatagagtaaaggtaagtgtcattgtgtgagagtttatttttgatgctctatgtttgaatgtctctgcgtgtgacacactggatcattatgtctaaaggtcaaaaaag

SEQ ID NO: 529099 - DNA, 569 bp, Homo sapiens
tgggcgtggaggctcgtgcctgtaagtccagcactttgggagcccgaggaggggggattgcctgaggtcaggagttcaagacctgcctgaccagtgaaaccccctctctactaaaaatacaaaaatcagccgagtgtggtggcaagagtctttaatcccagctactagggaggctgaggcaggagaatcgcttgaacctgggaggccaggttgcagtgagccgagatggcgccactgcactccagcctgggcaacagagagagattctgtctcaaaaacaaaaacaaaaacaaaaacaaaaacaaaaaaaaaaaacaaaagaaaaaagaaaaaggaaaagaaaaaagaaagaaagctgagagttgcattctattagcaggttgcaaaatcartttagaagggtgtggccagcatctttaacaaatcaaatggaataaaatagaaaataacacagtgtttcacatagagtaaaggtaagtgtcattgtgtgagagtttatttttgatgctctatgtttgaatgtctctgcgtgtgacacactggatcattatgtctaaaggtcaaaaaag

SEQ ID NO: 529100 - DNA, 539 bp, Homo sapiens
ttagtcttctggcctacgtctttctcccatgctggatgcttcctgccctcgaagatcagaccccaagttattcagctttgggacttggactggcttcyttgctcctcagctagcagacggcctattgtgggacctcaccttgtgatcatgtgagtcaatactccttaataaactcccatttatatatacatctatcctattagttctgtccctctagagaacgctgactaatacctttgggattatttattatgcagccatgttaactgcaacaggaactaatacttgtgtttatgttctttactgtaaatttagttaatctcttccatttatttctactccttagccctttcaccagtcctcttcactattacataagctgtgttggaagtagttaaatttgttacttagtccataatttggagaataataaagtggcctagggcaacactagaagtggaatgggcatcacctgaatgtcttggattaatagccatttttgctgaaaaggtgtgccatgctaagtggaagtattattg

SEQ ID NO: 529101 - DNA, 539 bp, Homo sapiens
ttagtcttctggcctacgtctttctcccatgctggatgcttcctgccctcgaagatcagaccccaagttattcagctttgggacttggactggcttctttgctcctcagctagcagacggcctattgtgggacctcaccttgtgatcatgtgagtcaatactccttaataaactcccatttatatatacatctatcctattagttctgtccctctagagaacgctgactaatacctttgggattatttattatgcagccatgttaactgcaacaggaactaatacttgtgtttatgttctttactgtaaatttagttaatctcttccatttatttctactccytagccctttcaccagtcctcttcactattacataagctgtgttggaagtagttaaatttgttacttagtccataatttggagaataataaagtggcctagggcaacactagaagtggaatgggcatcacctgaatgtcttggattaatagccatttttgctgaaaaggtgtgccatgctaagtggaagtattattg

SEQ ID NO: 529102 - DNA, 630 bp, Homo sapiens
ttatagccattatttcttagaatatttttctgctccttcatttcttttccttttttcctgtactcccattagaaatatgtaggaatgcttaatggtgtcacacaggttctatactcttgttcaattttattcattgttttcctttctgttcttcagcctggataatatctcagttcatcttcacaacccagtgaggtaagtagcattattatcctcactttatagatgaaaaatgtgaggctcagattaagtgacttgccaaggtcatagaatgttaagtgtggctgtacaggtctgactccagtttgtactacttcctctstgtatattgtttttttattttccagcaaccataaacaaacaactgggggatttgtgactggcatcctcttttctagagaacgctttatttccatttccgtttggcattctttgcttgtatgttcctcttctaaaattcatatgcctaatatttaacatatattagacacttaatcaatgtttattgctatgaattcaatgatactcaatggttgctagcttaaatggctgtgagaacaccaacattttgatctaaaatatttcactagaaaaatatatagctttttgaagactgataacttgtggagg

SEQ ID NO: 529103 - DNA, 584 bp, Homo sapiens
aaggcttatcactacagtaacatttcaataaaatgatgtgtaagatatatgagaataatcttttttggataaagtactttgaaaagccagtagggtgagggaaaaattatcatgaggcatggcktctaagattgttgcttccttgctgatcactaggctttcttttgctaaatggggtgccaagataaaggtaaaagttgagtatctctggataattgggataatcttgagaaacagtttgcatgaagaagaagaaggattgctaatggatgagaagaatattaaaaaacaagggtgtttgacaactatcaaatttcataaagatgcataatacaaactctttccctggattacattcatttaggggatgccctggtggacctgtagcaagaacaagggctgcccatggggaacctgtcacatattggtggctattgttattatgctgaacacattttagccagtattacaacccagttactatcaaaagaaatgaacatatagcttgaaagtggtccttccccttggaggctctagcctttaagttgtcctgggaagataccacagtatctgcccttccaact

SEQ ID NO: 529104 - DNA, 314 bp, Homo sapiens
taaaacatgccatgtcagtggctgtcatgaaagtggtttaaatctctgttcgaaatgcttgtttgtattacagtccaagtgttctgtgttgtgtgccaaggcttttaccagtggcaacaagctattggagaaataagtaccaagtacaaatcaagtaggaccagccacaggtccygtttaaaatgaatggacagaacagacaaatccaaacagaagagtggaaagggagtttctcctaattaggaagcatggctttctagatcctctcatcagcaagtctttgtcttactttttatctcctgtgtagtaaagaa

SEQ ID NO: 529105 - DNA, 611 bp, Homo sapiens
aaatccttatctctctctttcaatgttatacactgctgcaagattaactttcctgaagcacagctctgttcatgacattcctctgctcagaaaacttcaggctaaaaagccaaacactggagcctcccggtcacaccctgatcccagacgacctttttaacctcattccctacttggtatttccagtaaaaagacctgtgtttgcatcctggatctgctacttagtacttgtttagtttccacatagaagttagaacattccacatagtttgccttctgtgcctggcttatttcatttaacataatgtccttcaagtttatccatgttgctgcaaatgacagtatttccttctctttatggctgaatagtattccattgtgtctatataccacattttctttatccattcttctgttgatggatgatatagtcaatctttaaggaccaggttgggggcctagggcctatataatgtggcaagacaagtgggctaagttttggcaggagttacaagtctgtcctacaatggcagctttatcagaaatgcagttctttactttgtaagaggyagcagtatttttctttaactgactaaaggattcagcattac

SEQ ID NO: 529106 - DNA, 556 bp, Homo sapiens
cagccgtcccatgcccgctgccgcccccttgaggcactgggtccccatcccctcctctcctcatggtcccgtcccaccccaaacccccagcttgcctgggcctggtccggtccctgggcgtctgcagccrgcgctcagcggcacacaccccattcccgggagaaatctctctctcctgggtcacggagccctagagcacatggagaaatccagtggcttccttgcctgaaaagcactcggtgggaagttgctgctcttgctgagtgagcggttcctggccctggcactgcgctgtgggtgccccatgccaagaggccccaggttaggaagccctgtccagagggtgctcctgtgcctagaatttaccagcagtgcccgccatccccaaagtgggatctgcatccgccatccgctctgcagtgccaggaggaagaggcttccacgtggtcgtgtccactgggcagggccccgtcgagggtgcgggagccaggtgccttgttccgctccaggccgagcatgtcacgttccttgttctggaatcccgcagtagctccgg

SEQ ID NO: 529107 - DNA, 621 bp, Homo sapiens
aagctggctgggccatggggaggtgcaggcaggcaggggaaccacgtggccaggggtcggggctctattttcttgattttgtgccttcctcactgaaagcccctttcaatggcaaaaccccaagagactgccggctcctcaggcgtggctgcctcctcccgtccccaccccgtctgccttttgagcggctctggttcctcctcctggcctcaaggcccagtcttggcagggcccatggacaagctcaggggcttggaccttggcttgcttcaggagtcaccaggggaaggaagtgcaccaggagtccagagacctggccccacccctgctccccagatgtggcctggggagggtgacaaggacaagatgcccttcttcccttgggaagctgctttgacacttgagygagcacacggccataagcaggtgtcctgcaggcctcctggcatcctgccttgttccccccacagagccagaaaccttgaaaatacttcgctgttgtgttggctgagggccggggctaaaatccttggctgttgtgttggctgagggctgggactgagggccggggctacagggtctctgggaaaggggcccatcgcaggaggacagcagcaaaac

SEQ ID NO: 529108 - DNA, 588 bp, Homo sapiens
tgaaggttctgccccatcaagaatatggaagggtttcaattaaccacattaacaagccacaagaatgacatggagtggccttaacatactaaaaatgaacctgtctcatgatcaaaggatatttctcttctgttcctgggacaaacaaatgttttgaagtcaactaacaggcatacacaaatgaaaattagtatctgtagttttcaaaacactttttgcagatcaactcatttgatgttgaatggttgggagcagaatttatatttattgaaaacagcatgcgccagccatgtyggacttgttactgaacttaattcgtaacagcagcagctaatcataggtattactggtcctattttgcagtttacaaaaccaaggttttgacaggtggaataactcaatgggttcattgtggcctccctacctctactgggctctttccccacaacctcttcttcttagagacctttgatcttggtgcatctgtgaattacactgtggcttcagaaaataaaacattttgcaaattaagtcaaggtaacactgaaaaatgtcagctcccttcctacactagggtttcatttctat

SEQ ID NO: 529109 - DNA, 588 bp, Homo sapiens
tgaaggttctgccccatcaagaatatggaagggtttcaattaaccacattaacaagccacaagaatgacatggagtggccttaacatactaaaaatgaacctgtctcatgatcaaaggatatttctcttctgttcctgggacaaacaaatgttttgaagtcaactaacaggcatacacaaatgaaaattagtatctgtagttttcaaaacactttttgcagatcaactcatttgatgttgaatggttgggagcagaatttatatttattgaaaacagcatgcgccagccatgtcggacttgttactgaacttaattcgtaacagcagcagctaatcataggtattactggtcctattttgcagtttacaaaaccaaggttttgacaggtggaataactcaatgggttcattgtggcctccctacctctacwgggctctttccccacaacctcttcttcttagagacctttgatcttggtgcatctgtgaattacactgtggcttcagaaaataaaacattttgcaaattaagtcaaggtaacactgaaaaatgtcagctcccttcctacactagggtttcatttctat

SEQ ID NO: 529110 - DNA, 547 bp, Homo sapiens
tggctcacacctaagaccccacactctgggacaccaaggtgggaggatcgctggagctcaggagtttgagaccagcctggacaacatggtgtgaccctgtctacagaaaatttaaaaattagccaggcattgtggtgcacacctgtggtcccagcctctcaggaggctgaggtgggagtatcgcttgggcccaggagatcaaggttgtaataagccatgattgcaccactgcactctagcctggtgacagagtgagaccttgtctctaaataaataatgataaataaataaataataaataacagacaaaaaaggacaacaactagaacaaatgtctacagaaatgtcttaatgtctacagccatgcctccatggggctgtcaggctgctgtcacggaagtgcaggaagctggccctccaccagaaagtcatccggctggtgtgacaccaaagcttactgatggggacaagccattcaacgctgtcacygctatgtttccacagccttgcaacctgcaggtcaccctcagaacaagccctttctgac

SEQ ID NO: 529111 - DNA, 497 bp, Homo sapiens
ctgcaggataaattcaagctatcagttttccttgtgtcagaggtggacccaaattttctctgtgaaactccaaggggaaactctttcctcctgacattttgtcctctttgccagaaaaagcctcaagaagggtttaagtaacacagctttgagtcagttgcgtaagaaaacatttagaaaagcactttcrgaaattcagagataaagtagttccctgtttaccaaaaagaagagaaccaacttcatacgccattttatcagttccatcaatgtccatgtgctaagctgatctgtctgtacttccggctatgtcaaccaagcagtggagggcttgactttgaaaaagctgtgtctggctgggtacaggctcatgcctgtaatcccagcactttggaagaccaaggtgtctggatcgcttgagccaaggagtttgagaccagcctgggaaactggagaaaacttgtctatacaaaaattagccagatgtggtagtgaga

SEQ ID NO: 529112 - DNA, 637 bp, Homo sapiens
tctgtcacacaccaggtgtcccacgtaggaatttcttaaaccacaggtaggatgtagctgcagagagtccatacctaggggttgaaagcaagccagcattagcaggctgctaggctgaaggggagraagccagagggccgctggggactcaccaggtcacgatgtactgcagatgctcgttcctcagagtaactctggtttgccctccaatgggtcctccagggactgtgctctctgtggagacagcagactcaagtccaccccctactggcctgccagcctctgcaccacttcctagtggctgtcatttttgcgtggccagttggaagtcctgtatggcctttacgttgggtgaccatccccgcccttgtccgctcagtacttgcctaggttctttgctgagttgctgcctcctcccacccgccatatacacatgtgagaacataagccacagtagtgactgggcaatgagggttaggaggaaggacagtattcacaaaagctacttgttccgagatgggctggtccacaacgtacggaagttggcatcaatgaagatgggctctgcgcctgtattctggccatagcttcaggtctcgataatgccagtggttcctttctggattgttctcaggga

SEQ ID NO: 529113 - DNA, 626 bp, Homo sapiens
cacctcaccactgagaaccgaggcacagcgacttcaccaaggcctgtctccttatggaggctggtggcctcaccgcagtctctccatcactttaccctgatgtcgtctgttcctttgtttactcgctgttacttgttttcccctagagtgtgcgcatgataaggcagggcctgcttcttccgagcgttgagcagagctcagcatttagtgggtgccagtacacgtgtgtggaaggaaagcgtgctgaagccagaaagacccaagtatgaggcctgtccctgcttctcgccagttgggtggtttggggcaagtttctgacgtcctctgtgccttgtggtagtcatggtggcatcataaggagattgtgaggttggcactcttggctcagtgcctggtgattacttcaaccctgtgatggagccaggtgtggtggctgttgcctgtgatcccagctccttgggaggccaaggtgggaggatcacttgatcccaggaggttgaggctgcagtgagctgtgattgcactactgcctccagccygggtgacggagcaagactctcaaaaaaacaagtgaaaagaataaaccctgtgctggccacccacgtggggtggaccgggagtcagtg

SEQ ID NO: 529114 - DNA, 545 bp, Homo sapiens
gctgatgttgccatgatgtcaggtatgggagtttaaccctgagaatgggctaacaatcctgtcttcattactgtgacttttagttgactttgtaaatatattatttttgtcagctcatcgctgtggggcactgacacaaacatagtttatatcataataggcgggagtcactttaaaatataccatartaaggctgatagcctattttaaataataatgtgaatttgagttcgtttttttttttttttttttttttttggagacggagtcttgccctgttgactaggcgtgcagtggcacgatcttggcttactgcaacctccgcctcccaggttcaagcaattctcctgcctcagcctcctgagtagctgggactacagacgcccggctaatttttgtatttttagtagggatggggtctcaccatattggtgaggcttcccttgaactgactcctggttatccacctgcctcggcctcccaaagtgctgggattacaggcgtgagccacagtgcgcagcccaatttttttttttttttctttg

SEQ ID NO: 529115 - DNA, 555 bp, Homo sapiens
ctgtggccactttttcaacccacttgctgttttttattactgggagtcatgcaaaaaatgttgcccacacttaaatgttattacagagctttagaaattccttcatcccaatccaatgatttttcctctacggaaagaaataatgtagggaaggaagccatctgaagagcaacacatctatttctcaaggcaagttttggaggaaattgtcagatcttttcaaaaccaacgcttttgccctaaaagcaaaggatgaaaacttgtatcttttgtttgttttgagatggagtctttctctgtcactcagactggagtgcagtggcgcgacattggctcaccgcaacctctgcctcgtgggctcaagcgattctcatgcctcaacctcccgagtagctgagattacaggcgcctgcaaccacgcctgagtaattgtttgtatttttagtagagayggagcttcagcatgttggccaagctggtctcgaactccgggcctcaagtgatctggccgcctcaccctcccaaagtgctaggattacaggcgtgagccacttc

SEQ ID NO: 529116 - DNA, 620 bp, Homo sapiens
caactttgcctcctcttgtctgtatttttcagagtcaatattttctcttcattctccctcatcgcatccaatactgatctgacatatatcattctcactccagtgtaaataaggatggggagtaaacaggctactagtgtcttatctctagtcaccagtaagattggaaagtacattctactgctgcctccaggacctcctctgtcttctgacccatctccgccaaacctatctcatctattgttaaatatccttcgggttttgtggtgagttttatttgattaacaacactgaattttgaacacacatgctcagacatcaatgttcatgaacaagactgcctgcataccacctggaaaagaaaaataggccatgcaggttacaggagcactgctatcctagagtatgcttttgcttacctggataagcaggacttccttttagcatcactcatattagccttaagctttttagatatgtctcacagttccactggagcaaggacattttcaaagcacttcccaccccagtagaaacagcacgtgatatcagcccaagatgtatgtcaagtcacrccacaaaaactcagtgtttaaggccaatcaggtgcctggggaaag

SEQ ID NO: 529117 - DNA, 458 bp, Homo sapiens
atggttacttcataagtggtaagggcaccaggcatcaaagscttttatttcaaacaaggttattatatattaaaccacgcattggtatgaaagaaggagatacagtatgggattcttacaaagtattctttgccactaaatgttctcttgaagcaatgtgatggaactggaggttattatgttaagtaaaattatccaggcacagaaaggcatatcttgcattttctcactcatacgtgggagctaaaaaagttaatctcatggaggtagagattagaatgatggttactagaagctgggaagggtgtgtatgagggtaggtggggataaagagtggttggcgaataggcgcaaacatacagatagatagaacacgttatgttcaatagcagaataggtcacttatggttaacagcaatgtattgtatatttcaaaatagctagaaagaggacttgaa

SEQ ID NO: 529118 - DNA, 458 bp, Homo sapiens
atggttacttcataagtggtaagggcaccaggcatcaaaggcttttatttcaaacaaggttattatatattaaaccacgcattggtatgaaagaaggagatacagtatgggattcttacaaagtattctttgccactaaatgttctcttgaagcaaygtgatggaactggaggttattatgttaagtaaaattatccaggcacagaaaggcatatcttgcattttctcactcatacgtgggagctaaaaaagttaatctcatggaggtagagattagaatgatggttactagaagctgggaagggtgtgtatgagggtaggtggggataaagagtggttggcgaataggcgcaaacatacagatagatagaacacgttatgttcaatagcagaataggtcacttatggttaacagcaatgtattgtatatttcaaaatagctagaaagaggacttgaa

SEQ ID NO: 529119 - DNA, 458 bp, Homo sapiens
atggttacttcataagtggtaagggcaccaggcatcaaaggcttttatttcaaacaaggttattatatattaaaccacgcattggtatgaaagaaggagatacagtatgggattcttacaaagtattctttgccactaaatgttctcttgaagcaatgtgatggaactggaggttattatgttaagtaaaattatccaggcacagaaaggcatatcttgcattttctcactcatacgtgggagctaaaaaagttaatctcatggaggtagagattagaatgatrgttactagaagctgggaagggtgtgtatgagggtaggtggggataaagagtggttggcgaataggcgcaaacatacagatagatagaacacgttatgttcaatagcagaataggtcacttatggttaacagcaatgtattgtatatttcaaaatagctagaaagaggacttgaa

SEQ ID NO: 529120 - DNA, 530 bp, Homo sapiens
gttgagaaccactgatctagttcaactccatcactttatagaaagggaaacacaggtcttgagagggaaaattactgccccaacattccagatcatgtctcataaggaacacaggctattcactctcacactatacacttcctaaatacaaggtattgtgattaatgctgggcaggagaaagatgagtaagataaaaacctgaccttcaagccctcattagtacctacacaccagtgccaacaaaactgacaactccaaatgcctatcagatatctcctgctstatgtcctataaacaccttaaagtcagtgtcccaaactgaactcattttcttttcggaagctgttcctcctcaattgttctctgagttatgcaatttcattcatccaaatgccttcaaatccttgtcttttctgttcttcaccccatatctccaaaatgctgtcaattccaccccctaaatatctttcaaatctatctcctcctcttcatccatacaaggacttcccctagtccagtccctcatttt

SEQ ID NO: 529121 - DNA, 596 bp, Homo sapiens
tgaggctgatgtgtggaacatggatcagcagtagcatctggaagcagaaatgcagaatcctaggtccctctgtagacctactgaatcagaatctgcccattaacaagattcttgcacacatttgagactgactgctctgaggtccccgctcctggctctggcccggagagcagcagctcccagggaaacgcctgcccatatcaacacstgtggggacagtggatgccccaggtgaggtccctcctgcccacagtggagatccgtggcttaccagcctgattgtctttccaaatatggatgtttcaagagctgcaaatggggtgagatgacagtatagtctcctagaaactcggagcatcatcagaaggcccttgcagtacattgcattcaaccttttcattgtacagaggcccagagagggaaggctttgcccaggattacacagcaagtcagtgtgtatgggttgtgggggataggtgcagattccctgaccccaggccagtgctcttcccagccccccagaaggcccactcttcagcctggccatgctcatgggcaggagtccctgagtctgcaaagcagcgtccaggatgtgt

SEQ ID NO: 529122 - DNA, 552 bp, Homo sapiens
ccaggagacaggcgtttcctcttggtcactgactctctgggtcactgacgctccttgaacagcagggccaccgtgtctccctttgaagcaagkgatccttaaggaattttccaggtttagtaacttctgtctagctccgaaaagacgtaatggctgcaaaagtgcttcgttgaagaagataagatatattcatttttaaataaaaatacttatgggcgagaaaaatcggagtggactgaatcaattacagtaaatctatgggctctaagggagcaaataatccaggctggctgaaagaattaaatattttaaatttataaagccagggaccctcaaatccataaaaggattcaatcttcttcttctttttttttaggattcaatcttctaataatcccgggagggggcgcaagagcaggattcttgtttctattttacgaatgaggaaactgaggttcagaaagcctaagtggcatgcctcttcagtaatcggccaatcgtcgctgccctaacttcacctcacctcccagtgcagcactagagtcccctcag

SEQ ID NO: 529123 - DNA, 415 bp, Homo sapiens
gttaagacatcagggccaaaaaaaaaaaaaaaaaagcaaaagtgattgagattgaaacattctaaatgtgggctctcagtggatatctcctttgtaatctggacttcactccacaattcacataccagttcaggttccggggcatatagacatatctccaagatctaccgtgcccagatttttactcatctatcaggtttcaacttaaagtcattttttttcctctgggaaattttttcccctagattawgtcttctaatttacacttaaaaaaaaaaaaaagaaagcttacttctattgcgggatctggccagcagcccacaacgcaatggggctcactcttttttcccaggtggatcagcaggttgagaaataatagacacacacaagatagtgaaagctgggtccggggggg

SEQ ID NO: 529124 - DNA, 415 bp, Homo sapiens
gttaagacatcagggccaaaaaaaaaaaaaaaaaagcaaaagtgattgagattgaaacattctaaatgtgggctctcagtggatatctcctttgtaatctggacttcactccacaattcacataccagttcaggttccggggcatatagacatatctccaagatctaccgtgcccagatttttactcatctatcaggtttcaacttaaagtcattttttttcctctgggaaattttttcccctagattaagtcttctaatttacacttaaaaaaaaaaaaaagaaagcttacttctattgcgggatctggccagcagcccacaacgcaatggggctcactcttttttcccaggtggatcrgcaggttgagaaataatagacacacacaagatagtgaaagctgggtccggggggg

SEQ ID NO: 529125 - DNA, 363 bp, Homo sapiens
  misc_feature (1)...(363): n = A,T,C or G
gaaaaccactcagcagagcccagacaacaaaataattgttttaaaaataataaaatggttcttgtcttaagacaagttttggatgattacttattcagcaamagataaacaaaacagaaattactgcctggaagtgtaacattgttttagcaaaagtgtaaatacttggcactggctttggagctaagaggtagcagaatgtggttgcacattaaggaaaccacaaaaaaggtgggaagggacaggaaaaaactttntattngaagctgaaaataacagtacttgtttcatatagtgtcaaaagtttgtcaacactgtcacctaaggtaacatagaaagtagaaaaatgcctaatgaacttgt

SEQ ID NO: 529126 - DNA, 545 bp, Homo sapiens
taatcaataatataaagaaacatagcttaagtgcttaagtgctttttattcagcaaatgtgtgcctggcctaggaagaaggcttgtgaagatatttaaatggyggcagatttttctcaaatcatgaatttgattttcttgaaggtccacaaacagcagaagctaaactatcaatttttaaatgtgctttttaattttttggttgttattaaaaataagttaaaatattttaaatggcaaaaaactgccttagtaggaattggaaatggatagaagtctatcctcttcccaacaaagctctcctaatttctttctctttgaatgaaactcatgaagaaaaatcaaaataatagtcatactcaactgcacacaataatggtcattaaaatcatagtcatcaaaataatagtcataattaactgcatacaataatatactcatatataagtttactatatttacacacatacacacatacatgcataatattggtgtacatagggatgcacaccttcctatgtgtgtgtagtttagagatatgtacat

SEQ ID NO: 529127 - DNA, 541 bp, Homo sapiens
ctgtcagatcactatcaagggaaaaagaatcagtcaagcatccatcttctttttgaaatctgagactatcttcgtgggccacagtgcccatttctgcaaagcaaccttggatagtatgcatgcattaaggatagatggaaacttacctgcagagattcagaaattcaaagattacaggaagaaggtagagatatcaggaaaatgtcttgtgcaagttgaaagtggccagaagttacttgcatctcctcyatcagaatatagggtctttttccaccctttgaacttgggttgaccttgtgacttgctctgactaatgttaagtagcaatcatgcaattgtgaggttccaaggcctaagcctcaagatacctttaattattttgattgttctttcagaaatattctctgagaccattatgcaagaaagctagaatggcattccagaagataagatgccacaagaaagagaacaaaggagcctcagttgagtttctgcaccaattgtcaggtgtagaagtgtgggcatctgggagcttctaaca

SEQ ID NO: 529128 - DNA, 247 bp, Homo sapiens
tgttctccatggagtcagagatcattaatagttgattttgaccatatacatactagcagcagtcaagatacaattcttcagtcttccctggaactgcagatggccacagaaccgtttgtgccttggagcctaagtcattcttagaaacaatatggaaagaaatgaccatttgctacctaacatataagctttatgctgatggaaaatactgaaatcttyccaatttattctttttctttatggatat

SEQ ID NO: 529129 - DNA, 384 bp, Homo sapiens
aagggtgggtgttgggattacagatgtgagccaccatgcctgtcctgggatgcttttcatattattttaaggttaacattgaccttagtaaacttccccaaatcagagtatggctctttcccctactaagcttcactgatcaccaccttggcatacagtaggctcccattacactacatatgtatgtatctatcgcatcccactcttttactgttactatttgaaaaagaggggctgtagaaacaaggattctttttcctggcatgtatgaaaaactgggcaagggaacagcagccaactgcagttckgcccagaatgctctcagccaccatcttgtaattgaaaagtgtcactctgaggggaaatggccactcaaggtagcag

SEQ ID NO: 529130 - DNA, 648 bp, Homo sapiens
ccacttagatgcactttctaaacttaaacagaaaaatctgttttctaaagattgagccactgtccccaagttagtagcattttcaacttctaagtcatgatttctaaaactagtcactagtaacattttgggccaaataagtctctgtcatggaaagcttgtcatgaattctgcaaaatatttagtagcatcccagctctatctgctgagagtcagttatgcagcatccctatctctctccagttgtgccaacccaaaatgtccatgggggtcaacccaaatgtctcatgagggccaaaattgcccctggttgagaattacygctgcaaggcgagttccagctttaaacaataacataaaaacaagctttcatctcaatcctgaaatctttgatttatatatgcagatgcagctgagaaggtctgatcaggttgcattgtttcctcttggttggatttctctggctggctaaagtgacccatctctggcttcgtaacagttttttaattgggaagaaactgctgtttgagggcctgatgtgtgctccagagagtttgggattgttgggtattatgcggagtgttctgttttcctgaaatgcctgtattaaaaaaaatttctaaatactaggataatcctttatccaac

SEQ ID NO: 529131 - DNA, 556 bp, Homo sapiens
actgctaaaagaaaacattaaggaaattctccaggacattggtctaagcaaaaatttcttgagtaatatcccaagagcacagggaaccaaagaaaaaatggacaaatgggagcacatcaagttaaaaagtttctgcacacccaaggaaataactgacaaagtgaaaagacaacccacagaatgagagaaaatatttgcmaactatccatatatatatatatatatatatatatatatatatatatccatatatatggatatatttatggatatatatagcatatatatagcatacatattgcatatatatagtgcatacatatagcattcgtatatatagcatatgtatatatagcatatatatatatgcaattaattcctaaatcaaaaaagtaaaaaaaaaaagttcaaataaaaagagaaagctcaaataactctctctctatatatatatgtgtgtgtgtatacacacacctactatgtacacataaaaatttacaaaaaattaaaaatacattgatataatttttgaagatcaaatcagtataattaaggc

SEQ ID NO: 529132 - DNA, 631 bp, Homo sapiens
tcaagtaagatttattgaactcaaggcattttttttttwaaatctgtcttttattctgaactcagaaagaacaccttggaagtattgtaaacttcctaaggagttgttaggaagctttttagaattttttggagttttccaaggtgacttttggagaaacaggttcacttgggagcttggtagatgatatactaaacttgatttcaagattcttttatgcaaatccaagtcacatagctagccaccaaaagaattgataatctgatgtaatgagtctctttttgttttcgttagctaaaaatgtattttactaattaaatgtagcctttttgtaaactcctcgttttttaatctttatttccttatcagctagacccaagtgcatcatttttctgcctattcactgtttttattttttagtgggaagatatgtttttactctttttaatcagtagggtttggattttggagatggctgtcatattcaggtcagaggcagttgacttggtgctgatgcttgtttcagcttgtttctttccattttcctccagagtaaagaaaagattgaaaaactaaaactccaagctgaatccttctgccagcgtttggggaaataccggatgccctttgc

SEQ ID NO: 529133 - DNA, 470 bp, Homo sapiens
gcagatttgttttaggaaactatttgcaaagcctgggaaaaatgtgctttctctgtctgttaaaggaacatgcaggttggttggtgctggttctccatctgacagttctgtctggtggcctcaaaaaaaaagaaaaatacagcatagtccagatttggactatgcaaatggtgtcttgaaacttaacttttaggtcttgagcaaagccaagtattattgaaatgtttattttgtttttatctgcaggaggttttcattcaaaatgtggtgctttgggggaaaaggaagggtgtttgtactaggtactttttagcattcttcttattatctgacctatcacagcctcttcaggagacattaattaatttagttcatataatcaacactggaaccaaggaaaaattatttatacttttagaaattctcatgttcttatayttctttggagattgaattgactccaaagagac

SEQ ID NO: 529134 - DNA, 581 bp, Homo sapiens
acctgcttggtctgagctttcgaaaagtgcagtgaggatgtcagcctaggctgccgtcacctcaagggtcccctgggggtggatccacttccaagctcactcawgtggctgttggcaggatgcagttgctcacgggttgttaggctgagggcgtcggttcctcactaagccagaggcttccttaagttccttaacatgttttctcatggggggcagctcacagtgtagcaattggcttcgtcaaaacaagcaagcgggagggtaagagacagaaagcaagacagaggccagggtctttcacagcctaatctcaagagcagtacctcatcacttttgtcctattttgacaaacgtcgtattgacttttgtcactacatcagaagcgagtcactaggtctagcccacactcaaagggagaggatttcacagagcaagaatatcaggaagcagaatcattggttatttcattagaagctgctggcacagttcttaatgaagctacaaaacattgaactgggaggaatatgggggtaggagggtgacagggagggcaggttaattttgtggatgctgaggacaac

SEQ ID NO: 529135 - DNA, 581 bp, Homo sapiens
acctgcttggtctgagctttcgaaaagtgcagtgaggatgtcagcctaggctgccgtcacctcaagggtcccctgggggtggatccacttccaagctcactcatgtggctgttggcaggrtgcagttgctcacgggttgttaggctgagggcgtcggttcctcactaagccagaggcttccttaagttccttaacatgttttctcatggggggcagctcacagtgtagcaattggcttcgtcaaaacaagcaagcgggagggtaagagacagaaagcaagacagaggccagggtctttcacagcctaatctcaagagcagtacctcatcacttttgtcctattttgacaaacgtcgtattgacttttgtcactacatcagaagcgagtcactaggtctagcccacactcaaagggagaggatttcacagagcaagaatatcaggaagcagaatcattggttatttcattagaagctgctggcacagttcttaatgaagctacaaaacattgaactgggaggaatatgggggtaggagggtgacagggagggcaggttaattttgtggatgctgaggacaac

SEQ ID NO: 529136 - DNA, 581 bp, Homo sapiens
acctgcttggtctgagctttcgaaaagtgcagtgaggatgtcagcctaggctgccgtcacctcaagggtcccctgggggtggatccacttccaagctcactcatgtggctgttggcaggatgcagttgctcacgggttgttaggctgagggcstcggttcctcactaagccagaggcttccttaagttccttaacatgttttctcatggggggcagctcacagtgtagcaattggcttcgtcaaaacaagcaagcgggagggtaagagacagaaagcaagacagaggccagggtctttcacagcctaatctcaagagcagtacctcatcacttttgtcctattttgacaaacgtcgtattgacttttgtcactacatcagaagcgagtcactaggtctagcccacactcaaagggagaggatttcacagagcaagaatatcaggaagcagaatcattggttatttcattagaagctgctggcacagttcttaatgaagctacaaaacattgaactgggaggaatatgggggtaggagggtgacagggagggcaggttaattttgtggatgctgaggacaac

SEQ ID NO: 529137 - DNA, 581 bp, Homo sapiens
acctgcttggtctgagctttcgaaaagtgcagtgaggatgtcagcctaggctgccgtcacctcaagggtcccctgggggtggatccacttccaagctcactcatgtggctgttggcaggatgcagttgctcacgggttgttaggctgagggcgtcggttcctcactaagccagaggcttccttaagttccttaacatgttttctcatggggggcagctcacagtgtagcaattggcttcgtcaaaacaagcaagcgggagggtaagagacagaaagcaagacagaggccagggtctttcacagcctaatctcaagagcagtacctcatcacttttgtcctattttgacaaacgtcgtattgacttttgtcactacatcagaagcgagtcactaggtctagcccacactcaaagggagaggatttcacagagcaagaatatcaggaagcagaatcattggttatttcattagaagctgctrgcacagttcttaatgaagctacaaaacattgaactgggaggaatatgggggtaggagggtgacagggagggcaggttaattttgtggatgctgaggacaac

SEQ ID NO: 529138 - DNA, 568 bp, Homo sapiens
ctggagggaaaatcgctgatgattatcaaatgtccagttctcartgcggtggtatatgtgactgaaaaaaaccacttttgtccacatttggggaaagataagattatactaaatgcctggcacatacactggaccttcagttacctagaaaactttcaaaataactttgccataacaagtggcaaattattaaggtcatgggctgtcttctcaaaattacttagataacatgattctctggccagtatgagacccttaatttatcacgtatgaagcatatgagcctgtttatccgttcgttaatcattatttttatctggcttgggctctgggttactggccatgcaggcagatcttcccttccaaaaggaaacgttattattctcttgtattcgtttctttaaaaacatgcagatttaacaaaacatattacttagcactcttactgatttagaaatatgatgacccttaggaaatgcatctccttaaaagaaattccaggcaaactcatttaacctttctggatgttagtttcctgaccttcaaaaaatgggatgttggaccaaat

SEQ ID NO: 529139 - DNA, 642 bp, Homo sapiens
ctggagtagctcgtggtgctgattgatctgcttggagattcttgtgcatcttcacctgttagagctggaaagatgctcaggactatacagcccagcccttctggtttacatataatgaaactaaggcccaccttagtcaactaatgtgcttaaactcaagcaaatggcaaatggcaaaactcaggactctgtcaatgagttttcattctttttctttattcttctagacacatattttataaagaaatgaggcagcatgatgtttaaaatacttaaagtgagaatgagaaaaactgatgtctacatatcatgaaatggttaaaaagtttaacgtgcattgtcttctccattagaacttcttttackaatttttttctcaaaatctggctcagaaatcttgttttaaaagctccctaaacattcctaggcagaattagtaacgccttcctctttgctaacaaggaactgtgcatattcctgtaatagaatacttaccatattatattgtaagtattaaattattcatctgccctcctcccacctacccactggatcaggcttcccaggaacagcaacagagagcccagcaatttgtgtgttctcagtgtggaatgaatgaatgaatgaatgaatgaatgaacc

SEQ ID NO: 529140 - DNA, 627 bp, Homo sapiens
tgcttgaaatgagaatggctggatcaaaatggcagctcaggatttaaaggattctagtcagataccagacatcctcacatagagaaaactctgaatggctgggggagaaggagtcaaatgccctggatctttttcttgggcctcaaagtcctccttctgtcatcatccttccagtattgggcaggacctgactgcaggcatcatggcctctgtgaacttctcaagggtatgtattatcygacaaaaactacgatgtccactaacaggccactgaaaaggtatcttagtcagttctgctcattgcccagccaaggcctacgttttataacatgatatcaaagattgcatctaaaattgtgatgatttcctaaaataatcatttcatttagatttttctattttaatccaaggtattcttcagcggaaataaggaaacagtttactctcccaccaaaccttggccagtaccatcgacagagcataagtacctctggcttcccctctcttcaactagtaagtatgagttccaggtttacttagcgattggtcaagtgcaaaagtgcccagggtatgtgtttgcctcctgttccttagatcttcctaccatcacctcacattctccagtca

SEQ ID NO: 529141 - DNA, 627 bp, Homo sapiens
tgcttgaaatgagaatggctggatcaaaatggcagctcaggatttaaaggattctagtcagataccagacatcctcacatagagaaaactctgaatggctgggggagaaggagtcaaatgccctggatctttttcttgggcctcaaagtcctccttctgtcatcatccttccagtattgggcaggacctgactgcaggcatcatggcctctgtgaacttctcaagggtatgtattatctgacaaaaactacgatgtccactaacaggccactgaaaaggtatcttagtcagttctgctcattgcccagccaaggcctacgttttataacatgatatcaaagattgcatctaaaattgtgatgatttcctaaaataatcatttcatttagatttttctattttaatccaaggtattcttcagyggaaataaggaaacagtttactctcccaccaaaccttggccagtaccatcgacagagcataagtacctctggcttcccctctcttcaactagtaagtatgagttccaggtttacttagcgattggtcaagtgcaaaagtgcccagggtatgtgtttgcctcctgttccttagatcttcctaccatcacctcacattctccagtca

SEQ ID NO: 529142 - DNA, 179 bp, Homo sapiens
taatgtatacatttgctacattttctgcagtgaacataactgagtttaatttttaaagctctttggatacctcttcttgtatggcttgcagatatttctgctgggraaaatagatgctatctgcaaagatatgagggtatcattcatttacccattcattcattcattcattccttgaa

SEQ ID NO: 529143 - DNA, 660 bp, Homo sapiens
caaccctggacgatattagaatgatattagttttggaaggaggggatggagatcttccccttctaatactcaattttgttttggtatttgattgtcacaactagaggatataacaggaggtcagtttaaaaaatagcaaacagtctaaaaatgaaaactattcaatttagtgatggcttataaaagacactccaacttgtcttgcccaaactcccttcttcayagagccagggggctggatttcttgccactttttttctgaaaggcaaatgcatgacttttattcttttgggtctcagtgtgtttcttgaactgtgtgacttcaatatctgtgacaagtttttattttcccttagttgtatgtgaagaatttattctatagtcgtgatcatgtagtcctccattgtttggaagtgcagaccatggattcctatgcagcagatgggggttgtctgtttgtgcacttttttcctaagctgctgaaattcctccgatgtgaatgggccatagtaatctttgcctcctgcgtgactgtaagcatggcctccagtggatcagagaaagcagctcagtgattgttctcatggccaaaaataaagcacaagggttaccggaattgaatgagccctgttcagggcagcacggggcatctgcacccca

SEQ ID NO: 529144 - DNA, 660 bp, Homo sapiens
caaccctggacgatattagaatgatattagttttggaaggaggggatggagatcttccccttctaatactcaattttgttttggtatttgattgtcacaactagaggatataacaggaggtcagtttaaaaaatagcaaacagtctaaaaatgaaaactattcaatttagtgatggcttataaaagacactccaacttgtcttgcccaaactcccttcttcatagagccagggggctrgatttcttgccactttttttctgaaaggcaaatgcatgacttttattcttttgggtctcagtgtgtttcttgaactgtgtgacttcaatatctgtgacaagtttttattttcccttagttgtatgtgaagaatttattctatagtcgtgatcatgtagtcctccattgtttggaagtgcagaccatggattcctatgcagcagatgggggttgtctgtttgtgcacttttttcctaagctgctgaaattcctccgatgtgaatgggccatagtaatctttgcctcctgcgtgactgtaagcatggcctccagtggatcagagaaagcagctcagtgattgttctcatggccaaaaataaagcacaagggttaccggaattgaatgagccctgttcagggcagcacggggcatctgcacccca

SEQ ID NO: 529145 - DNA, 486 bp, Homo sapiens
gaggggttatacaaataaagagtagtaaggatttgtgggctgaacaatgtaagctttctgaaatggtgacttttgaacagttttaaaggataaagatatgaaatcattaaataggggaaatgcaggataaaatatacaggcaacagtaactgagctgatggaacacagcatgttcgaaacatgtattgcagatgatggcaaaggttgggagaagtatgaatttgataygtaggcaataggtaaggtaaagtagtggcaaaaattgtatttgttggaaagaaaaagatcacggcaaataccacggttatgtaaatacgctaaatattcatgttacattttatgtagtttatgacattatggttttttgggaaaactacggttttcccaaaccataaggcatctctccacaatttctactgttgtatttgacaggataatcaaatcaaaagttggccatggcaatgcaaaacattatttaaaagctaa

SEQ ID NO: 529146 - DNA, 531 bp, Homo sapiens
tgcctttccaaacggcggcgtgctggtggagagagttttcccgcaccttgttcgcccgtcagaaagcggcgccgggagggagcgagcgtgagaaagtgagcgtgtgcgctgcmggagagcacgacccaagagccggcgcccggtgtccgagcgcccagtccgccctgtccgcccccggacccgcgaagggcgggggcccggagcagcgaggcgcgggaagcgaggccggcgggtgccgggggttggcgggacgcgcgcttcgtgccggcgccggcctcgagcccgcgctccctccccccgcccgcgtgcccgcgccgctgcgcgatgcagtgtggggaatggctggggttggctgaagagcgcacagtggagttttaatgtccgccatgttggccatggcgtattgaagagagcgagcgagagaggagcggagcggcacagcctcccaccctcccggctggtgttagtgcccggacggcgggctctgcgctccgcccctcaagtccccggcagcggttggcgagtggggac

SEQ ID NO: 529147 - DNA, 612 bp, Homo sapiens
gtttttttcctgttctttaaatcttgttttctgaaccatttgaaagtatgttgcatatatcatgacacttcaccccaaatgccatttataaaatggagattgttttcttgactgttaaagataagaggtaattatgtgaatttttttttcttttgagacagagtcttgctctgttgcccaggttggagtgcagtggcgtgatctccgcttactgcagcctctgtctcccgggttcaaacaattctcctgcttcagcctcccgagtagctgggattacaggcacctgccaccatgcctggctaatttttgtatttttaatacagacagggttttaccatgttagccaggctggtcttgaactcctgacctcaggtaagccaccacgtctggcctgtgtgaaatattttgtacaagaaaactacaaataagattttttaaagcagtgagtgttcactataatattgatacacaaaattttggtttcacagttacgaaaagtggatataacataagggaagtttttttctacagaactattcatacaagaggatataaatggtaactaagggtatgaaaawcttcagcttctctaataatgaaaggtatagacta

SEQ ID NO: 529148 - DNA, 608 bp, Homo sapiens
agatctccaggttatatcaagcaaaccaaagctagggataaagttctacattgtgtatatcttatatccatttatataggaatatatatattcctttacatatttaaatatgtacacatttgtatatacattaaaatattgggaagaaaatacacattcctaatggactacctatgaagactggaacttttcatactattagaatgctttttatccatgaacttgtttgtgtgtgtgtgtgtgtgtgtgtgtgtgtttgaatttaataaggcatataccaaaattcagtgttgataggcctggatgagactaatacctttatatggcagttggtagtatcacaaactaggaaaagctttctgtgtggtggctaaaccaraacttattttgagcacctgttatatgtcaggcattatactaaacattttattcacatttatcttacttaaatctccaactctgtacagtagattctttttttctcttactgtaggaaatagatttagaagactggtttcttgccgggagtcacaaactgtttcagtatcggagttgggttctaatcagacagcctgagtccagagaatgtgctttctgcccctacacat

SEQ ID NO: 529149 - DNA, 426 bp, Homo sapiens
tcctcttcttgagtattttccacctttttctcttttcaagttgaaacacagctctgaaatctgtgggagtggcatggaatttggggatgtgggttttcacccttgctgtgaatggagayagattcttcctgtactaactcccacttctcctcagactcttcttcctgacatttcttcctcctccacccagaaagctatggtggttcctcaagggtcactcaagagaccaacttctctcatctgccaactactaccaaagcaccagagtgacacatgagccttccttgtgacagtcacctgtgtgcttacccccaggacaccctctattcagatggaagtcttgaaaataaaactccatcctcccaacctcaagccaaatatgaattttctaagtgtgttcatcagggatagaaagagatttgtctc

SEQ ID NO: 529150 - DNA, 549 bp, Homo sapiens
ctgtcctttcttcctcttcttgagtattttccacctttttctcttttcaagttgaaacacagctctgaaatctgtgggagtggcatggaatttggggatgtgggttttcacccttgctgtgaatggagacagattcttcctgtactaactcccacttctcctcagactcttcttcctgacatttcttcctcctccrcccagaaagctatggtggttcctcaagggtcactcaagagaccaacttctctcatctgccaactactaccaaagcaccagagtgacacatgagccttccttgtgacagtcacctgtgtgcttacccccaggacaccctctattcagatggaagtcttgaaaataaaactccatcctcccaacctcaagccaaatatgaattttctaagtgtgttcatcagggatagaaagagatttgtctccagatacttaaattttggaaggagacagatgactcaaccaaagaggcccaatgagttagagaattcactcgtgtaaattaagcatcttggaatcagccacattaaactgatt

SEQ ID NO: 529151 - DNA, 581 bp, Homo sapiens
ctaggtcatagagccttgagataaagggcactgtttctattccttattctgagtgcctagtgagtgaagacctggtggaagatagtcaagaaatggattcattcattcattcaaaaaacaaggccatcatgggggaaaggaagacaggaagcttgccagatatagcatgaagagcagagaggkccaagtccttttgcttttgcaaggatatttataatagtcccaagattattggattttctactatctgaggcaaattcttccccactttacacatttattgcctgcccagtagtttgtcactgtagtggtaaatcaaaagggattccagacaggtcacaccaaccttcatactctctctgaatcacttctccagcacagtcccaaagccaggctggttagcttaaagtttatattacccagcaggcacagagtgtggcatggttgcctgcattaaacagtgatgtcacagcctgacgaggaggttgtctttttagcaaggagcaagaggaaaattgaagcaactccagagagaaaatgtttattgaaatgcaaatgaatcttcccatgcatgtgcttta

SEQ ID NO: 529152 - DNA, 616 bp, Homo sapiens
ttctgtcatctaaaaatgaggaaaaagtgctgggatgtcctaattaattttaaagtaattgataattgacaaaactaaaaatgaagtcatgtccccaatctcttctccctatatatttttcctrcttaccttcaagggtatcaaatcctatgtcttcatacctaccttgctttttaatgggatggaacagtaggaagagatgctgataatatctgagagctgattaagtattaggctatttccatatttgtcatctattccttagaacaatcctccaatagatattatccccactttacagatgagctaataggttcagaggggttaagtaatttcttcaaggctacaaagcaatagcagcttaaaaagctagtcaccactgaggtgaaggatgaggtagaaaaagaaaagatcatggcatacacggcttttagaaaatcccaagatgtaaggccataggtaggtgaatagcaggctatgaattgttcagatagtctatccatctgattttaatggtaacttgaggttaaaagcctaaaccaaaaaaccctttgtcaacacctaattcctaacagtttttcaataagcattatgaagtcttgttacattaagaaca

SEQ ID NO: 529153 - DNA, 596 bp, Homo sapiens
aaggctctactgtcagtcatgcacacttggtgtgactttggggacacctgggactcctcaggtgggattggtgttttgcccgctctccaattgtggaataaagcctttgcttccgattcaaggcattcctgggaaaaggctgaatggtttggatgcgtggagagggatgctcccgtacctctgaaaagctcaagagataaagcttggctcagcaagcccatcctaggggtcctctgggaagtggtgttcaccttctcttgttccccggggacctgcttgttggctgctggtaagagtggtccttargccgcagactccccctccccacactgctccagtcccagggtctggtgcaggatagatgaggcccggccttgaactttggacctcttatgtttaggaaccatccaagggaaagtgacaatcagggagggcctctaatttccctcatgctcgccccacacctggccagccctcactatggcagcaggagatgttgggcacacccaacaatagcctggctctttccaagaggaaatactgtggctgctgggctagaggggagtggtgtgtgtggaagggtttctctcagcagc

SEQ ID NO: 529154 - DNA, 544 bp, Homo sapiens
cagagatcacatggcaagagaagagggaaggtgaggggtccaggcttttttttttaacaaccagctcttgkgagaagtaagatactgagaagtcactcacctgaaaaggagggtactcacttactcatgagggatccacccatgttacccaaacacctcccaccaggccccatctgcctacactgccagaccggggataaaatttcaacaagaggtttgttggggaaaacatatacaccatagcagatggtattaggagatgtgaccttggggagaaaattaggtcataagagtagagccctcatgaaaaggaataatgtccccaaaaattggaccccagaaagctgcaattttgcttgtgttctttaagccacagtggcattagggcaacaggactgggagccataaaggaagccagctattcctgcaaaacaaatcacatcaaaactcaatgactgaagaccacagcatttattatagatcagaagcctccaggttgattgggtatttattgtgctgttgtctcactttttcatgtgtggac

SEQ ID NO: 529155 - DNA, 619 bp, Homo sapiens
aaagttcacaattgggcacttacatctggtaagggtttctggttgtttctactcatcagagaagcaaaggggagccagtgtgtacagagatcacatggcaagagaagagggaaggtgaggggtccaggcttttttttttaacaaccagctcttgggagaagtaagatactgagaagtcactcaccygaaaaggagggtactcacttactcatgagggatccacccatgttacccaaacacctcccaccaggccccatctgcctacactgccagaccggggataaaatttcaacaagaggtttgttggggaaaacatatacaccatagcagatggtattaggagatgtgaccttggggagaaaattaggtcataagagtagagccctcatgaaaaggaataatgtccccaaaaattggaccccagaaagctgcaattttgcttgtgttctttaagccacagtggcattagggcaacaggactgggagccataaaggaagccagctattcctgcaaaacaaatcacatcaaaactcaatgactgaagaccacagcatttattatagatcagaagcctccaggttgattgggtatttattgtgctgttgtctcactttttca

SEQ ID NO: 529156 - DNA, 410 bp, Homo sapiens
gaatctgttaaggtgatgaagtttgaatgaccttggtcagagtcagactgatcctaattgcattagattttttcatgacccatggacagtggtacttgatttgcttagctgcacacagacttgtgcactcatcccaccctctctataatgcaaattttcaacccttagtgagtataatcatcatgacccactatcaccagcccctcagtcactgatttttcccctcagagtgctactcagtgaatttcttccctgatgtattcccttgcatatcagataaataaaatctgctttgttttttgagctgtggtgktctgtatttaatttattgatacccaagataatacagttagtaagttacaaagctgggacacaaatccattctgacttcaacccatatgcttaatttc

SEQ ID NO: 529157 - DNA, 543 bp, Homo sapiens
tattgtctcctctgtgtatttttcttcagttcctaaccaaccaaaccgctgtgtgtgtttcgcctttgtataaaaaacagagaatgcaggatagccttctatcctaagtgttttaaataaaatgggcaataaaataattattgaaactggtagaagaaaagaaggatttaggggaaaagaagcccacctactttgctttatgagatgtggaaactttcagagctgcctctgctttgcctctgaagagaaactaaagaaagaaaggaatcttttggaatgcaagataactaaattcatttgttatggtctttacaataagctttgctggttttgacctgtgagaggacagaaaasagaaattctaagcagtagagggttggggacactttataatcatttcttagtgatacaagagctaattgtaaagaggatgaacagagcttattaaggccgaaataagtatgtagtaactaaacagctacacgcacattttactctctttatgtaacaagggactatatgtactcccacatggtaggggaa

SEQ ID NO: 529158 - DNA, 543 bp, Homo sapiens
tattgtctcctctgtgtatttttcttcagttcctaaccaaccaaaccgctgtgtgtgtttcgcctttgtataaaaaacagagaatgcaggatagccttctatcctaagtgttttaaataaaatgggcaataaaataattattgaaactggtagaagaaaagaaggatttaggggaaaagaagcccacctactttgctttatgagatgtggaaactttcagagctgcctctgctttgcctctgaagagaaactaaagaaagaaaggaatcttttggaatgcaagataactaaattcatttgttatggtctttacaataagctttgctggttttgacctgtgagaggacagaaaacagaaattctaagcagtagagggttggggacactttataatcatttcttagtgatacaagagctaattgtaaagaggatgaacagagcttattaaggccgaaataagtatktagtaactaaacagctacacgcacattttactctctttatgtaacaagggactatatgtactcccacatggtaggggaa

SEQ ID NO: 529159 - DNA, 651 bp, Homo sapiens
ctgttgatgccttaatttatgaattcggatggagatattctataatttcattttcatctcataactggaataatttcataaaaaaatccttcccctcctcaaccatttggttgctcagtatttcaatttatataagaaaggctctcttatcaaggcttcctcccccttcccccytttagtcattattcaagaaaataaattggttctctatcatcttataaatttaaaaaatactattatggactcatggatttggacatattttataagtttgaacccactgcaattcctttttttgttgaacctcaaactatcccatctttgaccagtagtatcctcttgaaggtggcccttgattcatgttgatagctaactgtctgatacgtcaagatagtccacatgcttcttgtacatttcttgccccagacttgaaatgagcaatttcttcaagaaaatctggcttattttaatgggaactaattgcagtaatggagattttgctgctgtgttgatcattttctaggattcttcagtgtacatttaggacatacatatacaagggatgtgtgtgtgcatgtttgtttatatatatacagatatatatttttaatggaaataaaatttctcatagggatgtttcaagtttagtgc

SEQ ID NO: 529160 - DNA, 651 bp, Homo sapiens
ctgttgatgccttaatttatgaattcggatggagatattctataatttcattttcatctcataactggaataatttcataaaaaaatccttcccctcctcaaccatttggttgctcagtatttcaatttatataagaaaggctctcttatcaaggcttcctcccccttcccccttttagtcattattcaagaaaataaattggttytctatcatcttataaatttaaaaaatactattatggactcatggatttggacatattttataagtttgaacccactgcaattcctttttttgttgaacctcaaactatcccatctttgaccagtagtatcctcttgaaggtggcccttgattcatgttgatagctaactgtctgatacgtcaagatagtccacatgcttcttgtacatttcttgccccagacttgaaatgagcaatttcttcaagaaaatctggcttattttaatgggaactaattgcagtaatggagattttgctgctgtgttgatcattttctaggattcttcagtgtacatttaggacatacatatacaagggatgtgtgtgtgcatgtttgtttatatatatacagatatatatttttaatggaaataaaatttctcatagggatgtttcaagtttagtgc

SEQ ID NO: 529161 - DNA, 526 bp, Homo sapiens
gatcaaaatgttataactggaatattctcttgccctacgatccagcgacaattgccggctgtgagcagggaaagcaaccaacagggccaactgagcaatcaggaaacgaagaaataatcatgtgctcagggaagctacacagtccgattttaccaggatgtcatatccagggaataggtgtgttgtgggggcacaacccaattccctactccatgatttagctccttatgggcaaatgctctgaaatacagggcagtcccacaaatagactctctgacagctcctgtctgacagtttgatgaagacaagctttttttagatgtagatatctgggtaattggatataggattcgcaaaaggattgaattacagtaagcctaaggcacttgtatgctaggccactgaggaaattcaaagttagctcaggttctcttccttcctcagaaaataaatattctcctttctcatgactcacaccaaatrcaagtacggaaatgtaaacctgctttggctcagtttccattgt

SEQ ID NO: 529162 - DNA, 582 bp, Homo sapiens
ttgtcggtttgggctggggggagactatatctgtttccatctctctgcatgtccacctatctatatttttacgcactagaatgtcgttctggatcttcctcattcaaatggtgcaagctggagggcaacctggaaacttatttttaacagagaccagttgtcaaaataatgaagcttctgctatggcttggatgacactttattttcaaatcaaatagtaaaaggtgtttccattttcacattttccttcctggtttaaaaaaaaaaaagagttgtatttttatctgaaacttttccttaagtctatgtgaaactccttttcctctgccctgagctgtgtgaggctggcatatttttcagttgacaccaccagaaaaacactgacagtgagaaaggcatttaagaaagaagacaaagccgagtacagtggttcatgcctgtaatcccggcacttcgggaggccaaggcaggcagatcatctgagatcaggagttcaacaccagyctggccaacatggtgaaatcccgtctctactgaaaacacaaaattagctgggcatggttgggggcacctgtaatccca

SEQ ID NO: 529163 - DNA, 372 bp, Homo sapiens
tctcacctccctaagtctcagttttctcatctgtgaaatagccctacagtatttaccccaaatatttgttgggaggataaaatgacatcttgaatatcaagcctcttagtacagtcaatattagtttctccatttaaaaaatttaattttccctaaaataacctgccccttctcatgctcatttccaaaggcttgcaatgagtgatccagaaacaaatgaataaataaagggatttcccaaattccctgaactctggtgttggagttgtgcagcctyatgtatctttatatggcctgcatgacatcaatgatgactcacatttcttgatcatgtaatatgctctagaaactttcctgggtgttttacacaca

SEQ ID NO: 529164 - DNA, 563 bp, Homo sapiens
gggcatgggatggaggacatttgcrtaggtcctaccccaacagccataacattgtccttgaacctcttggacacagagttactctaccagatcatggttaaccagggcttgtcctggggaatgaggcctctgctaacttgttttcctccaacgtttggggaacgtggtggggagttggatgcgggaagggaagtctgagtgcatgtgtagacgtgcacgtacacgttcacatgcacacagactgtgtaaatgctgttgaaccgggagctcagtaggcagtatcggggggtagatctttagcggggatccaagaccacacaggcaggatgtcaatcaaggtgggctgaacttaggtaggagagaccacagaagaacatgttatcaaatagagaccctcactgagagggcaggcaccaggcatggcctgggcatacatgtgggcccagcagctagaaccatggggccgaggccctcagtaggccatcacgctgcacacctccagggcaccactgcatggaagtctgtgtgatggagtccttattttgcagtgcactgcctgcaca

SEQ ID NO: 529165 - DNA, 483 bp, Homo sapiens
tgcacctcagctggtcacttgtgctttgctggatgtctgcctgcctcctgcctttactctccctggctcttcacttctggcacatatacatccagcagtactttctgtagaaaaccagagtataattttatttcttgagtacatctcttttgatctaaattatccagagataactcaaaatttctggttcctgaggcttcttccgtctttctccctagcttgtttaggagtgtgtgtgcacccacgtgtgtgtgtgagtgtgtctcatttagtgtactaaattggggtgggaggcaatagcattagctcagtctatcaacctagtttatagagtgcatatgaactgggatctactttcaactaggggcctggcgcggtggctcacgcctgtactcccaaggccgaggcaggcagatcamctggtcaagagatagagaccagcctggccaacatggtgaaaccctatctctactaaaaatacaa

SEQ ID NO: 529166 - DNA, 239 bp, Homo sapiens
ctaaaggacacatagacaatatacaaatcaaaggccatagctatgwaacaataagactttatttataaatggtaggttgaatttggcccgtgagccatattttgctaatccctgctgcatagtatttattcaatatgcatacattcatccaacaaacatttcttgagcacttgttgcgtgccaaaatagatattatttcttagggagataaaaataggcaaaacatttcaagctttaaa

SEQ ID NO: 529167 - DNA, 573 bp, Homo sapiens
gacaatatacaaatcaaaggccatagctatgaaacaataagactttatttataaatggtaggttgaatttggcccgtgagccatattttgctaatccctgctgcatagtatttattcaatatgcatacattcatccaacaaacatttcttgagcacttgttgcrtgccaaaatagatattatttcttagggagataaaaataggcaaaacatttcaagctttaaattgattacattgtggtatggatacaggggaaaaaatgaatagataaagaaaagagtgataaaattaggatacaggcttacactgggactcaaaggagggtagagcttctaagaacctttatatgaggaaatcaaaggatcaaacatgaagggaggaaggaaaatattttcaaactgtgtgccgtgttaataggtaaacttaccttctgtacagtttcactaggcttagaatttcgtggtattcaggcaattcaaccacaaaacaccaacttttatgtgatgtctcatccacacaaggaacccctgagatatcatttccagagcttcgcaatgcaatgcatttaaatgt

SEQ ID NO: 529168 - DNA, 573 bp, Homo sapiens
gacaatatacaaatcaaaggccatagctatgaaacaataagactttatttataaatggtaggttgaatttggcccgtgagccatattttgctaatccctgctgcatagtatttattcaatatgcatacattcatccaacaaacatttcttgagcacttgttgcgtgccaaaatagatattatttcttagggagataaaaataggcaaaacatttcaagctttaaaytgattacattgtggtatggatacaggggaaaaaatgaatagataaagaaaagagtgataaaattaggatacaggcttacactgggactcaaaggagggtagagcttctaagaacctttatatgaggaaatcaaaggatcaaacatgaagggaggaaggaaaatattttcaaactgtgtgccgtgttaataggtaaacttaccttctgtacagtttcactaggcttagaatttcgtggtattcaggcaattcaaccacaaaacaccaacttttatgtgatgtctcatccacacaaggaacccctgagatatcatttccagagcttcgcaatgcaatgcatttaaatgt

SEQ ID NO: 529169 - DNA, 573 bp, Homo sapiens
gacaatatacaaatcaaaggccatagctatgaaacaataagactttatttataaatggtaggttgaatttggcccgtgagccatattttgctaatccctgctgcatagtatttattcaatatgcatacattcatccaacaaacatttcttgagcacttgttgcgtgccaaaatagatattatttcttagggagataaaaataggcaaaacatttcaagctttaaattgattacattgtggtatggatacaggggaaaaaatgaatagataaagaaaagagtgataaaattaggatacaggcttacactgggactcaaaggagggtagagcttctaagaacctttatatgaggaaatcaaaggatcaaacatgaagggaggaaggaaaatattttcaaactgtgtgccgtgttaataggtaaacttaccttctgtacagtttcactaggcttagaatttcgtggtattcaggcaattcaaccacaaaacaccaacttttatgtgatgtctcatccacacaaggaacccctgagatawcatttccagagcttcgcaatgcaatgcatttaaatgt

SEQ ID NO: 529170 - DNA, 577 bp, Homo sapiens
tgaaatgtgggaagcatttttctgtgggaggagcagaatggaaggggagggttggaatgacttcccaaggagaaccagtgagctggatcccagccagtattttaaatgttagcaagtaacttcagttttgaatatttctattaagatgagtcttcactgatgaattcagttcaaagttatagtcaaaacaggccaggtgttgtgcctcactcctctaatcccagcacttcaagaggccgaggccagcggatcgcttgagctcaggagttccaaaccagcctggccaacatggtgaaascccatctctgtgttgtctgctgataatacagagttggcactggcaactctgcactaaaaatacacaaattagctgggtgtggtggtacaggcctataacccccacttctcaagaggctgaggtaggaggatcacccgagcccagggaggtcaaggctgcaatgagctgtgattgaaccacagcacttcagcttgggcgtcagagtgagaccctatctcaaaaaaatgtagtgagcagaatggagcttagactctgggaggaatcccactccaaaagtgg

SEQ ID NO: 529171 - DNA, 577 bp, Homo sapiens
tgaaatgtgggaagcatttttctgtgggaggagcagaatggaaggggagggttggaatgacttcccaaggagaaccagtgagctggatcccagccagtattttaaatgttagcaagtaacttcagttttgaatatttctattaagatgagtcttcactgatgaattcagttcaaagttatagtcaaaacaggccaggtgttgtgcctcactcctctaatcccagcacttcaagaggccgaggccagcggatcgcttgagctcaggagttccaaaccagcctggccaacatggtgaaagcccatctctgtgttgtctgctgataatacagagttggcactggcaactctgcactaaaaatacacaaattagctgggtgtggtggtacaggcctataacccccacttctcaagaggctgaggtaggaggatcacccgagcccagggaggtcaaggctgcaatgagctgtgattgaaccacagcacttcagcttgggcgtcagagtgagaccctmtctcaaaaaaatgtagtgagcagaatggagcttagactctgggaggaatcccactccaaaagtgg

SEQ ID NO: 529172 - DNA, 561 bp, Homo sapiens
tggacagtacagctatttttaggaattgatccctttatgcttcacaattttattattctgtcttccttttttagtggctttgaatgaaatacagatgcattatccagaactgaagttgccctacttttaactttgaacttggctagttcaaagatagactcttcttttgtaaagtaaataaattcttcaaaatgcttgctgagtggtttttgtctgactgggtcacaccaagtgcaaaactgctgagtactgccatgtgccatctccctccctggtcggagaacccttgtggtcttgcagcacacacagaaattctctctgcacaayacagaaagacacactagcgtcatttggagctgtattagaagcagagcttcctgtagaagccagacttaatttttgtgtgctaactggcttttgtgttcaaattcccctcccaaatcttcctccactgcactggattatcaaatacagatttcttaatgttggctgtgattttcattaaaataccactttaaaaataatctagtagaactattctgcatcaggttgccctcaagt

SEQ ID NO: 529173 - DNA, 524 bp, Homo sapiens
aaatcaaattattttcctgactttgtaatgctgggctatgtttgtgataggtttagctattactttaaaaataggaagggacagaaagtctaagaataatccatgttctctaactaagaaaaataaagccttttctgtcaatttccaaagggcacgttcaggagacagacactcccttagaatatgcacatgttcccggctagtctacttgtggacatgttcttttatgtttttctcctgcatggaaaccctgaagataaactgtgtttactatttcttctgtacctactcagagttcctaaactgagtgtatgcagtaggtggtcaacaatattcattagtarattctttgtattcttcctgagggcaaaactgctaaaactccctggagaaaaaggcaatacctggcaaacataaggcatctctccaggcttatgagtatccttcatatgctggagaaatagtggctcactttcaaacgcccattcacagatcttgcacttggctgtaagaagaaaagtaat

SEQ ID NO: 529174 - DNA, 612 bp, Homo sapiens
gcaattctcctaagatacagcaagaaggaagctaaaaagattaggtttctttggtccagaaaaacaaarcccaaaaagggatacaggggggctctcaaaatcacaatcgcactgagacagagtcatggttgacatatgcatcatgaactatgaagggagtctaggatgttggtgagggcctcactggtcatacacgcaaactctgaacaaccatgggtgaagagtcacgtccagggtaggggtttgggccagaacccatctaccttgtccttggagttgaggacaacagcctgtgtgtggggtacacggaccacgtggtggtcaaagccagcagtgggcagccagactcgggcagggagcttatggttgagcagggagagctctgagatcagcctctgtgttttctgctctttggtggggagcgtggccagccgcttgccgatcgccatcagggacttgatgaattctctctcaggagccagtcgaacaggctacaggggtttggggtaagacaaaagatggtgaagaaaccatagaatacaatggcacacccactcagtcactcctggccatgcaggccggggaccccactatctggagaactccaggaaa

SEQ ID NO: 529175 - DNA, 545 bp, Homo sapiens
cctcctatcccctttcctgcctcccccagtttacagatacaggtacccacatgcacccacccacccactacttggagatggggcctcagaaattgagcctatgtcccagccctgagagtcccccagaatatctcctgtttgcagtctggtggtgacttttgggtttccatggaatttgctggcttgccagtgttagktcacactagttgtgtgaccatggtttggatggggagggcagaaactagccagggactagggctgtgggtagggctctatgccaagctccccttacttggctggagggctctggaagttgccagtcatctgagaatgtgggttggtagggcaggggctcatcgcctgtccagtcggccctgaagagggaaacaaagctgagttcacatccactctgtgaactctgatgccaggctgtgggacgcggacagggaggggacgacagggcctagcctcaggaatcttttggctaataggtgacatggtccatgtgcacagatgaaaggccccaggacacccacaaaggagca

SEQ ID NO: 529176 - DNA, 545 bp, Homo sapiens
cctcctatcccctttcctgcctcccccagtttacagatacaggtacccacatgcacccacccacccactacttggagatggggcctcagaaattgagcctatgtcccagccctgagagtcccccagaatatctcctgtttgcagtctggtggtgacttttgggtttccatggaatttgctggcttgccagtgttaggtcacactagttgtgtgaccatggtttggatggggagggcagaaactagccagggactagggctgtgggtagggctctatgccaagctccccttacttggctggagggctctggaagttgccagtcatcygagaatgtgggttggtagggcaggggctcatcgcctgtccagtcggccctgaagagggaaacaaagctgagttcacatccactctgtgaactctgatgccaggctgtgggacgcggacagggaggggacgacagggcctagcctcaggaatcttttggctaataggtgacatggtccatgtgcacagatgaaaggccccaggacacccacaaaggagca

SEQ ID NO: 529177 - DNA, 545 bp, Homo sapiens
cctcctatcccctttcctgcctcccccagtttacagatacaggtacccacatgcacccacccacccactacttggagatggggcctcagaaattgagcctatgtcccagccctgagagtcccccagaatatctcctgtttgcagtctggtggtgacttttgggtttccatggaatttgctggcttgccagtgttaggtcacactagttgtgtgaccatggtttggatggggagggcagaaactagccagggactagggctgtgggtagggctctatgccaagctccccttacttggctggagggctctggaagttgccagtcatctgagaatgtgggttggtagggcaggggctcatcgcctgtccagtcggccctgaagagggaaacaaagctgagttcacatccactctgtgaactctgatgccaggctgtgggacgcggasagggaggggacgacagggcctagcctcaggaatcttttggctaataggtgacatggtccatgtgcacagatgaaaggccccaggacacccacaaaggagca

SEQ ID NO: 529178 - DNA, 551 bp, Homo sapiens
ctcaggaaaggctgtggacgcatttctccaaccctgttgacaatcttgttgaacacagtttgctttgtacctatgtgttcatctgcatggctactgaatgtctgccccccaccccactctagactgtaagccccatgcgggcaggagctaaggctgtcttcctcaggacaatatccctaaaattcagagcagggcctgccacagagtatgcgctcaataaatacttgccgaatgaatgaatgactcatgcctctaaatatttatagcagtttccttctgtaatcttcaatggtttgagttccaccagatccctgcaggataatcagtgcttacgcccatttgacaggcccrggtgagttaatgaccctggctcccaatccatcctgactcacagtatcaggctacctttgtctaggaggaggaggagggacaaactgggagaagagaggcacgtgccacagaaccggagaccagagagagggctgggtgagagaccagcaaagggtgggggcactgccggggagccacatgccagcagccaggcccatcac

SEQ ID NO: 529179 - DNA, 609 bp, Homo sapiens
gcactgggaatttaacatatgggttctgggggtaggaggacacaaacatttacaccaaagctgactccttctcagcaatcatccagtccttttaaattgggacactaacctttttcttgccagcaatcattttaaaaaatcaatttaaaataataaaaattatrgtaaataccataatagcagagaaggatatgtaaaaattaaaaatgttctacccatcacccttttcctttgcctcatcttattccccaaggaaccactcttaacaatttcttatttatccctaagatatttctatgtatatagacaagcacgtatagctacaagtcactatatgtgctttgtaaaaaatatatacaaatgggatcatatcataacaataatgtaaccgtgttattttgcagcttgcttttttcacttaatgtcagatcttggacctctttttcatgtcgatatctgtagatctactcattttttttgtagtgactataaaaagttcattgtaaagatgtgactgaccagttccttttttaatggagatttatgctgcttaggttttgctaaggcaaacagttctaagatgaacaactatgtttgtaaattaattgc

SEQ ID NO: 529180 - DNA, 609 bp, Homo sapiens
gcactgggaatttaacatatgggttctgggggtaggaggacacaaacatttacaccaaagctgactccttctcagcaatcatccagtccttttaaattgggacactaacctttttcttgccagcaatcattttaaaaaatcaatttaaaataataaaaattatagtaaataccataatagcagagaaggatatgtaaaaattaaaaatgttctacccatcacccttttcctttgcctcatcttattccccaaggaaccactcttaacaatttcttatttatccctaagatatttctatgtatatagacaagcacgtatagctacaagtcactatatgtgctttgtaaaaaayatatacaaatgggatcatatcataacaataatgtaaccgtgttattttgcagcttgcttttttcacttaatgtcagatcttggacctctttttcatgtcgatatctgtagatctactcattttttttgtagtgactataaaaagttcattgtaaagatgtgactgaccagttccttttttaatggagatttatgctgcttaggttttgctaaggcaaacagttctaagatgaacaactatgtttgtaaattaattgc

SEQ ID NO: 529181 - DNA, 544 bp, Homo sapiens
gtccttgggggacaggggccttccagtcaaggccagaaagggaccgaaacgctgccagaggctgttgaaaagcagggggttgctggtgctggagcaggatttggaggacgcagtttcaggaagggaggaaggaaggaatagggagagagggacaggcccagagaaccaggcctctcccaggaagcttccggccactctggagcagcagccttgcccagctagaccagcagagggcgccaggtacctgtcatctgagcccacggcctgcccactgcccaggcccggcccagcccataagctgctggcacctgctctcacccctgagctgaatcagccctcgcctcatcctcagagtccacagggaggcagatgagagcacaggcgactgtgataggaggcaagaggagccaagtctcacagaagggacaggctaggtgctgcgggaactcagtcagatgggcactgaatccgggccggcttcctggaggaggcagctcgggatctgtggtccagttataatggwggtaggaagcagtgcatggcc

SEQ ID NO: 529182 - DNA, 513 bp, Homo sapiens
catgggacattttttggcagatgttcagagggagaaaaggaaaagctggcttgactcataggatcttgcatgtctgtttttctttcccatgaaaactygtagtttgaaggaacataaaggaagaaaatattctgctttcattaaaaaataacctgtgcttcctgcttctgtgcaaaataaacccttcataaagcagcagaagccatcttcatttacagttgtcactgaaggatgtttccaggctgggaagaatttttttcaaggcatttaaaaaccgtctgtactaataaaagaaaaacacgattttttcaggtcagaagacttcatcatacctggcgatggatatgtttttaattaaaacctgggcacaaaattgggttgactgtgaatcattgtgatgcctgatcactctcctgagacacccaccatcattggtactggttgcctgctcttgacaccggaggccactttgtgtacttagcagttagaaaggtgatgtgtgaggcccggcag

SEQ ID NO: 529183 - DNA, 563 bp, Homo sapiens
ggtgagcactgtccaccagcactgcagagccaggcagaggagtctgggttttgttttcttattagccctgggtactccgtttccagtgcttctctcttataggcctcagtgacattttttctttttttgagacagggtctcactctgtcacccaggctggagcacagtggcatgatcatggctyactgcagccccaaccttccaggctcaagcgatcctcctgcctcagcttcccaagtggctgggaccagaggcatgtgccactatgtctggctaatttttttaaaacattttttgtagagatgggggtttactatgttgcccaggctggtcttgaactcccaggctcaagtgatcctcccaccttagtttccaaagtgctgggattataggcgtcagctaccatgcctggcctccgtgatttgtaactgtagcctcattgttatttctccctccctttctctctctgtctctctctgtctgtcacatacacacacacacacccccgcccccaatatcttcaaagtgttgactacacgtaattctatttagtgaccaaaaac

SEQ ID NO: 529184 - DNA, 657 bp, Homo sapiens
tgcattgagaaaaatgcattaaggggtgagagaaatgtatgtgtaataatgcatttatatatacatatagatacgtgcatatatgtatataaacaaatattcacacatctatacatacrtgtatatatacatataataagtacacacgtatgtatatattatgtatatgtatagtttaaatgtaacctgggcatccataaattactatggaacttgttaaactatatatccaaataagcagaacatcacattttcagtatttatatattgcagtggaagtctttaaacatcaaatcttactggtgattaacaaatttaagtattatcttaacagaaaaggaatataaatttgctatctgtatgttttgttgccctttgggaaaattatactgtcaaccagtgttaaatagaaaaccttcaaatcagctataaattgacaacaaatagcaaagtctgaatgaatgtgttctgcctaacattaaaaaatgtcttgatcctaagtctcttccatttgacatctctagcccttaatgcctttttcggaagacaagctgttatgctgaatatgcaaagaggcaggaagaagcctctgaaggcacggtgaggcttagtcgacgccttccagattggtgtcagccacgttgcgcggctggggcc

SEQ ID NO: 529185 - DNA, 648 bp, Homo sapiens
gttggagcagtcaatttttgtaaggtagcttgagcaggaacaaaaaaaaaacaacataatacaaagagtggattggttaacatcaggttataagggttaaagcaggagggaattccttatcgtgccagctaacactggcctatttggggaatttgtctatcatctctcctgattttttggaaggtcagattaccaatttagtttcagtttggtgatgtggagcttcagcgtgagtgactccattttgattctgtctgttctattggggcctgatgcaggagctcagtccaaaacactggcctccatcaatttcacttcacaggaaattggacaactctttaaagataagaaagatggaataaagttccagatattgtgaagtwtggtaatttggtggcaagaagttgaaggattttttaatttatttcaatgtaaagtaaaaggcaaggttatctcctgtgaatgaggaagaggggttggtgggttgggtttaaagagaatcaagaagagatttaaatataaaagctgccaggaagaataggggaggaaaaatgattaaaagagcatgagactgtagatctattgagactggatagagaccaggaaggtaaaatgacccagatgcatggtatggggtgttctccagca

SEQ ID NO: 529186 - DNA, 604 bp, Homo sapiens
aatgaatgccttggtcctgaagcaggtatctgagcaagacaccacattatccattcagtgcaccctttgaactgctcagatccatttgctttgtataaaacagtcacaccacctgcttccttttggttggtctcttttccagtgaaatttacaaaaggaaagttggtggaatgaagtataatccccactgctgcacctgattgcagagttgcaactaatattcaatttttgaattctcattacttttggctggtacctccactagaccgggtggcttgcccataggggtgacccaggccctcattactgtgccatcgaagccctgctcactatgccctccttagggccaatgwtctgcactgttccttcactgtcaactttagacaggcgaacactaagagatgccccagtatatcacatggagcaaacctattctctccttccccattgtggaacagcagtcctgcctcccacagaacctggggttgtttgaaatgcagtcccaaagcatagctaggttctcacatctgtggaagccagcacttaacagtccacacttcaacctcttgctctgtgtctcacagcacgactattgatgtttcaa

SEQ ID NO: 529187 - DNA, 604 bp, Homo sapiens
aatgaatgccttggtcctgaagcaggtatctgagcaagacaccacattatccattcagtgcaccctttgaactgctcagatccatttgctttgtataaaacagtcacaccacctgcttccttttggttggtctcttttccagtgaaatttacaaaaggaaagttggtggaatgaagtataatccccactgctgcacctgattgcagagttgcaactaatattcaatttttgaattctcattacttttggctggtacctccactagaccgggtggcttgcccataggggtgacccaggccctcattactgtgccatcgaagccctgctcactatgccctccttagggccaatgakctgcactgttccttcactgtcaactttagacaggcgaacactaagagatgccccagtatatcacatggagcaaacctattctctccttccccattgtggaacagcagtcctgcctcccacagaacctggggttgtttgaaatgcagtcccaaagcatagctaggttctcacatctgtggaagccagcacttaacagtccacacttcaacctcttgctctgtgtctcacagcacgactattgatgtttcaa

SEQ ID NO: 529188 - DNA, 630 bp, Homo sapiens
tatgttgatggtagacagaaaaagagaaaacagatttgtatttttgcttaaatccttccctatgagacattaactagataaggaatatttgtataaagagtttgagattagcaatcaagagtcgtgggtttgtggttactgtcgttttttatgtctgacctcggacaaatcacttggccattctgggccccagtttctccatctattaaaaaaaagccttaactatgaagtacttgcagattttactttgcatattatctgttgctcaactttttaacaataacatgtagtttctaaacttctcaaaatccattctttacttgatagcaaactttaaacactcctgacgtataaacaggtcagaaacttaattctgtcctcccgcctgcarttcatggatcctaaatgtgaaagaaaacaattgtgtatgggtattttccctaattctaatcttccaatcccttgcttaaggaaactaaatcatagaacatagcagctttgtcctctgtgtcagcagagcattacaaagccctgaaagaatgttaaagcagttttaaagtcctatttttaggtgcaatattgtcaggaaataagctttcactgagagattttgagaaaaaagtacttgaa

SEQ ID NO: 529189 - DNA, 610 bp, Homo sapiens
tttggagaaggccacagggagccctttcctgaaccaacagtaccactgtgatttttggatggttctcataaccagtcaaatggattaatcacactgctagtcccttgggtaggatgtgatggcaaaggagtcatgaagccaagcttttttgwcaagaacatttgctcttgaatgcttcaagtaacttgctggtcattccaatgttcttgattatgtcaactgctttttgagtctgtacgttcagccatttatccaaattaagtaatgatccctgggggcttcgatggcaaggcattggcatgggaatcaatggtgccatctactgtccttttctttgatagaaacaacttcgggaataaactccttttctcccatcacacatttagcatctggtcttttaaagtataaatagttccacattttaaagtttttaaccagtcaaaggatggttagtagcactggcccctaagtgctagcaagatttttctgatatctccccagatggttatttgggaggtcagaacctgaggcccagaagtcagggaccataagggaaggaggtcaccataagggaaggaggttacaagtgtcaggcgctggcaccaggctt

SEQ ID NO: 529190 - DNA, 492 bp, Homo sapiens
tagtttttccattcctgaaaaactgaacctctttaaaaacaaaaacacctaatcgctttcagttcttcatggatgttccattttgatgttgagattgtgagtgccaggggctgggctggcatgtgtgtacccagcatctctacctgcccctgacmcagccttgagggtgagtcactggtgaaaggcttcctttcttctgagccagggcagagtctgttgtcacctgctgtcaccttggagtgcattgggttcggctgcctggtgcctgttctcacacctcacctcttgagacggtttggacagggtctggtatgtttcccctgaggcttttgctgagggatatgggagaatgtactcagcgtgacaagtctcaggaactgctggagctggcaattttgttgggaggagtaggctggccggctccctgcccagggcagaagcgggtgctggacggcctgaggctctatcagagctgtcttggcaggttcatgg

SEQ ID NO: 529191 - DNA, 497 bp, Homo sapiens
tgtcagtcaactggggttcacatgggaagttcaacctacttgccatcccagatctgatccaacctactatttgtattaagaggctgctgaacctggagraggaaagtgagttgcccaaagtcacgtagtaaacaacagaaccagacagtgtcatttcctttatatcatatccattcttgtaatggttacagcatttgccatgttactacccatctcataaacccttgttatctccattcatctccacaatgtgattccaccctccagatccaaattaatttcccaaaagcattgtggagctacagaaaaactggttaggtcatgttaatacaagtagagtatctagctgtagagaggtgatggtcacacttctttctgtgctgctcagggcacacctgggtattgtttccatttgggactccacatttcagaagtgcaaagaaagaaggatactcattatactcggataaaagcagtatgatgaggaggctcagaac

SEQ ID NO: 529192 - DNA, 497 bp, Homo sapiens
tgtcagtcaactggggttcacatgggaagttcaacctacttgccatcccagatctgatccaacctactatttgtattaagaggctgctgaacctggagaaggaaagtgagttgcccaaagtcacgtagtaaacaacagaaccagacagtgtcatttcctttatatcatatccattcttgtaatggttacagcatttgccatgttactacccatctcataaacccttgttatctccattcatctccacaatgtgattccaccctccagatccaaattaatttcccaaaagcattgtggagctacagaaaaactggttaggtcatgttaatacaagtagagtatctagctgtagagaggtgatggtcacacttctttctgtgctgctcagggcacacctgggtattgtttcyatttgggactccacatttcagaagtgcaaagaaagaaggatactcattatactcggataaaagcagtatgatgaggaggctcagaac

SEQ ID NO: 529193 - DNA, 606 bp, Homo sapiens
gggatggtagagagggaactgaagtgttagggttaggctctcaaaagcctattgttaactatccagaaattttgctagccaggtgcaaacctttagagagcttgacctcagcaatggtgggagcatttacaccccacaccctggaaactggcaattgctacacatcaaggcttttgcttttttttttttttttttttttttttaaatcttggctcactgcaacctccgcttctggggttcaagagatttttctccctcagcctctcaagtagctgggattacaggtgcccgccaccacacccggctaattttttaatttttagtagagacgggatttcactatgttggccaggctggaaggcttttgctcttcatttacttattcattgtcctagacgggtgttttattggcacatctctgatccaaaccagatactccaacaggtatctctgcatgctcacctgcctcctaacagtctcagatccacctccctgccctgtgggaattccttctccactctgtcccatstctaattcagccctagcttcctccatgaactgttcgtgaagcctccccacccccccatctcatttagtagttaccat

SEQ ID NO: 529194 - DNA, 476 bp, Homo sapiens
gctgcaagcatagtaataatcctattaatagttgtcatttatttgtctaatgatattaggcacttaaaatcatagcatgtgatttggatcagtaaatgagagcaatctataataataattaataattaggattataagttattaagtacattttctgtgccaggcattttatatacatgatcagcaattctcacagcaaccctgaatgatggatattattgtcctcatgtttagatgaggacattgagaccccaagaagtaaaagtaacttgcccacggctggtgaggggcagaggtagtatttgtgtttcactgtgtctctaaatagctggctgcaggggggcagaaagggagaagtaaggtgggctttgagacttttcacatggaaaccccaaaggtgttggagaaagggctctgggtggtccttcggctccccatcccaccatgtactyacttgtaacagccatcatgggcaa

SEQ ID NO: 529195 - DNA, 617 bp, Homo sapiens
ctgggacacaagcccccctgcaggcacaattcctctagctggagttacgtcctgttcattcagagacattgatgtccatccagaaataaaggggatgccagagagcagacagtgmctgtcctagccaggctgcctttcacactcttgttgctgttaccctgcctccgaggccagcacactgcctgacgacttcccatctcttagacctttggtttctttcatctctgtagttctgtggatgcactggtctctgatctaatttcagctcctgacaccacttttcttctcattcctctgggagtgaccagacatagccctgagattgcacaacttcaggggtaacttcccccagcattcaatgtgcagggcaggcctggcaggccatgacatagcatacagtgtgaatggtgcaccctggacatgggaaaccccacagtgttatgatcagtgtatttgcaagtggggcactctgtgaatcctgaagtgctagctagttgagaaatcttctacgttttcggcttcagctactgttttgatgtggtgaccatcttttcctctctccttcttgttgtatctctggggatgcagatcacagtattcactcctctgaccacagt

SEQ ID NO: 529196 - DNA, 654 bp, Homo sapiens
accattcaacataattggggaacataactctaaataatgatgtggcaaatacttttataagtagagcactcatttaatttatgatttgtaatttaagtagtagagtggaaagaacaatggcaggtacaagggaaggagacacggaaactcaaccacaactgcctttagttgagcactgactgyatgtgaatgcattgaacacaacacgtctatctcatttctcctttggcataggaatcacatcccattgtgcaaattaagatgctcaagtttaaagaggcaattaaattagtctcatcaagatcacacagctagtaggtggtggaggtggcacccatcctcaggctattggactccaaaccccatgtgaattagggttctctaaagggacagaactaataggatagatgtatatataagaggagtttattaaggagtattgactcacatgatcacaaggtgaggtcccacaataggccgtctgcaagctgaggagcaagggaaccagcaggagtcccaaagctgaagaacttggagtctgatgatgttcgaaggcaggaagcatccagcacaggagaaagatgtaggccagaagactaaatcagtctagtctttccacattcttctgcctgcttctattctggccatgctggc

SEQ ID NO: 529197 - DNA, 654 bp, Homo sapiens
accattcaacataattggggaacataactctaaataatgatgtggcaaatacttttataagtagagcactcatttaatttatgatttgtaatttaagtagtagagtggaaagaacaatggcaggtacaagggaaggagacacggaaactcaaccacaactgcctttagttgagcactgactgcatgtgaatgcattgaacacaacacgtctatctcatttctcctttggcataggaatcacatcccattgtgcaaattaagatgctcaagtttaaagaggcaattaaattagtctcatcaagatcacacagctagtaggtggtggaggtggcacccatcctcaggctmttggactccaaaccccatgtgaattagggttctctaaagggacagaactaataggatagatgtatatataagaggagtttattaaggagtattgactcacatgatcacaaggtgaggtcccacaataggccgtctgcaagctgaggagcaagggaaccagcaggagtcccaaagctgaagaacttggagtctgatgatgttcgaaggcaggaagcatccagcacaggagaaagatgtaggccagaagactaaatcagtctagtctttccacattcttctgcctgcttctattctggccatgctggc

SEQ ID NO: 529198 - DNA, 604 bp, Homo sapiens
ctatgtattttctccttttatttgaacatgagtttagatagccctaaaacatccaggtctaagagaagagaaaaactcagaaaaaaacagaamggcaaactataataagaaagcatgatatgggagcagaaggtgcctggcctcacactgtcctctctgttcagcatcttctccctcaaccactgctgagcagtagctttctcattgcaatcatttctacaccacctttaaaaaagaaataagtattttttactgtatgtctgaaaaacaatctgattatgcaattttaaccttcacaatgactcaaggacatcctattaacgtgggtgtaaatattagggctcttagatattaaaagggctttaggggactttgcttgcccctctagatgtcattgggttgacagagaacatcagttttcatcagctattatagacctgctaatcatgtgtgagaagaagcaagttgctttgatgagagattaaaatggagggagacaggtttgggaatgggaggcctctttctcgagtttgtatcagaggatgtaggagatggagactgactgtcatgtgacgggaaacacagtgagcccctctccatgcag

SEQ ID NO: 529199 - DNA, 538 bp, Homo sapiens
atctgcagaagtgtgaggccagccccacggcccacagaggygcccagcagagctgtctcaggtcagagttgattagacccaacctccccgccaagggatccctggtcacagtcacacaattaccttttagcccgggggtcccaggcattccatcaattcctttaaatccagggcttcctggatggccttgctcccctgtgaagccagcatctcctctgtcaccagagagacctttcatgcccacagggccaggagcgcctgtgtccccagggtcccctctatcaccaggcagacctgtcaggaagaggagcaaatcaaacagggtggacaaacacacacaggggaaatttctcttctgcttttacggcattgagtgttcagtaagaaaagctccttagaaggaaagtggaaaaccaccatgttggggtgagtttccaaagtgtggccggagcgggaccctggggctggcctttctggagaggtctgtatctggaggttgaggctgtgctggcggggtgccagccagcatggctttcca

SEQ ID NO: 529200 - DNA, 609 bp, Homo sapiens
  misc_feature (1)...(609): n = A,T,C or G
ggtgtttccgtggccagagggattctgaaatgtgtagggacaaggacccattccagggaagccaagtgtcggccgcattcaccacccgtcccctgcagtctcacacctgcccgaggaggcagcccagcagtcgggggccccgagctggggaggaacgcaggcrgctgcagccccgagggagccctgcgcttgtttctaagaataggtggcttccgggatctggagttcggtttttctaaatacacctcagcccggagactcggaggcaggcaatggggccaagtaggcagccttgggagtgacatcacggtttcctcttttaaggcgattctgaggctttcttctncccaggcccctcccgcccagctgctgcagctgctcagagccacctcggcctccacctctgcggagctctgacctgccctggcttggctgtgcctgggtttgggacagttcggtgtgtgttaaagaagcagagctttaactgcgttgagggtgtgttttccctcctgcctgctcttcttacctgcagtccaaacacgtgtgcctcggttgtttctaaagcttccccgtggactgcatgactgaaaatggactaaatgatgatta

SEQ ID NO: 529201 - DNA, 609 bp, Homo sapiens
  misc_feature (1)...(609): n = A,T,C or G
ggtgtttccgtggccagagggattctgaaatgtgtagggacaaggacccattccagggaagccaagtgtcggccgcattcaccacccgtcccctgcagtctcacacctgcccgaggaggcagcccagcagtcgggggccccgagctggggaggaacgcaggcggctgcagccccgagggagccctgcgcttgtttctaagaataggtggcttccgggatctggagttcggtttttctaaatacacctcagcccggagactcggaggcaggcaatggggccaagtaggcagccttgggagtgacatcacggtttcctcttttaaggcgattctgaggctttcttctncccaggcccctcccgcccagctgctgcagctgctcrgagccacctcggcctccacctctgcggagctctgacctgccctggcttggctgtgcctgggtttgggacagttcggtgtgtgttaaagaagcagagctttaactgcgttgagggtgtgttttccctcctgcctgctcttcttacctgcagtccaaacacgtgtgcctcggttgtttctaaagcttccccgtggactgcatgactgaaaatggactaaatgatgatta

SEQ ID NO: 529202 - DNA, 609 bp, Homo sapiens
  misc_feature (1)...(609): n = A,T,C or G
ggtgtttccgtggccagagggattctgaaatgtgtagggacaaggacccattccagggaagccaagtgtcggccgcattcaccacccgtcccctgcagtctcacacctgcccgaggaggcagcccagcagtcgggggccccgagctggggaggaacgcaggcggctgcagccccgagggagccctgcgcttgtttctaagaataggtggcttccgggatctggagttcggtttttctaaatacacctcagcccggagactcggaggcaggcaatggggccaagtaggcagccttgggagtgacatcacggtttcctcttttaaggcgattctgaggctttcttctncccaggcccctcccgcccagctgctgcagctgctcagagccacctcggcctccacctctgcggagctctgacctgccctggcttggctgtgcctgggtttgggacagttcggtgtgtgttaaagaagcagagctttaactgcgttgagggtgtgttttccctcctgyctgctcttcttacctgcagtccaaacacgtgtgcctcggttgtttctaaagcttccccgtggactgcatgactgaaaatggactaaatgatgatta

SEQ ID NO: 529203 - DNA, 631 bp, Homo sapiens
aacagattttttttttttttttgagacagggtctcactctatcacctaggctggagtgcaatggcatgatcacggctcactgcagccttgacctcccgggctcaggtgattctcccacctcagccacccaagtagctgggactgcaggtattcaccaccacacccagctagttttttgtatttttagtagagacagggttttaccatgttgcccaggctggtcttgagctcctaggctcaagtaatctgcctttctcagcctcccaaagccctgagattacaggtgtgaaccaccatgcccagcttgagcagaattaatcttgctgaattcacttgctggttcttgaatttggactaaatttttggccacttattaagtgccttttttctttgataaactttggttaatgtctgagttataggaattatactcaattttttgatatcaaataccatatacagatatatatataaaatatatattttaattctkccactgctgctgataaagattaagaccctcatctcaatttttttacttgtaagattttcactgtctataataattgagaagttgttttgtacagttacagtttgtttcaatgaacaaaatgtttctagtattattttg

SEQ ID NO: 529204 - DNA, 617 bp, Homo sapiens
agcaccttggacagagccaccaacctaccctgcccaccaggctctgcactgttgacaaagaaagaaacttttatcttgtttgaggttgtcttagttcattctcactgccataacaaaacaccataaactgggtaacttattaacaatagatatttatttcttacagttctggaggcaggaggtctaagatcaaggtgccagcactgtctggtgtgggcttgcttcctatatacagtgacttctacctgtgtcctcacctcacatggtggcaggggacaacaagttccccctgggtatcttttataaggacacaaattccattcatgagcaatccaccttcctgatttaaytacctccaaaaggacccacctctcaatactatcacattgggcattcaattttaacatctggatttggaggaacataaccatccatagcagaccacgtgttttgtgtgaatttgttacagcagcttattctctctactaccttatgggctgggcttgtgttaataacaacgcacttatatttgggttagttatttattttaaaagaataaagaacttaagtacataacatatacctatggctttacccacagtctgccactctcattt

SEQ ID NO: 529205 - DNA, 508 bp, Homo sapiens
ccatattacatttactttttaattgtcaagtgtgctttccaaatagacatcagtgggcaactttattgcaaatagaacaagtttaatttgatttttcaagagaaaagcactttatatttggtgtacttyagaaaaagaagaaagataccagatgcccttccatagtggcttccctatgggactccatatggcctgaaactctcactcttcaactcattgttgggacatacatacatagccactgaatatttttactgttttttttttataaaagtaacgcatgcccattgtagaaaatttggaaaacacatcacagagaagaagagtccgtttacctctcatgaccaactttctctctgtcccacccctaattttaccctcagccacagtgcaagacttccttttgcccaaacactgttctatcccttgtgaaaatgttaaccatcaggtcaagcaaatcttgcctgactacttgagaaatgacaggagtaaccagtactgctcctag

SEQ ID NO: 529206 - DNA, 569 bp, Homo sapiens
aatatgtagtgtatggttatctgcagataaacatcaccaaaataactttgcaatataagttgttcaatttaaataacaatagtattagtaattaagtatgatagttcaaaatagcatggaaatgtttacagtgtttttcacagaattattctattttaatgttgaaaaattattcaaaattatcttctcattttgcatgtgaggacactgaatgatgaagtgacttgcctgaaggactctrcacactcagaacaagagccaaggtctcttctctcctggtccattgtatgtgtctgtatgtgttttacacaacatcacacacctcttaggtttttttataagtcttactggaaaattattgaagtgatcaactcaacacctacctggggccactataactcccttaaggatcacataaagatgaataagcgaatgagagaaactgacagcattcctgtcctgctgacctcagataccccagagcataactagtgacatcatctgtctcttcactccctaacagttcattgcttatattcttgacgtgaacctacacccccatcaggttg

SEQ ID NO: 529207 - DNA, 550 bp, Homo sapiens
agaaataagagactgtcagagagaattaggtaaatgtttcaagaagggacatttggtcagggccttgaagactgggtagagaggaggtgggaaatggagggtctgccacctgaaggggcagcagacacaaaactctcctcatggatatgatgagaaagataacttctgtacaagctccatccagctcagaatgctgcttgaagagcagatggaatgacccacatgacagaattttgtaaaatgctgtataaatatgagagattgtaattatgctacgagtagttaaaaattgctttaaaagaaaattcgtagtaggctaaatgctagaggagcctaaaacccaactgcctaacttcagcctaaatgcggcagcattagcattaccaggctttacacagggctctaacccttctaaccatgagtggagtagggagacaccacacacagaacagaggccgagttttcttatgtgtacctgtgctcccagagtgtgactcacacatgtgggatatgaagctgcccacagatctscatgcatccacaggcagca

SEQ ID NO: 529208 - DNA, 605 bp, Homo sapiens
caagttcatctcaacaccaatgagagttcatctcaaccccattctcaaacaccaatgctctattacagcaagaatgattttttactctcccctcaaattacctgcgtgggctacactttaagttttcaaaatcttcttgtctgccacgtccttctatttgtttcacattcaagttctagcagacttcaaggctcagatgcactctgacttcttacagaagctctaacaacccctaccatatcaatccaagttaccaatttttctgtacaaaaaagggccttgtagtcatcacttgttttattgttaagtgaagatgacacctaacaactagttatttataacatatcttttctttgagaaggatttataggaacttcctacatctacgtttttacagttcacaatgcayttcaacgtacgttctctcatttaatccttacgaaaaccctgccagagaggcaggacagatactaatcttgtttgaagatgagaaggctgcagctcagagcaaacaggactcaaagagtttagaaaataacctcaggttaggaaacttggaatgtcagggttttgagctcagggctttggacttcttttgccatgtt

SEQ ID NO: 529209 - DNA, 483 bp, Homo sapiens
caggcaaataactattgcagcctctttccttcctaaactctcttgtgggtgatacatgctgaaaaaaacatttatgctttacttaacattttctacttaagagaaacaatctgaatgtctaaatttgggtctggaaaataaacacaaatttcccttccataattcctcttccttccttccttgctaatcaaaccaagataatggttctgccctagaaattgcccaatgactaacaggtactattgtttttcatatgagaaaccacacttaargagacaccccttcttatttgtgaaaaatattgcaaaattaaggaggatcaagagagtcaagcaagggtgaagttcactcacattcttgacagggaaatcaagagttttccattgttcccctgttatctagaaaaacacagaattcttaaagttgaatcatgcaaaagttcctttgactacttatatttttcaagactatactatatttgaa

SEQ ID NO: 529210 - DNA, 487 bp, Homo sapiens
acgtctccgatctgcagcgacggttcaggcgaccctcgcgacttgtgaccacactctccttcacgtccccttgacagtagaagtaagggtgactccaaatgcctttttctttctggcatgcgccccactcccccgccatcccaggggagccttccaagttgcccagctgccaaggcggtagctgtggcagttgcagggaccggggagcgcgccgtgcggaggcaggaagaggaggaggaggagaaaaaacgctgcactggctatcaattttgaggagagcgaccgctgccgctgccgtggaaggaaacgctgccaaccgcaacagaaatgccactctcggatacctaagtgagcatgtgtgcgactctgcgcacgcctagttgcgcagctcaatgacatcgggcttcytagcaagttatccagtttccgggttttgagtgtacccatcaggctccgtaggggcctgtctgggactgaacagcagtaa

SEQ ID NO: 529211 - DNA, 487 bp, Homo sapiens
acgtctccgatctgcagcgacggttcaggcgaccctcgcgacttgtgaccacactctccttcacgtccccttgacagtagaagtaagggtgactccaaatgcctttttctttctggcatgcgccccactcccccgccatcccaggggagccttccaagttgcccagctgccaaggcggtagctgtggcagttgcagggaccggggagcgcgccgtgcggaggcaggaagaggaggaggaggagaaaaaacgctgcactggctatcaattttgaggagagcgaccgctgccgctgccgtggaaggaaacgctgccaaccgcaacagaaatgccactctcggatacctaagtgagcatgtgtgcgactctgcgcacgcctagttgcgcagctcaatgacatcgggcttcttmgcaagttatccagtttccgggttttgagtgtacccatcaggctccgtaggggcctgtctgggactgaacagcagtaa

SEQ ID NO: 529212 - DNA, 536 bp, Homo sapiens
cacagtaccactttctgtgatgatctgcacagtgcagtagcgtagccactagccacatttggctcttgaaatgtgcctggtgtaatggggagattgacttttttatttaattcagttttgattaacttggatctaaatatgaatcactgcatgtgttagtgtattatatgtgtaacaacagcttttttatcttaatagaaaaagaatagaaaatacacaaattttggtcctgttctaaattggataaagccatttagataatgggggtggggatccatttgtttagtcagagaacataagcaagagtaaaacaagtgagattatgaaactggaatgactaaagtgtgaattactacattaaatttaacaactaggagttttgttgttaatttgggggaataaatattttccaaattgtgatgttattcaccaaaaaatatatatcgtcttcacatatgtgctgaaagataactgtgagaagcaataccrtcatgtttgtatgatttgtgatttcagcttcagaagctgcttaccat

SEQ ID NO: 529213 - DNA, 495 bp, Homo sapiens
caaaccatcacattctttctctttgtgccattttagaattgagaataccgtccttcttactgtggttatatttttacttttgtatataaacttgtagcagaaaataagattcagtagcttaaaggggccaggcactgtggctcatgcccrtaatcccagtggtttagaaggctgaggggaaggatcacttgaggcctggagtttgaaatcaacctgggcaacatagcaagactctgttccttcaaaaaaaatttttaaaaattagctgagcatggaggtgcatgcctataatcctagcaatgattataccattacactccagcctggatgatagagtgacaccctgtctcaaaagaaaaaaaaaatagtttaaagggcataaaaatgtattaatgccaaagaaatggattctgtgataccttctcctatcatactcacttttactcttcagtcatgtgtgtgggggtgagttttctactgaagaaagcatgtaaa

SEQ ID NO: 529214 - DNA, 337 bp, Homo sapiens
taggaaatatttgaaatacatgaaatttgcacataggagctttgcacgcaagagcaaccaatgtaaagacctgcggcagtgacgrgtgtggggtattggtggaaacgggagctctgtgccagaagagagtggctccaaaggtgtgggtgagggaggagttagataaataggcaggagagtatcctgcgttgtgggtccatcggcatgtgggggaggtggccactcaccagcagcaccaggacctgtggacgctccaggtgcttgactcctgctgttgaatatggcacgatgcttgaagccacagcctgcacaccttcatcagccgtggaaccaaatt

SEQ ID NO: 529215 - DNA, 337 bp, Homo sapiens
taggaaatatttgaaatacatgaaatttgcacataggagctttgcacgcaagagcaaccaatgtaaagacctgcggcagtgacgggtgtggggtattggtggaaacgggagctctgtgccagaagagagtggctccaaaggtgtgggtgagggaggagttagataaataggcaggagagtatcctgygttgtgggtccatcggcatgtgggggaggtggccactcaccagcagcaccaggacctgtggacgctccaggtgcttgactcctgctgttgaatatggcacgatgcttgaagccacagcctgcacaccttcatcagccgtggaaccaaatt

SEQ ID NO: 529216 - DNA, 638 bp, Homo sapiens
tccctgcttaaaatcccccattgctcctcatgagtagcaggtggaagcccaactccacagcaaggacctcagtgcccttctgtctgtgaccctggtcatctatttctgacccatctcccctgtgttactctgcagttcctaaagacccttctcccatctctcatgagatgtcatcctctatgcctctgccacttatttcctctgcctggaatgctctttccctttcttgtctaactaacccctcctgatcctttaaagtttagcttaaaagttagtggatccttgccagagggatagtcttaaataaaagataccaagggatccatttaggaaagaaaccacttgagggtacgactgtaagttgtctgacaagctcaattttttattgtaaaataatactttaaagttttgtaaactatatgtttgttacagaaaacttaagacaaacaaaaaaagtataacagaggaaaaacaacacccacratccctcattcaacaaaaaatgcagctatcattatggactgtttatctaccatcatctttgcgctcaaactgatgatgcactttaagaccacaacatttctgaacagtattaaagactcttggtacccatcatttttggtggctgcataatgttt

SEQ ID NO: 529217 - DNA, 575 bp, Homo sapiens
ctcccttttgcaaggagaccttaatcctaagggttgtagagggatgaagaaccatcttctgtagctttttcagtctcaacaggggtgatgatattcctgcctaactattagagtatcttgttttcagggtatggaggagttcagtcagaaggtgccagtatgrtgagggtcattcacaactctgaatcctgataaaacgtgatatctggaagattaataagtgtccaatttaagaaagcattgagtaagcttatctctaattcctatacaaagagtacaacagcaatatatcccacaatagcaaagcaatataactaaaaatattccaagtaaaccaaatacgaagactttccaggaactgggcaattgttggaaccaagctgctagggggttgactgacagtacatcaatggcagagacatgcctgtctaaagctttcatagcctgggtaatattatgtgaatagtctggaacatatacacaaaattcagttttgactaaagcacaagctcccccttgagctgctgttaaaatgtccaaagccgtttggttctgtaaggccacctacctaattt

SEQ ID NO: 529218 - DNA, 536 bp, Homo sapiens
ctggaggttgaatatatctaatccaactatacgtgcaggaactgggaagggtatgtttgaggacccactgaatcactgtgagatgaactcagatcaaaattatatttatcacctggcctctataagcctccattttgactggtgagcacagtagcaattggggatgcccaatgagcagcatctgctcagagtcagtgtcccagtaatcctcccaaagcgtgcttattttctttcccttttggtgaaagctagaaagaggactgayagtatatcctgtgacatcaccaaagaatatttcaagggaatccgatgttccctccatttaaaaaactctgggtctgtgtactggaacaagaatgggaattggtgaggggctgtgtctctcattgtaatgacccaagtccggccagtgtttatcagattagtcagttatactagtcaagaaggaccttagtctatctatttcagtcctcaggacatcaaaataaattggccaccaccatagatgcccacaggccaagctattctaataataa

SEQ ID NO: 529219 - DNA, 586 bp, Homo sapiens
ctggcatttaaatactgccatttggcctctgccaatctgatactctaattcccactgaaattgaaattaagggactcattttagggacagcttcctccctccgtcatgatcccaatctatagaaagtaaccactacagaattttccaaggatgctggtggaacttaccaatagatatctcaaacatagrgaggggctagtcaagtgggtcacacatggtagaccttctccaacactcctaactccattaagtctctggagtctctcctccacattattccaaagagtttctaacatatatctgagtttaatataggctgccactgagtccctgtttcagttgaacaactgaaaaaccagtaaagctgctcctcactgtttagctatgtcctcaaaataagaatttttggtaatatataagaactatatcaataatttcagttcattctaaagaaatgtttctccctgccttaacaccctgagaacctattcctacacattcctgcaaatgaaaattagccaaatcctatcattctaactgcctcctcccaggatagattttgtatttgttctcctggggcatgctg

SEQ ID NO: 529220 - DNA, 586 bp, Homo sapiens
ctggcatttaaatactgccatttggcctctgccaatctgatactctaattcccactgaaattgaaattaagggactcattttagggacagcttcctccctccgtcatgatcccaatctatagaaagtaaccactacagaattttccaaggatgctggtggaacttaccaatagatatctcaaacatagagaggggctagtcaagtgggtcacacatggtagaccttctccaacactcctaactccattaagtctctggagtctctcctccacattattccaaagagtttctaacatatatctgagtttaatataggctgccactgagtccctgwttcagttgaacaactgaaaaaccagtaaagctgctcctcactgtttagctatgtcctcaaaataagaatttttggtaatatataagaactatatcaataatttcagttcattctaaagaaatgtttctccctgccttaacaccctgagaacctattcctacacattcctgcaaatgaaaattagccaaatcctatcattctaactgcctcctcccaggatagattttgtatttgttctcctggggcatgctg

SEQ ID NO: 529221 - DNA, 586 bp, Homo sapiens
ctggcatttaaatactgccatttggcctctgccaatctgatactctaattcccactgaaattgaaattaagggactcattttagggacagcttcctccctccgtcatgatcccaatctatagaaagtaaccactacagaattttccaaggatgctggtggaacttaccaatagatatctcaaacatagagaggggctagtcaagtgggtcacacatggtagaccttctccaacactcctaactccattaagtctctggagtctctcctccacattattccaaagagtttctaacatatatctgagtttaatataggctgccactgagtccctgtttcagttgaacaactgaaaaaccagtaaagctgctcctcactgtttagctatgtcctcaaaataagaatttttggtaatatataagaactatatcaataatttcagttcattctaaagaaatgtttctccctgccttaacacsctgagaacctattcctacacattcctgcaaatgaaaattagccaaatcctatcattctaactgcctcctcccaggatagattttgtatttgttctcctggggcatgctg

SEQ ID NO: 529222 - DNA, 537 bp, Homo sapiens
ctgcctctgcatataacttggtggcagtttcctctacttcgcttcatgagtctataatttaattgcctactttccatcttgcagaaaattattgaaatattttatctgctgaggccccttcatattcttcccattgttgtgggtttagwcatttttgctaatctttgactatttttttaacagagccttgagagggatagaaaataaatagttgagcttacactaccatcttgagtcagaaggctgttcaatattcctaaaaaagaaaacgtttttgaagtcatccttgaaccaatgaggattcaatctgagctttgtcactaatacaaccttgaacaagttacttaatctttctgggtttcttcttcaaatgtaaaatggggatataacctctaacttgattaatatttggaaattaaatttaaaaatgcatacaaagtatttagcacagtgtatacttcatggaattgcttaataaatgtgatttccctgcatttttcttggcatccccttaaaagttcattcatcctcagattt

SEQ ID NO: 529223 - DNA, 537 bp, Homo sapiens
ctgcctctgcatataacttggtggcagtttcctctacttcgcttcatgagtctataatttaattgcctactttccatcttgcagaaaattattgaaatattttatctgctgaggccccttcatattcttcccattgttgtgggtttagtcatttttgctaatctttgactatttttttaacagagccttgagagggatagaaaataaatagttgagcttacactaccatcttgagtcagaaggctgttcaatattcctaaaaaagaaaacgtttttgaagtcatcyttgaaccaatgaggattcaatctgagctttgtcactaatacaaccttgaacaagttacttaatctttctgggtttcttcttcaaatgtaaaatggggatataacctctaacttgattaatatttggaaattaaatttaaaaatgcatacaaagtatttagcacagtgtatacttcatggaattgcttaataaatgtgatttccctgcatttttcttggcatccccttaaaagttcattcatcctcagattt

SEQ ID NO: 529224 - DNA, 601 bp, Homo sapiens
aaaacatctctcccaatacatgcacaagaaatgacacatgcagagttcatggacaatttcctacgaggcaagggaagtaaggcctgccctctaaatctgccttagcgtgtgagcccacagctttctgctgtgggttctgacatttctcatcacaccaagcgtcagtcctctcagacccagatctgaaagcgggggctgaaacctgtgttactgccttagctgtcatctccatggctgtgtgggatcccagagccacagccttccgtcctggcactgtgttgatttttaaggccttttctttgagatttgggacattattgtttcctctttcccagctcccccctatcaagctagagccctgaccattaggcactctggccagacccaggctctcccttgggctgggycacacgctgtggttggggagtttcttctgcaacgaaggcctccctggacccctgactcaccacgcatgtggccaaccacacctctgagggcctggagcccagaccctccagtggcagggggtattgggtccatccacggagagaacccctgatggaagaggcgcctccctcctgggccatccacactgacaatg

SEQ ID NO: 529225 - DNA, 592 bp, Homo sapiens
gtgctgtgtcttcagcaccctccttggctcaaagagactgtcatctggcagccgaaaccctgtgatccccgtgtggctgtgtcctgccaactgatggtgacagcaggaaatgcacctgccctgccccctcgcccggatactttctattctgctatsaaaaacagagtaaaatttgagaggaaagggaaagtacccccgtagccacaaggaaatgaagtggaatcacgctgacattttcaataacacctggatctggttttataaagttgacctaacaagaaaatggtcctattgttatcaataaacataaccctgaaatctaagcgctttaaaaatccatgcaacagggcaggtgtggtggcttatgcctgtagtcacagcactttgggaggccaaggcgagaggatcgtttgagttcaggggctcgagaccagcctaggcaatatagtgagaccctgtgtctacaaaacaaaaactaattaaattcatgcaacaaattctaatatttttcaaaggctgttctgtgaaataaaaactcacctaaaaatcatctatgtatctaagaacatgtagggaacaaagacgataaaac

SEQ ID NO: 529226 - DNA, 612 bp, Homo sapiens
acaggcggcaggttcagagtcagacccaggacactggcggaatttcctttgtttactggtatagcttcttgttaatacataaatagctttctcctctgaaaacctacagatgcaacagaagagacctaccaactgacaatcgccttygaggtgacagacaatagaggccacggctaaggatgcaggtgtggaaataaacagatataaaaacacaggacttgaaaagaaggaagcaaaggcaaagaggaaatttaagactgaaatggacagaaatgaccttgatttagggtagtgcattgctaaaagacggggccctgtccatcccttccttactccaagacattgagataaagaatatttccttcccaatcagacagaaatagttgaagtgcaatcgtcctttctccagtggttgctatttcaggaaatgggttctaccaaaacaacttttcacccatttcgtggcttccagagcacacatggcgtatgttctttcccttgaatgcagagctgattaaaactcatttatccaggtcaatgttgcattcgtgtgtgtgtgtgtgtgtgtgcacatgtgtgtgcctgtgtgtgcaggtctgcgtctacacagat

SEQ ID NO: 529227 - DNA, 597 bp, Homo sapiens
tattgtaaacacgccagagggccatttaccatccgcggaatctgtacaagtcgggctctaccccttcctcatctactgagtgctgacacttgatccagcatgttaaaaacaggtacattcttgagagatccaggggttgctgtggtgcccttcatactcacttcatattctgggagtggggctttaaaacacatacacacacacacacacacacacacacacaygctcccgaagtttgcctctgcattcaatctgcctgacgtcagtctcacacaggatgacataccaccactgcaaataaccaacttaactacaggttttgattcttttttctgcactaagggtttgatcccaagtgtgtatttttctgagtttttttttttccgcctaaacagcccacattgaaagagatgacacttcagaagaataagaacatgcagccgcttgtaacaaattgacaacctgcaaaacttatgcttatttacatctgcactttttaatagtacacagcaatgaaatggaacctactatcagaatttatagaattttttcacaatgtttccaaagtatttaccccagagtttctccgctacagga

SEQ ID NO: 529228 - DNA, 500 bp, Homo sapiens
aagagtctcatttcgatgtcacctgtctgtcccaggtgtagatagctataggtacaagtgtggacctttatcattgtctcccctttccccatgcagcccttcctccagtttctctaacagcaacctgtgtacttctccttcatagactcttccagctgtgaytgtgtgtaataatttgtttaaaagccacctcctcagctaaaccgtaggcccgaggagggctggaatgacatttaccactgtgtccgcaggttgagcacactatgcaggacctataatcagtagttaattcatatttattgaatgaatatagaatgatgggagcccccaaagcaggctatatcattcaggtcaggacctgaccaactgtgctgccattgctctcactgtctaactgctgtttctgggctgtgtttcacatgtcactccagttgcattgctagggctccaggatgacatacttctttgattcttatcacatactcctttgctttcccagg

SEQ ID NO: 529229 - DNA, 451 bp, Homo sapiens
atgcacttcaaattaagtttggagtaatatgcgttagatygaacattttgttttatgaaatgagactattcccgtggctagagagccagaaaaggcttgagacacactgagagtttatccaggtcccgggaaaaaactagcccaggacccagggggaacagggtccggttccctggggacagcggcatgtggagtccagtgtcttcctatactgggagcatttatctatttataaggtttgatttcctaatttagggatagacatttttctttttgataatggaagcttgcattcattgtacactttactgcatgccaagaactgtgctaaacatttaaatgtacactttctaatttcattctcaagcaaacctaggaggcacaaccatctactgtacagacaaggcatctcaggcagttattcagttacttgcacagataaagagtggtg

SEQ ID NO: 529230 - DNA, 519 bp, Homo sapiens
tcaaattgtttaaagccgaacttgcttcttcttcagagaaatggtcaagttcatgcttactgggcaggactgtgagaggatgaaataggagaaacratgtgtgagacacacagtaggtattcaatcaatgctaggtgtttccctggttccctgaagactgtgtgtcgctttggtaaaaactctggatttggagtcagaaaacctggatttggggtttgatagtctcagtgtgtacaaatcacatgccctctttaagcctcagttttcttgtctgtgtagtggtattatcactgttaggatcaagtaggataatatatgcaagggctgctttggaagcataaaagactgtatccatcagaatgtgggggtgccttctctaatttacactcagctgtaatgaacttctgccactgcacccccataccagcccctccactgcacgttgaaaacaggcagtggatatggatgggatatgctttctcagatggttcacattcatttatctttatttctcagcct

SEQ ID NO: 529231 - DNA, 528 bp, Homo sapiens
gcaccattgaggatactctgcacccatggctggtgggaggtgaataagatcatgtctaaggcaggctggactctgaaaaagtcagggggttctgctgacctcagggagccagactggcagtcagcttgactgggtagaggaaggaagaaaactgagctgatccaagggcagccccagagtgaaggtgaatgatgtggatatcatccaggcaacctccaaagggctccctgacgctcccctgattccttgttccatcatcaaacatccgtctgggtcaggctttgcccagcaggtagagctggaggcaacacattcccagccactgaattgaccacactcatgttcagaggttctctgcctcaggagctttcagagagagtgaygcccgtcccctatccaccatgaatctgacgagacgggcagggggctcgggatggaagtcagtccataaacaaaagatggtggccagatgccaccataagggttgcacttgtggtgctgtgggatgcacagaggattataagatgg

SEQ ID NO: 529232 - DNA, 396 bp, Homo sapiens
tgccacctccagcgtcagcattggcccagaaatacaaccattttatattttcagaagcttgacttcagtctagccaaaatgaattaagctcacctggtttcactatgcatgtggatgcatgtgtacacaaaatgtgatcatgtgagttttccttccagcagcagtgagctgcagagaccggtcttctaaaacaaaaggcatgggcagcagggctgtggaaacgggctgcctagaaatgctgtgctcacacatgtgactttgaatcccagatgatagtttgccaagctaatgtgattaatgtgcccttgtaggtgacgtttcctgctatttcctgttctccagtaaaagcygatcacaccctgccttacagcctccagcagggtgggggagttgaaa

SEQ ID NO: 529233 - DNA, 530 bp, Homo sapiens
attcccgcatggaagtactgcgtgaggccagtccctacaaccattttcacaagttaagtctcctcaactctttgcaccacaagttaatgttaaagtgagtatactggctggcagctaatgtaaagttatgagtcacctttgagcagcataaatgctggtgttcttcattgtcattatatgtcatctgttggccataatgctggtataggaaatccattcaagaagagagaacatgaagaatgatgtcagaaagatattcctggaacccatgcatcctcatatagcaataataaatctagagagtcattgtgtggcttccagagtcactttgtatcttccaaagctgtcaagtgtcttattgtgtcctttccgtagtatacgaggcctgtctcaattgggccctrgtgtgcttttctagtctcattccaagacactcacctaatcaagattattgacatgaattatgtaccaataatcttggtacataccaaccacagagtatgtaccaacaacatagtaaaaagctgtga

SEQ ID NO: 529234 - DNA, 589 bp, Homo sapiens
tctgagccaccctgggacccatcctaccgattcctcttgcttcttaaattcattcaggttgctttttctgtcacttgctaccaaaataaataaaataaaataaagccttatagaaaatggtaacttgcaggaaaggcaggttgggaagatagatagattagatagatagatagatagatagatagatagayagatagatagatagaagagagaaagagagagatgatagctcaatcaatagctagacaatggatatatactattatatgaagatatttatatctgtctctctatatgtttaggtagctatagatgtatttagggaagtagcattgtttgaaagcagaggcaaatgactcagaaaacggaaaggctgatcatataaggaaagaggatggatgatggagcttccagggaaagtgggatgagatgggattgcaagctcaggtggagggggtagtccctctaagacagaaagcaagaacagaagcagtttaatatggtttggctgtgtccccacccaaatctcatcttgaactgtagttcccataatccccatgtgtcatgggagggacctggtgggaggtaa

SEQ ID NO: 529235 - DNA, 589 bp, Homo sapiens
tctgagccaccctgggacccatcctaccgattcctcttgcttcttaaattcattcaggttgctttttctgtcacttgctaccaaaataaataaaataaaataaagccttatagaaaatggtaacttgcaggaaaggcaggttgggaagatagatagattagatagatagatagatagatagatagatagatagatagatagatagaagagagaaagagagagatgatagctcaatcaatagctagacaatggatatatactattatatgaagatatttatatctgtctctctatatgtttaggtagctatagatgtatttagggaagtagcattgtttgaaagcagaggcaaatgactcagaaaacggaaaggctgatcatataaggaaagaggatggaygatggagcttccagggaaagtgggatgagatgggattgcaagctcaggtggagggggtagtccctctaagacagaaagcaagaacagaagcagtttaatatggtttggctgtgtccccacccaaatctcatcttgaactgtagttcccataatccccatgtgtcatgggagggacctggtgggaggtaa

SEQ ID NO: 529236 - DNA, 639 bp, Homo sapiens
ctgtcatcataatctagtatccagtggtgagattgtggatagcctagtgggaaacaaaaaacagagtggatatgagaaagaggagtagaaagaagttatctgttaggtccaccttccatccctactcctaacaccactacttttgtcctgcagtttctgggctcaagactacggaaagaaactcaagaaaaaaaaaagagagaagagaaaccaagttgtagaggaagggaagctgaagaactactccctcctttccttgccagcaatgggaaaatgaaagacaaatggggtagagagcatgagaagtagagatctctccttcaccctctttgcactctccaggaacctcaggccatatttccaattcccaacttccctctctggatcggagcagtggagtctatgctcagccactgggagatgggggattcccactcatctgctaagaagggggctattggaaggaggaaggggaaagtccaggccccagttgcctggagccattattgcgcctggtacactgtgggtgaaatcatctttgatgggtccttttggacccattgcacttatcacaaaattgctaatgaacagctcatttttaagttgtgtgtatggtsgtgatggtggggtgcctctgtg

SEQ ID NO: 529237 - DNA, 647 bp, Homo sapiens
aaaagcgggactggctttatttataaattctgtgtcctgggctctccaagcactaacaatgggctaagagactagaacttmaggcaagctcaacctcgttcaacaagtctgatggtatcggtgcttgtataaggatattgagtgccaggaagagaagttgagagaggaaatataatgctaagtaagattggatctctgctttccagaagtttatcattgagtttaggggaaaaatgaaattaatgacataaggagtaaatacactaaacaggagctcagagtctggaagaaatcattttctcagaaaggtaagcaaagtctttgtggaaattggttgagcctaaagccactgacttaactgctaagaatcacttctcctagtagtagtttctgttgtgtgttttcttggcggggggttgggaggcaggggttgtttttgttttgtaaccttatttgtgtcttttcttatttgtatactttatactgtcaggcattttactgcggtgcgttgtgcttatgccctacttagagttaattactattagcatgaggacccaatatatgcctggcaaaatggtttatgaataaaactcatctaatcctcacaacaatcttactaagcagatcctgctactacccccacaaaa

SEQ ID NO: 529238 - DNA, 566 bp, Homo sapiens
ctttccactgaaatgcattattagggcactctgtgtatgtagatcttcactttgaatgtattaaaataaatggaaatgcttgtttcagcttgaggatcatgtctggaacttactttgcaaaatgcactctccacacagctcactggtcagaaaatgattaccctactccggaggactaataataataatttaattctcacagcagccctctctggtactattattctttccatttttcagccaggaggagagacgatgtagtggaggtcagagctcaggctctgaagccagaccgcctgagtatgaatcccagctgtgccacttactagctgtgtgatgytctaaaaactatacatgtggggcttgttgtcctttgatagccagtctgttataaaatttgctcaattgtgttaaaaaaattttttgaagttggtttgttctaagtaggatccaaataaggtctacaaattgcttttggttgttgtgtctcttaattctcattcaaactagagaagccccatatctcccctacgcctttgattgatagcagaaactgggtcatttgc

SEQ ID NO: 529239 - DNA, 405 bp, Homo sapiens
aaatgccaccaacaaaaagcaggagagacatggttcaaatgcgccatgactggacaggtgacactactcacgcctgtaatcccagcactttgggaggccaaggygggcagatcacctgaggtcaggggttccagaccagcctggccaacatggtgaaactccgtttatactaaaaatgcaaaaattagccaagtgtggtggtgcaccctgtaatcccaactactcaggaggctgaggcacaaaaatcacttgaactcgggaggtagaggttgcagtgagccgagatcacgccattacactccagcctgggtgacacaaagtgagactctgtctcaaggaaaaaaaaaaaaagtgccatgatttagagcaactggtaaaaattagcagaatgaactcaattggaaa

SEQ ID NO: 529240 - DNA, 405 bp, Homo sapiens
aaatgccaccaacaaaaagcaggagagacatggttcaaatgcgccatgactggacaggtgacactactcacgcctgtaatcccagcactttgggaggccaaggtgggcagatcacctgaggtcaggggttccagaccagcctggccaacatggtgaaactccgtttatactaaaaatgcaaaaattagccaagtgtggtggtgcaccctgtaatcccaactactcaggaggctgaggcacaaaaatcacttgaactcgggaggtagaggttgcagtgagccgagatcacgccattacactccagcctgggtgacacaaagtgagactctgtctcaaggaaaaaaaaaaaaagtgccatgatttagagcaactggtaaaaatkagcagaatgaactcaattggaaa

SEQ ID NO: 529241 - DNA, 585 bp, Homo sapiens
  misc_feature (1)...(585): n = A,T,C or G
cagtactcgtctctgacccctaggaattcttatgcatgggaaagtgtgagaaggcactgcttcagagggaagtacttggctgccgtttttttttttttaaatggagtctcactttgttgcccaggctagagtgcggttgcatgatctcggcttgctgcaacctccacttcctggattcaagcgattctcctgcctcagtctcctaagtagctgggattrcaagcacacgccaccatacctggctaatttttgtatttttagtagagatggggtttcaccatgttggccaggctggtctcgaactcctgacctcaagcgatctgcccaccttggcctcccaaagtgctgggattacaggagtgagccaccgcgtccagccttgctatttttttttttttttgtaacttctgggtttaatgcttttttctacctctttggtacctaattacaggatttcgaggttttgcttgagaatggaccagaagaggacattctgagcaaaagcaaaattttgccagcaaggagagattttttggagggtttttgctgtctttnttttttttttttttttttttttaaatcaag

SEQ ID NO: 529242 - DNA, 595 bp, Homo sapiens
aagacaaaataatcaaattttttaaaaccccaaatctacatattggtatatattaggcatatataaactataagggagaagtccygttcgacattgataacggccagggtgtggagtgggaggaccgtgtgttcttatttttcaagtaggaataaccaaaatgtagtaataggtagctttgttaagcatttactaaataactaggctaagcattttatgtgttttttctcagttattaatgtccagcaggttttcttcattgactttctcaatagcagtcacaccaaaggcaatgtgaccagggatagcaggggttagcaccactctgtaggagagctttcggacacagttgctcccaaatccaagaagtgaagttttcgttttttagaataaaaactctgaagcaataactctgatatttagtccaaacaaaccttccttcccacccttagcctgccaaccttcactctcaaactcagtcaaaatttttaatgtagaggtcgagacccaaaggacatcacactgactttgcagttaagagatggaagaagcataagctttagagtctgggattttatcctaactctgctcctgc

SEQ ID NO: 529243 - DNA, 614 bp, Homo sapiens
gacatttcttgctgtcttgatgggcttaggggtggaaatcctgctgatcaggccgaggtattccaggagagttggggcaggtttgaggatggggaggaagtgggggaggaaggagataatttattctgagaaggaagcaaagtgagaaaaatcctcccgtcagtagcttggtcggacttcctgggcagtagggctgaagatttatctctgaggagtggacatcrggccaggcacacggcaaagatactgctttaatgaagccccaattcgcttcctgaattttaaaagctaccactctggctcactgattcatggctccggtttctgtgcatgtaaatatacttgggggtgacagagggcgagaagagaagagagagtaaatgacattctgtatacagggacaactgtctatagcttacacactaaggagcaacggagcccagttgctcagaacccgccctaacctaacatgcctgaggggacaggggtggctttgctccgaggttttaggactttctgggagggaatcttttcattgaaaagtttttgagtgaggtgcatgcctagagtcccagcccaggcacggacccactcacagccacacacagacacga

SEQ ID NO: 529244 - DNA, 519 bp, Homo sapiens
gtaaaggtctggggtaaagaatatgatttgtagcactgtctatggctgcaaaaaataaaataaaaaaataaaaactagaataactgcaatttaaaataccctagaataggagatcggttacatagatgatgaacaaacaccatgttgttatctgaagtggtgatacacatgtgtgcacacacacaaatgatatgtctatccaagaaaaagggaggtgtaagatggaatttttctaagaaaataaaaaaagcaaacaagaaggtatgagtgtatacttagaaaaaagtttgaaagaatatatactaaaatgtccagcaattgcctttacatgaaaattatagatgttttatctatttatttattatttgaggcagggtctcactctgcygcccaggctaaagtgtgctggtgcaatcttggctcactgcaacctctgcctcccaggcttatttgatcctcccacctcagcctccagagtagctgggactacaggtgcgtgccaccatgcctggctaattt

SEQ ID NO: 529245 - DNA, 350 bp, Homo sapiens
gagcaagagttttatgcagaaggcaggtgaacaaagccaaatgcttaagaggtcaacgaggatgaggccaacagcagaagccatgctgcaaaagcatgaaggatgcacagatggagaacgcgygagatgatgcatggggaagtacttagtaaatcataaagaacatcacaacctcatcaattatgctaccgattcgcgataatgatggcatcacccaccaggtcccaagtcaggaacctggggtcattctagattctctcccatcttctccgccagatctgaattgacagcacaagttttcaactctgtttgctttcatgtgctttccccctgcttctgtcttgttaata

SEQ ID NO: 529246 - DNA, 519 bp, Homo sapiens
ctgaaatataatacagatgatcagaaaacaggacagagtgcatgagagaaagagtgttgttgagataactaaagtcaccatgatggatgatatgaacaaggaagaaacaagaggaaacaggttcaggtattttgaggaatacctatatataaaaagaaaaggaagaagaactaaagaaatacatggagggtcagatgtcaaagagatcaagggagcaagagttttatgcagaaggcaggtgaacaaagccaaatgcttaagaggtcaacgaggatgaggccaacagcagaagccatgctgcaaaagcatgaaggatgcacagatggagaacgcgtgagatgatgcatgggraagtacttagtaaatcataaagaacatcacaacctcatcaattatgctaccgattcgcgataatgatggcatcacccaccaggtcccaagtcaggaacctggggtcattctagattctctcccatcttctccgccagatctgaattgacagcacaagttttcaactct

SEQ ID NO: 529247 - DNA, 635 bp, Homo sapiens
gcccccaaccatgttaagaattgtgaattttatcctaagggcaaccaatatgctggaaagtttttaagaatgggagcaacataatcagatttatgtttttaaaagagaactgtggcctcaatgagaagaagccacagaagatgcaacaagtccagttgtggtacttactaatccaggggagaggtgagaggtgacgttttagattagggcagagaataggggtctggactagactggtagcagtaggctggagagaattgtatgaatcagatctattttcctttgtaaaaatttttttccttattatataaataatattttttattatagaagaccttgagaaaatatgagttcaaatataagtctccaattccatctcccagggaatagcattatttatttatgacataatcctattagtctctcttctgtgcatttatatttattttaaaaacaaaacttgaatattgacaattrtaattgtatatacattattttataacctatactttgaataacacccttttaagcttccaatataaattatttggcctatgttgacagttgaaatgccttggcatcaacttgtggatctcccaaggaagaactccttgccagtgtatatacataaacct

SEQ ID NO: 529248 - DNA, 625 bp, Homo sapiens
aagactgctgaatctcagctaatttttgttgtagaaataatttgcctatgataataatgagactatcctgagagagatgtttattttaagactgtttaaaactctcaggaataaatatccctggggctgattctgggcattaaaaacacaattcaaggtgagtttcatttctcttcctgcggccttcacattaggaacctctttttacaaagatgtggcagaattttgattttaaataattcataatgatactgttgacaattttgtatgtttgtcatgtgacataattattggttaaggaatgtagtggaccaaacttgctcatggctaatctgtggctgaaacttaaaatatggacaatatccaatttggaagaaagccttagctcggaaataatcagatataaccaggattagggagatgcygactgaagataagctgacttcagacagggtattcttgcgaagcatgtcctccacctaactggagcattaccttccttaggggtcagagtccaccaggttagagtgcttcttcctgccatggactgcacatgcacatggctaatcatcatgtatgatgacatgagtataggagaggaccctcagggcctccctgatggcca

SEQ ID NO: 529249 - DNA, 581 bp, Homo sapiens
ggagaaagcagtcaagagttccttggattcctcaggggacagatggtgctgaggggaaccacttggctgcaggaagccttaggttgcataagcagagcacagaatgcaggaatgaagaatctcagtaataggcagcaaaatgatgccacaaaagataagatacagccaagtttccctctgtcagcttcaacagtgggatgagggacatctcagggaaggccacaggacagtgtggtattctcctcctgcttttatgaggggagaaaatagccagcagggagtgtgaatttttttttttttttttgagacagggtctcattctgtcrcccagactggagtgcagtggtgtgacctcggctcactgtaacctctacttcccgggctcaagtgattttcctgcctcagcctcctgagtagctgggattacaggtatgcgccactaccacctggttaatttattttgtatttttagtagagacagggtttcaccatgttggccaggctggtctcgaactcctgacctcaaatgatccacctaccttggcctcccaaagtgctgggatcacaggtacgagccaccg

SEQ ID NO: 529250 - DNA, 576 bp, Homo sapiens
ctgttttgctatgaacagtactcttatcctcattctttaggttagaaacccttctttggtaaggaactaattctgtaagatttgggtggggctaacacatctttctcccaagccatagagaagggcatgtgacccacagtggtcagactctcctatacccctaaacatagtaattggttcaaggaaggacatgtgacccagcccacaccaataactgagtccttggatcttttctgccacaactaaactgggaggatttgagcctggggctgtcaaatctcatagtggccattttgtggaaaacctatccaagatacgaagataagaggctgctgacattatccctggacccaatacactcagttacaggagtyaacactttgtgtgtgtgcaaaataatctgatctgtcacttgcaaccccagcaaataaaaaaaaaaaattcccatgtaaaaagccaccgaaaaagcagtgatatatccagagtatctgccaagggggtccaaatgatgcaaccccaaaataaaagggagttaactctgaagaaattgaattgactggaatgaagaagaaaagc

SEQ ID NO: 529251 - DNA, 569 bp, Homo sapiens
catggcccaaagtgaagtctctatctcaacaattatttctggatggcctcttatgtgctaggcccttggcatccctgcttttgtggagcatgtgatcaaactgcagaaatatcagaagtagagctggctccagggacatctggatccaggaatataaatgctaccagatttcatggtttctgtctctctctctctctctctctctctctctcttactttctttctctctctctcaccctctctccccctttacatatctgtgtctctgcrtctttctgcacgctgatgttaatcaaaacgtctaagatgagctgaattagtgaagagtacacagccaaagcaacttggaattgaattctttcaagcttagtcattttcaagcttagtcattttaggagagagggaatttcttttcctcagcttcagtttaaaaactttctagaaaggaaacataagcccaccccttggacatatcattgcacctagggaagtgagtaacttaaagtgacccaggctggatcctgcctatttttgtggccagggatctggaatctcttagcagaaaaagc

SEQ ID NO: 529252 - DNA, 569 bp, Homo sapiens
catggcccaaagtgaagtctctatctcaacaattatttctggatggcctcttatgtgctaggcccttggcatccctgcttttgtggagcatgtgatcaaactgcagaaatatcagaagtagagctggctccagggacatctggatccaggaatataaatgctaccagatttcatggtttctgtctctctctctctctctctctctctctctcttactttctttctctctctctcaccctctctccccctttacatatctgtgtctctgcatctttctgcacgctgatgttaatcaaaacgtctaagatgagctgaattagtgaagagtacacagccaaagcaacttggaattgaattctttcaagcttagtcattttcaagcttagtcattttaggagagagggaatttcttttcctcagcttcagtttaaaaactttctagaaaggaawcataagcccaccccttggacatatcattgcacctagggaagtgagtaacttaaagtgacccaggctggatcctgcctatttttgtggccagggatctggaatctcttagcagaaaaagc

SEQ ID NO: 529253 - DNA, 482 bp, Homo sapiens
cagcccccgatgcccaaaccactttctcctttacatagcctgacaccctatcaggtaatctgaacttacaggagaaattgtcttcattttgttacacacttgtgtggttttctgtgtgctgggcgctctcctaaccactacatarctcctcgctcatttaatcctcagaacatcccagtgacacagcttgtgtcgttattcccactttacagatggggaacctgaggtgtagagaggctgagggactcagcactaggggctgggctggcatgcaggcccaggcagttcagctccagtgactgctcttagccatggttctgtactgaggataagtgtgggtccgtgctgggtttgaatgtcccatctggtcgcaggggctgctccagcacttccacttttccgctgtagagcaggggtgctactgggcctcagagagtgaacgtgtggattcagggagcgttcacagtggaacctggcaccca

SEQ ID NO: 529254 - DNA, 596 bp, Homo sapiens
atggtgcaccccatgcagcaggaccgtgcacccataaacacatggagcagatctccatacgactctgtggtggcctggctgtacgaaaggccrtgtcttcacgtttcctgaatcccatgctctgtggcctcttgcactgtccctgggcttgaccccagggcttgctctgactgatggaacagtggaaatgttaatgcacgcagaggcttagaaaagggcttacgcactttttccctcttgcttctctgtgaccgccacgagaacgtgcctaggccagcccatacctagcccaggccaacctgctgaacgataaaaggccacgtggcgcagagctgagctgtctaggcaagactccataagcgtaagagagcccagccaagagcagcaaagtcaccgggccgacccatagcaggccactgatggatgagcgagccctggcaagcccagaatcatgagaaataataaaaggtgattgctttaaggcactaagctttgggatggtttgttatgcagtaatagctaacaatcacaaagatagctgaaaaaagcaagacacaaaagagggtatatagtcactattgtgtgtaaaaaacaat

SEQ ID NO: 529255 - DNA, 596 bp, Homo sapiens
atggtgcaccccatgcagcaggaccgtgcacccataaacacatggagcagatctccatacgactctgtggtggcctggctgtacgaaaggccgtgtcttcacgtttcctgaatcccatgctctgtggcctcttgcactgtccctgggcttgaccccagggcttgctctgactgatggaacagtggaaatgttaatgcacgcagaggcttagaaaagggcttacgcactttttccctcttgcttctctgtgaccgccacgagaacgtgcctaggccagcccatacctagcccaggccaacctgctgaacgataaaaggccacgtggcgcagagctgagctgtctaggcaagactccataagcgtaagagagcccagccaagagcagcaaagtcaccgggcygacccatagcaggccactgatggatgagcgagccctggcaagcccagaatcatgagaaataataaaaggtgattgctttaaggcactaagctttgggatggtttgttatgcagtaatagctaacaatcacaaagatagctgaaaaaagcaagacacaaaagagggtatatagtcactattgtgtgtaaaaaacaat

SEQ ID NO: 529256 - DNA, 562 bp, Homo sapiens
cataataataattactttaaaagtaccaaatagataaaaatgatctctgggacaggtcttccatttatgtcattgaatctgaataatttgactcctacaaaatagtggcttgcccaaagttccaagatgtctccttacggcaagcactgcaaattggcaacacattagaatcccctggggcactttaaaaatataccaatgcctgggccaagccstggtcctggagccccagcatctgtgtttcttatttgtttgtttggacacgctcccgaatgataagccatgagattgataaacataaccatgtggtcccgagatactgatctagcccttggtccaaccaggtgggatgtggggtagcctgtgagcatattgtctgtttgctccagggtatagcacaagtcttatcatttcctataagtgccatgatgtaaaaatgtttgttgggtagcactgttctgacaaagtctatctctgtaaggagcaagaaagggttagcagcttcaagacagccggtgaactggtgaactggccctccagccttatgactatcaagggccaa

SEQ ID NO: 529257 - DNA, 642 bp, Homo sapiens
ctgaaatctgctgttctccatctcactggcattgatatttctcattgtatgaatctgacaaatggcttccggcagcacartatcacctatgttccatcttaatcttggagttggaggtgtaactgcacattcagaggtgagaggatactttatatgtgaaaagacattaggttgattgccctcaaaacaatctcaatacttccctcctccataaaggtgtggaattcgttccccttgggccaggaagtcaacgatgaaggcaatcaccgttcccacaaattctgtccccaatttcttaccctccctagtccttctgtcagtctcctagaattatcttctctaaaatctgggatttacagtcacctcaggacagatgtcactcggcacaccaggtagacaattaagatagttacccagacaatttagaaaggacaaaataatttttccttaattatctgtatgttacagttagtcctttcttttcaaatagctatgtgattgctataattctctttttaaaattgttttcctatcttgaacaagccttatgggtatagtagaagtttaataagatttagatagaattagtgcccacactaataaaatctaatcttataatccagtatttcggcattcagaaaa

SEQ ID NO: 529258 - DNA, 657 bp, Homo sapiens
tgtgcggttattgttcctatatcatgtataggaaaatgtgggcaccaagcggttaggccacttgccccaaacccagagggaataaacagtggagccaggatttagagagttaggtggagtctagtctcctaacccctctgccaaaccacctctgatatgggggttaacatgagtcaatccacacccacaccttgtatgtggaaagagcgtctttgaaggccatgccctgtggataagtggagacaccatagtttcaggctccaataagcacatacaacagtctatatggcacctgaagcaggtaggtgccttccttgtcttgtaaaaacccaaaggaaaatattctaatgcctcagaaccttctggctggctccaccattcagcaacgctgtcaggaagagtagctcttacacggccctcacaactttagatccactttatgataaactggctaatgattagaaagaagtgcatctcagaactatcggcctaacttagatgacacagacttctggatcaggtcttgcctttccctgacttttttgaagtctagrgtctcattttgcaatggttcagaattggaactggaccacctgcctgaggctgcttgggctgcccacacagcttgtaaaaactgtatgtaaacatgaaatgcag

SEQ ID NO: 529259 - DNA, 545 bp, Homo sapiens
tacagtaatgtggcaccttatctagagagtgaggccagtggaccaaccatagtgataaatttgacatttcaagaaaacgtgtttttgatgctaaatcagctcacttatttccttcaatgccctyctactttgatttttgcacacacaaaaatgtgattgaaaagtaaattgaacaggagaattattcacaatttttcccctaactaacctacagactttatttggatttcatcagttttttgactactgaccactttctattccagaatccaatagagaaaaccacattgcctttagtcattatcatcacagtctagtctgggacaatttctctgtgtcttccttgttttcataatcttgacaccttttgaatacactggtcaagtgttttgtagactgtcttttgatttgggttgatctgatattttctcatgattagactagctttatgaaatttctgggaagaataccccagagatggaagacccttttgttatagcatcatatcaggttggacctgtcatcagcatgacattagataatat

SEQ ID NO: 529260 - DNA, 577 bp, Homo sapiens
gaggggacaaatctttccagtgttcagaacaatgtagaaaaataaaatatctgaaaacatcactcttcataaaacattccgtatgtcagttacacagtgtagttctgagattgtctcacacttgtttttctgccacaaaaatacattatgtttaatctttgttttcttttttgtttgaactcagatattgtgatcacccagttattttcttttcacttaaattagaagcatagatgcaggggcttccatgacagttaaatggatgagttacaatatcagttagaaaaatatctggacattatgataaatgattttataattcctcagttaaaggaaataatttactctctgaacaatatctttattaccttagggcatttaaatttaggtgggaactaaggtaaatttccttactttccatggaaaagtaagcccactggtagttgtaaatttctatataaatgttaaacaataagagtcggctaaatggytagcaagtgttggaactttataatgcaatgaatttggcatatgaaaaaaaattctacaccccttggaagtgtgttttatgcttgtt

SEQ ID NO: 529261 - DNA, 656 bp, Homo sapiens
gaatacccagtgtaaacatttcttccttgattccctctatccttttacttttcatttcaaaaatgtaattatattatttctttgcttagactataatcaagctcagtttgtaaaagtcaaatactcttgttgtgggaggcaaagtaatatttttgtttattttatcagatatcagtgttatcctccaaatcagagttttggagtcacctttcttaagcttttatgagatataacaagttgcattattaaawgggttacctctctaaatatcagagttatgacacatcattttccatttttaaaaccatatgcatgtagatgctgtggttctccattgatatcagtatttgtggattaaaatgcattttttttaaaaataaaggaaatacatagaatctttgagagcaggatagtgtccataaatttttgtttcagattttaattttctctaatgatgtcaagaattttacacttcaagctttgctctccttgttttagtttgagcttataatttcttgtttattagggagaattctcaccatcacataaataaagaactattaaaaatacatgaaacagtcattacatgaataacattcataatgtctcttaaaatttctatgccatgaaagctgtattggttgcgtcttttgtaa

SEQ ID NO: 529262 - DNA, 651 bp, Homo sapiens
aataaacccaaatagatcacagtttggggaagtaagacatcttactattggagaaatattttaatatttgctttcttgatctctttcacgctaactacactatgaaatcctggagactaggattttatttttgtcacttcatttcgttgtgtagtccccagggcctgttctggggcctcataggcagggtagacacaatagacacagagtaaataatggttgaatgaatatcctatacaagccccataaatttacaagttccaccttctaaagtgattgctacacccacaaaattgcaacactttaaaaccccaagatataatcaatacaactttaaaaaaataaagtgtatttagaatatcttgtaataaaattagatgcaatgacmacagaaagcaagtaaaactgccactcctttgaaataataccaacttgtcattatttgcaaacacagccaacacctaatgactgctttgtgtaaacatatagtcaataagctgaaagggaagcattcatgtccataaatgtttgtctttgacaaatattttattcaactcctattcctaaaaataaaattctacttccactagaaaaacaaagaatgactaaatgcataaacaagacaaagaaaaccacatgagacctaaaatc

SEQ ID NO: 529263 - DNA, 635 bp, Homo sapiens
cctttcactgtgtgtcatgcagacccccttctcaaatgtgccttggcttctgcctctgtctatgtagcttttaaactcttgagcacaagcagcccaccctggggattacttacctctcctaccagcttttaatgttggctcatcttcttgactaaattaggccaccatggcaaacaaacacataattaaaaacccaggaaagacaactgcagttgcacttcttaaattgatttttgcaatgctggtgtatgcctccatgtgctcttccatttgatcattttatttctttatataaccttttgatagaagaaatttaaagatgggtggtgttgcaagctttatgtttttaaaacctatgtgttattttgtttcttactttctgtttctcaaataacaaaaattgtataatgggtcttaaaaagcacattcctcttccctaatatctgacctgacataccagtatacctttttaatcaaggtttcaaatgatcccgtttgaagtagtattagaaacaatggataaaattcctttgcctacaacactcaaycacaggacctcttttaaatggtatgtaatatgggtatttaaaaaaacttgcatgtgttatatgcacaatgcagttcagtatttgcta

SEQ ID NO: 529264 - DNA, 635 bp, Homo sapiens
cctttcactgtgtgtcatgcagacccccttctcaaatgtgccttggcttctgcctctgtctatgtagcttttaaactcttgagcacaagcagcccaccctggggattacttacctctcctaccagcttttaatgttggctcatcttcttgactaaattaggccaccatggcaaacaaacacataattaaaaacccaggaaagacaactgcagttgcacttcttaaattgatttttgcaatgctggtgtatgcctccatgtgctcttccatttgatcattttatttctttatataaccttttgatagaagaaatttaaagatgggtggtgttgcaagctttatgtttttaaaacctatgtgttattttgtttcttactttctgtttctcaaataacaaaaattgtataatgggtcttaaaaagcacattcctcttccctaatatctgacctgacataccagtatacctttttaatcaaggtttcaaatgatcccgtttgaagtagtattagaaacaatggataaaattcctttgcctacaacactcaaccacaggacctcttttaaatggtatgtaatatggstatttaaaaaaacttgcatgtgttatatgcacaatgcagttcagtatttgcta

SEQ ID NO: 529265 - DNA, 604 bp, Homo sapiens
tgtgtggaactgtgagtccactaaacctcattcctttatgaattacccactctcaggtatgtctttattagcagcatgagaacagactaatacaggtatcttcaatttagtgttaagtgaatgtaatagtcttccacagagccaatcaatcaggtcacttctataccttatgtagagaatttaatctttcctttatgttgaaggtttccaatctcataagatttcacaataaacttataaatatttagtaaccatgtcatgagcctaaatttgaagttcagacacgttccttcagatgtcagctccaccacttactaaatagaaattgtgtcagaaatctgataatctctgagtatatatgtaatcatccctagcataaggataatgatggaagataataatgccaaatgcatacacctgtggcgttaaatcaaatgacatcaataaaatattctaggggttagttcttgataatttaacatctctgtcactgttctttatatgcattatcttatcttgtcatcacaccacagatattatacaactactgttacctcagtttacatataakggtcctgtgatgcagctagatcgtagtatttgc

SEQ ID NO: 529266 - DNA, 596 bp, Homo sapiens
agactgcatgagatacattacaatatgccaattttcttcatggtgccaccatcagaatgtcatcaatatgatggaatgtttgaatctcattagaagwccacattggggttggtttttctgaaatattaaggaatttttactgaaagatatcctcataggaataaagagaatttactttctgtcatggaagaatggagtaatattcatctttttattgagaaattgggaaaaataaatgtattgacagtatgtgatgccacatttaatacctagttagtatatttcatttgattcccatggtagacaaagtaatgtcctcccagttgtgtcactgattaattattagaatgactccatatttcaccttatatgatgtgggggtttagccaaattaaagactttgatatatgaaaattatcttggtttatcctggattagatggtccaatctaatcatataatctaatccattctgcaatcaatgatccaatccagttgtggaattttaaaattggaaaccttttcccaaatatgataagtgctttaacaattaggatagtaacataagtgtaaagtttataggtaaaaaaacattag

SEQ ID NO: 529267 - DNA, 596 bp, Homo sapiens
agactgcatgagatacattacaatatgccaattttcttcatggtgccaccatcagaatgtcatcaatatgatggaatgtttgaatctcattagaagtccacattggggttggtttttctgaaatattaaggaatttttactgaaagatatcctcataggaataaagagaatttactttctgtcatggaagaatggagtaatattcatctttttattgagaaattgggaaaaataaatgtattgacagtatgtgatgccacatttaatacctagttagtatatttcatttgattcccatggtagacaaagtaatgtcctcccagttgtgtcactgattaattattagaatgactccatatttcaccttatatgatgtgggggtttagccaaattaaagactttgatatatgaaaattatcttggtttatcctggattagatggtccaatctaatcatataatctaatccattctgcaatcaatgatccaatccagttgtggaattttaaaattggaaascttttcccaaatatgataagtgctttaacaattaggatagtaacataagtgtaaagtttataggtaaaaaaacattag

SEQ ID NO: 529268 - DNA, 590 bp, Homo sapiens
actttgttctgttagtttttctatgctttataccatatgtttttccttttctattgtatcatttccatcagtataatgatatgggtggtatctcctattcattaaaataaagcaaagcaaaattctcctaaaycttagctccatattcctgcatagctatgtttttaatagtttattacaaaacaatttcttgaactgtttcattttgccaaaattccaaatcatttcataatataaactagccttgcactgatcaatccactgaaactctttttatcaatgtcgttaacaatctccatgttttaaaatctagcgaagcctctctgtcatttttactcacactattaggattttaatatatattttatcataccagtagttatgaactgccttcatttcttggccatcttacaatactttctccctgagttttgttgttttgcttttcatacataaatagtccaaccatttcaacacactttgcttgtttctcctttattacctaatatataaaggtacagatatttcaggactcagtactgtaagttcatgttttattttgctatgcttcccatggatgtaagtgtcac

SEQ ID NO: 529269 - DNA, 617 bp, Homo sapiens
ttgggtcctccaattcctagatcctctcaagaaaatcaatacaactctctctaaaaacgtgttagcaactttaacttycccaaatccttttacattttgagcagcaacattgctgctatttgctagtccaggaaaaactgagacatcccttgtgaattttcttcatccttctcatacatttaaataacttcttttttatatacactttctgtcattcttacttcagtgtacaaacttttatttcctgattgatacagtcataaaaaaaacccatttatgcctgaggttgcagttttttgaatgtttgtaatcagcctttggcgatgaccttgagcagtaggatataaataactcccacatgcttagcattccaataatggaacactaggcataatttggctgaacagggtcaggtctcactctgttgcccaagctggagtgcagtggcctgatctcagctcactgcagactcgacctttgggctgaagcaatcctcccacctcagcctcctgaatagctgagactatagacatgcatcaccatgcctggctaatttttgtgtgtttttttttgttttttttttttgtagagatgaggttttgccaatttgcccaggc

SEQ ID NO: 529270 - DNA, 657 bp, Homo sapiens
ttattccagtagccccacttcagcatagtaactttggactggttgggtcctccaattcctagatcctctcaagaaaatcaatacaactctctctaaaaacgtgttagcaactttaacttccccaaatccttttacattttgagcagcaacattgctgctatttgctagtccaggaaaaactgagacatcccttgtgaattttcttcatccttctcatacatttaaataacttcttttttatatacactttctgtcattcttacttcagtgtacaaacttttatttcctgattgatacagtcataaaaaaaacccatttatgcctgaggttgcagttttttgaatgtttgtaatcagcctttggcgatgaccttgagcagtaggatataaataactcccacatgcttagcattccaataatggaacactaggcataatttggctgaacagggtcaggtctcactctgttgcccaagctggagtgcagtggcctgatctcagctcactgcagactcgacytttgggctgaagcaatcctcccacctcagcctcctgaatagctgagactatagacatgcatcaccatgcctggctaatttttgtgtgtttttttttgttttttttttttgtagagatgaggttttgccaatttgcccag

SEQ ID NO: 529271 - DNA, 615 bp, Homo sapiens
cattctttgtacgttggtcccttgctgggggtggtggtaggatactccttcagtgcttagccagatggttgtawgttctgctttgacacttacttcctgcttgccttaagcctagtgattatctgaaagtgaaagcttaaggtcttggtgggtattttctgaccatgtgtcctgtcttgggcatgtatacagctttctaaattccttagtatgcacagacagttttgattgccctaatttcacaaatatattgtcttccttgattttcctcctagattttaggtgctctatttttggcctcaattttaatctcttgctccgagtaatcacagccttttcatttacctacaatgtttataagaaatgcccactgtttttccctcctgagttccacggtaggagaaacaaagacaaacatcttgccatgtagggaatggtaacaggaattaaaaaacaaacaaacaaacaaaaaaaacaaataagagatctttgttgccaagtatatttcaccacttagagaaggcattaaatgagtcacaattttcaggctaatgatgttggggagttataatcttagttgtgatgctggcgggagaagaacacacagttactgat

SEQ ID NO: 529272 - DNA, 615 bp, Homo sapiens
cattctttgtacgttggtcccttgctgggggtggtggtaggatactccttcagtgcttagccagatggttgtaagttctgctttgacacttacttcctgcttgccttaagcctagtgattatctgaaagtgaaagcttaaggtcttggtgggtattttctgaccatgtgtcctgtcttgggcatgtatacagctttctaaattccttagtatgcacagacagttttgattgccctaatttcacaaatatattgtcttccttgattttcctcctagattttaggtgctctatttttggcctcaattttaatctcttgctccgagtaatcacagccttttcatttacctacaatgtttataagaaatgcccactgtttttccctcctgagttccacggtaggagaaacaaagacaaacatcttgccatgtagggaatggtaacaggaattaaaaaacaaacaaacaaacaaaaaaaacaaataagagatctttgttgccaagtatatttcaccacttagagaaggcattaaatgagtcacaattttcaggctaatgatgttggggagttataatcttagttgtgatgctggygggagaagaacacacagttactgat

SEQ ID NO: 529273 - DNA, 415 bp, Homo sapiens
gcagttctgctgatctgggccaagctttgctgaccttggctgggctccctcaagcttctttggttggcaggcaggtgggatggggcaggccagttggtctaggatgagctcacttgcatgacagtggttgcttcgctgctggctggggcactgcgatataactgtgtcccaagtatttcacccarcaggttgtcctgggcttgttatcgcagctaggcaagggtctaagaaagagaaaggggatgagcaagacctcctgagagctaggttcggtggtagcacaccaattctgcctctttctggtggccaccagttctatgaaaagagcagagatgcaaggagggaataattgagtccacttttgcaatcagttgcactacaggaatcatgccttgagggagaatgctttgacttg

SEQ ID NO: 529274 - DNA, 573 bp, Homo sapiens
atttattaatactcactgtgtgccaggcactgtgttaggagccttccaagtacattctaacttaatcctcccaacaaccctacaaggtagagcacctctattaccttatgtatgactgagggaggtgacacacagtgaggttctatacctgccctcaaagccaggcagttaggtgccaggatctgcttcctgagccactggactacaccacctasagagcaagtgccacttatagtaagctttaaaatgggcttatggaaatcctacatccatccaatgtctcttctcaggtaagaggttgaagacccagctttgcatctcttttagaaagacaggagcttgtcctacacaagtctactctaggactccattatcatttcaattttgaaacctgtttataatctaataggacctcagtaaaacctcaggaatctgcttctggagttctttcctgttgatgtcattgcaaatattctcaaaggccttttgctggctgctctaggcctgggccctacatccaaaggggaggatgactgatccctggctgattccttgcaccaactttgactgaca

SEQ ID NO: 529275 - DNA, 466 bp, Homo sapiens
cctgttccccgacactccccagctcccttccagcagccgctctccaaaacagccactcctctgtccctactcctctgcccggtgtagaaccagtgccccgtgcacgctcctggtgtagagccagtaccccgtgcatgctcctggtgtagagccagtgccccgtgcatgctcctggaggaggcctgtgcagcgcagggctgctcttgaggaaccccgaaccctcacgcctcacccctcacccatggggccagccctgcttcctgcctccctaaacaccctccttcaacatttgcagggaaaaaggcaggacagttcaayagcgcagctctgatgtcaggatgattccatcacgggtaaacttaaaaatgaagtgagccaggcagacgtcccctactccatcccagacatttacttcaacctagacccagggtggagctggggagggtgggagtcaggactgggagca

SEQ ID NO: 529276 - DNA, 627 bp, Homo sapiens
gaagaagattacatcccttcatgacagcatttgctgcctggcattattgttgatttgtgtgtgtgtcactaccagactggagaccgtgtcttactgaatttctatgcccagcccttagcccggttcttgggacacacacgagtctgatgcctccccaccatgaacaagccactctgaaaactccatagaaccttgcttctcaaagtgtgatctgtsaaccagcagcagcagcagcatcactggggaagaggcttgcaaatgcagaaggtaggcccaccccaagaactactgagcagaatctgtcaaggtaaaaagttcagactattctggaggtagcaggaggtcttggacatcatggaatagatgtgccaaatcgaggaggttgggaaagggagaggcaggtgggtaccagaaatgcaggtgagaggggatgagggcctcaaccagggagctgaggatgatgagaagtggcatgcagggagagctggagtgaccttgcagagccagaaactgattgatggaagaagggaaggagaagcgggaagaaagtcaagggtgattgaggctccgaatactgttgggctggggtagagaagacgtgagcaccaggggaaggcaggctggtca

SEQ ID NO: 529277 - DNA, 624 bp, Homo sapiens
ctgcccctcatcctttagatccacaggcacgaaatttgatttttcttccatggcaacctgggcacagaactcagcatctcttcgaggtccccctagtaaattccatccacacacagcaaagagagtaggaaatatttacrgaagatttagggaagtcagaggaaggagtggcctcagactccccaaaggcatgtccagcccccagaggcctttcttggttgcaccaaggtgagggggaacagggagcatcttgggctctctcactgccagacttttgcccccactggaaacaatgccttgtgtactgatgctcctctcacggggaaaaaattcaagtctaaattggatggagcccaggtctggcctcctgaggatgttctgaggacacagaaggccctgcagtggtccagggcccctggcctgaggggtcacccgtggcaatggcagatttatcctgtgaccttctgagagggatacgaaggtgatgcactaatttgccatccacattggtagaacatttgttgatctttattgagcttctaatatggatctcaggagaccctccaaaagtgttccagagttccccagggcaaatcaggagagtcacacggatggatggaagtg

SEQ ID NO: 529278 - DNA, 632 bp, Homo sapiens
atagaaccagagcgtggggttatcaacaagtttgcctactaccctgcaagtgctgtgaaaagccctatatttaatgcattaccactttgtagatattctggggagttctatttataggccagatgatacaggcgattcaataaaatatgcctctcaagtgacatcagaaccatgaaatgcaattgttaagtacttggaaagacagagtctgtaaccatgtcatttaaatgtcctaagaattttcagcactgtaatacacatattaatattttaaatgaacttttagtctagtcaatgcaaaatagtcatctcataaatcttttagcattgtaatactttttcattttaatcattttaatgtccctaaaattctgtcctrcacatttatttttatttatgaaccttaaaaatacactgaaaatgcttgtttatagttgaccaccttactccccatgaccagttcatttaggttagtgtgcacatgttctactttcttctttaggaacctactaccataaaaacacatgtcagatgcccttattctgctaaacaccataaacatgtaacagttctagaattaaggctctgggtctgaactaattatggatgctttcctatagaattaaactcag

SEQ ID NO: 529279 - DNA, 621 bp, Homo sapiens
tggaatccccagagaacttttgcatatttgtaccaggaaacagtcatacaaatattcttagcaacagaatatggaaacaacaacccaaatgtccattgatagtagaatcaagacatacatgggggaatactcatagaagggaatactacacagcaatgaaaagaattgaaatacagtttgagacttcccacggataaatcatgcacaggcacaaggaggaatgaaaagaagcaagcctccagttgtacatagtatacggtttcatttacataaagatacaaaacacaactttaaatacattacttaaggatgcaacccacaggtggcaaaacagatgttagactcatggagagagagaggatgagggtatgcttagaaaaatatggcgtgatcgtggatggagcaaaaaagagagtctgaggtaargtacaattttctgcttttgaacctgggtggtgcttacataggtgttcacttggttctgcttctttaaaatgttcttatgttttatatacattgtgatgtatatattatggttagtgtctcaataaatttaaaaatgaagcaataaaccaaaacattaacaacactctctatgagccatagaattaaaaataattt

SEQ ID NO: 529280 - DNA, 357 bp, Homo sapiens
attatcaattctgtcttctttttctgcaaggaaaatgaggaagctagaagtaaaagacatgctgttgcagggctgtggttgaattatagttcccactgcaagtttaagtccacccaacatgtgcccactaagagcaggatgttatcatcataaacaacaagagaaatctactatacgtatcctatagagccttgtttacagagcctgtggaagctataatttagaattttggacatttttaagaagtgaaatctctactttggawcttttggcatgaaacataaaatataacagctcacaagaagatacgccttcactgagcttctctctttggcaagccctgaaaaagggcatttt

SEQ ID NO: 529281 - DNA, 597 bp, Homo sapiens
ccctagccccacattatctttctcctttgcctttaaactcacttaataacttcagtaaacaagcaaggtctccctctgctagaatgtaagctcctccagggtagagattcatggctcttttgttcatatctgtatccccatgaccccaaacaatgcctgatatgtactatgtgctcaatgatcatttgttgaagaaatgtgtgaacagggccaggcatggkggctcacgcctgtaatcctagcactttgggaggccgaggtgggcggatcacctgaggtcaggagtttgagaccaccctggccaacatggtgaaaccctgtctctgctaaaaatataagaattagccaggcatggtagcagccacttgttatcccagctactggggaggctgaggcaggagaatcacttgagcccaggaggcaaaggttgcagtgagcagggatcgagccactacactccagcctaggcaacagagccagacttctcaaaaaaaaaaaaaaaaatgtgtgaacaatctttccagtttaattccctttgtcacgaatgttgcatactgacctgaatgatagaaaattcataagaatctgaaagatgag

SEQ ID NO: 529282 - DNA, 597 bp, Homo sapiens
ccctagccccacattatctttctcctttgcctttaaactcacttaataacttcagtaaacaagcaaggtctccctctgctagaatgtaagctcctccagggtagagattcatggctcttttgttcatatctgtatccccatgaccccaaacaatgcctgatatgtactatgtgctcaatgatcatttgttgaagaaatgtgtgaacagggccaggcatggtggctcacgcctgtaatcctagcactttgggaggccgaggtgggcggatcacctgaggtcaggagtttgagaccaccctggccaacatggtgaaaccctgtctctgctaaaaatataagaattagccaggcatggtagcagccacttgttatcccagctactggggaggctgaggcaggagaatcacttgagcccaggaggcaaaggttgcagtgagcagggatcgagccactacactccagcctrggcaacagagccagacttctcaaaaaaaaaaaaaaaaatgtgtgaacaatctttccagtttaattccctttgtcacgaatgttgcatactgacctgaatgatagaaaattcataagaatctgaaagatgag

SEQ ID NO: 529283 - DNA, 534 bp, Homo sapiens
tggtctctctccttggcttgtaaatgtccatcttctcatggtgtctttatatagtcttaccttctgtgtgtgtgtctgtgtcctaacctcctcttctcaaaaggacaccagtcattggattagggcccaccccaatgacctcatttaatctagttacctctttaaagacccaatcttcaaataatgtcaggtacaaggagataggacttcaatatatgaatttgggggtggcaattcagcccattccaggtgcttatcaagtaagaacatagactgaaatagaacaggcaaaagatttaaccaggaatgcaagtgctctgcagtgctccttagaaatagaagcagcttcttggcaaagtggagaaaaccatcacagcaaacataatgaagctcgatgaggacaaaaatgctcaatgggagawccaagctgcttaagcagtaaatagaatatggtggaagaacacgatggggatgggtaggaatggtccttgtagttataaatgactataagaaaatcacgtgcccgtattgcag

SEQ ID NO: 529284 - DNA, 614 bp, Homo sapiens
ttggcctggtctatacaccttttaagactagatgcagtcagttatgatagatgcatttgtttttcttcagagaaatacatgtgcattggtattgatttttggtatttttayacttaatagtaaactgtgggaggccattacttcagataacagaggctttaagaattagacagctcagatgactctaaattctatttgtaagcagtttccagttaaggagataggtctggcagtgtgcccactcagcacagacctatttgacttgtctctctttcaatggtgtggttcagagcatatagtcaggaagtataacttatgttcaaacaatgcatgggagctggacatctattgccaaaaacaagctgcctggggcagaaatgaaaaaagcatcgtaagtgctatggaacaacccactgtaggcttttaattgtctgcgatttacataagcaactctacaaaatgggagatacacccaattaaatgacagtaaatttactttgctgcagaatgcaataatttacatcttggtttccccgcattgcattaattactgatttggtagcagataaaaaagcatctgggtgaaatttaacctacatatattcaaattaact

SEQ ID NO: 529285 - DNA, 614 bp, Homo sapiens
ttggcctggtctatacaccttttaagactagatgcagtcagttatgatagatgcatttgtttttcttcagagaaatacatgtgcattggtattgatttttggtatttttacacttaatagtaaactgtgggaggccattacttcagataacagargctttaagaattagacagctcagatgactctaaattctatttgtaagcagtttccagttaaggagataggtctggcagtgtgcccactcagcacagacctatttgacttgtctctctttcaatggtgtggttcagagcatatagtcaggaagtataacttatgttcaaacaatgcatgggagctggacatctattgccaaaaacaagctgcctggggcagaaatgaaaaaagcatcgtaagtgctatggaacaacccactgtaggcttttaattgtctgcgatttacataagcaactctacaaaatgggagatacacccaattaaatgacagtaaatttactttgctgcagaatgcaataatttacatcttggtttccccgcattgcattaattactgatttggtagcagataaaaaagcatctgggtgaaatttaacctacatatattcaaattaact

SEQ ID NO: 529286 - DNA, 555 bp, Homo sapiens
tgattcctttattcaattttacaaatcattccttgtgtataacttttgctagtaaagcaaaataaatttctacctatccatccaaaatattcctgtatcacaaaggttaaggaagggataagcataaatgttccactctcccccttgatggaggagggtggagggagaaaaacaaaacaaaacagagcagaaactaagatgccttgagaaggctctcacgacgttttattgactgagrgccatcacagacaatgccttctccacttatttatttggaccctttgcttaaggagaataaaataaactcttggtatatttccatttttagggttaaattagattttctgtaacaacatacaaatatatgcaattcacagtcatcaaagatgatacctgttggtggtggcgggatggaacagactttaagcttaaagctgtgtgtagactgctcttgaccatgtagtatttccagaagatcttatcaagtaagaggctttgcataattctgtaactgtgtgtttagagcttcccgaggaacaaccacagactgagaga

SEQ ID NO: 529287 - DNA, 509 bp, Homo sapiens
gaggccatgcaggcagttactctctggcttcatttctgaattgctgcctttgattcgctgtttcgtgagagctcctgaatttcctaggatgttgctttgcttatgctctctagtttcagatcactggaaaaaggacrcttagtatcccccaaattcaatttcatactgacttagcccgcagagtttctgtgaaacttaaatgatcttaagctggtgaggtgtcctttcaattgcaaaacatcagagacatggaaaaaaattggagtattcaatcaataatttgattattcaataatttcaatagttttgatggctgagtatgtcatatgtcagcacttttcatgctacccaaagtaaatcaataaggtaatagtcacacttagctaaatagtgttgagctctaaccatgtgctatgcactatgctaagaactttacctgaatgagttcagatacttttcacgccaccctgtgagataggtaatatacaaatctcagtgtcacagatggg

SEQ ID NO: 529288 - DNA, 509 bp, Homo sapiens
gaggccatgcaggcagttactctctggcttcatttctgaattgctgcctttgattcgctgtttcgtgagagctcctgaatttcctaggatgttgctttgcttatgctctctagtttcagatcactggaaaaaggacgcttagtatcccccaaattcaatttcatactgacttagcccgcagagtttctgtgaaacttaaatgatcttaagctggtgaggtgtcctttcaattgcaraacatcagagacatggaaaaaaattggagtattcaatcaataatttgattattcaataatttcaatagttttgatggctgagtatgtcatatgtcagcacttttcatgctacccaaagtaaatcaataaggtaatagtcacacttagctaaatagtgttgagctctaaccatgtgctatgcactatgctaagaactttacctgaatgagttcagatacttttcacgccaccctgtgagataggtaatatacaaatctcagtgtcacagatggg

SEQ ID NO: 529289 - DNA, 526 bp, Homo sapiens
gtgtttatacaagatgtggttctgcaacttacctttctttttttttttttaataaaaatctgacttcagtaatccatgtctaggttaccaaatatatagagagactagtgattttgccactcagtaaacaattatattttaagaaaatggattgtgtccgggtaaaatgtttttctgaacccagagctaaaatatttagggaaataacacatcatacatggtattgtacaatgttsagctactgttttctccagtaaatccatcacagcaccaggaggaatcaaatacagcatgttatttttgcacggtagagccaggcaattctggcagctaatcggtcatctaaagtaagtgactacttaataaacacaatctttgcccactagtagctttcagttcaaacagaaattaaagacagatggctgtgtatgggaatgtgcaacctctaagatgattggatatacatcctgcaggtaagccactggatggagaaacaagttattatttacactgaagagggaagcac

SEQ ID NO: 529290 - DNA, 590 bp, Homo sapiens
tcatgaatcttattctagagttcagctattctttccacgtctgcttctctctgggtccgtccatatctgccattccagatctctttctatctcatatccatactctcaacaacagagattctgagtaacagaccaccttggaggcccctggaagacctttaatatgtctctcttagatcaggtactccaaacagttatggttataagggttgcaagctgtagagcagagttctcagcagtgaccagagacacggcaagtattacaatggcttgtcaagttcaaacaccttccttctgtctggagaaatccctcatgtgttcacaatgtgtccccaagcagccacgacagtcctcaccttcctcactttgtggcatttactctctttccctgctacctggatgttcactctgtggctccctggtcactgcatagacagactccactttccttatacagatggtgaccctgtgctcctgcctttgcctgcctggccatggctcctggaggcagcccgtaacttcactggtgttagcctgcaagcatacttgtgtcagaatgcaaggycctcatctgactcataactggcttt

SEQ ID NO: 529291 - DNA, 615 bp, Homo sapiens
ctggggaaacgggaggccacatggtattggtttaaagaccaaactcacttcctgagaagtgggcagagccacagccttagtgagctttggaatatgctaacttggctaggctagactacrtttcccagaattctttctcctgtgtttccagttaggaagagctagagggctattctctcatgagagatggagggaggcatggcagggacagccattttgcagcacatggacaggctttgctgatctgctgactcacctcgttgacatgaagctgtggttgggcctgtcgctgccctcccttccctctggaccttcctacagcttctctgacccctggggtgggtgatgacttgttcagcaacatgacacagggcctcaacttctgcaggataccctcatcatcaaggtgagagggaaaaaaaaggatgagtttcagtctggcctagaacccgtggggttctaggttgctctcatcagctctccttgcctgcctgctcatggacttcaggctcaaacattagtcaaggaaacagccttggggaggctgcttagccagctcctataattgtgtttcaaatgaattatatatacatatccatcttcttctctgcttgg

SEQ ID NO: 529292 - DNA, 462 bp, Homo sapiens
gattacaggcgtgtgttaatttttgtatttttttttagtagagatggggtttcaccatgttggccaggctggtctcaaactcctgacctcaggtgatctgcccaccttggcctcccaaagtgctgggattacaggcatgagccaccgtggccagcctaatatcattatatttctaagagccagagctatacraaatggtatattcagaaagtgttgctctctcctcatcactctcatcccattcccagcagatactcaaccatcttagtttctggattatccttcctgtatttcttttgcactgaaggaggagacacatatgtatttttgtatatccctttgtttttcccaaaaggaatagcatactatatattctttttcattttgctttattcactcatcagcagatcctggacatcactccagctcaggtcatagagatcttcctcattctttgttcca

SEQ ID NO: 529293 - DNA, 641 bp, Homo sapiens
catagtacttcattgtacggacataggtgaatgaacattcacctgtgtatgagcattcaggttgtttccagtattttactatcacaaatcatgctgcagtgccttatcttgtacttacatgttttttatattttgaaagtaaatcttcacagatttttagaattgggatcgctggatcaaaaggcaaatgcgtgtgtcattttgttagatattgaggcagtgaccttgaagtcaagctaacttgggttttaatacatactctgctacttcctagaaatgtggttaatctctaaacccagtctcatcaatcattacctggttgctcaaagtatggcccaaggaccagcagcatcacttgttcccgctgggaacttgttagaaatgcagaatcccaggaagccccagttctacagaatcagartctgcatgttaagagatctccaggtgtttcctttgcagattaaactttgagatgctctgatctatgcaacaggaatggtgttagtagtaatcgtactagtattagttattgctctaggtgtatgcacctagtacaagaaaaaagtaaataaggccttaagccaacaagcaaaatcttgagggaaaaaacaacagccacaccacccttaaccacaccaata

SEQ ID NO: 529294 - DNA, 557 bp, Homo sapiens
aatccttttacttttataatctaatgtgattcttttttaatgaaaatagagtttattaacttttaatataaacatgagaaataaaaaccacataaattgtagcattcttttcaaaataaaactgcaatcaatacttgaatctccaagctccgaattccataaacaattttgttttttgaggtggtagattgtaatatttttataccgttatttatcatttatgtctctgtcctttaaaaatgatggaaactgcagcataatatgatgtgaagcattgctgtagtagaggaagtattcctggcccagaaatgctttgtttataagcaagattcctaggattagatttgagaaagtaggacaaatagatttcacatagttgagaacactaatctctttttagtatttcaaatttaggtgacattattggtctcctaatattatttgctccttgccttttaaagcctgaagtaagagttcctaagggttaygtaagttatttcttaaatagcaagacttaatgggacacctacagcttggtagcatgtagtatgataaaa

SEQ ID NO: 529295 - DNA, 596 bp, Homo sapiens
cactaatcacatggttttcctggcatgaccagccccatcctcttttttttctttttgagacagagtttcactctgtcacccaggctggagtgcagtggtgcaatctygggtcactacaacctcacctcccaggttgaagcaattatacagcctcagccttctgagtagctgggattacatgcgtgtgccaagacgcacagctagtttttatatttttagtacagacagggttttgccacatttgccaggctggtctccaactcctgagctcaaagtgatccactggtctcaaactcctgagctcaaagcaatccacctgcctcagcctcccaaagtgctggaattataggcatgagccaccgtgctggccctcctcctcctcttgtcatctggagtcatttcattagcaaaaactatcagggcccaccatgaatagcaaagacactcctattgctcgggaaattcccaaaatttagaatctccctccaaggaacagagataatgaccagataaattcttcattatgcaacaactccctcttgcagatccaatgaccatagttgtacttcccagcagcattcaacatggtgaattgc

SEQ ID NO: 529296 - DNA, 596 bp, Homo sapiens
cactaatcacatggttttcctggcatgaccagccccatcctcttttttttctttttgagacagagtttcactctgtcacccaggctggagtgcagtggtgcaatcttgggtcactacaacctcacctcccaggttgaagcaattatacagcctcagccttctgagtagctgggattacatgcgtgtgccaagacrcacagctagtttttatatttttagtacagacagggttttgccacatttgccaggctggtctccaactcctgagctcaaagtgatccactggtctcaaactcctgagctcaaagcaatccacctgcctcagcctcccaaagtgctggaattataggcatgagccaccgtgctggccctcctcctcctcttgtcatctggagtcatttcattagcaaaaactatcagggcccaccatgaatagcaaagacactcctattgctcgggaaattcccaaaatttagaatctccctccaaggaacagagataatgaccagataaattcttcattatgcaacaactccctcttgcagatccaatgaccatagttgtacttcccagcagcattcaacatggtgaattgc

SEQ ID NO: 529297 - DNA, 596 bp, Homo sapiens
cactaatcacatggttttcctggcatgaccagccccatcctcttttttttctttttgagacagagtttcactctgtcacccaggctggagtgcagtggtgcaatcttgggtcactacaacctcacctcccaggttgaagcaattatacagcctcagccttctgagtagctgggattacatgcgtgtgccaagacgcacagctartttttatatttttagtacagacagggttttgccacatttgccaggctggtctccaactcctgagctcaaagtgatccactggtctcaaactcctgagctcaaagcaatccacctgcctcagcctcccaaagtgctggaattataggcatgagccaccgtgctggccctcctcctcctcttgtcatctggagtcatttcattagcaaaaactatcagggcccaccatgaatagcaaagacactcctattgctcgggaaattcccaaaatttagaatctccctccaaggaacagagataatgaccagataaattcttcattatgcaacaactccctcttgcagatccaatgaccatagttgtacttcccagcagcattcaacatggtgaattgc

SEQ ID NO: 529298 - DNA, 528 bp, Homo sapiens
taatcaaccagctggggaaaccaatggcatagagtgtggtaacctctagggaagaattgagcttctttaagggaaaaaaaaaatcacctggagaagttgaggaaggcaaaaagaaaaggagcaaggggagaaggcaacttttaccgactgtcctgttagaaatacccctgctttgtataagtagctgacttagggtgtctcctgttttcagtaattccacgtttaaatcagtggctctaattcatcctcagaactgtttctttcatgattctgcttgcgtgtgtgtgtgtgtgtgtgtgtgtgtgtgtgtattaaatgtgcatatttctactgtttatgctggggaataggaagtatcagagtgatggaggtagttatgaacataatctagagctcagcaagaacaaatgcctctactccaggtagctctgcacagtctagaatcatagcttgtggctaaatacactaaagacaggcakatagttctgacaagaatgggaaagtgaggaagaatgagggagagtataa

SEQ ID NO: 529299 - DNA, 410 bp, Homo sapiens
actatttacactaataatacttgaattggaagtgagaaatcagaggagctcaacatcttgtttgccttaaatactgtctttgacactattttgtataattattctccccttgaagtactaatttataggaacctttgttactaagtactataacataatgttcatatcatttaaactctagacaatgagcaagaatttgagamttttctgttaataaatacatagattttaaaaatttacaactattgttgagcatttcaagatctttctcagtaataaaataagtaaagtattttaaaaatagaagttttcaataatcaacaattcgatctcgttgatatctatagaatgctctaattaacggagaatgtaataatatacattattttcaagtactagtcaaaccctga

SEQ ID NO: 529300 - DNA, 628 bp, Homo sapiens
atcctggcactggacaagcgcatccttggtttgacttagtagctgtattattgtaggcaaattactcttcccttctgagccttgctcttctcaggtgtgtaacagagaatgaaatctaagttgcagaattattgtgacattttaaatgacatatcaaatgcaaaataattattaaaataatcaccatttattaagttactacatcgcaggtgtttttcataccacctcctcatgagtctgtaagacagatatcattatccctgttttacagttgaggaaacttaggctcagcagagagatcacgcttcttgggcaagataacacagcatttataaggtagccagagattgagtttagaaagctagaaagctagtgctcttttaatcataacaagcygtctatcactggacctggcaccaaagagatgctcactacatgtgcatttgagctgaatcttcctcagggagtaccagttggggtttcttccctctccaggtacataaatctgaggtagaaactggaaaggcccgagaagaacgggtagctctgtttctgggatatgggtgtaccaacagggggccaccctggctaaactcagagggtccatgaagcagttctcatggcctca

SEQ ID NO: 529301 - DNA, 542 bp, Homo sapiens
aggccaggtatagtggctcacagctataatcccagcattttggaaggcccaggaaggaggattgcttgaggccaggagtttgagaccaacctgagcaacatagtgaaatatcacctctacaaaaaattctttcrgaaaaattagccaagcatggtggtgtgtgcctgcaatcctagctacttgggaggctgaggcaggaggatcacttgaggtcaggaagttgaggctgcagggaacataatcacattactgccctccagactgggtgacagaatgagaacctgtatcaaaaaaaaaaaaaatagtgtggggacaggtgaggacagaagccaagaatcagcaaacacccatgaatctctttcatccctttttcagctttgtcagtgtatctgctgacttcttgtgtcttggcacagcttgtttttcgctttttcactcacagaagctcttgtttacaggagttgtgtttttttttttctgtttttggctgttgtttgtattaacagaatctaaatagttatttttaaagattcttgcttaaa

SEQ ID NO: 529302 - DNA, 558 bp, Homo sapiens
acttgtgttgaacttgtagaagaataaggcaagaggagactatacaaaaggttgaagaaacttctgtaaccagatggagacgaaataagccctgggctcaataaaagcaggagacatggtcttgcctggaccaaacttttaagatggccaaaggagattatcagcgagcaaaagtgaagtcaggatagttggatgtgtgccagcacacaactcattcttagttagcaaaacctccagcaaagggcattggaatttattggttcatatgtttataaatcccataagtagaactggcgcgcrcacacacacacacacacacacacacacacacacgttcttagaaatcctttttactccagatactcaaagagcatcaggactcaatttctctccctgtcttcattgtgctttcactgcactggttttatttctctaaacagagggaagacctacatctccagtcttaacatccaacctccttagcaattagtcgcatcagaaagaaagcaagctgaagaatgtctcaccagacccacgtggatcctgcgttcatctctg

SEQ ID NO: 529303 - DNA, 642 bp, Homo sapiens
tctgaaacattttcttggcttgctatttatttatttatccaattaattcatcaatttttttcatttttagtttttgaattaaaaattcattcatttttaatttctttccagaagttccaccaccaaccatactggagaacttactcaagaggagaagaaaaattctaagatgtcttggtaatattttcaaaagttttattttactaaagctctctttgcttctcatagtctctcttctctcccaagtccactgactttcatcctttcttttctgatatgtatacatctatctcctctattytcttctccctaaaaaaccaatcttattttgtgttagcaacttgatcagaatatgtcaaccaaataacaaagatagagatgttaaaggagagatgactagaaaaatattcaggtatgaagaatctattccagaaaacttacaaacatatttagttagcttgctccaaaaagtttcttatcacctttctcttatcctaacccccaatttcttacccagatttctgtaactccagagttttctgtaagggactttctttatctgctgtcttacacattttgtggtatgggtttttccttccgtaggtctttactggagaggtaacctctttatagttagaaaga

SEQ ID NO: 529304 - DNA, 592 bp, Homo sapiens
acatcacagagtgattttaaatgttgccctgtacataatcacatctgtcttgtcactatttatttgcctattcctgtaacaataccataccataaagttttatatcatattctgatatagggtaagtcctacctaattgctgtttttctaaaatctattggctattctttcatattttcttttctggatgaactttattatcagtgatcgagcttcattaaaaacgctattacaattttaattgaaattgaaagtgtatcaaattaattaattttttgaataattgacatttttacactattcaaactttgcatcaaggaacctggtatgtctccccatgtgtgtttctttatgttctttcataatttttgtggtttagtgagcctcagaataacacatatttcaagtttatttcgagatacataataatttttgtggtcatcatccatgaaattttttgaccattatattttctttctttttcttttcttttttttttttttttttttgacaaagtcttgctctgttgcycaggctggagtacagtggcctgatatcggctcactgcaacctccgcctcctgggttcaagc

SEQ ID NO: 529305 - DNA, 391 bp, Homo sapiens
ctgagcatagcttaactgggtcctctgcttagggtcttacaaggctgtaatcaagattttgtttgtgctgtgcttcatctggaggctcaacttggggagcaatccccttcacactactttgggttgttggcagaattgatttcttggtggctgtatgttggggcggtgggtggggggacagctttttactatccatggctagaaggctgatcacastttccagaggacacctatagttccaggcaatatggtcttctctatggcctcttactttatgaagccaacaaggagagtctttcattcaaggagggccagtgtttctttcaaaggcttttatccagttaagtcaggaccactcagggtagtctcccgtttggtttcaaaaccagct

SEQ ID NO: 529306 - DNA, 681 bp, Homo sapiens
agctgcgtctcaggagaccaggctcacctactttgaatctcccatttgaagcactccttacccagggccaggggatacacagcaggaagcctcattccttgtctgcaaaattagaatattaatacttgcctaaataacagattaaccagttagtgattgttaagtgcttggctgatagaaagcagcaggagaagaaaggagaaaagaaaaaactgaaacacaattttattcttggatgggttttactcagctctggattttcctactgcccatgcaatcaagtgaccacacagtgcaaagagcaggtgtagagagactggaccttaactttatttctctcaagatagcagatgaaactgactatcctgcaargctgcatgaagctttgaataaatggagaaacggaaaccacactttgtccttgaatcgatgaattgcagggcaagacttcatgacgaataactgagaatgttttagctttcactcttctatttggtttcttacagaagagataattcagtgtatttggaacttcccatatctatattttacagtgaccaatttgcagtgcatatgtgtgcgtgagagagaaagagtaagattaagagagaggaagaagttgtgcaataagatagaagggaaatcaatagaaaaatccagaaaaaatggggcctatggaca

SEQ ID NO: 529307 - DNA, 545 bp, Homo sapiens
cactaactaccattaggctttttttcctaagggttaaacagaaagcagccctttcaaaacacttgctggactcctttccctttgtgtggttttgatacaactaaccagcattccttcttgataggagaccaccaaccatggactggttttggttggtttacagaggctgcacacagaatgcctctgtgtttaccatttcaccttttgacaaatatggcctaattttgctgtrtttaaattttaagtctccaaaccaaagtgaacatgggactgttacatgcatgtttgcttactatgcatgtgcatgtcccccttttgtaaatatccatagctctttctgtaaccagttaaatatgtatacttagccaactcatttaacataaattcctgttctacccttccctctctcgaagttcctgcttctggtttctgccagaagctgtgcttttcagcctgcgggatagccagcctgcaggctgcaactccttaaaagaaataaaactctccatttcagatttatgaacctcatgattcttcagttgaga

SEQ ID NO: 529308 - DNA, 595 bp, Homo sapiens
cagttcaaaatgaaaaacacttggggacaagtgtcatctgaacatgcagcctgtgagttacactttatttgaaagggaaagtgtgtcttcgccacataaaaaatgtattcatttatttattcatgcttttaattcaacaaatttttgttgtgttccattgtattccaggtacttttcttggtatagacaagagaagggtgaattatagagtccacaatcttgccttcagttgccagttcaagaatgccctatcattttctcacaatatttgtttcattctggtctgactacttatgcaacattaaaatacaaggtgaagagaattcaacacaccatttttatgcacaggtaatcctccttggtttgtggcagcaaactaaaatagcttttttttggttgtttgttcaactgtttsagtaataaggagggcaaaatttttttcaggaagagttttagaaactatacatattgctgacagagaaaagtggggagtagcactggtcaatgcagattaaccatgctatcagatgcaagtacttacatgaaagtggacaagaaaacttctcatcccagtgaccgaaaataagctcaaacc

SEQ ID NO: 529309 - DNA, 622 bp, Homo sapiens
cctggtaaataatatttagcctttaccaaggaacattgtaaagaagattgtggaaatttctacagtcaaatgatttagaaagtagaaaatctttgattatctcatacatagtccctagacaatgaatatactcatartattctcatcaaaacctgtctttaaattattttaatctaaattaattttcctaagtaataaatgacagcagctaaaacttataaggctatttggaactattaagtcaatgattaagaagacataaagaccctcaaaaactaattaacttgactatcagtcttttagatttgtgtactgcttccaggattataacaagcttaaataaatctaactaacacttaaattgtgatttcttgttctctgcatattttaaagaaaaatgtaaagagcctggagatcttttgtactatttagataaagggtttagaatttaagaatctatctgatatcaatggaagctttatctgaggaatgctacaagaccaaacacttagagagtcatggatgggactcacagcttttccctaatgccaatgtccatagtagtcatttacaaatgtttagggaaaggtaaattttgtagaagatgatctagaaaaaaaaa

SEQ ID NO: 529310 - DNA, 672 bp, Homo sapiens
aaatgagattgtattctttatttcctttctggaaaattcattgttattaaatagaaattcaactgatttttacatgttgcttttgtatcactcaatgtttctgtatttattaatttttttaccagatcatcacataagtttatttctgatgtaacagcaatgttaaagttgtcatgtttaattcttaacagaattctaggttgatgtatttttttctcaaaaactctaaatatttcactccacactcttgcttgcatggcttctgggaagaagccatatgtaacttttatttttgtacctccatggcgaggtatgtttttcttctggcgtctttcaatattttttctttatttttgatattttgaagtttaaatataatttgcctgagagtagttttttrgcatttatcctgcttcttgttttctgaactttatagatctatggtttgctgtctgacattaattgggaaagaggggcaactttcagtcatattgcttcaaatatatcatctgtttttttttctcaatgtattctccttctggtatttgtattacatgcatgttacaccttttgtagtagtcttacaattcttggacttttgaggttttctttcagtcttttcagctttgcttttaagttttggaagtttttattgtcatatcctcaagctca

SEQ ID NO: 529311 - DNA, 510 bp, Homo sapiens
ttgttttttggccagctcagatcaatagaaacagattctgctttaacacctctcctgctgccatgtcctacataatcctggcttaaaactccttcctctacgccctctagccaaaggagctgagattctatcacaccctgcgcctgttctactccctaggaagtaaaatgccaacatgaagtctttgctgctcaatttcagctagacaaatattctgattttgtttttcctatgaaygtggcagcgagaccgccttcatccggcatagttttgtgtaatttggaaaggcaaaagcaaaaaaagaagttttaacattaaagtaacatttgtgtcattcaatacaccattgagtgagatgctctttatatacattattctctttccagagaaattaataaccattttatagctattagtgagggatatagaagttgatgttataaagtttaaagtttgggatacatgtttcaagtaagacattgagtgtcatcatttttgacgaaggtgatg

SEQ ID NO: 529312 - DNA, 585 bp, Homo sapiens
tgaaagggttgcttaaaaaaatctgactcaaattaaaagcgtctgccttattcagtggtgaaaaaatatcagctctctttaccttctcactacaatgttccctgctccctttattagcatatattttatatgtaatatatcacacataggttaatgtacattttattgcatttgaaggaatagtttaacatgaatgtttaatttttaggcacttcatttacctatctcttatcacatcccccttcccttttgtaatgtttgtgttaataaccatctgctttaaattatacctagataggaaaaggaaaaatgaattatagyttccatagcaccatagggtgactataaattaacaatttgttgtatattttcaaatatctagaacagtagattttgaatgtttctatcatagagaaataataagtatttgaggtgatgtatatgctaattgccctgatttgatcattacacattgtgtgcatgtatcaaaatatcacactgtatcccatcaatatgtacagttattacctgtcaaataaaaacaaaggggaaatatatttcatgtagatattttcctatattttg

SEQ ID NO: 529313 - DNA, 585 bp, Homo sapiens
tgaaagggttgcttaaaaaaatctgactcaaattaaaagcgtctgccttattcagtggtgaaaaaatatcagctctctttaccttctcactacaatgttccctgctccctttattagcatatattttatatgtaatatatcacacataggttaatgtacattttattgcatttgaaggaatagtttaacatgaatgtttaatttttaggcacttcatttacctatctcttatcacatcccccttcccttttgtaatgtttgtgttaataaccatctgctttaaattatacctagataggaaaaggaaaaatgaattatagcttccatagcaccatagggtgactataaattaacaatttgttgtatattttcaaatatctagaacagtagattttgaatgtttctatcatagagaaataataagtatttgaggtgatgtatatgctaattgccctgatttgatcattacacattgtgtgcatgtatcaaaatatcacactgtatcccatcaatrtgtacagttattacctgtcaaataaaaacaaaggggaaatatatttcatgtagatattttcctatattttg

SEQ ID NO: 529314 - DNA, 554 bp, Homo sapiens
gccccttctctttggaggtgaggaactcagtctctcatttacttatgaaaaataacagttcagttcctcaggcaaaatgcatacagacaacccaattgagattaattctgatagaaaaaaatagagaaagacccttctgaatgcacctctgaaactaaaattaagatttcaaccaaattcctgggagaaaagagagagaaaataaaaaccagctcagaataaatcaagtaccatcaaccaaaatggaaggtccagggctcaggaggacttaccagttccactagaggagaagctcagactcggtgagtcttcagtgggcccctgctggtaccttagctccagttttgggcaacttcttaggggttctgagtcttctctgaggctccacatgtttgggtgccagattattgtcgacaaaaagagtcaaactctgtaaaatatttgaagagatttawtgtgagacaactatgagttacaattgcccgtgacacagccctcaggaggtcctgagaacacgtgctccaggtggttggggtacagcttggttttatatg

SEQ ID NO: 529315 - DNA, 554 bp, Homo sapiens
gccccttctctttggaggtgaggaactcagtctctcatttacttatgaaaaataacagttcagttcctcaggcaaaatgcatacagacaacccaattgagattaattctgatagaaaaaaatagagaaagacccttctgaatgcacctctgaaactaaaattaagatttcaaccaaattcctgggagaaaagagagagaaaataaaaaccagctcagaataaatcaagtaccatcaaccaaaatggaaggtccagggctcaggaggacttaccagttccactagaggagaagctcagactcggtgagtcttcagtgggcccctgctggtaccttagctccagttttgggcaacttcttaggggttctgagtcttctctgaggctccacatgtttgggtgccagattattgtcgacaaaaagagtcaaactctgtaaaatatttgaagagatttaatstgagacaactatgagttacaattgcccgtgacacagccctcaggaggtcctgagaacacgtgctccaggtggttggggtacagcttggttttatatg

SEQ ID NO: 529316 - DNA, 582 bp, Homo sapiens
tgaaagggacagtaagtttcagagcatgctctcctgagccctatactattaggatacaaagtttatgtctgctacaaaatggcatgcaacttaaaaaaagagcaggccttatacatttttgtgtccccttactacacctagcacagtgactttccacaaaattggtgttcaatagatgtagtaagaatgaatgagaataaataagtctttcctaaatcctccattaggaaagaatattgtagggatgtcccatcttcaatctttatagcactatagattcttggtgaatttcccaggtataaggggcagaacacagactccccaatgtatttgtttgggagatatacaagcccttgactcctttttcagttgttaaatacagtagaccctataggatagggatagactctcttatcctaagygacaacctattcccaaatagggatttttctcatatacacaggccagtgttactcctccagtcaattgagtaacaattcttagctcaaagaccctgaaaactcaaaagtctttagggagttctgtgaaacctctgaaaatgcatgcaagatttggagtgtg

SEQ ID NO: 529317 - DNA, 582 bp, Homo sapiens
tgaaagggacagtaagtttcagagcatgctctcctgagccctatactattaggatacaaagtttatgtctgctacaaaatggcatgcaacttaaaaaaagagcaggccttatacatttttgtgtccccttactacacctagcacagtgactttccacaaaattggtgttcaatagatgtagtaagaatgaatgagaataaataagtctttcctaaatcctccattaggaaagaatattgtagggatgtcccatcttcaatctttatagcactatagattcttggtgaatttcccaggtataaggggcagaacacagactccccaatgtatttgtttgggagatatacaagcccttgactcctttttcagttgttaaatacagtagaccctataggatagggatagactctcttatcctaagtgacaacctattcccaaatagggatttttctcatatacacaggccagtgttactcctccagtcaattgagtaacaattcttagctcaaagaccmtgaaaactcaaaagtctttagggagttctgtgaaacctctgaaaatgcatgcaagatttggagtgtg

SEQ ID NO: 529318 - DNA, 578 bp, Homo sapiens
aaacaatgctttgcctctctgtaatcagatcaggcaagggattctgggtacatcggtgttaggggtcaaatcgtgtcccccacaaaattaataagttgaagttctaactccagaacctcagagcatcaccttatttggaattgagttgtttcagatgtaatttatcaagatgaggtcattagagtggtcccatccccattgtgacaggcgttcttataaaaaaggggaaatttgagcatagagacacatacaggaagaatagcatgtgaagatgaaggcagagatcagggagatgcttcaagaagtcaagcaacaccaaagattgccagcaaaccatcgggagacaggggagaggcgtggagcaggttccctttgcagctctcagaaggagtcaaggctgcaaacaccttgatcttggacttctcccctccagaactttgaaacaataaatttctgttgtttaagtcactcarttttggcactttgttatgagagcactattaaatgaatccatcagctttaaggtctgttgtagcaatagccacactgacagtcattgtctaagcacagggaaccac

SEQ ID NO: 529319 - DNA, 514 bp, Homo sapiens
ggagttttgagttgttaggggtggagagatggtacaagacatgagctgccattgctgctttggagcagaaccaaatgtaaacatgtgagctgcatgcagccacgcccccccacccgctcccatgggtgccattcacccagcactgcaggggaaaggaagggggcatgtggggagatctgtctcctcctcaagatctgcttgtctcaggaacagatgagcacagcatacgacacttctcagaagcyggtgtcagccatgaggctggggcctctggacaatgaaaggaccttccatctattattctgcgtgtccccgcctccctggtggcatctccaaaaaaggagcagcttattgctgtttgatgggggacacggaggcacttgagtgctgcgagggacaggcagttctctccctgggtgcctctccacctgcactgggccatgccctcccctcactcccacacagcaccacacggcaccacatgctctgtcctgcctggggacctctccaccaa

SEQ ID NO: 529320 - DNA, 542 bp, Homo sapiens
cctgataaccattagcatgtcctcaatatttgttggatggctgctactaatcttgagggcatcatgccaatattgactgatgtatcaatcaatgctactggcatgtggtatttacagcaaaaaactaagtgtgctcatttagctataacatgtctttagcagaagagataagtcagatgttaacatttgatacctgcatctatgggaggtgaagtagagaatgctgttttctctagttacattcctttgtttcttcttacacttatttatagggtgaccatatgtcctagtttgcctgatacagtctggktttccaaagtctaatagtgccccttttcattcacagaattgtcctagtctaggtggtaaattaaatggcagtattacttacataacatttaatgtatgccagactctcttctaaacactttacatacattctcacttaatcttcatgataaccctgggaaacagtttctattattctacccatcttacatatgggaaagttgaagcacaaagaggtcaagtgacttggctaa

SEQ ID NO: 529321 - DNA, 426 bp, Homo sapiens
gtacaataaatcctacaggaataataacaacagaaacatattaacagtttcctttggcaaatttaacggaagtgaatgctgatgtgaacatagaaaaaataattacaaaaacatgaaaaatggaaacgacataaaagttaaaayaaagggatatttctaacttttagactgatgaaagaaatgtctgaggccattaaatgcaaaaaagaaatacattctctttaaattattgtgtactgtttgacaaaatattccttgtttatctcttcttttcccctccacttaaaaaaaaaggaaaaaagaaaaaaaaaagacaacaaaacagtctgcaatgcacaccctaatggttttggctgcagactgaacttgagtaaatatcatcatttagtcagtatgttgtggtagctgaggctgccgatgtggtta

SEQ ID NO: 529322 - DNA, 600 bp, Homo sapiens
ctgctgtttgcatgctgttttctttgttgctatgtgtgtgggtgcctcaggcccaagtcctgagtccccattctcctgccgtgtattgcttgtgtttctgtggagaattgtaatgttcttggatcagggacttttacaaataggtgtgttcttcctagttggcttggagtgatcaaagaccaccatgtttcattttgcccagagccttcgaatcccacccaccaccctcagtaaaatcctttgcagagagctttaccctaaagacacagaaaacaaatgcaacacctgtgaccctaagagcattacttacaaaggcctggaaactccctgaatgctgtttataaagtacaccctcagttgtgtttcttgtttcctttctagctacatgtgagcatgaaactcttttgtagagrtgcaggaaggtcatgctataggagaacgtgattgcacgtgttagaatgcatgctaggacacaggccgattcatgacactgaattctgactcatcctaagggagaggaaatgcatgtatatggatgtgttttggcttctatttaactctataattgtttcttttttcccttaaataaggatttcttct

SEQ ID NO: 529323 - DNA, 600 bp, Homo sapiens
ctgctgtttgcatgctgttttctttgttgctatgtgtgtgggtgcctcaggcccaagtcctgagtccccattctcctgccgtgtattgcttgtgtttctgtggagaattgtaatgttcttggatcagggacttttacaaataggtgtgttcttcctagttggcttggagtgatcaaagaccaccatgtttcattttgcccagagccttcgaatcccacccaccaccctcagtaaaatcctttgcagagagctttaccctaaagacacagaaaacaaatgcaacacctgtgaccctaagagcattacttacaaaggcctggaaactccctgaatgctgtttataaagtacaccctcagttgtgtttcttgtttcctttctagctacatgtgagcatgaaactcttttgtagaggtgcaggaaggtcatgctataggagaacgtgattgcacgtgttagaatgcatgctaggacacaggccgattcatgamactgaattctgactcatcctaagggagaggaaatgcatgtatatggatgtgttttggcttctatttaactctataattgtttcttttttcccttaaataaggatttcttct

SEQ ID NO: 529324 - DNA, 581 bp, Homo sapiens
ggactacagacgcgtgcctccacactcggctaatttttgtgtttttagtagagacggggtttcactatgttggccaggctggtcttgaactcctcacctcaagtgatccaccagcctcgggctcccaaagtgctgggattacaggcgtgagccactgcgcccggcctggagggctgtgttcatatatttgccttctttttccttcttcaacctcttccagaagcttttccttcagcaagtatttccttaaacaccgattatatacctgcaatgatactaagcaaaggaggtacagcaataaacaaacgatccacagtcctgctggagacacaggcaygaagcaaatgaccaccaacaactcgccgattttacttggaataaaaatgttaggaaggagaaggacacagcagtggacgtttcagccacttggtctgaaaatggaagcttccctaattgtgtcctgagttccagacttggtttgtctttattgactgtgaacaggatttggtcacactgagcatagacaaggaggaccccatcctttgctgcccttctgacctgggtttttctccaccaccata

SEQ ID NO: 529325 - DNA, 581 bp, Homo sapiens
ggactacagacgcgtgcctccacactcggctaatttttgtgtttttagtagagacggggtttcactatgttggccaggctggtcttgaactcctcacctcaagtgatccaccagcctcgggctcccaaagtgctgggattacaggcgtgagccactgcgcccggcctggagggctgtgttcatatatttgccttctttttccttcttcaacctcttccagaagcttttccttcagcaagtatttccttaaacaccgattatatacctgcaatgatactaagcaaaggaggtacagcaataaacaaacgatccacagtcctgctggagacacaggcatgaagcaaatgaccaccaacaactcgccgattttacttggaataaaaatgttaggaaggagaaggacacagcagtggacgtttcagcyacttggtctgaaaatggaagcttccctaattgtgtcctgagttccagacttggtttgtctttattgactgtgaacaggatttggtcacactgagcatagacaaggaggaccccatcctttgctgcccttctgacctgggtttttctccaccaccata

SEQ ID NO: 529326 - DNA, 598 bp, Homo sapiens
agtgcccatccacattacgcaccctctccctctcccagtccactgactcaaatgtcaatctcctctggcaacaccctcacaaacacacccagaaacaacacttcaccagccctctaggcgtccctcaacccagtcaagttgacacctaaaattaaccatcccaaagtatatgtagtttctttagctgtaaacaaaatttctacttcttggttgttttgaggcttaaagagatatggatgtaaaatcttccaagcacaatgtttggtgcataagagccactcaataaatacatgatgaatgagttaatattactatgcacatagggacatgtgctcaagccacccctgacttacaaaccctcagttgagctcagtccctgcacatgaacacgatgactgtagggatccagcctcttcctttggcctttcctattgctgctgcctrcagtcctggccaccatgcagccattccatctggtttcatggaactactggaatgtcaagaactactggaggtggggcagcttacccccatttactcaacttgagagggtgagatcccctcttcctgctggggcaacattgggaatggataattt

SEQ ID NO: 529327 - DNA, 285 bp, Homo sapiens
cagggagcagtggttttggtacccacaggacttagcctttggtttgcatctgtccttcagaggaggaggatacagaggctggttttgagattatttggagctggtgatcagtgaggtctctttaagctgattgagccaactgtgctgacttagtcagttaasctagataaataccactctgagttttcttttttcatttaagaaaaatagtgtcagagtacaggatggactcccccagtgggagagctgacaccatgtaaatgattcattagcagatgctttagc

SEQ ID NO: 529328 - DNA, 525 bp, Homo sapiens
ggtggaactcggttgggaatacaatacatggctggacaatatattgaggccttccrtaaacatcactgacctctagcaactactttagctaatgctattctttgagtattggaaaacactctcatgacataattgtcagaagcccctgtgccccacaaaattttctttatccatggcctacatgagagattcatccctttgagttgaagaaagtttatgccttaactcccttttcaaatagaaaagatgcctgaaggggaaagctcatttaagagtgagtatctcattctttgattactatgggaagaaagtagagaaagtgcctctgaaaaaaaaggcggttcccaggagcttgatgggtgacctggaagtcaaactctaccagttcaggatttgctcctcttgtcctgggctagttttgaaaattttagtaggaacttcagctatgttttgataatctaattattatagaaatccaagaaattgataatggatacttggcaaaatagagaaggaaagcagcag

SEQ ID NO: 529329 - DNA, 435 bp, Homo sapiens
aggaccataaggaagttccctcatagggttcttgtgaggacggcacgatttacgyaggggatgctgacaccgtgcctggcacgtgggacgcactccacccgcggcagccgctcccatggcttctcagtgagttttccagccacactgcacttcttagacaggaacactccatacgatgtccctgtcctgcactggagggcccaaaaatctgaaataagaggaggagtgcgtgtgaagctcccagtggagcgtttggcacctgtccagcatgtccccaagggcaagtcacggctctgagattcagtgtctccttctgcaaaatgggccaatagtggttcctccctcccagggctgaagtgaggatgaaatgggataatccacccccgtccccacaccctgcaggtcatcatgattgctagcagttgtgtggtggag

SEQ ID NO: 529330 - DNA, 435 bp, Homo sapiens
aggaccataaggaagttccctcatagggttcttgtgaggacggcacgatttacgcaggggatgctgacaccgtgcctggcacgtgggacgcactccacccgcggcagccgctcccatggcttctcagtgagttttccagccacactgcacttcttagacaggaacactccatacgatgtccctgtcctgcactggakggcccaaaaatctgaaataagaggaggagtgcgtgtgaagctcccagtggagcgtttggcacctgtccagcatgtccccaagggcaagtcacggctctgagattcagtgtctccttctgcaaaatgggccaatagtggttcctccctcccagggctgaagtgaggatgaaatgggataatccacccccgtccccacaccctgcaggtcatcatgattgctagcagttgtgtggtggag

SEQ ID NO: 529331 - DNA, 596 bp, Homo sapiens
tctcttgcttttcccatctctcaccaggcatcagcaggtcccagaaagaccccgaccccaaaggccctgtggccactgcggccaccacagccatgacaggggcccctactactcctgtcccctccacgtccactgcctgggcccccatggcgcccagcaccccacagcccacaggtgggtgccagggtacagcgacccctgtcatcccaccctctcctgcttctagcctgggtccctgcctctcttggggtgggagggtcggcagccctgggcagagagcaggggcttggctcttagaatagagacgctagaaccctagagctgggaggccacaggccaaaggggcttgaggacacctgggtcaacctgttcctgagcccagccaggggattcagggatcagttcagcttccaaartcgtcttcctcctgcccttcaagccattgcttggaagggctcccagaccattgtggccagacggctgcaggaactgagaggaaaggtgctgggggcagcgaggccatcctgacatgcagccaaagactggccttatctcccaatggtgcttctgcctccgtggtccctggagccccgccc

SEQ ID NO: 529332 - DNA, 712 bp, Homo sapiens
tgagtagcatgctcttattagtgtttgcatataataagaacttaatttctattttttaaatgaattgtgtattaaaaaaaaagactgattcctcaacatatttaacatatgtatttattcaaaaattttgttgagtgcacacaatttgccacctactctgttaagctaagataggaggaaaaacatcatatgggttaatatttaatcaccaaatcttcaaaagcaactgctcaaaaaagtctgatcaattatttgtgagttccttataagtcctctgcccatctttgcaactaataaaggcagtagccaggaagctctgttttaccttcactctttcattttgttcaacttcaccaaaggtgacaaaacagcaagtactggtttacagttacattcccattttcttcaactccttactttttctgatttcctccattttctgattcccttacaccattgctcagcacaggggaccttaacgcaagcagctcccctccatggcagactttcagatatactactaggcctggagtgggaagggccactgctactgaaactgtccatggctaggagatctgctcatctaccatgccaatgcccacaaactccctcagaagcaggtcctgctattcatgctctgtgagtgaygaaactgaggttccaagagattacttatcttgctcagaatcatttcactagtatggattacagc

SEQ ID NO: 529333 - DNA, 470 bp, Homo sapiens
ggacagagacctgcaggcccagcagtgctgggagtgggaagggcacatttttgtttttaatcaaagcataattttcagaaataaactagtattaatagtaatttcagccgggtgtggtggctcacgcctgtaatcccagcatcttgggagggtggggtgggcggattacctgaggtcaggagttcgagaccagcctagccaacatggcaaaaccccacttactaaaaatagaaaaattagctgggcgtggtggcacatgcctttaatcccagctactagggaggctgaggtaggagaatcacttgaacctgggaggtagaggttgcagtgagccragattgtgccattgcactccagcctgggcaacagagcaagactctgtctcaaaaaaaaaaaagtaatttcaactttagaaatcatggttctctaacaattccctgagattgctacttttttttttttttttttca

SEQ ID NO: 529334 - DNA, 664 bp, Homo sapiens
tgaatttaatccattttgctacaaaggtgaacaaattatgttcccttctttccaatgcacatccagaaaagctccatattgaatatcagaagattgtgtaagtgaattataacacagataagaataatttaaatctggattccaaatattacagctctcaatgtcccttcacagatggaatccttcttggctgactacacaacatacgacatgatgtcataatttatctttcacaaagtagagtttctttttaccctgtccctatttctcccttgtagactaacagacattcatctccctagctgctgttggattcatagatgcaaactcaatctaaataaatttgagtttgagttataaaattaaagtgacattttacttaattactttcagaatgttaatgagtaatagaaccagaaactaatatcctgtggtcagtatactgtcaacctcagtgtgcttctagaaaaccaaagtatcaatttaagattacttgatgagcacagaatcagagcaagagaagcggaccataaaaagcatatgtttaatggcatcagataacttaaagtatccttccctacacagggttataccagacacccaaataagacacatcacacctgcaratgacaacattctctttttaggcacctctgggatgagc

SEQ ID NO: 529335 - DNA, 580 bp, Homo sapiens
caaaccttggtagcctagaagtaaagcaggcttaagaacttgatttttctatctttttaacttaaatttcaaacctgaatttgatcactttgatgtgagcagagatcaagtatttatatagcaagcaaaagaaatcaagagtaatttgcccatgtgytgaggaccccacctgtgccaagtgttccttggattaaggatggaggggaagaggttgttgttcaggcagctgcacccacaattcaggactaatgcaccttgctgggtaaatatctgaagagagccaattattagaaatgaactgtgactattagttacccagggaggttaattactcatggtgacccatataaagttttaaagcctattcaactacagcagcactttttctccttaaagacagtgttgcatggtggacagggtggatggagaggagccccaagttttcctttgaattgcgctcctcaatcatttttttctaacccaaaacttgagcatctgacacatggccatcagtgaaaatgaatctcagtggcagtagtttctagtaggaaagaaattatactctctcggataagtgaat

SEQ ID NO: 529336 - DNA, 580 bp, Homo sapiens
caaaccttggtagcctagaagtaaagcaggcttaagaacttgatttttctatctttttaacttaaatttcaaacctgaatttgatcactttgatgtgagcagagatcaagtatttatatagcaagcaaaagaaatcaagagtaatttgcccatgtgttgaggaccccacctgtgccaagtgttccttggattaaggatggaggggaagaggttgttgttcaggcagytgcacccacaattcaggactaatgcaccttgctgggtaaatatctgaagagagccaattattagaaatgaactgtgactattagttacccagggaggttaattactcatggtgacccatataaagttttaaagcctattcaactacagcagcactttttctccttaaagacagtgttgcatggtggacagggtggatggagaggagccccaagttttcctttgaattgcgctcctcaatcatttttttctaacccaaaacttgagcatctgacacatggccatcagtgaaaatgaatctcagtggcagtagtttctagtaggaaagaaattatactctctcggataagtgaat

SEQ ID NO: 529337 - DNA, 580 bp, Homo sapiens
caaaccttggtagcctagaagtaaagcaggcttaagaacttgatttttctatctttttaacttaaatttcaaacctgaatttgatcactttgatgtgagcagagatcaagtatttatatagcaagcaaaagaaatcaagagtaatttgcccatgtgttgaggaccccacctgtgccaagtgttccttggattaaggatggaggggaagaggttgttgttcaggcagctgcacccacaattcaggactaatgcaccttgctgggtaaatatctgaagagagccaattattagaaatgaactgtgactattarttacccagggaggttaattactcatggtgacccatataaagttttaaagcctattcaactacagcagcactttttctccttaaagacagtgttgcatggtggacagggtggatggagaggagccccaagttttcctttgaattgcgctcctcaatcatttttttctaacccaaaacttgagcatctgacacatggccatcagtgaaaatgaatctcagtggcagtagtttctagtaggaaagaaattatactctctcggataagtgaat

SEQ ID NO: 529338 - DNA, 580 bp, Homo sapiens
caaaccttggtagcctagaagtaaagcaggcttaagaacttgatttttctatctttttaacttaaatttcaaacctgaatttgatcactttgatgtgagcagagatcaagtatttatatagcaagcaaaagaaatcaagagtaatttgcccatgtgttgaggaccccacctgtgccaagtgttccttggattaaggatggaggggaagaggttgttgttcaggcagctgcacccacaattcaggactaatgcaccttgctgggtaaatatctgaagagagccaattattagaaatgaactgtgactattagttacccagggaggttaattactcatggtgacccatataaagttttaaagcctattcaactacagcagcactttttctccttaaagacagtgtygcatggtggacagggtggatggagaggagccccaagttttcctttgaattgcgctcctcaatcatttttttctaacccaaaacttgagcatctgacacatggccatcagtgaaaatgaatctcagtggcagtagtttctagtaggaaagaaattatactctctcggataagtgaat

SEQ ID NO: 529339 - DNA, 199 bp, Homo sapiens
gcacattaaatcgctatgatttttttttaaaagtctcttarttgaattgttttacagaaactgtgctctctggcacactgtggctcttctattgctagttcaagcccttataagtatacttttgaaataattccagaaaacacataaagttctgctcattaccctaaatgttctaaaatgtgtacaaaaccttagagca

SEQ ID NO: 529340 - DNA, 597 bp, Homo sapiens
ctgatggcacattaaatcgctatgatttttttttaaaagtctcttaattgaattgttttacagaaactrtgctctctggcacactgtggctcttctattgctagttcaagcccttataagtatacttttgaaataattccagaaaacacataaagttctgctcattaccctaaatgttctaaaatgtgtacaaaaccttagagcaaaatagtcttctcacataaactggcggatttttagtagaggtaaccaggaaagcttgatagcaatgccttgcattttttggcttcatccctatgccaggacgtccagcatttaattagatgtttgcttcattgaattatgatatatggtatctaaaggtctcatttaaaggcaacgtctctcaggatagttagtcaccagttggtctgtaaaagaatgagtcatgtatattttgataagtgataaattttgagtgaaaagcacgagaaagcaaatacgtggcagatatcattttcttttttagccaccaaccatctatgtagacaaatcttcagaagcacacaaccaagacttcagtaattgaagaccacataataggcttctctagtgcaa

SEQ ID NO: 529341 - DNA, 574 bp, Homo sapiens
acagggtcattaactattatacttggaggtcagaagtaatgtggaaagctggttgataagttcttataagtaatcatcgcaaccaatgagtgattactattttgaagttctcattcaggttttctttaagagtttgaatgatatgggctctcttaattttgttacaaatgtaaacatatacagcatagccaggcaaacctatgagttagttaacaccttgccatgactccccaagaattacatgctctactcagtrcagtccagcagcagttcccctagcaatcaagtcacttcatgactccatgcctttacacaaactgttctctatagactagcaatctaagtttttgaagtaattgtgaatgtatgtgtttcttactagttaacatttactagcatttgtttttgttgttattgtaaattgtacttgcgttagccaggatacatccttaaattcaattgcaggggtgggaggagttgcacgggatagaacataggctgacacagactccagcaaactgtaactgcaccacctggatgatggaacctcctccgaccttccaggaggtagaca

SEQ ID NO: 529342 - DNA, 574 bp, Homo sapiens
acagggtcattaactattatacttggaggtcagaagtaatgtggaaagctggttgataagttcttataagtaatcatcgcaaccaatgagtgattactattttgaagttctcattcaggttttctttaagagtttgaatgatatgggctctcttaattttgttacaaatgtaaacatatacagcatagccaggcaaacctatgagttagttaacaccttgccatgactccccaagaattacatgctctactcagtacagtccagcagcagttcccctagcaatcaagtcacttcatractccatgcctttacacaaactgttctctatagactagcaatctaagtttttgaagtaattgtgaatgtatgtgtttcttactagttaacatttactagcatttgtttttgttgttattgtaaattgtacttgcgttagccaggatacatccttaaattcaattgcaggggtgggaggagttgcacgggatagaacataggctgacacagactccagcaaactgtaactgcaccacctggatgatggaacctcctccgaccttccaggaggtagaca

SEQ ID NO: 529343 - DNA, 664 bp, Homo sapiens
tgaatttaatccattttgctacaaaggtgaacaaattatgttcccttctttccaatgcacatccagaaaagctccatattgaatatcagaagattgtgtaagtgaattataacacagataagaataatttaaatctggattccaaatattacagctctcaatgtcccttcacagatggaatccttcttggctgactacacaacatmcgacatgatgtcataatttatctttcacaaagtagagtttctttttaccctgtccctatttctcccttgtagactaacagacattcatctccctagctgctgttggattcatagatgcaaactcaatctaaataaatttgagtttgagttataaaattaaagtgacattttacttaattactttcagaatgttaatgagtaatagaaccagaaactaatatcctgtggtcagtatactgtcaacctcagtgtgcttctagaaaaccaaagtatcaatttaagattacttgatgagcacagaatcagagcaagagaagcggaccataaaaagcatatgtttaatggcatcagataacttaaagtatccttccctacacagggttataccagacacccaaataagacacatcacacctgcaaatgacaacattctctttttaggcacctctgggatgagc

SEQ ID NO: 529344 - DNA, 491 bp, Homo sapiens
cctgaggttgggagtttgagaccagcctgaccaacatggagatacccatctctactaaaaatacaaaattagctgggtgtggtggcgcatgcctgtaatcccagctactcgggaggctgaggcaggagaatcatttgaacccgggaggcggaggttgccgtgagaggagattgcgccattgccctccagcctaggcaacaagagtgaaactccgtctcaaacaaaaaaaacattacagctattattattatttcatttaatcctcacaaaaacctcctgaagtaaggtgctatcataacccattctaactatgcagaaacagaggaacaggcagtgtaagcatcttgcccaaggtcatacaactaataagtggtagagccatgatagtctggttccaaagccttaaccactagtctatattgcattttagacaaaaagacagatgatacagattagyaaaacatgtcaaatagccttaaaaaacaacccta

SEQ ID NO: 529345 - DNA, 588 bp, Homo sapiens
gcatacttcctcctaacaatacccacatatgatataagggtgattttttcacttgcaagagacagtttaggaaagtggtgtatatttgacaggaatcagagatggaaggagtagggatgaggtcctgggaagtccctgtcctcaggatgtgtgtgcaaaaccctctcctctcagagcctgctcagggtgctgcaacttttcaaagcactcagcctgcttcctcatgaatgtgactctggtgtatatttggaagtggaaaatgctgacctctctgatctgtttgattggtcctagcaccacagaaagcatcttgtgagggaggaaggaagaagagcctttaattttctttaatttgtcatggttttcattttcatttgaatggtatgtgtcagaagacctgagtgtggtgaaatgtcttgcccttgtcatcatrtcctctccacaatctgcctcaggcccatgaactgcaccctggagtcgctctggcaggaaaccgttccttcctcatgtgcacagggaccacttcccagtccactcttgttaacgttataacaaaagcttatgtgtgaccacttttaagggagggga

SEQ ID NO: 529346 - DNA, 456 bp, Homo sapiens
tgtagaacacttcctgcccgggtgaaaagttgtccttgtccctttgggtacgctcagcatgcaggacatctggaggtggctgacatactggggagagagaaacaaagtacagctaattgtgtgaaaacaacttttttctcactgttaaactggccaagggaataataattacraatctatatataataataaagttagaataacagccttattacattgataaactaaatacacggggcaaggaagatgtcttgccatcagtcatagaactgacacatggcacaactgtgactaaaacagaggtatctccaattcattgtttttcatctaaagtatgcaactaagatttcacaatggacagttccttctagaatgcttccaattactgttcacccagtacaaaattgggaggaatgatggatttttgtatcttcatacttcctttctagaaaggca

SEQ ID NO: 529347 - DNA, 456 bp, Homo sapiens
tgtagaacacttcctgcccgggtgaaaagttgtccttgtccctttgggtacgctcagcatgcaggacatctggaggtggctgacatactggggagagagaaacaaagtacagctaattgtgtgaaaacaacttttttctcactgttaaactggccaagggaataataattacgaatctatatataataataaagttagaataacagccttattacattgataaactaaatacacrgggcaaggaagatgtcttgccatcagtcatagaactgacacatggcacaactgtgactaaaacagaggtatctccaattcattgtttttcatctaaagtatgcaactaagatttcacaatggacagttccttctagaatgcttccaattactgttcacccagtacaaaattgggaggaatgatggatttttgtatcttcatacttcctttctagaaaggca

SEQ ID NO: 529348 - DNA, 456 bp, Homo sapiens
tgtagaacacttcctgcccgggtgaaaagttgtccttgtccctttgggtacgctcagcatgcaggacatctggaggtggctgacatactggggagagagaaacaaagtacagctaattgtgtgaaaacaacttttttctcactgttaaactggccaagggaataataattacgaatctatatataataataaagttagaataacagccttattacattgataaactaaatacacggggcaaggaagatgtcttgccatcagtcatagaactgacacrtggcacaactgtgactaaaacagaggtatctccaattcattgtttttcatctaaagtatgcaactaagatttcacaatggacagttccttctagaatgcttccaattactgttcacccagtacaaaattgggaggaatgatggatttttgtatcttcatacttcctttctagaaaggca

SEQ ID NO: 529349 - DNA, 629 bp, Homo sapiens
ctgcaatattcattgtgatatatatatatatatatatatatatatatatgatatagatcacatgtatgaaatgaaatatataaacacactgaatacatatattcattcatgtacacacttcatggctagtttcacagaagtatttgtacaattgaatcttgttacaaatatgaaaaggagagtgttctgaaagtttccctggtttcttggcagtaaatctcttttgtaaaatttctcctgatttttcagactggtctcttttacatgtatttcctgtttcttctcataagctcaakggttttctgcttcatgccatagagaggttcctcacttattcagcaatgcaagatgagtagggtacagtcaggaaatttaccaattgcatttaaaaatgcttaaaaaaaagagagaaaaggagacatcggatttattctaatttttgtcagattctaggtgttgtggtctgtgaggcctatgctggcaaatgtgctggacaccacaaacttcctttcagtgtctgctgtggtgacacaaacgtaactcgtattcgctacctggcttagctgttcccatgaagaatgagattgaggcagagcctccaccgtgtgctgagcaagggtgagcaccaa

SEQ ID NO: 529350 - DNA, 629 bp, Homo sapiens
ctgcaatattcattgtgatatatatatatatatatatatatatatatatgatatagatcacatgtatgaaatgaaatatataaacacactgaatacatatattcattcatgtacacacttcatggctagtttcacagaagtatttgtacaattgaatcttgttacaaatatgaaaaggagagtgttctgaaagtttccctggtttcttggcagtaaatctcttttgtaaaatttctcctgatttttcagactggtctcttttacatgtatttcctgtttcttctcataagctcaagggttttctgcttcatgccatagagaggttcctcacttattcagcaatgcaagatgagtagggtacagtcaggaaatttaccaattgcatttaaaaatgcttaaaaaaaagagagaaaaggagacatcggatttattctaatttttgtcagattctaggtgttgtggtctgtgaggcctatgctggcaaatgtgctggacaccacaaacttcctttcagtgtctgctgtggtgacacaaaygtaactcgtattcgctacctggcttagctgttcccatgaagaatgagattgaggcagagcctccaccgtgtgctgagcaagggtgagcaccaa

SEQ ID NO: 529351 - DNA, 583 bp, Homo sapiens
tcttaatttcaatctcagttatgtatttttaaattaatttttaaatttataattgacacataattctacatatttcagtgatacatttaaaaattaatttggattmattgtatccatttttctaattattttgtgtgggatgagatggcttcaaaagtcagccttgtcatgatgttgccttgatgtgtacttatatgtagtgttaagtacaacatagtatttctcgagtcatacattttcaggaagtgtcaatagtctttaacttctttttttattgttaatggttacattcttttttcttttttacaaataattttaacttttattttagattcaagggatgtgcagttttattgcatgggtatattatggaatgcttagatttgaattatcccattacccagatagtgagcataatactcaacagttagtttttcaacccttgcctccttcccccttctattagtcccgagtgtctatgtccatgtcccgagtgtctatgtccatgagtactcaatgtttagctcccacttatatgtgagaacatgcagtatttggttttctgttcctgcattaatttgct

SEQ ID NO: 529352 - DNA, 522 bp, Homo sapiens
tggtgtcttggacccagtaagttaagtcacatcactgaccttcagtgtccacatgtataaaatgagcataactgacatcctgatctctgagagagacgttttgaaaatcagatggtgtaatgcatgtgacagtgttttgtaatctgaaaacccccatgcatgtctgaaaaaccatgactaagaagtcgtgcaagactgcaggatcaccgaaaarcgagaaatctcaactcctatgatcaggaaaggatgagtgaaaggtatatggctttactagcacttaaagagtgaatctagaaacagattgcatacgacaaaaaatagcagaggagctaggattgttttgttattatgagttactcacagtacccgtaaagtggtatagtgctatttgaaagaggacttagattagctgcaaatagatattgcaaatgtaggacaacccctgaaaaatgtgaaaaaaagaactataatttatatgttaataagtaagagagaattgcatcatataaaatgctcagttaa

SEQ ID NO: 529353 - DNA, 522 bp, Homo sapiens
tggtgtcttggacccagtaagttaagtcacatcactgaccttcagtgtccacatgtataaaatgagcataactgacatcctgatctctgagagagacgttttgaaaatcagatggtgtaatgcatgtgacagtgttttgtaatctgaaaacccccatgcatgtctgaaaaaccatgactaagaagtcgtgcaagactgcaggatcaccgaaaagcgagaaatctcaactcctatgatcaggaaaggatgagtgaaaggtatatggctttactagcacttaaagagtgaatctagaaacagattgcatacgacaaaaaatagcagaggagctaggattgttttgttattatgagttactcacagtacccgtaaagtggtatagtgctatttgaaagaggacttagattagctgcaaatagatattgcaaatgtaggacaaccmctgaaaaatgtgaaaaaaagaactataatttatatgttaataagtaagagagaattgcatcatataaaatgctcagttaa

SEQ ID NO: 529354 - DNA, 577 bp, Homo sapiens
gaaataattagtcaccattatgaaatagacttttggactgcatatgctttttcattttgtaacctacttttctcatgggagatgtgagcattttgctgtatccttaatccagtgtttcttgacctttttttttttatcacccctcctgaggagcctttttagacagtttttcctaatcayctcccactccaaagaaagtgtaataccacagacctactatatatcattcattcattcattcattcattcattcattcatttggaaatggagtcttgctctgtcacccaggctggagtgcagtggcgcgatcttggctcgctgcaacctctgcctcctgggttcaagcaattctcctgcctcagcctcccgagtagctgggattacaggcacccgccatcatgcctggctaatttttgtatttttaatagagacagggtttcaccatgttggccaggctggtctagaactcctgacctcaggtgatctgcctgcctcggcctcccaaagtgctgggattataggcgtgagccaccacacttggccgactatcttttaaatgtactgtggcctttggaa

SEQ ID NO: 529355 - DNA, 578 bp, Homo sapiens
ggctctgttcttaaggaatcagagtacatttgccctggaaaagacctgactggtaacataaactaaggtgtggacctataacaagattggtcacaggactggcatgggtggccaacccgcctgctccactgggcaccaaggcatcaggaggcagggctgtggggaagcacaatccacaggcacccagccgggctctcctccaccccccacctttacagatcctgctacacagtgagaaacagaagccaaggcctgccctgcccacccttccctttgctcacgcctgaggaaggacacagggctgggaagagacgggggccctttcccggccctactgcagggggaacttggggaaagggtacasagttaaccagggatatggtgcctgccaacacaccattgggaatcatcccaagggaagagtggagatgccatgaaaacattgaaacatacttattccacaatcatctggcaatcactagctcaaaactcttaaggacttctgacatccccagcactcacataagatacagatgaaccacaatctctggactcaagaaatgtatccagctggagag

SEQ ID NO: 529356 - DNA, 598 bp, Homo sapiens
acagagtatccctggcacatcactggcccactcctgcttcgcaccaccagaatcccctgaactttaccgagatgatacagatgtaattaaacctgaattctagtctctccttgtgacaactcagtggacaattaatgatgataaaagagcctgccagctgctgcctgacataccaatgtgagcttccaactccgaggaagatggagggtgaagggcaggtccctctggctycatttcaatctgtcttttatctcacactagctaaaaagtaacacttactttggggaaatttagattctttcttctcctctcttaaaagcaccaaacagacagtcagaggtaatgcaaggtctatgaaataaataagaatgcttccgggaagagtaattgaagcttcatcaccagggaccgtagagtcaggcctaaagccagaggagcaggctgcgctcccacccctgatctcaagcaggggatacacccaccgcctctttgccacagggacccatcagttggtagggaggggcttcataagggagacacttaatggatttttccacagtaatgctgttcattccaaactgacttcaatcacgtttgt

SEQ ID NO: 529357 - DNA, 580 bp, Homo sapiens
ttccatttctcagagtcttggtgctgttttgccaagatattagrcaaaaaaatggtataataacactggtcatattttgagttattttttaaagtgttaagttagttgcaactttaatttgaatctagcatcctcttgtccagaggttttcaactggggattcatatcattaacctacgaagatttatcaaattcagatgtttaggatctactcgagattttctgagtctctttccttgataaacttgatatattctcggtgtagtctaactatatgtttagtatatccatggtatattgtgtctcaggattattatatgttatattgaatattttttcctctgtgaagattacattcacttattttcaaaatgtagatgtattatctactcttctttgaaaataggattaatcattatgtttatagatattttatctaaaactttttggttgacatttcattttgcatgccatggaaacattttttgccaggtgcattattcttgtaataactctcatcagatcttttactttggaaagttattagtaataactattactagccatttaaagccttttg

SEQ ID NO: 529358 - DNA, 643 bp, Homo sapiens
tcacaagtaaaataccctctaactttagtatgtaaagccaatctttagtttataaagacaagaaaagcacctttctgaatttaggccagtgacaagaactctctaagcctcaatgtccccttctgcaaaatgatcatgattaatatcagcatgcatctcataaagaaacckgattagggttgttgtaaggattacataagatgatgtatactgaacacttagcatagtacctggcagagtagccaaaaggatttggtagcagcagcagcatcattagcacttaaaaaactaatgagactggtgaaactctctgaaagttacatggtatttaccagcgttggaaatgtcaataccttttaacccagcagatgtatctcctggtatctatcctagagaaataatctcatacacagcccaaagagcatgtaaaacgctgttaatataatacttgtttgctataacaaaaaaatcctcaaataacttaaatgcctattattgacaaaatcattaaataatattttattgtacaatgtaatactatgcaatagtgttaaagaataaggtagatttacatgtactgacacacataaaaatctctaagatgtattattgctaagcaggaagaaaaatgcaagttcagaac

SEQ ID NO: 529359 - DNA, 453 bp, Homo sapiens
tgaaggttgggtttcattgggggcttgtccctatctgcctaggaatttgttggccttctactactatcacaataatttttcaaatgaataggtacaaatcccttagcgtagaggagctccttgaataccagcatgactgggcagttgggctaccaygggtctaaaatcatggatgggaagctcctccgagacccaatatgtttttctctttctacctacggcctgcacctcccccattttgagcctataaaaaccctgccctcagccacacgttgggactacccgccttctggtagggactacccactttgggtctcctctccactgagagctgttccgtcactcaataaaactcttcttggatgcaggacaagaacctgggacccacccaacagcgagtgagaaaggagctgtaatactgtagccttcctgtcctctgttggcgccaggcag

SEQ ID NO: 529360 - DNA, 691 bp, Homo sapiens
ctcttggtaaaattctgcacaatttattttccttttttgtacttttctgtaccctatgtattttccacaataagattattttactgttgtaatcatggggaaattttatttaatgaggtgggaccatacaatattttaaaatgacaaaaataggcatatgattctcacatattttgtgatattaaaattatatgaagatttcagtcccatttttattcgtttgttgacacctaactataactatccaaatgagaacctataattatttggaatcaataaatatttcaatttctataccaccatgatagaaaattatatcaattgcccattcttgattttgtggtaatttgttgaggactgaggtgtgtcatctttaggctgtattttgacccacctccccttcatatttccctrcattgtccaatttaatacatatcacagcacagcagctttatttctttatgcctctcctattagattttgagttatttgaagactgaactctcatttatgtactcaatacatacttattgacaccttaatataccataaaccctattctaggtcctcctggtagaacaatgcagcaggagagagggaggcatggatgacaaaaagctcttaacctatatccttgtgtctgtatcccagctagccctgtgcttagcacctgacaggtactagaaaagca

SEQ ID NO: 529361 - DNA, 606 bp, Homo sapiens
gcttttttcttattgatttacaccggttctcacagggaccttttttttttttttttgccaaggttggtgatttgtgaacatcactataacaattcctttcaaaaagcaaaaatgtactgtatttcatatatgtctctatcattctgtagttaaaaaattcaaactcagctcatattctaatttttaaatagcagaatcagaatcagaatcctcagattttatcatcctgaggcycttggcatctaatagcaacatgcactgaagtccatgttatagtaagagctgaaaatcatcctcccactataacaggaacaaaagtgtggggaaagaggaagagagaaagcaatacttttcctgggatgaaagcctctacagcacaaggcctgattagtaaatggaaattctggatagtctctgaatagaatccttttccacctttcaaataatttacagcttaatgtccgctaaatttagtaacttctcccatttgtccatggcaaggagattcttggctggctttccatggtcattacagaccttctcatagatccctgaaatatgatgtggccatcaaaatgtcagcacttacctgctgcccacattgtg

SEQ ID NO: 529362 - DNA, 597 bp, Homo sapiens
tcttcagaatcctaggccaccatcagccaagtcttttcttcttcttcttcttctttttttttttttttttttttgagacagagtttcactttgttgcccaggctggagtgcagtggcacgatcttggctcactgcaacctccgccttccggtttcaagcgattctcctgtctcagtytcctgagtagctgggattacaggcgcctgccaccacacctggctaattttttgtatttttagtagagacgaggtttcactatgttgaccaggctggtctcgaactcctgacctcgtgatctgcctgcctcggcctcccaaagtgctgggattacaggtgtgagccaccacaccgggccaagccaagtattttcttgcttgtacccttaggggtgctactctgaccttcagtttgggacagaactcagctcagtgcacagaaaccattcccatgcctgactttccccattagacactgagctctctgggagttctatgacgagtacatagcaggttcacaaagactattgaatacaggtagctccatgtttggacatacagagacctgtgttcttgtctcaatgtgccactaagttgcagt

SEQ ID NO: 529363 - DNA, 563 bp, Homo sapiens
gctcctcaagcacggccagtgaggccgaggaggtgctgagagccagcgagggctgcgagggctgccagcacgctgtcacctctcactttcactgcctgaatttcctctggggactactgcaarggatcaggttcctcttcttgtgacttgagatacaggatctttgtcttttgagcacatgagtcaatccataacctccagtagccagttaaacctaaaaattttcagagttctttctttgtcttaggcagaagcccactattcctggtattctttctgggtttattctccacctcccttcattaatcaggtatcctaaatatttaacttatttttctacaaactgcaatttgttcttagagatttgcaaccccctttctcctagggaattaagcaagcttatggtggtttctgatactttggtcttcctctccctagaaattaaaagatcatctacatattgtaataactggtttcccctggaaggttggaattccttcaggactttttctaagatttgaccaaataagtttgaggcatctgtgaagccttgtggcagcaca

SEQ ID NO: 529364 - DNA, 445 bp, Homo sapiens
tgggagtcaggaagcaggactacacagaagctgttgaactgtaatgccggtaagtcagaggcttccrctgatttcactgggagcatggagctggaattaaggcaagggctcggtttttatgtgcctacatcaaccagtcaccggatggggctaccgtgaggagggataaagtcttgcccatggcagctcccttcagctcaggcaggtcccagagagggactctgcggtaatgctgcaacagccagtgctctggggagcggggaaatgagctcctgtcctggagaggggatttgggctgcataccacggtggccatctcttctacatctagtcatataagctatcctaaaataaacccctgttctatttacaggacccctttttctgtctttctcagtgaactctgtgctcctggaaggcagaggtcaggtcttacttaccacaac

SEQ ID NO: 529365 - DNA, 445 bp, Homo sapiens
tgggagtcaggaagcaggactacacagaagctgttgaactgtaatgccggtaagtcagaggcttccgctgatttcactgggagcatggagctggaattaaggcaagggctcggtttttatgtgcctacatcaaccagtcaccggatggggctaccgtgaggagggataaagtcttgcccatggcagctcccttcagctcaggcaggtcccagagagggactctgcggtaatgctgcaacagccagtgctctggggagcggggaaatgagctcctgtcctggagaggggatttgggctgcayaccacggtggccatctcttctacatctagtcatataagctatcctaaaataaacccctgttctatttacaggacccctttttctgtctttctcagtgaactctgtgctcctggaaggcagaggtcaggtcttacttaccacaac

SEQ ID NO: 529366 - DNA, 484 bp, Homo sapiens
tggttaaacagcactggggctkgggaaagaggcctgtgggggcttcaggacactgatgtcttttacatcccagggactggacaaaaattaccaggagaataagcagtgatccagaagagaagagggtcaagaccgctgctcttgagaattgaaaaggttggccgggtgcggtggctcacacctgtaatcccagcactttgggaggccgaggcgggcggatcacctgaggttgggagtttgagaccagcctgatcaacatagagaaaccctgtgtctactaaaaataccaaattagccgggtgtggtggcacatgcccgtaatcccagctactcgggaggttgaggcaggagaattgcttgaacccggaaggtggaggttgcagtgagctgagattgcaccatcgcactccagcctgggtaacaagagcaaaactccatctaaaaaaaaaaaaagaaaaggaagtgacattgtttggtcactact

SEQ ID NO: 529367 - DNA, 585 bp, Homo sapiens
atctggctcttacgtgtatcctcttcatccccttcatcctcatgcctaatgagatttaaggcagggactcacttctcttcttgctctaggtctgcccaaagaaagaagggatttgggctcaaagttctctctctgtttctctccatttctctggagctatgagcgtgatacacacatacaccttctgctgagccacctaccctatgccacattggaggaaattctaattctatgaggtagactcttgggccaggcattagtagtgggtaggattgctgcctcatggaaaaaaaacactcttcgatgaggttactttggtaagtggccagatctgtyggcattttgcagatgagatccacagtaagtgggcggagtgtggcccctcatccctagcctaccttgataccctctgcagttacatggctaaatggagtctgacttcagggaaagactaagaagcaaaaagccttgcgtaccagctcttaactttgctgaatcattaacccaaattgttgaattcagcattcaccagatatcagggagcatcaggggctggccccactgtctggaaagtcgcattccgct

SEQ ID NO: 529368 - DNA, 609 bp, Homo sapiens
ctaatgagcaatcagcatagcccagatctccattttgcattcttgcccccacactatccacaaccctgattagaggagcaaacacgtgtgcactgagtgtctgctggagtgagcattatgatgggcccttaggatctgcctgcaggtacctcatatcctggaaaagtacctcttgcaagagcagcctgggaaaggccagaggtctccttaaaacttcttagaaagttaaaatcatgattccagttctacctttctcaccaggtagctgaaataatcaaccacaagaaagataattacatttaaaccaagtaatttataatctataaactattccactaatagaatataacacttgttaatattgatcagcaaagccaaaaaaaaaaaagggggaatcataagtgagatttgactagaacttggccttgaaggaattggtaggaaaaaaaagggaaataaaaagagggaaaccctaacccttttggccaactttcaattacgggcctttttctgtgttacttaacagagcagtgccagagagtagacccacagacayggaactacgcaggccgtctgcaccactaaacggaaatggatgtgtgacctgca

SEQ ID NO: 529369 - DNA, 645 bp, Homo sapiens
ttccattttattacctgatatactccagtgctkttataaatttttcagtggggaggtggttgcaaaggttacagcagatcagctattgctggctagcctccaaattggtctctaatttgaggttgatcggggtttatcgattacagaacaggctcctctagagggatatgaagcaccgccaggtcctttgagttttaagctgtggctcgtagtgttctggcgagcagttttgttgatttaactgttgaggtttagggctaagcatagtggggtatctaatcccagtttgggtcttagctattgtgtgttcagatatgttaaagccactttcgtagtttattttgtatcaactggagttttttacaactcaggtctctgttgactgttgcaaaatggttcagatacaaactctctaacacattgtttccctttttttgtttaccagaaacacaggattcaattcaatacttttatttacttcattaaaatgaaaataggttgaaaaagaggtaatgtaaataatagctaacatttattgagtggttactatgcaccaagcactgtgatttatatacacaactcatataaatgaaattgtaacaacatacacagggagtaggaactattactgtctttattccacag

SEQ ID NO: 529370 - DNA, 619 bp, Homo sapiens
ctttaatcttagcagtgaacattttaacaaggagttaatgtttgcaagacatgtacggaaagcagggttgtccacgtgtttatgttttcaagtacacatgaaacgtccctcaacacagtcatttcacaaatattacccaacggcactctcaggtacatgtgaatatttgctcttttttcaagaatcttgcaatcgatagtccaaggaaataatctgttatctgtgaaaaggctaaaatcagtaaaaaataagaaatkatttccttgaattattgttcccagaattcttaacaaagaacaaaagaggaagaggggagacaggtgggtttggcctctcttcctgaagatggcagcacttgactcagcaggttcaaatacacttttggttctggatcaattgccctaatgtcacttacagggagagtgcacgatcttctacaatacatggaggtgggggcgagactgtaggtgaaatcctaaaacacctcataaaaggggtagtcagccctaaaaatggaagctgtgaccttgaaagcttggaataagtcaagtgggtggcccacaaccaacacggagaagctaagtcaaagatgtttttaccagcagctatgcagagggaa

SEQ ID NO: 529371 - DNA, 619 bp, Homo sapiens
ctttaatcttagcagtgaacattttaacaaggagttaatgtttgcaagacatgtacggaaagcagggttgtccacgtgtttatgttttcaagtacacatgaaacgtccctcaacacagtcatttcacaaatattacccaacggcactctcaggtacatgtgaatatttgctcttttttcaagaatcttgcaatcgatagtccaaggaaataatctgttatctgtgaaaaggctaaaatcagtaaaaaataagaaatgatttccttgaattattgttcccagaattcttaacaaagaacaaaagaggaagaggggagacaggtgggtttggcctctcttcctgaagatggcagcacttgactcagcaggttcaaatamacttttggttctggatcaattgccctaatgtcacttacagggagagtgcacgatcttctacaatacatggaggtgggggcgagactgtaggtgaaatcctaaaacacctcataaaaggggtagtcagccctaaaaatggaagctgtgaccttgaaagcttggaataagtcaagtgggtggcccacaaccaacacggagaagctaagtcaaagatgtttttaccagcagctatgcagagggaa

SEQ ID NO: 529372 - DNA, 612 bp, Homo sapiens
tgggatttgaacacaggcatactgacaccaaagctcattcacctaatggcctcattatattccatcccctacgtgtaaatcattttactaggtatatatttcagagtttttgctttaaaggttaggtattatgaatacagtgctgaagagcagatatttcttttttttgctaacagaggagatctaaaaccaactctgagtgaagaaaggagtgtttaaaagaagagaatcacaggcagtcattgtaaaaactgggacctgcctggctttaaggctctatacyttgtaatatagtatagtatagtaatttaaagcatgttactagtatgtttatattactatagtactagtacactagtagtatagtataataatttaaacatgtgtagccgtagatgtgatggccttgccagaaaagaagggaaggaaaaggaactattcaggacactccttcaaatttcaagagtgtcaggtggtacaaaagaaaagagcatgagacatgaattcagattttcttgggtccaaaaactaatttttcattacatcgtctgaactgttgagtgagtcattgaaactacactcttcttgactgaaaaatgatatgaccttcgc

SEQ ID NO: 529373 - DNA, 563 bp, Homo sapiens
gatcttttccatggcaagcttttagctgcaattcagttattttcaaaatatccctggaaaatgtgtctaaatgacattatttcccttctgtattatcagtagtaagcatgcataagcagctttttagtaaacgtgcccatttaagctggtgaaatatcaaaccaagtaaccattctgacaaaaagtggtaactggcccatggtgctctcttctcacccttttatttaaattcaattatagttcaaaagytgggacctgtacctagcattgtgttcaggccttagcatacattgacacctttaatccctcaacaatcttatgatattgctatgcattccaatttttcacatagagaaattgaggttcacataggtacaaaacggcaggactggtatgtaaaaccgatctatccaaatccgaggcctaaagtttttaccactgtgttctattcctccccagaattccatagtattccatggtaaaacatagaagagccccatagggacattcatgagtccagtttttagattaatggactatttattttgattaacattgagttt

SEQ ID NO: 529374 - DNA, 563 bp, Homo sapiens
gatcttttccatggcaagcttttagctgcaattcagttattttcaaaatatccctggaaaatgtgtctaaatgacattatttcccttctgtattatcagtagtaagcatgcataagcagctttttagtaaacgtgcccatttaagctggtgaaatatcaaaccaagtaaccattctgacaaaaagtggtaactggcccatggtgctctcttctcacccttttatttaaattcaattatagttcaaaagctgggacctgtacctagcattgtgttcaggccttagcatacattgacacctttaatccctcaacaatcttatgatattgctatgcattccaatttttcacatagagaaattgaggttcacataggtacaaaacggcaggactggtatktaaaaccgatctatccaaatccgaggcctaaagtttttaccactgtgttctattcctccccagaattccatagtattccatggtaaaacatagaagagccccatagggacattcatgagtccagtttttagattaatggactatttattttgattaacattgagttt

SEQ ID NO: 529375 - DNA, 622 bp, Homo sapiens
cagagaaaggaaacattggcccctaggtagcaactgctaaacatacctacatttacatgaacaaacagagaattttacttcttagtttaaaacatttgaatctaatttatctcactatatttaagtttccccttaagaactatggttaaacttctgccttaccttttacataacaaaaaaatgcatattacgggatttctcccagtttgctacataaatttgagctagaggtagaacycggcttgcaactcttaaataatagttttccccacatctatattcagtaagattttaaaattttcatcaaaggactgaatttcacatagaatgagactaaagcagggtcttccccggcctcacaccaaccatggccaccttcattcatgcatttgcttaaacagctcccttgccggttgaccatctggaaacgctgtggtgtacattctattcagtgtcttcatggcacagaaaaggctcccaagattccaggagtcctgccataccgtggaaggattcagaagcagtccacgtgttaggatgtctacagttgagaaggaggtccagaagagagtccagtataattagtctacagcaaagtgaaaacagatggcacttctacgca

SEQ ID NO: 529376 - DNA, 591 bp, Homo sapiens
gcagattgcggagcccacacccaggattttatttcagtagatttgaggtgggggctggcatgtctaacaagttcccaagagatactgagacttcttattcatgggccacaccttgagagcaagcgggctagaataaatagactctataacacagtggtttgttcaaaaatttatgtagtaaaatactctatagagaaatcaaattgtatcatttcttactataaactcttaaggaagaaactaaagtaattcttccacctcccttccaagactagacagtaagggcaataaagaaagaaaactagttggagtaagataatagagagtggtggagattgtcaactggagattacgtgtccagtctaaaggtattgaagtttaattaaaacaaaacaaatcactatgtgagacaaacaatttctgcctttaaaattctgggcccaacaagaatattagactggattgcctgaggccaggtgcagtggtgcgaacactttgggaggctgagacaggagcatggtttgaggccaggagtttcaggccattctrggcaacatagtaagaccctgcctctacaaaatatttaaaaat

SEQ ID NO: 529377 - DNA, 591 bp, Homo sapiens
gcagattgcggagcccacacccaggattttatttcagtagatttgaggtgggggctggcatgtctaacaagttcccaagagatactgagacttcttattcatgggccacaccttgagagcaagcgggctagaataaatagactctataacacagtggtttgttcaaaaatttatgtagtaaaatactctatagagaaatcaaattgtatcatttcttactataaactcttaaggaagaaactaaagtaattcttccacctcccttccaagactagacagtaagggcaataaagaaagaaaactagttggagtaagataatagagagtggtggagattgtcaactggagattacgtgtccagtctaaaggtattgaagtttaattaaaacaaaacaaatcactatgtgagacaaacaatttctgcctttaaaattctgggcccaacaagaatattagactggattgcctgaggccaggtgcagtggtgcgaacactttgggaggctgagacaggagcatggtttgaggccaggagtttcaggccattctgrgcaacatagtaagaccctgcctctacaaaatatttaaaaat

SEQ ID NO: 529378 - DNA, 526 bp, Homo sapiens
atgagctagggggccagagactttcgtagtgtttctatttccctttagmcttcagccttccctgaacacctgcacggcagagcgggtttctttctcagttcttcccttccctcaggggatatactcccttcactggttactccctgctaggcctgtgatgggcaggggatttctcacttgtccttatccagcctcactctcaggcaatctgtgttgtttgatcagcacccatgtcacttctctcagtagccaaactttgccttttacagtggttggtcttgggtggtatttcttgtctcttcctgtggtaacagctctctgttagtaatggtgaaggatcctggccccaaggtagtttaacatctttcttctagaggcagaaaagttttgcttttactcctatccccagaagtcatagatctttgcttgtgctttgggaataagaggctttgctgcccctccgcaagaggcttttatagcttcagagctactgagaaagtgggaggggtcacctgtctgtccccag

SEQ ID NO: 529379 - DNA, 604 bp, Homo sapiens
tgcatcgtgcaagtgctttgttaaaaatattcttttcattttgtgtctgtcccgtaattataatggaagtattgtgcaagtcagccagtaagcatgtggagtaaaatatttgggttttataacatccgtgcggtttttaaagtgcattgtcaagtggagtggctttgccatatccttcatgtgtcacctctgacttcagcctcacggttttaaggtgccgcacgccatgtaattgtaagaatccactgctctttctcgatatttacatcgtgcacacgctggcctccgtgaaagggttccctgtggagttctgagacttcattctggttaatttggggaaaacagcactgcacccttctcaatcactaggaccacgttaacygctctcctctctccctaaaggtccaacatctcaagaaagccacaaaacatggtcaactcaatttctgaggcaaatgcctgaagtgcccactgagtcattaaggaccaaggagagtaaggaaacccaatgttcctcgtgagaaagtgatttagaaatgatcccttaattggtcttcaagctggggaagaccttggtcacctgtttcaactgtttggatgagga

SEQ ID NO: 529380 - DNA, 544 bp, Homo sapiens
ggaatagcagggaagcagatgcaactcctattttcctctagtccaatccatgcatctctatgagtgcatgcttgcaggacatgtgtccatggtgggttaggctctgggaggcagtgtgcactaggctaagtgctcagcatggtcataccagctcgatttaattcctggtcagtggcttactagctgatgacctcagacaaatcaaatacccctctgagcctctgagctgatagctcctacaggcctaagccatttgttttcaccataatgctgcatggcaaaccaccccaaaactcagtctgtggccagcagcrttggctaggctgagctgggcagttcttcaggtctgggctgggctcactcagctattctcattcactcacggcaattggctctcagctggtattgtggagatgcagaccgtgtgcctctcccctcaggctggcttgggcatgttctcatgaccgtggtggaaaaggagcaggggccatcaggacttgggtgtaagtacttcccagcttttgatggtgtgttgtttgcttac

SEQ ID NO: 529381 - DNA, 537 bp, Homo sapiens
tgtgttcttaccacacccctttatggtgttaagtgagtgtcttggtcatcacaggctgtgggacaaaataccacagactgtgtgtcttaatcaatagacattgatttcctatagttctggaggctggaagtccaagatcaaggtgctgggagattcayttcctggtgagggctctctctctgatgtgcagacagcagcccccttgctgtgtcctcacatggcagagagaggaccctgacctgttcctgttcttatggagacaggaatcccatcatggggaccccaccctcctgacctcatctaaacctaattagcttctaaagtaccagctccaaataccatctcattgtgggttacagcgccaacacacgtgtttgggggcacagaatccagttgatagcagtaagttaatgcatagaagggtggcttgcttgtttattgtcttggcattctttctacaccattagactgggaccaagcccctccctctgctgtcatactttcctaggacattgggaaaaattgtgttcctttgag

SEQ ID NO: 529382 - DNA, 537 bp, Homo sapiens
tgtgttcttaccacacccctttatggtgttaagtgagtgtcttggtcatcacaggctgtgggacaaaataccacagactgtgtgtcttaatcaatagacattgatttcctatagttctggaggctggaagtccaagatcaaggtgctgggagattcatttcctggtgagggctctctctctgatgtgcagacagcagcccccttgctgtgtcctcacatggcagagagaggaccctgacctgttcctgttcttatggagacaggaatcccatcatggggaccccaccctcctgacctcatctaaacctaattagcttctaaagtaccagctccaaataccatctcattgtgggttacagcgccaacacacgtgtttgggggcacagaatccagttgatagcagtaagttaatgcatrgaagggtggcttgcttgtttattgtcttggcattctttctacaccattagactgggaccaagcccctccctctgctgtcatactttcctaggacattgggaaaaattgtgttcctttgag

SEQ ID NO: 529383 - DNA, 611 bp, Homo sapiens
agttgttgaggttaatatctgagcaaaataagcaacacgatataagaacaaaacaggccgggcgcagtggctcatgcttgtaatcccagcactttgtgaggccgaggcgggtggatcacctgaggtcgggagttcgatactagcctgaccaacatggtgaaaccctgtctctactaaaaatacacactagccggtcgtggtggtgtgtgcctgtaatcccagctacttgggaggcmgagacaggagaatcacttcaacccgggtggcagaggttgcagtgagccgagatcacgccactgcactgcagcctgggcaacagatcgagacactgtctcaaaacaacaaaacaacaacaacaacaacaaaaaaccatggtgacatgtatgacatttttcgcgaacattcttttcccttagggtccatgttctgaaagttgcacgttccatgtggcaaatcttcctggagttctccttttattctgaggtctgggacaagaaggaaccacattgctttcacttgaagcaaatatattgtgaagtagggggcaaatttcaaatgcatttttcacctgaactccgagacttcacggatgtttccgactggcaggggct

SEQ ID NO: 529384 - DNA, 545 bp, Homo sapiens
atcgttaaagtagaaaaaatcttaagtcaaacgatcttaagttggagaccttatatgtatgtttatatacctgtaatrcaagtatatatgtatatataatatgtataggtatatatgcatgtgtatgtgtttgtgtgtgtgctttgcatatatgtgtgtttacaggtacatgcatgtgtgtgtgtgtgtacatgtatatgtacatgaaccaaatttctgtacttaacggttattttcagatttattaagcaagtttggctgtttatgggatttcttttatttactataatctgtttaatcttttactttttcaggatacagtcatgtaccacatgatgttttggtcaatgacagactgcatatatgacagtagtcccataaaattataatgccatattttcactgtaccttttctatgttagatatgttagatacacaatacttaccattgtgttacagttgcctacagcatttaatacagtcacacgctgcccagatttgtagcctaggagcataggctgtgccatatagccagggtgtagtca

SEQ ID NO: 529385 - DNA, 536 bp, Homo sapiens
tggaagttgtttacagaatcagacatggagactttctccttcagacggaatctaactggtcagttttaaagctgtggcattccctggcggggccactgtgctagttctccccatggcgggctttataggaaggccccctcttcacacagaagccgggaaggcgtgcctcggtaagggtatagccctgagtgtctgcaccccccaaaacccctgytccctgctcgtgtgtgacaatctgacttcagacagttaatctttctggctcaagcatttggaatggagatggactgaacccactgggcgttttagttgcatgtaagccgcactccgggctgagcttgccgagctgacttcactgtctgggctgcctgcctggggtgctgggagccaagtgcccatttccagaagctcgctgtgctcccccaggtcagctcctgtctgcctcacctcaccgtggtctccttttcctaatgcgtgatggagaccagcgtcgtgtggcatccatggaccccatcgaggaccttttgatcagtggt

SEQ ID NO: 529386 - DNA, 456 bp, Homo sapiens
gggcctccggaaggaagctgcaaatgaaccggcagcagcttccccgatggccctgtcttggcagccctcatccgggcaaggactctgtgggagagcagggccactctctgtgatgccaccgccgggatggctgagctccagcgtggtgcccgtcctgggtctgagggcccggcagccgcccttccgtctgctgccaggagtgtgtgtgcccagcactggagagcagtgagaggcactggtttcccagcacacagtgtgcrcctgcccgctcactctcccggctccgtgtgtgcgcccctcatcagccaggtgctcgctttcccggctctgtgtgtggggccctcaccggccagtgtgtagctgcatggtgtttctggggggctgctggcctgccaggcatggcctctcagtggccagcatggggtctgggggtggtctgggatggccaggcgaggg

SEQ ID NO: 529387 - DNA, 593 bp, Homo sapiens
ttttttattttaaccattctgataagtgtgcrgtgctatctcgttgtggttttaatttgcatcttcctaatgaccagtgatgttgaaaatcttttcacatgcttatttataaatcttaattttttaaatggtgaaaatagcaactatatactaccaaatttctaaaaacaagtaaattttccttggaatcagaaagtattcacatgggctccttgaatatctttttaagagcccaaaacccactgtaggctcttgaatatgagttatctcctctgctgaaataacagcggttattagttgaacacttactttatgccaagtgagaacaggcacttgaatttcgttgaatcctcccacagatctgcagggaacatgagatgaaagagagcaagtattccgccatttgcccaaatgggtatcaaatcgcacaaccagaatgtaaaactaggcctgtgagactccaaagcacttgttgtactctccactgtcacctctcctgatggaagttaggagcagaaccaaaatttctggctaattgagctttggagctatctattcagatccttgataccagagtgtattccctccattta

SEQ ID NO: 529388 - DNA, 500 bp, Homo sapiens
ctcttgttgcccaggctggagagcaatggtgcaatcttggctcaccacaacccctgcctcctggattaaagcgattctcctgcctcagcctcctgagtagctgggattacaggcatgcaccaccacgcctggctaattttttgtattttttttagtagagatggggtttctccatgttggtcaggctggtctcgaccccctgaccccaggtgatctgcccaccttggcctcccaaagtgctgggattacaggcgtgagccaccatgtccggccagcagggccttcctttctaacagactctggctcaagaytctcttcctcaccaaggttttccaagcacccctcaaatcccactaccttccacctgtcccattccccaaattctggaggcaccacttccaccggcacacccagtatctcaaaaatacctacaaacctgaaagcacagaagaaaaccttcccaggtaagcagtcatgttgcacctgtatacacctgtgca

SEQ ID NO: 529389 - DNA, 529 bp, Homo sapiens
acaagattagaaattatggtttaggagtcatgtagctggaggctacamgattcttatccttcctaaactgctcctaagatcagtgcttgcgatattttgcagagtctgcacttgatggatcagctggcaccacccaaattaaccagctcatctgttcttgtggcccccatccaggaactgactaaagcacaagaggacagcttcaatttcctattatttcatctcctgcctaaccaatcagcattcctggcttactggctccctcctacctaccaagtggtccttaaaaactctgatccccgaatgctcaaggagactgatttgagtaataataaaactccagtctccctcacagctggctgtgcacaaattaccctttctctattgcaagtcccatgtcttgatatatcagctctgcctaggcagcgggcaaggtgaacctactgggtagttacattaggcccttgtcccaggaccaccctcgcttcctctcaacttattgctccctgccctcaaaggtgcgttctgc

SEQ ID NO: 529390 - DNA, 529 bp, Homo sapiens
acaagattagaaattatggtttaggagtcatgtagctggaggctacaagattcttatccttcctaaactgctcctaagatcagtgcttgmgatattttgcagagtctgcacttgatggatcagctggcaccacccaaattaaccagctcatctgttcttgtggcccccatccaggaactgactaaagcacaagaggacagcttcaatttcctattatttcatctcctgcctaaccaatcagcattcctggcttactggctccctcctacctaccaagtggtccttaaaaactctgatccccgaatgctcaaggagactgatttgagtaataataaaactccagtctccctcacagctggctgtgcacaaattaccctttctctattgcaagtcccatgtcttgatatatcagctctgcctaggcagcgggcaaggtgaacctactgggtagttacattaggcccttgtcccaggaccaccctcgcttcctctcaacttattgctccctgccctcaaaggtgcgttctgc

SEQ ID NO: 529391 - DNA, 529 bp, Homo sapiens
acaagattagaaattatggtttaggagtcatgtagctggaggctacaagattcttatccttcctaaactgctcctaagatcagtgcttgcgatattttgcagagtctgcacttgatggatcagctggcaccacccaaattaaccagctcatctgttcttgtggcccccatccaggaactgactaaagcacaagaggacagcttcaattycctattatttcatctcctgcctaaccaatcagcattcctggcttactggctccctcctacctaccaagtggtccttaaaaactctgatccccgaatgctcaaggagactgatttgagtaataataaaactccagtctccctcacagctggctgtgcacaaattaccctttctctattgcaagtcccatgtcttgatatatcagctctgcctaggcagcgggcaaggtgaacctactgggtagttacattaggcccttgtcccaggaccaccctcgcttcctctcaacttattgctccctgccctcaaaggtgcgttctgc

SEQ ID NO: 529392 - DNA, 560 bp, Homo sapiens
gtaatcatcacctccatttttcagacaaggaaactgaggtttaacgaggtcaggcgacttgtccaagggcaccgtgataaaaaggggtggagctggatagggccaaggctgtctgaccccaaagcccaccacatcaccactgcaccctggctttctggagttggtgcagagaagagcaggaagtgcttcttgctaatgtataggaaagatgctcatgaagccgtaaacccttacctggcccatggcctccttcaaggaatgtgaccacaggtggtttttctactccaagctgttatggcatgcgccgtgtgtcaatcaaaatgagttctgctcccctgactgcaacgaatgggccaccaagctctgtgagggcaggacagtgcctcttacctgttggtgaagctccagtacttagcacatagtaggtactcaataaatatctgttgaattaataaatgaatcagaaattggtgcccatgcctaaggcagccaagtctggattataaaaatgtaatgygaacagtctctgttgtggcccaatgcaaagctttacctaacag

SEQ ID NO: 529393 - DNA, 617 bp, Homo sapiens
ctgaaagcaaggcacttcatccatacaacaaatttttgagcagggagcttaactaagatgtgtatagactgacacctcccacacacccaccctaaagttctcagagaaaaaaataagtgaatagacgtgtaactaccagaaayatttatttatctgacacatatttgttgagacaggcacagttcttggccctggagacatagtactgaacaaaatcaaattcctgccctcagggagctcccagtccagcacaagagactgacaataagcaaatagacaagatgaatatataatgccacccagagggatggtagggatgttacagacacacagccaagtaactcttctctgcagagaatgctgtgagggagacagccaggaaatcatgggaaggaaagagtgtttctgggcaagggagccacacatctgaaagccctggggtaggagcacttggccaggaggccagagggactggagttgggggagcagggaacagacgggtggaaaacaaggcaggaaagggtgttggggccatgctgaaagagaccgttcaggttgtggtaaggacctccgatttttgttctaagtgacgggcaattattggagggttttgagca

SEQ ID NO: 529394 - DNA, 617 bp, Homo sapiens
ctgaaagcaaggcacttcatccatacaacaaatttttgagcagggagcttaactaagatgtgtatagactgacacctcccacacacccaccctaaagttctcagagaaaaaaataagtgaatagacgtgtaactaccagaaacatttatttatctgacacatatttgttgagacaggcacagttcttggccctggagacatagtactgaacaaaatcaaattcctgccctcagggagctsccagtccagcacaagagactgacaataagcaaatagacaagatgaatatataatgccacccagagggatggtagggatgttacagacacacagccaagtaactcttctctgcagagaatgctgtgagggagacagccaggaaatcatgggaaggaaagagtgtttctgggcaagggagccacacatctgaaagccctggggtaggagcacttggccaggaggccagagggactggagttgggggagcagggaacagacgggtggaaaacaaggcaggaaagggtgttggggccatgctgaaagagaccgttcaggttgtggtaaggacctccgatttttgttctaagtgacgggcaattattggagggttttgagca

SEQ ID NO: 529395 - DNA, 614 bp, Homo sapiens
agccaggaacaattttcctccccctcccctcaagacatttggcaatgtctggagacatttttggttgtcaccagttgggggtgggggtgctactggcatcaagtgggccraggccagggaagctgctgaacatcccacagaactcaggacagccccgcaaacaaacaatccagctccaagggtcaacagtgcgagactgagagctctggcctggagcacctcatcaataacactccgctcccagaattgagtctccagccttgacaggtgaggctccttccacgcccacgctgtgaagggtctgcaaaccaggaggaccctgctttttgctggggcagactgtccccttccctctccctgtgcatcccaccttgtcttggaaatgagcttgcaatggaaagactcgctctgtggcaggctgctgggatctctaaggcactggatttacattcattatcaaccactgtaacaaggaaagcatggattctatttgggcaataagccagctcagaggcttctgcacaaccccagagaccccgccgttattgctgggaacacacatggcaggagtgtcatggcagggaccaggagaacacggcaccggtcccccaccc

SEQ ID NO: 529396 - DNA, 599 bp, Homo sapiens
aatccaccccagggctttccagccaagactgcctttaagctaatggttttcaaaatgagatattgattttgaatcctacttctttcaaaaacctgcatcagcaagccctgtgccagtgcttgtgatttaataacccagagtgagagtctccgcttggggctgaaggggcagggctgattgttaatgttctgagcatgccaggggatgaaggcctctgtcggagaagctcaggtaaccatttccctagtggtcctcccgcacctgcaccccctggctaaagctgtccctgcaggcctgttcagtcgccaacctcacctctctgcccagctcctccttcttttttccacttagaccaggggcgatgtttgcccacctgcccaccaggtgaggtgcccttacccacctaagacagcacctggggaggcagcatggctgagggggatgactttggtgccaaaaagaccctggggccaaattctggtgccatcatttgctaactttggaaatatcatttaattttyccaaacctcagtttcatcatctgtaaaatgggtacaaccacttcagtcacagactcttggttaaaagtaacagaaacc

SEQ ID NO: 529397 - DNA, 606 bp, Homo sapiens
ttattttaaattccctgtaattatttttggaagcagaaaggatattgattatacatttaaatacaattccagtttgtcttaaatcagtcacttaaatcagtccagtgtcttagattagtcattcagcctaagcaggccttatatatagtgaaaccagtatctgttagattgcttatgcatttctgttagaatgagacctacagatctgtagtgatatagatactcaggatgggaaaatttagcatttagttactttaataacaaagaatatctttcacttggttttaggggatgtaactgatgattgcactttgaattaaccttttggaaaacttgcttttaactcaatttagacaatattcactagagtaagaatagggataagtttgcctggagtaaggagctggtattgggttaagctgaagtcaatttttgatgtggatgttgatatataattgacctgggtaatacctaaagtcaaacaaaatttaatttgtgataaataatggctgtgggtggtagkgcaagtcaggaggacaaggtggggtccaaagggtggaaaaggatcattcactaaatttgttagaaagtctaggaccatggaca

SEQ ID NO: 529398 - DNA, 491 bp, Homo sapiens
gtgtcacagacctgtcctgcacagaggaggcaccttccccttgctctctgaccacaaaatgctccttttttcaggttcatgggaagatttttaggcaaaaattccgtggagtcctgctctcagtactcgacttgactgtcttacaagcctcttgttgcctcaagcccaaggaagtaacctcaggctgaaaggctttctagggctctttaacctcagrgtggacacaaactcagatgtccatcaaacagctaagtccaagctttaaatactttacacagctgattaggagtttagggaacacataatgcgtttcgaaatttaaaattggtgcaaggtaagaattaatgaactctcatcagaagtttttctcccaggagctctctccagcctacagtccaccataacctggaaagtatggctttccacaagtgaacttcttttagcctccctcccatactgggatttcagaaccccttctaaagtcaatgagg

SEQ ID NO: 529399 - DNA, 491 bp, Homo sapiens
gtgtcacagacctgtcctgcacagaggaggcaccttccccttgctctctgaccacaaaatgctccttttttcaggttcatgggaagatttttaggcaaaaattccgtggagtcctgctctcagtactcgacttgactgtcttacaagcctcttgttgcctcaagcccaaggaagtaacctcaggctgaaaggctttctagggctctttaacctcagagtggacacaaactcagatgtccatcaaacagctaagtccaagctttaaatactttacacagctrattaggagtttagggaacacataatgcgtttcgaaatttaaaattggtgcaaggtaagaattaatgaactctcatcagaagtttttctcccaggagctctctccagcctacagtccaccataacctggaaagtatggctttccacaagtgaacttcttttagcctccctcccatactgggatttcagaaccccttctaaagtcaatgagg

SEQ ID NO: 529400 - DNA, 551 bp, Homo sapiens
tgtttaataatattgtacaatttttgttttctttaaattttttctcaaaagtttactttctaagaaatcagtgtagaccaataaaagtttcctgtggtggaatttggttggtatacttcctagaatttaaccctaaccaggttttctttcaaaactactgagaatcattttatttacaaataacaattatatgaattatcaaagaattttaaaattaacataactttgtccaaagtcagtgtctcttcctgttataaaattacttgatcctattaagaaattctgaattgcaacatctgtttgtttttgtttatcccttttgtsgagaggattcatgccatgattttcttattacatttttaatagatattcagtgaaaaaggtaactgatgccaggcagtttatgtatcaaccacatctatcatgccttttcctcctttgtcctacctattcagttgttaatgggctatttgggcagcagccacacaaacgctttcacatagatcacgcatcaacatagttatcctggaaaagaaaacacctgaactatt

SEQ ID NO: 529401 - DNA, 615 bp, Homo sapiens
gctgtgggatacattgatattaatggatgtgccccagtgaggctatacagcctagtgtagggtttgcaaactacagcttataagtcaaacccagcctcttcccactaccccacrtagagttttatggctcataaagcccaagatatggttactgacccctggtctagtggtttagagaataaattgtagatttagactgcctgggtttgaaaccaagctccattatttaatatatacatggctaagagcaaattactaaacctttcctgtgcctcaatttcctccttttctctttaagatatagggtctcactctgtcacctagggtgcagtggagcgatcacagctcactgcagcctagacttcctgggcttaagtaatcctctggtctcagcctccggagtagctgggattacaagcatgtgccaccatgcccagctagtttttaattttttacagagatggggtattgccatgtttcccaggctggtcccaaactcgtagcctcaagcaatcctcccagctcggcctcccaaaggactgggattattggcatgggccatcaagccactgcaccaggctctcttctctttaaaaatgagagaaatatttacac

SEQ ID NO: 529402 - DNA, 615 bp, Homo sapiens
gctgtgggatacattgatattaatggatgtgccccagtgaggctatacagcctagtgtagggtttgcaaactacagcttataagtcaaacccagcctcttcccactaccccacatagagttttatggctcataaagcccaagatatggttactgacccctggtctagtggtttagagaataaattgtagatttagactgcctgggtttgaaaccaagctccattatttaatatatacatggctaagagcaaattactaaacctttcctgtgcctcaatttcctccttttytctttaagatatagggtctcactctgtcacctagggtgcagtggagcgatcacagctcactgcagcctagacttcctgggcttaagtaatcctctggtctcagcctccggagtagctgggattacaagcatgtgccaccatgcccagctagtttttaattttttacagagatggggtattgccatgtttcccaggctggtcccaaactcgtagcctcaagcaatcctcccagctcggcctcccaaaggactgggattattggcatgggccatcaagccactgcaccaggctctcttctctttaaaaatgagagaaatatttacac

SEQ ID NO: 529403 - DNA, 615 bp, Homo sapiens
gctgtgggatacattgatattaatggatgtgccccagtgaggctatacagcctagtgtagggtttgcaaactacagcttataagtcaaacccagcctcttcccactaccccacatagagttttatggctcataaagcccaagatatggttactgacccctggtctagtggtttagagaataaattgtagatttagactgcctgggtttgaaaccaagctccattatttaatatatacatggctaagagcaaattactaaacctttcctgtgcctcaatttcctccttttctctttaagatatagggtctcactctgtcacctagggtgcagtggagcgatcacagctcactgcagcctagacttcctgggcttaagtaatcctctggtctcagcctccggagtagctgggattacaagcatgtgccaccatgcccagctagtttttaattttttacagagatggggtattgcyatgtttcccaggctggtcccaaactcgtagcctcaagcaatcctcccagctcggcctcccaaaggactgggattattggcatgggccatcaagccactgcaccaggctctcttctctttaaaaatgagagaaatatttacac

SEQ ID NO: 529404 - DNA, 594 bp, Homo sapiens
tgtaatcctagctattcaagaggctgaggcagaagaatcacttgaacctgggaggtggaggttgcagtgaggtgaggttgcgccacgtcactccagcctaggtgacagagcaacactctgtctcagaaaaaaaaaaaaggccaggcacagtggctcatgcctgtaatcccagcactttgggaggccgaggcgggcagatcacatgaggtcaggagttcaagaccagcctgaccagcatggagaaaccccgtctctactaaaaatacaaaaaaaattagctaggtgtggtggcaaatgcctgtaatcccagctacttgggaggctgaggcaggagaattgcttgagcccaggaggcagagattgyggttagctgagatcacaccattgcactccagcctgggcaacgagagcaaaactccattcaaaaaaaaaaaaaaaaaaaaagaaatggaaaagaagtggaggcatttacctagaaaaacaaatacctcttaaccttcctaggagtgattcatacttgtcagtttctaggtgtgaatcccagtgttgactcacctggggccagaagaggctgaataggatgccagtcctctg

SEQ ID NO: 529405 - DNA, 594 bp, Homo sapiens
tgtaatcctagctattcaagaggctgaggcagaagaatcacttgaacctgggaggtggaggttgcagtgaggtgaggttgcgccacgtcactccagcctaggtgacagagcaacactctgtctcagaaaaaaaaaaaaggccaggcacagtggctcatgcctgtaatcccagcactttgggaggccgaggcgggcagatcacatgaggtcaggagttcaagaccagcctgaccagcatggagaaaccccgtctctactaaaaatacaaaaaaaattagctaggtgtggtggcaaatgcctgtaatcccagctacttgggaggctgaggcaggagaattgcttgagcccaggaggcagagattgtggttagctgagatcacaccattgcactccagcctgggcaacragagcaaaactccattcaaaaaaaaaaaaaaaaaaaaagaaatggaaaagaagtggaggcatttacctagaaaaacaaatacctcttaaccttcctaggagtgattcatacttgtcagtttctaggtgtgaatcccagtgttgactcacctggggccagaagaggctgaataggatgccagtcctctg

SEQ ID NO: 529406 - DNA, 601 bp, Homo sapiens
cttgggaagttgaggcacaagaatcacttaagccagggaggcagaggttacagtgagccaaggcaccacagcactccagcctgggcgacagagaaagactgtctcaagaaaataaaaataaaagaagaagccaggtgtggtggctcacgcaagtaatcccagcactttgggaggccaaggcaggtggatcacctgaggtcaggagttccaagaccaatatggccaacatggtgaaatcccatctctactaaaattacaaaaattagccaagtgtgttggcaggcgcctgtaaccccagctactcaggaggctgaggcaggagcatcacttgaacccggtgggcagaggttgcagtgggcgaagatcgtaccactgcactccaacctgggtgacagagcgagactccatctgtaaataaataaataaataaatgaagagtattacctagtcttaaataaaacacctactctactccttaatgtgagccctatttcatacttcaaatccaaatagttaactggattccaattcaattatgctatgtccagcatgaaaattagtkatcaaaaaatggaaacttatcaaacattgtttacaaacg

SEQ ID NO: 529407 - DNA, 515 bp, Homo sapiens
tgaggcccaacccagggggattctgatagaggatagtccacacctctcttggagagtggaatcataaaagagctcacaactccatctccatcttgagttcagttcacacctttctctccagtggtagtattcctatgtctcacatttctttcattggattcttctttggaggagctaagggcagaaccaagctaagaaacctgagcaatttattgtcttcatcactggtttcagaattagcagcctatgtttccatcctcccaaacatttcagttatctcagcacactagcgtgaagaaagatatgaatgaactagcatgaagcaaataacactgagtgattccttctcctgtccaccccccactcctcattgttgtcttctagataccagcaactgaaaagcagaasaaaaacacttggatcgtaggctaactcctaaaagattgatccctggtgctgatacaggtatggacatcctgacttgctatttctgggtatctgcacgaggaatggca

SEQ ID NO: 529408 - DNA, 491 bp, Homo sapiens
atagcatttttagcagcttttatgcattcatgtacatgtgygtacacacacacacacacacgtgcacataattccactggcaaagcgaggaggtggttggcagtctgacatcctgatatagtccttcttacacaactttttactggaatggaatgtcctggcgaaacaagtatttgtgggcaggaccagaaaccaaacatcaaactagagtacaattccacatctttgatggggattttattggagtcacagttgctgtttgcgtgctattagtaataggccgtctgtatctcattccctcctatatccttaaaatttgtaaaatattattaaaatattggaatgaaagtaagtctaataaatgagcaaccatatcagagtaactttttgataatgaagaaaataatgaaatttcctttaattcctggtgccaatgaagacacatttttttctaatggtggtctttttatttttatttttacatatttagg

SEQ ID NO: 529409 - DNA, 584 bp, Homo sapiens
gcccactgggaggacaacttcctgggttcaactgcatgtcttagatttcaagctgataacatttacctacctgataaggtgttggggtaagggatggaggggcacattttctgaatatatraaaaggcttttaaatacttggatataagaactaaatactctggttgggctttttccgtgtcattatttgacaatgaaactaatgctgctgatctcaacataataggtgaatttagaaatagagttacaggcttagataaaatccaagttttcacccttgaccattaagaggtattatatgtatgaggattgggatgtcctactttcccttaactgcaaagtatccctttggtgctcatatttcaacctccaaaatgcactttgctaaaatgtttgctgtggagccaggtcctgtggacagaagctgaagaggtgagggctgtgtgcaaacacacggcggggagtctggattggtttacagtaagcacaagcaccccacagggactgcagccttttacctctcactgcaggggatcggcattgaccaggtgatgcagccccagaaatcaattcaacactaatga

SEQ ID NO: 529410 - DNA, 584 bp, Homo sapiens
gcccactgggaggacaacttcctgggttcaactgcatgtcttagatttcaagctgataacatttacctacctgataaggtgttggggtaagggatggaggggcacattttctgaatatataaaaaggcttttaaatacttggatataagaactaaatactctggttgggctttttccgtgtcattatttgacaatgaaactaatgctgctgatctcaacataataggtgaatttagaaatagagttacaggcttagataaaatccaagttttcacccttgaccattaagaggtattatatgtatgaggattgggatgtcctactttcccttaactgcaaagtatccctttggtgctcatatttcaacctccaaaatgcactttgctaaaatgtttgctgtggagccaggtcctgtggacagaagctgaagaggtgagggctgtgtgcaaacacacggcggggagtctggattggtttacagtaagcacaagcaccccacagggactgcagccttttacctctcactgcaggggatsggcattgaccaggtgatgcagccccagaaatcaattcaacactaatga

SEQ ID NO: 529411 - DNA, 666 bp, Homo sapiens
caagaggtacactgaatcataatatgtaaccacttcctgaggggtcgataggattccctggctgccaaacagggccatttttgatgaggctcaactagggggaacatgttgagatggggtagctactggacaccatggtctgtgagcatgccctccaccccagggctctgtgggatgtggcagcccccaggatccagctgtacaggcagcccccagagcagggcagagactgagcttgcccttcctcagttcccactgcttgctcttcagcaggggagcacggccagtgctgctcaactcacaaaatggtgccaaacgggccctgagagaaacatgttcaaaggcctttttgtctaggaatgcatccgtgccgaggaagggaatgttatgcatgacatgcatggatgggctttcaacccacccaagtccaaacctcatttgctttctgtgagggaggaaggtggcaggagaggaagccaagtgggtaggatgctgccaacattcaagcgggaagggccctgctctggaatgagcatgctggcagaggaatgcattttagaaatgttgtggtgaatgagacaccaaggtttattttaaaatgaagatttatgaaaataacctgayacctgaggggaaaaaaagacaagagttgaaatagacgatggt

SEQ ID NO: 529412 - DNA, 493 bp, Homo sapiens
agctggtttagcgtgggtcacattctcacctgctggccagaggagggcacccaaaccatgagccagggaggagaggttcctggaagaggactgagggaactggagctggacaaacagaaacaccagkgtccactgtacagggctaggataaaaccacaagcaggcatcatctcaataccacagagtcatggaagcaagggaaggctctagtacgtgtctgatattgctgctttgtatgcgttattataggggtccccaacccctgggccataaactggtaccagtccgtggcccgttaggaaatgggctgcacaacaggaggtgagtggcaggagagtgatggacgcttcatctgtacttacagccactctccatcgctcacattacggcccgagctccacctcctatcagaacagcagcggcattagattctcataggagcgcaagccctgttgtaaaccgcgcatgcgtgggatctgggttgcgttccttg

SEQ ID NO: 529413 - DNA, 493 bp, Homo sapiens
agctggtttagcgtgggtcacattctcacctgctggccagaggagggcacccaaaccatgagccagggaggagaggttcctggaagaggactgagggaactggagctggacaaacagaaacaccagtgtccactgtacagggctaggataaaaccacaagcaggcatcatctcaataccacagagtcatggaagcaagggaaggctctagtacgtgtctgatattgctgctttgtatgcgttattataggggtccccaacccctgggccataaactggtaccagtccgtggcccgttaggaaatgggctgcacaacaggaggtgagtggcaggagagtsatggacgcttcatctgtacttacagccactctccatcgctcacattacggcccgagctccacctcctatcagaacagcagcggcattagattctcataggagcgcaagccctgttgtaaaccgcgcatgcgtgggatctgggttgcgttccttg

SEQ ID NO: 529414 - DNA, 572 bp, Homo sapiens
agttatgtctaagagaattgtcttctttttttgtggggtgtgctttctcttaatttaacacccragttcacagattacttcctgccctaggatctgtggcgaatgtcaccacctgtgacagcgctcttatttatgaactgaagaacactctccatcttggtatgtatgctaattcaaaatccactccaagttccaagcatttatgatgatttctaaaagagattactttcctccagcattctttgcttactgcctgcttctagttacttatttctccaggaaagatttacctttctgtgagcatggctttatagctttctggctctctgaacattttctccctgctgcctctatgtgtttcattctccccttactgaagattagaagaggggattgatatttgtttcaacaaatatttattcaatatccactatgtcagtcactgggctatgttgtgtggaagagtaacttacacatttgatcagagttgaaaataaattctaccgctatgcagaaacaggctcaccttgatgtttcctgtgaaacactatcaacaccttccctggttacaa

SEQ ID NO: 529415 - DNA, 572 bp, Homo sapiens
agttatgtctaagagaattgtcttctttttttgtggggtgtgctttctcttaatttaacacccgagttcacagattacttcctgccctaggatctgtggcgaatgtcaccacctgtgacagsgctcttatttatgaactgaagaacactctccatcttggtatgtatgctaattcaaaatccactccaagttccaagcatttatgatgatttctaaaagagattactttcctccagcattctttgcttactgcctgcttctagttacttatttctccaggaaagatttacctttctgtgagcatggctttatagctttctggctctctgaacattttctccctgctgcctctatgtgtttcattctccccttactgaagattagaagaggggattgatatttgtttcaacaaatatttattcaatatccactatgtcagtcactgggctatgttgtgtggaagagtaacttacacatttgatcagagttgaaaataaattctaccgctatgcagaaacaggctcaccttgatgtttcctgtgaaacactatcaacaccttccctggttacaa

SEQ ID NO: 529416 - DNA, 572 bp, Homo sapiens
agttatgtctaagagaattgtcttctttttttgtggggtgtgctttctcttaatttaacacccgagttcacagattacttcctgccctaggatctgtggcgaatgtcaccacctgtgacagcgctcttatttatgaactgaagaacactctccatcttggtatgtatgctaattcaaaatccactccaagttccaagcatttatgatgatttctaaaagagattactttcctccagcattctttgcttactgcctgcttctagttacttatttctccaggaaagatttacctttctgtgagcatggcyttatagctttctggctctctgaacattttctccctgctgcctctatgtgtttcattctccccttactgaagattagaagaggggattgatatttgtttcaacaaatatttattcaatatccactatgtcagtcactgggctatgttgtgtggaagagtaacttacacatttgatcagagttgaaaataaattctaccgctatgcagaaacaggctcaccttgatgtttcctgtgaaacactatcaacaccttccctggttacaa

SEQ ID NO: 529417 - DNA, 572 bp, Homo sapiens
aaacagtgccattcattctgagaatgtgcagaaacagcatttgattgggaagaggccttcggtcatttatctctcacttttaaaatgatgagatcgatgtgtctccccartgggctgtcccccttctattcagcaacaatacactacttcttttcaaagagaaatatgcttccaataagggggaagggaggctgggggtggtagtgaaggggatcaagcaactttcattgaaggattcatttttgatttaaatattttgttctaatctccaacttcctttttaacttggcagaatgaccaaaagaaaaacaatgtccctccctagcccagtttacagcctgtcagaggagaggatccggttacttcttccaaattgtatacgttgggttgtttgatatactaggttttttttctttttacatccattgctcatatacatagggttttcttttaatggcttgtcaaagtggactttggtgaaaaaccacaggagaaaaaaaaagaatgaaaaatatagatcaaatatagccagctatttaataatttttttttttttttggttctttgagtat

SEQ ID NO: 529418 - DNA, 660 bp, Homo sapiens
tttttccttgtggtggagagtgcttcttctagtgggtataggaataaattccaccttactcagaccagaaatagcccaatgcaattcttgtttgggggtccccagaagcacaccctgagacaatgatttgagtgcagtggcgcaatggggaggaatcccaggagatcctaggagaggagtggagaaatgagacagggaagggaaggaggccaccaaagggaacctcgtcaaggtggtggccactgtggacaactggatcttaacacagcccaggaggcttgtcaacctcagcactgttgacattttgagctgatgattccttgttatgggggctgtcttgtgaattacaggaggcttacagcagccctgacctctacctgctaggtgctggtagcactccytccttcacggcttattgtcatgggttgtaacaatcaagaatgtctccagacattgcctagtactcccagggggacaaaactccccatggtttagaaccacaggagccacagcaactctggccatgggtagtctggccaccatgctctgagatggtaaaggccatggtgagccctggagtgtccactgcattctcttctagagccagagcagcacttggggaggctgaggagtgaatagaactgcctgtcactcagcaga

SEQ ID NO: 529419 - DNA, 478 bp, Homo sapiens
tagtcagtggggctcccacaggaggtaacgttagagtgaattctcaaggactcgtaggagggcaccagctagatggggagggagatttcaggcatagcgagtcccataagcacctttgttgttgttgttctctaaagatcctctcccctgccttccccactaggacctggagattccttgattagtggtggttaactgtgacaggcctcctacctgtctggaatagagccagggggaggacttaacatggaaactkccggcttcaaggttcaaaaaatatattttttaatgtaaaaagccatttaaacatttcctccagggagctgtttgatggagagagtccttgcagcttgggtcttgaaaggatcactgcaggtcagagcttctcagggaagtgttattggcatgttggatgggatatttcttagtggggagcatttaggacactagtccttcaggcactaaggcaatgagcatt

SEQ ID NO: 529420 - DNA, 533 bp, Homo sapiens
tgtaatagaccagcaaagataccaattccccgctgtgtttcctttgagatacttcaggtaaagcctgaaggagaggtgggaataaaacacaggccaaactggagctgttgttttgcctccagaatagaattctaattgtctcaactgagcttcttatttccctcaagtaatgagaaacgtaaattcctcagcaaagttctaaggcaggattgaccctgggaaaacaatcccagcgtaagctcaagtgtttgaattctttttgttcaggttgtagactcaatactttctaactagtgtggtttcagttgtgttttctgaacaacaggcatgctrtgggttttcccacaatgcattcctgtcctcccttccaagatggtgccttttcccacaaacatggaagcaaaatggtctgttcctgtctccacagtgacctcgctgctggctccaaaagaaatgcttccagaaccaagcacccgagacagtgtctgatgagccatgttcttgggtcatttttgatcttattacaattataa

SEQ ID NO: 529421 - DNA, 258 bp, Homo sapiens
ccccatgtcagcataggtcggtcatgagtcaggtgctgttctcttcacctccatgctcagtattcctgggttagtcttcctcttttcattggagttgtcagtttctgtgatcccctgtccttctaattacctgtctgrggtgaggtaaacaaagtagagaagggattgggaagagggctttcaaaatttcacttaaccttcttgtctttggtagagtatctcactgctgctctctgccttacctgatgcctctaaggc

SEQ ID NO: 529422 - DNA, 592 bp, Homo sapiens
aaggtggaaaaagtctgcagtgggtcagaagtgactggttacaggtctttccccacaggtgctgctattttgggtgttttgtacttgtggagcagaaagaatgctgaatcaggaaggcaggtgattcaagactaagctcggccttgaaggggtcaccactagatattttcccttatgatctctgcaggaaaatagaccaaggaggtaatggttaaattgctttgtacttttactgctctaacctataaggccaagttaagttcctggattaagaaatcaagctttttattgcaccctaaattgaatggtgggagtcctgatttgaccaatcattgttttgtaaaagcagatcctcagcyggctgcattgtaggactacaaccagcaacatctctgatccacgggccatctgactcttctgaaagatccccagtggcctggtgttacggtttgaattgtatccatccccagctccaattcgtacgtggaaatcctaactaccagtacatagaatgtgaccttatttggagctagggtcttcacagacaaaatcaagttaaaatgaggtaattaggatgatccctaatccaata

SEQ ID NO: 529423 - DNA, 592 bp, Homo sapiens
aaggtggaaaaagtctgcagtgggtcagaagtgactggttacaggtctttccccacaggtgctgctattttgggtgttttgtacttgtggagcagaaagaatgctgaatcaggaaggcaggtgattcaagactaagctcggccttgaaggggtcaccactagatattttcccttatgatctctgcaggaaaatagaccaaggaggtaatggttaaattgctttgtacttttactgctctaacctataaggccaagttaagttcctggattaagaaatcaagctttttattgcaccctaaattgaatggtgggagtcctgatttgaccaatcattgttttgtaaaagcagatcctcagctggctgcattgtaggactacaaccagcaacatctctgatccacgggccatctgactcttctgaaagatccccagtggcctggtgttacggtttgaattgtatccatccccagctccaattcgtacgtggaartcctaactaccagtacatagaatgtgaccttatttggagctagggtcttcacagacaaaatcaagttaaaatgaggtaattaggatgatccctaatccaata

SEQ ID NO: 529424 - DNA, 592 bp, Homo sapiens
aaggtggaaaaagtctgcagtgggtcagaagtgactggttacaggtctttccccacaggtgctgctattttgggtgttttgtacttgtggagcagaaagaatgctgaatcaggaaggcaggtgattcaagactaagctcggccttgaaggggtcaccactagatattttcccttatgatctctgcaggaaaatagaccaaggaggtaatggttaaattgctttgtacttttactgctctaacctataaggccaagttaagttcctggattaagaaatcaagctttttattgcaccctaaattgaatggtgggagtcctgatttgaccaatcattgttttgtaaaagcagatcctcagctggctgcattgtaggactacaaccagcaacatctctgatccacgggccatctgactcttctgaaagatccccagtggcctggtgttacggtttgaattgtatccatccccagctccaattcgtacgtggaaatcctaactaccagtacatagaatgtgaccttatttggagctagggtcttcacagacaaaatcaagttaaaatgaggtrattaggatgatccctaatccaata

SEQ ID NO: 529425 - DNA, 562 bp, Homo sapiens
ggtggtgagtccagacccaaaagaggattatatgctgctacaggaagcagaagatgtgtgactgctatgttcgtgagttaaaagaaagcaagctctttggttagtatgtgcctctagacccctgtaccttgctttatcctgccgtgtgtcctggaagtcttgttctttaacttctcacttgttctttgtccagcggaagccctagatggatatggaagggagggagaagagaaagtttgaggtatttatcccctggtcctctcaagtgaggctactgcctctgttcagtggggtgtttctccatgacacacttcttgcaagttctagaaaccactccctttcctcatccacttggggctagaggtagtgatagctcccttgtttttagacccagcgtactgcaccatccagagtgaaacagaaggtagttcactctgcccacactttgtagatagtacttttgttaagcccttctagagttctaatttgagcataccacctgtttcctactgggaccttgartggtacaattagcactgatgaaagccaagtctccctgata

SEQ ID NO: 529426 - DNA, 552 bp, Homo sapiens
ctgtcatcaacttaaattttagtctgtggttaagtaccaatttatttgcagggcaaagtgagcctcagaaaaattctactgtgttgttagattgccttaaggccaccaagtcatagcttactaccataatttgtagagttttcatcaattccagtgaactatatagtgattctttgtaattcttaccagttatcacccacattcttgaaatgctgctttaacatctaacttcaawtaatctgttatcttatttctacgttctatcttgttgattattctcaaagagaaatgtagtgcttttgtaccttttctatcaaacttacagagtacataaatctaccaacaagttatttagatagaagttaccacccttctccataaacacggaaacaggctctcctccatcagggtttctttataaaggaaaaatgtttaagtagcatcaaccccatatgaggattctacctgtattttgccacacagagatttcaaactaactacatgtaaggaaaattatttccaaaatctaacgtttatttcagttgaaatgca

SEQ ID NO: 529427 - DNA, 558 bp, Homo sapiens
cagctgctctctagtatctaacatcaatgtaaagaacctaaaatgatgctctatggctttcagagtcttcagtagcctagagaaaccataacggataatgttttccctgggggaaaaaaaagagtgtggcgattaaaatctgcagtggtcccttctgtcctcagggagatgataatgtctgggaatgcaatggcctgacagggacaggtgaactgtgtttctgaagctgatgcaactggctgtgatatggtactccagtgtgtgggaaagacagcacctacaggaggacctttctgttctgcaagttacaacttaaccctcctgaaagggcagtgatcttacactggaagcaagtattacaatggcaattcttcaccttaattttaggataaaagggggaataacaccaaaataaagcyaatgtgtggagcttaaagacaagggaaactcaagattgtatcttggatggcattcatatttacaataatttcccatatcatctactacacacatcagaaggattaattatgaccatagctggaggaaatcattcatcac

SEQ ID NO: 529428 - DNA, 583 bp, Homo sapiens
tatagcaaccttcagaatttagtgtatcttttaatgttgtatgtctgggatgcaagtattgctaaatatcatgttagacccccaagttaaagatgattcagctttaagatgttaccctttcaggggtacagaagaaacccaattccaaaaaaggttctttcagtggtagacttggagggaacatggtggcccttctgagatgccaagtttcttttttatctagaaatggctgtaagtggaagctgataatatgtagatactttgtaaattcatattgagtaaatgaatgaaattgtgatttcctgagaatggaaccttggtttcctaaccctaattgatkagaggctcattgcttgattgtgtgtacaaactcacctgaaagggacttttttagacagagcttcatgacctgttcccaccccagttcatcctcacctcttttacgccaaaaggtctgcagggtgggttcactgtgtcttttctgccattttggggtggagagggtaatgtgatgaagccaataattcaggacttactcctttttgtgttgtgtttctttgcccttgcacgagagtatgaaata

SEQ ID NO: 529429 - DNA, 508 bp, Homo sapiens
cagaaaaaaataacctattcatggtgggggaaaaaagagcctgacttttgaggtgtataagcrtggagtcgggttcaaatcaggctctgatctttctggctctgtgatatggggcagggcatattaccaagctcagcctcagcatctctacctgtgaaatgggcttgattcagtacaccacacagggctgctgtagtatgtatgaattaatgtttgtgaaatatttagcatggtgcctgacacatggtactcagtaagaaacaactattgctattaagtgctttgcactttggttttcacagagctaacaatttttactgtctagctttgtgtctttgaaagatttttgagctctgagaatgaccttttaagacctcagcacttctagaagaggtcacactttgagcttcaatagctagcatttttgtcaattagttaacagtgtgctgaaagcaagtccctgtagagagtgttcacgggcatgagccacagggaatacaatgtgagg

SEQ ID NO: 529430 - DNA, 508 bp, Homo sapiens
cagaaaaaaataacctattcatggtgggggaaaaaagagcctgacttttgaggtgtataagcgtggagtcgggttcaaatcaggctctgatctttctggctctgtgatatggggcagggcatattaccaagctcagcctcagcatctctacctgtgaaatgggcttgattcagtacaccacacagggctgctgtagtatgtatgaattaatgtttgtgaaatatttagcatggtgccygacacatggtactcagtaagaaacaactattgctattaagtgctttgcactttggttttcacagagctaacaatttttactgtctagctttgtgtctttgaaagatttttgagctctgagaatgaccttttaagacctcagcacttctagaagaggtcacactttgagcttcaatagctagcatttttgtcaattagttaacagtgtgctgaaagcaagtccctgtagagagtgttcacgggcatgagccacagggaatacaatgtgagg

SEQ ID NO: 529431 - DNA, 508 bp, Homo sapiens
cagaaaaaaataacctattcatggtgggggaaaaaagagcctgacttttgaggtgtataagcgtggagtcgggttcaaatcaggctctgatctttctggctctgtgatatggggcagggcatattaccaagctcagcctcagcatctctacctgtgaaatgggcttgattcagtacaccacacagggctgctgtagtatgtatgaattaatgtttgtgaaatatttagcatggtgcctgacacatggtactcagtaagaaacaactattgctattaagtgctttgcactttggttttcacagagctaacaatttttactgtctagctttgtgtctttgaaagatttttgagctctgagaatgaccttttaagacctcagcacttctagaagaggtcacacttygagcttcaatagctagcatttttgtcaattagttaacagtgtgctgaaagcaagtccctgtagagagtgttcacgggcatgagccacagggaatacaatgtgagg

SEQ ID NO: 529432 - DNA, 626 bp, Homo sapiens
catgtgccactatgcccagctaatttttgtatttttatgagaggcagggtttcaccatgttggccaggctggtctcgaactcctgacctcatgatccacccgcctcggcctcccaaagtgctgggatgacaggcatgagccaccgtgcccggcctattcctttactttcttaataaacttgctttcactttactctatggrcttgtgtgaattctttcttgggagaggtccaagaaccctctcttgggctctgggtcaggacccctttttggtaacactgctgagaatatggagaaactgaaactcttgagcactgttgtcatgagaatgtaaaatggtgtagccactaaggtaaacagtacggtggcgcctcaaaaaattaaagagagaattacactatgatccagcaattctacttctgggtgtatattaataataatgtatgctaaataacatatactactaataataaccaaacttgatttatcctgctatactcaccaacacagagtacttcagacaccagatgtgtatggggttctccccacacaccaagtaagtaaccagctctgcagcatggacaccaactgggtgtcctctaattcaattcaattctgacactatct

SEQ ID NO: 529433 - DNA, 626 bp, Homo sapiens
catgtgccactatgcccagctaatttttgtatttttatgagaggcagggtttcaccatgttggccaggctggtctcgaactcctgacctcatgatccacccgcctcggcctcccaaagtgctgggatgacaggcatgagccaccgtgcccggcctattcctttactttcttaataaacttgctttcactttactctatgggcttgtgtgaattctttcttgggagaggtccaakaaccctctcttgggctctgggtcaggacccctttttggtaacactgctgagaatatggagaaactgaaactcttgagcactgttgtcatgagaatgtaaaatggtgtagccactaaggtaaacagtacggtggcgcctcaaaaaattaaagagagaattacactatgatccagcaattctacttctgggtgtatattaataataatgtatgctaaataacatatactactaataataaccaaacttgatttatcctgctatactcaccaacacagagtacttcagacaccagatgtgtatggggttctccccacacaccaagtaagtaaccagctctgcagcatggacaccaactgggtgtcctctaattcaattcaattctgacactatct

SEQ ID NO: 529434 - DNA, 626 bp, Homo sapiens
catgtgccactatgcccagctaatttttgtatttttatgagaggcagggtttcaccatgttggccaggctggtctcgaactcctgacctcatgatccacccgcctcggcctcccaaagtgctgggatgacaggcatgagccaccgtgcccggcctattcctttactttcttaataaacttgctttcactttactctatgggcttgtgtgaattctttcttgggagaggtccaagaaccctctcttgggctctgggtcaggacccctttttggtaacactgctgagaatatggagaaactgaaactcttgagcactgttgtcatgagaatgtaaaatggtgtagccactaaggtaaacagtayggtggcgcctcaaaaaattaaagagagaattacactatgatccagcaattctacttctgggtgtatattaataataatgtatgctaaataacatatactactaataataaccaaacttgatttatcctgctatactcaccaacacagagtacttcagacaccagatgtgtatggggttctccccacacaccaagtaagtaaccagctctgcagcatggacaccaactgggtgtcctctaattcaattcaattctgacactatct

SEQ ID NO: 529435 - DNA, 626 bp, Homo sapiens
catgtgccactatgcccagctaatttttgtatttttatgagaggcagggtttcaccatgttggccaggctggtctcgaactcctgacctcatgatccacccgcctcggcctcccaaagtgctgggatgacaggcatgagccaccgtgcccggcctattcctttactttcttaataaacttgctttcactttactctatgggcttgtgtgaattctttcttgggagaggtccaagaaccctctcttgggctctgggtcaggacccctttttggtaacactgctgagaatatggagaaactgaaactcttgagcactgttgtcatgagaatgtaaaatggtgtagccactaaggtaaacagtacggtggcgcctcaaaaaattaaagagagaattacactatgatccagcaattctacttctgggtgtatattaataataatgtatgctaaataacatatactactaataataaccaaacttgatttatcctgctatactcaccaacacagagtacttcagacaccagaygtgtatggggttctccccacacaccaagtaagtaaccagctctgcagcatggacaccaactgggtgtcctctaattcaattcaattctgacactatct

SEQ ID NO: 529436 - DNA, 527 bp, Homo sapiens
aactgtcagtccattaaagctctttcctttataaattacccaatctcaggcagttctttatagcactatgagaatggattaatacagcctgatttgtacaatttaggtacattccattctaatttgcttatagattttatcaaggtaaaaatcwcagaataataaaagggaataaaaagcaccaactttctgagcttctttgttgtatttacatcttaagaaattttgtcttcagttgcgaattaaaaatgagttgtcaagttcccttaataattaatgttgaaatgaacaactgtcgcaagtacaacacattccatttaatgttaaacagcattatatttactgtaattccacctttcatcccaatgtcaacctttaaatctttaatgctttaatcacacttcttttgctgatatcccttgtgagttcctcaaaccaatgcccactcttttgtgataaggtgggcattttatgccgcaagggttagtcagcagcaattgttaattattaaggaaaacaaaatgcag

SEQ ID NO: 529437 - DNA, 342 bp, Homo sapiens
tatgaggtgttgtgagaaagagtcctgtggttaaattctgttgggaaatgttccatattgtcttcactccagagagtcatgatgtatcttcgcatatttaaagtcatagtaaagaatctttgtttaagtcagtatttcccaaacayttttgattagagatcaccccaaccacacacacacaacaaagaaagaaggaaggacaggaagagaagaagtagaacatctaatgataacctgtggaagttctttggattgaatgttggaaaacagtgacctaaatctctattctacatatatttgttttatatccctttttaggacagaaaattatcctagtatttc

SEQ ID NO: 529438 - DNA, 497 bp, Homo sapiens
tgtttttctccttgatgtctggttcctcaccttcaggagcctgtcacttgctatcacttatagtttaaccaaaacattagattgtgaatctaacaatagaagcctgcaacttcttrtctaccgagaaagtgtacaagaactgctaactcatgcccccatgcctagcaacatggctttctcaactttgaaaggattagagtcatccgttggtcttaggaaccaaaaacattgatgcaactccaaataaaagtagcaaacatgtatttttccactaccataataaccctaatccccttaatcttacccatcattactaccttagccaacccctataaaaaaggttcatatccaaattacgtaaaaacatctatcgcatgtgccttcatcatcagcctcatccctacaacaatgtttatatgtacagatcaagaagtcattatctcaaactgacaggcatcagaggtttgccgaagcccaaggtgcagaggttgtagtta

SEQ ID NO: 529439 - DNA, 578 bp, Homo sapiens
tgaactctcagccaatagccctgtagctcatgcctgaaccaagcttacgtaacgtgtattttctccgtgaggcacattgcagctttcttgcacttaggaacactagacagcactcagtactatgtttggggccattttagcagcaccatcatcaacagaargtgcaaaaatgcaaaaatcatggcactaaatagaccacaaaaggggcccttgtgtacagcatgagagctgaaacaaggagacttcgtgttacctgtctgaattcaactgagaaagagtgtgttgggcgactaattttttcacaccctgcataggtccacagatgagctgtgagtgttggtcttggggttacaaatcaacgttagtgactagactagttcacaagtacggaatctgcaattaatgaggatggactgtaccatgaccctaaggaagcagaaaaatagtggttggcttcatgcaggatgtggagaatagtgccatagcagaaatttcttgcatgcgtgtgtcgcagggaggtcccaggtagtggcttgtgtctgtgtgtgttttacttttggtcccgtgtcctcagatgg

SEQ ID NO: 529440 - DNA, 556 bp, Homo sapiens
cttgtctggcaagacttcagccctgctaaatcccacttkcccctattcttcatgtacatatgggcaggtgaccatagctatagaaaaagtcacaaccacgccgattgacctcactgtgaattgatgactgccacctccagttggcccttagtcctgcccagaaatcttactacttttcccttttctattcactctcacactcctctagagattatttcacatgcttttcccttaactctcaaatcccatcatttcctgccagctcgctcctagctcatgactacaattgccttcctacttcactgggaaaatagcagcaatcaggagaggcatgtacaggctccatccactgcactgaccgcctgctgcatctggtccctggtaccaggcctttaccttctgttactgtggactgaccacccctcaagttccatgtggagtctgttgcccatgtagagaaaaatgagcccctttgtttattctgtctccatttttttttcttacaattttctctggaacccattccaatcaggtctttgtcccaggcaaacaaaca

SEQ ID NO: 529441 - DNA, 607 bp, Homo sapiens
agctgcgattcttccagttaacagtgagacctccgtaatggaggyttcaatgtcaaggtgtccatcgttgcatggactctgacagttacgtaggaaggggaggagcattttccagacccaatatttgatccaaattaacagtaaagtaagcataaaaaatcaatgttaaaacatgcaaggtgaacttcgttaggtaaaaatcttctcttggggtaaaagaagcctagctgattttcaagcaaaatctgtgtgactaaaattacactgagtctaaacaaaattcaaatcattcatctaaatatttccttcatgatcaaggcctagattaaagttcattctaatgactaatgttctatctcattctttagggctagcaaaagggtggtggaaataggttgaatttcaactcactttctaaatttaaaggaaaaaaagtctctaaaattctaatttattaaattgttgtagggaagttttaaacagaagcaggactttggatattcaaggtcacattgaaagctatcaaatatggtgatccaggtttaaatattaccttgaagactgtggccctaatctgcgctatgtttaaaattttttgatagcagcc

SEQ ID NO: 529442 - DNA, 614 bp, Homo sapiens
gctgacagcacggactgtctttgagctggaagagtcaggtgagttgcttggtgtctgggaaaggggctaggtctgatcagagaagcaagtcctacctgtgtttacctgcctggccccagaccctgctccctcctttccagggtccactgagcacagaggaaatggagccaggtagctcgttgcctggcttattgtgttgttttggcttttaacttttaattttaaattagtttaattttagatttagagaaatgctgcaaaaaatagtacagagagttcccttatattcttcagcctgcttcccctagcatctgacataaccacagcatgattacaagaaaattatcaccggtgaattgaagttaatgttagttaactaaatagcaggccttacttaaattttaccaatttttctgaaaatgccctttttctgttgcagaattttattcgtgatcccatactgcattcrttgttattttttctttgtctcctgtggtctgtgacagttcctcagtcttttcttgtctctaatgactttgacacttttgaggagtactggtcagtaattttgtagaatatccctcagtttgggtttgttcaatgttttctcatga

SEQ ID NO: 529443 - DNA, 580 bp, Homo sapiens
acccagcagagacggagccacaggaataagcaaatgcctttcctcactctcctcgtccccttcctgctactcctgcccgggccccccattggccacacccagccggaagtctgaagaaggatgagggtggctctggtggcggacggaagacctcagtacagagtcccatacagcacccgagcttgacccctctgggagtgtctgatgaaagctctggactctccccaggaaatggatcataaatacacacacacaattttacacttaattttaaggaattcatggctgctctcccaggaagcccaggcacccgagattaaacaccacagtgctatgaagtggtagaagcagaggcacaaaacacgrgtgattgaagaagggaagagaaaagcagaaagaaagggaggggcactgatgtcctcatcttacagagctgggaatcagcgactgctgtcagaagaggaaatgctcatgcaggagtcaaaaatagtcatgaaagttcagacattgggagtagtgagctaaatgctcatcttaggtattggggagtgaatagctgttgtctaaagatggtaactga

SEQ ID NO: 529444 - DNA, 598 bp, Homo sapiens
cagctgacctcagatccatgaaagaacccagccaagatcagccatacctggcgcagaccagaaaaaccatctaactaacccacacactcatayacacgaaccaatgttttaagccactacattttgggagtgttttgttatatagctagagctaactgatacaagtcccatgtgaagccttagagtgtggagtatctcctggtatcaaaaagaacctcctattttatcttttagagagcaccctgagtggtatccaggcatacgataatagaaggatcactaccactcacatgcagaaaccaagcgactatagtgggcatggggtgggggaagcaataaaagctaagcactgaacagagtcacttttaaaaagtgcgactctgagaagaaggaggtaggacaaaaccgtgactgaatctcagaaggtgaaacaagacttatcgatggtatgaccagctgtaggtggcctgggtgatttattcctggaaacctcggaaagaaagctggctcatggagataaacctttagcaagtgtgtctggaaatagatacataagttttgaatgtttggtgttctacatgaatgtgaatgttttatt

SEQ ID NO: 529445 - DNA, 598 bp, Homo sapiens
cagctgacctcagatccatgaaagaacccagccaagatcagccatacctggcgcagaccagaaaaaccatctaactaacccacacactcatacacacgaaccaatgttttaagccactacattttgggrgtgttttgttatatagctagagctaactgatacaagtcccatgtgaagccttagagtgtggagtatctcctggtatcaaaaagaacctcctattttatcttttagagagcaccctgagtggtatccaggcatacgataatagaaggatcactaccactcacatgcagaaaccaagcgactatagtgggcatggggtgggggaagcaataaaagctaagcactgaacagagtcacttttaaaaagtgcgactctgagaagaaggaggtaggacaaaaccgtgactgaatctcagaaggtgaaacaagacttatcgatggtatgaccagctgtaggtggcctgggtgatttattcctggaaacctcggaaagaaagctggctcatggagataaacctttagcaagtgtgtctggaaatagatacataagttttgaatgtttggtgttctacatgaatgtgaatgttttatt

SEQ ID NO: 529446 - DNA, 511 bp, Homo sapiens
tttgtaaattaggatttattggaaccagggcaaggatgagggtgaggtgagtgaggcaggattaggccagtgcaggatccaatcccatctttatttaaaattttaacattttgctcattatggattattttttgcattcattttgattttttaaaatattactaaaaatgttatttatcttgattaccaagtttcttggcgcccccttcaatgctgcaccaaggcctcttgccttacccagccctggcttcaccctcccatcacggtttcctactctgaatgcctggcatttggaaatgtgcccagctctgtctgagtgaggctggtgcggtaaaaagaggttgctgctttataagcaagaggagagcacaggccgccacaggtgcagggcaggtgtctgaggggaggggctgggccagaggctgctgagaaacccaccatgggcctgytgcttgtcctggagaagaattactctcctatagcctcctttcacccagtcccttcaccgcgc

SEQ ID NO: 529447 - DNA, 575 bp, Homo sapiens
tcatcccttctgggttctgctgagtgatggggctccccatcctgcctctgctcagcctcagtctagaattggcatctcagccaaggggcatcccccagctcacatgacagtcactcggcctctcttgtttgggtgccctcctttctgatatgccgaatgaggacctggggcactggtacctttggcttactcttcattgtctgtgtaagtaataaacagtctgaatctattataaaagcccctgaatcagggcttggagttgccctgaattgtatgcacctgagcttgacaaagtcccagtgcctaatmctgcagggaaccctggagtgggggtgacagcaaaggagctgggcctttgtccacatgaccaccagttgtggccatgggctgcccgggagccccagtgcccaagggcaggtccctgaaggtatcaggggtgagccattcacagcaaagcacacagaccttggaaaaggacctcagtgggcctggaagtgggagaagagatgagggtgtacagttcattacattcaccaataattcatataagacgctgcaggattcattgctgaggc

SEQ ID NO: 529448 - DNA, 555 bp, Homo sapiens
attggtgccaatttttaataaaatatattataattgcatgtttctctctggtcaaaatagtaatagtaacaataaaaacaaaataaatgtacacaggaaaatatctggagaaatttaacattgataagatatttcaaagttagatagccttttaattggaaggaaattaggagaataaatagcacaaggattaataaagctggttggaaatcagaacactgaggcatcattaaaaattgtatartccttgattaactttagtatattcagtactaggtgaaatgcaggaagtgtacttttaaagctttcccaaatttttcgatatagctgattctagcatttggaagccacttggagtttcaacttctcccattttacatgtaagaaaaatatttttcccttgcatacaaagaggcaaatgtatttactacacttaaaccatttttaaattatacagaatatttctagactttaacattgattgtatagaatcaattcaatctggtatctttaataagatttggcatatagtatctaatgcagtatctatcccta

SEQ ID NO: 529449 - DNA, 616 bp, Homo sapiens
ggctgtgattccagcctggactgacggaggattcccctccaccccagcactgatctaaatgtctgtagacactggcaaaattctgtcctgtgttttattttgctgccacggggcagcactgaattccaatacaaagtctcacactcactttgctctccctgcaaagcacacagattctctttctgccctgcactgcctgggattaggagagatgtggtgtaggcaatgccaaattgtcttycctaccctcttcagtgtgtctttccttgttgttatgttaaaacaacgtgtcagatgcatgctaaccagagtgattccatcttgaatagaggctggataatgccaaatctactggattacattccaagagggttaggcattgttggtcataatatgtttatggttgagcaaattagttagtaatgctaaccaactaaagacccagaacttgtggaaatgttccaatatttcaagaacaaagagatttttagttgaataagttttgctttaaatagtacagtcatcattattgctgaaatcaatagttacataggaaaataacagtactaatagcctgtcacaagctgatcacaagcttttataataaagtacacta

SEQ ID NO: 529450 - DNA, 616 bp, Homo sapiens
ggctgtgattccagcctggactgacggaggattcccctccaccccagcactgatctaaatgtctgtagacactggcaaaattctgtcctgtgttttattttgctgccacggggcagcactgaattccaatacaaagtctcacactcactttgctctccctgcaaagcacacagattctctttctgccctgcactgcctgggattaggagagatgtggtgtaggcaatgccaaattgtcttccctaccctcttcagtgtgtctttccttgttgttatgttaaaacaacgtgtcagatgcatgctaaccagagtgattccatcttgaatagaggcyggataatgccaaatctactggattacattccaagagggttaggcattgttggtcataatatgtttatggttgagcaaattagttagtaatgctaaccaactaaagacccagaacttgtggaaatgttccaatatttcaagaacaaagagatttttagttgaataagttttgctttaaatagtacagtcatcattattgctgaaatcaatagttacataggaaaataacagtactaatagcctgtcacaagctgatcacaagcttttataataaagtacacta

SEQ ID NO: 529451 - DNA, 532 bp, Homo sapiens
tgcttctaatcggccatcttgggccaatctccaattcattttaaaataggcaaaacttactaactgtcaggagcaatggcctgaattaaaaataaagaatattaagattaaatatcagtaaaatgttatttttatttattagatgtgtcaagaaatatgtaagttttaaaatagcactattgtatcagcttcttgtaagggcaatatttttctgcactctaggttaaatttgatagagtgttaaggcctggcaatgtgacatttagcaagagttagaagaagttcatactatctatctcactgatgttaccttkgctaatatagcctaagaaaagtatcaacggaaaatacaagtgtacaaaactaatactaaaatcttatagtaatttggctcaggcaggtagggttgagaataaaatttgtattgtaattaagttattatcagcatgtacaggaactgtaataagaaaatagtgttatttaaatatttaaacaagaatacaagctttagagatggcagtatcctgaatag

SEQ ID NO: 529452 - DNA, 532 bp, Homo sapiens
tgcttctaatcggccatcttgggccaatctccaattcattttaaaataggcaaaacttactaactgtcaggagcaatggcctgaattaaaaataaagaatattaagattaaatatcagtaaaatgttatttttatttattagatgtgtcaagaaatatgtaagttttaaaatagcactattgtatcagcttcttgtaagggcaatatttttctgcactctaggttaaatttgatagagtgttaaggcctggcaatgtgacatttagcaagagttagaagaagttcatactatctatctcactgatgttacctttgctaatatagcctaagaaaagtatcaacggaaaatacaagtgtacaaaactaatactaaaatcttatagtaatttggctcaggcasgtagggttgagaataaaatttgtattgtaattaagttattatcagcatgtacaggaactgtaataagaaaatagtgttatttaaatatttaaacaagaatacaagctttagagatggcagtatcctgaatag

SEQ ID NO: 529453 - DNA, 594 bp, Homo sapiens
tgtaaaaaacagcttcaaatccccttatccctcatcatttctggacttggtctcccattcatgacttatgctttggctaaataattgtacagactttagttaggtgtctattgctttccaggttctgtagtaagcatagaccaagaacgaaaatagaagagtgcttgctctcacagatcttagattttagtagagaaaacaggcattagttamataatcatacacatacattcacaattaaaattgaattaagtgacctaaaaaagaaaaagattctgtgagctaaaacaataacaaaaacaaacaaacaaacaaaaatggacccagcctgggaaacaggaatagagaaggtaatttcactctgaataggtgaaccacacaatctcatgaaagatagaatataagcaaagattatttcatgcaaatggacaagtaggttaaaaggttatctcattaagaaagaatgagatacacattaggaacagaagaaagccaaggtgatgataaccaaaatgaggaaactgatgagagatgaggatgtagagttaagtaggactcgtgggaatgttacgagatccttggggtgtggcttca

SEQ ID NO: 529454 - DNA, 298 bp, Homo sapiens
gggaaatactacatgaggagtggttgatggaaaagtagagatgcaacctggtgtggaactctggggaaacctgttcatctaacctacttgcatcctyacgaccttctagttctagtcttgtagtttaattatgtctcatggtggggtactatattaaggcccaatacaggccaactgctgcttttaaaaggcaaaaccttctcaaaaatcctaaggttctgctctgtacctgtcctatcaggatttgacccagatttcacatatccttcctgtcacaatgaatatcattgaattcgcc

SEQ ID NO: 529455 - DNA, 634 bp, Homo sapiens
gaaaactgagaagagacaggtcttacagagaattagagggtggactgtgcaaagcgaagagtgaagatttttgagccagaaatgagtatgatacattctaggggaaaaaagatcagtgtgactaatataacacaaggaagggggagactgatttcagttggattccaattgaacagaatttaagatttttaagaacaaaaaatacaatactaatgttaatgattagtaaaagttataatggagcctccttttgttaattcrgaatagatccattgtagcaatgtaaatgtttggttagatcaagggcagggcaggctgaccgtatagggctaagcttcgtatgtattcctaagtacttttggaccaattagctgcagataaaaattaacctgtttcatatcataattatttctggcaactgcttttaggaagatgatccattacttagtttaggtattatatttattctatttcctgaaacatcacattttatcatcactgatctgaagtcactgattctatatcactttgtatcaacaaaacacccaatcaagttttccatgcttattgggtttaaaacattttcacataatttagagaagtatgttttttttttttttgtatcacgtacata

SEQ ID NO: 529456 - DNA, 634 bp, Homo sapiens
gaaaactgagaagagacaggtcttacagagaattagagggtggactgtgcaaagcgaagagtgaagatttttgagccagaaatgagtatgatacattctaggggaaaaaagatcagtgtgactaatataacacaaggaagggggagactgatttcagttggattccaattgaacagaatttaagatttttaagaacaaaaaatacaatactaatgttaatgattagtaaaagttataatggagcctccttttgttaattcagaatagatccattgtagcaatgtaaatgtttggttagatcaagggcagggcaggctgaccgtatagggctaagcttcgtatgtattcctaagtacttttggacyaattagctgcagataaaaattaacctgtttcatatcataattatttctggcaactgcttttaggaagatgatccattacttagtttaggtattatatttattctatttcctgaaacatcacattttatcatcactgatctgaagtcactgattctatatcactttgtatcaacaaaacacccaatcaagttttccatgcttattgggtttaaaacattttcacataatttagagaagtatgttttttttttttttgtatcacgtacata

SEQ ID NO: 529457 - DNA, 587 bp, Homo sapiens
tgaagcctctactgcatttgtattgcaactcgagtttctctgtgtgcccaaacttgctttcttttcttcccctctcaggtatcaatgctaagcacattctctaataaacttccagcatgcctaatcttggtckgtctacttcctggaaaattcagaccataactgctcatcactacagtcaatttcatccctcacctggtccggcggctgacatgtgtaatcccagcacttcgggaggctgaggcaggagggttgcttgagtccaggagtttgaaaccagcctgggcaacaaagtgagggcccatcactacaaaaaagattaaaatgaaataaaaaattagctgggtgtggtggcacactcctgtagtcccagttacttgggaggctgaggcaggaagatcatttaagcctaaatggtagaggctacagtcagccatgataataccactgaactccagcctgggagaggatgagaccctgtctcaaaaaaaaactaacaaaacacttcatctttcaaatacttccagacactttctgttccagaaattttacaaggtctcttgccactagaaattgcctcctttttt

SEQ ID NO: 529458 - DNA, 587 bp, Homo sapiens
tgaagcctctactgcatttgtattgcaactcgagtttctctgtgtgcccaaacttgctttcttttcttcccctctcaggtatcaatgctaagcacattctctaataaacttccagcatgcctaatcttggtcggtctacttcctggaaaattcagaccataactgctcatcactacagtcaatttcatccctcacctggtscggcggctgacatgtgtaatcccagcacttcgggaggctgaggcaggagggttgcttgagtccaggagtttgaaaccagcctgggcaacaaagtgagggcccatcactacaaaaaagattaaaatgaaataaaaaattagctgggtgtggtggcacactcctgtagtcccagttacttgggaggctgaggcaggaagatcatttaagcctaaatggtagaggctacagtcagccatgataataccactgaactccagcctgggagaggatgagaccctgtctcaaaaaaaaactaacaaaacacttcatctttcaaatacttccagacactttctgttccagaaattttacaaggtctcttgccactagaaattgcctcctttttt

SEQ ID NO: 529459 - DNA, 587 bp, Homo sapiens
tgaagcctctactgcatttgtattgcaactcgagtttctctgtgtgcccaaacttgctttcttttcttcccctctcaggtatcaatgctaagcacattctctaataaacttccagcatgcctaatcttggtcggtctacttcctggaaaattcagaccataactgctcatcactacagtcaatttcatccctcacctggtccggyggctgacatgtgtaatcccagcacttcgggaggctgaggcaggagggttgcttgagtccaggagtttgaaaccagcctgggcaacaaagtgagggcccatcactacaaaaaagattaaaatgaaataaaaaattagctgggtgtggtggcacactcctgtagtcccagttacttgggaggctgaggcaggaagatcatttaagcctaaatggtagaggctacagtcagccatgataataccactgaactccagcctgggagaggatgagaccctgtctcaaaaaaaaactaacaaaacacttcatctttcaaatacttccagacactttctgttccagaaattttacaaggtctcttgccactagaaattgcctcctttttt

SEQ ID NO: 529460 - DNA, 487 bp, Homo sapiens
ataagagagcctcaagaaaaaattatttttactagagtgtaacctcattttkgtcttcattctaggagctgctattcatgttgaccaacagtcttaagcagaaagaaatagcttctggaaaaataactgtaagtgtaactaaattctctggagaaacctattctttctttgtggtctttttgcatcttcttaatttttgttttcatgtatacatttttgatatggttttggacatttgtccctcaaatctcatgtggaaatgtgatctccagtgtggaaggtgggcctggtgggaagtatctgggacatgggagtggatccctcatgaatggtttggtgccctccccgtggtaatgagttacccaagatctgcatgttaataagactctgagacctcccccaacccactgcagcctctctcatcatgtgacatacctgccaccccttcttttgccatgattgggagcttcctgaggcctcaccagaa

SEQ ID NO: 529461 - DNA, 650 bp, Homo sapiens
tgctctcctggtcttaagctgaaaccctcctgcagcctacataagcttactagaccacatacagccagtgcagccattataaaagcaatcctatgggcaagagcccacaccagataagcttcggtcatctaaaaagttaaactatctcacatggcaggcttaaagccttagtgtattactttttctattgctgctataacaagttacttttaaaaagccaatggctttaagcaagacaaatttattttcttgcacttatgcaggtctggagtccaaagtgggtcttcatgggctaaaattaaggtatcagtggttctgcattcattctagaggttctagyggagaacccctttcctggccttttccaggctccagagaccactggcattctttggcttatggtcccctttcatcttcaaaaccaaccatcacagcaccctgattccatgtccattattccatcattacatttccttctctgactcctcagcaaccctctttaatttctaaggacctcgttgttacttacattaaacccacctgtgtaacacaggatactctcctgttatccccatataaagggggttagattattagcagctttaattcccccttgcatgtaacaaaatatttcattaagttaaacatgt

SEQ ID NO: 529462 - DNA, 456 bp, Homo sapiens
gaaccgtagatgatgtcatgtggccaatgagatgctctcaactgggagtctgaatcttgagggggtgaggcacatatatatgtacatgtattagggaacctgggatggagtagagaatgcagtgatgaatccaagagtgatcaggatggctaaagatcataaygcatcagtgggcaataagcagttagcggaggtggggccagtggtgcagcccatgcagactgtatctggctgggctatttctcttctctcccatagtagcttggttgcctgggattcatacagattctctgagtgcccattacccttccgacccattgttacgattcttaacatctgatccctaggttggaaagacaggttcacatcattcaatgaataactgtctcacctattttaattttacatatgaccttcttactgatgtgactcctgggaaaataacttaatcttttg

SEQ ID NO: 529463 - DNA, 581 bp, Homo sapiens
ccaaagtggcagaagctagtaagaagtctgtcccctggggcacagggatccatcactgacactgttaagaattgttggcactgagtggaaataaaaagcacggtaaattttagttggttttattattcttattttaatactctgattccaatatactttcttgttggctgaaccctgggatagtttccgctgaccctctgcccctgctggaggtctctaagcttcagttcactgatttgcgtatggcaatttcagcatctgctcctactaccccacagaattgtgaggatcaaggtagtaatgggtgagaaagtgttctgtaattgtcaagcaagttkcgcagttaagcacatgattatctgaggtgtggagcagagtgaatgtgatggaaaattgaacctcactggtgatctcccaactctgtctttgctcttgctttagaattattttccctaacccacaagtgttgcagaaaaggggcgattaacaacaaaatgagattcactagtttgagcatcagcttgtttcttcactctccctgcttattctgagcagtttctcaagcttggcatgattggcct

SEQ ID NO: 529464 - DNA, 553 bp, Homo sapiens
ccaaagtggcagaagctagtaagaagtctgtcccctggggcacagggatccatcactgacactgttaagaattgttggcactgagtggaaataaaaagcacggtaaattttagttggttttattattcttattttaatactctgattccaatatactttcttgttggctgaaccctgggatagtttccgctgaccctctgcccctgctggaggtctctaagcttcagttcactgatttgcgtatggcaatttcagcatctgctcctactaccccacagaattgtgaggatcaaggtagtaatgggtgagaaagtgttctgtaattgtcaagcaagttgcgcagttaagcacatgattatctgaggtgtggagcagagtgaatgtgayggaaaattgaacctcactggtgatctcccaactctgtctttgctcttgctttagaattattttccctaacccacaagtgttgcagaaaaggggcgattaacaacaaaatgagattcactagtttgagcatcagcttgtttcttcactctccctgcttattctgagc

SEQ ID NO: 529465 - DNA, 573 bp, Homo sapiens
gctaccaataatacttagagaatttgatacaactcagtctgaaaaagctaagattagcagaacagagctgtctccaaatatttgaagaactattttatttaagggattggacccatttttgtatgtagttccagaggagcagatggtgaccactgtccaggcagatgtgtctcaatgtaaggacaacatctgtaatattaataattagaatgtatcctgtaattttctstctacccttggaaaccagtcgagatccagagtctttcactgggaggcttaaagcctagagcagccttggtgctagaggcggacagggataatgaactaatcttgaaccaattcatccatagcaatctcaatgctttcgttagctcttataggtatttaatacggccagaggaatgaaggtagtcttgctggtttagaagccctgcctaccacaacccctacaccaccccatcccctgcatagtctgatgtcatcactagtggaaatgtttaaacagcagtgaatatgcatgatagacagaatcttgcattggataaagagtgaatctttgaatttcaaggtcat

SEQ ID NO: 529466 - DNA, 573 bp, Homo sapiens
gctaccaataatacttagagaatttgatacaactcagtctgaaaaagctaagattagcagaacagagctgtctccaaatatttgaagaactattttatttaagggattggacccatttttgtatgtagttccagaggagcagatggtgaccactgtccaggcagatgtgtctcaatgtaaggacaacatctgtaatattaataattagaatgtatcctgtaattttctctctacccttggaaaccagtcgagatccagagtctttcactgggaggcttaaagcctagagcagccttggtgctagaggcggacagggataatgaactaatcttgaaccaattcatccatagcaatctcaatgctttcgttagctcttataggtatttaatacggccaraggaatgaaggtagtcttgctggtttagaagccctgcctaccacaacccctacaccaccccatcccctgcatagtctgatgtcatcactagtggaaatgtttaaacagcagtgaatatgcatgatagacagaatcttgcattggataaagagtgaatctttgaatttcaaggtcat

SEQ ID NO: 529467 - DNA, 623 bp, Homo sapiens
ataattaaatgaatgtttatataagcaaagagccaaaccagcaattgaatcaataaagcctactatgctttcatttttctctggctctcctttccaacttcccttgaataaaggtatcccttaaaattcagtacatgtyctttttggtctatggagatctcattctttttgatgacttcataaccttaattttgcatttctatgactgaccttcagtttgaattccagtcctgtctcctaatgtctactgaatattctcactttgagtttttttcgttatgtcctcaaagtcagtattactctatgtccccaactggctccttgtcctaaattttccttcccagacactaagcgttagccatatttaattacttagccaaataattgttatatcctattcattcttccttaaattatgtctatatattgcacttacatcaaatttactattttcactgccaatatcatatttcaaatccatgtgcattcacacctcgattgctacaatagctgcttttttgtggttttattttgtattttacttttgagttcacaggtacatgtgcaggtttgttacataggtcacctgtatcatggggatttgttgcacggattatttcatc

SEQ ID NO: 529468 - DNA, 591 bp, Homo sapiens
tctaataaaactttatttacagaaataggtgattgttcagatttggcccagggatcatttcttgcagacccatgtgctgagatttgagggttttcagaagctagttctgactgatctatttagaagtggtaatagaaagaagtgggagcatctgagaaaacaggttggttaagaattagtttgaaacacaagctccagcaagaactgaggatgactttggcagagttcagtgttgatggtgaaatggaaatggagaatatctgatggacgtaagagctatttaattkgtagagaggggcctctcagggaggcagctagctcaatgctggagagcactaagccaaggcatcatgccctacactgcccagattagcaaaacagtacagtcaggatggctaaaggtgacaccaagaaaccaaagggtaagatgtctgcttgtgctctctttgtgcagatgtgcagagaagaacataaaaagaaaaacccagaggtccctgtcaatttagcagaatttttcaagatgtgctccgacaggtgaaagacagtgtctaggaaagataagtataaatctgataaaatggcaaaggcaga

SEQ ID NO: 529469 - DNA, 630 bp, Homo sapiens
gggccaggggttctctggttgcgtgaccatgtgtcccctttcctagccagggttcctgcttcctgttgcccaagtgctcaaactccaactcgagcttgtcttcccgggcatatgctctttgttcctttttgctttatctgatcgtcctgcactgaccccttgcctgccggagactgcgccactgctgccttctttttcagtggcccctccgtttgctctttggcttacccaggtctgagggcctgcaagacctccttggtagagttcccccagccccctgacacacaaatccaacatatggtctttttctaaagcctgcttttcagagggtctatggatttcaagaaaactcgctcattcagaagacctagtgtaaaaaaggtttatgagatcatgaaaattaggtcaggcatggtggctcacacctgtaaccccagcacttggggargccaagatgggaagatcacttgaagccaggagtttgagaccagcctgagcaacatggtgaaaccccgtctctggggggggaagaaagagagagataatgaaaattaaaattaaaaataatgtgtgaatgtaacatagtattataataactgatgctctctaaaagcttttggcagtaattaa

SEQ ID NO: 529470 - DNA, 645 bp, Homo sapiens
ctggacagaaatctgcctgcatgcagacctaatctgtcctttgccttattcacatagcttaggacttytctaaaattaagtattgattagcttccccattgctgctaaaatcaacagatacattgatggcatgtgtctagaagagtcctttcatcaagacttgaattcttcacggtgcacaggggcattcttgtttctgaattgccagactcttagaggaggcatccaggagcacctgagggctctccataggcctggcttcaggttggggtgagctctcactttttcctcatcttgctctccattccagccctctggactggctacatttgctcttcctgcctctcacatgctgttccacccactgtggcattcctcaccactgtctcccacctgatggcatggcctgctgctctttgttcttgtagctacctttttcaggaagctttctctgccatccgaagctgggctggtttctctgccctccgaagctgggctggttgttcatccctgcaggtttccttagcacttggtacctatccctgtagtggcacatgtttgcattgttactgcatatttacttgctttttctcctccactaaattgcattccttgagagttggcatgtgttgcatatgtgtgtag

SEQ ID NO: 529471 - DNA, 605 bp, Homo sapiens
ctggggttatattcctaatgctgcctttaatttatcagggtgcctgttctgaagttaggtttctttataaagtatgggtgacactgtttgctcaacctgtttcacaggattgtagaaaggaagatgttayataatatatggactgttttataaattattgagctcttcacatatacatgatgccatttctaacatctgacactattctatttttactatcctctcgctgaatagtcagtgaatttatttacactgatccaaactaaatagctttgagggtttttttttttaatgtggtcaactgccataataacgatccattttcccagattagtttttctagctcccaattattatttaaaattgttaataatgtatcacccgattcatggagaaaatacttatagggttgtgattttcaaacagtatgttatataataaagtcatgttctgtaacagaatataacaattatacagccctgtcctgttctccaagttgacctcctggttaggagaatgccccggaaataaatgtaaagctaactaataacaagacagtgagaggatgcccacagccgtgtatgaacagtggcttgatgagtaga

SEQ ID NO: 529472 - DNA, 394 bp, Homo sapiens
atcaaaagcactgtctgcaaatctgcttctctccctgctgtattaaatgacttggatctcagctaacttcattctaacaaccttaaaactgagatgttcatagacactgagggttagcagaggattgtggtcatgttatgttagaggtatgcattctgtacagtgttgataggttagtcattataacctaaatggaaataaaacctaaagcaaaagagagcaaaaatggaaataaaacattttattatccagaaaagagacaatgggaaaaaaacaaagaatgaggatggtaagtagaaaacayaagagggtagggatgtgtcacaacaaacttaaatgggttgagcttgcctattacaggacagagactatcggtttagattaaaaaaaaaaa

SEQ ID NO: 529473 - DNA, 608 bp, Homo sapiens
gtgagggggattctcttgtacttaaagatgactgtaagattattcacatgtatcattgataaatgtttttgtgttacctttttcctcatttgacagttctgatttttaatgcaaacatttagtatttaaaataggacttttcatgaaatgttgcaaaattgtaattggaaagcttggctattacagccaagtgacatatatcagtttaaacaaatacttcaacatttcagtgaccgtatcaactgttcttctagatgtctggtgagagaccttcaaaaattgaagtcagtctttacatattcataattccactaattttsttacacattaatacttttccttaaagcattgcttacttactgaacttcatttaaattcttcttgtggttctgcagagagcttttgagccatctacatctcagaacttcttcattttctacagttttatgaatcatagtactgagtcattaccacagggatgcaccctaattctcaaaagccgaggtctcaggactgatctgattctggcatgattaaaatagaaagagccttcttttgccaattttctttttacagttcacacatttatctttacttgaccctctttt

SEQ ID NO: 529474 - DNA, 639 bp, Homo sapiens
taagagaataaagggtaagtgcatggcccaasggactagagaggttgatttcttgtggtgctctggccagcattggctgtagaaggttaacatgatgcccagggggaaataaacaccaaagaagcaaaagggccatgaatgcaaggaagcaagaaccaaaagaccatctttatctcctcttaactgccagcttaccattctttaattataacttcttacaagttgatctctacaaattcttcctgcttcattttcctttgttttaatgccacttagaaaattttccatgaggattgctgagtctgccatggacaagtaggtagataagttttagcattcctgccccttcaaaggcagacagtgagtgaaagatttcagcttacacgagcggcagcatctactttcacactgtgtgggagagtaatataaaggtggagcctgcatacccttgtgaccagcaagtgtattatgcatgccattggctgtcactacacagcagcgaagacagagcagagctgtgagtatttgtacagagtaatgttagggcacactgaaaaaatgtgacctctttcttaatgaaagtataagagcattgcctagagtaggctttacagatgtgtttgtatcaaaagagaacag

SEQ ID NO: 529475 - DNA, 617 bp, Homo sapiens
tggaagcagttcttcatcagacactttgtctgcagaatccttgatcttagacttcccatcctccagaactgtgagaaatacattgctgtttttttgtaagtcactcagtctatgatattgtgttatagcagcctgaatgaactaagccattagagaaggctacaatacttgakaaaatagtgtagtttctatgtaggggtgtgtgctacacagaggttgtcttttcttggcacactgtaataagtaacttagatatagttttattattgaataaatatgaaatataacttggatatatttatagttattttagaaaacataaataagataaaatgtgtgaaattaaacaatacccatcaaaacctgcccgaaatcaccccgtattaattttttcattggcatcttgatattttagataatatattgttgacagttgatagctaaaataaccagaatagaatggattttttttcctttgcaaattaattcatgacttgtccagagataagaaaaatatgccaaatgtatttccacagtcacatttaatgcaaagtaattaatttaagatgaaaattaattataggtactctggaaaaagcattttggattcattgtga

SEQ ID NO: 529476 - DNA, 617 bp, Homo sapiens
tggaagcagttcttcatcagacactttgtctgcagaatccttgatcttagacttcccatcctccagaactgtgagaaatacattgctgtttttttgtaagtcactcagtctatgatattgtgttatagcagcctgaatgaactaagccattagagaaggctacaatacttgataaaatagtgtagtttctatgtaggggtgtgtgctacacagaggttgtcttttcttggcacactgtaataagtaacttagatatagttttattattgaataaatatgaaatataacttggatatatttatagttattttagaaaacataaataagataaaatgtgtgaaattaaacaatacccatcaaaacctgcccgaaatcacmccgtattaattttttcattggcatcttgatattttagataatatattgttgacagttgatagctaaaataaccagaatagaatggattttttttcctttgcaaattaattcatgacttgtccagagataagaaaaatatgccaaatgtatttccacagtcacatttaatgcaaagtaattaatttaagatgaaaattaattataggtactctggaaaaagcattttggattcattgtga

SEQ ID NO: 529477 - DNA, 293 bp, Homo sapiens
tccccacacagggtctgacagggaccaagccacaggccaaccytaagtgagaaagacagacatgcttgaagccatagggagtgagtaaagctttattcaactgaatgaattttttttcctttcctttcttaaccaaaaaaaaaaaaaaaaaaaaaaaagggaggaggcacaagagggtgaagactgtgcacatctgcatgttttatcacttcaactaatgaaaaaaaaattttttttttaaccacagcacaatctctggagacaaggatgctgactttaactctatctccacc

SEQ ID NO: 529478 - DNA, 480 bp, Homo sapiens
tgacatctatttattattaatttccctgtccccatgttgccatagcaccttgtgtgatggaaagagtatggattttggagttagatggccttaacgcagttagtttccacctctttcatttatcagctgcgctgaatgtcaatttgctcagcaatatggtatggacaacacctccttcatagaaatgttgagaaaatttaaygaaactgcacatgtaaaatgtctaacatggatcctggcacaataattgctccttaatgcaaattagtttcttttcctttggtcatttccacccccattaatttattctgcatatatctatcaaactcatgaggctgtaaactcctctgtgtccccagatctggaacagcaccctggcacagagtaagttcaccaggcgtgtctggtgaatgaacacaatcccatgacaaacggaaagtgagttcagggtaaacacagcatccctgcctccataaatag

SEQ ID NO: 529479 - DNA, 510 bp, Homo sapiens
gctggtgtgacggaaaagaatccaccctccattctcattctggaataacaacgagatgttctttcgcagagggctcagaccaaatcaagactacacgatacagccactacgtccttctgctgctgggatcccttggaataaaatcaagaaaagactaaaggtgggcttaatttcactacccattgtaagcttttttgccgttttatttcctaagctctgtcaaaactccagattttcagctcaaaagtagtcatctctcattacagaatttccacctaatgatttgtattcttcctgtggaaggaaggttactagatgctcctcttacttagctagaagaaaggaggtaattgcaaaccactggacttgctcgtggacctcctgccctcactaggatcacagatgtgcagaattgtcagccacaagggcagcacctaggctttgcctatgtggggtggacatattaggatcaagaggggatctktctgtctggtttgcaaaagcatattt

SEQ ID NO: 529480 - DNA, 598 bp, Homo sapiens
tcaccctgacactgatgggggatagcattatcactctcaggactgggatctcagactgggtcaaggggcagggaaggcaggcagggctaagtaggagaataaagcaatttgtttattcacttacatttgtttatgcccctgccttatcccatgaaggatttagggcaaggcagtggggggactaatgaggataattggacaagtggaggaaagccctcttttgtgatgagagttagttacacaggcacatatgggtcagccacaaataacgtcaccagtgtgccgccactgactcactccccagccacagcaggatccaaaagatctttcgatcttttataacgagttttataatgaccatgtattgactgggccagcagagcccgggaagtgggacctggaagaacaggctcttcagtgtcagccaagragctcacttgtcagtgtttcagagtgatcctgggatggtaattgctgctgagctttgcagaaatggcaaggtgtgggaaagtgacacaagtcttgaatcctaaagctgaaattttggaaataggcgacatgtttgaatatttggaatctcacctctagcaaaggtgca

SEQ ID NO: 529481 - DNA, 642 bp, Homo sapiens
gcccagacactccactcaagaccttccattccttcagctcttgaagaccagccaggctgtaagtccctggtcatcagcccacgcagagaaactcaagctctgagagtgtcctgagacctgtcccctgggaagccacaggtctgtttggcactggcacggcaccagcaggcagtgtgctgagygggttgactgtgttacaattggcattttcaactctaccaaatacctcatgctgcgctgaaagcggacagcttctcagggacccagtctgagacacgtcaaggaatccagatggagtcagggcaccgtccgctcccaaagtctttctcgaagcagccactgtcctttggggttctctgtctcatagtagtcctccccaggagacaactggggctccaacgcaaagagctctgcatcccactccatatcttctcctgagaagttgaaaaggatctgtctggagctccccaggctagaaggaaggaatgaggcaggaggtttaagttcggcttggccggccacacagagggaagggatgctcaatgaccaccattctcatggagaccctcagattgctgccctagtcctgggtcttggggaggaccaaatggtgtcgccatgggggccatgggtggacctcag

SEQ ID NO: 529482 - DNA, 623 bp, Homo sapiens
gtgattgcacaagttgttttgaaagactgatcattggtggaggctgctagcaatttcctctggaggtggattaggagttctatgagttcatagttcactgggtgtctctgttyggaagttgcagtgctggtgaaatctagctattttcctggatgttgtggttgtgatggttgggcctaggtgaaggctcaaggcaaatttttgttttgcaagggtgcaggctgtgcaggtagtgcttcttggagtgactttccaactccgcttcagaagtctgaaccagagcaacaccattttgaatatcatatttcagagaaaaagcaagagattggtggggaagtgtgtgtaaaggagggacagtacaatgtctactcttggggcagaggctagactggttcggctggaatggctatgcttgtgtaatgaattggtggcacataaaaagaagggagggggtttcatttacttactaaatgcctgagcactgataatgaagcagtcaagaagctgagaagcctgggtgagtcagggtaggcatgttctctgagcgcaaagcctctggggagagatcagcatgcaaaccaataatggaattcagggaagtgtaatttaataaatgtatgtaa

SEQ ID NO: 529483 - DNA, 570 bp, Homo sapiens
atatcctttgccttcccttctaggtacaggcataggaggcaattctraaatgagaagggtgggcatctctgctgggggactgttgagagttgtctgcctcatcaaggaagagacatgtgggaagaaatcatttctttctgtgcctctaggcattgtcatgaggccttagctcctggaactctagccatcatcttgtgtttatttggaggtgatctggtggaacaaggatctgagagccaaaagacagagagaacctggcaccctgttgatactgcaagcttacagctttctcactcctgcaagactctgcactgggacttcttgttatgtgaaataacggcttgccctgactatgtaagccagttgagtcaggaatttctgtgacctgctgccaaaagtatcttaactgacacagactacttgagttgagagtttcaacagctcatcctctaaactcttttattggaatttctaagcagcagagtgaagtttttaattttttaaaattttcccttttaatcttgtttcttccttctctcatggccttattcaccccttcttcactcctct

SEQ ID NO: 529484 - DNA, 570 bp, Homo sapiens
atatcctttgccttcccttctaggtacaggcataggaggcaattctaaaatgagaagggtgggcatctctgctgggggactgttgagagttgtctgcctcatcaaggaagagacatgtgggaagaaatcatttctttctgtgcctctaggcattgtcatgagrccttagctcctggaactctagccatcatcttgtgtttatttggaggtgatctggtggaacaaggatctgagagccaaaagacagagagaacctggcaccctgttgatactgcaagcttacagctttctcactcctgcaagactctgcactgggacttcttgttatgtgaaataacggcttgccctgactatgtaagccagttgagtcaggaatttctgtgacctgctgccaaaagtatcttaactgacacagactacttgagttgagagtttcaacagctcatcctctaaactcttttattggaatttctaagcagcagagtgaagtttttaattttttaaaattttcccttttaatcttgtttcttccttctctcatggccttattcaccccttcttcactcctct

SEQ ID NO: 529485 - DNA, 570 bp, Homo sapiens
atatcctttgccttcccttctaggtacaggcataggaggcaattctaaaatgagaagggtgggcatctctgctgggggactgttgagagttgtctgcctcatcaaggaagagacatgtgggaagaaatcatttctttctgtgcctctaggcattgtcatgaggccttagctcctggaactctagccatcatcttgtgtttatttggaggtgatctggtggaacaaggatctgagagccaraagacagagagaacctggcaccctgttgatactgcaagcttacagctttctcactcctgcaagactctgcactgggacttcttgttatgtgaaataacggcttgccctgactatgtaagccagttgagtcaggaatttctgtgacctgctgccaaaagtatcttaactgacacagactacttgagttgagagtttcaacagctcatcctctaaactcttttattggaatttctaagcagcagagtgaagtttttaattttttaaaattttcccttttaatcttgtttcttccttctctcatggccttattcaccccttcttcactcctct

SEQ ID NO: 529486 - DNA, 637 bp, Homo sapiens
gctcagagtaagcaaaggcagtttaaggatactgtatgccatgctaaggacttcagaattttatttgtaggtggatggaaacatgcaagatttaaccttgagaatgatataagcagatgtggattttagaatgctctttactcccatagaaagaattgattgaagccaggaatgcccattagtcagtcccactgcagcagtgcagttgagaaacagtagcaaaataaaactcataattacatggcagactgacaagactagatgaccagttacatgcacaagatyagggagaatgactgggatgatacaagtcctccctgactcttcattgtctctcacacctcacatccataccattaagcagtcctgttgttgcaaacttcaaaattcatccaaaacctaatcatgtttcaccttcccaacagtcaacaccatcaattccagccactatcatccttcacctggctactccaatagctttctaactggttaacctgcatgcatctatagtctggtctcaatatagcaccctgtcaaaacataaactagatcatgttgctgctctactaaaaaccctccaacatcccctcatctcacacagcgaaggccaaagtccttacatggcctgttcctcatg

SEQ ID NO: 529487 - DNA, 581 bp, Homo sapiens
taggtgacatgcccacgtgagtgtccacaagctacctgagaagctacatgcacaagactgcacttactctctttgttaaaaaaaaaaaaaaaagtgttactatactgtcaaaagcatgcagagatagctacacaagagtgtcctggatgacattacttgtaaaagtagatataaagaaataaccggaaacatcctacatggaatgggatactacttatccttttacactaaggcgtaaagcagatctcttaggtacttcagtggaaagctggagggctgcttgcgctatgttactaaatacaaaaggaagctgctaaaggtaccattctgtttaagatgatcattacacatacatgtggctttcagtgtagaagaaaaaagctaacagggtcatatgtgggtagtggaatttcttagcttactttgaagattttccacattgtttgagtttttaaagtgaataattcctacacagaaaacttgacagttaaaaaacaaaaactaaaaaaataaactttctctaytctcaagctctattacaaacaaccctccagtcaccacattagaagtgtggtagctct

SEQ ID NO: 529488 - DNA, 430 bp, Homo sapiens
aaaaaatgtagaacacctgccatgtaaagaaatctcatcaagcctgtattttgaagcaaaggaaaacactgtggccaaacagccaagaaagctcatatttaatagaaaaaaataaaataactaaataatcactaaagaaatgatggcttttacaaccatayactgggagtgtcttctctaacattactgcaatctactttaagaaaattctattcacagaataatatgtgcttgtataataattatctggtcagtggtttaacaatttccacaaggctcaggtactcttaattttcaagtcattcactcaattaaggtaatgaacagattcatacagaaactctgaaaattctaaattctatattcagtgactgattagttgtagagcataattatgatcacaactagtcagatgttgccaaagtttcat

SEQ ID NO: 529489 - DNA, 473 bp, Homo sapiens
ccttgcaggcaggtaaaagagcttgactgacacctcttggcacctcttcatccctccacagacccctccaggcctaaatgaaaactcacatcacaggaggctgcacagtgggttttcactagtgaggcactcagcaatcaattcaaaaatcacggggaatgtaatagaagaagctgttagtgagaggcaaagaaagagaaaaacaaacactagaaaagctagcaaaatattctggaagtttttttccccctactccaaattcaaagaaccccccaacccaccatttgaccaatgcccttttaaaaaatgtttctcttgtacatytgggatttgggaaaatcatttctcagatctgggtctctgtcggcagaataaaccagactgtttttgctatttgtcagttctgtgcatgttctgtacttaagcgtcattggaggtttacttttggacctacctcctgcatgtctgcttct

SEQ ID NO: 529490 - DNA, 506 bp, Homo sapiens
aggtagttcttatgagaaaagacaacagttagacttctttatcctggaaaaaagaaagctgtgaatggggagcttaaagattggatttaagtataggtgctataatggaacaaatacaaaatggcacactgaaaactcggggattataggaaaattaagactgagggagaccactcagaacccacactgctttaactctaacaaaaccaattacaaccctattaaaaataatgataaaaatggcatgctaaattcctaatacataaggmaacacaatctattattaaaacatcagattttttttttccaaaataaggttatcatgatagaagaggatttaaggaagggttgaggctgctgagagatggagacatgagcatcatgtgcagagatgggggacagcagcacgataagccccccctaagagacagcacccagccacgctggaccacaaaaaggaacatggaggcaagggggctgcagttcagtcctgcatttctccacag

SEQ ID NO: 529491 - DNA, 506 bp, Homo sapiens
aggtagttcttatgagaaaagacaacagttagacttctttatcctggaaaaaagaaagctgtgaatggggagcttaaagattggatttaagtataggtgctataatggaacaaatacaaaatggcacactgaaaactcggggattataggaaaattaagactgagggagaccactcagaacccacactgctttaactctaacaaaaccaattacaaccctattaaaaataatgataaaaatggcatgctaaattcctaatacataaggcaacacaatctattattaaaacatcagattttttttttccaaaataaggttatcatgatagaagaggatttaaggaagggttgaggctgctgagagatggagacatgagcatcatgtgcagagatgggggacagcagcacgataagcccccsctaagagacagcacccagccacgctggaccacaaaaaggaacatggaggcaagggggctgcagttcagtcctgcatttctccacag

SEQ ID NO: 529492 - DNA, 526 bp, Homo sapiens
ccattgccccaagtagaagctgaattgaagagcttctgatgtcagagcttcctatctgaggtgtcactgcaaaaagggaaactgaggcagcaagtgaggaaagagtagctcacctcagcatgcagaatgtgagccaaagtctaagcagtctgcattctattaaaatagggtccatagaaaaccaagggctgctacagttactcctatttgccaggccagaaaacaaacctgactcccaaaataccagccaggcctataagaaatcaggcaatagactagctagaatgtttcatttcctctgcctctttctctgctagttttgttgccaaagaattaggtttgtttgtaagagactatattaactacaggcagtagtaatatttttcagacaaggataatgaaaaacaagaaataaggmacagggtagatgttgtcagagccccacctgcatcccttccacatgccaggcatgtgcacactagcatgacttcacctgctagcactacccactcccccgagagcattt

SEQ ID NO: 529493 - DNA, 588 bp, Homo sapiens
tttaatgaagaaattgaggctcaaagggattaagtagcctagggtcacagtaggaggtggcagtgccagtctacctgctcccagaacccatgctctttccattattgtaggcccaggattccctctgcaacttctcctgccgttttccactccctctcctctgacgggccttcactgctgttcagttgtctctgaaggctagccacctttctctggctccccactccaccacagtttcccagtgcacctgctgggctcggcccccgttggctcccttggatggttttcctgagatgcactaatgtatccacccccatgccactcccatggaggtgagtgcagagacagagcacagggagcctcacagattcaatggtgggcctggcccattgcaccagaaagacgcaacgtgcatatgcarcatctaacaatgacttttgaacctggaagctgaaaccatttccattcagttttgtcttttattcacaaactcactaacacattcctcctaatctccagtctcttcaaatggagaacaattcccacatcatgaagcaccaactctgtgttaggcaattattttacagg

SEQ ID NO: 529494 - DNA, 511 bp, Homo sapiens
ccctctaaggctgagataacatctcagttggttccaaaagaattcaggtaactctgtaaaaccatcaacagtgtgtctcaccacttaattctaatccacagttgcttgtgaatatagggccatcctcagtgacatgaggtccttagccgaatttccatgctcaagggagaggctgggagtgaggaggagccygcacaccatttccctgccagttcccaactgccaagggttcagacccattgagtggtttaaggctcctgcaccaaccattctggagggcagaggaagactctatgtcagccctggtgccagcctgcaatagcaactgtggtttagcaaaaagagcattcaccctgtgtattggtcagggttgtccagataagcagaaccaataggaaatatattgatatatggagagagattttttggaaggaattggctcactcagtgtggaggctgagaaatcctatgatctgccatctgcaagctgcgggcccaggaaagtctagct

SEQ ID NO: 529495 - DNA, 612 bp, Homo sapiens
gggcagcggagggtgagcaggagtggcacctggaaatgaagctaactggataaaagtgctggtccactgctcctggtgtctctgtcctataaatacaggacctgatgaccctggaggggagcagagtggtaatatagtataattggcttgattttctttttcgttttttaggactgggtaacaggatcatgcaggagaagattaaaccattacatttctaagctaggcaggcccatcgagctcctctaatccacacccctattttatataattagaaggccagagtgaaggggagattcagcttgctgttctatgccactgacaaatgtcccctcttcagggggcttcccctgaccactccatctcgagtcaccccctagttatcccctatcccattaccattttttctgcatcactatctgacatgttatccttccgaacttgcctatttttgaaatacctgcaaccccccataatactaagagctccaatgcaacagggacctgtttgtcttgctcattgctgtgtcccaagcacagagtcrctgttcagtaaacggtccttcagttcatgagtagacgagccagaacccagatgtgtttctcaggctgg

SEQ ID NO: 529496 - DNA, 607 bp, Homo sapiens
aggtttacttttttattgttaaattcaaggagagattacaatcctgcatcttcccattcaggaacatactaaaactcccagtatgttcttgtcctcttcatttgctctctaaatttgcacttttcctttttgtaggtcctgcatcattgttttaacaatttcatggtcattttcttttaaacacttaagttttcaatactctttatcagattttattgcatcctaagatctgtctttgccttgtaaacccatcttcaattaatacagaactcaatgataatgtatgattcaatttacatacayttgctttagatttaatattacatgaacacgtttccagctatatactgttttccatatgaaaggataaaatacattattttttatcaaatggaaacacacccacaaggatttactttgcatttttacataacaaaatccttttaatatgtcttttaaaacttttacaagttttccgttaattttatatctatgtatataatcatatacatatatatgtgcacatatatatgtgcatatgtatgtaggttctgcattttcatatataaaccaaagctgttatttaaaaatttcagctaaagaaaca

SEQ ID NO: 529497 - DNA, 566 bp, Homo sapiens
tttgctacaaaaattcaataaaacaatttaataatcttcataaagtatttatctacttgagtgaattaactaagtactcaatagaaattgctttagttctccacagccatttactcatgtggtatatcctctgtgcacatttctcaagtgctcctctgaggtgtggacagcattccacacacattggacaaagactgctgaaccagccgaaatctacagatgaagactccataaaagtaacaagcaaggaaaaataaactacatgacatgccttgattccatgtctcttttcgtcatgttatatatttttcttgtgaaataaggtttggaagaatctgagggccaaaactgaaaccaaaaagtacatggcaaaaaataacatataaataactcttaaaatatgagggaaaacataaaaatataaaaaccagatgaagaaaataggcaaagggcacaaataactcccctgcctcctcactccccagttctctctctctctctcgcactctctctctctctcacaaagacatataaakaaatgatactcaaacttatgaaaaggtgtt

SEQ ID NO: 529498 - DNA, 641 bp, Homo sapiens
gactacttcaggactgtctttctataattacgactttcacttcattaataattataatgccttttcctatatgcatctgtccawcagcaagtgaagacaggaattgcctgaccttacacgacaaataaactctcaattcaaatcataatgaagttggtaaaacagtttggctttagggagatgaagatgatgtattgtggggaaaaaagtctcttattactaaggtatattttatccccatataaagtagcaaaataatattatttattcataaacaaaaaagagtgatctaaaggttttcccaagttattttagattggtgcaaaagtaattgcagttttgccgttattttgatggcaaataatattaacacatcaacatatataggatatcagatctgaatttaaaaggtcagtttataaattgtatatcgttctctccagatataaagtggattccagcactctgcacgcctgagcctctgctcctgtgactatcctgccgcctctatcctcactgctgccaccttgagggagatcgtgcacctgcaggctggtgagtttggcaactagttctacggggtgatcagtgatgagcatgccatcgagcctactggcacttagcatgcggatagcaacctg

SEQ ID NO: 529499 - DNA, 641 bp, Homo sapiens
gactacttcaggactgtctttctataattacgactttcacttcattaataattataatgccttttcctatatgcatctgtccaacagcaagtgaagacaggaattgcctgaccttacacgamaaataaactctcaattcaaatcataatgaagttggtaaaacagtttggctttagggagatgaagatgatgtattgtggggaaaaaagtctcttattactaaggtatattttatccccatataaagtagcaaaataatattatttattcataaacaaaaaagagtgatctaaaggttttcccaagttattttagattggtgcaaaagtaattgcagttttgccgttattttgatggcaaataatattaacacatcaacatatataggatatcagatctgaatttaaaaggtcagtttataaattgtatatcgttctctccagatataaagtggattccagcactctgcacgcctgagcctctgctcctgtgactatcctgccgcctctatcctcactgctgccaccttgagggagatcgtgcacctgcaggctggtgagtttggcaactagttctacggggtgatcagtgatgagcatgccatcgagcctactggcacttagcatgcggatagcaacctg

SEQ ID NO: 529500 - DNA, 501 bp, Homo sapiens
cctacaaacccatcattcacaagtgaaagaatctcagaatgtacaggagacaagaccataaaaacacaaaatccactctaaacccaatcttgagattcctttgcttcaagtatttgactaaaattaaacacaaactaaactttttgaaatactcaaaacattctccccttttcttctttaaaattaaggtcttcatatgcattttcttcaatttgacttgtttaaaaatactcaagtgagagaaaatgataaagcaaatggggcaaaatgaaaaaaattggtgaaactgagtaagggtatacagaatttcttgtatcatttttgcaacttttccatatgtttaaaaaaytgcaataaaatcaagagtcaccaaaaaatagagtattaacaacagaagttctctcatagggctgtttcaaatttcaaacaattcacatactcagttaatgctggacacctagtaaacactcagtaattgttaattattttttttaaatgagt

SEQ ID NO: 529501 - DNA, 502 bp, Homo sapiens
ttggctcactgcaaccttcgtatcccaggttcaagcaatactcstgcctcagcctactgagtagctgggattataggcacctgccaccaagcctgactaatttttgtattttcagtagagacacggttttgccatgttggccaggctggtctcgaattcctgacctcaggtgatccgcccgcctcagcctccccaagtgctgggattacaggcatgagccaccgcacccagtgaattctaaagcttttgtcccagtatttctcctatgtcgcaaatcaaggcacacaaaatgagtgacagtgattgacttaccttagcgtctgagtagagattaagagcccattacttttaatggcaaaaactgcaattacctttgcaccaacctagtacttcatgggatggtggtgaggataaaatggttatatccgtaaacactgaaggctcagcaataataaatatttgataaatgaataattatcataggtacagctggtgactactg

SEQ ID NO: 529502 - DNA, 622 bp, Homo sapiens
tagaggacagacattagcaaacttgctttgcccagtttaaaagccgatacagtaataaattgaagtctaatagctctggtcaggctgcctttccccctaaaccaattgatttaaatggcagtaatttggccagcgaggctagtcctgtttaaattaaacccattaatataatagcacaagtcctgaatgaaatccatctgcaagaaaggctccaccggtcagtagtttcataactgyccagggacgtcctaaaacgcccacagtcgtgtgaacaggaattacagattacaggcaagaccctgaaaggctcctgatgagagagagagagaaaaagagacagagagaaggatatgaaaacaattgtgtgagcacacacattcaaagcaagtgggaaaccgacctgaagatttcaagggaaatgaccttggttattagtaacagtgaaaggttaattgtattaataacaacaagcagcggtgctgcaggaaaagccctcagcatcttcttttcctcccccctgtctcagtaaggagacatttttcctctttaactgttctgcctagaccccatggcccaaaaggacaaaaataatttcttcaaagcgggaatttgatctttgcag

SEQ ID NO: 529503 - DNA, 552 bp, Homo sapiens
tgcagtcatggagaagcaccttcatttgagtttgcttcctcattgaaaagaaaaaaaaaaaggaagaatacttgttctgcattcctcacatattgttgttggaatcaagtgaaaaggtgcatgataaagtccttggcaatcaataaagcattaaatatatttaagatagtagtactagtcactgtaccattattattaggcttactaacaaggcaataattaataactattatataagttattatataactattttatatgtaaatatatagatacaaaattataacaaaattgtatagctgtatccactctttatcaggtgcttaccatgtttgggatattgtgataggttcttgcacatgaaatgctcttttatttactttcatacaaccctgagaggtaaatattattattatcctctattttatagacaaggaaatataagctttcttctgtattcagttttaatattctttgaggatacgtaatgatttccttcctcagaattgctacyacatttctttacccaattatttgcacttcagatcagtg

SEQ ID NO: 529504 - DNA, 555 bp, Homo sapiens
ctgactgctgggccagtaaggagcaggtccatctttaccatgggactagggtgtgtccagtctgttctgcatctcccccatctgccagcccttcccaaggcccttgcccagcactcccacaagagcatgtacacagcacaacttccactgcccccagcctgagtgctttgttggcaacctgggagcacttcggttcccccagcagagccagtggctgaccctgaagggctagaggacaaagcccctggcaggtcccaatgccacagggttgcagcacatagctcaggagtgccaagctgagttctttggctggcacttgagcaggggaggagtcccaaatctcagaacactgagaagagtgagatgtaggtttcttggctggtgctggagtggrtcctgtttccctctgtagggctgtccgggaagtatgaggcctatctgccagctatagcctcctcctgagggagccccacagtctagaacaccgaacaaaggaaatgtgggcatggcatcagtaaccagcagagtgtcccttaaggcctggaaactgacctg

SEQ ID NO: 529505 - DNA, 555 bp, Homo sapiens
ctgactgctgggccagtaaggagcaggtccatctttaccatgggactagggtgtgtccagtctgttctgcatctcccccatctgccagcccttcccaaggcccttgcccagcactcccacaagagcatgtacacagcacaacttccactgcccccagcctgagtgctttgttggcaacctgggagcacttcggttcccccagcagagccagtggctgaccctgaagggctagaggacaaagcccctggcaggtcccaatgccacagggttgcagcacatagctcaggagtgccaagctgagttctttggctggcacttgagcaggggaggagtcccaaatctcagaacactgagaagagtgagatgtaggtttcttggctggtgctggagtggakcctgtttccctctgtagggctgtccgggaagtatgaggcctatctgccagctatagcctcctcctgagggagccccacagtctagaacaccgaacaaaggaaatgtgggcatggcatcagtaaccagcagagtgtcccttaaggcctggaaactgacctg

SEQ ID NO: 529506 - DNA, 546 bp, Homo sapiens
cataaccttaaaactgtacagagacaaatatgaaacttaaaactgtaaagagactaatatgaagggtccagtttactggagaaagtaggacaccttcgcaaaagagatgctgcctactgttgaatgatgagttatttaggcattccagggagaggagggaatttcagataaaggaaactgtgcctcaaactcacagaaccaagaaaagagtaagcaaatccaaaaaattgcaaatgattgtatatagctttaagaaataggtaaacygggactatgagaagatgaaaacaacaaattgacaaagattagactatgaaagcctttattccagaaagggccacttaaacattttaattatgggaataatattatttatatgcatgctagagaaataaatccggtgggagggaaagaagagggctgggagcaagttagcaaatattgaaaaagcccaagagacaataggagcttaaaataaatcaggatgagaagaacagattaaaaatattattaatattgttgtatgtacatgaatgtatttttaat

SEQ ID NO: 529507 - DNA, 567 bp, Homo sapiens
tatactgctctctctctgttttggctaaccaaggacaaaatatttaatcatactcaacttggaataaaagtcagtctctggaaatttcatgcttaccctcgtatcctcatccttttaccccacagtagacaygcaccatcattatgtgttctgcgtaaacttctcctgagcctttcttctctacaatttgtgctgctgcaacattacgattttcattgaaaaactatggtgtggactgagcataagcaaccactttcaccccagtctaaaatccttagaaatgaaacaaactgttttaaaagattttataatgttactggaaaataaaaaacattgtctctgataaatgcaaaagtttgatgaatttctgaagaatagaaagctgataggaatgaaataggaaccgaaggctacatcaaattgtaatgaaaatatacaaagtaaagaaatggtactgaaatcagagtggtttggggcaggggtccccaacccatggactgcggactggtacaggtccccggcctgttaggcactgggccgcacagcaacgctgcatctgtatttaca

SEQ ID NO: 529508 - DNA, 567 bp, Homo sapiens
tatactgctctctctctgttttggctaaccaaggacaaaatatttaatcatactcaacttggaataaaagtcagtctctggaaatttcatgcttaccctcgtatcctcatccttttaccccacagtagacatgcaccatcattatgtgttctgcgtaaacttctcctgagcctttcttctctacaatttgtgctgctgcaacattacgattttcattgaaaaactakggtgtggactgagcataagcaaccactttcaccccagtctaaaatccttagaaatgaaacaaactgttttaaaagattttataatgttactggaaaataaaaaacattgtctctgataaatgcaaaagtttgatgaatttctgaagaatagaaagctgataggaatgaaataggaaccgaaggctacatcaaattgtaatgaaaatatacaaagtaaagaaatggtactgaaatcagagtggtttggggcaggggtccccaacccatggactgcggactggtacaggtccccggcctgttaggcactgggccgcacagcaacgctgcatctgtatttaca

SEQ ID NO: 529509 - DNA, 513 bp, Homo sapiens
ctgttgctattagttaatccttaccacagccacatgagatgggtacaatcctgtatscccactttacagaaggggaaatagaagccaagaggcacttgccacataggtggtagatggcagagcaggattcaaacccaggacagttggacttccaagtcctgtccctctctgagagtgagtgagacagacatagagggtgaatgggatagacatgaccctcgctttacagagctcttatggttgagcagggagcagccgcattggcatgtcagagtgacaagcgttgcggagggctaagcagagagcctgcagaggaaggccatggacccaggctggaggcctgtagagtgaagagaaaagaaacagtattctagttagagtcctatgcgaagagagtcacttcctgctcagcgtaagggatacgtttcattcgcctctgggcttcaacgaggaggtactagttcagtcgtctgtgtacatgctattaatggttaataatttgagtgcaggggt

SEQ ID NO: 529510 - DNA, 670 bp, Homo sapiens
gcagcagtggagagaagagaaggccttgaataggtgatgatcttttggcacttagtgacactaatggatgtggtcctatcctgacctggcttggtaccagccagaccagtaatgcctctgcctttggcaggatctaagagggagggaaaaggaggtcaagaccccctgctccctacacgcctccacagtccaccttagatggtttctgtttggcccacacgtaacaggtgtaaaatgcctgattgtcaacacccagggctgcagtcctcccataatggtttttcacaggaaatgttgagacccctgtttttagacctattcctaagggagactatggggagggaaattgggtggggagggagggtgggataggatatgagaatatagaatccttaatttttttttaactttttattttgagattattttagatttatagaaargctgcaaaacagtacagagcttacataaccacagtactattatgaaattaataggtaccacactgtttactgaactacagacctttttcagatgttaccagttttccccacagtgtcccttttctgtttcaggatccagtctagggtccctcagtgcattcagccattgagtctcatcagtttcctctggtctgtgatagttccttagtctgtccagaaggtatcag

SEQ ID NO: 529511 - DNA, 545 bp, Homo sapiens
ttcaaagatctcccataactgataacatgacactcaaatgctgggtacctgggtagctccaggattttaagtggatcttaaaatcccattaatttttcctcacaattttctacaaaacataactcgtgtgcaaaggcaagcatacctttattggctactagaaagtgaagaacaactgcccttttccccacagtgcacataggcctgcctcttctcttcagcccacacccaacctgcttgcttacgattatctgtttgtcttagccagtggtaacctccctttttctctatttctctgacaggcctcagcagcattacattgctcacttcttacgtgctaaggtttttctttrccttatgtgattagatgtgccgaacatacttccaagatctaaaaagcagcaaaatttagggaagcaagaagtcaattgtattctggccttctgctgctttggaatttctgctctctcagagagctctaaagaggcatggcaacacagagcccctccttcctggtgattattatacaaggctcccactggcct

SEQ ID NO: 529512 - DNA, 611 bp, Homo sapiens
cactgatattatttgagaagaattacagatctatgtcataagaactgagacagggactaggagtgaagaacatttggtagagtgatagagactgggaaaagagttccatcaggcagatttgaatgctaaaagctaaaagaaaccaacaccacccagaaagaggtgagccatgcaggaaacacacacagccgtcactctgcrgagtatctgcttagaaagagaaataaagtaaattacagcctatcatttggtttcagcaaacatggcagagaactaagaaatgtctgctaataatattaatcatccacactcaaaattggaacagaggctaatataaaatgaggttgaaataaaaaataataggaactgcaccagaataaaagatatttctctgagatatatctgccaaagtgtgtcaacaactccgtagtgaagaaatattagatgctaatactagtaacattttgcacatcatttcaagtttgctgaatttcctatttgtgcatgcacgtgtgtatccatgctctagttacctacagaatgtatgattgaaaattcaagtaatattttgttatctatcagtttttacacagttgcaaagtaacttcttt

SEQ ID NO: 529513 - DNA, 417 bp, Homo sapiens
agtgtaaaagagaatatagcagcagggaggcacacatgccggtacatttggttttagaatacttgcctcaaacagcatttccctaaggatgtttcatgggtcactgttcttgtgagatgctctgtgaaagaagagctttattcctacaatcagactgggaaatgctacttatcttatcccctttttgaagaagcacactgcacatttccatgttaaaagttctgagaattcctgcagtaaagaaagatttttccatctggtacctgggatattgccatcctacggaaccagatttctgygtaatacacattgagagtggctggattacaggaccctttttgcagtggcagtctttagaggctgaaagtagctttgtaaagctttgtaaagacttaaatgggtaaaggctagaaacac

SEQ ID NO: 529514 - DNA, 610 bp, Homo sapiens
gtgatagctcaatatctccactggctcttggccctggtcactgtgtcatctgctggaactgcagcacagccttgcctggcctccctgcctccactctccctgttgcctcctgcttcttccaacaacaggaaatacacatcagctccaaatgactcagtgactccatctctgtcttcaaataaagtccaaactctcattaggattcacaagacctacatgattaggcccttacattcatcccagctccactgctgaaaatcaaagaaatagggaaagtaaggaaagggggaggaaggggcatagaatcctcaaaggcaaaacagagggctgctgccccaacagaaaccagggaggacagaagacaatcaaataacaccattaaaacacaggcaaaaattaaaaacctagcattctatatccatcaagcatatctttaaaaattgatgtcaaaatgaaaatgttttgggaaataaaacattaaattttaagtaaactaacttaaaaaaccattgaattcttttgggaaaaaatttatcagcagtagaaagaacagcaccagaaaagatacctaygtgggtcaatagaattgagtatcaactgcataaaactg

SEQ ID NO: 529515 - DNA, 648 bp, Homo sapiens
ttttattagtaatcattaaaatcttctaaaacaacttgattatcctggatatggccatacatcaggcaacaaaatgatgagaaattattgagttccgactgaatattgaggaataaagtctccaatgacctgatgattctaagatggctcggagcaaggagtgtggattctaagttctggccttattgagaacctaagaaattgtcaacccccaaagaagacagacaggtcagaagggggtrgcccaaaggtccctatctggtgcagccaggctgatctgtgcactgcagggcagggttcactagagccaaggttcctggccagtcctagctgcccctcactttcccagcccctgcagtctccctgcccacccaggcccctcacccagcaccacccttgcagccagtagtggaacacactcccgagacactctcccatcaacctgcctttctttcatctgccaccacaacagaaagtctcattttggtgaaatgagagccacaggcctggttttccatgcacaatgcaatcctgcctcagtctcatctttccaaggcctgacccacgtcttcctgttcttgctggcccgattcacaggcgaaggcctgcatttctaggttatagctgggaatgtgagcaaaagaccag

SEQ ID NO: 529516 - DNA, 648 bp, Homo sapiens
ttttattagtaatcattaaaatcttctaaaacaacttgattatcctggatatggccatacatcaggcaacaaaatgatgagaaattattgagttccgactgaatattgaggaataaagtctccaatgacctgatgattctaagatggctcggagcaaggagtgtggattctaagttctggccttattgagaacctaagaaattgtcaacccccaaagaagacagacaggtcagaagggggtggcccaaaggtccctatctggtgcagccaggctgatctgtgcactgcagggcagggttcactagagccaaggttcctggcyagtcctagctgcccctcactttcccagcccctgcagtctccctgcccacccaggcccctcacccagcaccacccttgcagccagtagtggaacacactcccgagacactctcccatcaacctgcctttctttcatctgccaccacaacagaaagtctcattttggtgaaatgagagccacaggcctggttttccatgcacaatgcaatcctgcctcagtctcatctttccaaggcctgacccacgtcttcctgttcttgctggcccgattcacaggcgaaggcctgcatttctaggttatagctgggaatgtgagcaaaagaccag

SEQ ID NO: 529517 - DNA, 648 bp, Homo sapiens
ttttattagtaatcattaaaatcttctaaaacaacttgattatcctggatatggccatacatcaggcaacaaaatgatgagaaattattgagttccgactgaatattgaggaataaagtctccaatgacctgatgattctaagatggctcggagcaaggagtgtggattctaagttctggccttattgagaacctaagaaattgtcaacccccaaagaagacagacaggtcagaagggggtggcccaaaggtccctatctggtgcagccaggctgatctgtgcactgcagggcagggttcactagagccaaggttcctggccagtcctagctgcccctcactttcccagcccctgcrgtctccctgcccacccaggcccctcacccagcaccacccttgcagccagtagtggaacacactcccgagacactctcccatcaacctgcctttctttcatctgccaccacaacagaaagtctcattttggtgaaatgagagccacaggcctggttttccatgcacaatgcaatcctgcctcagtctcatctttccaaggcctgacccacgtcttcctgttcttgctggcccgattcacaggcgaaggcctgcatttctaggttatagctgggaatgtgagcaaaagaccag

SEQ ID NO: 529518 - DNA, 648 bp, Homo sapiens
ttttattagtaatcattaaaatcttctaaaacaacttgattatcctggatatggccatacatcaggcaacaaaatgatgagaaattattgagttccgactgaatattgaggaataaagtctccaatgacctgatgattctaagatggctcggagcaaggagtgtggattctaagttctggccttattgagaacctaagaaattgtcaacccccaaagaagacagacaggtcagaagggggtggcccaaaggtccctatctggtgcagccaggctgatctgtgcactgcagggcagggttcactagagccaaggttcctggccagtcctagctgcccctcactttcccagcccctgcagtctccctgcccacccaggcccctcacccagcaccaccctygcagccagtagtggaacacactcccgagacactctcccatcaacctgcctttctttcatctgccaccacaacagaaagtctcattttggtgaaatgagagccacaggcctggttttccatgcacaatgcaatcctgcctcagtctcatctttccaaggcctgacccacgtcttcctgttcttgctggcccgattcacaggcgaaggcctgcatttctaggttatagctgggaatgtgagcaaaagaccag

SEQ ID NO: 529519 - DNA, 589 bp, Homo sapiens
ttcctcctggaagcttagagggtagtctatcccacatccttcttctagcttctggtggcttctagcaatctttagtgttccttggctcatagctaygtaactcccatctctgtttccatggtcacgtgggcttcccttctgtgtgtctctttgtcccaaatctgcatctcttttcacttcctaggatgcttaccattggatttagggtccagcctaagtccaggttgatttcttctccatatccttcacttagccacatctgcaaagaccgttctcccaatagtattcacaggtaccaaggcagtcccttggtctttcctagtttcttgtgtaatagagactgtaggagaccaaacccgccctaaagaagagacccccggaggagtgattaggcaatggtggacagtcccttacctggggtccctctcacctgtggagccaccaggcagatggaaggaggcagggctgtacctgtgtcagggcccttgtgtgctctgagcaccagacacactgatttctagcaaggctgctcctctgctgcatcccccaccacctgatgccaagccacccatccaccctggtgctccca

SEQ ID NO: 529520 - DNA, 377 bp, Homo sapiens
ctgcatggcccctggtgtaagagatcctctcctccgtccccgcctccactgcccacacccctgcctccgcctctgcccacccggcccaatcccttacaactgcccaggactgctcctgagcagccgctgggagacagacggcaaccaggytgcccctctttgctccaggtacctctctcccctcagttagcaggcctcggcttcctgtctcactgcagccagacgagaggggaaattggacagcctgacacactccactcttgtttctgcagctagaaagacttgagttagacaagcagcagcacacgcctccctacctcatggcgacagaaaatggagcagttgagctgggaattcagaacccatcaacaggtgcc

SEQ ID NO: 529521 - DNA, 497 bp, Homo sapiens
gccagttttcagttgataattattgagcacttctctgccattcagtgggtcaggggctggggaaatgtcagtgacctaaaaacacccctgccctcatgggctgacatgctacagtggagggagagacaactaaaacataaagcaaaaagaaaaaagaaaagaaaagagaagaaaagaaggcctggcatcaggtactgagaagtgctaggagggaaaataaagccaggtaaggtagagggggtacagggctgatgggggcgcttttagatagggaggtgagatcagtcctytctgagaaagacatatgtgaggtgagaactgaatgaaggggtgggtaaaggcagaaggggagccatcctggcagtgaaacaagggttagtgtttaaccactggatctgggtagggcaggtgtggagagaggcccgatttacagcatttgccatttctcatggtgtaagtattcctattatagccgatatatcagcctaccgatgtga

SEQ ID NO: 529522 - DNA, 553 bp, Homo sapiens
tgaaccaaaaattcaatacatcagtcaatttcataaccatcaactacataccataaagattttacttttctgttagctactctcttgaagctactgagcagaggtcatgggtggcagttatgaaactgtatacaacattcaggaataaaagccaaagacttcccctagtcaagcctactcgtgacatagtctcatctaacaaacactcaggataatcttaagtcagaaaattttcactttttgaaaaggtcctaggcaaaagtaaaaaaactggcaacaggtgttgaaatttgcaaattatgcgaaacatcccgcytgattcccattttgactttcccactgtgcttaacaggactgtctgcgtttatgatggaagaaggaagaatttacacataatgggggtgatggaacaggttgtttaaacttcttccattttatgcttagacactggggttggcaaacgacaaccagtgggtcaaatctggctgccaactgtttgtgaaagcaagttttactggaacacagccatgtctattcatttacacactgcatc

SEQ ID NO: 529523 - DNA, 552 bp, Homo sapiens
taactgcgattcctgttatgaccatgacaggtgacagcagaaggcmccacccagctcccacctcagttgtatagactgtgggctctgcttggccatgtgtgttgtggggaaggagaccctgttttctcctgcctttgcagtcccattctctttcctaaggattctcttttccttcttttttttttttcttgagtcagtctcgctctgtcactcaggctggagtgcagtggcacgatcttggctcactgcaacctccacctcctgagttcaagctattctccctgcctcagcctcctgagtagctgagattacaggcacgtgccaccacacccggctaatttttgtatttttagtagagacggggtttcaccatgttggccaggatggtcttgaactcctgacctcaagtgctccgccctcctcagcctcccttctcttttccttttacagcccttctgagatgtctcttcttcggcgtttcattcactccccgcggcaccctggatgcctgttcacagctcggtccagatttctagagctgcttttaaaggg

SEQ ID NO: 529524 - DNA, 642 bp, Homo sapiens
gtggagaataattttattagtcagggtccaaagcctttgaattttgtccaagtgtgataagggtggttgaagagacatctaaaaaatagtgtagtcagatattgcaggataaatgatttggtgttgatgttgtcggctgtggagaacaggaactctggtccttgtggtgcatgtgacttctgaggatggggtttctcaagaggargcctttaggcaagcagtaaattctattaaagctcaggtttaataagataagtagacgtagggagctttctgggaagaggttcagggtggagttggttctctctctctctctctctctgtctcttcccttttgtgtttaaaggaagactccagaaagcacaagagaaggtataagaagagagtataaggaaacttgactcagggcaaagaaagcattgattagaaatggattcaaaatccaggagatgattagtgttgggtcaggcatgttcatttttatatcttctgtgtaagtcctcttagattagcttgatttaaatgcttttcctttttgttcttataaaaaacggcacctaccttcatcaatatgttgatcacagtcagaggtgaaattaagtttttgggcctgatgcacgtacaagatgagggccccacttt

SEQ ID NO: 529525 - DNA, 642 bp, Homo sapiens
gtggagaataattttattagtcagggtccaaagcctttgaattttgtccaagtgtgataagggtggttgaagagacatctaaaaaatagtgtagtcagatattgcaggataaatgatttggtgttgatgttgtcggctgtggagaacaggaactctggtccttgtggtgcatgtgacttctgaggatggggtttctcaagaggaggcctttaggcaagcagtaaattctattaaagctcaggtttaataagataagtagacgtagggagctttctgggaagaggtycagggtggagttggttctctctctctctctctctctgtctcttcccttttgtgtttaaaggaagactccagaaagcacaagagaaggtataagaagagagtataaggaaacttgactcagggcaaagaaagcattgattagaaatggattcaaaatccaggagatgattagtgttgggtcaggcatgttcatttttatatcttctgtgtaagtcctcttagattagcttgatttaaatgcttttcctttttgttcttataaaaaacggcacctaccttcatcaatatgttgatcacagtcagaggtgaaattaagtttttgggcctgatgcacgtacaagatgagggccccacttt

SEQ ID NO: 529526 - DNA, 567 bp, Homo sapiens
tgtgttgggtgagtgaagttgagtgggtacaaatcaggtcaggaatataagttaggagactgttactagaatccaggccagaggtgatggtggccaatatatgagagttttagcagggaatgaaaaaaagaaaatgtgttcatgaggtagaagtaggtaaaaasaacaggatctggttcctgattggaaatgggggtagtctggagaggaagccagaatgcaggcaagaatgcatagtggtaccatccactgacatagggattaaaggaggagaagaagctttggtaaagaaaataagaagttcagctatggaatgtttgaatttgatttctctgatgaggagtagttctaggtgatgataatgctcagggtgtagacttgagagtggatgggtaaagtaaaggttgaggctattaaaagggaaaaggtcaaggaactgagggccaaggatttataataagttatcttgggccactaaagccacgcaggatgctggcaggaaacctatgagccaggtcttcaatgttgagtccagtgactcaggtgtcagaagcagcaggagaagca

SEQ ID NO: 529527 - DNA, 582 bp, Homo sapiens
atttaaggatgcacatatctgacattggtgcagtgaaagatggtactgtgtgtggcccaggaaagatctgcatccacaagaagtgtcagtctgtctgtcttgtcacacatctgccttcctgagacctgcaatatgaaggagatctgcaataacaaacatcactgccactgtggctaggggtggtccccgccctactgccagcacagaggctatgggggcagtgttgacagtggcccagcatctgcaaagagaagagtttttttttttgccattgattgtgattccttcttgtctgttgtgattttcctctttactgttgggcttcttatgtatctacgacaatgttctggtcccaaagaaactaaggctcattcatcaggttaagaaaatgtctctaatttaatattccatgmattattacactttagtctctttgcagcagaaatgttagtacatccctgaaactgagcacatttttgaccatttccagaaagctgcaaagatcttcccttacgtcagtaccacaaacattgtcattaagtgcaggttattcttaacatgtttctatctattgttcattgt

SEQ ID NO: 529528 - DNA, 477 bp, Homo sapiens
ccactgtactctctccccagtgagacaggaagaatcctcttgagccaatgccttttagcccctgaaaagaaactaatagaggaatcaacctcaaggggaaatcattatggaagagcacatctgtgaaggyagtagctagatctgctgggagtctgaggaatctgctcctagcacccccttgtaataggaggacccagagcatccctagagttaattatacaaaagaactacccagacttgtctcagagagatgactttgactgctcgccaggttttatttgttcttcaatcaggcaatgatatgatttaattccatatttcaacatttaaaaaattaaaataaattaaatggcattaaaatacatctggcttctggagaatagcctgagaaatatgtacataaaggaggctgatcaccagcatcccttgatggctttgcaacagggcagaaggatgtcagcctcccccatgggtaac

SEQ ID NO: 529529 - DNA, 581 bp, Homo sapiens
gaacttggtgaggaagggctcccaggtgaaacccgtaaagaaatgaaagaagcaagagagcaggagaccgtggggagaaagctctgcctgattccccaggaatctctggattttggcaccacaggcttgtcctactttgaggcaaggaagagctagcaatttatattctgttattctaatatccattcatcgttggcgatgggctacccctggaaggagaacaaaacctctcaagcattttctaggggtggctccactcaggttgctaaggggggttctcatgagaagaaagcatttgtgagctgctattagtcagactcagaacagtcggaggatgaagacactactatcaggtaaacatatcttgccaagggcatcaacagcattaactacaccatgcaaaatgtccattttgtttagcartttgtttatggcagggataccccaggacagagaaaagctaaatcttcatgtgaagagaattactggagatatggggcaggggttttttgtcccacacagttttctgtctgtatctttagttttagttttatgaaatcctacagcaaacattgactgta

SEQ ID NO: 529530 - DNA, 556 bp, Homo sapiens
tcttcactgaggacatcagtgatagaacatgttccttatttcgtacacaaaggagtcttcaaatttgccctggcagagagaactgaaaatgagagaattacctggatgattgaggaaaacatatcaaatgccacatttcttccaaataggtttttcctagtccttgccttagttaccagctaagctttccagaatgagtctgaagtttttgagtttagattattctacgtagaacattgacttttctgtgatccttaccattatactataagctttttcaaagtgcaagaagctatgtctcattcaacagtgtgagcttagcactcagcaaataattgttgaacaaatgaatgaatgtctgcttccatttcctttcagttttgacagtgaatatggtagatcaatgtcttagttcattctcacactgctataaagaactgcctgaaackaggtcatttataaaggttaaattgactcacagttccacatggctggggaggtctcaggaaacttacaagcatggtggaaggtgaaggggaggcaaagaccttcctta

SEQ ID NO: 529531 - DNA, 556 bp, Homo sapiens
tcttcactgaggacatcagtgatagaacatgttccttatttcgtacacaaaggagtcttcaaatttgccctggcagagagaactgaaaatgagagaattacctggatgattgaggaaaacatatcaaatgccacatttcttccaaataggtttttcctagtccttgccttagttaccagctaagctttccagaatgagtctgaagtttttgagtttagattattctacgtagaacattgacttttctgtgatccttaccattatactataagctttttcaaagtgcaagaagctatgtctcattcaacagtgtgagcttagcactcagcaaataattgttgaacaaatgaatgaatgtctgcttccatttcctttcagttttgacagtgaatatggtagatcaatgtcttagttcattctcacactgctataaagaactgcctgaaacgaggtcatttataaaggttaaattgactcacagttccacatggctggggaggtctcaggaaacttacaagcmtggtggaaggtgaaggggaggcaaagaccttcctta

SEQ ID NO: 529532 - DNA, 610 bp, Homo sapiens
gcttgcaaaatgtgaaactgcttgagttttttatgactttgcagcttttgaaaattatagcctacaaatttgtagatttttattcagtttggttttgtttaatgttcataattagaataatgttatagacttttgttataattgttgaattgttttttagtgcttccataacataataccaaacactgggyggttaaacaaagaaatgtattgtctgatgattgtggaggctggaagtcagagatcaaggtgtcggcagggctggttttatctgagtcctttctccttggccatctacaagccaaggagctatgatgataaatacatgtattgactatacttaatattacttacaataataatatttatttattaggtgaggccaagactaaactgtaatatcagtgaggttaaatgatactacttacacttttttccctctctcatgaaacagtacagatgaaggtaggctacacatgataggcctatagaagaaggtaggccatctacaagccaaggagaaaggacttacatgaaaccagccctgccaacgccctctatctttacatggtcttcactctgtaatgaataataatttggggtaagagta

SEQ ID NO: 529533 - DNA, 567 bp, Homo sapiens
tcctttatctatccctaatactcttatggtagttttccagaatctatagaagattctatttcaatctgctataggctaatggcaagcaaccaagtttgagttatatattaaatgatagttagtaaggctctaaataagaaataagtatattggatatattacctgaataaactttatggcaaagttttatgtattctaaggcattctattgtttgctaagtttatactgttactaataattgaaattttattgctgaacatctaaatttgagacactactatatgtgtatattttgtgttcaattcaaggcttaagasttttaaaagattgtatttatttttgggggctttaaaattcattgaaaagcgatatttcaaataatttgtgatttttgcagatgtcgaatttgaattcagaaggctatagtgaaatatatatataattttccattatcaatcctaatattgtgcttatactatgcactaatgacccagaaagcaatattgctgttgtaaactgctaagcatgtgccaaatattttgcctttccatgcctgcttcaaaatg

SEQ ID NO: 529534 - DNA, 558 bp, Homo sapiens
gtatggggcattttgatattcctttagtttgggttggcctagcaattctggtagtacttgctctcagaagcagtcttgactggatcagtttattgtcctaggcttttcccccttcttctattccagtctcaagaagccaggtcctagaaggttaaattggcattcaagattgtattagtcagggttctctagagggacaggactaacaggatagatatatatatatatatgaaagggagtttattgaagagtattgactcacacgatcataagatgaagtcccacaataggccrtctgcaagctgaggagcaaggaagccagtccgagtcccaacacctcaaaagtagggaagccaacagtgcagccttcagtctgtggctgatggctggagagcccctgacaaaccactggtgtaagtccaagagtcgaaaagctgaagaacttggagtccaatgttcgaaggcaggaagcatccagcacaggagaaagatgaaggctggaagagtcagccagtctagtccttccacgttcctctgcctgcttttatcctagctgtg

SEQ ID NO: 529535 - DNA, 553 bp, Homo sapiens
tgtcatcagtgatcttgtggagcccatggatgtcgctctccacagactggcgcatgaccattctgtctcatagttgactctaaagtcatcagcagcaagatgggcactgtcaatctgcagaacgatgcaggcatggctcacagtatttgcaaagatctgagccctcagatccttgatgttcttgaagtaatgcccccaatctctgacctggggtcccttcttctgcaggtgctcctgcattttgctctccagcttccatttcttggtctccagactcctcactctgtccaggyagtaggccagggagtcgttcaggccttgcatggtctccttctcattctggatgccctccactcctgccagacccctggccatccccacagccaggcccccagaccccaagttgccccagaaactggtggagtgggacatggagatctgggagcccaagcccccagcacctgcatagatgttggccatgctgctgactggcagggcgccatagcttggcggcttgatagagccaagggactggtagttagtagagaacatg

SEQ ID NO: 529536 - DNA, 623 bp, Homo sapiens
agacttattagtttggctgatcaatagcctaggacagctaaaagaacaatgcctaaaggggtatatatatttgtaataaagtagtcttctatgataatgctttaaatatcagcataatgccatttttctttttaaataaagtcatcatcataacagttttatggttctcttaattttactactaacatcttatctgaagggagtgaaaaattatattaattgcaggctgttctacttgtctcaccagcactatcttttagtacaagtttccaatatctatctmtcaacattttgactgtaaaggttaaggtgccacttacggtttaggataattatgtgaagaaacttttcagtcaatatagaaacccatcacttcaaagtaacaaaatgcatagaaataggaaacatgaatttccactttaataaatttgagcacatgatcacattgaatctttcagcatattcctcaaaaaccccaaacaaaccagaaatagataactgaagtactctgttctcagagttatcagtgatattgtgcatctctgaagttcactgtcaataaacaatgtgaaacatttgggtcttgggtgcctatatggatctctactttatcctcaaacttt

SEQ ID NO: 529537 - DNA, 656 bp, Homo sapiens
cactctggcctgggtgatggagcaagaccttgtctctataaataaataaatacttaaaaaaatgtatagggaagtctgctgggtgctttttgaaagcagaatgacaatccgtcttcttcctctgaacaatgtgtctcaatatgatgcctatgactgctgctactgccatcttgctactacccagaagatgaagccaaacctgatgctcgcaggactgagacggagaaagaatgtcagtctttgatgagataatatagcctctaaaacaaccagccctcaaaccacattattccaatatttcagttctgtgagacaatcartgttctaattgtatatataataggctaaatattaaattatttatattaatataattatatattacatataattagatataatacactaagtataaaatataatatataacatatatatatatatatattttttggtagagatggggtttcaccatgttgcccaggctgatccacctgcctcagcctcccaaagttctaattctttaagtccgcatcagtgggattcccattacttgcagctaagagcattctattcaatgccacctgagagatcattagctaagccaggtagactaactccctccaggacctgttgaggacaggcagcccacaagc

SEQ ID NO: 529538 - DNA, 353 bp, Homo sapiens
tttgctatattccaccaaatctctaaacattgaaacataaacaaatcaatgataggctagcacaatataatgattttcatatttctagatttaatgatgtctttgaaccttaattcaggtgaagaagtcaaattaccttttgaagaagaggacctagcattcacatctgragcataaaatggaatggggaaaattgaagcttggagcaaaatgcataggagagggtaggcgcgtggtaaatgtgagctgccattccctgctccagtggaggcagtttccctcaaaagagtgtttccttttccaatgagcaagttagcccagtcttagtcgttggtctggtggctgtaggtatg

SEQ ID NO: 529539 - DNA, 671 bp, Homo sapiens
aaagttctacaagttctagccaaaatacaataaaatataaacctaaagtcacaaatatagcattgaaaagaaaaaaaattttttttcagctgactgactcctagataaaaacccagatattyacctaatagaactaggtatagaaactattagaattcagtaaaatattatgtagaaaattacatttaatagttttcatatataacagcaagaaccagttagaaagcatgatgaaaactttatcacaacagcatcaaaagtagaatataatgaaaattaatttccaagaaatgtgtgatatatataaaaactaagtatattttaaatgcccattcttctctgatcagattgtaagtttaaattccaggtacaatcccaaaaggattggtgtttgattactatatagggggatggatgtatcttattagctaagttgttggtggcttttgatgtttcattacttgattcacagtattttataaaaattttcaaatgtacacaaattttgaaacaattatggagtgctttgttgcttttgccaacaaagtttacttcaaagtataaatgtataaaaatgcttagaatattttgagaaagataagtagcaagagaaaacctatctcgcttgtagtaggcagaatttagacatggccctcaatattctaccccgt

SEQ ID NO: 529540 - DNA, 394 bp, Homo sapiens
catggtaataacttcctggtagcacacaatttcatggyaagtataattcatttttccccatataaatgatttttctctaatttctttcaaaatgtaaagtaaacagtaaaaagacaaatgagggacagggcctacaggctgagatgtaactatgtacttctcctggcactgtctctaaactagaatgaactgaggtgcaacatttaatttctctatgtttcattttcaccatgtgcaatgaggaaggggggagtgtataagtgaggagactgaaacagtaagtctaacttgctatcatttcatgaccactaagtggaaataagccactgactcacaatgtatcataaaaatacataaaatttccctcaaatttaatgtaaagtaatttgattct

SEQ ID NO: 529541 - DNA, 650 bp, Homo sapiens
aacttaagattactggcctttggcaagaacagttgcttaaagagttaaggacattgaaagcgacataaatagtcactttaaaaaggaaatgattctggatggttctttgactctatttttatttttacttagagacagggtcttgctctgttgcccaggctggagtgtagagacacagttacacctcaatgtaaccttgaactcctaggcttgagatcttcccatctcggcttcccaatgtgtgaaggttacaggtgtgagcccttatatgtggccctcgtgaatggtttagcactatccccttggtggtgtccttamgataatgagttatgagatcttgttgtttcaaagtatgtggcactcgccccccacactctcttgctcctgccttcgccatgtgaagtgccttctcctattttgccttctaccatgagtaaaagcttcctgaggcttccccagaagcagatgccagtgctatgcttcctatagcctggagaactgtgagccaattatacctcttttcttataaattacccagtatcaagtatttctttatagcaatgcaagaatggcctaaaacacaaggcaaaacaactttgatatggtacagtcattttgacaatcgatatttgaatcacaatatttgatga

SEQ ID NO: 529542 - DNA, 553 bp, Homo sapiens
aaagacccctgttcccagagaaagcgatggtccgatcctccactagtgtcagcaggctcaaggatggacacagacttgaatccagtgtaactcaccccttacgccactsagatccactcattttctcccattatattgactcttatactgtattatagcaattctgggtttgttttgtttttgtgtgcagacaagacaccctcactccttccctaagagggagatataggtccttacagtcacagttgaaatcccctgggagaattcaggaatgaggttcagtgaaacaagagtccttaatagacattcatcctccatcatctctctcctgcaccacccatgctaaaattcccttgtctcctaccagcatttagtctggtccaggttgattgcttggtggagttacccagcccttcaggccccttgtcctccctgtgcttggtgggttgtaccaagcacaattcccattgactgtaattataggacttagaagtactgagagacatccaaatacattgcctgaattttggaaattctttttaatgatccctta

SEQ ID NO: 529543 - DNA, 553 bp, Homo sapiens
aaagacccctgttcccagagaaagcgatggtccgatcctccactagtgtcagcaggctcaaggatggacacagacttgaatccagtgtaactcaccccttacgccactgagatccactcattttctcccattatattgactcttatactgtattatagcaattctgggtttgttttgtttttgtgtgcagacaagacaccctcactccttccctaagagggagatataggtccttacagtcacagttgaaatcccctgggagaattcaggaatgaggttcagtgaaacaagagtccttaatagacattcatcctccatcatctctctcctgcaccacccatgctaaaattcccttgtctcctaccagcatttagtctggtccaggttgattgcttggtggagttacccagcccttcaggccccttgtcctccctgtgcttggtgggttgyaccaagcacaattcccattgactgtaattataggacttagaagtactgagagacatccaaatacattgcctgaattttggaaattctttttaatgatccctta

SEQ ID NO: 529544 - DNA, 564 bp, Homo sapiens
cccaaggacctatccaaccttaagaataactcctgtcactgggatcacctttaggccatagtcaaarcctatgaaccaatcaccaatttaagaagagattagctactgctcaacaactttcctgccaaattcaggtgtcatgccccttggcaggcctatgctattactagttaattgcatgtgtgagtatgtgttccactctcatatcctttcccaccaaagaaaagaaaatggtgccatggagtgttctaatgtgggatattgaccaatgcattgaacgctgaaccagttaactccaaaagacaccaagtccttgcactgagatgagctttaggacatttggcaactaaatataattattatctaatataaatccaaatatttgaaaatgtaggatgttaagaacatgattcctgctgtcaacctaaataataaacacagtgagagaggctttaaaaaattatacattttttagaatagggcattgcaatggaaatatgcatgccatagtaaactacatgcatattcagggagacaaaggaagacaaagatttttaaagaaaa

SEQ ID NO: 529545 - DNA, 568 bp, Homo sapiens
gaaagcctcctttgttccattttaatgatgtttatataamttttagtatgcatattcagtcagtaacattattttaaggcagttgatataggtgccaaaatcctctgtgtactgaggagataggttatcttttgcatgtgtggggttttggagacaaaagttgcactgaagtgtgtggctcttgtaaattatctcaatttcctgtttgagataatggagcagtggattttcacatccaatccctttaaatcgtaggtttaattcagttgagacccagaagtgattagcccaagtttacacaggcacttaatagctgagcagggtcacagacaaattctacctaaagtttgcaattactccccatgataagctggagaattggaattcctttccattacctgtagtacttttgccatagtaagtcttagaacaagagtaaagaaaaggcaataggttttcatggctgggtgcaggggctcatacttgtaatcccagcactttgggaggtcaaggtaggaggattgcttgaggctaggagtttgagaccagcctcagcaacatggtgaaa

SEQ ID NO: 529546 - DNA, 568 bp, Homo sapiens
gaaagcctcctttgttccattttaatgatgtttatataaattttagtatgcatattcagtcagtaacattattttaaggcagttgatataggtgccaaaatcctctgtgtactgaggagataggttatcttttgcatgtgtggggttttggagacaaaagttgcactgaagtgtgtggctcttgtaaattatctcaatttcctgtttgagataatggagcagtggattttcacatccaatccctttaaatcgtaggtttaattcagttgagacccagaagtgattagcccaagtttacacaggcacttaatagctgagcagggtcacagacaaattctacctaaagtttgcaattactccccatgataagctggagaattggaattcctttccattacctgtagtacttttgccatagyaagtcttagaacaagagtaaagaaaaggcaataggttttcatggctgggtgcaggggctcatacttgtaatcccagcactttgggaggtcaaggtaggaggattgcttgaggctaggagtttgagaccagcctcagcaacatggtgaaa

SEQ ID NO: 529547 - DNA, 570 bp, Homo sapiens
tgttggcggagcatagcaggcatcagctcacggaattatttccattgataactgaggtttgtttttaactttggttaaaattcctaactattatcttaaacaattcaaaaacattacactatatagaaaattagaataatgagcaaagaaatggagcattaggatgcaaatacactataagcraagcaagattctttgctgcagaaatgactacacttccaataagatttacaaaggcaagattcccccaaggggaagaatttgggtttaaatttgttgggaagacaaattcctagaggactgcatgtcccaggccatgcaattaaagagggagaaaccgctacatttcatgaaatagatcacagaatgcttaaaactagacgaagttgagaagactgattcaagtaccatgaaggactattaggccctgtcaaaaaattcaaggaaagctgttacattttctgtgatatgtaatgcaattaagcaaaacatgtaactctcagttttgttcaccatcatgcaagaatccagggattttaggtcttaattttcttgtgctgatattgcttc

SEQ ID NO: 529548 - DNA, 601 bp, Homo sapiens
gaaatctccaaacaatagtcatgcttaggaaatactgaagtgtcttaatattttcaggagsagtagcagtaccaacttgttcctcagcattgagagctttgtgaaactgcaaaagggcaggcaatgtgaaagcaaggggagggcagaaagaggaggagacaggggacatacagaatacatacactggatgatcaaaaagaaagccatgggatagtccagttttatgcagacattttcacactgagacattttttcggactggctaattagggttcagataattttctccaagactttaggaatgtgtccaggtttgggcccaggttattttcttggtccataagtagaagattacctgtaaattatccaggatgattcggagggagtgcacctgtcgccgaacagcacctgaaaacctttcataggttgcagcatcgtattcactcatttggatctcctttagcctgaaatcagaagagtataaaaagttaacagcttaaatcacgtatatgtgggtttttacttccaatcgcctcctgctggaactttagcaaactccttggaaactcagattcatgttgaggagaaaaggcaagaagtg

SEQ ID NO: 529549 - DNA, 548 bp, Homo sapiens
tctgccttactcacaggtgtttcctgctcagtgactcacacrgttttgcacacagtaggtgttcatatcatgtctctagaattaaatctactgctggggttcttctgttataccggcaggcaaacatgaaggcccaggacagcttgagttaaaagcaaaactgctggaagacattacaacactgaaatactacagggtttatggtgttgccatgtgctgaaagccttgggagaccaaaaatctgagtcacccttgaaaggcaaattactttgtagataggagtgcattgtaatcagatatttctaataagaataaaattaaaaaatgtttgctctctttaacatttagccttccgtaatcagtacttcttgttctaatgaaaagtgccttttgttaatactatgctttctgtactttttaaaacttgtgcatacatttagaaaaaaaaattgaacaacatagggctaatgagttcatgggcccagtacattgctttaaaaataatcttgagcacatcatttatacagttctgattaatgttttatgag

SEQ ID NO: 529550 - DNA, 548 bp, Homo sapiens
tctgccttactcacaggtgtttcctgctcagtgactcacacagttttgcacacagtaggtgttcatatcatgtctctagaattaaatctactgctggggttcttctgttataccggcaggcaaacatgaaggcccaggacagcttgagttaaaagcaaaactgctggaagacattacaacactgaaatactacagggtttatggtgttgccatgtgctgaaagccttgggagaccaaaaatctgagtcacccttgaaaggcaaattactttgtagataggagtgcattgtaatcagatatttctaataagaataaaattaaaaaatgtttgytctctttaacatttagccttccgtaatcagtacttcttgttctaatgaaaagtgccttttgttaatactatgctttctgtactttttaaaacttgtgcatacatttagaaaaaaaaattgaacaacatagggctaatgagttcatgggcccagtacattgctttaaaaataatcttgagcacatcatttatacagttctgattaatgttttatgag

SEQ ID NO: 529551 - DNA, 640 bp, Homo sapiens
ctgggtggggtttcaaagctaatgctggtcacatatctttgtgaacagcaggcctcgcaccttgagccagctttgggcttcctgatacagggatgctttgcatgtgtgctgctggtggttgaagacaatgcatgttctgtgcaacccacccaggagcagaaggatgaargagctctctgcctgctatctctggacccttttcaatgcaatccttcttttgctgccgcttttctatttcttttcccaaaataaaggtgtcccacgagaacaaagtgatccttgtaaactttccagtagtggaacactaatggtgattaatatgtgattaatatagttagtaatgcaaataatttctattcataaaaatgcaaatgtctccagtgaaatgcaattgattgattatccgcctctggatattgaccagttttaccagttgtttatccatttgtaaatttgttttggcattccttatctgactttaatatgtggtattttgaattttcctttggaccaaatagaatatcttactggtttcttcattaattaatggattaaataaaatatttgacaggttttcattatatatcaggatgataataataatatatcctatatccgctttcaaattttatcatttatc

SEQ ID NO: 529552 - DNA, 535 bp, Homo sapiens
ttgatcattatctgctgtgggctgcaaatgggcagtggccccaaatgcactctgaaggtcaggagaaaattaactctgtgtcttgtctctaaaagttagatcttgttcagttctaacatgtgtgtgggcatgcatatatgtatgtgtgtgatgtgtgcgcatgtatgtgtgtgctgtaaggagtgtatatcacagggtggagaatagggtggggtgagtgaggctttcacaactggggcatcaaaagtctcagtaatcaagataaataatattttaatgtcctatttttaaaagttaaaaataacattaaaattcacaacaaatyatcaaatttttaaatgaaaatgggctgctgtttattttatgacactgtattatagtcatcaggaacagccagtgggtcctggtccttgtggctgggctcccgtcccctcggcaggggttttctgagggctgacagtggtgtatgagcagattgagccatgtgggtattatatatagtcatgtatatattgtatagcttttatttactttt

SEQ ID NO: 529553 - DNA, 616 bp, Homo sapiens
tttttctttctttttttttttttaaataaattactttctaagtcattctagcttagtggtttatgtaagttgaattgtaatgcaatcacttcaattgttgaaaactaagaacatcttgaacggcttctaaatttgatcattagaagataatcatattttttaaattgtcttatttaaccagaaaagttaaaatcaaaatatattttatgaaaaaggtcacagcaaaggacttcataaagtaatacaagttgagcatcccaagtttgaaaatttgtaatccaaaatgctccaaaatccaaaactctttgagcatcaayatgatgctcaaagcaaatgctcactgaagcatttggggtttttcagatttgggatgctcagtcagtaagtataatgcaaatattcccaaatcctccaaaatctgaaacacttctcttcccaaacatttcaggtaaaggatacgcagatattgtatgtattattcatgtatgcataatactgaaataaataggagtacatgacaggcaagaggaaagcaaaaccaatgtttttacgtccttttaactaaaatacaaaaggaacaatgtataattttgttgaactgacatcattttaaatt

SEQ ID NO: 529554 - DNA, 618 bp, Homo sapiens
tttttctttctttttttttttttaaataaattactttctaagtcattctagcttagtggtttatgtaagttgaattgtaatgcaatcacttcaattgttgaaaactaagaacatcttgaacggcttctaaatttgatcattagaagataatcatattttttaaattgtcttatttaaccagaaaagttaaaatcaaaatatattttatgaaaaaggtcacagcaaaggacttcataaagtaatacaagttgagcatcccaagtttgaaaatttgtaatccaaaatgctccaaaatccaaaactctttgagcatcaacatgatkctcaaagcaaatgctcactgaagcatttggggtttttcagatttgggatgctcagtcagtaagtataatgcaaatattcccaaatcctccaaaatctgaaacacttctcttcccaaacatttcaggtaaaggatacgcagatattgtatgtattattcatgtatgcataatactgaaataaataggagtacatgacaggcaagaggaaagcaaaaccaatgtttttacgtccttttaactaaaatacaaaaggaacaatgtataattttgttgaactgacatcattttaaattat

SEQ ID NO: 529555 - DNA, 522 bp, Homo sapiens
atgacatgacaacctttgccttctgcccctgcacactcagccctcttctatttttttcttgcacttttcacctctagcacacttattcattatgtgtattcaatttctacacatttatttatttatttattttatttatttttgagatggagccttgctctgttgccaggccggagtgcaatggtgtgatcttggctcactgcaacctccacctcctgcgttcaagtgattctcctgcctcagcctcccaagtagctgggactacaggcatgcaccaccatacccagctaatttttgtatttttagtagagacggggtttcagcatgttggccaggatggtctcaatcttttgaccgcgtgatccgcctgcctcagccccccaaagtactgggattacaggcgtgaactactgcamccagcctatttatttttatgtgtattgatattgattatcattcatctccctctgctccaggaagggagagatcctcatcccttttattcactgatgtatcccaagt

SEQ ID NO: 529556 - DNA, 613 bp, Homo sapiens
ctctttcattttaaaatatctgaaggaattttttccttagaggagaaattttaaggatgggttataaataaactctttaagaactagtaacagttgttgtgttcttaggcaccaattctgtgtacgcatttgaggtggacaaaacttatccagaaatcagaacataaactgtgttaggtgaagcgaaagctttctcactgctaaatttggttaactactttgtctttggctggttttcaaataaagatgttctttaagaaaagtgatttttaatgactttgaatatttccctgtaaaaccctcttctaaggggttgaataatttatgcatctttaatggtagagagggaaggtattccttgaaggccagctttttataagcactttgtcatggctgattgatctctccactcagaactacaatcttccatgaaacatgcaattgagtaggtcacttgaccccaatacctccaaagcgcataaatgggttatgaacacagacatatacacaatattaatttcaattgccaaacacaagtatcataaagaaacaagcaaccctragataaagaaaagtagaatgtagggcaaagatagaagcaaattaaaagcaa

SEQ ID NO: 529557 - DNA, 283 bp, Homo sapiens
atgtaacacagatccgggagagacagccctgctaaaacattsttagtgtgattgtgtacatgcccaaggctatgtcttctgtggagcaacattagtgaattcacagtgcaagggaaataggcttcattaaagtagatcaaccaagttgttaaacaaataaataagcaaacaacaagccccagagaggaagagagataattagtagtcaaggatgctacataattatctaaaagtttcattacaacaaaaataaaatgagacacacaaaagaaaaaaatacaga

SEQ ID NO: 529558 - DNA, 283 bp, Homo sapiens
atgtaacacagatccgggagagacagccctgctaaaacattcttagtgtgattgtgtacatgcccaaggctatgtcttctgtggagcracattagtgaattcacagtgcaagggaaataggcttcattaaagtagatcaaccaagttgttaaacaaataaataagcaaacaacaagccccagagaggaagagagataattagtagtcaaggatgctacataattatctaaaagtttcattacaacaaaaataaaatgagacacacaaaagaaaaaaatacaga

SEQ ID NO: 529559 - DNA, 652 bp, Homo sapiens
tgaaatttttctcagattaaattatttgaatttcttttgtatgtggygtttggctggatttattgtttataacataatttattttgagttttaatgtggaatttaaaactgacattcattgtgataagttctctatttgtcttatctgtgccatattatttcatgatttttattttttaatcttaccaggtttgaatctgaaaaaagcctggtataaagggagatagagtgggaccagattatgcagggatttgctggccattttaagaatttaggatttgttttagttcaatggggaggcattgaattgttttgaacagggtactccttgattcattatacatcttaagatcaatccaaccattacaaaggaggttggaggaaagaatggaggcagtaagaccagttaggaggatgtcaattgtagtacacgtaatcagcgaaggtgacctggattgggtggtagcaatggtcagagagggaagtgaattactccagtttaagatctgacagctacagacttgcctatgaatcgggtgtatggcaggcagccaggaggagactcaaagatgatatttgttttggttgatggcattactctctgggtaacggagaggcctgaggaggaggagaattcatttgcagggcagac

SEQ ID NO: 529560 - DNA, 652 bp, Homo sapiens
tgaaatttttctcagattaaattatttgaatttcttttgtatgtggcgtttggctggatttattgtttataacataatttattttgagttttaatgtggaatttaaaactgacattcattgtgataagtkctctatttgtcttatctgtgccatattatttcatgatttttattttttaatcttaccaggtttgaatctgaaaaaagcctggtataaagggagatagagtgggaccagattatgcagggatttgctggccattttaagaatttaggatttgttttagttcaatggggaggcattgaattgttttgaacagggtactccttgattcattatacatcttaagatcaatccaaccattacaaaggaggttggaggaaagaatggaggcagtaagaccagttaggaggatgtcaattgtagtacacgtaatcagcgaaggtgacctggattgggtggtagcaatggtcagagagggaagtgaattactccagtttaagatctgacagctacagacttgcctatgaatcgggtgtatggcaggcagccaggaggagactcaaagatgatatttgttttggttgatggcattactctctgggtaacggagaggcctgaggaggaggagaattcatttgcagggcagac

SEQ ID NO: 529561 - DNA, 652 bp, Homo sapiens
tgaaatttttctcagattaaattatttgaatttcttttgtatgtggcgtttggctggatttattgtttataacataatttattttgagttttaatgtggaatttaaaactgacattcattgtgataagttctctatttgtcttatctgtgccatattatttcatgatttttattttttaatcttaccaggtttgaatctgaaaaaagcctggtataaagggagatagagtgggaccagattatgcagggatttgctggccattttaagaatttaggatttgttttagttcaatggggaggcattgaattgttttgaacagggtactccttgattcatyatacatcttaagatcaatccaaccattacaaaggaggttggaggaaagaatggaggcagtaagaccagttaggaggatgtcaattgtagtacacgtaatcagcgaaggtgacctggattgggtggtagcaatggtcagagagggaagtgaattactccagtttaagatctgacagctacagacttgcctatgaatcgggtgtatggcaggcagccaggaggagactcaaagatgatatttgttttggttgatggcattactctctgggtaacggagaggcctgaggaggaggagaattcatttgcagggcagac

SEQ ID NO: 529562 - DNA, 652 bp, Homo sapiens
tgaaatttttctcagattaaattatttgaatttcttttgtatgtggcgtttggctggatttattgtttataacataatttattttgagttttaatgtggaatttaaaactgacattcattgtgataagttctctatttgtcttatctgtgccatattatttcatgatttttattttttaatcttaccaggtttgaatctgaaaaaagcctggtataaagggagatagagtgggaccagattatgcagggatttgctggccattttaagaatttaggatttgttttagttcaatggggaggcattgaattgttttgaacagggtactccttgattcattatacatcttaagatcaatccaaccattacaaaggaggttggaggaaagaatggaggcagtaagaccagttaggaggatgtcaattgtagtacacgtaatcagcgaaggtgacctggattgggtggtagcaatggtcagagagggaagtgaattactccagtttaagatctgacagctacagacttgcctatgaatcgggtgtatggcaggcagccaggaggagactcaaagatgatatttgttttkgttgatggcattactctctgggtaacggagaggcctgaggaggaggagaattcatttgcagggcagac

SEQ ID NO: 529563 - DNA, 626 bp, Homo sapiens
tgcaggaaggcctctaacaaacttggccatgaaaggaactctctgaaactgacccagttgttccatagatagttttttggataaacagaaattgacccttctggtcttaaagcttgaaacttacatttgttttatctgagttcctttctcaggaaagggccttcagacctctcaaagtatcaaagaactgaaacttaccaggtcaccacatccagacaataaaatgcctgaccccacgttcatcatggttgcttccttgtcccatcctagttcctgttttcctayacattgttaaatttcttccctgctataaaaacccctagttttagttgatcagagagattaatttgagactgagctcccatctcccagactgcagcacccaattaaagccttcttccttgtcacttcagtcattggctttctgtgcagcaaacagcaggacctaaaccaaacccctgctgtttcagtaacatctccccagggaaagcaatatgtgggaaggaagagcagtgcagtattatctggcacataaacaaaggaagacacatcaacttctttgctctgcctatttgacattcttggtggctccatttagaaacattttaccactggtcttccaactg

SEQ ID NO: 529564 - DNA, 620 bp, Homo sapiens
gcaatagtttcagcctgtcctgtaggtttggcttaatacctttagtttccagcttttccagagatcagaattgatccgttaagtcccatcttaaattatattcatattgttagaatttttggtggccaaaatccccaagcaagcaaagaccctgctctcaggtgggacacgtcagaggcctagagagcagcttcaagtaaccaagggtaatatccagacctctctttggataatattaatcctccactatgcaatatratggtcagaatagcaattacctttaaaggcgtgtaataaccatagaggagcaggatctcatttccagggtactggtaatgttctatttcttggcctgatagtagtggtacaactccgtttattttactacatttattgagctgtgcttttatgatttgtgtgcttttctgtatgtgtgttgatacttcaataaaaatatatacttagggaaaaaaatttttaacccagagatactactcagcccaagcagctatttaatagtataaaacagggagtgctatacaattcatggcttctacccagtagggaagcacttttcaggttgaactcaacacagaagctgcactcttcctgccagagaa

SEQ ID NO: 529565 - DNA, 620 bp, Homo sapiens
gcaatagtttcagcctgtcctgtaggtttggcttaatacctttagtttccagcttttccagagatcagaattgatccgttaagtcccatcttaaattatattcatattgttagaatttttggtggccaaaatccccaagcaagcaaagaccctgctctcaggtgggacacgtcagaggcctagagagcagcttcaagtaaccaagggtaatatccagacctctctttggataatattaatcctccactatgcaatataatggtcagaatagcaattacctttaaaggcrtgtaataaccatagaggagcaggatctcatttccagggtactggtaatgttctatttcttggcctgatagtagtggtacaactccgtttattttactacatttattgagctgtgcttttatgatttgtgtgcttttctgtatgtgtgttgatacttcaataaaaatatatacttagggaaaaaaatttttaacccagagatactactcagcccaagcagctatttaatagtataaaacagggagtgctatacaattcatggcttctacccagtagggaagcacttttcaggttgaactcaacacagaagctgcactcttcctgccagagaa

SEQ ID NO: 529566 - DNA, 599 bp, Homo sapiens
caggttttgctttaacacaaggagtcctatttattaatcaatacactaatatttcaaatgcttactcccattcagacattggaatgtcatgcccaaggtattaaccagtgaataaaatccttagggagcttacagttcagttggagacaagcaagaatacaaacaatttcaaggctgtgttttcagagaaattttggtgaggttaatacaattaccatagaaggacagaaaacacacctacctggtttagggaagtttagtatcaagccattttcctcagtggttttattttagttagacacacctacttgagaagagtttgtyggttcctacatacagcagcttgttccacagaagtctgtgtttgctggggcagattactgtctctaggatttatacagacttaagtgtcaacaacagcaacacccagaaaaaccagcaacatcattgcatgttggagtcctgttatctgacactaccaaagttagaattaacttctgtagctaatttaggttcttccttaaactagtctccagcaatgaaccacatatgatattttcctcactgcgtttgccaacactcaagaataaaaagacaaa

SEQ ID NO: 529567 - DNA, 507 bp, Homo sapiens
tgcttgaaatgcctagaataacttatgttatcttgattaaatattgactaatacaagatcctagcacagtgtcaatccaaaataatgaaagattttatakatgaaagaatgaatagatgaacagataaatgacaaattaatgaggatgtacttagtctaaaattaaggcctaggtttggcaaagaagtcagaaatttacaatgacatcataaggttgaagaacaacttcattgaaaaattaaaaatttcctaacattcttaaacaaaacatggaatgaccagagctttattttcagcatattaagctacacaggggactttctaatcctccatcatcattctccaacaaataagaaaggagaaaattagtaatcagtttgaattcaggtattaaaaattacaaagtacaccctgtctattttatgttggaaaataaaagtgccagtggaaaggttctatattttttgtttgtttgttcattgttgttgttgttttgtttgtttttta

SEQ ID NO: 529568 - DNA, 507 bp, Homo sapiens
tgcttgaaatgcctagaataacttatgttatcttgattaaatattgactaatacaagatcctagcacagtgtcaatccaaaataatgaaagattttatagatgaaagaatgaatagatgaacagataaatgacaaattaatgaggatgtacttagtctaaaattaaggcctaggtttggcaaagaagtcagaaatttacaatgacatcataaggttgaagaacaacttcattgaaaaattaaaaatttcctaacattcttaaacaaaacatggaatgaccagagctttattttmagcatattaagctacacaggggactttctaatcctccatcatcattctccaacaaataagaaaggagaaaattagtaatcagtttgaattcaggtattaaaaattacaaagtacaccctgtctattttatgttggaaaataaaagtgccagtggaaaggttctatattttttgtttgtttgttcattgttgttgttgttttgtttgtttttta

SEQ ID NO: 529569 - DNA, 585 bp, Homo sapiens
ggcaccccacctccttacttaacatctccctagtctactcaacattctttcaattaatatttctggaactctttaatatatctgggaatccagctgyaagcaaaacttaacgcatttaggaatggagcttgcatggagctccatggaactttcctggggcatccacgccttcacagaactgacattctaatggagaagagaaacaataaagaaataaatcatatgatgtcaggaaataataaactttttttaggtaactcaggaatctctcttgtgcactcagagacgatagctctctcatgtgtactcagagcaaagataggcccagctatctttccactctggccccctcatttaattagccaccattggaagaaagcatctcttttccacaaaaatgtggcaaaagcaccactcagtggaaaagagttgttttctggatgctgcttttcaggagcatattccccgccgaccccttgtgtgaagtgggcgtctgctgatttcatcttcctagcatctgtttcccaacccaactggtggggaactgcacctccacaattatgataatgtgaccttaaccctggc

SEQ ID NO: 529570 - DNA, 590 bp, Homo sapiens
ctgcaagcaaaacttaacgcatttaggaatggagcttgcatggagctccatggaactttcctggggcatccacgccttcacagaactgacattctaatggagaagagaaacaataaagaaataaatcatatgatgtcaggaaataataaactttttttaggtaactcaggaatctctcttgtgcactcagagacgatagctctctcatgtgtactcagagcaaagataggcccagctatctttccactctggccccctcatttaattagccaccattggaagaaagcatctcttttccacaaaaatgtggcaaaagcaccactcagtggaaaagagttgttttctggatgctgcttttcaggagcatattccccgccgaccccttgtgtgaagtgggcgtctgctgatttcatcttcctagcatctgtttcccaacccaactggtggggaactgcacctccacaattatgataatgtgaccttaaccctggcctgtccagcaatgatatctttcctcctgtccaaagcratttgtcctgaaaaagggcacaaacccaaacaaggccaaaagagttgttccatgagatttg

SEQ ID NO: 529571 - DNA, 586 bp, Homo sapiens
aactctaaattataagggaaactgaaattgcttcagcttcttagaagattatttcaacaattaaaatatttgttaagacaaacctttcagctttttcatgagaaaaagttctcaacttctcactttggctacttcaagggtgaaaagttaaaaaatgaaacagacactagaaatcaactttaagaatctctccaagtggcctcagttcatgtatttagaaaatctttttaggaaaacattggccatttagaaatgctagctgggtttcctacactgcagaaggctttgtctcttaaatcactaaaatttttttgacaaaagaatattttgaatggaaatgtttctaaatgtctttaacaccataaaaagaacattttgaaacaatctaacactttcttaatgatccaggcttggtagacaaagatgaatgattgtactgggccaaaaacttcatgtggcatttaataattgttgaagttcatrgagccccttgagtctgtcataaatgactccagattactttgctttttgaaatttaatctttgctctttgtaggtatcaaatcaaattttttcttttcttcaaa

SEQ ID NO: 529572 - DNA, 683 bp, Homo sapiens
tttatgcaattcttttcacaacatatgagtttgctacacaagttcagtaataattcaaacaggcatactcgcttaataagcttaacaggcaggaacacagagccacccctatgtaggaaaatatcagttgatagccctaaggatatggaaaaggagggcaaaattgataaaatgtttttatggtaattgatttgtaattgttactgcccacatttggtctcactgggaaataacagtttttgaggatagtcaataaaattgtttgaattctgatggaaaagacatttgcagagtttaaattcattttcttaaagttgccacaaaaatattaatcactgtgggtatgaaratatgggagcagtaacagcaatgatactacaacaacactttcttcttccttggtggggtattttgtatttttaaattgacatgctctatgttgtgtcacagggtttttcattcaatgtttttctgacaagaaaaacaaggtattgatatgaaataaaagtgtgaatgcaaacctcattggaagagcaagcaaaattgaagagggagtctattatgtgaatttaaattatagtagtttggaaatggtcactgctttctattaacatagcaaattggcaggtttattaaaaatggtaaaactttgagcttctatatgaatggatgtgtctacatat

SEQ ID NO: 529573 - DNA, 512 bp, Homo sapiens
agaatattgcaccaggcccagccagggggcactgggaggacagtaggcaccaggggatggtggaaatgtgtgtgtccaaaggaattaggaagacagtaaaacagagaaatgaaggtccacagattaaaacaaaacaaaccttggccctcatttactttttttcctttcttcagtcattttttagtggctgcaatgtacaggacattatgctagtcctttaaaatagtggtgggcttgttttttcattcaagcctctagtataacaagtgagttggctacaaaataaaacrtctgagaagtaagtatatattctaaccctgcaggcaaaatccacactgtctatttgcacctttgcctcagtctgtccttcatcctttccctggctgctttttcaggggacaccattaggatgaaagagcagaagtatggaaatgggaatggggaactgtatccacccatagaattgtcaacaggtatgcacgtagcatctgcgattccgggagagctgacag

SEQ ID NO: 529574 - DNA, 639 bp, Homo sapiens
ctgtaataattaaagaaactatcatggagactttgtttagagattatttgagaccacagaacttaacgtagaaggtttagttttgagttttgttggaagcccagtggaaagtaatgtgagtttaggctatggaagcatttgggtttttttggatgtcagatgggtgcctaagatggagtttcaggtcttgctgccttttagtgtgttacccagagagttgatggacagaaagatgcaccctattcgtcatgtttttgttctgagaaaaattacagccaaaaacacatcctgttacaatgctgcatctaagaagatgcctggcactgcagcattaattaggaagtgctccttccagtggccagacccctccttgctgcaatcatgctgtcagatctaagccaaggatccagctttgccaggtggaccacaaaaggagggatgctcttttttttcaccctaatggaaaagatgcctgtgctaagctcttctacgttagaaattcgctcttgcatatcttatgtctctcaatgacacctccaaggatttcatttctttagactttgagagatctatgaggaaataaagagtgyggattatcagtcagccacttgaagaaaaacagacaaaggcagaggcaac

SEQ ID NO: 529575 - DNA, 473 bp, Homo sapiens
gctttaattacttatgatgaaccgagagtggctaatattgtgaaagaaaattgctgtacgaagttcttgacaacccagggagttaacaaatatcaatctatacaagaaaaaagagctcttgattctttgaaatgcagtggaacttagttctataactactattggtataacactagcaatttacacagccatttttccttttattttcttccaaaccatgcagcaaatgttatgaagacaggcatattatgttttaaaaagaagaaagcagagrctcagggatttcaaggacttgggcccaaaggcattcaactagaaagctggtaataataacagcgacagtttattgagtcttagtgtttctgagaacttttctaagtactttacacatattaaatttttaaatcttcacattagtcctgtgaggaaggtactattgttatgtctgtattacccatggggatactgacgca

SEQ ID NO: 529576 - DNA, 627 bp, Homo sapiens
ttttttaaggagtaacaaatattaaacatttatcagttttaatttgtatcatgataaatgttataaattatatcatgagatatgatgtacatgaactaaagcactttgaagtcctcaacaacttatttatttatttttttttgagatggggtcctgctatgttgccctggctgatctcagactactaggctcaagcgatcctctcgtctcagcctcctgtagctgggactacaggcatgcgccactgtgccctgcctcagaattttttaagattcataaggttatcctgagattaaccaatttaagaaccgccggtctaaagcaatgtgttagtaaatccatcttccaggaagctgaagcgtagagaaatttgcgctagttacattccctggggtctaggatctgctcccagttctcattttgaagcagrgtttcgggaagtataagtcaggtctccttaatggctcggggcttcctgttctgtgtgcagtgacagaggataaagacaaaaaggctgtagtccataaagtccatttttaatttccaatcttatatgccccaaagtcatgaaatcctctaggataatttctgagtttcaaaccacagctactgaagatggagcatttt

SEQ ID NO: 529577 - DNA, 627 bp, Homo sapiens
ttttttaaggagtaacaaatattaaacatttatcagttttaatttgtatcatgataaatgttataaattatatcatgagatatgatgtacatgaactaaagcactttgaagtcctcaacaacttatttatttatttttttttgagatggggtcctgctatgttgccctggctgatctcagactactaggctcaagcgatcctctcgtctcagcctcctgtagctgggactacaggcatgcgccactgtgccctgcctcagaattttttaagattcataaggttatcctgagattaaccaatttaagaaccgccggtctaaagcaatgtgttagtaaatccatcttccaggaagctgaagcgtagagaaatttgcgctagttacattccctggggtctaggatctgctcccagttctcattttgaagcagggtttcrggaagtataagtcaggtctccttaatggctcggggcttcctgttctgtgtgcagtgacagaggataaagacaaaaaggctgtagtccataaagtccatttttaatttccaatcttatatgccccaaagtcatgaaatcctctaggataatttctgagtttcaaaccacagctactgaagatggagcatttt

SEQ ID NO: 529578 - DNA, 509 bp, Homo sapiens
agtataattaccaaagccaccaggcccgtctgccaagctgggctgatgtggcctcttgaccaggttttattcttggcggctgctgcactcttctccctctgctcttcctgctccygctactaaataaactagcagatgctggcttcatgtactacaaaccctgagctatctatcttctcgtttgttttggcatctacttcaaatggtaaagcatctgtgaaacggaccaaagcactccaaaaatctacttcagggtcattttcaagaatttatttctacacttccacagaccgttttgaatttccctatcaaagatataacaagcgtgatccacacacaatcacccagtcatttttgttatttgtcttctctaggcaaatacatgtcattgttcaaataccagcgcgggagagaaatcacagtgtgcttttagttctataccaaatttcatccactcccatttctcttcgttctctgtgctaccttattcactcttgtggcttcatcac

SEQ ID NO: 529579 - DNA, 694 bp, Homo sapiens
taaaatttaaacacagttcctcagtcacactaaccacatttcaagttcttgttagccacaagaggcaggcagttaccatatggacggcacagatgtagaacatcatcacaaagagtacactgaacagcactgttctagaactaacgtagcacctgtcctcagatccaagatacccaggaaacccaagctgtgcaactaaaatccacacatggacacactacagtcaaactgcaaaatactaaaactgagaaagttaaaaacagccagtgaggagtcacaccacggacaaaggaacaataattagctaactggcttcccagcagcaaatgtcaaagccagtagaaaacaaaggaagaatacyttcattgtactaggagaaaatgctgtcaacctagaactctttcaagaccagggtaattttcatacctaagagacatataagagatttaccaacaacataccttctcaatggaaattccaattcattttagatggaagggaaattatctcaagaaaagactgaaatgtaagaagaaacagtaagcaaagacacagtacaatatgattagatctaaaacatttaactgtataaaaataatgttcaatttgtggtgaaaaagatataactaaaatactgggcaataattgatcatattgggggagatgactggagttaaataaccttatgtctttt

SEQ ID NO: 529580 - DNA, 694 bp, Homo sapiens
taaaatttaaacacagttcctcagtcacactaaccacatttcaagttcttgttagccacaagaggcaggcagttaccatatggacggcacagatgtagaacatcatcacaaagagtacactgaacagcactgttctagaactaacgtagcacctgtcctcagatccaagatacccaggaaacccaagctgtgcaactaaaatccacacatggacacactacagtcaaactgcaaaatactaaaactgagaaagttaaaaacagccagtgaggagtcacaccacggacaaaggaacaataattagctaactggcttcccagcagcaaatgtcaaagccagtagaaaacaaaggaagaataccttcattgtactaggagaaaatgctgtcaacctagaactctttcaagaccagggtaattttcatacctaaragacatataagagatttaccaacaacataccttctcaatggaaattccaattcattttagatggaagggaaattatctcaagaaaagactgaaatgtaagaagaaacagtaagcaaagacacagtacaatatgattagatctaaaacatttaactgtataaaaataatgttcaatttgtggtgaaaaagatataactaaaatactgggcaataattgatcatattgggggagatgactggagttaaataaccttatgtctttt

SEQ ID NO: 529581 - DNA, 580 bp, Homo sapiens
caaggttactaacccactatttaacgcctagggcaaggcacattaaaacttactttgctgtggctaagaaaataacttcaccaccagcccccaaattaaaatagctttattgcttttcccaattgtaaaactgcatgctcactgggggtggggagacaggaatacaaatatagtaaagtttaaaatcaaacagtagcaaataccaaaccccagagacaactggcagaaacttactcccagttgagagtacccatctcccacaccctcaccagtgtgtgtatttacaaggtctcacttcttccccaagggggaggaaatggaattactggcaacataccaatgataagctggctttgaagccaggcacataggttcaaatccycacaccactgtttcaccagtcttgaaaacttggaccaattccttaaagtcttggtctcaaactgcctgtgccttgtgacacaaaggagaaatgaagtaataaaaataaagcccatagaatagggaccggcacatatggcccagtaaatgcaggctatcaccacctttgttgttttttttttttaaacattacatgtac

SEQ ID NO: 529582 - DNA, 504 bp, Homo sapiens
ataagacaagcaaactcattacattctagaataataacaacagtggatattaatcaaatatctgttacatcaggtacttcacatattggattgaatttaatcttcacgggaagtctctgtgtactgactgtacccattttgccagtaggaaagattaaactcagagcacaagagactgacagagatcttaacacttctttcaagtggtggaggtgagactccaacccaggccctgcgactcgaacacatacagttgtctgcrtagacccttccccaccacccaggaaaaaaccagaacatccaaatctaattacattatttgtcttttaaaatgacatttacattaactttttgtctttttcattaattccaaagcaattgcagggaaggtccatgcttcaagacggccaccaacagcgtcttgccaaggctcttaggtccgtagtaatacttccaaacacattatcctggtggctctcccaatgataccatgaggaggctcag

SEQ ID NO: 529583 - DNA, 514 bp, Homo sapiens
acctgctttggacagacagtgggaagaagtgtgatccctctctccctctccccaggccatcggggagggtggagcacatttcagaagatgaggtttgtcctgggtctcaagggagatgagcagcgaagagagcagaaagcacagcagatgtgaaggcttcggaggtgaggggttgcagcatggaccaaygcaagaggaaatgtgatccggcgctcctcccagctttcccccaagtatgccagaggaaggagaccccggcaggtgtgcagagacctgtctgttgcagacggggccattcctaaggcagacacgtgggtcgatgaccgcagggccttcctccccctatctgaggcagatcgccccatctgtgctctgcccctcaccctccacttcaccttggaagcccccctccttatcttcaacctcctcctctctacggcttcctcccaccagtgtggaacccactcatgctcacatctgttccacttacaaagatgctttctctcctgggcat

SEQ ID NO: 529584 - DNA, 499 bp, Homo sapiens
tttaatttcaacgagcatattattaggttttgttatatgctaggccccgtgctaggagttggggctaggaagatgaataagatgtggttcaatccttgattatgtaaagtttggtgttgctaacgagatataaatgtaaagaagaaaatagaatgactatcttaaaaatcaaatataacatattaaattagcgtcccattgtaggttacttcaggagtgacaccattttattttcaatatctactggattcagtgtctgaaaatatagcccaacctttcaaaagggaggtgtgtttctgacccttttttgtccctgcctctctgtgctgaatgtttggggaacttctaaacataatttattatagattgtaaaactagaatgcttttaatgtaggtttcctataaaatgctacaaatgaataaaatctgtaaactctccagttrtgatgcacctctttgtgagttatggtaagttctcctgagggcaagcatggaaggc

SEQ ID NO: 529585 - DNA, 616 bp, Homo sapiens
taacctgtgcctgtcaatttttctttgaaatttccccttatctcaatccctgtcttctactactacctggccagagcctttttcaacttttgccagaattgcataatatcttctaagctgttattctgcttgcttcctttcrtggtaaaaaatatattatttaagggtatttctttgattcacctgcttaaaacaattccaggcttccctggttcaagagtagcagtctcaattctgttaggagcccattttttcacaggtctgtcacatttgtgaaatgaaggactgactgacctctttttcagattattttttcaagggtgcttatatagaaaataaatatagtgtctcctttcaaagcaaatggcaggtttgctgaaggctttgaaagacagagatagtttctctaactaaaacaaatggtaggcatattactttccagtataaaatattcaggtctccctaacctctgggatactctcctgcaattatacctagtatgtgtgcaggtgtcatcaggccctctttgtatcatcctataggaattagggctcaaggaaccagcacaaaaaaatgccaatactctggctatttttatttctgtaataaaccgttt

SEQ ID NO: 529586 - DNA, 357 bp, Homo sapiens
taatggaaaatgtcctgttctcaggcctataatatgaagcccttgataaatcttgaatgcttaagatcatgttaaaaagttatacgactttgaatcatttagattaaaaattttggggagttgacccttcatacactttttctcttctttctcccttatgaaaatcattgttatcatgaaaaactaacygagctttactttaaataaaataaagtcatacttataatattctcagatacatgacttagacaaagaaaaatcactactttaaactgagtttccagacttttaaagttcacaaaactctattacatacctcatttttgcaatttccaacctagaaaattaaaggacata

SEQ ID NO: 529587 - DNA, 361 bp, Homo sapiens
cattagatcatcttcgaagataagtaatggaaaatgtcctgttctcaggcctataatatgaagcccttgataaatcttgaatgcttaagatcatgttaaaaagttatacgactttgaatcatttagattaaaaattttggggagttgacccttcatacactttttctcttctttctcccttatgaaaatcattgttatcatgaaaaactaactgagctttactttaaataaaataaagtcatacttataatattctcagatacatgacttagacaaagaaaaatcactactttaaactgagtttccagacttttaaagktcacaaaactctattacatacctcatttttgcaatttccaac

SEQ ID NO: 529588 - DNA, 616 bp, Homo sapiens
taacctgtgcctgtcaatttttctttgaaatttccccttatctcaatccctgtcttctactactacctggccagagcctttttcaacttttgccagaattgcataatatcttctaagctgttattctgcttgcttcctttcatggtaaaaaatatattatttaagggtatttctttgattcacctgcttaaaacaattccaggcttccctggttcaagagtagcagtctcaattctgttaggagcccattttttcacaggtctgtcacatttgtgaaatgaaggactgactgacctctttttcagattattttttcaagggtgcttatatagaaaataaatatagtgtctcctttcaaagcaaatggcaggtttgctgaaggctttgaaagacagagatagtttctctaactaaaacaaatggtaggcatattactttccagtataaaatattcaggtctccctaacctctgggatactctcctgcaattatacctagtatgtgtgcaggtgtcatcwggccctctttgtatcatcctataggaattagggctcaaggaaccagcacaaaaaaatgccaatactctggctatttttatttctgtaataaaccgttt

SEQ ID NO: 529589 - DNA, 616 bp, Homo sapiens
taacctgtgcctgtcaatttttctttgaaatttccccttatctcaatccctgtcttctactactacctggccagagcctttttcaacttttgccagaattgcataatatcttctaagctgttattctgcttgcttcctttcatggtaaaaaatatattatttaagggtatttctttgattcacctgcttaaaacaattccaggcttccctggttcaagagtagcagtctcaattctgttaggagcccattttttcacaggtctgtcacatttgtgaaatgaaggactgactgacctctttttcagattattttttcaagggtgcttatatagaaaataaatatagtgtctcctttcaaagcaaatggcaggtttgctgaaggctttgaaagacagagatagtttctctaactaaaacaaatggtaggcatattactttccagtataaaatattcaggtctccctaacctctgggatactctcctgcaattatacctagtatgtgtgcaggtgtcatcaggccctctttgtatcatcctataggaattagggctcaaggaaccagcacaaaaaaatgccaatactctggctayttttatttctgtaataaaccgttt

SEQ ID NO: 529590 - DNA, 634 bp, Homo sapiens
acaggtgtgaaaacccgagaaggggtcagtttccaggtgaggggtcagcctgggtgcaggggaagaggcacctgcctagtgggcgtaaggaatggagggctggtactttcttctccatgacccccttgctcagaacgacctattttcagcattttgtgcagactggcttccatccatgcaccttaggcattgttctctgatgctatctgaggcacttgtctgtcctttaaaatagtctctgcatttttcagatgactgctacccctggtttggagtttgctgtgatagaactaaagtaaaatttcttagtgactccactgttgccgtgccrtcaagcatctgggactggaaaagccgggttgctcgggtggtttggattcagtgccgctgatcttttgtttccatgagaacacagaatgtggccaaccagcaatctggtctgaccttgatgcctaaattctaatgaaagagcaagttgaactataatggtgagaatggaaactaagaacattctatccaaaatgtttgagaaagccttgtgaccaaaggtgagtgactcagagtttctctaagaccctgaaatgggtgataacgtcatgtctaaccttgggaattggctgagtaaatctcagta

SEQ ID NO: 529591 - DNA, 634 bp, Homo sapiens
acaggtgtgaaaacccgagaaggggtcagtttccaggtgaggggtcagcctgggtgcaggggaagaggcacctgcctagtgggcgtaaggaatggagggctggtactttcttctccatgacccccttgctcagaacgacctattttcagcattttgtgcagactggcttccatccatgcaccttaggcattgttctctgatgctatctgaggcacttgtctgtcctttaaaatagtctctgcatttttcagatgactgctacccctggtttggagtttgctgtgatagaactaaagtaaaatttcttagtgactccactgttgccgtgccatcaagcatctgggactggaaaagccgggttgctcgggtggtttggattcagtgcsgctgatcttttgtttccatgagaacacagaatgtggccaaccagcaatctggtctgaccttgatgcctaaattctaatgaaagagcaagttgaactataatggtgagaatggaaactaagaacattctatccaaaatgtttgagaaagccttgtgaccaaaggtgagtgactcagagtttctctaagaccctgaaatgggtgataacgtcatgtctaaccttgggaattggctgagtaaatctcagta

SEQ ID NO: 529592 - DNA, 616 bp, Homo sapiens
gcttagctcagccacagtacccggcaggtttggatcccaacacagattaggtgtgtgcaggcaagaagtagctgagagtgtcaaccaggaggatcttgatggctgccccagtgagtttgagatgacttcagtgcaataatggtgctggctttagagagttgtgtgttgagttggaagcaaaggtaggcatctacctggtgatatcctgaaggtgttggacatatccactgggtagaagggcaggaagaggtaccagtgggacctccaggataaattctgaattgggtgggaggtgtgtgtgaatsaggagaccagaaggccgaggctgagtctcaggtgatgcctgcaggtacaggcagaaagcctggcagactgtgaggggcccaagtcagagtggtaggggacaggggaggcagagccttggatgatgagggaaggttgttttgggggtgtagacatcttggcctctttttcctggagggaagcagctctgatggtgcctgtgccatcttcagggttagggtattggaggcctcttgaaggcccacctacccaccctccagcccccatgggaggggcaggtcccattgttcaggcttggatgctcaaagcactg

SEQ ID NO: 529593 - DNA, 582 bp, Homo sapiens
attgcattctagcagatttttcagtatcttcaacttcttcaactactttccttattcttattccctcccactatcacttaaccctcttggctcctcagtgaccgtactactggtgttaatacgtgtctggaatatagaaagggttcatttaagtgcacaattatgccattcacaactgttgttatatactagaacatagcttaagcttagaatatgcaaatgcagtagaacctctcttaagcaaatttcatttaaacaacatgccagattaatctcattttctaatttcaaatatastaaccagtcaggtgtggtggcatgctcctgtagtcccagctactagggaggctgaggcaggaggatcacttgaggccaggaggttgtggcttaagtgagctgagattgcaccactgtactctagcacagttgacagagtgacatcctgtctcaaaaagaaaaaaaaagttagattgcaccactgtactccaacctggtagacagtgtgacatcctgtctcaaaaaataaataaataaataaaaataaataaaactaaccactgccaacaatgtaattagcaggca

SEQ ID NO: 529594 - DNA, 626 bp, Homo sapiens
tttagaagcaggcatgtggggaacatgggattttgcttttcaccaaggccctgctcttaaagggtaaaaggcagccaaaaacctgcagggaaacgagctgccccttgtatatggatatgatcataratgtcacatttgcaaatataagattcacaccattcctcccttttcatctgtcatttcaaattacatgatttcaaatgttagcgtacaaaagtaatctcattgtaaaaagagaaactcaaagcgatagttgacaataattctcctcttactccatatttctcatcaccattaaagaaaaaaacagctaacagttttgctgaaatagaaatatactttttttaaaaaaattatacatagcattttttcagagagatatagtgtaatttatttgacactttatgttgtatccgttttattggtattgtttttgttcttgtttcttttctttttctattaagataatactgcactgagcatttacatgataaaaatctctcatcaaatgggtgagggtttctttaaaatataatattaacactacactctctgggtcaatattatatatgttttaaaaagtttgatagatacattgccaagttgctttacatctactgttttac

SEQ ID NO: 529595 - DNA, 573 bp, Homo sapiens
tctgacaatccccgtgttttccaaaaccttgtgcagaaagctcttaatggacatcataaaatgtttggagatttgataagttttctgaggactttagtrttgcattaatgaaagttaattcagttctaatctgtgattcttggtggttagaacagggatttaataccagcgttaagagtcaatattagtagtaacggtcaaataacaccatcacaggaatagttttggagactttatttttttttcaacccaaattttgtattaaaatgtaactttaataaaactaacacatgctactatgtttctgggactagtaacagacacactgtagacattagggacaaagctcctcccctcatgggctgcctaatggcttggcctggtttcatgctgcttttagtaaatgtggggctctccagcctgacttgaaaagtaaagaatataaaagtttctgtttatgctgcctatatggctttattatcaggccaaaggcataaagggaagcctcatctcttctaattagagtcaagcctagattatgaaagagctgcagaattttttcaggggtggagg

SEQ ID NO: 529596 - DNA, 646 bp, Homo sapiens
aggcagtagcaacaagaatagttaacaactattgaataatttatctatgtgccaggaaaagatataaatactataygtatatgatttcattcattcctaaccacaacgctgttgaggaaattggggcttagaaagattgagtaacttagcaaatctcatgactaataagtggtagggaccaaaatcaaaattaaagaggctgactttaaatttctttaaccataacacagtaccatcacccaggtagtagaaataatgtaatgtgtatcattatgcatatttttaaagggagaatcctgaagtatgtagacagtaagtactttgccccaggtcatatgaccagtataccagaacaggaatcaagaccttctgatttctggttcactttttatctcactatacatgtctctttgacctatatgaagaatgctctattccttaatcattgagatacatcaaattcttctgtagctctagcaagataatatgtttattaattaactagaatattttccccttaatttctactacaccaggacactttcttacttaaggctatgtgacatttcattgcttcaaaagatttattcacaagaaaaccagagaagagtcagatcctttgctgtcattgtcaagagcagtagtc

SEQ ID NO: 529597 - DNA, 680 bp, Homo sapiens
aagctattacatttatattttaatagaaaatggtttttaaaatttttttgtattgtattcccctttaagtattacaaacatcacaaagcccatttagttggactcattgtaagtttatgtcctctaacattgtctcaggtcctgcaaacagatctttaaccttaggtgtgttaaaatggtagaataattacacaggtataaaagctaagttaaaagaaattcatcataacgttcagttcatgaaaaattgttttgtctctacctacaaagcttagatgcttatcaggggaagcttgaagtgaaaatttccctgggctgttaattcatcatgagttacactaattcatatcatactcctatgtccaatatacagtagaaatattattttagagttatactcttacaaagaaacatgtacttagagaaatgaacttttaagtcatgtctacaatgactgtaaattgtatgaawtttttttattgtatccatgggctatcttaattaacattctgcaaaaagtaataccaggtcactgcccttggcatagtcataaagactgtgttctcccagcaagaactaaacatttttttttttttgataagattttttttggctagatagtcacagcctaacagggcaagcctgttgaacaattagttaagtcatcccaaggatggcag

SEQ ID NO: 529598 - DNA, 670 bp, Homo sapiens
gctgtttattgtctctttatgtttctagtaagagatatgtggtttctctggccacatggaatctccctttaagcactcccagcttgatgtaatgtataattttttatcaatgacmacaacaaattccccacacaccaactttttaaaccaaaatcatagctattaaaagttaatgattagaatgcatgttttattctgtaatttgagtgatgtgaaagatgcaacaaagtttgattcccttattatgctgtttttttccttttctcttaggggagttacaaaaatacaatgaataacttaacagtatataatccctttaatttacctcctcctttcctatatgggggctatttctttaaaatttttctttatcccttacttttaccatgataattgctaattgtaatccaaggtttctcttgtagagattgacttatatatccagagaaggagaaatagtctctggggactgtagcaggtgagtcattatggaataatgttgatcttccaagcgcaatattcaagttagaatgaaatacaccaggggtctggataattcactgaagatcatcatgcatatctcagaggtgaatgcttgaaatattcaaagtttgagaaggcaaactgaagaaatactttttataaaaataaacctacaaaactctggtta

SEQ ID NO: 529599 - DNA, 670 bp, Homo sapiens
gctgtttattgtctctttatgtttctagtaagagatatgtggtttctctggccacatggaatctccctttaagcactcccagcttgatgtaatgtataattttttatcaatgaccacaacaaattccccacacaccaactttttaaacyaaaatcatagctattaaaagttaatgattagaatgcatgttttattctgtaatttgagtgatgtgaaagatgcaacaaagtttgattcccttattatgctgtttttttccttttctcttaggggagttacaaaaatacaatgaataacttaacagtatataatccctttaatttacctcctcctttcctatatgggggctatttctttaaaatttttctttatcccttacttttaccatgataattgctaattgtaatccaaggtttctcttgtagagattgacttatatatccagagaaggagaaatagtctctggggactgtagcaggtgagtcattatggaataatgttgatcttccaagcgcaatattcaagttagaatgaaatacaccaggggtctggataattcactgaagatcatcatgcatatctcagaggtgaatgcttgaaatattcaaagtttgagaaggcaaactgaagaaatactttttataaaaataaacctacaaaactctggtta

SEQ ID NO: 529600 - DNA, 670 bp, Homo sapiens
gctgtttattgtctctttatgtttctagtaagagatatgtggtttctctggccacatggaatctccctttaagcactcccagcttgatgtaatgtataattttttatcaatgaccacaacaaattccccacacaccaactttttaaaccaaaatcatagctattaaaagttaatgattagaatgcatgttttattctgtaatttgagtgatgtgaaagatgcaacaaagtttgattcccttattatgctgtttttttccttttctcttaggggagttacaaaaatacaatgaataacttaacagtwtataatccctttaatttacctcctcctttcctatatgggggctatttctttaaaatttttctttatcccttacttttaccatgataattgctaattgtaatccaaggtttctcttgtagagattgacttatatatccagagaaggagaaatagtctctggggactgtagcaggtgagtcattatggaataatgttgatcttccaagcgcaatattcaagttagaatgaaatacaccaggggtctggataattcactgaagatcatcatgcatatctcagaggtgaatgcttgaaatattcaaagtttgagaaggcaaactgaagaaatactttttataaaaataaacctacaaaactctggtta

SEQ ID NO: 529601 - DNA, 670 bp, Homo sapiens
gctgtttattgtctctttatgtttctagtaagagatatgtggtttctctggccacatggaatctccctttaagcactcccagcttgatgtaatgtataattttttatcaatgaccacaacaaattccccacacaccaactttttaaaccaaaatcatagctattaaaagttaatgattagaatgcatgttttattctgtaatttgagtgatgtgaaagatgcaacaaagtttgattcccttattatgctgtttttttccttttctcttaggggagttacaaaaatacaatgaataacttaacagtatataatccctttaatttacctcctcctttcctatatgggggctatttctttaaaatttttctttatcccttacttttaccatgataattgctaattgtaatccaaggtttctcttrtagagattgacttatatatccagagaaggagaaatagtctctggggactgtagcaggtgagtcattatggaataatgttgatcttccaagcgcaatattcaagttagaatgaaatacaccaggggtctggataattcactgaagatcatcatgcatatctcagaggtgaatgcttgaaatattcaaagtttgagaaggcaaactgaagaaatactttttataaaaataaacctacaaaactctggtta

SEQ ID NO: 529602 - DNA, 606 bp, Homo sapiens
tgaaatcctagctccgccatctaacttgttatgttatcttgagaaaattccctaaactttccaaggctcagttttcttatttttgaaacaaggcagataatacttgtcttctagaattgtctttcatcgttttatacttaccttggctagtgcctggtagatggcagattctcaaaagatatttgttcatggaaaaatgaatgaaagtagaggaatatatagtatacagtataaattatagctattgatattaacctctactattgcatacagtgatgtctatatctactcatatatactttggaatattgggataaatagtacacacrtagtagtgcaaagatatatttttaaaaacctattatagggctgggttctccagaatcatgttgtataacatataacagaatcaatagaatatatatgtgtgtgtttgtgtatcctattaatcctaaataaattcaaagatatttatttcaaggaatctagctcacataattgttgggactggcaaatctgaaatctataggccaggctggtaggctggaaactcaggctggagttgattttgagtcttgaagtagaatttttcttctcaggaaacct

SEQ ID NO: 529603 - DNA, 606 bp, Homo sapiens
tgaaatcctagctccgccatctaacttgttatgttatcttgagaaaattccctaaactttccaaggctcagttttcttatttttgaaacaaggcagataatacttgtcttctagaattgtctttcatcgttttatacttaccttggctagtgcctggtagatggcagattctcaaaagatatttgttcatggaaaaatgaatgaaagtagaggaatatatagtatacagtataaattatagctattgatattaacctctactattgcatacagtgatgtctatatctactcatatatactttggaatattgggataaatagtacacacatagtagtgcaaagatatatttttaaaaacctattatagggctgggttctccagaatcatgttgtatarcatataacagaatcaatagaatatatatgtgtgtgtttgtgtatcctattaatcctaaataaattcaaagatatttatttcaaggaatctagctcacataattgttgggactggcaaatctgaaatctataggccaggctggtaggctggaaactcaggctggagttgattttgagtcttgaagtagaatttttcttctcaggaaacct

SEQ ID NO: 529604 - DNA, 563 bp, Homo sapiens
tagaacagaggtgctaagtgtcttattagcaccttcttgttgttgtatttttaaaactcagcacagtgaaagagggtggatgccaagtagatcttaaatgggaatctgcttttctgcttctacttgatagacttggaacaagatatctaacccctttgattgtcagttttctcatctgtaaaatggaagaattgtaaaacataaaattaaaagagaacaaataaaatactataagtgaaattgttgatacattattaattctcagtaaatgttagctcaactttgtctcccttttctgaaaaccaaatacccccaaatataaattgtcctagtgaaaccaggmtaaatacatttctgttctttcacctgattctcaggtgaaaggtcttttcagcttttatttattttttattctgaattgacaaataaaacagtaaagttgattaaggaaaccaaaccagtatttatgaagcactaacttcacagaaagtggggcatttgatcatccagtcattctcatgaggctcgtattattaccccatagaataggtgataaggacaag

SEQ ID NO: 529605 - DNA, 683 bp, Homo sapiens
tcttactgaatcattggttaatcaaaactagaagttagacttgactgatcaagagcttcaatttttacagtaaaatgggatggccattcaaaaactactttatttcagacaacccttcattagcttgtttgagactaagataattaaagtagggttgatatgacaatttccactatccataaatcattacatctctcaactttatccagagactggtaccaggaatccaaagtcctgggctaagtatactggggagagaagggtaagaaattttaaacttccaaattatagccttcagattcctcatttgattttaaatacaggtttcccgaaaaaggtaacgttctgcattccagtatgtgcttccctgtggtactgaaatcctcatggcactgccagtgatagagcagcagcatgggctgcctgccctgaagcatcatgtgggccataacttgaacgaggctccaagaactggagataaccagaagggcaagaaggtatgggttgatcactagmgtggctatactttaacttggaggaaacactgttattaaatttaggtgggtggaagctttctatttaagaaaaagtaccttactccatagtgggttaagtgctgaaaaatacataagaactatgtatctaattagaacattaacccaaaaatgccttccctaatactt

SEQ ID NO: 529606 - DNA, 586 bp, Homo sapiens
tatgtcatcagagatatgatgaagtcttgtctcaagaacatatccatagtccaatacaggtgtcctaggtgcaaagaggactctctcagagggtctatcccaggaggaggaggcaaaccctaagggggagacgtaaccctagtaagcacataattactagataatgggggcctctgactacccagtagcaggactctccgtagggagaacagttacagttgacaggtaaagagtagaccaggtagggaggggaggagataagactgaaactaaaagttaaaagatagaggttagaagaaaaatgatgcaaggtgaagaatttatcagtaaatgtaactttataatggaggatgagttagttttaaaggctagggcaagacatcacagtagcaaagtgagaagcagagaggagttaagagagagccagagagattcaaaactgagggtggagggtaaataarcagacaggagagacataatgaatgggaacagggaatgatggatgagacagcagcaacatggggagatagatggaatctgaaatggcaaaagaaacagaaggacagagggggcaggagtaaaaaag

SEQ ID NO: 529607 - DNA, 618 bp, Homo sapiens
tgccaatacttcttggagcagcagcccataatcacctcattttcctgctcccagtgccatccgaaagggactctgcggccttcggcttcctgggaggtagcacagatggaaggctgcaaggacgcagagggaacacgtctatcaaaacggccggcttctgatgctgggccctggggtcccaagccctccaaagataagagaatcaggcgagaaacaagagcccagcacttttccgcagaaacaaaaggtcagtgaaacttggcaggcctccctgttcctgaatgattcccagaggatagtaaatttggaaagtggtcagtgttgaaatccagacatatgggcctggctgctgaagcctggctccctcctgttgcctccacaacatgtgagagtgaaatatacagakttgagggcacggcattcaccccttgccattaatttcgattaaataaacttagcccagacgtagggctctactgttctgctatagccaaggtgtgcgggaaacgccagctctgccactcactggtcaagtgaacccacacacatgagttaagttttctctgcctcagtttcctcatctgtaaaatgaaggcaatactaatagtacctacttct

SEQ ID NO: 529608 - DNA, 618 bp, Homo sapiens
tgccaatacttcttggagcagcagcccataatcacctcattttcctgctcccagtgccatccgaaagggactctgcggccttcggcttcctgggaggtagcacagatggaaggctgcaaggacgcagagggaacacgtctatcaaaacggccggcttctgatgctgggccctggggtcccaagccctccaaagataagagaatcaggcgagaaacaagagcccagcacttttccgcagaaacaaaaggtcagtgaaacttggcaggcctccctgttcctgaatgattcccagaggatagtaaatttggaaagtggtcagtgttgaaatccagacatatgggcctggctgctgaagcctggctccctcctgttgcctccacaacatgtgagagtgaaatatacagatttgagggcacggcattcaccccttgccattaatttcgattaaataaacttagcccagacgtagggctctactgttctgctatagccaaggtgtgcgggaaacgccagctctgccactcactggtcaagtgaacccacacacatgagttaagttttctstgcctcagtttcctcatctgtaaaatgaaggcaatactaatagtacctacttct

SEQ ID NO: 529609 - DNA, 576 bp, Homo sapiens
  misc_feature (1)...(576): n = A,T,C or G
ggctgaagggctcctcaaatgccaccaaagtaggagcccaggcagaggaggcgctgagagcgaccgagggctgtgaggactgccagcacgctgtcacctctcagaagcacttactacttatctgccaccagacacacagtgtttcatttaatcttctcaactctgcaaagaaggtatacccttaatctacagagaaggaaagtgagacccaaggtcacacaacctagtaagtggcaaaaccatttcaagcccaggtgtatggagtctttaaggccatgctyttaactgtaacaatgcactgcccccttttggcattttggagcattgtcactaggccctggttaattcaactcttaagtcggtatattctagaactgaaagccccaagaagccacgcttcagttctagcgctccacatttggccctggctgtgaaaggacactgggaatggaattcaaccaggactccncagggttccagggtatatatgtctcagggtctctcaccccatctgtttccatggatcctttgtagcctccagatcataacgtagtgtcctgttttaaagagaagggc

SEQ ID NO: 529610 - DNA, 584 bp, Homo sapiens
tctttacagagctaattcattttaaatgaggtaattgggtgggcctagtccaatgagaactgctatcctcataagaagagaagatttggctgggtgcggtggctcaccactgtaattccagcactctgggaggccgaggcgggtggatcacctgaggtcaggagttcgagaccatcctggccaacatggtgaaaccccgcctctattaaaaatacaaaacaattagctgggcatggtggcaggtgcctgtaatcccagttacttgggaggatgaggcaggagaatcacttgaacccaggaggcagaggttgcagtgagccgagatcacacgtggtggcaggtgcgtgtaatcccagctacttgggaggatgaggcaggagaatcacttgaacccaggaggcagaggttgcagtgagccgagatcacaccattgcactctagcctgggcaacragagagaaaatccgtctcaaaataaataaataaataaataaataaaaataaaaaataagagaagatgtggacgcagacacacagagggaagacgaggggaggacagctgtctaccagccgggagaggcctgg

SEQ ID NO: 529611 - DNA, 552 bp, Homo sapiens
ctcttgcatttgtatcaataaaaaggctgctacctcccagacaggagaagcaggcagaggcagttttggccaaaagactccaaacccccaactctttccctgactcaaataaccttaatgctcttagagtctgcctttctgcaaactccacaaatcagaatctgcacacacagcttttttcctttaattaaaatagctcttattgctttttttcatatcacaaaagttataacacatttattgtagaaaaatgcaaaaatacagacaaggaaaaagaagggaggaaggggaagctacaatcctattctgtagcttcgaactaggaaattaagtgtgtttcataaaaggaagaggtctaggaggaccctctggggttttgaaaacaawgagcagaagccagtatgcctgggacttctctgtacctgtacttcaccagcattatctcagtgagaccctacagcaatcctaagtccacctgatcacagccctaagtcccctctgctcagagctgctgccagcaatgagcccggcacccctccccttccttcgttg

SEQ ID NO: 529612 - DNA, 552 bp, Homo sapiens
ctcttgcatttgtatcaataaaaaggctgctacctcccagacaggagaagcaggcagaggcagttttggccaaaagactccaaacccccaactctttccctgactcaaataaccttaatgctcttagagtctgcctttctgcaaactccacaaatcagaatctgcacacacagcttttttcctttaattaaaatagctcttattgctttttttcatatcacaaaagttataacacatttattgtagaaaaatgcaaaaatacagacaaggaaaaagaagggaggaaggggaagctacaatcctattctgtagcttcgaactaggaaattaagtgtgtttcataaaaggaagaggtctaggaggaccctctggggttttgaaaacaatgagcagaagccagtatgcctgggacttctctgtrcctgtacttcaccagcattatctcagtgagaccctacagcaatcctaagtccacctgatcacagccctaagtcccctctgctcagagctgctgccagcaatgagcccggcacccctccccttccttcgttg

SEQ ID NO: 529613 - DNA, 564 bp, Homo sapiens
ttagaactatgatgacggccattgctgggaacattgcagagctaaaaactaaaataaaaataaaaaataaaataatgatgatggccaggcatcctggtccacgtctgtaatcccagaactttgggagaccgaggtaggaggatcacttgaagccaggcgtttcagaccagcctgggcaacatgaccagaccccatctcctcaaacaatacaaaaatcagccagatgtggtggctcgggcctgtattcccagctactcaacaggcagaaagttggagaatcccttgagcctgggaggtcgaggctgcggtgagccgtgatcacgccactgcactccagcctgggcgacagaaaagaccctgtctcgaaataataaaataataataatgatgatgatrataataataataactatggtctattgagtgcttacttcatgccagacgcggggctggtgcttccaaagccttcactcatttaattctcacagccaccctctgaagatgtgaaggcaggtgggatgggagagcttcagcgtcggtgccatctccaccctgagcatgtcc

SEQ ID NO: 529614 - DNA, 498 bp, Homo sapiens
ctgaagatgtctcatgtctacagagaggaagccctcgtgggattcccatacacctcctggactcctttctttcttttattttttccttttttttttttttttttttgatacagggtctcgctttgttgcccaggctggagtgccgtggtgcaatcatggctcactgtaagccttgacctcctgggatcaagygatcctcccatctcagcctcccaagtagctgggactgcaggtgtgtgcaaccatggctgtctaatttaatttttttttttttttgtagagatgaggtctcactatgttgcccaggctggtctcgaattcctgggctcaagagattctcccaccatggcctctctaagtgctgggattacaggtgtgagccactgtacccagcttggattcctttctctgaatcctttcctcagagtaagaagggaggcatgagaagtgtccctgttccacggaagatggagcgggtcccacgtgaatgagcacctc

SEQ ID NO: 529615 - DNA, 578 bp, Homo sapiens
ctgcatacatctcccatcagtcttccagaacaaatccctctgagctcctagggaagagcctcttctcctctgcaggcctgcccacaagctcaccctgggagctccctaatctgtccrgctctcttctactccctacctcctcgtcatctctagaagcactgtagagtttagaaagcctcccctgcatcccagcttgttcctggccctccaaattcaacctttctccaccaggcctcacttgacaggcccccaccagcccagcaagttgtccctgtgccaccctctggcccagactgtcttgattccccatggcacttgggacccccaaatgtgaggcctatgaccttgtgtattctctgaggatatacataggtatggatgaacccctcaaggccctgccccagccaggcactgctgcatgagaaagaaaatgtcccaaagaacagcaatgactcaaaagatctcccccaggggttaaggagagtcctgcacaccaaggaggtatcaggcaatgcaagggggcgggatgaggaacaggccagagctgcacactatgcgggatgtgaaggggtttcctg

SEQ ID NO: 529616 - DNA, 546 bp, Homo sapiens
cagccttaggctgggaggtggctcacacctgtaatcccagcactttgggaggctgaggcggcggatcacaaggtcaggagttcaagaccagcctggccaaagagaccagcctggtcaacatggtgaaaccccatctctactaaaaatacaaaaattagccgggcgtggtggcgggcgcctgtcatcccagctacttgggaggctgaggcagaagaattgcttgaacctgggagggggaggttgcagtgagccgagatcaccccattgcactccagcctgggcaacagcagagtgagactccatctcaaaaaaaaaaaaaaaaaaaaagaagaagaaccagcattagaaagggctccggggtgggtttatccaccctaccaaattacaacaaaggcacctgaggctcaggagattaagcaatttgcccacggtcacccagccagaagcaaggcttccgcagccccctgtgagctccagcaggacagtcaggaggagagctgtcttctgaaggaaycctcaggatgatggggtgtcctgttagtgcag

SEQ ID NO: 529617 - DNA, 597 bp, Homo sapiens
aaactggccaaagtataagcctgcatttayatcttatagaatcttaaacatgctataacttgctttccatgtctttacctgttctttcctgcacaaattgggcaaagtgaggcgacaataagttgatgaaatgtactaaattgcattttcttcagtttgctgaattaaagtttctctcccagcaaatgaaattagggggatttcaagcaagcattatccctggggaattagtgatgtactcttagcaaattggacacaaaacactgatattttttgtgatgtttagagatgggtggggcaaggggcatcattggaaggatgggagaagataaaaggtgttgctgcagataaggggactattactgccaaacctctgattctatgatgctaccgtgacacaagtcttcttcaatagcattatttgtaatcattcctaccatttattgagcacttgccaagtgctaggaactgtgctaagcatttcacacatattatttaatttaatcttcataactaccatgtgaggaatacattatcacctccatgtaacagataaagaaacttcaaaccagagaagagactgaacttgccttgtgt

SEQ ID NO: 529618 - DNA, 597 bp, Homo sapiens
aaactggccaaagtataagcctgcatttacrtcttatagaatcttaaacatgctataacttgctttccatgtctttacctgttctttcctgcacaaattgggcaaagtgaggcgacaataagttgatgaaatgtactaaattgcattttcttcagtttgctgaattaaagtttctctcccagcaaatgaaattagggggatttcaagcaagcattatccctggggaattagtgatgtactcttagcaaattggacacaaaacactgatattttttgtgatgtttagagatgggtggggcaaggggcatcattggaaggatgggagaagataaaaggtgttgctgcagataaggggactattactgccaaacctctgattctatgatgctaccgtgacacaagtcttcttcaatagcattatttgtaatcattcctaccatttattgagcacttgccaagtgctaggaactgtgctaagcatttcacacatattatttaatttaatcttcataactaccatgtgaggaatacattatcacctccatgtaacagataaagaaacttcaaaccagagaagagactgaacttgccttgtgt

SEQ ID NO: 529619 - DNA, 274 bp, Homo sapiens
aaggggacaagcgtataaccttactaggtacagaatgctctgcttgccatcctgcctcttcaatcctgcctcttcactttgtgacgcatcaratagcttgggactgagctgcacgcaggccttcagtcatcccaggtgtgtggagagaggagacaaaagcagaagtaggctaggattccttgatgtgaggatacagatcaccgggtgaacaaagtggtaaaggtgggtaagggcaggggaaataagaagagcagctttgcaggaagaatggcag

SEQ ID NO: 529620 - DNA, 274 bp, Homo sapiens
aaggggacaagcgtataaccttactaggtacagaatgctctgcttgccatcctgcctcttcaatcctgcctcttcactttgtgacgcatcaaatagcttgggactgagctgcacgcaggccttcagtcatcccaggtgtgtggagagaggagacaaaagcagaagtaggctaggattccttgatgtgaggatacagatcacsgggtgaacaaagtggtaaaggtgggtaagggcaggggaaataagaagagcagctttgcaggaagaatggcag

SEQ ID NO: 529621 - DNA, 499 bp, Homo sapiens
tgatggtgatgatactttcctaaaatcacaggattatctgacaattcaataagacaagaggtatgacagcatacttccccctgccttccttatgcctcctgcatcccatatcccacaccccttgctctttccatcaaaactgacccatttgtgtagttgataagtttaccaacccctgctgctgaacatgttggtgcaaacagttgatatttcagccttctgatgaaacagggttgccttgtgcattgtcaacagccttgtgatgtcttcaattatttaatttctgtactagagggaggaatcaagaatccctggaaggctgcactggggagggggagcagaactagaagagtctgaataggcaggcttcatgagttcaactttcacttcaactaaagcaaaccccttatctattttacatattggatttcctcgaaggatatacctgaatagaggagagctgcttcagaggagaaraaaacagataataatgaaacat

SEQ ID NO: 529622 - DNA, 655 bp, Homo sapiens
aacatttccctcactaaccagaagaaagtattctaatgatcagcatggtcaattctactaatttatggcttacctatataaataggtgtgtcccataattagaaatcttttttatcagaaatgtgtgacctcaccacttaaaagaataacaagctaatataacagtactgcgtttattaggctcagattctgagaggcgagctgagagacaacctgtaaggccatctgatcgagtctcctaggccattagacagatcaagtgttgtattctccacgttttcttcacatataaggatggctgattttaaagaaaaacttagattgagcttcttgatctctcccaatattgagacaaactacctgaaggattaaaaactctggatgattatcctgaatcactagatgtcttttaagttgaaatggaagttaattttatgttggcaagtataaattattttaacttaaaatccaraaaaatagtagctagcttttaggtttgcttttatgacatttcaggcactggtctatgtatcatgctagtgcatgtactttccatatattatttcctttatcctggtaaaaaacccattgaagctggtactacaggtgagaacactaaggaccacaaaggttaaataagtttcccagggtcatt

SEQ ID NO: 529623 - DNA, 510 bp, Homo sapiens
agctaaaatctactgatagctgtaatgttttagattgttatttgactaccataggataaattgtgatcatttggaatctgtgtgagaaattccagtattcttaatgcgaactgactctgtattagttcgttctcatgctgctataaggaaatacccaagactgggtaatttgtaaagaaaagaggtttaattgacacacagtttccacatgactggggaggcctcaggaaacttacaatcatggcagaagtcacctcttggcagggcagcaggagagagaatgagtgcaaacaggggaaatgccagagacttataaaatcagatctcatgagactcattcactatcatgagaacagcatgggggaaaccacccctgtgayccaattacctccacgtggtcccacccttgacacgtgaggattatgggattacaatttaagatgagattttgggtggggtcacagccaaaccataactgtctccaactaatctgacttgaaattagccctt

SEQ ID NO: 529624 - DNA, 590 bp, Homo sapiens
tgatgatgaagcccagctttgctggtcccagtcctggcactgccactaacttgctgtgtggctttgggctagcccatactgaggccccccgcatctgcaacaggaagtcagtgggctgcgtcatctatctttccaaggattctcccrgctctgatgaccgaaggttgtaagtctatgttattcccaacctcctttctcttttccaggctctggccatctgctgttgctcccctttctctgtggccaaagccccactctggaaatttccatcatcggtggtcgtgtgtcgatcacagcacactgggttcactccatggcctcatccttgggtagtgagttcccacccgtccagtgctcctctccagcctcagtcaccagcatctcctacttggattattgcaacggctcctaagcatcagcattaagcaccaacacagatgaatcctcctcctacagacattagatcatgtcacacctctgcccagacctcccagtggcttccagtatcatgttgaataaaagaaaagtctttccctgggcctgtcttgaaaaaactcataatctaaccatttatccacttgtccctcact

SEQ ID NO: 529625 - DNA, 472 bp, Homo sapiens
aggaagctacttgaaatcctgtgtgtaaacaagactccctgtaatgaatatacctgtcctgtgcctggttgcctggggcatcctctgtaagggaacagaaatcccaactgcctggcagtggggcctggtcagctcttgagttccctgtgggcccctggctgtgcctgagctggagaagacccaagaccagaagggaagttctcagtttgggccttggaaggttttagtttctcttcctcctccttctcctcctgggaatttttctcagcatgttcaaaaaggccaaagttggcaaaaagastccgggtaactctccctggcctttggtgactttggccctggagacagcccctaggaaccccggcttgcccaggctcaggcctgaagttcttttttgtgctgttttctgaaggcatatgatgctgagctggctgctccagaatgaaccacagctctgagaaggggaagtaga

SEQ ID NO: 529626 - DNA, 615 bp, Homo sapiens
tgtgaagctgtttggtttgaccacatgtgaatgcgggtcaggccctggcttttctctttggtccagagcgcagtgggtgcctaggtaatttgcaaagggcaggtagtttatctgatcctgcctggccacctggaaggtctttagcaagggaactgaactttggccttgttaagtcacgtgcagcaatagtagacagagtgagagccatgtagtgcaaggtgccgtgctatttatttggagggttgttttgtttggttttctggtttgttttgttgtactaaattgctggaaaaacttgacagagggagtgctttttatttttaaaactacaggtatttatttttccattgcgtaggacagtgttttgttgcttaattttcagccaatttcaagtatttctgctgttactaaaagmagcagtcttcttcctgggatatttttgttgttggttggtttcttcatttgttgaatatatgtttactgattatcttctatgggccaactgccatgtcagcactgggaaaacaggcatgaacaagacaggtacagtcctcagggaacttgtcccccaagcctttatttttttgagacagggtctcgctctgttgcccaggc

SEQ ID NO: 529627 - DNA, 484 bp, Homo sapiens
gttcatctttaaaacggggatgaaaacaatagcccctcccccataaggtttctgcgacgttccgcgagacgcagagcgctgcgtgcaagtcctccgcatggtgctggtgcggacgacctctcggccagcagcagccgtcctctcctgccctcccaacaatccaggaactgccctaaataacagtactggggcattcagtaggggcctaatacatatttgctgatacgtattttagtaggcacctaatacatagtctaggcactgtattaattaaggtgtctagaatattacctgactcacagmagcgtctcagttttgagtgtggatgggtaagagacgaacttcacccactgcatgggttcaggtccagacactggggagggaggctcagggaaatgaccaggggtgtgggctgccaaggagggggcagctagcaaggagaaagcaaggagagtcggcctctcttggacaaaggggcctggcc

SEQ ID NO: 529628 - DNA, 657 bp, Homo sapiens
caaagggagggtcagaccagtgtgtgcaccaacacccccccccaaggaggggctgccttgagaaacccctctcccacccccggctaccgggttctgcccacagatgctccctgctctctctctcaatgtgatctagctctgaccaggacaaaaagccaatgagacaagatggcatcagggaggaacaaaggacaaaggtcaggatggcaggaacttattttttccaacaggtgccgagagccccatggactgtcttccacttccctcccrtgggccattccgttttcctcctcctctcctcccttcttctctccttctctctctatctctcccctttcctgtttggcctttaggcccgtcagtgtgcccagggtttctgtgatggctcatccttggggatggtttgtggccaggaggttgtgggtagggaaggagagaaagagtgagtgagtgagaggcagatgaatgggcagagtgaaggagcctgcaacaggtcccgaggggctgggcctggcatttcccagcgaggggacgccatggcatggggactgagcgtctgcatgaagctcaagccttctgttgagagcacatgtgctgatgcacagaaacctgggcccatctcagaaaacgactgttttgcccagaatgggatgccag

SEQ ID NO: 529629 - DNA, 531 bp, Homo sapiens
ctgcagcaactacgacagcaacaactacagcaagttctggaacatccccttgaatttttmtggaatcagcctcagtttcaacagatgagacaaattattcaacagagtccttcccttcttccagtgttactacagtagatagattgagagaatcctcaattacttcagcaaattagccaacaccaggagcattttattcagatgttaaatgaaacagtttgagaagctggtggtcaaagaggaagaggtggaggtgtcagtggaggaattgcagaagctggaaatggtcttatgaactacattcaagtaatgcctcaggaaaaagaagctacagaaaggttaaaggcattaggatttcctgaaggacttgtgatacaagcatattttgcttgtgagaagaataagaatttgggtgccgattttcttctacagcacaactttgatgaagattgaaagggagttttttatatctcacacttcgcactagtgcattacaccagcttgttcactggattgtctgggatgacttgg

SEQ ID NO: 529630 - DNA, 450 bp, Homo sapiens
gaaaaaaaaaatcagcttttacactcattatgtacataaaatacattatgcaaactaaaaccttaggaagtctaacgagactttattttataggcttaaaacattgtaacaaaattgcaaagtgaacagtaaaatagatttgattatattaaacacttgattagttaaaacaacaatgtaacaagcaaagggtggcctaygtgcaattgcaattatttgaacataataacaaagagttgatatgatttcacaagagctcatacaaactcatacttaatcaatatatgagataagaatgaaatcacatttcataaaatatgaaatataacacatttgcaagcacataaaaatccagccttaataacaatcaaatgaatatacactaaaacaaaaaaaaatgagttatgtttaggtttaatcaactatttaaaattgatgtcaaggacttac

SEQ ID NO: 529631 - DNA, 620 bp, Homo sapiens
ggaaccaccacccgcccctttctctagcagaagatttccccacatctgagttatttcaygtggagcaggtgctggagcaggtggggtggaagggagaggagagtatcagattctgaccccggccctatgcctacagacctgtggtgtatataatgcaaggggagtgatgcattttttaaaatcttttttgtattctctttacagggacctttcccctctatagcgaggggtattgttttctcacagactatggattttaacaacaggaatgcaaagaaaaagaaagaattggtgttcagcattagacctcccaaacagaatttctgacttaacaatggtccagtaagtgaagattgaaaagagaggaaaaggttttctaaattgcaggacccaatctaaaaagctactgtatgaacctagagcagtggtccccaacctttttggcaccagggactggttttgtggaagacattttttccacagactggggggatggtttcaggatgaaactgttccacctcagatcatcaggcattactgagattctcctaaagagcacaaaacctagatccctccaatgcacagttcacaatagggttcatgctcctatgagaatctaa

SEQ ID NO: 529632 - DNA, 620 bp, Homo sapiens
ggaaccaccacccgcccctttctctagcagaagatttccccacatctgagttatttcacgtggagcaggtgctggagcaggtggggtggaagggagaggagagtatcagattctgaccccggccctatgcctacagacctgtggtgtatataatgcaaggggagtgatgcattttttaaaatcttttttgtattctctttacagggacctttcccctctatagcgaggggtattgttttctcacagactatggattttaacaacaggaatgcaaagaaaaagaaagaatyggtgttcagcattagacctcccaaacagaatttctgacttaacaatggtccagtaagtgaagattgaaaagagaggaaaaggttttctaaattgcaggacccaatctaaaaagctactgtatgaacctagagcagtggtccccaacctttttggcaccagggactggttttgtggaagacattttttccacagactggggggatggtttcaggatgaaactgttccacctcagatcatcaggcattactgagattctcctaaagagcacaaaacctagatccctccaatgcacagttcacaatagggttcatgctcctatgagaatctaa

SEQ ID NO: 529633 - DNA, 623 bp, Homo sapiens
attcttaaaaacaccaacacatattctatttctgtaggaaagytggcagataggaatgtaaatagaaaacaaaagcaaaatgatgtaagtcttgatgtcaacatagctgccattttagtgtatttctctgcatattgttaatcccagcctgcaaaagctgctgggttgcccaagaatgggtctgtccacttccctgtgacctggaatttgtgtctgggtgcctgcctgtcaggaacaagccttcttttagtggcatgtggccctgtgcttaatgagagcagacgttggtaaatggcagtcattcctgctcctcggtgacagttttcgttgggaggataaaaggttaggacaggctttgtacaaggtgttatgaaaacaataatttcatggggaagcaccgaaatcccaggaaatcatttttgttagctactgccccctggcggtgtaacgtgacggctcccaggagacccactttacctggtcaccgggaattcctcccgcaggctcctctccgcgggaataggaatggcttcttcaaatactcttcctggacattcatgcctcctatgaccttggatgttttccttcccacagctcaacagccacaaccctcagtgtcccca

SEQ ID NO: 529634 - DNA, 623 bp, Homo sapiens
attcttaaaaacaccaacacatattctatttctgtaggaaagttggcagataggaatgtaaatagaaaacaaaagcaaaatgatgtaagtcttgatgtcaacatagctgccattttagtgtatttctctgcatattgttaatcccagcctgcaaaagctgctgggttgcccaagaatgggtctgtccacttccctgtgacctggaatttgtgtctgggtgcctgcctgtcaggaacaagccttcttttagtggcatgtggccctgtgcttaatgagagcagacgttggtaaatggcagtcattcctgctcctcggtgacagttttcgttgggaggataaaaggttaggacaggctttgtacaaggtgttatgaaaacaataatttcatggggaagcaccgaaatcccaggaaatcatttttgttagctactgccccctggcggtgtaacgtgacggctcccaggagacccactttacctggtcaccgggaattcctcccgcaggctcctctccgcgggaayaggaatggcttcttcaaatactcttcctggacattcatgcctcctatgaccttggatgttttccttcccacagctcaacagccacaaccctcagtgtcccca

SEQ ID NO: 529635 - DNA, 328 bp, Homo sapiens
caggtggctcagcacaggtacagcagccagtgtggaaaggacatatcccatcwggccaggaatctgccctggagccccccgagcccattgattaaaagcagatcacaggtatttccaggtcaggtcaggacctcaggtctgcactgattagtatgttgctcacctctttgaatccaggtttcctgcagcaacattcccctctgtaaacctttacaaactgtgtgttgtaaaatcacagtgcccaccacacacactgagcgctcaatggtggctgtcatcacaaatgacactcagggtgcccagccacaggggccactgctgcacctca

SEQ ID NO: 529636 - DNA, 550 bp, Homo sapiens
tctgtgtatctgtgcaccagagttctctgtctttgtatctccagacrttgcctccacaaggacacctcactgccttttctcaactgttttcccacccaggagatctgtgtggagctgatgactccacgctgatacaaagaagccatcctgaaggctgccaggagtagcagattaagttcctggtgcccagggggagtgaagagagacccagtcacccagggcagtgggcactgcactcccaaactaacagactctggaaataaaagcaaaacacgacaagacaaaatgacagctcctaaggtgagccgagaactgcagttcagagcgtcacttgaggctgtgtttgtcacacgtgtggaaatgttgtaggttagctggaccatttccacactgcttccccaggctcacaccacttccaagagctggaatttgggacaggctgagtccctggcacctctcacggccccctgcctgggctcccaggggctcacctcgcctgtgctgtggagctgctgagcaatgcgcctgaggtcctcctcgctggccaggg

SEQ ID NO: 529637 - DNA, 520 bp, Homo sapiens
ctccactttctttagaaggctttggattgttgacctatatccaaacaactttcccagcctagggagctatttttaacttcgtcgttggcatttttaacatccaccagtttcttttactmttgtaataatcccaaattcatttattcaatggaaagcatttaattattttctgtgtgtataaagatattcctgaaaataggatgttagtagtagagtggcacagcagagtaatgtggaggttgtcagtaacttttgataagagacattcaagtggagtaaagtgacggagtagggtaaaagctatgtgaatgtggattctctctctgtctctcaaaatatcttattgtactgaacctgcctattttcggactacagttggccatggataactgaaaccatggaaagcacaactgaagataaaaggggactaccgtgaatatcagatgctcaataaatatttgctgagttaattaatgtataaatgaatgaagtgtagcacagtgctctagcaggcacgggc

SEQ ID NO: 529638 - DNA, 520 bp, Homo sapiens
ctccactttctttagaaggctttggattgttgacctatatccaaacaactttcccagcctagggagctatttttaacttcgtcgttggcatttttaacatccaccagtttcttttactcttgtaataatcccaaattcatttattcaatggaaagcatttaattattttctgtgtgtataaagatattcctgaaaataggatgttagtagtagagtggcacagcagagtaatgtggaggttgtcagtaacttttgataagagacattcaagtggagtaaagtgacggagtagggtaaaagctatgtgaatgtggattctctctctgtctctcaaaatatcttattgtactgaacctrcctattttcggactacagttggccatggataactgaaaccatggaaagcacaactgaagataaaaggggactaccgtgaatatcagatgctcaataaatatttgctgagttaattaatgtataaatgaatgaagtgtagcacagtgctctagcaggcacgggc

SEQ ID NO: 529639 - DNA, 493 bp, Homo sapiens
ttatgtaaccctcagtataaaaatgagagtatatacccagatgaataaaatccttcacctatagcaggaaaaaagtgtatttaaaattctcaaatgtaaagtacgactataaaattttgatgcaggtgccataaatgacatggaaatcagcatcgttagtatagagcagggaatagcaaactatagcttgcaggccaaatctagcccattttctgtttttctatggcctgtgagctaagaatagtttctccattttaaatgtaaaattgcaaaatattaagggattttatgtctggagtcatggcaygagaatctctatggatctgttcctcagcaaaacaactataactggtgaaaaacattaacaccaaaatcaaacaaaaacatttaaagctgctggaaagtgtcttaattgtatacaccaaaatgaaggaacatttaacgaagaacatttactaaatcttggtaaaaatgagtcagagtttgtggaact

SEQ ID NO: 529640 - DNA, 620 bp, Homo sapiens
taagaagtcattaaaaaaatttttaatttgkcagaagaaaagaaaatgaactaaaacagaaggaattgttaatttgtacaaaatttttatttactactcaagatggtaatttgtggaagagccttttaaaaaagaaattgcaccatgaagaccattaagctgtgctgtgtgtgtgtgtgtgtgtgtgtgtgtgtgtgtgtgtgtgtgtgtgtgcctgtgtgtttttatttagctagttcaattcagttgttggcaatatgatgctctgctatgaaatagagaatagcaatgctattatcttccccttttacatctactatttgtttgttgttttattgtgttttcttctttagttttttgttttggtttggtttttggtcagagtttacaattgtcttctattttgtaaccacggtcttctcagttgttattcttagttctatattaaggtggatccattgttcttaacaaggacttcccagtatctaaattctttacttaatctccagttgactggattttggcaacaattagtttttttttccgcaggaaaggttcatgagtgctatgtttctagacttttatatatgagaatgccttttgtgttgaaatttgaatgg

SEQ ID NO: 529641 - DNA, 620 bp, Homo sapiens
taagaagtcattaaaaaaatttttaatttggcagaagaaaagaaaatgaactaaaacagaaggaattgttaatttktacaaaatttttatttactactcaagatggtaatttgtggaagagccttttaaaaaagaaattgcaccatgaagaccattaagctgtgctgtgtgtgtgtgtgtgtgtgtgtgtgtgtgtgtgtgtgtgtgtgtgtgcctgtgtgtttttatttagctagttcaattcagttgttggcaatatgatgctctgctatgaaatagagaatagcaatgctattatcttccccttttacatctactatttgtttgttgttttattgtgttttcttctttagttttttgttttggtttggtttttggtcagagtttacaattgtcttctattttgtaaccacggtcttctcagttgttattcttagttctatattaaggtggatccattgttcttaacaaggacttcccagtatctaaattctttacttaatctccagttgactggattttggcaacaattagtttttttttccgcaggaaaggttcatgagtgctatgtttctagacttttatatatgagaatgccttttgtgttgaaatttgaatgg

SEQ ID NO: 529642 - DNA, 545 bp, Homo sapiens
gtgtgcaattacagcaaggtctgtaatttctagcagtatcatttaagttcttgccttttcaaatgctcgtggtagattgtaaaaatgctgatttaccacctttcttggccagttgtctctggaaacgctcaccctactccacctgatgcttaataaaaaactggtgtccaaaggggttggaggttcatctctaaattccacatttgatccaagaagaaaaaaaaatagtatttgttgtttggggagtccaaaataaagaaagcaggaaagagaaaagaaaacatttgatatcccaggagtgccaagtcccaaatcctctccagcagcgtcctccaatatttgtagtccctgtcatgttggtggcctttgctcrggtacccagctaggctctaaaattgcataaacatgtaactatgttgttttagagagaagcagctacacatgccactttaaagaaatttaattactgtatctttttcttcaaacatgtggggttctgtggagagttggacaccaccctgggcaggttccacatggcatggcag

SEQ ID NO: 529643 - DNA, 545 bp, Homo sapiens
gtgtgcaattacagcaaggtctgtaatttctagcagtatcatttaagttcttgccttttcaaatgctcgtggtagattgtaaaaatgctgatttaccacctttcttggccagttgtctctggaaacgctcaccctactccacctgatgcttaataaaaaactggtgtccaaaggggttggaggttcatctctaaattccacatttgatccaagaagaaaaaaaaatagtatttgttgtttggggagtccaaaataaagaaagcaggaaagagaaaagaaaacatttgatatcccaggagtgccaagtcccaaatcctctccagcagcgtcctccaatatttgtagtccctgtcatgttggtggcctttgctcgggtacccagctaggctctaaaattgcataaacatgtaactatgttgttttagagagaagcagctacacatgccacwttaaagaaatttaattactgtatctttttcttcaaacatgtggggttctgtggagagttggacaccaccctgggcaggttccacatggcatggcag

SEQ ID NO: 529644 - DNA, 615 bp, Homo sapiens
atcacatggtcctcctgacatcacatgagaarccgagagccaactcagccagtttctttgtcccttcctattgttctctctcccttgtgtaacataggaattccagaacccatccctacatccatctggtgtgccatgaggaattaccaattattaatttctgaaaatggagaacaatataataaaatgcctgggaaacctgaattatttacggtttaataattttgagaggtccttcaataagaagatgcatttaatctgttttattttagatatttgtccaggctctataacatacatatttattaagcataaatttattgtgaagtatcctctagagcagaatttattcaaacatgggactcaaggtattacttctttgttaccacacatttttagttttgcttgagggaagtagagttgaatacatacctaatattttgaactgatagagtgctttggagaatgcagagctttcctgattttacattctggatttaaagggttctaaatacaaaccttaataacactcctggacatcagcataagtaagataaagtgagtctttatttagtaactgaagccccatcatttgggtttgagcagcactccgcc

SEQ ID NO: 529645 - DNA, 615 bp, Homo sapiens
atcacatggtcctcctgacatcacatgagaagccgagagccaactcagccagtttctttgtcccttcctattgttctctctcccttgtgtaacataggaattccagaacccatccctacatccatctggtgtgccatgaggaattaccaattattaatttctgaaaatggagaacaatataataaaatgcctgggaaacctgaattatttayggtttaataattttgagaggtccttcaataagaagatgcatttaatctgttttattttagatatttgtccaggctctataacatacatatttattaagcataaatttattgtgaagtatcctctagagcagaatttattcaaacatgggactcaaggtattacttctttgttaccacacatttttagttttgcttgagggaagtagagttgaatacatacctaatattttgaactgatagagtgctttggagaatgcagagctttcctgattttacattctggatttaaagggttctaaatacaaaccttaataacactcctggacatcagcataagtaagataaagtgagtctttatttagtaactgaagccccatcatttgggtttgagcagcactccgcc

SEQ ID NO: 529646 - DNA, 583 bp, Homo sapiens
gtagccattctttattcctttacgtttttttttttttgtggctacaaagactttatcaaattatttaaaatgttggcatttaagtattcatgtgtatacagttacatggaaccttcaggtcagtggggcacaaatgtggtatacacacaatgagcctggcagggaagcaaatgagaccaggcttggagctacagggctttaaaaaaattggatgtctttcggagggtctgagaagaatagggcagaagaggaaagggtcactttaggggtctggcttaacccactgcccagatctccaactgaagagttcctttcccttcctcaggggaagagggcctgttttcaaacggcatccctactacacatacaccccttccctaaaatcttgttgtggcaaacacacccaagaacccactggaatacgtccttataaataygtttgtatcagagaaaacaaggcactttgggaacattatggcttactctactacatgtacatcattccagacagaaggtaaaaattggttagttcctcaagttaattaactggataaacttaatacaatgacaaaattattcccta

SEQ ID NO: 529647 - DNA, 583 bp, Homo sapiens
gtagccattctttattcctttacgtttttttttttttgtggctacaaagactttatcaaattatttaaaatgttggcatttaagtattcatgtgtatacagttacatggaaccttcaggtcagtggggcacaaatgtggtatacacacaatgagcctggcagggaagcaaatgagaccaggcttggagctacagggctttaaaaaaattggatgtctttcggagggtctgagaagaatagggcagaagaggaaagggtcactttaggggtctggcttaacccactgcccagatctccaactgaagagttcctttcccttcctcaggggaagagggcctgttttcaaacggcatccctactacacatacaccccttccctaaaatcttgttgtggcaaacacacccaagaacccactggaatacgtccttataaatatgtttgtatcagagaaaacaaggcactttgggarcattatggcttactctactacatgtacatcattccagacagaaggtaaaaattggttagttcctcaagttaattaactggataaacttaatacaatgacaaaattattcccta

SEQ ID NO: 529648 - DNA, 605 bp, Homo sapiens
tttataagaaagtaagttagagtctcatgcaaggamaggctgggttagtctcctaggtttctctttttgtaagaggctgggttctgtaaggaacagaagctgggtcagagtcccaagtttctctatttataaccataaaagtactattagttaaaaaacatgggaacttctcagtctaccaaaatatccatttttgaacccctgctggctatatgctccaccaactctacctgtttcctgtcttgttggcatgattttactaaggataatttggaacttcaggggtttccttgggaaactttacatctcccccaactgtctcctccaaaacctctcccttcccattgcttctgctcctccttcttccttttaccacctttgatcttccctttaagctctcttgaatcctcgcataggtcactcttcaaactcctacctcttccacccctctatccattcctgccagacctttcccttcctacttcagtctcttaactccctacagtcacttgaactttgggacccctcctcccatcaggggctctcaagagactgagggaaccctaaaagcaaccatctgagactaaaaaagaaaaaaaaactaa

SEQ ID NO: 529649 - DNA, 625 bp, Homo sapiens
gacttaaagtgaatctatatactgacaataaacatgtgtttggtgtctgtcatataataggggaaatttgaaaaaatggattcttgacttcatgggaactaaaatatctcatggaaaattaatatccgagttatgagaggcttcacaactgctgagtaagataaaataatccactgtagagaccacatagtgcagaaaaacaaaatttctaaaggcaatgattctgctgatagggctgtaaaaactacggttaacacamggctgacacccagctcagaagccccaattctaatacaagaaactttcatttattttcaaaaatatgcattccaaaagaaaatgggcaaatggattaaggaaggggggctgtactatgggaattagctaacaatacaattcctactccttggtctttatttacttggttagtattgtgtcagcaacaaaatcagctacataaaagatggattttaaaggtttcagactctcactatgcctaccaaaaagatgaatttattcaaaacatagtaaagagatgtgctatttgtcagcaaaagtcttcacagaccactcccaaggtaagcacaggaagttttccccaatcaacataccaggaacctggtgg

SEQ ID NO: 529650 - DNA, 625 bp, Homo sapiens
gacttaaagtgaatctatatactgacaataaacatgtgtttggtgtctgtcatataataggggaaatttgaaaaaatggattcttgacttcatgggaactaaaatatctcatggaaaattaatatccgagttatgagaggcttcacaactgctgagtaagataaaataatccactgtagagaccacatagtgcagaaaaacaaaatttctaaaggcaatgattctgctgatagggctgtaaaaactacggttaacacacggctgacacccagctcagaagccccaattctaatacaagaaactttcatttattttcaaaaatatgcattccaaaagaaaatgggcaaatggattaaggaaggggggctgtactatgggaattagctaacartacaattcctactccttggtctttatttacttggttagtattgtgtcagcaacaaaatcagctacataaaagatggattttaaaggtttcagactctcactatgcctaccaaaaagatgaatttattcaaaacatagtaaagagatgtgctatttgtcagcaaaagtcttcacagaccactcccaaggtaagcacaggaagttttccccaatcaacataccaggaacctggtgg

SEQ ID NO: 529651 - DNA, 635 bp, Homo sapiens
tctgggctgtagagtgagactctcaaaacaaaacatcactctgtcagcactgtagagaatgaactggtagggkcaagactatttggagacttgcaataatatttcaggcaaaatacgaggaaggcttaaactagggcaatgaatgaaggctggagagaacatgggtttgaggaagtttaaggagatagcatctgcatacttggttgccatttgagtgaagtgaaaggagaagtggtatcgaaaatgttatttggtgtgtttcgcttggagataattaattcgaagtgatgcctgctgtaacaggtgtgcatagtgctgtagaggatgcttacagttcagcttagggctggttggaagtaacatgtgggtcctgaagtcagtcggtctgggggtcattgtcctaaacagagaagataggaaggaataggagctgagcatttagaggtattcttctttgtggtttaatattatacccatgggtcatcctcaaaagatgtgcccttatttccccggggactttcggaaaccccgctacgaccccgcggaacgttccgtggggaagcttctctaggccaccagagggcgccaggcgggccgcagcgactccagagtcgcgttatggccgaggtgcgggt

SEQ ID NO: 529652 - DNA, 635 bp, Homo sapiens
tctgggctgtagagtgagactctcaaaacaaaacatcactctgtcagcactgtagagaatgaactggtagggtcaagactatttggagacttgcaataatatttcaggcaaaatacgaggaaggcttaaactagggcaatgaatgaaggctggagagaacatgggtttgaggaagtttaaggagatagcatctgcatacttggttgccatttgagtgaagtgaaaggagaagtggtatcgaaaatgttatttggtgtgtttcgcttggagataattaattcgaagtgatgcctgctgtaacaggtgtgcatagtgctgtagaggatgcttacagttcagcttagggctggttggaagtaacatgtgggtcctgaagtcaktcggtctgggggtcattgtcctaaacagagaagataggaaggaataggagctgagcatttagaggtattcttctttgtggtttaatattatacccatgggtcatcctcaaaagatgtgcccttatttccccggggactttcggaaaccccgctacgaccccgcggaacgttccgtggggaagcttctctaggccaccagagggcgccaggcgggccgcagcgactccagagtcgcgttatggccgaggtgcgggt

SEQ ID NO: 529653 - DNA, 635 bp, Homo sapiens
tctgggctgtagagtgagactctcaaaacaaaacatcactctgtcagcactgtagagaatgaactggtagggtcaagactatttggagacttgcaataatatttcaggcaaaatacgaggaaggcttaaactagggcaatgaatgaaggctggagagaacatgggtttgaggaagtttaaggagatagcatctgcatacttggttgccatttgagtgaagtgaaaggagaagtggtatcgaaaatgttatttggtgtgtttcgcttggagataattaattcgaagtgatgcctgctgtaacaggtgtgcatagtgctgtagaggatgcttacagttcagcttagggctggttggaagtaacatgtgggtcctgaagtcagtcggtctgggggtcattgtcctaaacagagaagataggaaggaataggagctgagcatttagaggtattcttctttgtggtttaatattatacccatgggtcatcctcaaaagatgtgcccttatttccccggggactttcggaaacccsgctacgaccccgcggaacgttccgtggggaagcttctctaggccaccagagggcgccaggcgggccgcagcgactccagagtcgcgttatggccgaggtgcgggt

SEQ ID NO: 529654 - DNA, 635 bp, Homo sapiens
tctgggctgtagagtgagactctcaaaacaaaacatcactctgtcagcactgtagagaatgaactggtagggtcaagactatttggagacttgcaataatatttcaggcaaaatacgaggaaggcttaaactagggcaatgaatgaaggctggagagaacatgggtttgaggaagtttaaggagatagcatctgcatacttggttgccatttgagtgaagtgaaaggagaagtggtatcgaaaatgttatttggtgtgtttcgcttggagataattaattcgaagtgatgcctgctgtaacaggtgtgcatagtgctgtagaggatgcttacagttcagcttagggctggttggaagtaacatgtgggtcctgaagtcagtcggtctgggggtcattgtcctaaacagagaagataggaaggaataggagctgagcatttagaggtattcttctttgtggtttaatattatacccatgggtcatcctcaaaagatgtgcccttatttccccggggactttcggaaaccccgctacgaccccgcggaacgttccgwggggaagcttctctaggccaccagagggcgccaggcgggccgcagcgactccagagtcgcgttatggccgaggtgcgggt

SEQ ID NO: 529655 - DNA, 166 bp, Homo sapiens
tatctattggagttactttctgtctttggarttactgagaccagaggaattggattacccctctcaagttacatactgtaagggcaacttataaaagaaaactatccacatttttttgtcagttgggaattaattgagatagaaacactgcatgtaatttagtaag

SEQ ID NO: 529656 - DNA, 578 bp, Homo sapiens
agctgaaggggctagacaggctctggtttgccagttctcaccactccctattgcattacactcacatgcttcgatcttttatatctgcctgactcctgtttagtgtttaggtttgtcttagtttgttacctctgctctaagtagagcttctcaaatatttcttctgcaggacccctaagatacaagagagtgaaccattttcccccaggactcccaaagcagtctaaagtagcctgtcataasccagaaatgtctttgaagtacctattttctttaaaaaatgcaaattttgatttacactgcataatatatttgtgttggttttagcataaaaatgatttatcttcccccaccaaatcttaaaagtaaaattaacactctggaagatgtgccatgtgtattctgtggctccaaatagtcttcaccatatcaccctaggaataatccaatttaaacagcactgtataaaggcatgaggtaaagagagacatggagaaaagacacagagaaagagtcaaaaagaggaaaagaatttgaaaaacaacaagaatgagtctgagtgacaagctttctgtctg

SEQ ID NO: 529657 - DNA, 578 bp, Homo sapiens
agctgaaggggctagacaggctctggtttgccagttctcaccactccctattgcattacactcacatgcttcgatcttttatatctgcctgactcctgtttagtgtttaggtttgtcttagtttgttacctctgctctaagtagagcttctcaaatatttcttctgcaggacccctaagatacaagagagtgaaccattttcccccaggactcccaaagcagtctaaagtagcctgtcataagccagaaatgtctttgaagtacctattttctttaaaaaatgcaaattttgatttacactgcataatatatttgtgttggttttagcataaaaatgatttatcttcccccaccaaatcttaaaagtaaaattaacactctggaagatgtgccatgtgtattctgtggctccaaatagtcttcaccatatcaccstaggaataatccaatttaaacagcactgtataaaggcatgaggtaaagagagacatggagaaaagacacagagaaagagtcaaaaagaggaaaagaatttgaaaaacaacaagaatgagtctgagtgacaagctttctgtctg

SEQ ID NO: 529658 - DNA, 638 bp, Homo sapiens
gggaagccaggcttttggagtggccataaagactgccacactacttctctgacaaatggttccagagtagtttgccacccaaaacagtggaggaatttatcatgagaagtgtggggaaatttcatgaggaaccaatctgcagctgaaactgccctatttgcaagctttctatgactccaatctgtctgaagaaacagttttctttccagctagataattctaaacccatccaacttacttcccataatctcattatagtaagatcttgttatactaaaagtttagaatgggtggtcattctttatggtcaaacctctgtacagctagaatcaaggaggacagagggatggttccaaattccaaaagccagcccactcattccagcaccttggaaaggaggtactgcccaaggattgggggatcagaaagaatgaaatagtttccccattcctaagaagcaggcagactccacaaaccygtaagggaaaggcaacattgaatactttcagtaactaaggaagagtccatatgaatttctaaaaagtcattatgagttaagactgagtctgggcagcctcagtttctggtgcatataatagtaaataccttttgattggttgatcaatgtgtggaaacta

SEQ ID NO: 529659 - DNA, 627 bp, Homo sapiens
ctgcccgaatgttgttgcacaggtgctacaaggtaactcaatctggaccttctccccatttcctccatacggtcaagtacccctcatgtgcccacttcgccctgagctgctgaaatagaactatgtgcattccttgtctgtcttctctttcctcagagcatagccaacttgatagaaaggaggcaatttgaaaccaaagagaataagtaagtaacattttcagttgagttatttacatctttcaagatcaagggcctcaggggaaatttcctctagaaataggaatcaatagacgctgggcctggcagggtggctcatgcctgtaatcccagcacttcgggaggctgaggcrggtggatcacttgaggtcaggagtttgagaccaacctggccaacatggtgaaaccctgtcttcactaaaaatacaaaaattagctgggcatggtggcgggcacctatagtcccagctactcgggaggctaaggcaggagaatcacttaaacccagtgagtggaggttgcagtgaaccaagatcacgccactgcactccagcctgggcgacaaagtgagactccatctcaaaaaaaaaaattttttttttgagaagtaggaaccagtagagatagc

SEQ ID NO: 529660 - DNA, 596 bp, Homo sapiens
tggcaccaaactggacttcctgctttttcctgaatgtgtcctatgtttttccacctttgtgccattgctcatgatgttacctctgcctggaatctccttccaatcatctctccatttccaaattttctctatctcagctctgtggaatttccctcgagtgttttagtcaaaagttgcctctccctctctttaacttttgtggtattttatctgtccccctcctagagcatctatcactttcagcattgcattatggttacttacgtacaacttccagtacagcaagttctakagccagtcttcttgggttcatatctcagatccacctctttatcaactatacaatcatgggctagtgagtaagcctatctaaacctcagtttctttctctgtaaaatggggataataataacatctatcttatatgttcttgggatgggggacattaaatcagattatgtaagatcgtttagcacaacgccagacacataatcaataattatgtgcttaacataatcaatctcatcattattatcatctcttctccaattaaactgtgattcctgaaggacaatgatgatatttttataggaccc

SEQ ID NO: 529661 - DNA, 524 bp, Homo sapiens
aactttcctcctagactatcctctttctcaccagagtagcttttgcttctagagattttttccccccaggtgtactgttgattaatactagcaactaccccacccaaggcagggagctcccagaaacgactttcaggttttatttcctgtgtcatctctgatcctttagtagtggctacatgtattgagaaggactctcaggctgagtctgggctaagctggcaacagagccatcatcagttagttgtgtctgctgytggggctagtagtggcacacattcctcacatttacattccctgtgctgggcactagggggcaatcaaagacgaataaggtccccaatggaaatatccatccttcaagattcagctccatttccaacacctccagaagcatttctgatatctcagcttctctctctttcctattcctggagccactgtatagtaggtgagacagagaaatagaatagtatacatgaaacttagcactgctgcaggttagtactcttcatgtatgtatc

SEQ ID NO: 529662 - DNA, 616 bp, Homo sapiens
tggagatctttgtaggcaggagaaaaattaagcctttgtatactttgtattcagtatattctacccaacacccatgtgtaagagttggacttggggagttgcaacaggctaaggaaagtttgtgcagataaatagagttattttaaattctgtgcctactaagctctgaatcacaaagtgcaactgcaagtcctctagaaatratatataagaaatccttttctaactctgctcattctattatgtgggtttcacttattatttttaaataaagaacttatgaaaaagaagtcactgaaaagttagcaattacctcatcattttccagttctcaaactgttactattcttgagccactgagaagcagagtggtcttgtgaaagaatattatccatatatgggacaaaaagcaaaaatattaatatagttttaacttactaaaaatgattccaaataattggttacttgtggccacaaaatgaaaagttatgatgaaaaacattggtgcttacatttgggttgtggtgtgtatcgttatgtatgtttatgtctctcgtgctcagtataatagcagctattctaacacagcatagctggcaagagtgccccagagtga

SEQ ID NO: 529663 - DNA, 650 bp, Homo sapiens
gaagcaagaaggttggaaaatatctgttagtgctgagaaacaataccttcctacccaagaattcagagagcaaacaaaacatatattcctatttgctgagcttattctatttctattttgagtctttagggcacactgtataaaattagggtaaccaaggggtatcttcccctgccttgtctaaatcccagaaccaaattgtaaagaaagaagtgcactcctttagggctggtacaatcaactctctgttcattggcaaggctaaattagtgaatgatccattgagataatgataggaagccactttctaagctgacatttgatatgcaaagataacatagtgrtgccttaacagactagaattatttttccaattagtcaaaagtttgttgagtggcacatggcacatgtatacatatgtaacaaacctgcacgctgtgaacatgtaccctagaacttaaagtataataaaaaaaagtttgttgagtggctacaatatgcaagacatgtacgatgtctaagaagacacctgtgattactgtcaagctgattaaaatatggttgaggagcaattatctacatatatgttgtacacacagacgtatacatttgaaaaacaattactattgaattaaacattaaactatatc

SEQ ID NO: 529664 - DNA, 594 bp, Homo sapiens
tgtattaagtatgagtaaatcacagactgttgagttaggcaaaacttattaattcattctcaactcatttagccatcaaaattttattttgtctttgtgtctaactgagcattgaataaaatcgcagctaatttcaaattccctttgtcatcatggttttcagccaaaagtctataataaatggtcagaagatgagctgagactgaatgaatrgtgagtggtattcatcagccaaacatagagtccagatccaattatatgtattcattaagtgataatgatatcatggtctttaactaggaagaaaagagtgtaattgaataataacagttgtacaatcccaacggaacacactttccatcccagcccagcgaccctcggggatgatgcaggattgatggaattctattactctttgatagatttattatgaaaggctgagtggacttgcagcaccactttgtcactcacactaatcagtatcgtaagggccccgagcgggcaggcttttgtatccctttgacaaagacaaggttaggggaggatgacagacacccagacctttacaaacccatactgcaagataaaatgggc

SEQ ID NO: 529665 - DNA, 697 bp, Homo sapiens
agttgaatgaccatgtagagcagagctacccctgacctgaatcccttcactggactgttasgtgagaaaggataaactttctttaaaaagtcccctcattctagcaaatacatccatggtgaacattaattttttttccccatgggtatgtggtctgtttactctttgaatattaatattcaattggttaactctatgctattgtttgtagatactattacttaaaagatctccagtttaacctatggagactcctattaagaacacatgattaaccttaaaaaaaggaatatatgagcaaataaaggttgatattcctttcggcaatttcaatacaggcaatattcaacttgaaatcaatgccattgcctcaggatcatgtttaatgtaaaaaaaaagaaccaaattaattgtaaatacgttttcagtttgtgattgttgtttgtggttatgccttactcacttttccattaacaacataattaactactaaatgccaggttaggggctgaagaaataccagagaatatggagtgtattcaagagaatgtttttgtcaacaattagtaaagatctttataccagataatggagattaaatatgaataagaaagtctcctaagaagtagaggaacacatgaatgactttataaattgctcacttctaaagaaggggggttccttgttttttaattag

SEQ ID NO: 529666 - DNA, 640 bp, Homo sapiens
ggtggccttctcaactgcccggactgtcgcacgatgttgatggggtcggggaggggagaggggggaaaaaacggttgttcccacccaaggccgcacctcggggccggcctaaggcagcaccccctgtggagggtacattacctgtatgttacctgtatattacaaaaccgaccttatgtgattgcccctttcaggctgcacaaaatgaagcggtgcagggcaacrgttctccgcagttcctcgccgccagtttttgttgtaatggcggtcgcgcgacaggcgcttttatagaagaccccccgcgggcggcctgcccattggtctgaacctgtcacgtgaccacacccagccccgggcggtgcaaaaaaggtgtaggagtctgagccgggcagctcaggcctgttagggcaggcagagtgggttcgggtgattgccgtgtagagagccgggggttaggagtaggagcgctacactcaaggcgtttgctgttaacacgacgttttcactaatcagttagcctagtagaggttcttgagttttggcttctgatgttttcgtggttttcacgcttttttccccagccttctccacagttcctgtctcttgcacgtagtgagtgcttgatcaatattaggtagca

SEQ ID NO: 529667 - DNA, 640 bp, Homo sapiens
ggtggccttctcaactgcccggactgtcgcacgatgttgatggggtcggggaggggagaggggggaaaaaacggttgttcccacccaaggccgcacctcggggccggcctaaggcagcaccccctgtggagggtacattacctgtatgttacctgtatattacaaaaccgaccttatgtgattgcccctttcaggctgcacaaaatgaagcggtgcagggcaacagttctccgcagttcctcgccgccagtttttgttgtaatggcggtcgcgcgacaggcgcttttatagaagaccccccrcgggcggcctgcccattggtctgaacctgtcacgtgaccacacccagccccgggcggtgcaaaaaaggtgtaggagtctgagccgggcagctcaggcctgttagggcaggcagagtgggttcgggtgattgccgtgtagagagccgggggttaggagtaggagcgctacactcaaggcgtttgctgttaacacgacgttttcactaatcagttagcctagtagaggttcttgagttttggcttctgatgttttcgtggttttcacgcttttttccccagccttctccacagttcctgtctcttgcacgtagtgagtgcttgatcaatattaggtagca

SEQ ID NO: 529668 - DNA, 589 bp, Homo sapiens
gcgctgctggtgcgggccgagtagagattagggggccctctccgaatcggcgcaggaaggtagctgcgacggcggccccgcgcgcctgcgcaccagcgccccctgaccagcaggcctctcccggggcgccgcgttccagccccgagggcacgtggcaggtgggacggttgggcaggattagccgctccggggtcaggtgtgaggtccgccccagtctcaggagccgctgggcccggctgcagaggctggccgccttccaggatcccaggcgcctacgtcctccgacgcggtgggaagacgcgaggtggggctgcagcccttgaaccaatccaaccrcctccagagctagggccgggcctgacgcagggaggggaagcgggccgcgtgggcctcagaatcacctgtggggctatgtaagaggcgaaaaggatgcacaggtctgataagcagagattctcattcaataggtctgggtttatttgaggaaaatcacagacagaaaattctgattcttggctgagaatccctgcagagctaaaggcaactctggctccctgatgaaggaatgggtggggctaggagacctttt

SEQ ID NO: 529669 - DNA, 589 bp, Homo sapiens
gcgctgctggtgcgggccgagtagagattagggggccctctccgaatcggcgcaggaaggtagctgcgacggcggccccgcgcgcctgcgcaccagcgccccctgaccagcaggcctctcccggggcgccgcgttccagccccgagggcacgtggcaggtgggacggttgggcaggattagccgctccggggtcaggtgtgaggtccgccccagtctcaggagccgctgggcccggctgcagaggctggccgccttccaggatcccaggcgcctacgtcctccgacgcggtgggaagacgcgaggtggggctgcagcccttgaaccaatccaaccacctccagagctagggccgggcctgacgcagggaggggaagcgggccgcgtgggcctcagaatcacctgtggggctatgtaagaggcgaaaaggrtgcacaggtctgataagcagagattctcattcaataggtctgggtttatttgaggaaaatcacagacagaaaattctgattcttggctgagaatccctgcagagctaaaggcaactctggctccctgatgaaggaatgggtggggctaggagacctttt

SEQ ID NO: 529670 - DNA, 653 bp, Homo sapiens
tggctcttcacctttttatccatccccctcttcctaggtcagctttctcattctcacagtttcagctttggctaatgccttccaaacggcatgttcattcaagcaacaaatatcttttagctcctactgtgtgccaagtactgtcctaagagatgggactataacagtaagcaaaacaaagtttctgtttttctggacattaccaaagacaagcattaagcagataaaatatataatatatgatgtcaaataatgataaaggatcttgcaaaaaayaaaccaggataagacagtgagaatggggctgctgtaaatggagtatttagaaaacacttttgtttaacttgtatcatactggctctcaaagtgtggttccagaccaacagcatcacctgggaactggctagaaatgcacattatcaggcctcactcgacctgctgaatcagaaaataggggtcgggggatgagtccagcaatctatgccttaacaggccctccaagtgattctgatgcatgctgtagaggagtttcccacctctgttgcctcaaatagatgacaggtgtgcagtctaatactaattttcttagcccatagggatagctttagggttgggggttagagagatgccaggaacctccggaccaaagtagc

SEQ ID NO: 529671 - DNA, 653 bp, Homo sapiens
tggctcttcacctttttatccatccccctcttcctaggtcagctttctcattctcacagtttcagctttggctaatgccttccaaacggcatgttcattcaagcaacaaatatcttttagctcctactgtgtgccaagtactgtcctaagagatgggactataacagtaagcaaaacaaagtttctgtttttctggacattaccaaagacaagcattaagcagataaaatatataatatatgatgtcaaataatgataaaggatcttgcaaaaaataaaccaggataagacagtgagaatggggctgctgtaaatggagtatttagaaaacacttttgtttaacttgtatcatactggctctcaaagtgtggttccagaccaacagcatcacctgggaactggctagaaatgcacattatcaggcctcactcgacctgctgaatcagaaaataggggtcgggggatgagtccagcaatctatgccttaacaggccctccaagtgattctgatgcatgctgtagaggagtttcccacctctgttgccycaaatagatgacaggtgtgcagtctaatactaattttcttagcccatagggatagctttagggttgggggttagagagatgccaggaacctccggaccaaagtagc

SEQ ID NO: 529672 - DNA, 575 bp, Homo sapiens
tactcactcccttctttgtgttctcacagtaccatatagatcagtgattctcaaccaggagcaattttgtttgatgccatggggaaaacacttggcaatatctgaagataattttggtcacmacaactagggatgaagtgctacaggcatctggtagaggccagggattttgctaacgatgctgcgatgctaatgatgctgttacaatgtacaagacagccctccacaacaaagaatcatccagtccaaaatgtcagtagtgctgaggttgaaaaacctggaggtacaacactttatcacacttgtctgtttacacatctgtctctccctgttatactatacgctcctcaagggcatgcaccatgtcttacctttaaatcctcagtggtgagcagtgcaatacatgtagtaggtgctcactaagtatctatggagtgaattgattagatagaagttaagttaagtctcatcttgtccctgcacctaacaggccaacacctgcatttcaaagcaaagagggtaggaacataagatgcttggggtcaaaacagttaggggatgtggatcaaccaaag

SEQ ID NO: 529673 - DNA, 594 bp, Homo sapiens
ctcctgcagcatagttccaaatctttctgcacaaatttagtggatgatgtgattttttacatggaatagcccctttatttattgcagagaagctggacaattcacacttagtaacatatggcctagcaaatttcatttcgtgatcaccacacctgttaaaaggtgatgcttgtggtctaaatatgcagattcctcatcatcctcaaggaaaagggaaccactgcaagaaaacctgggagggagtttaggattgtcctgaggcagtgcaagccactgaaattcacacacaaggggttagaaaagagaatccacatgttctcatctctccatgttctgggtataayttggtcctccttaaattgcaccatttttggcgttagagaaaactggatttgaataccacttccatcactctttatgatgtgatggtgaatgtgtttttaactcatctgagcctcagtttgctcatctatagaagatgtgattgttgtaaggcttccataaggtaagtgtgtaaaaaccatggcaaaatgcttgtaatttaaaagagagggttattatgaggcttctataaggtaagtgtgtaaaagtctg

SEQ ID NO: 529674 - DNA, 580 bp, Homo sapiens
aattctcacatacagagcacacccaaggaaacagcatgggataaagaagaggacattacctgaactgctaaacctccctgtgcccgccttccgtcactgaccttccggcaaaggtctgccatgatcctgactgctaacactgtagattaattctgtctaattttatgtaactggaatcacacagtatttactcttcactcttaggtatggcctttttctctstgtgtgtgtgtgtgtgtgtgtgtgtgtgtgtgtctccttcatgtcactgtgcatagttgtaatttcttcactcttgttgctgtgatgttttataccatataattacacccactacttatctattctattgctgttagacatgtgaatcgtttcaaatttggggctattatgaatagtgttgcttggaaaattctcaaacttgtcctttagcactcatgtggacccagtttctattgactatttaactaggagaactgttgggttatatggtatgggtatgctcagcttcagaagcataagtattttttattatttttttaaagaaatgggtgcaaactatttgctgcatcaaccatat

SEQ ID NO: 529675 - DNA, 580 bp, Homo sapiens
aattctcacatacagagcacacccaaggaaacagcatgggataaagaagaggacattacctgaactgctaaacctccctgtgcccgccttccgtcactgaccttccggcaaaggtctgccatgatcctgactgctaacactgtagattaattctgtctaattttatgtaactggaatcacacagtatttactcttcactcttaggtatggcctttttctctgtstgtgtgtgtgtgtgtgtgtgtgtgtgtgtgtctccttcatgtcactgtgcatagttgtaatttcttcactcttgttgctgtgatgttttataccatataattacacccactacttatctattctattgctgttagacatgtgaatcgtttcaaatttggggctattatgaatagtgttgcttggaaaattctcaaacttgtcctttagcactcatgtggacccagtttctattgactatttaactaggagaactgttgggttatatggtatgggtatgctcagcttcagaagcataagtattttttattatttttttaaagaaatgggtgcaaactatttgctgcatcaaccatat

SEQ ID NO: 529676 - DNA, 580 bp, Homo sapiens
aattctcacatacagagcacacccaaggaaacagcatgggataaagaagaggacattacctgaactgctaaacctccctgtgcccgccttccgtcactgaccttccggcaaaggtctgccatgatcctgactgctaacactgtagattaattctgtctaattttatgtaactggaatcacacagtatttactcttcactcttaggtatggcctttttctctgtgtgtgtgtgtgtgtgtgtgtgtgtgtgtgtgtctccttcatgtcactgtgcatagttgtaatttcttcactcttgttgctgtgatgttttataccatataattacacccactacttatctattctattgctgttagacatgtgaatcgtttcaaatttggggctattatgaatagtgttgcttggaaaattctcaaacttgtcctttagcactcatgtggacccagtttctattgactatttaactaggagaactgtygggttatatggtatgggtatgctcagcttcagaagcataagtattttttattatttttttaaagaaatgggtgcaaactatttgctgcatcaaccatat

SEQ ID NO: 529677 - DNA, 496 bp, Homo sapiens
ttagaagagatttttgtatttttagaagagatggggtttcgtcatgctggctggtcttgaactcctgacctcaagtgatccgcctgcctcaggctcccaaagtgctgggattacaggtgtaagccaccrtgtctggcttgccttttctttcattcaacaaacattcactgaagtgccttccatacattaggtatcacggtcccgcctttggagcactgatactgtatgggaacacagggaagcaaagggggctgagagaggctcacacagaccattgcaggggctatggcagcccaaagtcagagcactaatccactcatgcaggggtgggggaggctgtcaggaaaggtgttaaaggaaatcagaatattttaccccaaaatatatttttttgacatattttgacatggctgtcagagagccagcaaaaagaggtagctctgcaaagctgtcttttgtgcaggagatttgtatttgtagagaaaaatctgcattg

SEQ ID NO: 529678 - DNA, 439 bp, Homo sapiens
aaaactcatcttagggttacagcacattgttttagtagctgggtttgtggataatttttgaaacaggtgctatgtgcggaatgctttccctccgctggtccctagactctgatttatttgggtatggcaagaatcacccaattcacataatcaactttcacagaagtaattttgttgttgggatatgagaggatgtaactttttgaagtgcatcaacttttaagaagtctcgttagggaatccacattgttataaaaaatatcttgaggtgagacacagacacaatgggcaaaattctccattaatattcagatttcttgtattgcctgccccccacccccccaaccccccattttataagcagttcaagtcagggctgaaatgctgtttgtttaagatagagaatrgtcacccaaatgggagtccctgtgatctatgg

SEQ ID NO: 529679 - DNA, 545 bp, Homo sapiens
ggaagcccagaaaccccaagggctaccagccacccctggaagccacgagaggcaagaaaatgtcctcccctccagcctgcatagggagtggggcaaaatccacaccttaattttggacttctggcctctagacggggagagaataaatttctgctgttttaagccactaggtttgtggagatttgttatggcagttctagggaatatagaaatggtaggtttggggaaatgagagtgtggcacagcgtggctggtctgaggagcggggaggagagaggagaatgagatgaggctggcrgtgtgggcagcagccagcatcatggcggcgtgttggttgtattcaggatgtgcttttcatcctaagagcagtgcattttaggaacacacccttctctgctgcggtatggggtgccctggaggccaggactgagagcagtgtggatggatccgggtggctggtgatgtcctaaactaggtggcaatggaaggaagctgagggatgggagaaataaatggtaaatggttgaatttggaataaataaggg

SEQ ID NO: 529680 - DNA, 573 bp, Homo sapiens
gctggctctagtccatcctgtagccctgagcaatgactctgctcaaacaggttagagccatttaggaaacacaagcccgagcttccttaccaagtcycacgtggtgacggctgttgctaggtgtaggaagccagcaatatctgaaaccatgctttctggccagaatattaatttgcaccagtaagtatttgctgtgctcattcccagcacccctccccactcaacgtacttgcataacatccatatcctcatgcaggggctgggagtagcagtgcaagagtcatctcagagggatggcccattgataaaaaaacttctttttcaagttaattgccaaagagaagtaaaatgttcttccaatacttcgtctccaaaactgttctggcttgtgaacatctgtcaagaatatatatttccagggctccaaattgcccagattttaacatccagcttagttaagccactagagtttaactaacatgctgctccttatagaatcagcactaggataaaaaggagtttgatttcttccccgaatgcatttcgtttcttttggatggtcatacagcatag

SEQ ID NO: 529681 - DNA, 573 bp, Homo sapiens
gctggctctagtccatcctgtagccctgagcaatgactctgctcaaacaggttagagccatttaggaaacacaagcccgagcttccttaccaagtctcacgtggtgacggctgttgctaggtgtaggaagccagcaatatctgaaaccatgctttctggccagaatattaatttgcaccagtaagtatttgctgtgctcattcccagcacccctccccactcaaygtacttgcataacatccatatcctcatgcaggggctgggagtagcagtgcaagagtcatctcagagggatggcccattgataaaaaaacttctttttcaagttaattgccaaagagaagtaaaatgttcttccaatacttcgtctccaaaactgttctggcttgtgaacatctgtcaagaatatatatttccagggctccaaattgcccagattttaacatccagcttagttaagccactagagtttaactaacatgctgctccttatagaatcagcactaggataaaaaggagtttgatttcttccccgaatgcatttcgtttcttttggatggtcatacagcatag

SEQ ID NO: 529682 - DNA, 573 bp, Homo sapiens
gctggctctagtccatcctgtagccctgagcaatgactctgctcaaacaggttagagccatttaggaaacacaagcccgagcttccttaccaagtctcacgtggtgacggctgttgctaggtgtaggaagccagcaatatctgaaaccatgctttctggccagaatattaatttgcaccagtaagtatttgctgtgctcattcccagcacccctccccactcaacgtacttgcataacatccatatcctcatgcaggggstgggagtagcagtgcaagagtcatctcagagggatggcccattgataaaaaaacttctttttcaagttaattgccaaagagaagtaaaatgttcttccaatacttcgtctccaaaactgttctggcttgtgaacatctgtcaagaatatatatttccagggctccaaattgcccagattttaacatccagcttagttaagccactagagtttaactaacatgctgctccttatagaatcagcactaggataaaaaggagtttgatttcttccccgaatgcatttcgtttcttttggatggtcatacagcatag

SEQ ID NO: 529683 - DNA, 437 bp, Homo sapiens
gcaactaggcgacaccctgttagcctcgggactaatcaccagctccagcacagtcccccagtatggagggtycttacgctggacctccagatctctgccctgatggttgagccagcttctctgagagctgcttgtaggaaggtatactccaacctttactcagaccttaccttccccagagagacctgcttccatcctaactgagcaaccagactgtaataattttggaacccactcactaagtggttaatgtactttatctatcaagcagattccctgtgagctttcttctctttattctttaagcatcgtgaccctaagaagagattttttttggtacggcaatacactatgaaattcaaaaaatcatactttgatcatctccttatttccaccgtatataacattctcccttcccaggaaggacagaactaggg

SEQ ID NO: 529684 - DNA, 349 bp, Homo sapiens
ctggggggggtggggatataatctttactgcacatataytgagggtgtcttatttaaaatatatcaaaaaatattttaacaacctaagagttattgttttctaattgtggagtatagtttttatttttttcattctttattgttgaagatgcttattctttggatgattgagtatacttttttttttttttgagacagagtttttgtgctgttgcccaggctatatacctattagcataagcccctttctcactgggtgcaagcctaagcttctctgcaggtagaagctcctttatgcgaaactattcaattcccaacaacttttgcactttcaaaaagagaagaaaag

SEQ ID NO: 529685 - DNA, 627 bp, Homo sapiens
cctttaacatggggccaatgtcgctaagaagttgaaaatacagtattacaaaatcagtagaaaacaagcaacaaaacaaaagtgtctatcttcttttctttgtccaacatgtttgggtagtagtattgaaggagctctatgacaagtgcaaatgattgtaaaatgaatcagctctgctcagcatatacacagagactataaagttacttatgcaaatatagctctactgtgttaattgccacaggacttagataggtatggcagaaagatggccagatttagatgacctagacactgatgtcacactaaactcttggaattggcttcttggctttcctctctgacaagtgactgaaatgggggtagggttgaattttatgamgatgtgacacttaacccaccacacacacgcacaaattattgtatttccttcttcgtgcctgtgttatggcctgctaatggtatactttacttgaatgaactcatgtgctccaaattttctgtgggatagagattgatcatattccccattttaaggaaattacagcttgaaaaaactaaatagtgtggcaagaaagctagtaagttgcaaagtcagggatggtcccaggattctgtctctggaga

SEQ ID NO: 529686 - DNA, 585 bp, Homo sapiens
cctgtggtagtgggggtgctgtcttctaggtgtgcaagggcttgcctcccaccccccaaggaagctggggaggcgggatatgccctgagctgcctcggacagaggttctgagagaggaaggccaaggaggaaggaggagttaggaggggtctggggacctggggccccaccactccagccctttagaaatgcscatgaacccatgagactatagtgagccgagatcgtgccattgcactccagcctgggtgacagagtgagactttgtctcaaaaaaaaaaaaaaaaaaaataaagggcaggtggcctccagagagtgtctgtggcttccccagggctccccttccctgctgtccatgaatttgttccccaatacggggcctggggctgctaggccagggccattcaaactgggcagttgtaccagcctgagcccctcctgcctctctgcctaaagggaccaggccagtctgggaccagtgccctggagtctctgcatctagacctgcttcagttcctgggtatttaaccatttcctctgggggtgggagtggggggcagtcttgtgtatttggagtcatccgca

SEQ ID NO: 529687 - DNA, 517 bp, Homo sapiens
gcttcccagccaggctggcactcccacaccaggcaggagccccagcacaccgctctctgcaggcatagtgtagctggggagggcagtggttagggtgcggggactctaaactaagctgctgtattcaaacttgacttctcccttccctggcttggtgccctaagatatctaacctctgtgtgcctcagtttcccattctgtaaagcacagagtatgaggagtccaagacagtgacctaaagctttctgctgcagcccaggatcctatactagtggctaggagaccctatactagcagctaggagaccctgccagactcatgcctgccccaaggcctgcccagccacccctggtgccagctcccagaacttggcacagcatcaccccctcccaaagcccccccataggttgggtttgggtgccccacccagacctcttccaacccccgacatgggccacatcctgtcytcactgcctggtgactcatctgcttacccaccccccacccgtgctcccat

SEQ ID NO: 529688 - DNA, 507 bp, Homo sapiens
gcacagtggctcacacctgtagtcccggcattttgggaggctgaagcaggaggatctctcaagcctaggagttcgagaccagcttggacaatataatgagaccttgtctctacaaaaaaatacaagaattagctcatgcctatagtcccagctactaaggaggctgaggtgggggtaggaggatctgcttgagccagggagatcaaggtgcagagagccatgatcatgccactgcattccagcctgggcaacagagactctgtctcaaaaataaataaataaaactrttagtaagctaaggataggaggaaatttcaaacattcataagaagcctaattaataattatattcaatgttgaaatattaaaataattctaactacaaaatcagaaaaatataagctccatattttttcatttcatcttggttagaaactgtaattgaagagaaaagctataagccttagttaacaaacaacatttggcctgtgcagtggctcacatctg

SEQ ID NO: 529689 - DNA, 507 bp, Homo sapiens
gcacagtggctcacacctgtagtcccggcattttgggaggctgaagcaggaggatctctcaagcctaggagttcgagaccagcttggacaatataatgagaccttgtctctacaaaaaaatacaagaattagctcatgcctatagtcccagctactaaggaggctgaggtgggggtaggaggatctgcttgagccagggagatcaaggtgcagagagccatgatcatgccactgcattccagcctgggcaacagagactctgtctcaaaaataaataaataaaactattagtaagctaaggataggaggaaatttcaaacattcataagaagcctaattaataattatattcaatgttgaaatattaaaataattctaactacaaaatcagaaaaatataagctccatattttttcatttcatcttggttagaaactgtaaytgaagagaaaagctataagccttagttaacaaacaacatttggcctgtgcagtggctcacatctg

SEQ ID NO: 529690 - DNA, 657 bp, Homo sapiens
ggaatggccaggttctgcccagagctctggtcaatgatgtctaaaaytcctctgattggtggtctcggccttatccattgccaccaaaaccctctttttactaagaaacagtgagccttgttctggcagtccagagaatgacacgggaaaaaagcagatgaagagaaggtggcaggagagggcacgtggcccagcctcagtctctccaactgagttcctgcctgcctgcctttgctcagactgtttgccccttactgctcttctaggcctcattctaagccccttctccaagttgcctctccttatttctccctgtctgccaaaaaatctttcccagctcactaagtcagtctcacgcagtcactcattaacccaccaatcactgattgtgccggcacatgaatgcaccaggtgttgaagtggaggaattaaaaagtcagatgaggggtgtgcccagaggaagcaccattctagttgggggagcccatctgtcagctgggaaaagtccaaataacttcagattggaatgtgttttaactcagggttgagaaaacagctaccttcaggacaaaagtcagggaagggctctctgaagaaatgctacttgaagataccagccctaccaagggcagggagaggaccctatagaggcctggg

SEQ ID NO: 529691 - DNA, 657 bp, Homo sapiens
ggaatggccaggttctgcccagagctctggtcaatgatgtctaaaactcctctgattggtggtctcggccttatccattgccaccaaaaccctctttttactaagaaacagtgagccttgttctggcagtccagagaatgacacgggaaaaaagcagatgaagagaaggtggcaggagagggcacgtggcccagcctcagtctctccaactgagttcctgcctgcctgcctttgctcagactgtttgccccttactgctcttctaggcctcattctaagccccttctccaagttgcctctccttatttctccctgtctgccaaaaaatctttcccagctcactaagtcagtctcacgcagtcactcattaacccaccaatcactgattgtgccggcacatgaatgcaccaggtgttgaagtggaggaattaaaaagtcagatgaggggtgtgcccagaggaagcaccattctagttgggggagcccatctgtcagctgggaaaagtccaaataacttcagattggaatgtgttttaactcagggttgagaaaacagctaccttcaggacaaaagtcagggaaggrctctctgaagaaatgctacttgaagataccagccctaccaagggcagggagaggaccctatagaggcctggg

SEQ ID NO: 529692 - DNA, 508 bp, Homo sapiens
ctgaggtgaggggccttgaagctgggagtggggtttagggacgygggtctctgggtgcatcctaagctctgagagcaaacctccctgcagggtcttgcttttaagtccaaagcctgagcccaccaaactctcctacttcttcctgttacaaattcctcttgtgcaataataatggcctgaaacgctgtaaaatatcctcatttcagccgcctcagttgcacttctcccctatgaggtaggaagaacagttgtttagaaacgaagaaactgaggccccacagctaatgagtggaggaagagagacacttgtgtacaccacatgccttgtgttgtacttctctcaccgtgtaacctcctcatgtcctctctccccagtacggctctcttagctcagtagaaagaagacattacactcatattacaccccaatcctggctagagtctccgcaccctcctcccccagggtccccagtcgtcttgctgacaactgcatcctgttccatcacca

SEQ ID NO: 529693 - DNA, 556 bp, Homo sapiens
tgggagtggggtttagggacgcgggtctctgggtgcatcctaagctctgagagcaaacctccctgcagggtcttgcttttaagtccaaagcctgagcccaccaaactctcctacttcttcctgttacaaattcctcttgtgcaataataatggcctgaaacgctgtaaaatatcctcatttcagccgcctcagttgmacttctcccctatgaggtaggaagaacagttgtttagaaacgaagaaactgaggccccacagctaatgagtggaggaagagagacacttgtgtacaccacatgccttgtgttgtacttctctcaccgtgtaacctcctcatgtcctctctccccagtacggctctcttagctcagtagaaagaagacattacactcatattacaccccaatcctggctagagtctccgcaccctcctcccccagggtccccagtcgtcttgctgacaactgcatcctgttccatcaccatcaaaaaaaaactccaggctgggtgcgggggctcacacctgtaatcccagcactttgggaggcagaggca

SEQ ID NO: 529694 - DNA, 561 bp, Homo sapiens
cctgccagcccagtgccctcaggcagcaaagcccagcagtcactggtcccccaaggccgcccacagatctatgcaaggtgatgcagcaggggctatggacccacccacacccaagcagggaggcacgatgacaaggcccgggcaggtagggggacatccggaaagcaggctcagctccacccctgagaaatttccgtctaaatccaggagatccttgattcagcaagaaccttccctcatgtccgaggctgttaaacctaaagccagttagggcagaggtcagaggggtggaccaggagcaagtgggtcgagggtgagcaagtgttgggagtggggatagaaactccatccatctccgactgctctgctcgcatatctggctccagggcccacctggtatgtcagagggaattagaacggccttgtgaggaggctcaggagaagggctcctgtgcccaccggccargtcagcactgggcctaacgccaccacagcaaagcccctcagtgcagagggcccagctatacggaactgggcattgcttagcctggagggaatagg

SEQ ID NO: 529695 - DNA, 426 bp, Homo sapiens
tctgtggcatatcatctgccccttttgtaaaacttataaacttgtggttacttgtttagcgtctctttcctccccagaccataagcaacataaagacaaagggtacatctagcacatagttcgtgttcaataaatgtttgttttcatcatgccacgggaagtgagatataccaagtattcaaaaaagtgttcaaatcattactaacagtgcttgctctgtgctggctgagtccagctgggcccagaattccacggttctaaatggcgcatattccatgtgcataggctgattgaaaatgtattaaacctaaattttwaaaaaaaagcacatgatactacacatgtcatgatgaatgaatagacagaactcctcctgaatataattacaaagttctgatccatctcaggaccctgtgtcttctctga

SEQ ID NO: 529696 - DNA, 645 bp, Homo sapiens
acttcaaaagaataattgctatgaatgaaatcaaattgttgttccccctgtgtacactctgaatttttcagcaggtaacagcttgcttacaaaagagatgatgaatctttttgaagaattcaagttgtagaagtttaagtctgtggcctatgtcttactatcagtagggaatataatattaagtgctaattgagtacttaaaatgtctatttcaagaaagtgaaaattattgcttatagagaattaaccacaaaacaatattgagatatatgacaatgatatgttaattattacattatttttcttttcttctttgttgttatcaataaatggctcaagatttttcttagatcttcaccttgtttccagttttcacagatakagccatatttctatcaaaattcagtagggctaagtgccttgtactcaaagcttattctgtgggccccttgaaaagtaaaatttacaatatggtctttcaaatttttccgttaatgaaaccgctggacaatatctaggatatacgcaatacgtattaaatgcttgatatcataaattatattttgggaaatgtacaagtatgagtttgcgtgtataagtatgtatgtgttggaaagagaagagagttataataagaaagcaatg

SEQ ID NO: 529697 - DNA, 631 bp, Homo sapiens
cacacccctgttgcacatccatcctgtgttgggggccagggaactctcccctcacattactttgtacaaatgatgttgctcagtcattaaccattggccctctcctcaacgtagtagccatctcagcacytctgcctctagaatccaaagcctaaagtgatctcttctctgaactcctggagctaattatactaagacatatacgacaataaatcgtcttttagcatatattgagcaatcacttaaacatttaattttatttgcttatatgttttgttatatgattacaatctcttcaatagaaaaaaaaagtaaacattaagaccagtgttgtcaccatgaacatctgatataattttcagagtgaagagtccaagaaaagtatactattagaaaataacttccacatgatcatcctacatattttctcatttcaatgtttagtttatatttgccatacatttgtgattttaccagattgtctttcctggtaggcaaacaagtatttatttgtatttatccattaatggacattccccaaatttatattttatgcaaagagttaatgtgtcagttccataaaacatacaaagatattgtgtttaataacactgttagttttagaaactgc

SEQ ID NO: 529698 - DNA, 549 bp, Homo sapiens
aatatggattcatgttcattgaactcatgatggtgggttataatccagtactatgttctttattgctggaattgctttagctttggccattactttcctactttctgacactacaagagatccacccttattttgtatttgttttctcagtgcctagaatcaactgtttctctaattgcccttattctttttagttgaaacttatctttagaatccaagtttaggcactgagtatgcttaatagttttgcagtatygttgcttcttggcctcctagaaaatagaactaggtaaaattgtatgtatatgctaacacatttatatacatatgcctatgattatttttgtatgtattcaaatgtacgtattttaagctaaacatatttatatatttttaaacatgcctctgatagaatgcacttatatgaaccacattttatttcatttattcctcgcaaagactctatggcgtgggtactattcttaaccccattttatacatgaagaaaaataaatttaagaagattaattaacactgagggaggagtaa

SEQ ID NO: 529699 - DNA, 549 bp, Homo sapiens
aatatggattcatgttcattgaactcatgatggtgggttataatccagtactatgttctttattgctggaattgctttagctttggccattactttcctactttctgacactacaagagatccacccttattttgtatttgttttctcagtgcctagaatcaactgtttctctaattgcccttattctttttagttgaaacttatctttagaatccaagtttaggcactgagtatgcttaatagttttgcagtattgttgcttcttggcctcctagaaaatagaactaggkaaaattgtatgtatatgctaacacatttatatacatatgcctatgattatttttgtatgtattcaaatgtacgtattttaagctaaacatatttatatatttttaaacatgcctctgatagaatgcacttatatgaaccacattttatttcatttattcctcgcaaagactctatggcgtgggtactattcttaaccccattttatacatgaagaaaaataaatttaagaagattaattaacactgagggaggagtaa

SEQ ID NO: 529700 - DNA, 571 bp, Homo sapiens
taattcttacaaagtgagactcaaaatcatattgtaaatgcactatatcaaatggagtattcgttagtcaatcagaaacttattttcaatttctttctaaccttattgttaagttttatctcctactactactgtatattttatggctctctaaaacttgaaagtgtgtgtgtgtgtgtgtgtgtgtgtgtgtgtgtgtgcctactaatataaagacagtagaagaaacatatttgtgttcaatggcctaaacaactyacacctatgaatgtttagaagacataccttagaaattattacaattaaaatgttgcatttatttgtggcacaaagaactagatatattttgatggcatcacatttttatcagtcaaaactccacgaagaaacagaaacatttttttctattagaaatagttgatgctaatttccacatattgtaattatcttgggcataacacaccaaaaagaagtgagatttgttcagccaatgaatgtttattaagcactaagcctatactagttagtgttcttagtccccatagtaccaacctagccaccttttatgcaa

SEQ ID NO: 529701 - DNA, 571 bp, Homo sapiens
taattcttacaaagtgagactcaaaatcatattgtaaatgcactatatcaaatggagtattcgttagtcaatcagaaacttattttcaatttctttctaaccttattgttaagttttatctcctactactactgtatattttatggctctctaaaacttgaaagtgtgtgtgtgtgtgtgtgtgtgtgtgtgtgtgtgtgcctactaatataaagacagtagaagaaacatatttgtgttcaatggcctaaacaactcacacctatgaatgtttagaagacataccttagaaattattacaattaaaatgttgcatttatttgtggcacaaagaactagatatattttgatggcatcacatttttatcagtcaaaactccacgaagaaacrgaaacatttttttctattagaaatagttgatgctaatttccacatattgtaattatcttgggcataacacaccaaaaagaagtgagatttgttcagccaatgaatgtttattaagcactaagcctatactagttagtgttcttagtccccatagtaccaacctagccaccttttatgcaa

SEQ ID NO: 529702 - DNA, 596 bp, Homo sapiens
aatttcaaaattgataatgagctgaacattttagaaacatattatatacacaaaaagttaagaaaaataatatcttatccaataaaatcgaagtcatgaaaaacctctggatatgttctgtgccctttctgtgatatttaccttgttaggttttgtgttcttttgaaagtctttcttcttattaaataaaaggtcaagtaaaattcagtccatatttatcattcttctaaaaatcctgtactggaaaatattctattaacctgttctctacaggtgcctctctaaatgatcttttttctttttattttttmttttttctgcattagttttacctggccttagctgagaaaggaaggatttacagagctgacaaagcttagctcctcatgtctgtctagcatgctctaatgaagggaattaactcaatcaaaaaaaaaaagtataatagagattcttagaccacttaagtaccaaccaaccaccttcttattacaacattcacagtcagaaaaggagatttaatttcatatgcttatattaaaaaggtcatattaaatagaattttcatccacaaaaataaggtattttgaattaca

SEQ ID NO: 529703 - DNA, 640 bp, Homo sapiens
aagtagattctgtgatgttcccacactgacacaatcrcctaataatgcatttctcagaacatatcgttgtcgttaaatgatgcgtgactgtattgtattcattttatatgtaaataaatttaaaagttgaattttaaaaattgttttcacacttattatttattcgcatatcataaaaacctgcagctttctggaatttaaaacaaaagcttagtttgctgttttcccttgagatggttaggttgtctaaagtttccaagtataaaagccaatgtaaaactttgattattctttgacattccttcaggatctaatttatgtgtttccttttgtgattccctgctcccaaagcagactgcgttgcctactcatctgtgctccagtggcgaaattcttaattctgccttagaaaatgtattgcatataaacacttcccagatcttctcagacatatgttgaagttattttattggatattaaaggaataaagaccttaaaccattaaggttttgaagacacttaggttacatttctctatataaactcattcatatgttacgaattcagaatggcatctgagatcctagatcccataatttgggtcttcttactgaaggataaatggccaaagaggaaaaac

SEQ ID NO: 529704 - DNA, 640 bp, Homo sapiens
aagtagattctgtgatgttcccacactgacacaatcacctaataatgcatttctcagaacatatygttgtcgttaaatgatgcgtgactgtattgtattcattttatatgtaaataaatttaaaagttgaattttaaaaattgttttcacacttattatttattcgcatatcataaaaacctgcagctttctggaatttaaaacaaaagcttagtttgctgttttcccttgagatggttaggttgtctaaagtttccaagtataaaagccaatgtaaaactttgattattctttgacattccttcaggatctaatttatgtgtttccttttgtgattccctgctcccaaagcagactgcgttgcctactcatctgtgctccagtggcgaaattcttaattctgccttagaaaatgtattgcatataaacacttcccagatcttctcagacatatgttgaagttattttattggatattaaaggaataaagaccttaaaccattaaggttttgaagacacttaggttacatttctctatataaactcattcatatgttacgaattcagaatggcatctgagatcctagatcccataatttgggtcttcttactgaaggataaatggccaaagaggaaaaac

SEQ ID NO: 529705 - DNA, 640 bp, Homo sapiens
aagtagattctgtgatgttcccacactgacacaatcacctaataatgcatttctcagaacatatcgttgtcgttaaatgatgcgtgactgtattgtattcattttatatgtaaataaatttaaaagttgaattttaaaaattgttttcacacttattatttattcgcatatcataaaaacctgcagctttctggaatttaaaacaaaagcttagtttgctgttttcccttgagatggttaggttgtctaaagtttccaagtataaaagccaatgtaaaactttgattattctttgacattccttcaggatctaatttatgtgtttccttttgtgattccctgctcccaaagcagactgcgttgcctactcatctgtgctccagtggcgaaattcttaattctgccttagaaaatgtattgcrtataaacacttcccagatcttctcagacatatgttgaagttattttattggatattaaaggaataaagaccttaaaccattaaggttttgaagacacttaggttacatttctctatataaactcattcatatgttacgaattcagaatggcatctgagatcctagatcccataatttgggtcttcttactgaaggataaatggccaaagaggaaaaac

SEQ ID NO: 529706 - DNA, 341 bp, Homo sapiens
agcatttggtctaacggcagtctaggatattagcagggatatggctgcrgagacaggaacagccaagttgaagaggaccctgcagagaccacaccaaaagagctttgctgtgatcctctgggtaatgcaaactgaaggtttttaacaggaaagaacactattgtatctgtatttcagaatgataggcagcagagaagaaaaatgggtgtggcagagttagttaagactttggtaactatgctgttgacattatatctaaagtactaaatttaaacctaagtactacatttaaacctaggcagccacatttttaaatgaacaataacagaattgtccaaaaa

SEQ ID NO: 529707 - DNA, 398 bp, Homo sapiens
gctgctggagcgcggcgcctcggttgcggccactagtgcagggatgtgcctcggcccgtcctcattgaaatgcggcgcttcgcacagcctcactccagcctctctctccagaggagggcggcggcggcggcggcggcgggcgcgctcccttttcttgtctcactcgctcacacgccctcccgtctccctcctcctcctcctcctccgcgtgcgcgccccgtcgcccccgcccttcttggcagggcgcacccaccacggctgcgccccaggtcctcctccctcccagcgccctcttcccaccgcagcaacctcggtgcatctggcttgactacacccctaaacctccctagtccccacaagtagtcttkgggagatgggggcagatcagatggtggaag

SEQ ID NO: 529708 - DNA, 639 bp, Homo sapiens
tgcttcatcatctatacccaaatgaacattctttaaaagtccaagacaaatatcataaagggtgactgggaaatgctgaagaaattttaatttaaaaacaaatgagaattgaaatatagaaaacactaggcttgtttggcattctaaaaccttttttaacggcaacttttagttgagtcccaagtttgtagaacaatataagtacactgctctaggaagaaaacctccaattactaggaaaatgtctttcctgtaaatctcaacaaggcctgaactacttcaagatgtgtgatttgctgaccattcactctgcactgttggctgagtcaactctttacagcttctcgctagaaccctttcagggttatgtcacattctgcatcaataaccacacccccacataatcacatgattctgtgacccatgtcrtatcagtgcatcaggttactacctcataagatgcattagatgtacagatttttttaaaaaacaaacccaaggaactctagccatccagtaaataataggccgtgaaggtttattcttccatcgacaaaatttccctcaactaacaggcattgtgctagttgttgaggtcacaaaggccaaagacatggctctgctgttaggcagacagac

SEQ ID NO: 529709 - DNA, 676 bp, Homo sapiens
gtaagttaacaggagctctcacatttggctgtgcatcggaatcatcctaatcatcctacgcagagtattgggcctcattccagagctatggaatcagaatctctgggagaaagtccgagaatgtacagttttaatcaacgtatgagtgcttctgaggccctgccaggtttggaaatcaatgacatatggttttagtttgtatctattctgtcccctatgggtatctgcactctttatgtgaattgggtgtgtttaagaggaataatcaaataccagcaaacacattttgtagtgtttaaatgcagattcccaagcaccagggagcaaggcttaccaaatctgaccctgtaggggtatggcctgggaatctgcattttaacaaacccccccatcctctcttcccgaaatgatttccttgtatagagaaacagtacccctttgggaaccaaactggaacagggcacaccacttcaatgaatgargcaggctggatgggaagggaccaaagggaagctgatgccccatgtagagggaggcactgctctgcctgagcagttcgtcactatttttccagactagaaatagagccagtattctctatgttttgaatttttcagaagctagaaattcagagcaatttaatttcttaacattcaaaaacagccaataaacaaac

SEQ ID NO: 529710 - DNA, 594 bp, Homo sapiens
tatttgagagatgtggaacctgggattcaacttctccatcagtgtttttattcctctcagtacagatctgccattttctggcccccattgttgccattaagaggcaagctatcaaattaagcatcacttcttgaaaggttgtatgtcttttctccacrgaagactttatcttctcacggttttcagttttcattttgctgtgtccaggagtgcagttctatgcatttatcctgccttatggttatatttatagcttttttttttttttttttggagacagagtctgactctgttgcccaggctggagtgcaatggcacaatctcggctcacttcaacctctgcctcccaggttcaagcgattctcctgcctcagcctcctgagtagctgggactacaggcatgtgccaacacacctggctaatttttgtatttttagtagagacaaggtttcgctatgttggccaggccagtcttgaactcctggcctcgagtgatccacccacctcagcctcccaaagtgctgggattacaggcttgaaccactgcgcccagccatagctgggttttctcaatctgtagatggctttctaaaa

SEQ ID NO: 529711 - DNA, 461 bp, Homo sapiens
taccagtactctgagctatggaagacttggaaggtctcctctttgtatccctggggccataaaactacgccacctggtcacaggtcccgttcttgatggcttagaaatcttaccactctctgatcccaggcaggaatatcccagtggcagaggagatgagcacagttcttcattaaatgctctgaaaaacaaccatatcatttcttatacatcctccttggaggatctcaggattatcttggcttcttcaaatctaattaaaccatgaagccaccctatgaattagtggaccttttcatccctatcttgcaagttgaaaaacttgtttggttaaattattatgtcaggcatactaatttaggcatataagaagtgcaagcaacattcaacacttgctccatattttatccactgggttctacttggcaggtrccaaagaagaaaaatttagcaccttatca

SEQ ID NO: 529712 - DNA, 378 bp, Homo sapiens
tagattcccccttgaaaattataatactacccatttgatctctcataacaaaataacacatgcatctttattcaatagatttgtgtgtgtgtgtgtgtgtgtgtgtgtgtgcataaaatatgttatgagatttaatctccaaaatgtcagagagtactcaaacaaaaagagccaggtagagatttcttagtctgttttgtgttgctataacagaatactacaggctgggtaatttagaaacaaaaggacattatttctcatggttctggaggctggtaagtccaatatcaaggtgccagtgtctggcaagggcctttgtgttgtgtyactccatggcagaaggcaggagggcaagagaacatgagagagcaagacagg

SEQ ID NO: 529713 - DNA, 530 bp, Homo sapiens
tggatgcctttaccaactgtaagagaaatgggaatgatgctgccmgcccccggtgaactgagatcagtgaattcacccagcatctgatcccaggaagacgacctcagggggtactatattgcttcttcaagaagacttctgaaatttgtcccaatgtctaaggaattaaaatgtgctttaaagaaagggtaaaattgaagcattttacttcctattttgcttctgtctatttgctcaggaattttccatagaggcttgaacaaataatttactacagggtttatatattcatgcaaataacattatttctctagaagactacactctttgttctttcagatgctggaatatttctgtttcctcttgcagttggtttaaaaggatttcgatgcaaatacatggcagcaaatattctgtagtcttcccaagctcttccttatatactgagtaagaaaaaaactgtgctcctgaacttgggttccctgttgcttccagcaggtataggatttgacactgccagagacaaaaca

SEQ ID NO: 529714 - DNA, 612 bp, Homo sapiens
tttactcagagcttgctatagcgatggggtcagccaccatcaactttgagttcttccattttggcaagaactcaaaggcatgcagaggagtgggaaagcttagtagtggaaaaaagggaaggctttccgtacaccaggattggaggctgttggtgtggggaagctgtaggcaggctaactaggagtggggctccctatgggattggttagagctgcatatttggctttctctgatttgtcctacattggaaggggggacaaaaatcaggaaaactgtcagttattaatcaagtcctagccacttggggatgattattacagaggttattgttcagcttcctgaattgttatcaaagatagtagtctgacttcttataagtctgactcataggttgcaggtgggcttcctgggctgtttattgtagatgtcgatactggggttgtttttctgagcagcttgctgcagcttgtggccctgagttctacttttttatgtggtccgaccattgtccatctgtatattcagtctttcacttctcagggaggcattctctgacaagctcacctaaaatgccaactctccccsactcccttcctttgtgtttatcttta

SEQ ID NO: 529715 - DNA, 437 bp, Homo sapiens
cttagatgaatcaacataaacagtttcacacaattagcaggagatctgacttacagccaccttgtaccaaattctgcttcagcatcaaagygtgttggtgtagttctggcctacgtagcaagccctagaaaacaagaggaaagggaaagagatatatttactaatgtgaaggaaggtacatttactaagaacaaatattttctctagccctgtgataggtgcttcccttgtgttaactaagtaatactcatcaacagccattatgtaggtaaagaaactcaaattcagagaggttggataatttatcaaaaatcacacagtaattgaagtcattttttttagcatccttctctttgtgtccaaaatccatactttttcccatacaacatgctactcactggttaaagtacaattccttatgatttatctgaagtgac

SEQ ID NO: 529716 - DNA, 614 bp, Homo sapiens
ctgttgcaaactttatgtcaatttacttataatattttaattataattgtaaaagtaatatatacttactatacataacttaaaaataaagaaacatggagaataaattgaaaaacctgtaataccactacttagtggtaacctgtggtaataagactttcatatattttgggtagtaatattttaaatttatatatgtatataccatttattgaattcctgctgtgggtaggactagagtagtcatttgacaaagggtctctcatataaattcacaaaaatgttctattagacaaattctattcctctgattttataatgacatcctgatgcccartgaattttcagagaatctcaactaaaaaacagtaaaagtgccactaaaagagtctaactccaagcctcatgcctctaacctcaatgcttcattgtgtcttatgtatgtatctatacatacatacatacataacactatttggaacttagaatcttttattttgattttcatgatggcaatcacaagcatttccctctgttattaaatattcccagaaaatgttattctgatggttggatagtattttgttgcatgagcatctcagattgtaatattg

SEQ ID NO: 529717 - DNA, 574 bp, Homo sapiens
agaacagccgggagactatgacatcaagatatttcaaatgtggaatttatgactggagagtcgtttcaaaggcatctcaaccctttgatcttaactgtggcaggatcaaagtcccattcggccagtgagtaagagcactgacatgggtctgttgatgcggctctttggagcaggaagaagagcaccgaaaaatattccttctgtgtccactgtgctcaaaaagaaagattgtgtatcatttcaactaaaatcacagaaatttactagtggtttgctactggattttaaatgccctttcatatacatatttacaatagaaactataataatatgcaatcatttmgcacccaatattcctaaaagtggccacttgaaggaataattgcatagccatggtacaattctactaaagccaaaatacataattatcccttgatccccttcccaaaatatgttatgtgcctcatagactgaactgagaaaaagcattgtgcccagtgcgaactcaggcagccttgcctggaaggtgctactctctctccccaacgcagagcaggaagtgagaaggaactca

SEQ ID NO: 529718 - DNA, 516 bp, Homo sapiens
aaatcagcttcctttttattatcaccatgggttggcaattctaaataatgtcagatataagatgttccccctccaaatagcttttgttggtttaagttccagacaattgctatagttacttgtggatacatacatgcgtgtacacacagacacacacacacacacacagttcaaattagcccattttattttttagccttaaataaaccttgtgttctatgtrgaagttaattgggagaacttctgttttacagagagtctttaccttgcagcctcagtgacacatgttaacctacaatggctctgaatcctttacgcttgctttggtacaacccctgtatttattagtgtccctgcatttaaaccatgtgttctacataaacaatagtaggatggggattatgaagatgcaaataaataaacagaacttgaattacttcaattctggccctttttctaaagcgatgaatcaaacaataccatagaaacagaacagaaacaaattgtgatacatct

SEQ ID NO: 529719 - DNA, 566 bp, Homo sapiens
ctttgtatttttagtagagatggggtttcaccatgttgtccaggctggtctccaagtcctaggctcaaggcatccacccagcttggctttccaaagtgttgggattataagcatgagccaccatgcccagcccccatgtcctttctaatcgtcagagatcagatgactcagagatatacaaaggagaacaaaagcaaataaatcaccaggctatagaagcagaaattcctgtggccttccatttttrtctcaagaatttttctttattgccccaaatgctccagccaaaggaaacaggaagttctgatactattaggggacctccttatatacaaatcagcagtgcacaaactgacagaacatttctcatctatggggcagcaggagaggaagggcttctgtgacacttggttcaagtgtttctgcttccccacactgcccctacccaggtctagaaaggatccatacaccttgcggccagcatttcactctcctgttaggtgatggctcacctgacctgtctcaaaccaggctggggttaactcaactcacaaatctcccagtcc

SEQ ID NO: 529720 - DNA, 566 bp, Homo sapiens
ctttgtatttttagtagagatggggtttcaccatgttgtccaggctggtctccaagtcctaggctcaaggcatccacccagcttggctttccaaagtgttgggattataagcatgagccaccatgcccagcccccatgtcctttctaatcgtcagagatcagatgactcagagatatacaaaggagaacaaaagcaaataaatcaccaggctatagaagcagaaattcctgtggccttccatttttgtctcaagaattkttctttattgccccaaatgctccagccaaaggaaacaggaagttctgatactattaggggacctccttatatacaaatcagcagtgcacaaactgacagaacatttctcatctatggggcagcaggagaggaagggcttctgtgacacttggttcaagtgtttctgcttccccacactgcccctacccaggtctagaaaggatccatacaccttgcggccagcatttcactctcctgttaggtgatggctcacctgacctgtctcaaaccaggctggggttaactcaactcacaaatctcccagtcc

SEQ ID NO: 529721 - DNA, 580 bp, Homo sapiens
cagggtaaccaatttgttaaagctattaacctggaaagtcatatcatcctttgattctcraaatttttagttttttgctttttaaaataatttattactttccttttatccacttagatatgaatttaataaataacccttattggaagattcaaataacttttcaaaaaaggaactttaatacaacatacgtaagtgaatttagttgccatggaagttgattgtagattcttttgatcatattttattcatcttattttttcccctccagcatctcttggcaaaagaaattagtggagagattttaacggtctttcgggtcattggttgtttttccaaactggaaggttatgttggatgcactgatgtggtgggtgagcagtcccagggatgtctgcttaatgactgagagcactggggtccttaggaagaaagtctgtgagggtctctgactgtctgcagacactttctccactttctcctcatctgttctgctgtgtctccttactggagtatgattacagatgtaaaatccctgtaaagtgaccagcagagcagcactgatgcagatgaaggtgtg

SEQ ID NO: 529722 - DNA, 580 bp, Homo sapiens
cagggtaaccaatttgttaaagctattaacctggaaagtcatatcatcctttgattctcgaaatttttagttttttgctttttaaaataatttattactttccttttatccacttagatatgaatttaataaataacccttattggaagattcaaataacttttcaaaaaaggaactttaatwcaacatacgtaagtgaatttagttgccatggaagttgattgtagattcttttgatcatattttattcatcttattttttcccctccagcatctcttggcaaaagaaattagtggagagattttaacggtctttcgggtcattggttgtttttccaaactggaaggttatgttggatgcactgatgtggtgggtgagcagtcccagggatgtctgcttaatgactgagagcactggggtccttaggaagaaagtctgtgagggtctctgactgtctgcagacactttctccactttctcctcatctgttctgctgtgtctccttactggagtatgattacagatgtaaaatccctgtaaagtgaccagcagagcagcactgatgcagatgaaggtgtg

SEQ ID NO: 529723 - DNA, 580 bp, Homo sapiens
cagggtaaccaatttgttaaagctattaacctggaaagtcatatcatcctttgattctcgaaatttttagttttttgctttttaaaataatttattactttccttttatccacttagatatgaatttaataaataacccttattggaagattcaaataacttttcaaaaaaggaactttaatacaacatacrtaagtgaatttagttgccatggaagttgattgtagattcttttgatcatattttattcatcttattttttcccctccagcatctcttggcaaaagaaattagtggagagattttaacggtctttcgggtcattggttgtttttccaaactggaaggttatgttggatgcactgatgtggtgggtgagcagtcccagggatgtctgcttaatgactgagagcactggggtccttaggaagaaagtctgtgagggtctctgactgtctgcagacactttctccactttctcctcatctgttctgctgtgtctccttactggagtatgattacagatgtaaaatccctgtaaagtgaccagcagagcagcactgatgcagatgaaggtgtg

SEQ ID NO: 529724 - DNA, 580 bp, Homo sapiens
cagggtaaccaatttgttaaagctattaacctggaaagtcatatcatcctttgattctcgaaatttttagttttttgctttttaaaataatttattactttccttttatccacttagatatgaatttaataaataacccttattggaagattcaaataacttttcaaaaaaggaactttaatacaacatacgtaagtgaatttagytgccatggaagttgattgtagattcttttgatcatattttattcatcttattttttcccctccagcatctcttggcaaaagaaattagtggagagattttaacggtctttcgggtcattggttgtttttccaaactggaaggttatgttggatgcactgatgtggtgggtgagcagtcccagggatgtctgcttaatgactgagagcactggggtccttaggaagaaagtctgtgagggtctctgactgtctgcagacactttctccactttctcctcatctgttctgctgtgtctccttactggagtatgattacagatgtaaaatccctgtaaagtgaccagcagagcagcactgatgcagatgaaggtgtg

SEQ ID NO: 529725 - DNA, 542 bp, Homo sapiens
ccaacatggctcagtttactgattccgggaaaagtactttgctgcatttcagaaagatgtttaacaacaaaactgacaaaaggttatctgattatttgaatagagatttctcccaacaggatatacaaatggccaataagtgcatgagaagatgttcaatgttattagtaaatgcaaatgaagaccacagtgagatgtcacttgcagccactaacttgtctgcaatcraaaggtagattacaataaggatgtggagaaactggaaccctcataggctgctggtaggggtaaacagtggtatgtatacatatgtaacaaacctgcacattgtgcacatgtaccctagaacttaaagtgtaataaaaaaaaaaggaaatgaaataaaaggtacacaaacttaaaatgaaaagaaaaaaaaagagtggtgcagccactttggaaaacagtttggtagttcatcaaaaagttaaacagttaccaaatcacccagcaactccactcctaggtctatattcgagagacttgaaaacatacattcatgc

SEQ ID NO: 529726 - DNA, 542 bp, Homo sapiens
ccaacatggctcagtttactgattccgggaaaagtactttgctgcatttcagaaagatgtttaacaacaaaactgacaaaaggttatctgattatttgaatagagatttctcccaacaggatatacaaatggccaataagtgcatgagaagatgttcaatgttattagtaaatgcaaatgaagaccacagtgagatgtcacttgcagccactaacttgtctgcaatcaaaaggtagattacaataaggatgtggagaaactggaaccctcataggctgctggtaggggtaaacagtggtatgtatacatatgtaacaaacctgcacattgtgcacatgtaccctagaacttaaagtgtaataaaaaaaaaaggaaatgaaataaaaggtacacaaacttaaaatgaaaagaaaaaaaaagagtggtgcagccactttggaaaacagtttggtagttcatcaaaaagttaaacagttaccaaatcacccagcaactccactcctagrtctatattcgagagacttgaaaacatacattcatgc

SEQ ID NO: 529727 - DNA, 411 bp, Homo sapiens
tttctccacgcatccatgggcttttctccacggtccttgttagcggatggctgctggcctggggcatttcagtttttgaaagtctctgaccagacatgcactcatgcagcgagggactctgaaggttgtctcgaggcccagatcacagaatctgagaggcaatggggctttacagatggattccccaagggttccgtttaaggagytctttccatttcagccactgttttgagggtcaatgcaatttgtggttccccttccccaacctgtaggttacatgaaaactaaatctggtctttaaagaactatttattgtctacggagttttaggacattatagttactgttgaggagagaagacaattaaacaaataccaatacaagaaaagtcctagttggtaaatactgaga

SEQ ID NO: 529728 - DNA, 470 bp, Homo sapiens
cgtttcaatgtgtgtttccctaccagacccatgtgctgaacccagctgtagctcaccagagtttgccttctttgctaagcaagyctgccctccaggcttggcacccatttctgaaacagagatgtttcacagcgttagcacccgaagggcctggactccatcagctgcccaggttgcatttccagaacattccctcacatctggaactctatccacatcgcaaccagaggggcctacacgccccctaaggccaaagacatcacccttttatagtggcctcgttcttctctgagacagatgaggtctgggagtcctgagagtggccttgtgtgacccttctggtggcagcagggaagagtgtggcgatcaaactcggcagagccacggccaaagggctgagatgtccagcagccccatgtcccactgacctggagaaaacacacagcagccactgctttaccgactttggc

SEQ ID NO: 529729 - DNA, 529 bp, Homo sapiens
gagaaagattattgcaagggaagaaaggataagatgaagttttaaaatttaaatcttattttctaattttctaggtttcattaaaattgtagtatgaatacattttctggaaattctagtcyacaggttaaccactgtctcctcctcatctttcctttattcgctttgatggatgtagctcacagaacagtggtaggggtgccaacttctggggccaaatctatttccaaattcaaacaccaaaaatgtttgtgaattgagactgttttgtgattcatccaacttcaattttaccaattccatcaagggaaatattagttcattctggatgtaggtttgagtttctgttgggggctaatttactcacagaatgaatatactttgctccttatcttgcacatgcatagtctgcgataatgtaaagttgtaggataggaactgaagccatagctgattaaaaaaaaaaaaacagattggttcattatatagctcatttaaactttaaaagggcaaataaaaaatactgtat

SEQ ID NO: 529730 - DNA, 622 bp, Homo sapiens
ctggcctccaggagctaagggcctcagtcctacaaccacaagtaactgaacccttccaacaaacacagaagcctggaagaacaatcaaaagtttcagatgggaatgtagcctggctggcaatttgattgtagccttggaagaccagaggagaggatccmgttaagccatgcctggattctcaacatacagaaattgtgagataaaacatgtgttgtttaaagctgctaggtctatggtgatttgttatgcagcaattgaactaatgcagtaggaaaagtactggtttagtggtcaaggcccccaggtaaaatcctccagtgtgtaaccaactagagaatgaatctgaaatatttctgttattttaaaaaataactgaagtgtcccatagcttatcacttcaatcaacattacatggggaacaatgagttgcttctggttgtacctgccctaccatgagagatgggcgactcattgaaaggaaacaaaaaggtagatgggtcctcttcttctgtgtgtgtctgatattcttggctggcctgagattcaacatgtatttccccaggccttctcacattctgtttccaataatgggatctttttatttagtgcctgcagatagag

SEQ ID NO: 529731 - DNA, 622 bp, Homo sapiens
ctggcctccaggagctaagggcctcagtcctacaaccacaagtaactgaacccttccaacaaacacagaagcctggaagaacaatcaaaagtttcagatgggaatgtagcctggctggcaatttgattgtagccttggaagaccagaggagaggatcccgttaagccatgcctggattctcaacatacagaaattgtgagataaaacatgtgttgtttaaagctgctaggtctatggtgatttgttatgcagcaattgaactaatgcagtaggaaaagtactggtttagtggtcaaggcccccaggtaaaatcctccagtgtgtaaccaactagagaatgaatctgaaatatttctgttattttaaaaaataactgaagtgtcccatagcttatcacttcaatcaacattacatggggaacaatgagttgcttctggttgtacctgccctaccatgagagatgggcgactcattgaaaggaaacaaaaaggtagatgggtcctcttcttctgtgtgtgtctgatattcttggctggcctgagattcaacatgyatttccccaggccttctcacattctgtttccaataatgggatctttttatttagtgcctgcagatagag

SEQ ID NO: 529732 - DNA, 629 bp, Homo sapiens
aaccccgtctctactaaaaatacaaataytagccaggagtagtggtgcatgcctgtagtcccaactacttgggagcacaagaattgcttggacctgggagatggaggttgcagttagctgagatcatgccactgaactccagcccaggtgacagagcgagacttcatgtcaaaaaaaaagtcattaggatgaacctttatccagtcagactgatatccttataagagaagattcagacacagagacacacacaaatacaacccgttcaccccgacaccccaaatacttgtagcaaacagcttggcatcttagggatggagtagtgttcatccaggaactgctcacgcccagggtagcctggctcttaggaggccttggtaaaggtatgctggctgaaccaatgcatgggtatccatcctgctctttcattataaagctcctattgtatgccctcacctgatacaggggatgcatgagataaactgagaccccctcactgcagcttagagctgtgcatgaaaaataatgggtgaatgaaattggctgaatgaattggtttttctttaatgtggtgcagggaaaatgaacaaattgcaacccctgacatccagagactggcctgatactca

SEQ ID NO: 529733 - DNA, 620 bp, Homo sapiens
cacacgcaatgacagctcctgttgggttctctcctcctcatgcctcctcccgtccctggttgccactcctttcctctgtccctccaccccttggggtggtaacagcttcccactgctgccagactctgggtgccatgacacccgtatatcccgcttctcccacacaaagtgggtgccctaagattcaattcaatcctgacactaacaaagttarcacggatcccatagcctaagcggcggctctgtcccacaagactgcctcacctctgatgccagccacaagttccaggtctccagatgactaccgcttctatttgacttggctacaaattcaggggtttccggccccacctcaacttccataattcactagaatgactcaaactattcaggaaagcactatacttacaattatacttttattatgaagaatataaaagtataatataatgtactttcattataaagaatataaaagtataatatacttttattaaaaagaatataatatatataaagaacagccaaatcacgagatgcataaggcaaggtctggaaaggacccgcgtgcaggcgctctgtccccatggagttgacatgcatgcaccattatcccggta

SEQ ID NO: 529734 - DNA, 634 bp, Homo sapiens
agctgcttggaatccactgcacagcaccacacccgttagtggagaacggccttgctggaaccggtttcaaagattcgctctcattgttgccttttggctaacttcgcaaagctgatgtacccatcctccaaaaataagactcagccagtcaaaggatgggctaaaatacaaaagtgacatcatcacttygcatttcaaaaaaaggcctggtttgggatgaaatgaacagagttctcctggcacggcatcactgggccagttgccaccatccgtccgtgggctcatccggaacagcaaccagcggtgagccacagtcaggaaaaggaatgaggctctctccataacctccaggcctatgttaaacttcacatccaatgacaccgaggaggaaaggtaccgaagaaagaaagcagaactgcctggaaattgaaacactcagccatctcaggtaattggcctcaatcacagaatactactcaattagattttaaaagatgcccctctgtcagaatgcagagagatctaagtagatcctgcatccctcttctctgccccactctccctctctcctccctccccaaagtccaattaagtccaagtgccaacctaacatgagaaggctaagaattctgtt

SEQ ID NO: 529735 - DNA, 621 bp, Homo sapiens
agggctactggaatttttgctcccaaatcactagatcagtcaaccactgcctttccaggtaaagggctgtgctcgcctcgtcccattaccgaagctgtgatgtggctcttctgccctgtgcactgccacccaaatgtactcacgtgatttctggcttccagggctgctgttcccaagagctccctcctcaggaagccacaccattcccccaccttcttagtagaggcagactctcccttctaccaccagtgtttcccaggaccccagttctggcccagagcatgacagcatcgaggaagcctcatgcagaggctccttacagatcccagactaccaacttttccaggtctcctatgcgtgggctgctttactttctctaagaaggcacaaggaaaaatgctggtccttgggtcggttgactgaatcctttgatgygacaggtagctaagccacttatctggacccataaacctccttggcaggcctgattggattgtggaaatttcgatggtgatcacatgtgttttctccttagagttggcatggccaagacaagagccacatgcaacttctaagcaaaacacacacacaggctcacacaaacacatagcatggtgcact

SEQ ID NO: 529736 - DNA, 636 bp, Homo sapiens
attcccatggagagttacatctttgcctgacagtttagaacctctgaaaagattctgggagatgcctggcaaatgtagcattgatgattgtctagcctcaagactgactacagatataattcgttcttaatattgcttcctttatgccattgtaaagargtagaatttaagtcaagaagggctttaaaatactgtgataaatttcttacaaagtagagattatctttaagagtccacttatatctagagctattctttgctcactgaagaattccagcagtgttttctcccatcttggggtttctaatcatttccatttcccttgtattactgggttatttttacctctgtttaaatgatgtaattaaaaacaaaatacaagagaaggctgatagaataatatgtggaaccactctttttcttattgagttttctgtccattgggaagacattgaattgctaatgttttcttcttatttggattaagagatttaggacctgtcgatattttcaggtattttgtatctttctttgcaattctcagtcacttgaagaaaatacttatattttcattttcattaaagaggaacagaaaaggcagcaaatcaatccagagccctcaaccccatcatgagg

SEQ ID NO: 529737 - DNA, 599 bp, Homo sapiens
gctgctgcccccgtgagaggaccattgccgcaggtgggcataggaacagggagagaggtagctggtgtacagatcatcctcttacatgcatttcagtgtcataattttatagagtacttgcttcagacgctacaattttctacattttatattagcwtgtagaaaaaaattctgaaattagaagtatttgcaacagcacctagaactacataaaatacactcagtaaatatttattaggttagtattcatgaagtacatacgtgaataaaaagcatatccaaatggaaagagaaagtgtgtttgagtggctcagaatgatggtgttagcagaaataatgaagctctaattcccaaattgtcaacacttggcacatccattttaagtgtatctcttttagatgcattttatttgtgacaaatgttaccagcattttacgtggaaatattaagtcctttccctcttgatggaaaccttaaatatttcagaatttggtaactttaaataactttagagattatgcctgtaaagttccacattttgcagatgaggaaactgctacttagtggaagaaacaaggttagcatgcctttttaaaag

SEQ ID NO: 529738 - DNA, 560 bp, Homo sapiens
tgcaaaatattgttgagggccacccttgcaggctgacatttgcagtgataagcgtccttccctcgcaggtgtcttcactctttctccctttccactttctctgattcgctgcctgcaaacatgcacaggtcttttgtgagttggaaaatgcaaccctccaaaaatgtcacttgatcctrttcctgtttctaactcacactgactctcatgcagcagggctcttgaccatcctggaagaatatcagaattccctccttaggcattatgccaaagaggtcaggaccagcctgcttaatgttgagcttacattcaacatctattaatatatcatttcatattaaaaccatgcagaaatcagcacagtattcaaatgttagtctcaaaatttaagtgaaatttctgtagtaaagcaggcttttctgataactcttattttaagagtataggccgacttcccatccatactagtgaaaccatgcagatccataatccagcttttctcagtgacggattccataacggaggtattggattaaaacttaggatcacaactattttcc

SEQ ID NO: 529739 - DNA, 560 bp, Homo sapiens
tgcaaaatattgttgagggccacccttgcaggctgacatttgcagtgataagcgtccttccctcgcaggtgtcttcactctttctccctttccactttctctgattcgctgcctgcaaacatgcacaggtcttttgtgagttggaaaatgcaaccctccaaaaatgtcacttgatcctattcctgtttctaactcacactgactctcatgcagcagggctcttgaccatcctggaagaatatcagaattccctccttaggcattatgccaaagaggtcaggaccagcctgcttaatgttgagcttacattcaacatctattaatatatcatttcatattaaaaccatgcagaaatcagcacagtattcaratgttagtctcaaaatttaagtgaaatttctgtagtaaagcaggcttttctgataactcttattttaagagtataggccgacttcccatccatactagtgaaaccatgcagatccataatccagcttttctcagtgacggattccataacggaggtattggattaaaacttaggatcacaactattttcc

SEQ ID NO: 529740 - DNA, 601 bp, Homo sapiens
ttggccttgtgcagggagaggggaccttctgacaagcatagtggcaatagccagcaggggcagggcagctacggacccagaagcttcctgatcatggcagaggcctggtgcttccggggccctgctggcaacagctcccttagtagaccggttcttttgagaggttcagtctagattgtgtaccttcaaccctcccaatgattttttggagctattagtagccctttatacctctccttttgcatacactagccagaggattctgtaatttacaacaaaaatcacagcctcacacagatggatcctatacataggatgccatcatcaacagcctrataatggcttcctggaatgctgccttgaaaggaattctgagacctcatccaggcttagtgagaaagactgctctgatgcgttaggacctcttttatggtcccagagagagaagaattgcatttgcatcagacttttgccatctgtggttgagactattgacaaaatcacttattttttcttttgttttacaaccatactgtcattttaagatgctctctgctaaggtgttgataattctggaaatcagaaattttagacatatttc

SEQ ID NO: 529741 - DNA, 131 bp, Homo sapiens
tcctgctctcaggagccatgaagtctaacctgggcttctgagcactcagctgtcttcctggctttgtrggcagcacacagctctggagttaaaccagaggactaactcctgagcacaccctttaaaattgt

SEQ ID NO: 529742 - DNA, 632 bp, Homo sapiens
gagggcttgaaaaacattcctaagatcaggcagctagtgagtggcagatttgactaattccagagctcactctgttacctcatgtctggacaacttatgggagtgactgcacacagtccagttcactgmagcatccccgtggctcttggggacctgcactacctccctcacctcccacctcagaactacctggttaccacgtgaacctgagggccctacctattccacttcaaaaagttagcataacctctgtaggcctgtttcattttaagtgggtggaattgtgtctcccctgttgaattcatatgttgaagtcctaacccccagtacctcagaatgtgaccttacttagaaacagggccattgaagatataattagttaggatgaacttatatcatattggaggaggatgggtccttaatccaatatgactaacttcctcataaaaaggagagatttagacaaagacatagacatagggaggatagtatgtgaagatgaaggcagagatccacaagccaaggaacaccaaagactgccagtaaaccaccatgagctaggggagaggcctgcaagagattctccctcacatccctcagaagaaccaatcctgccaacaccttgaccttgg

SEQ ID NO: 529743 - DNA, 632 bp, Homo sapiens
gagggcttgaaaaacattcctaagatcaggcagctagtgagtggcagatttgactaattccagagctcactctgttacctcatgtctggacaacttatgggagtgactgcacacagtccagttcactgaagcatccccgtggctcttggggacctgcactacctccctcacctcccacctcagaactacctggttaccacgtgaacctgagggccctasctattccacttcaaaaagttagcataacctctgtaggcctgtttcattttaagtgggtggaattgtgtctcccctgttgaattcatatgttgaagtcctaacccccagtacctcagaatgtgaccttacttagaaacagggccattgaagatataattagttaggatgaacttatatcatattggaggaggatgggtccttaatccaatatgactaacttcctcataaaaaggagagatttagacaaagacatagacatagggaggatagtatgtgaagatgaaggcagagatccacaagccaaggaacaccaaagactgccagtaaaccaccatgagctaggggagaggcctgcaagagattctccctcacatccctcagaagaaccaatcctgccaacaccttgaccttgg

SEQ ID NO: 529744 - DNA, 523 bp, Homo sapiens
gcatgcacctgtagtgcaccyggctaatttttccattttttgtagagatggggtttctccatgttgcccaggctcatctcaaactcccaggctcaagtgatccacctgccttggcctcccaaagtgctagatttacaggcatgagccactgtgcctggcctcaacacgaattttggagaggacacaaaccttccaaccacagcacatgttattaacctccagcccccaagactctccccagtcatacgagtgaggggtggaatgtgctacagcagaaaaatgggtgttggtggaaatcaagggatactttgtccatttctagctgcttttgctcctacttatcactgagcaaccatttgaggagagtcggctctgggcaaggtgccatgctggaccccgctgagaacacaaagaaccataaggcaaacaccaccatcctcagtaaatttacagtcttgttggcaaaacaagccacataaaaaagacaagttacgatacaagacaggatatgaccagtgccagt

SEQ ID NO: 529745 - DNA, 523 bp, Homo sapiens
gcatgcacctgtagtgcacccggctaatttttccattttttgtagagatggggtttctccatgttgcccaggctcatctcaaactcccaggctcaagtgatccacctgccttggcctcccaaagtgctagatttacaggcatgagccactgtgcctggcctcaacacgaattttggagaggacacaaaccttccaaccacagcacatgttattaacctccagcccccaagactctccccagtcatacgagtgaggggtggaatgtgctacagcagaaaaaygggtgttggtggaaatcaagggatactttgtccatttctagctgcttttgctcctacttatcactgagcaaccatttgaggagagtcggctctgggcaaggtgccatgctggaccccgctgagaacacaaagaaccataaggcaaacaccaccatcctcagtaaatttacagtcttgttggcaaaacaagccacataaaaaagacaagttacgatacaagacaggatatgaccagtgccagt

SEQ ID NO: 529746 - DNA, 597 bp, Homo sapiens
cataaagaaacagattttagagagttaaaggttaacttttaaaatcaatttactaataaaatgctgttttattcaagaaaaaagagggcagcctttgtttagaggtaataatgaaacaacaaatgaatttgtcaagttgctgaagagatgtattctgaggtaaaaaaaatatagaacaaatcatatattagaacaaaacatatttgaagggatttaaatgccttgtctattttattttgctagggcaaaatagacataattgctcttataactgcaattggaatgacctatgagtacaaaagtaaaataataaaattaagaaaagttttttccataaagaccaagtaagaaaaaattcacctttaatttctatttctttagctaataatgctgctttttttcctaggagtcagtagcctagaaaagccttttaaagtgaatttgygggctccaatttattttcattagctttgatgttcaattaaaaattatctgtccattcaatttttcaaatgaacataggagtaattgtgttaatgctaaattttagaaaattttttggattctttatttcagtattaaataacagctaccacc

SEQ ID NO: 529747 - DNA, 633 bp, Homo sapiens
gcttctccgggatcagtcacgttaccacactgtggaagctttgttctttcactctttgcaataaatcttgctgctgctcactctttgggtccacactgcctttatgagctgtaacactcactgtgaagtctgcagcttcactcctgaagccagcaagaccatgaaaccactgaacacatctgaacatcagaaggaacaaactccggacacaccacctctaagaactgtaacactcaccgcgagggtccgcagcttcattcttgaagtcagtgagaccaagaactcaccaattccagacaaaatactattcattaattgatccattaatcatcccaaagtcctttcagttgttgtgagtactattttactgataaaattgaaagaattagaagagaaattccagatccctagctgcatctacatacacatgctctgccttcttttttgttgctraaaatgaactacccctgcaaccatctaaaccaggtcatccacgtgagcactggattccatcccttctttcctagtcaaagatattattatagcaattctcttccgtctctcctatgtcaacatgtatttactagtttattagcatacaaatgtataagtattccttccacattacaaaat

SEQ ID NO: 529748 - DNA, 623 bp, Homo sapiens
tgcgaggttcaaagggcaaattctgcatatgttcctggggtgcgagatgttgctctaagttcatattgaactggtccattacagggggattcatattgaattcagggtttactttgtagtgcaatagcctttcatgyggcaaggtttccatgccaatattcattttgctttcttctttcattgaaggctggttatttacagaacttctgggcatcacaatatagtcactttccatcattctttcttgaggatggactatgtccatgtcagcccctctcaaattatcatccgtacataagtacacagttctccgcaattcactattttcttttttcaaacatggattgctaagctcattcatactcatgggcatgtgcaaacctgtgggttgctggatgatgactttggaaatgacatttccaggcaatgttgaatagcttagcccttcagggtttgttcccttttcttcttcatcatcatttagagaaatcctagaaagtgttcctgttattgtggctgctcggcaaggaccaatatccttatgaagaactgtgagtaggaatgtaaagttgaagaaagagagttaatgtgtgtttatttttcattattatattatgttgtct

SEQ ID NO: 529749 - DNA, 299 bp, Homo sapiens
cttctttcctccccacgttcgcctgtgtccctcctttgagccacaggcctgcctcttgggcagcccctcatttcctcactcctgggttgtttctacttgatttgccccccagcacacccactgttacctcttccttcctccagccccgctgccaccttcccaagcacttgacctaggtgcatggtggggccatggtggaggtgcactgggtaactgaatgkttccttctccatttggctgttccagcttggagcctaagagaagaaggcagtggaggggccgtgccatggaagccaccc

SEQ ID NO: 529750 - DNA, 644 bp, Homo sapiens
gcttcaccccacctgtctctcctgagaacaaattagaggcgctcaccagcacacctctgttaactgaggttagcaggtcccccaggagagcatggtttctaacaccattctttctatcacctgtcagtgcctccttcgatttctttttacctgaggcggaaaaagcattctcttcccttgagtctccagactgttaaggatttgaggggccctctattagcactcttcttctgtctctgaatttctgaaccatcttctgtctctgagtttctgaaccatgtgagaaataagacaaatgggagatcgaagtaggggatctcctttatcactggcaaaagctgggctggaggaagtckttgatgggtctgatcatgctcctcccctagccttgacctcaaatcagcccaccaactgggaaagtctgagtctggagtcaacacgggtccagggcaggagggaaaggatggattggctcccccagtggagacacaggggccagtgcttataccccagcaatgaagcagcagttaagaggggcaagagggtaggcaagcagaagccctggggaaaacgtctccatgtagaaaccagaggaatgaggaatgggtttcccctctaaccaagctattattgttttagtgtaa

SEQ ID NO: 529751 - DNA, 534 bp, Homo sapiens
tgtgaccttgctgttgttataagattagcagaccctaacccaagccagtgacttcacagcacaactcctccagtcgtatgcccactcatgagcctaatctcccttggaagttcccttttacttcatcttgacctgctcaatgtcattgctctactgacacctacttattctctcaaggacagactaccctatcagacctaatacacatcaaggtgctaaagctagtaaagcttattataaaaccagacctaaagttgctccattctagtaatgaacaattatttattaatggtaaaatctcagtcattagcaaaaaagattatgaggagatatcccagaaagaagacccttctcatggggctctacctacatcctctatataaaatgatcctacttcctataatcartccccagctttccaaggtgtactttatctatataactaaactctatgcatccctggaaaacactgattgagtgatagtctttcctattcctgccatcattacattttttttaatcaggtcctattgt

SEQ ID NO: 529752 - DNA, 502 bp, Homo sapiens
tcattcagtttgttgtcagaattcatcttcttgtggatgtaagactgaggtttctattttcttgrtggctgtcagacagggcccacacagcatgcgtgcacacacacaagtatgcatgcacacacatgtgtgtgcatgctcacacacatacacacccctataatgttatcacgggagtaacatcccatcacctttgccatattctattcgttataaggaaatcgaaggtcccactcatactcaaggagacagcataaacatgggggccaccctagtgtctgtcacatatatgaacaatatttataccatcatatgactataaatgatatttttagcttttcaatttttagaataaacctacaatgtacagagttaataacagctattaaaacgggaaaatttcccttgtccccctcacagggcatgcaatgggggtgtggctcgcttcttcagtaccctgctgctcctacctctagggcagcatacggacaggcagactgtg

SEQ ID NO: 529753 - DNA, 502 bp, Homo sapiens
tcattcagtttgttgtcagaattcatcttcttgtggatgtaagactgaggtttctattttcttggtggctgtcagacagggcccacacagcatgcgtgcacacacacaagtatgcatgcacacacatgtgtgtgcatgctcacacacatacacacccctataatgttatcacgggagtaacatcccatcacctttgccatattctattcgttataaggaaatcgaaggtcccactcatactcaaggagacagcataaacatgggggccaccctagtgtctgtcacatatatgaacaatatttataccatcatatgactataaatgmtatttttagcttttcaatttttagaataaacctacaatgtacagagttaataacagctattaaaacgggaaaatttcccttgtccccctcacagggcatgcaatgggggtgtggctcgcttcttcagtaccctgctgctcctacctctagggcagcatacggacaggcagactgtg

SEQ ID NO: 529754 - DNA, 502 bp, Homo sapiens
tcattcagtttgttgtcagaattcatcttcttgtggatgtaagactgaggtttctattttcttggtggctgtcagacagggcccacacagcatgcgtgcacacacacaagtatgcatgcacacacatgtgtgtgcatgctcacacacatacacacccctataatgttatcacgggagtaacatcccatcacctttgccatattctattcgttataaggaaatcgaaggtcccactcatactcaaggagacagcataaacatgggggccaccctagtgtctgtcacatatatgaacaatatttataccatcatatgactataaatgatatttttagcttttcaatttttagaataaacctacaatgtacagagttaataacagctattaaaacgggaaaatttcccttgtccscctcacagggcatgcaatgggggtgtggctcgcttcttcagtaccctgctgctcctacctctagggcagcatacggacaggcagactgtg

SEQ ID NO: 529755 - DNA, 541 bp, Homo sapiens
aatatgcatacttagatgttaaaaattcagtggatcagaggtgcaaaactgctgagagttgtgagaatgggtataaactattaaaaatcaaaaaatttcatggtttagcaacaatctggcttaatgttaaggaatctctttcactaaaaactgggcagcctggaagcttaaacagcgaaaaccaaccaaggagagaatgactgtaacaactttaggccgttattttatcattcctgtatctctgtctgcttggaagatgaactcaaggaattttagcaaaagaaagagacgagagagcccctgcatgatttttctccatctttctaacctgacttaacttggaagtaggaaatattaaatgataatgacaagctaaaarataatttaaagactcccctcaacataaatatgtaatgagcaatgaactaaacctattctgttccctcagtggctgtttcaaagaacagaacctgagggttgaagtgacagcttccttcataatgaggtagcagttgagggagaaaggctacaaggattctag

SEQ ID NO: 529756 - DNA, 606 bp, Homo sapiens
tttcagatatgaagtttacttccgggggatatagtaataatctctaaaatccaaatgttttataagacacttttataaaaataacagttcaaaagaaacatttgcaaaataattattagttcttatacaaatcttcagattaaaaagaagacaataaatacttttgttgaaatcattgatttgtctcttaatttaaactaactttatagaaaacaaaaatatcagctatgtaggagcactaacattttattcccattaatcagcagagtttctttcaccaagagtacaagggactataattttaagactaggtgttggaatttcattagagagacaaaacaaacataaagagaaaatatwtagggaaagagtaaaatgtgattataaacaaatgcaatatgtgcatataatattttacaactattttttgaaggctacctaatctgtctaattgatatatcaggtgattcatatgagcgttcaacactattctaattcttagtcacctgtatgctggttggagctatggcacagtatactgatatccttagctatttgggtatactgatatccttagctattaagtatgcacaaagcctgaagcag

SEQ ID NO: 529757 - DNA, 610 bp, Homo sapiens
gctgggacacatggcacaatgtcccaaggctgcacagagcaacagggccctgggccttagccacagaatcatttttccctcctaggcctctgggcctctaataggaggggctgcacatcttcacatggtggcaggaaaaagaataaaaggggaagtgctgcatactattaaacaagcagatctcatgagaacttactcactatcacaagaacagcaagggggaaatctgcccccatgatccaatcaccttctcactaggtccctcycccaacactgggggattaaaattcaacctgagatttgggtggggacacagagccaaaccatatcacctgggaatctttcacctacttttctcctacaatggagtgttcctcctgggtcaaaaatgatcctggctagactagtgcttgctgctgtctccttttattccttagagatttttgtcacctacctgctaaatttcagtgctctcttagaagctctagtcaatgtgtggttacctactcttccttgattcttccttgtgccttcatttgcgtttgtatcttccagactcctgacaaagcacattgttcttggatcttagattgatatttctgtttcctta

SEQ ID NO: 529758 - DNA, 612 bp, Homo sapiens
gccaagaaaattaagtctatctcagactcaggatgattttttctttcttttttcactttttgtaatacagttccacctccatgtacaaagagactatgttctttgtaacatagcctatgatgaacggatttcatttttttaaatcaaattgcttcataattttcaactttttgtttttcaatataagtattaatcaaaatattgattctcaataccctatgaaattttggttctgatttcaagtggttgcaatttaagtagtcttttcctagtatcaggcattcctaggtaattatgaccgtttatctggtaaagtaaaatctgttaaatatacaaataaaaaatgacagaaacacagatgtaactgtatacctaaataggtatataaagtactataataacataatttataaatgtaaaaaatatatgttttcaaaaactttgttttgttttgagttttacaaagtaaacttcagaratcacattattaaaaaatgaactgcaatcaaaatgctcaagtgaattgttcaacttaattctctaagtttaattaagacttcatatggtttaaataacaggtatctttaagaaaaatttagtttatttattatt

SEQ ID NO: 529759 - DNA, 538 bp, Homo sapiens
gcaagactctatctaaaaaaaaaaaaaagraacataatcacatccacaattcacagtgcaaagcaattacacggcagcacgactattctggacatttctggatgttagtatctttgctgttgatattcttcttcttgttctcaaaccagctccatgctgctccatgccagcgccttgcccgccttcttccctcgctccctcccacattctatcctctgaaattccatgattctgccgttccctatgccagaggaggctgtctcattagaccagtggttctccaatctggccactcaggaacctcatgtggggtgtgtttgagaatatactcatgttgccagagatcctgacctaagtgaatggaatggggctgagcatcagattatttaaaggtctgcaggtggttctgaggtacagcctgttaaaaagctgctgtccaagacccatgtgtgtggaagcaatggctggtggacccgccacccctccaggaggtctctgtaccagaaggaagcgtcttagggtgaatgctgtactgcgg

SEQ ID NO: 529760 - DNA, 538 bp, Homo sapiens
gcaagactctatctaaaaaaaaaaaaaaggaacataatcacatccacaattcacagtgcaaagcaattacacggcagcacgactattctggacatttctggatgttagtatctttgctgttgatattcttcttcttgttctcaaaccagctccatgctgctccatgccagcgccttgcccgccttcttccctcgctccctcccacattctatcctctgaaattccatgattctgccgttccctatgccagaggaggctgtctcattagaccagtggttctccaatctggccactcaggaacctcatgtggggtgtgtttgagaatatactcatgttgccagagatcctgacctaagtgaatggaatggggctgagcatcagattatttaaaggtctgcaggtggttctgaggtacagcctgttaaaaagctgctgtccaagacccatgtgtgtggaagsaatggctggtggacccgccacccctccaggaggtctctgtaccagaaggaagcgtcttagggtgaatgctgtactgcgg

SEQ ID NO: 529761 - DNA, 626 bp, Homo sapiens
gggggaccaacgcaggaggatcccttgaggtcaggaattagaggtatggtgacctatgattgcgtcactgcactccagcctgggtgacagaatgagacctcactccaaaaaaatttttaaacgttttaaaatgaaaaggaaaaaaatatacgtttctattgatacaactcaatagcatgtaaactttccaacctaatcaatagtgaatgcttggaaaacttaacatttgaaattcaggcaattaaaaacaacaatttccaatatatgttattcgctgctagttagtgaggggtagtttaaaaaatataagacaatctctttatatatatatacccaagttttctcccctcaatacatgcattcctaaatatcttcacccatgaatatctgggaaaatattcttcagatatatgattgttaaaatgaaactttacatcgtatgccattgatagaattgcaaattacattgacggaactgcaaattaaaatgagacagcactacaaaacctactagaatggtgacratccgaaacactgacaaaaacaaatgctggccaagatgcgatgcaacaagaacttcaacgtattgctgaagggaatacaaacaggtgtaaccattttgcaag

SEQ ID NO: 529762 - DNA, 622 bp, Homo sapiens
tcttcgtcttcgtgccctgaattaatttcaagaccaaggtcatttccctccctgtatggtagtttccccacctcgttaataagccttttgcaaagtgttaattttggattaagggtgagacgattaagcttttccagaaggtagcatggtgtaaaaaccacccctggcaggcttggagcagtaccttataattaaatatattaataatttccatattaaaatgtgaatattgacactaaatgggataaagtctgcacatatttttacatcagctcaggtcagatttcactgtcacgggagataggagagaatgttggttgtcagagctttttgtcatatgttttgttttattttattttattttttgagacarggtctctctctgtcactcgggctggaatgcagtggtgctatctcggcttactgtaaccgccgccccccacctcagcctcctgagtagctgggattacaggtgtgcatcaccatgcccagctaatttttgtattttagtagagtcagggttttaccatgttggccaggctgatcttgaactcctgacctcaaatgatcctcctgcctacacctctcaaagtgctgggattacaggcatgagccactatac

SEQ ID NO: 529763 - DNA, 590 bp, Homo sapiens
agtgagcaaagatcaatcaggctgggcgtggtggctcacgcctgtaacccagcactttgggaggccgaggtgcgtggatcacgaagtcaggagtttgagaccagtctggccaatatagtgaaatgccatctctactaaaaaaaataacaaaaattagccaggcgtggtggcacacgcctgtagtcccagctactcgggaggctgaggcagtagaatcgctggaacctgggaggcagaggttgcagtgagccgagatcrtgccattgcactccagccaggatgatacaacgagactccgtctcagaaaaaaagataatcacaaccacattcatctaattacacaacataaaaagaccaaggaacatgggtacgtattgtgtacaagggaattacttaagggactgtgtcttatttttatttattggaacacatgctaaaatgtgtttctatctatggtttcattgtacatacaccactccctatagaagctccctttgtccattttctgactcatcttgtttatttcactttcatctttaggtataaccaaaatttgttaaactcaacctaaggccgggcacggtggctca

SEQ ID NO: 529764 - DNA, 595 bp, Homo sapiens
cacgaattttatgtttgtcatattatagttacttagatgtaaactgagagaattaagtagctgtttgaagtcttgtttttcaaatgccaatgcagctcagttatggttttcagtctgtatggatcactagaccttggcatttattgaatattaatgcctcagatattacacatttggcactttggaaaacataggtggcattgaggtacaactgctgatacatttttatagacttcayacgtgattaagtaatgaagagtatttttaaaagcagccaaagaaacaatttttttttgcttggttttcaacacacctaactttttacttcagagtattagacttacaggtcgtctgggaggtttccattttggaagaaaaatttgttcactgtttcctgtattcaaaacatagtgctgagcactgtggaggatacagaggatgttagaggactttaggtgctgagtacttatacagagtaatgttaaaagaaacagctcaaacgttctgagaatttagaaaatgaaattctctactgagagtgtcattaaatagtcttggtacttttgtgtgtgtatatgtctgtgtttataaaatg

SEQ ID NO: 529765 - DNA, 595 bp, Homo sapiens
cacgaattttatgtttgtcatattatagttacttagatgtaaactgagagaattaagtagctgtttgaagtcttgtttttcaaatgccaatgcagctcagttatggttttcagtctgtatggatcactagaccttggcatttattgaatattaatgcctcagatattacacatttggcactttggaaaacataggtggcattgaggtacaactgctgatacatttttatagacttcatacgtgattaartaatgaagagtatttttaaaagcagccaaagaaacaatttttttttgcttggttttcaacacacctaactttttacttcagagtattagacttacaggtcgtctgggaggtttccattttggaagaaaaatttgttcactgtttcctgtattcaaaacatagtgctgagcactgtggaggatacagaggatgttagaggactttaggtgctgagtacttatacagagtaatgttaaaagaaacagctcaaacgttctgagaatttagaaaatgaaattctctactgagagtgtcattaaatagtcttggtacttttgtgtgtgtatatgtctgtgtttataaaatg

SEQ ID NO: 529766 - DNA, 480 bp, Homo sapiens
tggggctccctgcaggaacgctgaagccagaacggaacaaactgcgaacagtgccatacgaacactgcactcactctaaacccaggtgggattaaaaatcggcagatctggccgggygcagtggctcatgcctgtaatcccagcactttgggaagccgaggcgggcagatcacatgaggtcaggagtttgagaccagcctggccagcatggtgaaaccccgtctctactaaaaatacaaacacatgcctgtaattccagctacttgggagggtgaggtacgagaatctcttgagccctagaggctgaggttgtagtgagccgagatggcaccactgcactccagcctgggcaatagagtgagactcagtgtataaaaaaaaaatcggcaaaaatctgaactcgaaacagacaaatcgggaattacaggaaagcaatctctctcctgaaagcgactttggggaaattggaagcccttccta

SEQ ID NO: 529767 - DNA, 480 bp, Homo sapiens
gcacatagacaactttcattttgcaaagccacaggctgcctggagagacacacatgcaatgtgtgacgagtacgacacctcacccagtgctctgtcattggaccagggagctcaaatgagcaacccaacagtacagatataaaatttggagattttatataaaaatctggctattttgcttctgaaaaaaaaaaatgaaggatccagcaatagcgggcccaagttcccgcatgaccataaatggccagagttgagtgttggtatctgccagtccatccactgtcaccatttcccgatccacttcactcattgaccttcgctcccagactgtagtagataattgagtttcctgcggtggactccagccttccttcagcccagatcaagacscccaacataaccaagcaaatatttccaatacatttcttatatcctaccaagggttggtagtggagatattctcatatccaacccttggta

SEQ ID NO: 529768 - DNA, 549 bp, Homo sapiens
gagtctgggccaggtatgagagtctgataaaggaggtggttggggtatgggcttcagatcggttagtttgtattggaaaggtgcactcgcagacgagtcccttactacctttagaaattggctagccctaggaggggcagtayctccaagtgagcaaggccctcaggatgttaaagtatcaagaaatacagaaaatgaaaaccacaattgatataatattgcatgtgaaatgattaaatattgacaggagcatttatgtgctccttcgtgggatggctgcctgatttacagcttcaacttctcagacacccaagatggctcccttcaatatgatatgacggcctctggccttggtccaggacaggcccaaggcaaaactgggcctacccaatgagatgctccctcctgaaaatctgatacttggaacagaagagacacaggcaaaaaatttctggagcttagttccttcaagggcaataataattattttccctatctgaatgtccgatatggcagccattaaccacatgtggctactgagcacttgaa

SEQ ID NO: 529769 - DNA, 605 bp, Homo sapiens
gggtccctgagcggtttgtgtttcagtctcctgggatgaaaatggggacagaatggtcacccctcggcctgtcccctctgcctctctcactcttctctccgtcactgtcaatgtctctgcatctctctccaacattctgctgtctctgtctctgggtctcttgctgtcttgtcctccaggcctttccctctctgcctttacttctttccctctgccggaggatcctcaacccaccccctccaaggccactctcggcctctggtctccccctcccctgcctcccaattcgccctgtccctcggtctagcgacacctctgcgggtcccagatcgcttcctctacgggacctgttgcttctctggggtggatctgcccacgacctcaggtccggggactggccggtgggcgtggtggcgggggtccgcgctcccacctctctcccyttccctcttcccgccagagactgagacagacgcgaggccgtgcattggcggaggtttattgtccgtgctgcaggggcgggcgcgaagagcgcgccggtggggcgagcgcggggctcagtaggcgtcgggctgggcgggctcgaagggctcgggcgccccggc

SEQ ID NO: 529770 - DNA, 565 bp, Homo sapiens
aaatataaaacctgaaaataattctgtaagaaacaggagaaaattgttacagccatgatttaagcaaattccatattacagttccaaagaaatcccacgtaaaaataaataaattgtacttaattaaaattaaagacactgctaagagaacaaaagacatcccatgctgtgagaaaaatatttgcaagcttctggataaaagggcttggatccagaatatatacagtcttagcaaaactcagtaagtatgtaatcaacccattaaatatgtgcaaaaggtttgaacagataattctcccaagaagatatacgaagggtaataaacacatgaasagttggctcaacatcattagtcttcagggaagtgtaaattattacatcactacctactaccagacaactaattgaatgacttaaaacacagagagagagagaaaataccaagtgcttcgtgtttgtgaggctgcagagcaacaggcactctcatacattgatgctggaagtataaaaagtacagttgctttggaacagagtgaggcagccaagtataacgcggtcccggaag

SEQ ID NO: 529771 - DNA, 238 bp, Homo sapiens
taatgcacttgtatattttttattgtgtggacaagaaattgggaacaggttcaggctgctcagaaaaacgtgttaagtttatttttgaacagaggtttattaaaaaaaaaaaaagccaaggaaagtcatgcatggttttgagcttctgcctcgcagyacctggtagatgctggtgttgcaaagtggacacagcaatttgatcccttccctgggtcaccagggaaacctgtgccccaca

SEQ ID NO: 529772 - DNA, 628 bp, Homo sapiens
tagtgttactggcttgtgccttttcaaaagtaacctgttatccactgtatgtttgcccaaacttttcttataagttttagtatgccttttcattttgttcgttctttccttttttgggcacaaattcttcagtttgatgaggtmccacatgtgtataatttcttggttagtgtgctattgtttactaatcaagaaaaaacaaaatcagtgccaaagcagtccattgtcagtgatttttcccttgtatttttgttactttttgcaaactgtgagcatacatccaagtttccctaaatatacacacactcgaggttgtgtttataagagctttatggttgcaagttttgtgaattatttctgtattatttagtaccacactttttgtattatttagtacactaaatatattttgtattatttagtataaatacaaaataatacaaaataaaaatattttttattatttagtacacactatttgtattatttagtaccacactttttgcaaaccgtgagcatacatccaagcttccctaaatatacacacactcgaggttgtgtttataagagctttatggttgcaagttttgtgaataatctttaatccttttgagttaaagtgtttttt

SEQ ID NO: 529773 - DNA, 230 bp, Homo sapiens
tatctatcaataaatattgatagataggtaggtggatagataaacagccctgatgagggctctyctttgcctccaagatggcgccttcctgatgaatcttccagaagaaacaccttgtctttacatgaagaccacctatctatctatgtctgtgtctatccattcatccatctatccattcatctatctaatgtattctctgtgtatttatctattaaatctataatcta

SEQ ID NO: 529774 - DNA, 551 bp, Homo sapiens
tgctcagaggaagatatttgtgccaatatgaaaattaatcaaatgaagccaatttattttatttataccttttttacttccacaagacaaaaggtgatggtgaaatgccaatttcccaaggctttgtctacactgaagaaaagagtatgaagcactgaagtaatctgataataagaaagggtggtagggaagccctgtgagattctacatctcatgtagaagrtttcctctgagctaagactatccaagagcattgggtcagttttcctgggctattttgaaatcaatttaagaatagaattttgtttatacaactaatgtactacttactccattctcaggagttattccttatgtacctaatgaataaaagagttgtggagaattttttttaaaaatcttgttttcatctgttgttttctgcagattctttaaggacaaaacaaaacataatgactaaatgatgttgtcctacatcaacaagggtttcctaataaataaacattcaatatataataattaatgttttattattttgtgacacattttga

SEQ ID NO: 529775 - DNA, 617 bp, Homo sapiens
ttaattttgtccagtggccttacttaatgacaagtcattgaattatgtgcttcctggtacatattcttccttctgcctgatcatccatcactgtcctgcaccatgaaccctcatgttatccactgacttctacaagatcctcagatctaggctcagattagatgccatcaccccggagaggccatacttgacaccaataaccagattaggtggcacttaaccatcataccacatttacttatttaattatctttcttcaaactttaaatcattaaaacattcayttgtttaattatcgttctccctattttagactaaaatattaaaactttgactttttacaacattccccccaaaactgttaaatgctcaccatacactgctatctaattagaattaaagaatcttatttaaaaatagctagaagaattgtaacgttctcaacacaaagaaaagatacatttttgaggtgatagatatctctatttttgatttcatcaatacatattgtcttcatgtatcaaaatatcacctgtatccctcctaagtgtacaactgttatgtatcaataccattaagaaataaactccattcctcatgtaagtggttttgactca

SEQ ID NO: 529776 - DNA, 593 bp, Homo sapiens
caagcctagccagctcctttgtataatagtgcaatgatattgttttctggattggaatctagggaagaaagcacttattatagacttggtttaaaaattaagaaaaggtgtccgtgaaactgctgggtcctgacaagttctgctgagcatggcccttgatcctcactccatctccatgagactataaagtctgagacatcatactttcccctgcatgcaactgtggaagatttacctggaacaataagttcatttgcttaaaacaaagttaaaaggtaaaaggatgtgagcaattccggattyagaagaaattctacttctctttcagaaccacatggggaaaccaaagtaaaagttggatgctattctttgagtacaaaaataaaagctcacaaacagaaaagctgtggaagaaaacataaggtgggttttcttcacactatctttaaggaggtgacatatatgttctgatgtcacctaagatataaatgtaaccagagaaataaattattaaataactagtaatgaagtttataacctgattatgttactccttgactttctagggaagaaatcaattaactaacttgaac

SEQ ID NO: 529777 - DNA, 688 bp, Homo sapiens
ctgggctgcgttgcagaaatgctgtctgataatctcccgttacaactttttgattgcctaaacattctagtgggaactatcttaagggaaaaatagtatcttcttagctctagatttggccagatgcaaaactcattagctagtttttgcagagtgaagctatcagaggaggttacatgacaacatgccatctacttttctgtctagtcctggcaatttctgctgtgcccaccaattcaagcaaacatcacgccaggggataaaacaacgaatacacttcacaaacacacaaatccccaccttccaatcttcctgaatggctctcacttgtctgctgctttgtgtggttttatactaattaatttcacaaaacatgagaataattccttacctttccgtgtgagatattctgccactagggctgttacgtggacatagcacattgctgcctataatagaagacacatgcctcagaatcatcattcataacagcaagtcataatgctcccacacagacagaaatctaatcaatgtatgaacgtatatattagatctcaatgcaccagctagtatttctaatagctgatatcttaccttttgaagagagtggaatcactcacataagctgaaaatttgaaattaattgggagttgasataaatggcagtaaatttgctaaggcttttttc

SEQ ID NO: 529778 - DNA, 623 bp, Homo sapiens
gtgccattagcagtttggtggcatccttccactttttctctcccttagcacaaaatacctgagtacatacaaggaattaagctcaagagctattgcttgacagacctgacagactaatttgttcaatttgatttactcagtgaagacaaagacatccctatgagctcaactctcttcaaacgtaaaaagaatacaggacattaataaagactsaacatacaaacattaaaagcatgtaaaaaagccacattgcttgtgattttgattactgccaccactatggacaagggctatgaaaatagtagaataatgaattttgggggtgaagcagggatgtttgttttacttcttaaagaaacatcctagagtacccagtgacttcaggagcaaaaaaccggatgcctccctgggatgttacagcaatgtcttagttccagtgaaaaaattcactaatttatggcaagtttaaaaattgatcaaattatataggaaatacttaacagaacagcatatggaagcagttcagccatcacttgcattctttattttttagaggaggaaaatgcaagaaagcaagcgtcataccccacacctacctacaggagtgtcatttgactccacag

SEQ ID NO: 529779 - DNA, 583 bp, Homo sapiens
catctgcagctatctgaaatgtttttttgttgttgttgktggtggtggtggtggtgttctaaataagatatcctgttccttcctcaaaaatgctgtctcaacctacactattttatgtggagtggactgtgctgacttaccagtcatatataaggctaatatagccttaaactcagtataataactgtaaccacatgattttctggtaaatatttttcattgaaagcaaggttacttgaactaaacttagtttaattgatttattcaatggagacactaagaatagtacttgaaaggttcaaattagtataaaactagtaaaggagctaagggatggaataatgcctcaatcaaggcctgcctgtcaaagcattcccactgaagaattctttcaaataaactatttctggttcccgggactacagaacctctaaatgacaatttctcattgcatcacaagtgccaagatatttatgttgtattctgtaggcaccataatattaaagagaataaccaataatattcatggaatgaacaataaaattaatgattttggcaattataaaaagaacactgagttatt

SEQ ID NO: 529780 - DNA, 470 bp, Homo sapiens
acccagaaatgtaatgcaaatgactctatggcagcgaattctctaaatctgtctggaacaatacactatttctagcttctcaggcatatttgctattcaattattgtttaaccatttttgccaattttctttgctcagaaagccaagactgygcagaaacgtaaaaatattcatggaaaattgtctcccaacactaccctggaacttgtcatcaccccaaacctctctaccacccaaatcactaaatcagtttcctactaactcctttctatccagctagctagttcgactcctcagattacaagtgttcttcaacttcttcagggtcccttccattgactcttctactctcttccaatctatcagccttctttttcaaattccccctttctaagcttgaatttcattatatgtcatttcaataacatatttgccagggccccaaactccattcctttctgtctttatat

SEQ ID NO: 529781 - DNA, 470 bp, Homo sapiens
acccagaaatgtaatgcaaatgactctatggcagcgaattctctaaatctgtctggaacaatacactatttctagcttctcaggcatatttgctattcaattattgtttaaccatttttgccaattttctttgctcagaaagccaagactgcgcagaaacgtaaaaatattcatggaaaattgtctcccaacactaccctggaacttgtcatcaccccaaacctctctaccacccaartcactaaatcagtttcctactaactcctttctatccagctagctagttcgactcctcagattacaagtgttcttcaacttcttcagggtcccttccattgactcttctactctcttccaatctatcagccttctttttcaaattccccctttctaagcttgaatttcattatatgtcatttcaataacatatttgccagggccccaaactccattcctttctgtctttatat

SEQ ID NO: 529782 - DNA, 470 bp, Homo sapiens
acccagaaatgtaatgcaaatgactctatggcagcgaattctctaaatctgtctggaacaatacactatttctagcttctcaggcatatttgctattcaattattgtttaaccatttttgccaattttctttgctcagaaagccaagactgcgcagaaacgtaaaaatattcatggaaaattgtctcccaacactaccctggaacttgtcatcaccccaaacctctctaccacccaaatcactaaatcagtttcctactaactcctttctatccagctagctagttcgactcctcagattacaagtgttcttcaacttcttcagggycccttccattgactcttctactctcttccaatctatcagccttctttttcaaattccccctttctaagcttgaatttcattatatgtcatttcaataacatatttgccagggccccaaactccattcctttctgtctttatat

SEQ ID NO: 529783 - DNA, 448 bp, Homo sapiens
ggcagctcagagcaaggagagagagcctcaagctagaggaactgagaaaggctttgtgctcttgagctgagtcttgaaagattaataggctttagatgtgaggagatgagagagagagatggggtgggatggagagacctgggaggaaaaggaagcatggaaaaaagatatccatggggaaagcctgtgtgggtagagaggaatgatcacaaggtacaggaggtggaatgattcggaagctgcaggggcagaagggcaagggatgggagcctggaacagcggaccaggatttgagaatacattttttaaaagcaattgaaagtttctgagaaggggaatgacccagtcaaagccsacattgagaatggtggtgggcagatggaaggcggagagagggggagcagggatgaaggcactgcatctcctggggtgaagacagccagtggca

SEQ ID NO: 529784 - DNA, 616 bp, Homo sapiens
gggcacagtggctcatgcctataatccctgcactttggaggccaaggtgggtggatcgtttgagcccacaagtttgaaatgagactgggcaacatggcaaaaccccatctttacaaaaaaatacaaaaattagccaggcgtgcacctgtagtcccagctacctgggaggctaagatgggagaattgcttgagcaattctgagcctgggaagtccaggctgcagttagccatgatcactccactacactccagcctgggtgacagtgagatcwtctcaaaaattaataaataaataaaattatagcaattgaaagtaaggctaacttgatctggacatcagcgattgtcacgtggtttcaacacattatagctttataggcgcatattttgttttcactgaagcgaagttgttaaacgtttgattttgtcctaatggtgaaaagaagacgtttcctgaaggagacaggattgcattatcattacaaaagtatccagcctctgtcgcacactcttttttaatagcgctgttgtcctatttgcatatgtaagaaaaagactgagagtcacccagcagcaagcaagtacctgtaaccacagagggcagggtctgtaacat

SEQ ID NO: 529785 - DNA, 548 bp, Homo sapiens
gacttacttgctgttgtgtacakggaggtaaggttgggcagaattggacagtggaagctttaaaagtcaggccaaatacttgaccttcttttgccttgtaggcaatgacaaggcacagggtttttttatccagggaatgtcaggatctaaatagtaatctggcagctaagtaaaagatggattcagatggatgagacttgtggtagtaagactagataggtcatctaagcatggcacaaaaggagaaagggaggcagcaataatggtagagttggacataaaaatttataggactccgggtctaaatagaggtgactgaaagaagagggcaaagcaaaaaatacatcagatatgactgagataagtgcctgagagaaagacagtgctgttagcaaacaggaagctagttcggggaatggcaaatatggatttcttctatctctttaggtcttgttggatttgagaaacagtgggaccaaaagtggaaacatccaattgaatactgaaaatagtagtgttctatgttcctgggacaaaagctgggatgt

SEQ ID NO: 529786 - DNA, 548 bp, Homo sapiens
gacttacttgctgttgtgtacatggaggtaaggttgggcagaattggacagtggaagctttaaaagtcaggccaaatacttgaccttcttttgccttgtaggcaatgacaaggcacagggtttttttatccagggaatgtcaggatctaaatagtaatctggcagctaagtaaaagatggattcagatggatgagacttgtggtaktaagactagataggtcatctaagcatggcacaaaaggagaaagggaggcagcaataatggtagagttggacataaaaatttataggactccgggtctaaatagaggtgactgaaagaagagggcaaagcaaaaaatacatcagatatgactgagataagtgcctgagagaaagacagtgctgttagcaaacaggaagctagttcggggaatggcaaatatggatttcttctatctctttaggtcttgttggatttgagaaacagtgggaccaaaagtggaaacatccaattgaatactgaaaatagtagtgttctatgttcctgggacaaaagctgggatgt

SEQ ID NO: 529787 - DNA, 556 bp, Homo sapiens
gcaaccagccatccatttggcaacgcctcccacgtcccaggtcctccctgggcgtttggaaaacccagaggaaggggatcatgccactgtcttcagtgagctcacagtgtgagatggtgggggaggggaattgcaaaaagtacaataggagcgatgatagaaatatgggcagcatgtctaactctgcctaggattgtcagggaaaagtttcaaaagatgaattagtctagaaaaggaatgcaaatgggaagggaattccaggcagagggaacagcataggcaacgtggtggaggtggaaraaaatgaatgatgcagagagcaaaccactagcagggagcggccacaagtgaggttgcaacagaagctggggcaggccattgattcttatgaatgctattaagaaagttggacattttcccctaggctcaggagagccatcagggagttttggccatggcgaaccatagctgcatatgcgttttgtagatcattctggagcaggtgtctctaggggtctgtgtcacatcccttagcccatgtctgatttaagctgca

SEQ ID NO: 529788 - DNA, 607 bp, Homo sapiens
cgcctgattctgaattcattttctacagtaaaattgattactttgcctcatactctgaaccctataaaaagcaccaaggtagtcttaattcttctactactaataaaacccatacttgggtatgctttatgctttaatgcttataaggaacttttcacatattatgaccagaaacaatttgctcatatattctttcatccagtaattccttcaacaacctatttttacattcttagtcacgtgagagaaaaaaaggcaagcacaagagatataattgcaggcctcatgaagcttacaaataccttttcatcaaatagacagacaaataaatgaaaaattgcatccaaacaaggacattacaagawaagaaaattacataccaacatattaaaaaggataatacatcatgactggctggagtttattccaggaatgcaaggtttatttaacaaatgaaaatcatttaatgaaatttatgatattaaccaattaaaagaaaaatagattatgatcattttactagatgaagaaaaggcatttgccgaaaatttagacccattcatgattttttaaatccacataactagggataggaggagatttcctc

SEQ ID NO: 529789 - DNA, 552 bp, Homo sapiens
agttaaacatcttgagaattggcgccagagtttgtgacatacagcagcactttgacattcctttggttttgcgaagaaactggttatctgcaatttggtaaacacaatagcatgaaatcatattttactggtttatttaataatcttgcagacaattttaaaarggcagattctaagtaagaaacttgcatttcaaggttttcagaagtagataacagtaagctgacattgcgatattgaagaacactttctatcttgtcttccacttatatgtttcccttttcctatttgataataatttcaaattaagttgtcaatgataatgtcatgaggccagtttactaccatcctcaaaaattaaaaaaaaaaaatctgatctattttttatttttgcagggggatcatttgttccttttttcatgcaccaaatgttcattgagtacttactagttttaactattttttaaaatcttccctgttaagaagattatatagaggctattgaattcagtcagatatgtaaattctgacttttattattatgagttatta

SEQ ID NO: 529790 - DNA, 545 bp, Homo sapiens
agctgtgtggttcaatgtgccttgctctgcaatgtgtaatgcatgtgcaaagttggctacaaattaaagaagcacaggaaatagaaggacggaaacgatcaaaggaataggctgaacattcccttctgattattttaatcttagaaagttaacattaaataaatttcacatttctgaaaatgaaacaaatgcacaaatatttaawaataaaatctaactttaacaagctctataatttctattctctcaaaaatgttcacaaacttttctttgatctagaaatgaacaaggagattacgaaaataaccactgagatgataaaagaacatgaagttagtgttcctatagactagatattagtggtcatttatttgtccataacctctgagccttttctttgatagcctgtgaagtctctgcatttgaattcagtcttaatactgtctacctgaatctctagcatcactcaccccaaattaccctgaacacacacacacacacacacacacgcacacacactcatgcacacacagataatgaaatgg

SEQ ID NO: 529791 - DNA, 631 bp, Homo sapiens
actattgaactcttatctagaatttgcaaaagcacagtttagagctttgagctttgagtatagtgagaaaagttatgcattaaataaaaaaaagaatatgcaacggaaaccgtattgcagaattgtctaggcagcagtccaaaagttaggaatgactcaaacagatgagtgtggcagacacaataattaggccttctgaaacaatcccatctaatgtgcytaatcgccaaaacagtgtattaggactgtggcttccaattaatttcacatttaggccattgattttattgttgggaatgctataaacaattatttgggatgtgtccctcctatgtaataaagatattgtcattttgaatgaagtgtgggctctttcttctttatgttcttcctagtttacagagatgtggacttggagatgggtaggtaggatcctcttgatattttttctcaggtatcttaatacttcctctccaccatgacttacctaatgtttatcttcctatttacactgcaacattcacagggcaaagactattctttgtagttttcatttctgtattcccagtgccttagtctacggcgtatattagaccctcaagaaatatttattgaccaatttaactgatga

SEQ ID NO: 529792 - DNA, 583 bp, Homo sapiens
attgctttacaccagtgttttagggttccccagaggagtggaaccaatagaatactagtaatgtaaaattcctgcttaagtaagattatcgctgaacagttataatttgacagcatgaaagcattccaggcagtcactcagaggggtccagcctaatggagtgcaggccccttcgacacatggcccccatacagaactcaggctccttgggcacacagccccyatacagagatcaggctccttgggcacaaggcccccatgccagcatgactttcacttcccagtcagaggaatgtgaggagccctgggaagcacatatgggaggtttttatgggccagacctgcaaacagtgggcagtaagtttgtcatttcattggtgacagctaagtcccgggaccacgaataacaggaagggagactgagaaaaatgggtcagacaagacagcccaggaaaaaagaaaatggcattggctaaagggagccattctctgtcacaacattaggaaacaaatggaattctacccctatcatgattgtaggctgagacgggagagtttggcagcattgttttgtggaggtcta

SEQ ID NO: 529793 - DNA, 583 bp, Homo sapiens
attgctttacaccagtgttttagggttccccagaggagtggaaccaatagaatactagtaatgtaaaattcctgcttaagtaagattatcgctgaacagttataatttgacagcatgaaagcattccaggcagtcactcagaggggtccagcctaatggagtgcaggccccttcgacacatggcccccatacagaactcaggctccttgggcacacagcccccatacagagatcaggctccttgggcacaaggcccccatgccagcatgactttcacttcccagtcagaggaatgtgaggagccctgggaagcacatatgggaggtttytatgggccagacctgcaaacagtgggcagtaagtttgtcatttcattggtgacagctaagtcccgggaccacgaataacaggaagggagactgagaaaaatgggtcagacaagacagcccaggaaaaaagaaaatggcattggctaaagggagccattctctgtcacaacattaggaaacaaatggaattctacccctatcatgattgtaggctgagacgggagagtttggcagcattgttttgtggaggtcta

SEQ ID NO: 529794 - DNA, 537 bp, Homo sapiens
cactgtacaaaagtaacaaatctgcatatgcactatctgtgtctggaaaaaactgaaattataaaaaccaagagaatatgtttctaatgaatgtagactttatttgatggactggattagaatataatatctttttaaggggaaaggcattgggggatgcacaatgtctacaggtttctaaacctctctggtttctsacctaattcatagtctcttatgtcattttcatagttttcatattctgcctttccacctcttctttttaacaagtaaaattcctcatagcatacaaaaaaacaattttataaaaaacccatattatagatcagggacctgtggattatatgctattagaactatacaaaatgtctctatatagttttctgtatctttggaatatctttgggtgaagctgcagaccttcttggtgagtgttacagctctgcgcagagccaaacagtgagcagcagcaagactgcaaagagcaaaagaacaaagcctccacactgtggaaagggaccctagcacgttgctgtt

SEQ ID NO: 529795 - DNA, 578 bp, Homo sapiens
agtgacttttttacctcctacaaagtttcaactgacagtcttattgtctctgactttcccaaattaatgacataattagtcaccagggctttggctgctcaatagggatttagtaagcaatgagtcatatgttggggaacacttcaacaaacaaaatgttggcagagaaagatgtatgaatcagctaggaagaaacactattctatcactgaggatctttctaatattagatatcacagaaaaattttcatatagattaccatatgagtgagccaaaacctctaggaacaaaaaagcttagtataattataactccttgccatgatttaacttaaaatttctttacttatttagcaattctataaacaagaatcatttctgttaaggatactaaggagagtgttcctattgaatcagaacatttaaaasaaataattgagggaactcacacatgtaaaacgtcattaaccaaactaaaataaaatgtgagggcataaacttaaccagaaatgtttaaaacctatatataaaaaaaactagaaaacacttctgaatggcacaaatttggacttgagcac

SEQ ID NO: 529796 - DNA, 662 bp, Homo sapiens
ctgatattttccctgtgacaatgttttgtgaattgtaactcagccacttaagtggctcctcataataaagccacatggtatccatgtacacatatttaacaaatcaaagaagtggttctcaacctaatctctagaggaggtccttcttgttcactttcaataactatgttgaagaatagattctaaaaagctatcaccaaattttcgaatatgttttgaaatttgtgtccacaaaatctataaatcaataaatktatagaatagagcataataatccaattaacaaatttaagatgtcatctaagcaggaatgaatgcaataaataggccttcttacttcaaaatcaactgcagaggtaatgcattgccactagacttgtgtgctgtgttggtaataaattaacaaaaactttggggataagaaaaatctgcaaataaaatggtgtgtcatttgtgaaatataatcacaaaaatgttcagattgttataattaacagaaaaactattgtttttattatatccagtgtttaacagacactattcatgtatacatacaacattcttataataactcttgtgtccatgtaaatagcagtcttgccaaaaagaattgattatcatgtagtagtttgtaagtattttcatgcataggctgcaaccct

SEQ ID NO: 529797 - DNA, 532 bp, Homo sapiens
ccaggtcatggattattccacagagcctatagaaggaatgcagtcttccaatgctttgattttaaatcagtaagacctgtgttgaacttctaacctggaatactgctagacaataaatttatgttgttttaaactactaagtgtattgtratttttataacagccacaggaaaataatacatttggcaaatcagtgcatgtttcatgatggtcaatgatatgccccagggtccatcttagccatgatttctatcccttcaaaaaccaaaacaaaataaaaaagtaaaacaaaaagaccaattttactatactacttgatttttaacaatattttatatgtatttaatccagtatatccaaaatattgtcatctcagcataaaacaatattaaaattattcagttttacattttttaaactaaatctagtttgtattttacatatagcataaatcaattcaaatccaccatatttcaagtgttcaatatctacatgtcactagtaatgactatagtggacagaattgatccag

SEQ ID NO: 529798 - DNA, 547 bp, Homo sapiens
gcagggtgtcaaaatatttaagcagaggagagacaaaagcagacctgtgttttagaaagaaaactctaacagcagggtgayggatggacaggacacaccactcaagaagctatttcagtaattcagacaaaaggtggtgcagactcaaaataagaccatggcaaagaggaatagggaagaggaaggtttcaaaaatattaagaaagtggaatctaaatggaatagggtcagttcagaaaagcaaagattcataagctttgatatggagaagagaagaaagtttaaaccaaacccaaggcaggtggtaaggggtgtaccagaaatgggaaaaaagaacacactgaaagaaatgatgggcatatgagaaacattgtaccttctttctaacctttttatgggctagtctattccatggtctctgagtatgttaacccaaacaaataaaggaagaccccaactttccagggtgtgagcataagaggctgaaaaataattggtaattaagccttaaaatcaaaggcatactccatttatcctgttatcttat

SEQ ID NO: 529799 - DNA, 488 bp, Homo sapiens
ggggaaaattaattccttgaatccaagaaggtttgaagtctaaaagggacaagagtagactaagaatctgtttacacgccatctaaaacaacaaagaaccagaataatgggaataggcaagatcagaatgtcagctcttctaattttccctgcctctgactcccctagatccccacaattggttatactggtttcccaccttgaggtcagttttttcccggttatccagtcattctcagtgttaggtagtcagtatgtaagcagatacagctgttcattacacagctacccctcacttaacacacaaacatcacactcgaaacaagcttagaagcagacacttgcccatttctcagtctcatcactggcttccatgttgatgcctgagcctcttccacccacagtcaggcytggggttcagtgccctagggatgataagtagaattctggaattatcctgtccctttcaatcccagctctgggaagct

SEQ ID NO: 529800 - DNA, 547 bp, Homo sapiens
gcagggtgtcaaaatatttaagcagaggagagacaaaagcagacctgtgttttagaaagaaaactctaacagcagggtgatggatggacaggacacaccactcaagaagctatttcagtaattcagacaaaaggtggtgcagactcaaaataagaccatggcaaagaggaatagggaagaggaaggtttcaaaaatattaagaaagtrgaatctaaatggaatagggtcagttcagaaaagcaaagattcataagctttgatatggagaagagaagaaagtttaaaccaaacccaaggcaggtggtaaggggtgtaccagaaatgggaaaaaagaacacactgaaagaaatgatgggcatatgagaaacattgtaccttctttctaacctttttatgggctagtctattccatggtctctgagtatgttaacccaaacaaataaaggaagaccccaactttccagggtgtgagcataagaggctgaaaaataattggtaattaagccttaaaatcaaaggcatactccatttatcctgttatcttat

SEQ ID NO: 529801 - DNA, 547 bp, Homo sapiens
gcagggtgtcaaaatatttaagcagaggagagacaaaagcagacctgtgttttagaaagaaaactctaacagcagggtgatggatggacaggacacaccactcaagaagctatttcagtaattcagacaaaaggtggtgcagactcaaaataagaccatggcaaagaggaatagggaagaggaaggtttcaaaaatattaagaaagtggaatctaaatggaatagggtcagttyagaaaagcaaagattcataagctttgatatggagaagagaagaaagtttaaaccaaacccaaggcaggtggtaaggggtgtaccagaaatgggaaaaaagaacacactgaaagaaatgatgggcatatgagaaacattgtaccttctttctaacctttttatgggctagtctattccatggtctctgagtatgttaacccaaacaaataaaggaagaccccaactttccagggtgtgagcataagaggctgaaaaataattggtaattaagccttaaaatcaaaggcatactccatttatcctgttatcttat

SEQ ID NO: 529802 - DNA, 491 bp, Homo sapiens
  misc_feature (1)...(491): n = A,T,C or G
ctcccctcggtctcccattgacatncttctnccagccagccgctccccgttcagacaaagggggactccatttctcactgttaactttttttttttaggtggagtctcgttctgtcgcccaggctggtgtgcagtggcgtgatctcagctcactgcaacctctgcctcccagcttcaagcaattctcctgcctcagcctcctgagtagctgggattacaggcacctgccaccacacccagctaatttttgtatttttagtaaagatagggttttgcccygttggccaggcttgtcttgaactcctggcctcaagtgatccaaccacctcagcctcccaaagtgctgggattacaggcgtgagccaccacccccagcccacttctgactgtttaataacaaagcagagagatggcaaaaagccccaaggctggggtatacaggaaactggtggttggctctttagaaggcctgcatgtggacagcccttctg

SEQ ID NO: 529803 - DNA, 571 bp, Homo sapiens
tttaataaataacaagaagaataagcattttattttatttgttctatgcaacagaccatgcaaacgagatgcagcaaactaactttcatcaataaattcaaatgctagttcctataaacaaggatcaagtattaaggcttgcatatactgataatgaaatacagattggggctatgcctattttactatcctaataagcatttaagaaatggtactacaaaaacatatttcttttgttcattcttcatttttatttctctaacctgaaatgaacgtttgtcytcacaaccttcaaaagagtaaacatgtgtacacacaaaaatgttaaatagctgtgcatttttgttcacaatttaccctcagtgttcatgctctcttattttttgtcatactgtaatatcagaaaataatgcatattaagtaattacccacttaatgtgagcaacgtcaattgtcaatccagataagacagggatttaggaagaaattacttaaatggtttatcttggctgattaagttcaggaaaggtattgtagttttataacagaatttatttctaacaataatttg

SEQ ID NO: 529804 - DNA, 485 bp, Homo sapiens
acccagtccaaggctctatattgctggcaacactcacatccctgtccagatcttccccatcttcagaggccttgttcaccccagacctctcctccaactcctgtgacaaatgtctagagaagtaaggtctgaaacttcagtacctctgatttcagtcctttacataccytgagaaacacatctcatcaatatatattgtattagtgtttacatgcaagttcaagtgtataaaagaaagagaaaatgggggtactctttcacgtatatttcttcccttcactcccattatttctaacaaaaacaatcctttttaaaaatcaaaaatgctgtgttttcctcagggtcagattggtgatacagcaaaggcagtgaatctggactctattccacaagatggagaaaaccccagacaaaaaccacaggaggcagatgtggaaaaggaaagcaggacgaccatcccttgagccagtgaagcaaagaacagt

SEQ ID NO: 529805 - DNA, 575 bp, Homo sapiens
ttttttgttgaaactagtatggaatgactattcctttccttagtgtgtgcgcccatggtgcattacacatggcacttctccctgtaggggccccactctatcacaacaaccagtgtcctcatctctcctaggccttgctcctggcccagccctgagcacatactcygcaatattcgaacccttgatcaattctgaaagcaatttattaacttccagccgtgagaaagaagtgaattagtggtcagggtaaaaattgtaggcatagtttaaaaattcattccagtgacataatgaaaaatttcatcaggagtcaagattggagatctctttttggctttgcaactgagtaaatgtggtaaagttacttgatgtctatgtacttcagattcttatttataaaattggactgaattaacatgactgaattaacacaacagcatcgtgattctgcgtctttcagtcccatacaactgtccatagtttagttgtctgattagggattataatatttgcgtcttttgtaacctaaagaatatcttatgttattcaagactgctcattttcattgacgtgct

SEQ ID NO: 529806 - DNA, 584 bp, Homo sapiens
ggtgctttttgctcttgtgatctaccttttttgaaatgtttactagtttgtggatctggcaaagcatgggctaattgaacccaagagctgctgtcattgccacagactagacctgcttagtggccgtggtggtgttttattgttcatttgcaggtactgaacatgggataagatggatgcttttgttgtgaaagcttgtggctctcttcaggcaactaactgaaactatgtgtaggtttgaggagaattttgatctgcaatgtgcatygaaccctaatataaatttaataatggctccattggaacttttggactataatgtggcttcctggtggatataataaatgaaaaataggcgaggtaggacagatatcataaactgggggaccagagagcttaatcactccttcaaaaatgttgtgtttgcccttatgaggagttgtgtgtgtgtatgcacatgcatgggtgcatgtgtgtttaaatgacttgctgccaatattttaaaaatgtttatataaacatttggtcaatttttccaaagaagccagaatctgacttcactggtctcccacggtcaatatcag

SEQ ID NO: 529807 - DNA, 603 bp, Homo sapiens
ctaggcatgactatgaaagtggcttgccatgaaatgtggcagaagtcacatgtgtcacttcccagatgaagctttaagagttgccatgtgatttgcttcatccccttccccttacattggttgaagcacaggccacgagagagcctacacagtctggtcatgtgatgaggggctatgatggaaagacctcccgaccgaggttgaacatgtcatgtaagcaagaattargcttcagttactacaagtcatggggatttaggtagaggtggtgtgttcctgcagcattatccagcctgtcctaagtaatgcagtcagcattcttatctctttagagttataggaattaaggcctcaatgttgggctgtggaggggatgttcacagttgtgatggtggcagcagtggtggaaaatctgtacatgtggtagttattgatgcacaaaaattgggcatcagtttttagaggtgtgacctacatttcagtatcgttgttaaatatctgtagggagattacatcccttctgacactgtatgtctaattgtcagtgaatatctttatataatgaaacataattctaaagaaggaaaaaactcaaagtatgta

SEQ ID NO: 529808 - DNA, 618 bp, Homo sapiens
aattcccatatggtttccgttctttcagtgttagaacctctgaaatgcagtctacttttagccttggcttctgcatgcctctttgtcaggctgaaatgcttcccgtctgcttgctctggtaggaaatggaaccaaagccgactgctctgggggacgagttcccaggctttgctttctatttggcaaacgtggctcatgtgatgggaggcacttctcctccagggcactcttgactctctgacagacaggaccagctctgaaggtggctgcaagttttcattaatgccagagctcgctataggcacttttctccctcccttacaattctgtttacaataaactttccctcaaaggaaaaacccaggattcatatgagtttcgttgttttccctggaaagaagtttttgtaaccctcagactctttagaagggaaaacatccagtaaatcctgaaatctgactgcagagttatttttcattatttgtactttcattaattcaaattccaccgaaaaacttttctctttttcctgccctgtgtaagtttactttccccsctgtgttcatatgagttcatgaaatacttaggaagtatatgaaaaatgtttcagaaacacag

SEQ ID NO: 529809 - DNA, 528 bp, Homo sapiens
ttaagagtcgtttgttgcagacagtaagaggcacggagacaaatttaattttagttttactttttagaaaaagaaaaatagaagtatttgttcaggtacagtataaatgtagaatatatatatgtgtatatattcacacaaacatacacacatgaaatatttctttgtttaaagcaatcaatrcaacgtaagactccaacactttgtgtaaacatgttcctgtactacatgaaagttcctatctcagtatttatagtatgatgttgataaattgcatgattttttttttctgattggtggtaataaatgacagtgatttatcacttaacttttcaggtgagttcaaacagttgcctaggctgataagcaactaaaatatttaacagaaaagcagacctttctgttttcccagaagcatatgtccagatattagcaataggatatgaagaaggggaaagaaaattgtaaaagggttgttctgagagcagtccgtacagtcagagctgcaataagagctcgttttcatgc

SEQ ID NO: 529810 - DNA, 545 bp, Homo sapiens
tgcagtatcacaaggcagtacaatgagggatttggacttgaggagcaataaattgatagctggcacaaaactatgtttttttttaatttaagtaactgaagacgaatttgtattattacaatggaaaagtatgacacttgttcyggctctaatctggttatggctatggaatagccataaccagtgttgtttgggaaattaatactagtctaaatagattcatggaaacataccataatttataggggaaagtctatgggatcaaagcattttaataaaattaaagtcttttaatctgaaagattgtccaatccctcattctagaaagtagaggaagactgaaacctagaagaattaaatgactaatttaagcctaaagaattagttagtgaaagagataactgatttgttcaatgaatatttatttattgggtgctaccgggtgctattggtccaatgtgcagaagatacagcaatgaacaaaatggagtcacttcctgcactcaaggagcttacattttggtagagggcatgagacaataaac

SEQ ID NO: 529811 - DNA, 545 bp, Homo sapiens
tgcagtatcacaaggcagtacaatgagggatttggacttgaggagcaataaattgatagctggcacaaaactatgtttttttttaatttaagtaactgaagacgaatttgtattattacaatggaaaagtatgacacttgttctggctctaatctggttatggctatggaatagccataaccagtgttgtttgggaaattaatactwgtctaaatagattcatggaaacataccataatttataggggaaagtctatgggatcaaagcattttaataaaattaaagtcttttaatctgaaagattgtccaatccctcattctagaaagtagaggaagactgaaacctagaagaattaaatgactaatttaagcctaaagaattagttagtgaaagagataactgatttgttcaatgaatatttatttattgggtgctaccgggtgctattggtccaatgtgcagaagatacagcaatgaacaaaatggagtcacttcctgcactcaaggagcttacattttggtagagggcatgagacaataaac

SEQ ID NO: 529812 - DNA, 545 bp, Homo sapiens
tgcagtatcacaaggcagtacaatgagggatttggacttgaggagcaataaattgatagctggcacaaaactatgtttttttttaatttaagtaactgaagacgaatttgtattattacaatggaaaagtatgacacttgttctggctctaatctggttatggctatggaatagccataaccagtgttgtttgggaaattaatactagtctaaatagattcatggaaacataccataatttataggggaaagtctrtgggatcaaagcattttaataaaattaaagtcttttaatctgaaagattgtccaatccctcattctagaaagtagaggaagactgaaacctagaagaattaaatgactaatttaagcctaaagaattagttagtgaaagagataactgatttgttcaatgaatatttatttattgggtgctaccgggtgctattggtccaatgtgcagaagatacagcaatgaacaaaatggagtcacttcctgcactcaaggagcttacattttggtagagggcatgagacaataaac

SEQ ID NO: 529813 - DNA, 506 bp, Homo sapiens
tcttgaactagtaaccccattgacaaggactagaaaaaagcagatcacattcacatgaaactgctgtaaaaagaaaayagaaaatctgagtaatttcagttgttgaatattctcccctcccaaaaaaatcacaaagcagaagagaagtataatacaacttcttaaattgaatattctccaaaaagcatttggggatacagaaaaaatataccttaaattagaagtttgaaaactaagaaaataaatttccaaaaaagaggatgaaattcagagttgattgacttcaggaattggaataaaaaggaaaaaaaataccagatatgaagattacattacaaaatacgtgagagagtagacttaaataaatactgacaattaaaactattgctatcatcctacaaggagagaaaaatcagacaacctacaaaaatttccagggccagggactattttgtgaaggcagctaggactggaagtggcaacagagtaaggccaaatatacatag

SEQ ID NO: 529814 - DNA, 513 bp, Homo sapiens
tccaggtctctacttcctaatctctcatttacttttcaacctcctgcagtctagtttctgtctctcctcctccatgggacctatttaaactttgcacctccagagtgacaccttttgtctgtacattttggaatattgtcatgatagagccagttgcctaggcatgacctcaaagttgccctttgctgcttcctctctctagcatatctacatccaaatagtttccaagtcctggttatgctgcctcctgaataattttttcctccctcccctcaacttygtcctcactacttactacttgctttagtttggctcttagtctctttgccagaactagcaaagttctcctaactgcttttcctgcctctaatcccgccctcccctttattccgtctgttacaaccgctgcaagattatacaatgcaaaccagttcacatcagtgcttgtttgaagacctccaatccctgttacaaatagaatcaaggccaaaagtccttcataacctggtcccc

SEQ ID NO: 529815 - DNA, 360 bp, Homo sapiens
cgtcacttttgatggacctttacagcctggaaacctcaggcaaaaggcagcggtttcaagggtcattgccatccatgatgatgtctccagtggggggcttgaggcaggtcaaaatagagctggctgcactgatttttcctaagataaccccaactccaaccactgacagacccctgctaaaatatgggctattgtgagggtggtgagaaagcctaaagtagccttcaggaatcagggccagactactcctctcttggtttccaattgttcagagaggcaaaagggtggactgcactagagtcagaaacaaatgtttcccctgtcaycctggtctcatccagagagaccaggccattcccc

SEQ ID NO: 529816 - DNA, 540 bp, Homo sapiens
actttttaaaactgaccatttaatttggggaaacaacttttttgtataaagggaaaactcaacttcatgtgttttcctccagctcccctgactttttgagactatgtattttgctgttggggaacttttccctcgtcagttatacaataaagtctttgttgttcagcattctattaaccacaaccctccagtaaccagcacatctgtaaatctctagtacaataattgttgttcataatcatgacccaggggctctgcgtggtctcaaatgccttctgaaccatcaaagagaacatactgaaatgagcttgcattcccagagcacacatcaaccaaccacagagggcaggagtccagaaagtgctaggtagaagaagaactaaaacaggaatgttgaatttgccacaggtacttccccctgtggataatgaatacctacagtacaytggttagacctttctgctgtttctgtgcgtttctttgtgcacaatgtagactcaaccaaaatattaatgcttgtgctcaacttttgaaagcaca

SEQ ID NO: 529817 - DNA, 556 bp, Homo sapiens
tcccctgacttttctccctcctcccctccccacctctccttgcaccaccctcctactagtccctgtggaacaggtagagctgccaatcacaatgtaccctggttatggactgtaattctggccctggccaatcgtaataccctatttctctaaacacaaggattagttccatagcaaattttataatttaaacagagaccatcagaattcattcctaggagtggtatacagatattgggagagggagtatctttctgctggagaaataagttaggaggaagtaactctagggctgctgtttccatcctttttcaatctgcaggtgccaagctgagaagagtgagacacacaattttggcatagttgaatcccaaatttcaggttctgaggctcaggtccttacagttctttcctcccctcmcctccccttccctccccttctcttcgctttctcccctccctccctccctccctctcttctttccttccttccttcttttcattcaacaattattattgaggatttatgatgtttcagacaattttttaagggtgc

SEQ ID NO: 529818 - DNA, 556 bp, Homo sapiens
tcccctgacttttctccctcctcccctccccacctctccttgcaccaccctcctactagtccctgtggaacaggtagagctgccaatcacaatgtaccctggttatggactgtaattctggccctggccaatcgtaataccctatttctctaaacacaaggattagttccatagcaaattttataatttaaacagagaccatcagaattcattcctaggagtggtatacagatattgggagagggagtatctttctgctggagaaataagttaggaggaagtaactctagggctgctgtttccatcctttttcaatctgcaggtgccaagctgagaagagtgagacacacaattttggcatagttgaatcccaaatttcaggttctgaggctcaggtccttacagttctttcctcccctcacctcccyttccctccccttctcttcgctttctcccctccctccctccctccctctcttctttccttccttccttcttttcattcaacaattattattgaggatttatgatgtttcagacaattttttaagggtgc

SEQ ID NO: 529819 - DNA, 456 bp, Homo sapiens
gccagaacaacagtctcacaaggaaaagcttagggtgttaagagcagaaaaagtaaatgatggcagaaaaaagggaagtaggcaggagaatgtggaataagatgagtttggagactgtgtaaaacttatagtccctgsccagggatgaaattttattcaagtcgctgcaggaagatttttaaaagaagaagatgccatgatcaaatttgaatttgaaaaggattactttgtctattatatgaaaataattacagggaggaaaaagtgaaagccagaaagccaagtcagtgttttgctcttatattaattaggatgattgtcattataacaaaattaatcagactaggattgtattattattaatacacaaacagtctcacgatgactctccagcctcacaaatatcattgaggacccatgctctttctgtcttttagtgtgttatgctcagcatgt

SEQ ID NO: 529820 - DNA, 606 bp, Homo sapiens
aatacctttatcaccgtttattgacctttgagaactataatccatagtagacttctctgaattgttatttaacaactcttcttgaccaaggagccttgtttttgtcatctctgagttgcrtggggccaaagatggtgactggcaagtttaggtcacattgtggctgtttgtgggttggtgcttctggcagtactttgagattgttttggctcatcactctcctggtccattccctctttctttttatctctttcacgtcaccttcaatgctgctgctgatcctccttcaccgcattgtttatcctctatttagctgcaagagagttatttcttaaggagcccccatacagcagttctggtttcccttccaaagcagtactgctacttctatcctaagggcgatctcatcgtccttcataacagagccagcatagtcatttcttgctgaagttagtctgactttgatttctgtcacttgttaccaatgttctgacctaaatatatttgtctgtatagattgcattctagatggggatagaaagataagtatagataagcaaggcttaaaaaggaagattgctgtgtcctagttaatcagctgagtca

SEQ ID NO: 529821 - DNA, 606 bp, Homo sapiens
aatacctttatcaccgtttattgacctttgagaactataatccatagtagacttctctgaattgttatttaacaactcttcttgaccaaggagccttgtttttgtcatctctgagttgcgtggggccaaagatggtgactggcaagtttaggtcacattgtggctgtttgtgggttggtgcttctggcagtactttgagattgttttggctcatcactctcctggtccattccctctttctttttrtctctttcacgtcaccttcaatgctgctgctgatcctccttcaccgcattgtttatcctctatttagctgcaagagagttatttcttaaggagcccccatacagcagttctggtttcccttccaaagcagtactgctacttctatcctaagggcgatctcatcgtccttcataacagagccagcatagtcatttcttgctgaagttagtctgactttgatttctgtcacttgttaccaatgttctgacctaaatatatttgtctgtatagattgcattctagatggggatagaaagataagtatagataagcaaggcttaaaaaggaagattgctgtgtcctagttaatcagctgagtca

SEQ ID NO: 529822 - DNA, 618 bp, Homo sapiens
ctgcccttctatggcagacacgggcctgacaccttcctcaatagtcacctgacgttaaaaccagatgaaaatcccttgggagagctctgctgagtttaagaccttagcatggcacctggggtttttttagtctaagttttccttgatgtcggctcccaccttgcgtcctgttatagcccatactctagctatggaaaatgcttgttgttcacggagcacactagattgttccacagctttgtgccttcgtttggtgaatacctgytcctatttcaacactcaccccttccctgagttttctgagcttttgggaaacccccattgtatatccctcatgcctccactgcaccttgttttatggcctctttagcattttactgggggaggtttaatcctgtggctgtcactctttctagattgtagggactttgaaggcaaagactatgtctcagctagctctgtgttcctaatgctcggggtctaatagcccctcaggaaatgttttttgagtggataaaatctactttgatttctcacaaaaatcttgtggtactgacagtttaataatggtgcgaggaagcgcttttacagtaagcagaatgtggttgtgttgaggtg

SEQ ID NO: 529823 - DNA, 332 bp, Homo sapiens
acccagacaccctgatactcacacsgtgggtctggggcccggcttggctctgcctcaccaaataagacaggtggcctgtggttggccccccaaccaatctaccctactgcttagactctcacctgtgtgcacctgctgctgttgcctgcttaatctgtgtaggatgaatttgtaaatatccatggaaatgccataaatattctctaattctctcagcacttccacaggaaggacagagagcatctctctctggttccctgacatcctgttactgctcctgagggattctaatacctccagtcaccttgaccccatgtctttggtaatgtctg

SEQ ID NO: 529824 - DNA, 332 bp, Homo sapiens
acccagacaccctgatactcacacggtgggtctggggccsggcttggctctgcctcaccaaataagacaggtggcctgtggttggccccccaaccaatctaccctactgcttagactctcacctgtgtgcacctgctgctgttgcctgcttaatctgtgtaggatgaatttgtaaatatccatggaaatgccataaatattctctaattctctcagcacttccacaggaaggacagagagcatctctctctggttccctgacatcctgttactgctcctgagggattctaatacctccagtcaccttgaccccatgtctttggtaatgtctg

SEQ ID NO: 529825 - DNA, 559 bp, Homo sapiens
ctggtaaagagagggccaaaattctctctcagctctgccctaactagggtggacaaccatccctgcttgcctgggaccatccctgattttagtactgaaaataactacatcccaagggacccttgagtcccaggcgaactaggacggttggttaccctagtcctagcacagcatactcccttctaggtttgtaattgcctttttgtcttttcgatgttttaagtggtctaaaacaaatgaaagtaggcacaggtggttctagctatgctatcaactaagttgkgtaaatcagatgacactatggcctagttcaatgttaaagaaatgtttctgctcaaacaaggccaggaagaaaacccttcccattgttagccctcccggaagtgacagcaagggttctcatgtgactggcacctaattccactgtattgtttagcttattcaaaatgctaacagtacgtggataataatacgttcaattgtatgtttgatctttattaagaccgtggtggatgttcatcaaccagaattggtaacttgtgcctgagagacataccca

SEQ ID NO: 529826 - DNA, 584 bp, Homo sapiens
tctgtgatgtgagggaaagccaattcctgtggaagtttccagttctgatggtcttatgattctgaccatggccaactcccctgcctaatggaccacattccaatgagccagcccttgccaaatactctttctgacttgcactggaattgctgaagctccctgctgagtgttccctaccagcatcaagttgactcactgatctggaatgtggcttcctgagacacagcagaggtgagaatgaggatcagtgtgatttggctcagctttaataacacagccttccccatgcagcacagcatcaactgaggtgagacaaaggaaaatcaaagaattattcatgttcacccacagcacatcaatctgaaggtttaaatgggttctcagggaaaacacaaaccattatttttgttttaactacaagaygctattgcagtatgtccagtctcctatcaaatgcttccagattgtttctgagagttcccatggggcatctcagatgtgctcataaaaccctcagtttccacatgtgactgccattttgctctgtttcttccccaatgtcacttcacaaatgtcagctttct

SEQ ID NO: 529827 - DNA, 584 bp, Homo sapiens
tctgtgatgtgagggaaagccaattcctgtggaagtttccagttctgatggtcttatgattctgaccatggccaactcccctgcctaatggaccacattccaatgagccagcccttgccaaatactctttctgacttgcactggaattgctgaagctccctgctgagtgttccctaccagcatcaagttgactcactgatctggaatgtggcttcctgagacacagcagaggtgagaatgaggatcagtgtgatttggctcagctttaataacacagccttccccatgcagcacagcatcaactgaggtgagacaaaggaaaatcaaagaattattcatgttcacccacagcacatcaatctgaaggtttaaatgggttctcagggaaaacacaaaccattatttttgttttaactacaagatgctattgcagtatgtccagtctcctatcaaatgcttccagattgtttctgagagttcccatggggcatctcagatgtgctcataaaaccctcagtttccacatgtgactgccattttgctctgtttcttccccaatgtyacttcacaaatgtcagctttct

SEQ ID NO: 529828 - DNA, 561 bp, Homo sapiens
gattttccatttgcaatcacatcatatagttgttagaatttagaggtcacatttctgtaggaataatagtggtctttgttttctatcttcttgaattttttttttttttgacagaatctcactctgtcrccaggctggagtgcagtggcacaatcttggctcattgcaacctccaactcctgggttcaagcgattctcctgcctcagcctcccaagtagctgggactacaggcatgtgccaccacacccagctaatttttatatttttagtagagatagggtttttccatgttggccaggctagtctcaaactcctgaccttaggtgatccacctgccttggcctcccaaattgctgggattacaggcatgagccaccatgcccagcctcctctttgcttttatactgctttgatggttttgttaccccattcaggaacccataatggcttcctgttgtctgtggtcaaaactccagacctcaaactctggtatttgaggctttccacatcatggcttcactttccagctgtatttcccaacagtcttatatcacttccaa

SEQ ID NO: 529829 - DNA, 583 bp, Homo sapiens
ttcctctccagggactctgcccctccctgagccttctctggctgtgcccactcttcatggaatgaggaacccacaagaccaagtggacatggtccatacagagtccaaatcccaggtcctcttctagatcagactttggatacctaggaacctaaaattcccacccagactatcccaagcccacctccagagtctgtgtttacctgtgttttaaggtagactgtgatgttggtgtgtgtatctctaggcaagagggaggccagggggcactggggagaggttggatggagtatgtctttgtggactgcagtgtctacccagttatgtgtaagattcctcagggtgcaagacagaggcaggggtgagaagagaatctrtgtatgtgccctaagatgcacaaatgttaaaacgagactgatgatgagacatgtcagcaagcaggcacgtagtctcataagccaggcttaagtagtggcttgtagcagagggaaaatggaagcatgaaactggtgtttgaatctcagctctgcaacttattagctgaatgaagtctttcctgttctttaatctctctgaatctagt

SEQ ID NO: 529830 - DNA, 568 bp, Homo sapiens
gctgctgtgaagcttcaaaactaagacacacctggaacctgggtagaacagaaaaataaaatgaaacaaaaacctgaggatactgtctctgtcccataaaggttcccattcctgcttctctggtgaaaaaaataaaaagagagagacagatattcttttggaggtatttctgtccatgcttagtatatagttttaggatttgactgcacttgagactgtattatatagaataaaacaaaacaaaacaaaacaaaatgaaaacagaaaatgtaccacttgagtttttagtattttcaattctaattttcttacccaatctacctgctacaatttactgttgagagtcctcagattgctatctactgcattcgatctaggcttctatttgtatttcttgggagaggagggataacgtgcttattcaaccttatttaaacccaaaactctactatttattttttwaaattagtttggcctttatatttccattttcaaaattctttactcttttctgattatttatttgtcatagcattcattttccctttatgtatgtgatttagctttg

SEQ ID NO: 529831 - DNA, 483 bp, Homo sapiens
ctcactctccccaaatacaccgtgatatcattgtgccctstctctactcttggtgaccctggaacacatctcgctgcagggcaaatgtccttggggtgtcatgttcctctggtttccagtctattgaccctgtcactcataacaacctcctctgcacctggggttcctctgcctcacagcctgggtacaggtcctgaagcccagaaaaaggcagtagccacattccctgcctggggacactgccaaagacggaaatgaggcttgcctgccatgaccggctcagccagacaaacctcatttcctttctggcatggtaagaagttccagttctaagaagaaaccagcccttaggaatgtctgaaatcccacctcctggaagaaacaagagggaaggagcctggatatgtggcagaaacttggtaaccttcagaatgtggtcaatgtgatcatcctcattccctcccctctccccccacccccaca

SEQ ID NO: 529832 - DNA, 551 bp, Homo sapiens
tggcttccattttggcaagagcaaaaacagatacacaaactataaatacgttagaatagttgcctrtgatatacctgggaaatagaagtgggaatgaggacaaaataaaacaaatacatgaggcaagagagtccatgagtagaccccaatgatgattattggccatgaaaggaagcttgatggctggatggaaagaaggaaggaaggaaggaaataagtaagggagagatggcggatggagctggatgtgtccttccagggctgtacaaaggagggggaccccaacccctagtccagacaaaggtccctaaggcaggtgtacagtattgtggggatgaattcatcagccacgagagactgacccatctaatgttaaattcacttccctgctctgactgctgactcaccagcagttagcttatcctgcggcttcccttgcagtgaattcagccagagatttctaagctactcaataacagttctaatcttcccagtaaagctgcaactttgcattccagtatgtaagtaagtctcctgggagttttattact

SEQ ID NO: 529833 - DNA, 594 bp, Homo sapiens
agaagagtccagctgaaatctccctgtggtgactttaggtctccctgggctggctcaagtctccctgggctggctttaaggtagtgtttttatcagaaaaattttggggggtggattctgagattagtaagtaactggtggaaggaaaggggaggtctggaaagtcctcagtcatgcacaattatttcttcatgcctcttcactggtcacatgtgcaattcagggggatttagaatgaaacgtggtggaaatttgggttgtgacaccagaaagctctttctgtgaacagcccagttgccctgtttgttccaactgatttcagccagttcttttatctcaagcagagggagttttggcatttcagcacattgtttcttttcttatctgccatcctgcaaactcaggaatttctgttagtcattgttttctttaactctttgggacacagtttcacaggtatattcctcaggttcagggaygggagatacggatagctgggtgcagtggctcacgcctttaatcccagtgctttggaaggttgaggtgggaggaccacttgagcccaagagtctgagaccagcctgggtaacatct

SEQ ID NO: 529834 - DNA, 633 bp, Homo sapiens
ccatagcaggcccagggctacccgggtttatatatatatggccaccttccccaggaaggagggaactgctacccttatcctgtgaaagtgcgagctggctttctgcattggaagtacagagggcagaacctggggaaaatgcgtctgcgtggatcagtaggaagggtggagcatcactttaggcaggtgtgctgagaagaagacaggtgtcagttgatgggcactattggtgggagggagcttgaaggcagcgtggtccctgaggtccagccgcctttctcaaaggacctggggtggccattgggggcgggggagcggtgttctgtgcctttggcttaaattctgcagcattattgttattacttgttttttcttgaaataaaaaaaaaataagttgccctatgaaaaaagatacatttctttttcagtgacgtaatgtgagaaataacatttgtaattgggattttttaaaagcacttctgtttttgtaaaacaaaacaattttttaaacatttgtaaaaamgtagaaggaacagaaggaatggtgctactatgcttttgctctcaccttagaaaagggcgaatgatatttcacttgctccccaaaaactgttcttaaagatcatggtggtt

SEQ ID NO: 529835 - DNA, 566 bp, Homo sapiens
tcccaatctttaggctgccgattcattttgttgattgtttcctttgttatgcagaagctttttaacttgatgtagttccacttgtttatttttgttttcattgtctatgcttttggtgtgataccccaaaaaaatcattgccaaggccagtgtcaaggagctcttctttcgtgttttttttctaggagttttacagctttgggtctttcatttaggtctttgattcatattgagttgatttttgtgtctggtgtaaggtcagggtccaattttattattttccatgtgaaaatccaattttcccaatatcatttattgaaaagactgtcctttccccattgtgtgttcttggtgcccatgttgaaaattagttgaccatatatactcgggtttatttctgggctctattctttccgttggtctatatgtctgtttttatgccagagccatactgtgttgacttgctgtacttttgaagcacatgcattctggggttctgttcccagatctcttaaatkgaggaagcagaacatgactcatccctgccttcctggcatccggagggg

SEQ ID NO: 529836 - DNA, 644 bp, Homo sapiens
ctgccgattcattttgttgattgtttcctttgttatgcagaagctttttaacttgatgtagttccacttgtttatttttgttttcattgtctatgcttttggtgtgataccccaaaaaaatcattgccaaggccagtgtcaaggagctcttctttcgtgttttttttctaggagttttacagctttgggtctttcatttaggtctttgattcatattgagttgatttttgtgtctggtgtaaggtcagggtccaattttattattttccatgtgaaaatccaattttcccaatatcatttattgaaaagactgtcctttccccattgtgtgttcttggtgcccatgttgaaaattagttgaccatatatactcgggtttatttctgggctctattctttccgttggtctatatgtctgtttttatgccagagccatactgtgttgacttgctgtacttttgaagcacatgcattctggggttctgttcccagatctcttaaattgaggaagcagaacatgactcatccctgccttcctggcatccggaggggsctccaggaaagttgtggcatccagttagccgcttccacgtgagtcccagtcctgctgacatgtaagcctgtccccagtgtcgctgagccag

SEQ ID NO: 529837 - DNA, 237 bp, Homo sapiens
cttgtcactcccctgctgaaaaaacttcggtggctctctaaagccccaggatcaaggttatctccttaccctccttttcaaacatcccacacccctctacagtctggtctcaacctaactgctstactcatctgctcctgaagagatgggcccccgattcctttgctgattccatccctgtgcatggagtgtgccctcctctcacttctgtgtccagtgacattctgtgatgtcacc

SEQ ID NO: 529838 - DNA, 662 bp, Homo sapiens
cccccaggcacctcctgccccaacttaacacacacttcctctctacctgcatcctgctgccaacctaggtggcctcagtgtcccctggacttaacacttcacttcagccttacagtccaggatcacctttgataacaatcgcagcagataatgttaatggagcacttgtctcgcgccaggccctgttcttagttctccatacrtgtcatcttgtttgatgctcccaatagctcttcagagggagcctcgctctgtcacccaggctggagtgaagtggtgcaatctcggcttattgcaacctttgcctcccaggttcaagcgattctcatgcctcagcctcccctgtagctagggttataggcgtgtgccaccatgcctagctaattttttgtatgttagtagagatggggtttcgccatgttgccgaggttggtcttgagctcctgagctcaggtgacctgccctccgcagcctcccaaagtgctaggatcacaggtgtgagccactgcacccagccagagcaccattcttctagtcatcttacgcatgagcgaggactcacgatttgcccaaactcatgcaggtgaggagagctggaatttggtgcaagtaccatagtgcctgaaccaacaccacctgaggcctccccacctctgaaacct

SEQ ID NO: 529839 - DNA, 662 bp, Homo sapiens
cccccaggcacctcctgccccaacttaacacacacttcctctctacctgcatcctgctgccaacctaggtggcctcagtgtcccctggacttaacacttcacttcagccttacagtccaggatcacctttgataacaatcgcagcagataatgttaatggagcacttgtctcgcgccaggccctgttcttagttctccatacgtgtcatcttgtttgatgctcccaatagctcttcagagggagcctcgctctgtcacccaggctggagtgaagtggtgcaatctcggcttattgcaacctttgcctcccaggttcaagcgattctcatgcctcagcctcccctgtagctagggttataggcgtgtgccaccatgcctagctaattttttgtatgttagtagagatggggtttcgccatgttgccgaggttggtcttgagctcctgagctcaggtgacctgccctccgcagcctcccaaagtgctaggatcacaggtgtgagccactgcacccagccagagcaccattcttctastcatcttacgcatgagcgaggactcacgatttgcccaaactcatgcaggtgaggagagctggaatttggtgcaagtaccatagtgcctgaaccaacaccacctgaggcctccccacctctgaaacct

SEQ ID NO: 529840 - DNA, 215 bp, Homo sapiens
gtgcggtggctcatgctggtagaatttgggargatcacttgagcccgcgagttcgagaccagcctggacaatatagggagaccctgcctccacaaaaaataaaaattaaaattaatccaatgccctagttgaccaatcatttcggaagggcttggagagggtccacctgagtggtctcgttacactccccctccccatatttttgttatgcccat

SEQ ID NO: 529841 - DNA, 389 bp, Homo sapiens
agctgggcttgtctgggaatccataccactccctaatcatggggtagcaagctaggtagagttgtatggctctycactcccaggccctgccactacctctcaacccaggaaacctctattctgccagtggtaggcatgccatctgatctctctcacatggctttgcagccaccggggatccgtgcctgagacgccagggttgcaggtagattaggctcagggccccagcggtgtcaggaagggctgcattactggaatgatgcacttgccacttagcggggctgcccctcgccaaccacctggagggaggcaaagccctgggtccaggtgaaccgacaggcatagcagcactgtgtgctgggtgaaaacaccgatcccactagagtgct

SEQ ID NO: 529842 - DNA, 603 bp, Homo sapiens
caagtttgggagagaggaaagctgggggatgttgaggtgaaaatcagggttcttgctgccttaagcctaatgctcatgaggtagaaggaaacagggaatggcccccacagaaggtggggccagctatggaggatctgggatgccaggactaggggtgcagccactaaaggcaagaaactgggaaaggtggaccaggagccttcattgggtttgtgcttcacatacacaaaatcctttaagaagctggcaggacacatggggatgtggtaactagacactgataatctgaaggttgggccttccaaacaactagggctccaccctttcaagaagtgggcagaagatgcccagggctccagaaagcaaaacacactcctgtgaacagcccccagatgtggaaatgctggcatatccactgggatgatgagcaggggctgggctagcacgggtggcatcagcatcctcaggccaaccatgacagggcgggcatccccggggcccctgtgctgcagaragccagggcccagcagggacttcacagggctgcagcacacacaggcagatgtgcgtcccagcttgttccttctgagtatcgacagacca

SEQ ID NO: 529843 - DNA, 511 bp, Homo sapiens
tgagaatccacagaagcaccaatcacttggcagttgaatttcttaaattcttctgtatcactgaaagcaatgttctctgtggggcacacaaaagtgaagtcaagcsggtaaaagaagaatacaacatatttcctttgtagtcagacaggctgatatctttaaactgactgtctggcataatggctgtggctttgaagttgggggcagggtgcccaattttagcgtttcctgaagacatcttcctatcagcagtcctgacacaagcctctgagaacaaaccaccaacaccaggcaggaagaggacgctgtgatagttattcttaatgaaacatgaaagcaataatattttatgctatatgacttcctatttcaaattaattggaactgttctgtagacaccaacagaatcaaaaactattttatatcagtgtcagctcatagagacagtagataatagaaatataaagcacaatttttaagggaattgcatataaaaggagatgagaaccag

SEQ ID NO: 529844 - DNA, 551 bp, Homo sapiens
ccccatgttctcactccttccattccttcttcctcaccagccctattctgatatagttttgaggagtgaaaacactctctgtaaggcacccacatgttttttcctaacatttttgccagcagctactttgagacttcgcttaggtttcagtgtggtctgcggggacaaaagtgtggtgggggaaaaatggccctttgataaagggaaagagagagagaatatacatggaaaataaacacatttgtacttcaaaaaaggatattttttgcttgctattatctacttatatgctgaatccaggtaatgggatgacttgtcaagaaaagcagtcagagttaatgaactgtatttcttaggggactattgtgtgcttctgtccatgacaggtgagaagtatataaagtttctgggtcatctggcggtcctgggtcagcctaacatgcctggcakgcagaagtggtcattcctgtttgaagacagaggaaaggaatggagcagtaaaaaaggggaaagaaaaagtattgaggaatgagccaggaggggagggaagg

SEQ ID NO: 529845 - DNA, 600 bp, Homo sapiens
ggcaaaaatcccacttgtgcatagaattctgcccttttcaaggcaatgttcagctactaccccggaaggacaaaaaacttactcacacccaagatctcccacctatacaagatagttttgttgacactaggaggagaagcaggaaatttgcttacactctccaagtgcactggggaacaagcaggaaggttgagaaaaccccacttcctgggctcatatatatataagacyggcccaagtctgagggtggagtaggggaatgagaaaccactcccgttaccaccagagaccttgcatcaaataacaaggaacatagttgtgccttaggagaagggcaagagcatggacaaagaacccttctgtgatgcaggtgagcaaggcttgctgaagactgggggtgaagcaaaaacattgagaaacacactctggaaccccaagccccactctgggccaagataatagcagcccaacactagaggatatccactgacaaaaagaatgtactttgatttttatgtcaccatgtataaaaactaactcaaaatggaccatacacctaggtggaagagctgaagctctaaaacttctagaagaaaacgc

SEQ ID NO: 529846 - DNA, 621 bp, Homo sapiens
ctacagagtctgagcagggaggatcacttgagcccaggaggtcgaggctgccgtgagacatgatcacgctactgcactttagcctgggtggatgacagagagaccctatctcaaaaaaaaaaaaaaaaaagaaagaaagaaagggaatggggatagaagtttttaattcagtctttaaagtggggttttcttttctttttgattgaggcaagcattatatacgagggcwtgctccaaggtttatgttttgttataatttacatttaataaagtgtattcatttaaggaaataatccagtgagttttgacaaatgtgtatacactaatgtaaaacactgccacaatcaagacgcatgacttttccaatgcgtgagaatgtttcctcatgatctctcaggccagtccctgccctcactggtttctattacctgagaacacttctacctgactttgaccttcatgtaaatggactcacacagtatacatgcgttttttgtgtctggcttcttttgcccaatatatttttgatgttcatccacactgtagagtgcatttgtactttattcttttattgctgaatagtgttcaactatatgaacataattttttattcgttttctt

SEQ ID NO: 529847 - DNA, 523 bp, Homo sapiens
gctcccagtgcctccagacaggctctggtgcttctgtgaggccccgcccctcctgtttctaggggcctaagtgtaataagcctccgtcccacagtcattcctatggctgtgtctcccccaccagcctaaagcaaaccctgggaacccttcaaacacctgcagtgcagagtcctttctccatgttatgtggggccgctctggtgtcccagcccctgtgaatgaggtcacgacgccagctcagccagtcctggaagccatctgagagctgctctmctgctcaagccaatgtgtgaaatacggcattttggatacatcatcaccagtgagccaagctggacgctagttaaagcggtgaggacaggttttattcagcagcttctcagagccagggacagactggttccatgccactttgtgcaggggagaaggggtgttctgaagggagagtggttgggggtgcgggagggagtgggggctccagtgaagagttacagagtgctggtcagggtcagtgcagtggggc

SEQ ID NO: 529848 - DNA, 523 bp, Homo sapiens
gctcccagtgcctccagacaggctctggtgcttctgtgaggccccgcccctcctgtttctaggggcctaagtgtaataagcctccgtcccacagtcattcctatggctgtgtctcccccaccagcctaaagcaaaccctgggaacccttcaaacacctgcagtgcagagtcctttctccatgttatgtggggccgctctggtgtcccagcccctgtgaatgaggtcacgacgccagctcagccagtcctggaagccatctgagagctgctctccygctcaagccaatgtgtgaaatacggcattttggatacatcatcaccagtgagccaagctggacgctagttaaagcggtgaggacaggttttattcagcagcttctcagagccagggacagactggttccatgccactttgtgcaggggagaaggggtgttctgaagggagagtggttgggggtgcgggagggagtgggggctccagtgaagagttacagagtgctggtcagggtcagtgcagtggggc

SEQ ID NO: 529849 - DNA, 523 bp, Homo sapiens
gctcccagtgcctccagacaggctctggtgcttctgtgaggccccgcccctcctgtttctaggggcctaagtgtaataagcctccgtcccacagtcattcctatggctgtgtctcccccaccagcctaaagcaaaccctgggaacccttcaaacacctgcagtgcagagtcctttctccatgttatgtggggccgctctggtgtcccagcccctgtgaatgaggtcacgacgccagctcagccagtcctggaagccatctgagagctgctctcctgctcaagccaatgtgtgaaatacggcattttggatacatcatcaccagtgagccaagctggacgctagttaaagcggtgaggacaggttttattcagcagcttctcagagccagggacagactggttccatgccactttgtgcaggggagaaggggtgttstgaagggagagtggttgggggtgcgggagggagtgggggctccagtgaagagttacagagtgctggtcagggtcagtgcagtggggc

SEQ ID NO: 529850 - DNA, 319 bp, Homo sapiens
aaatgaccctcgcagcctttcctcytatgaaggagcagaaaggaaaaatgattattttccatgcaaggctgttatacaaacaagtgtcataccaagccgcagacaatgaaagagtaaagtgcccagttctttttctttcaaaggaaaatctggtgaaattcatcctattaaaaccacctttgcaggccaggcacagtggctcaacacctgtaatcccagcactttgggaggccgaggtgggcagatcacttgaggtcaggagttcaagacaagcctaaccaacatggcaaaatcccatctctattaaaaatacaaaaaa

SEQ ID NO: 529851 - DNA, 650 bp, Homo sapiens
cccttcatccccatgggaaatgaacgtccggagaaaagcaggaaaatgtgctcattaccaaggtgagtgggggtaaagatcttgcctttgcttatgttttggctttctataaacgcttctaagatcatcagggcttctgggttttcatgcagggtgtggcctgcaggcaaaatggggtagggagtcgggagaggcagggtccccaggcccacgtrgggcaggggagcagggccccactcttcagaccggatgctgacaggtctcccagggcctctggcctcagagaggacttgcactgctgtccccgggacctgtctacatatgtagcagccccaaccccaggccaaaccatggagcaggagagccaaggccccaagggtgagcccaggactctgggtgacacccgagctggctctggctaagaagaggccttggaagaagcccttgccagcccagctccaggctggaaaagaggcctgagtatatctgggacctgagcagaggggcctcctgtgtggctgacagcaccctgggtggttctcttctccttccctgaagtctccataggaaggggtcctaccaggcccctctacagagcagagaagggctctcctgggcttggggatgccctgccccactgccgcacctac

SEQ ID NO: 529852 - DNA, 542 bp, Homo sapiens
tctaaagtgatcgtttagtataaaatctagattcaaaactctattcttcttggatcacaaacctctttgaaaatctaaggaaagctaaagaccctgtagcaggcagcttctgacaggactcccaataatacccacctcttcatattcccagtcctgtttaatctccttcccttgagttctggctggacttagcaacttgcttctaatgagaagaatgtgacaaaagtgaagggatgtctcttgtgttattacatcaccaaagactatgacttctgttttactagtgctgtctcttgccctcctacttgctctccttttatgaagcaagctaccttgtgtgagatgccccatgaagaggtccatgtgtcaaggaagcaaaggaggcctccagccaacagctcacaagaaactgaggccaagaacccacaaggaactgaatcctgccaacaaacaggtgggctaggaagtgaatcttccccagtcaccttgagatgactgcagccctgtgagaggcaaagctasaggaccaggctaggcggcag

SEQ ID NO: 529853 - DNA, 414 bp, Homo sapiens
tggagggggaggggaaatgaaataaatagatgaacttgagatmcagttgcagaactggcctgatgtgaacagttaaagaaaatctaaggaaaaggtatccaagcactgagtacactgaggaagatataaggtagaggaatactgcattaacagcaaaacaaataagctcaacagacaagcttcttgcaagtagataaaatccataactgagtgcggattagaccattcccttgaaggaatggtttccgagccttccttgtcggtgagcaaaaatatcccaaggatactttaaaaggcacattattttatatctcttgaattctacatcaaaatgagacttgaatctaagaaaagtttgtaaaatggaagtgggaatgtggtccaaaactggaaaagacctatccagggcacggg

SEQ ID NO: 529854 - DNA, 597 bp, Homo sapiens
tgtttttcttcagaacatcaacagcttctttcctaaactagttttagtatgagttccatttctaattagctcaaattaaagtcctagagagcagcgaggtaatatttaaaccctcaggctaaaatttcggagtaggtgcagaatgttgactctaaatgagtttttcccgtgacataacacgcatgaaagcaggatttctttcatgtgtgaaatgtcttaaatcagacttaccctttgtgattcttttagctttaaatgtcatttaagaaaaaaaaagaaaagaaaattaagcatgacattccccaatatcctctgctcactgtgttataatccctatcactccccaagtgaattggagagagtgaagacacaatgaacagaaacttccctgatgctacacagaggaagtgttctccaggaccacacagcctccaccatgtccatctacgaagggctgtggcaagccatatacacaaagatgcctgtttcctgtcttctcggttaaaaacaaaaacaaaacactggaaggaaccccaaagccaagctgccatgggttgcagaatgccagyccttaagtagtgttgtccatgggtaaac

SEQ ID NO: 529855 - DNA, 557 bp, Homo sapiens
ggaaaaaggaatgagccaaaagggtttaaaatcacaggtaaccagaaacagyacaattgtttccgttttctttcccatccaatttattagcagggctgctattattagcttctcgttgaccttcttcccttgtccctttcagcctgtgggtggagtagttaaggaacaatagaagatccaaaaggaaaaggaaggagaagttttgttaagggctaggaaaatcacagactgataatcagcccgtggctaatcaacccttggctttagtactttcaaggcagaatacagtcacacccgatctcaccccagtccttgggaggggcctgattttcccccagtcttcctgaaaattgaggaatttaagtatttgtttgtttgtttgtttgtttgttttttgagaggaagtctcactctgtggcccaggttgaagtgcagtggcatgatctcagctcactgtaacctccacctcttggattcaagggattctcctgcctcagccccccgagtagcggggattacaggtgaccgccaccatccctggctgattttgtattttt

SEQ ID NO: 529856 - DNA, 557 bp, Homo sapiens
ggaaaaaggaatgagccaaaagggtttaaaatcacaggtaaccagaaacagtacaattgtttccgttttctttcccatccaatttattagcagggctgctattattagcttctcgttgaccttcttcccttgtccctttcagcctgtgggtggagtagttaaggaacaatagaagatccaaaaggaaaaggaaggagaagttttgttaagggctaggaaaatcacagactgataatcagcccgtggctaatcaacccttggctttagtactttcaaggcagaatacagtcacaccygatctcaccccagtccttgggaggggcctgattttcccccagtcttcctgaaaattgaggaatttaagtatttgtttgtttgtttgtttgtttgttttttgagaggaagtctcactctgtggcccaggttgaagtgcagtggcatgatctcagctcactgtaacctccacctcttggattcaagggattctcctgcctcagccccccgagtagcggggattacaggtgaccgccaccatccctggctgattttgtattttt

SEQ ID NO: 529857 - DNA, 609 bp, Homo sapiens
tgtgacttgcaaatgacttcagcactggaagagtttcatgatttttgagcttgttagaaatataggagttggtttgggaggccgaggtgggcggatcacttgaggtcaggagtttgagatcagactggccaacatggtaaaaccctgtctctactaagggtataaaaaaattagctgggcgtggtggtgcacgcctgtagccccagctactcaggaggctgaggcacaagaatcgcttgaacccgggagcagaggtcacagtgagccaagatcacaccactgcactccagcctgggcgacagagccagactctgtctaaaaaaaaaaaaaaagaaaagaaaaagaaaaaagaaaacaacaacaacaacaacaacracataggattaggatgagtcataaaaagagactcagttgcttaaattttgctcctgaagtgtcaaggtttctcatttcaaatccagttttcaaaatataggtcatggttctggattgatacccaccatagtggaaatatgctgtctctcaatgtggagccatttctgtcacactgtccttcactcacaataccaggattggagtattccttctatcagagctgggggagtctca

SEQ ID NO: 529858 - DNA, 570 bp, Homo sapiens
tgtcttttgtaattagagtattcatcataacatgcatcaactatttatattttctcaataaatagtccttagcaaccaattttgtgccttggtctctttaaagacagtcatacaggtgtcatacccaccttttcctctagaatatattataacctgaataaatcctgggccttatstcaccaagtttcagggcagtgtaacattcaaagaaacaaccaaaagcaaatgaaactctaagttttgcttgcagtcctcagaacgcattaaaagagattcaatttacagatcctagccacatcgtctaaggttcccccaactccacttcctcactgtcacagcccatctggagcccttgttctccactgccgccttcccactactcgccaacactgtccacttttctttgcctcttgtattctgtttttctagtcctacctctttcttcgcattctcctgtttctgtatcacaggaacccaggagtcaagttggggtagacaaagaagagaagctgatcaggcaaagacaaaattatctttactgggaagtggaggccttgagggttcagagtg

SEQ ID NO: 529859 - DNA, 570 bp, Homo sapiens
tgtcttttgtaattagagtattcatcataacatgcatcaactatttatattttctcaataaatagtccttagcaaccaattttgtgccttggtctctttaaagacagtcatacaggtgtcatacccaccttttcctctagaatatattataacctgaataaatcctgggccttatgtcaccaagtttcagggcagtgtaacattcaaagaaacaaccaaaagcaaatgaaactctaagttttgcttgcagtcctcagaacgcattaaaagagattcaatttacagatcctagccacatcgtctaaggttcccccaactccacttcctcactgtcacagcccatctggagcccttgttctccactgccgccttcccactactcgccaacactgtccacttttctttgcctcttgtattctgtttttctagtcctacctctttcttcgcattctcctgtttctgtatcacaggaacccaggagtcaagttggggtagacaaagaagmgaagctgatcaggcaaagacaaaattatctttactgggaagtggaggccttgagggttcagagtg

SEQ ID NO: 529860 - DNA, 562 bp, Homo sapiens
acatttattaatagacataacatgtttttattacaagcttttcagtgttatttgacttttaaaactatgtccatcaatttctatgattaaaaaaagttaaagaaaaactaaaagatacagtaataaaaactttcacatactgaaatgtaagactttctttctaccactaggataactgtagttgtgaatactttacaaaagtaactcttgtgataatcactagtacaaaacaaaacaaaaactatccctaaaggacataccctattaagggcagatgagtggcacygggctttcatcttaaggacagaaatccattgtctatacaattactttttttctatcatgtgtaaagtggttttcagctactaaaagaaatttattgttgtattagagcttcaaaaaatccccaaacttttctattgctttatgtttctagctggaaaatagtgcaatgtgggcagtttatgcgtcagcaaaagtggtttaactagggctggtaatatattaccctctgctggccaaggcactattaaaaaagtgaccctcttaaagacttttttca

SEQ ID NO: 529861 - DNA, 621 bp, Homo sapiens
tcagctgccagtctaactttcatgcctgtataggttttctgtttttttctgtctggtttaaactaagttttgtttcgatttgtttgtttgtttgatattctgcaatgttgctttggggtttctaggtataatttatttttgcttttcccattagatcttaatatactccttcaacytgagacccatcttcagttctgggatggtctgagccattatctctgttagcacctcccttgacctaattctcttttttttctttttccctggaattttatcagcatttatcaatggaattcttttattttattctctatggatgtttcatatttttcatctctgatttatttcttggtgtttttctctttaattttccaattcagtaattattcttcattgatttcttctgatcaatcttttagtcgcattgttaaaacttcagtttctgtaaattttactattcttaaagtttcctctttagtttgttttcagacttacctattcttttatatgttgcctagttgttacccctatggtctgccagatatttttgtgcctgcaacatttgtgcaaactcttccatttattgctttacctgactcgttcaagtcatgtgttccttca

SEQ ID NO: 529862 - DNA, 510 bp, Homo sapiens
atgtaaagtagtatagccattatggaaaacagcatggagtttcctcagaaaactaaaaatagaactaccagatgatccagcaatggactgtttagtatatagccaatactagcttttctttgtagtttcttgacctttatggatttggatatatttgacttccttttttggtatactttcttttttttttttttggattgtgtaaggctggtctctcctggctttctgctaacatcactgactacagcttttctgtctcctttgctgagtctcaattcacttctaattgacttctaaatgtcagtgccctattcacaatcacaaagatatggaatcaagctaagtgttcaagtgtccatcaatggatgattgagtaaacaaaatgtggtatgtttatataccatgaaatactacttggccataaaaaagaatgaacttgtgtcttttatagcaacttggatggaactaggagccaytatcctaagtgaaataactcagaaagttaaatat

SEQ ID NO: 529863 - DNA, 385 bp, Homo sapiens
gggagtgtgggggctatagctctatcccaggagctttaggcttgagaagagccagtcaacagccttcagtcctgctccccaaaggaagaggccccaccacacaggaagaagagggtttcaagggctgcagttgaagtcccagccttgaagccagaaccatctagattctattattggagccctcactgcagcatttgagactttaaatatatttctttttgtgtcttcaagctcaagtttcttcatttctagagcaggatagtgatacctcaattagggtcttgaggctattctcaactgtctgcctcccttwcctgccctttctcttggacagcagaccctggggcctgggccaggccacacctgtgcttggggctagggctgc

SEQ ID NO: 529864 - DNA, 638 bp, Homo sapiens
cattacttcgaagacaggactgagccatgagggatctgcccccatgacgcaagcatctctcaccaggccccatttccaacattggggatcacatttcaacatgagatttggaagagaaacacatccaaaccatatcaccctcttcacaaggtcagggcccagagtgtgaattacctgctacaatcttcaaagtgccataaattgtggaagctgcttaatttcctgctctgtggtctkcgggtaagaagtactagaggtccattcaaaatagcttacgcttaaaagtagaaattcggtgtaatggtatgggatttgattacacaagctaaggggagaacacatctgatccctagaaacaaatagaagcagggacttaggctggctttcatatccggactcttcttttttggtggggggcgtggctaattcttctctctctttctttagagtggcctcctctgcttctccagtcacccaggtagagaaagtgatcccaatagttctaagtttagatattatattttctgctactatgtcagagaatgatctctctcagttctgattacaaattcctaagaaagaaataagtgtgctttgaccatttcctccaatcttagtgtagctccttactacgtacc

SEQ ID NO: 529865 - DNA, 533 bp, Homo sapiens
ttgtttcaccttttttgccattgtgaataatgctgctgtgaacattggcatacaaatgtgtttgtgtcgctgctttcagttcttttgggtatgtacctaggaggggattactgggtcatatgttaactttgtttaatttttgaggaaccaccaaactttttcacagcagctgcactattttatattccccmaaagatgtataattttaaactatttaagccctgtacactagagctaatcccttgaagattgggaccttacttgtcttatttggaggtgcttgttaaatttatgtagtagtatgatacctgtacttaagcatcactcaagggtaagtgttctaggaaggttgatttagcttatatggaagaactgttgaataatggcttgatgaaaatctcttcagaaattaaagtgtatgtttcttccaacaagagttcctatttgccaggtgctgtgtgtgcttagatcctgagggtataaagtcaagacggtactgctcctccctgtagtaagtccttttatcagggaaa

SEQ ID NO: 529866 - DNA, 310 bp, Homo sapiens
tccctgctgacttggtttctctttctactgtgacctcagacagagaggtagagatgtgcacgggaagactggaaacaaacacaccgagttcaatrcagaaatacccagtcacagggtggggcttcttactctaacagttccagcctaaaatgccagaaaaatagtggaaacaccaaagcaggagagttgaattaagccacttggcatggagaaggtgacagacacacacggtatcgctgaaggctcttgtaagcgtctccaaggttgacagacggcacagagtacaatttgttccactacacttggccac

SEQ ID NO: 529867 - DNA, 576 bp, Homo sapiens
tccctgctgacttggtttctctttctactgtgacctcagacagagaggtagagatgtgcacgggaagactggaaacaaacacaccgagttcaatacagaaatacccagtcacagggtggggcttcttactctaacagttccagcctaaaatgccagaaaaatagtggaaacaccaaagcaggagagttgaattaagccacttggcatggagaaggtgacagacacacacggtatcgctgaaggctcttgtaagcrtctccaaggttgacagacggcacagagtacaatttgttccactacacttggccacattcttgggcctactagatgccaaatgccactagctttacaacagctctctgctgactaacagcttttataagccaaatgaagttgcttccaatttacattaaatgtgtacttcttggctggagaaatttgtcactgttaatcatttacttttgtacaaaacaacctttatttctattacatgattaataattcttctaatgtcataaccacccaaatatatatcaaaaccacaaggacacacacattccacaagtttgagcaaat

SEQ ID NO: 529868 - DNA, 517 bp, Homo sapiens
ctgaaggaaccatgagttcacgtcacttgcctgattggttctttagaaagtcattaatttcaattgttctatcacatttattgatcacctcctacttgccaggcccttttctaggtgctgggatggaaccaagactaaaataatccctgccatggagctgttgtcaagtaggaggtaaggccctccgtccctcccccgcttccttccctccctctttccttccttccttccttccttccgtcctccctccctccttccctccctccctcccttcctcaccttcacttattaattcatgtagactccctttttcagtaaccgcagaagagcgtcctggagagaaggttccagagaagcctggcgcaggttccggcctggcggaggctccccggggtcttggagctgcgcgtgggcatcaacacctggctgtctgtgtctccagcctgggtccaagatgtgtgggccgggcttgcaggcagwggtccagagaggctgttgggagatgaccatttccatc

SEQ ID NO: 529869 - DNA, 614 bp, Homo sapiens
tggaatagctggaagaaacaggggctggctgggcctctctccacacagtgcccggcctaaagcaggctaactcttacaaagttgcaaaatcacagcgaagatattgaagtagcaggttagttaatggtacaagcaatttcacttcatcgcaatgaacttctttcccataatatttaatgtatcccagattcatttctaagcttaattactatactaattcttagaaacactttaaagctagtaaataatacgtcttggaaagatctaagtgartaaataatacatctagaaagattcagaacaatttaaactattctaccaatctgcataaactagccactagttcatgctagtgggtcacaaaagggtaaaaacaatgagccccttctcccaagtggcaggatggcagaacacgaatgtcatagcacaagtgaggtttacaggctctgtggctactttgcttgtgcagtaagatgtatcatattctgctgtttgttttatgccattttccatcatacttagtctatgcacttgataggcaatcaaatgtaattgattctattaattgcttttcagtcactagaattgcccatatatgtaacttcatttcccaa

SEQ ID NO: 529870 - DNA, 444 bp, Homo sapiens
tgttctttcgcttttccaatacgggactcaatccctacccaggtgattgtggtggtcgtggaagaccgctgccttcaccctcccgctaaccagcttgctgccccccactcgggtcatgccagcgcctccctgagccctcgggcacaaataggtgaacgaccacacccgcctcccgctgtggactgagattcgcggtgcgaggggttcccgggttggggacctaaaacgccgaggagttccaatttgtcctcgagaacacggggtttctccattcgcggccgtcaacagcactagatcacagttacattttttttcctttcgcgaaacctcattcggttctctttttcttaaacgttccacagggagtccaggtccccacccacgcccaagggaaaggccttgccgcgccgcgggtcmctgtcccggaagcgggaggttgccacg

SEQ ID NO: 529871 - DNA, 546 bp, Homo sapiens
ggtgatctcagccccgagctgggccaggttctcattctgcttctgtgccacctcccgggacagttcctccaggcggcctagcagccgaccctcctgctccaccaggaaagccctcagtgcctggaactctgcccccaccttctcctgctccgctgccatctgtttctgtcccaggaggagaagttggagagggacttgaacatggagacataacatttggccagtggcctgagtcatcccacagggcaaggcttcgtccctgtcactgctggaggatcggagacacacccacctacgcacgcagtgcrtgctctattgtcagtgtcccagctctgaacaagctgtagtctggacacatgctcttttctcccctgccacagatgcacccacacatgtctgtggacctgtgctccatcacctaaaccaaggcagcttcatactccccccagaactacgccaagctgcagcttcctcacttgaaaagcagaagggataaattagtgcctcctggggcaaccataggattaaactgagattgctttttct

SEQ ID NO: 529872 - DNA, 385 bp, Homo sapiens
atctgccccaatcttcatggttttgtgtctccttttttacccatatgaccatctctctccaccgtgtctccctcatcaaataaagagaagtttagcaactaagtacctgaggaggtgggaaaggaatgctactcattcctcagctctcctagttacytttccactcccttcatccccccacattccctcatttctctcacctggtactcctgcaccacctcctccaaaggcagcacgctgtgctgtttgtggctcctggattctcggcacaccacacagatggcctctttgtccacctcacagaagagtttcagggcttcctggtgtttaaagcacatgccctgatcattactccggtttccccgataaggagtggggcacatct

SEQ ID NO: 529873 - DNA, 570 bp, Homo sapiens
ctgccccaggccaaatttctgcctgcctgccagcagcctcaacaggcacagctcctccctcacagtggcccatttaggcccaactyatgactgtgaggccatttccaggcctagtgcctgcctcgtggctgactcttgaagcccaaaacttcctcaaatcaggcttttgcccaacttctgtctactgtcggactctacaggtcagcctctgcctcacagtggaccctccagacccagatggtgtctcactgtggcatcctcaggcgaagctcctgcctttcggcagcctctccaggcccagctcctcctgcctcccagtggcctctttcggcccagcccagctcatgcctcccggcggccttcccaagccccgcttttgactttcggtggcctctgcaggcctcgacaaggcccagcctcctgcctcccgaaggcctgcacaggcccagcctctgcctcacagcggactctccacgcccagctagctgttgcttcactgcggcctcccgagtccaaagctcctgcctctcggccgcttcggcaggcccagctcccgcctgccagtggcct

SEQ ID NO: 529874 - DNA, 570 bp, Homo sapiens
ctgccccaggccaaatttctgcctgcctgccagcagcctcaacaggcacagctcctccctcacagtggcccatttaggcccaactcatgactgtgaggccatttccaggcctagtgcctgcctcgtggctgactcttgaagcccaaaacttcctcaaatcaggcttttgcccaacttctgtctactgtcggactctacaggtcagcctctgcctcacagtggaccctccagacccagatggtgtctcactgtggcatcctcaggygaagctcctgcctttcggcagcctctccaggcccagctcctcctgcctcccagtggcctctttcggcccagcccagctcatgcctcccggcggccttcccaagccccgcttttgactttcggtggcctctgcaggcctcgacaaggcccagcctcctgcctcccgaaggcctgcacaggcccagcctctgcctcacagcggactctccacgcccagctagctgttgcttcactgcggcctcccgagtccaaagctcctgcctctcggccgcttcggcaggcccagctcccgcctgccagtggcct

SEQ ID NO: 529875 - DNA, 486 bp, Homo sapiens
cattcaaagactctttgtcaatcttggttctgcrtttactaaacatgggctgtgcagccagcttctcagagcctccgtttcctcctttgtaagggggtccattttaataaccactgtacctttattgcaggatcactatgaggccaaaaggaaaatggatgtgagtactgtggctgggacactgaatgtgatttttctgagtgtgtgctgcctgtcactagagccccgcctcttctcagcagatcggagatagacggataaacccaaagcctttgatttttttttttttttttttttgagacagggcctcgctctgtctcccagactggagcacagtggcatgatcagctcaccgcagtcttgagctctttgactcaagagatcctcctcactcagcctcctgagtggctggtactacaggcgcacaccaccacacctagctaattttttatttttcatagagacagggttttgaacgccttgcat

SEQ ID NO: 529876 - DNA, 602 bp, Homo sapiens
tatgctcgtagcacagtcatgcccacctcatgcaagtcacatctgcagacttagtccctgcttgcacgtctacctatgctgccacttgacctaattataggccacagtcagaaggaacctcttgctgttggcgcctcttctgccttgtaggcggaggtaaaggcctggccccgaraaggccgaaagattccctttcctaggaggcggggataacaggagatctgtgaatctgggtgggaacaatagcagaactcatgtttttcctaatcacgaactgaaagagggttttccattcagaaaggaggctgcaatccacagtagaattaacacgacctttattgctaatggaaatcacagatgcggctgaggcgggaggatcgcaggagccccagaggtggaggctgcagcgagccaaggttgtgccactgcactccagcctgggcagcagaggcagactctgtctcatacaccagcaaaacacaaagaaatcacaggtcctttcatatcacatgtcaaatcatagttcttgtaggcactttgaaatatcacttatgctcattagtacttaaaaattatggtaattgtcctggcagtgtgactca

SEQ ID NO: 529877 - DNA, 602 bp, Homo sapiens
tatgctcgtagcacagtcatgcccacctcatgcaagtcacatctgcagacttagtccctgcttgcacgtctacctatgctgccacttgacctaattataggccacagtcagaaggaacctcttgctgttggcgcctcttctgccttgtaggcggaggtaaaggcctggccccgaaaaggccgaaagattccctttcctaggaggcggggataacaggrgatctgtgaatctgggtgggaacaatagcagaactcatgtttttcctaatcacgaactgaaagagggttttccattcagaaaggaggctgcaatccacagtagaattaacacgacctttattgctaatggaaatcacagatgcggctgaggcgggaggatcgcaggagccccagaggtggaggctgcagcgagccaaggttgtgccactgcactccagcctgggcagcagaggcagactctgtctcatacaccagcaaaacacaaagaaatcacaggtcctttcatatcacatgtcaaatcatagttcttgtaggcactttgaaatatcacttatgctcattagtacttaaaaattatggtaattgtcctggcagtgtgactca

SEQ ID NO: 529878 - DNA, 620 bp, Homo sapiens
ctgggcaatgcgggaggcagaggccaggcctcctcaagttggcctctcagacccacttgcagcctcccggcgccccctccgggcccagctcttcctcccggctgcatctccaggccggactctggcccgactccaggtcccaacaacgtctttggactcagctcctgcccagctcccagcggccctggtaggcccacaacttccctaagccaagctccccaggcccagctcaggcctcgcggtggcctctccaggctcagctcctggccctccgatgacatctgcaggccccaaatggcctccrgtcggtgggctcctctaggcccagcttgggcctcccggcggcctccgcaggcccaaatcgtcccgaagtcagtctctccaggcttagctccagcctcccggtggcctctgcaggcccaagtcgtcctcaagtcggcctggaagtgggcctggaagagcagcaagtcggcctccctgggcccagctccgtcctctcgacggcctctccaggtgcaaaacttcctcgagtcagcctctccaggcccagctcctcctgcctcccagtggcctctttcggcccagcccagctcatggctctcggcggccttcccaggccc

SEQ ID NO: 529879 - DNA, 620 bp, Homo sapiens
ctgggcaatgcgggaggcagaggccaggcctcctcaagttggcctctcagacccacttgcagcctcccggcgccccctccgggcccagctcttcctcccggctgcatctccaggccggactctggcccgactccaggtcccaacaacgtctttggactcagctcctgcccagctcccagcggccctggtaggcccacaacttccctaagccaagctccccaggcccagctcaggcctcgcggtggcctctccaggctcagctcctggccctccgatgacatctgcaggccccaaatggcctccagtcggtgggctcctctaggcccagcttgggcctcccggcggcctccgcaggcccaaatcgtcccgaagtcagtctctccaggcttagctccagcctcccggyggcctctgcaggcccaagtcgtcctcaagtcggcctggaagtgggcctggaagagcagcaagtcggcctccctgggcccagctccgtcctctcgacggcctctccaggtgcaaaacttcctcgagtcagcctctccaggcccagctcctcctgcctcccagtggcctctttcggcccagcccagctcatggctctcggcggccttcccaggccc

SEQ ID NO: 529880 - DNA, 575 bp, Homo sapiens
gtagtctggagagttgaaggtggcttcagtgatgtgcctgttttattagtggattggatgaaatgttgtggtaaggtgggcctctcttgctctccgtgtagtttgagagcctgtctacatgatctattcagcagcaatatggtttggctgtgtccccacccaaatctcatcttgaattgtagctcccataatttccgtgtcttgtgggagggatccartgggagataactgaatcacaggagtatttcccccatactgttctcgtggtcttgaataagtctcacaagagctgatgattttataagggggttccccttccacttagctctcattctgtcttgtctgccatcatgtagagatgtgccttttgccttccaccatgattgtgaggcctccccatccacctggaaatgtgagtccattaagtgtctttttcttcgtaaatcactcagtctcaggtatgtctttatcagcagcatgaaaacagactaatacagtacattggtactggtagagtggggtgctgttgtaaagataacccaaaaatgtggaagcgactttggaactgggtaaca

SEQ ID NO: 529881 - DNA, 575 bp, Homo sapiens
gtagtctggagagttgaaggtggcttcagtgatgtgcctgttttattagtggattggatgaaatgttgtggtaaggtgggcctctcttgctctccgtgtagtttgagagcctgtctacatgatctattcagcagcaatatggtttggctgtgtccccacccaaatctcatcttgaattgtagctcccataatttccgtgtcttgtgggagggatccagygggagataactgaatcacaggagtatttcccccatactgttctcgtggtcttgaataagtctcacaagagctgatgattttataagggggttccccttccacttagctctcattctgtcttgtctgccatcatgtagagatgtgccttttgccttccaccatgattgtgaggcctccccatccacctggaaatgtgagtccattaagtgtctttttcttcgtaaatcactcagtctcaggtatgtctttatcagcagcatgaaaacagactaatacagtacattggtactggtagagtggggtgctgttgtaaagataacccaaaaatgtggaagcgactttggaactgggtaaca

SEQ ID NO: 529882 - DNA, 575 bp, Homo sapiens
gtagtctggagagttgaaggtggcttcagtgatgtgcctgttttattagtggattggatgaaatgttgtggtaaggtgggcctctcttgctctccgtgtagtttgagagcctgtctacatgatctattcagcagcaatatggtttggctgtgtccccacccaaatctcatcttgaattgtagctcccataatttccgtgtcttgtgggagggatccagtgggagataactgaatcacaggagtatttcccccatactgttctcgtggtcttgaataagtctcacaagagctgatgattttataagggggttccccttccacttagctctcattctgtcttgtctgccatcatgtagagatgtgccttttgccttccaccatgattgtgaggcctccccatccacctggaaatgtgagtccattaagtgtctttttcttcrtaaatcactcagtctcaggtatgtctttatcagcagcatgaaaacagactaatacagtacattggtactggtagagtggggtgctgttgtaaagataacccaaaaatgtggaagcgactttggaactgggtaaca

SEQ ID NO: 529883 - DNA, 589 bp, Homo sapiens
ctgtccggtgaaccagagaagagaaaatcgctcggggccacctgggtagagaccggaggagtgactgccttgactgggaggcgtggaggagcgagcggggtctgcggctccggccgggaggtatgcgcttccctctctcacccatgcctgctccggtccaaagagccgagaccgtgggtcaagaccgggatggattcgctcgggagaggccaggagcctgccagcacgttcgggcactagcgctcccggggctcctcggactcgtggaccccgaaacgcctgccccacaggaagatcaccccactgtagaagtcgggtcacggggaccagtggcgagctacctgacggcttaactacagataccctcccgacgaaagccgtggactcccagggtgcgtgcgtctgcttgtgtgtgggggtgttggcaggcggtccccataatcatcgaagmgacaggtggatgaacctcaggcctcgcactcgggggctctcagagtctgggcgttacagccgctcccgtacactcacgggtcacctggctgaatcaggtgggatctgggtgaggtgccgggaggtctcccaggctggc

SEQ ID NO: 529884 - DNA, 666 bp, Homo sapiens
tgctttccacaatgcctagagatcaaagccaggggacatgggccagggcagcaggtggatgtgtgtctgggcacaaggagcgagaagaagctctgcaccaccccagcaggctgctgagccagagagcaacaggtgtggcttccaggtgggatcaaagagtcattcggataggattttgaaaaaacaagttggcccatttgtgagagacacaccacagtgcctcaaagccacaacttaattatcatttaccaggaatatttattagggacgtgggaggcaaatgagggagctcctaattgtaccctgtgtgacttgagtattaagccagcaccctttctcatatgctaaccctttgagataactcatctgggttgactccgtttaaatgaacatttcttgtgatgattctaaccctttcacatcagaaagaatgtgacagaagctgggagagaacctatttggtaaattatgcttcatcctacggcacgtatataaaaaagaaagggttatacaagcaaacaattgtgggttgtttcacktttcagtgaaaggagagaagacacaagaatgccacaaaagaccctgaggttcaaaatatttagaaactttctttactctccaaacaaaaccagaatggtaaagggaggtgcagaaattagaaacagc

SEQ ID NO: 529885 - DNA, 539 bp, Homo sapiens
agcaatgccttctctctatgtcacatctgccctcctagtgatggccctggcaaagccccttcatctgcctggtggtgaaggctggtcaggggataagctgacctcctagagatcttggtggaatgtgaaatccatcttcttggaagctcctacaactcacctcaaaggaccccactyttctttggtagatctacccttcaaggtataatgtcttcatgcaacccaaaggctgaagactcccattggaaaagtgcacttgagcctgcctgatcagtttatactgccctaagctgccacccagtttccatgactgaccttctgccatcttaagtgacacatgtatgcaacatctggtgatgggcttggtatttgaaattgtgaaaaaatatgcctaacataaaatttaacatcttgaaaccatttttaggcatacagtttattagtattaagtatattcacattattgtacaataaattttcataattttttcattttgcaaaactcaaactctatacccatttgtcaataactcctcatt

SEQ ID NO: 529886 - DNA, 539 bp, Homo sapiens
aacatagagatttaaacagggaacatgctgtgaaaaatgctcaaataagatgaatatcaggtgccccagtattgcttcttcccctttttaataatcataataatctaaataatctgacatctgttcttccagttaaatcatacccaaacagcttgcttctctttttttattgttcacattcaaaaaaccatcgctcatggtctttgttggggaaggccccagtcaggtacttttctaagagtttatgtatrttatctcatttaacattacggtggtcctgggaagtaactgcaattattaatcctcattttacatctggagaactgaagcacaaggtggttaagtgactgtctcaacaatatcttgctagtaagtgatggagtttgggatccgaagccaggcaacctggatacagagtctgcagacctaatcaccataaacccaacttctccattcagagaagaaatctatttaaatagtaactccttttatgaaaaaaaaatgatttgacctctttgctactaaataaaagagttagc

SEQ ID NO: 529887 - DNA, 579 bp, Homo sapiens
tctggcaagtggcagagccaggatgcaaacgcagattgactggctccagtggtcaactcttagccaccccactctaaagcctttcattaactatgagattaatcagtctagattccgtgagtcccatgtcttctttttattttcatataaggcctaggcaacattgtagaaacaactagttattgtttgkgctggacttggtagtatacagtcaggaaatggaagtatttttcttccaggctgacctcaatcctgctctgtccaattactctttcctactaaatgccaataacctaggaagaattttagcttttgcagtcacattaatctattaaacagtcccataatcagttattgaaaagtcatattctcatctaaatctactacactgtcattttatattcaatttaaattccctcttcccccccagcaggaattaaaaggagtttcctttctttgctcgttcgccctctggttagctgctgcttctgacttttccagagctggggcaaagggaagcaatgtaaagaaaattgaagggtcttacttaactgtaggtgctgttgtaatcttgctgta

SEQ ID NO: 529888 - DNA, 579 bp, Homo sapiens
tctggcaagtggcagagccaggatgcaaacgcagattgactggctccagtggtcaactcttagccaccccactctaaagcctttcattaactatgagattaatcagtctagattccgtgagtcccatgtcttctttttattttcatataaggcctaggcaacattgtagaaacaactagttattgtttgtgctggacttggtagtatacagtcaggaaatggaagtatttttcttccaggctgacctcaatcctgctctgtccaattactctttcctactaaawgccaataacctaggaagaattttagcttttgcagtcacattaatctattaaacagtcccataatcagttattgaaaagtcatattctcatctaaatctactacactgtcattttatattcaatttaaattccctcttcccccccagcaggaattaaaaggagtttcctttctttgctcgttcgccctctggttagctgctgcttctgacttttccagagctggggcaaagggaagcaatgtaaagaaaattgaagggtcttacttaactgtaggtgctgttgtaatcttgctgta

SEQ ID NO: 529889 - DNA, 479 bp, Homo sapiens
tgcctctctttgaacagtatcatgtactggactcattccataaactcagaaggaaaaagaagtagtacaaatttaacaccaggttaacagtacttcctcctttgctggayaatagactataattaaaatgcacttcttttcaatcttttttttctcagggattattcattttactctttggatgcctctgggatctgaaggtaagagcaatgacagtttcatgtttctagaaaagtctgaagtgcttgtggcatgttgaagttacgatagcttctttttaacaatgcaggtacaggaagctttgctgaataagttttcattgtcgagatggtcttcacagcactcaaaggtaaaccttttctctgcagagacttttcattttataacatcatgtattccactagcattctgaagtacagagtactaaattttttctttgggattttgatcaattaggctaaatatattgcatcctcaaa

SEQ ID NO: 529890 - DNA, 534 bp, Homo sapiens
gaattctacagagcagagtgaaacaattagaagtcagcattttctggttgggcatggtggcatacgcctgtaataccagcactttgggaggccgggtggatcacctgaggtcaggagtttgagatcagcctggccaagatggtctcatctctactaaaaataccaaaaaaaaaaaaaaaatagccagacatggtggtgggcacctgtaatcccagctactcgggaggctgaggcagtagaattgcttgaacccggggggtggaagttgcagtgagctgaaatcgtgccattgcactccagcctgggtgacaagagcaaaaactgtctcaaaaaaaaaaaaaataagaagtcagcattttcttttactaatcctgaatgattttaccttccaaggcctcatctctatcctgagaattgacttcttagaaatcagtgagtaatagcaagtttatttcatttttttctgacccagtccyctccaaacacaacttagtgatatcccctagtgttaccttagaaaaacttattctgcca

SEQ ID NO: 529891 - DNA, 420 bp, Homo sapiens
ctggaggatacttaacctccaaaaaatagagggctrggttcttagactagaatgaactctcagattgctctgatggtattggtggtgatgatgatgatgatgacgatgatgatgattttattgtatcctaggagtcttcacatataatcttccaaatgtgatatttttctcctctccagttttttctctccttccttctctcctttctttcttccaaactaaatttgtttctagcttgaggtaaattcagtggagatgccttaaaaatagtatgagcaagtcagtaacaagagttatgttatatttctagcctcactcatatttcccacttagtatagtaaaaacactggggaactgaagagttatcaccatcatcaacaacaacagcaaccacataataacctgtctgattctgggtga

SEQ ID NO: 529892 - DNA, 600 bp, Homo sapiens
ttcaatttcatattgagattgaagatggggaaatagcaagggcataccaattcagccataaatatgttttgggtcaatgtcataaaattgtcacaaaattttggtaattgagaaaaagctaaaactttttttgtttgttttttgtttktaaagggaagaaaagtgcttctgaggctcttttggaataagtaacagttttcagattcacttttgcaaagattgccaatatccttcgcagacaccaacaaaccagactgaacagaaagatccctgtagtaggatgccgagcaaatcattgacttctccaatctctaagagacaatatctaaatgtcagtctcatggcattgtattttctgcttcaccataagattagcaaacacaagacataaaattatgtttatttactaaccaatacagaatatactaggccctttgcctggaagccagatttcacttctgagattttccgaagtccattctagaagaggtggttgttactgatacccagggaaggcaattcttaaattgcttacctggggatggaactttctgtggactttaggcccttaagaccaaaagccatgaggcatttatgaat

SEQ ID NO: 529893 - DNA, 616 bp, Homo sapiens
tgactgctgagacacttgggttgatttagaacggctattaatgaatctataaatttggctaaggttgatttgactttctagggaaaagccagcctatcttcaaatggacagctccctccacataaacgtcaatgtaccctaaagacaaaactaagtatatgtatatacgggatatatacatatatatgtacacataaaatggattgggaagtcctttggtttagacagtattaaatatgtacttcccaagtgcataggtttcctttgaccaacctgttcaaaaaacaagcatgaaaagtrccatggcacatttcccatgtctttccccctatttgaaggacacctttccttgcttctccatcactcctaagcattttatttttaaaagaagctggttattttggccttctatcttaacactccattgattcatccattccttggaagagctctcagattacatccagaaacttgtttttagaggagaacaaggttgcaaataactttttcctctttttttattccctcttccccccaagaagcaggcaccttgaagtgtcatgaataatgcactcttgatctgacttgccttgttacccctggccagcccaagcag

SEQ ID NO: 529894 - DNA, 616 bp, Homo sapiens
tgactgctgagacacttgggttgatttagaacggctattaatgaatctataaatttggctaaggttgatttgactttctagggaaaagccagcctatcttcaaatggacagctccctccacataaacgtcaatgtaccctaaagacaaaactaagtatatgtatatacgggatatatacatatatatgtacacataaaatggattgggaagtcctttggtttagacagtattaaatatgtacttcccaagtgcataggtttcctttgaccaacctgttcaaaaaacaagcatgaaaagtaccatggcacatttcccatgtctttccccctatttgaaggacacctttccttgcttctccatcactcctaagcattttatttttaaaagaagctggttattttggccttctatcttaacactccattgattcatccattccttggaagagctctcagattacatccakaaacttgtttttagaggagaacaaggttgcaaataactttttcctctttttttattccctcttccccccaagaagcaggcaccttgaagtgtcatgaataatgcactcttgatctgacttgccttgttacccctggccagcccaagcag

SEQ ID NO: 529895 - DNA, 593 bp, Homo sapiens
tatggcctgtttgttttcaccgccccagaagttctgctccaagcaacttgatctaaacctactgcagcatggttctaagacctttcatgggaagctgacggctgctggtgcaaactaatgagtaytttcagacacaaagcctccaattgagattatgaagtaatttattaggctcctactgcagtgagcacacaccgttcctgctcagaatggactaattaaaaacttccctaccacgtacaatttcaactgtgctggaaaaaaaggaacaatacctcagtggtaatttttcataaaaaggaattgataacaatttctaaaaaaaattagtaggagccttatattgcttaaatagacaaaactatcatctgtgtgttttggtgtgtaatgcggagtgctattgtcggtgcagaatagatctaatttcccacctctaactctgatgtgatgctttccctgagtttaactgaaacaaaagtaagagtcagtattcctagttgtagagaacaactgagttgaaaggcgatttcattttgggggtgatggtagtcatataaccccaacagccctagatgttctgggctcaggagtcc

SEQ ID NO: 529896 - DNA, 625 bp, Homo sapiens
  misc_feature (1)...(625): n = A,T,C or G
agcgctgctgttctaaaaaaagaaagtcaagtactaccaatttgaccgttataaatctgttcataacaagatttctagagatttgacacgagtttttaatgccagaaacttaactatttcattaggaaatgagttgtgaatagtaataatacaaataaaaatgaataactgaccatcattaatataaaataatgttaagaaaagtatttagactttttaccatttaaaagtaaggaaagtctgaatcacttagtgctgattccaggtgacatcctgccccattctgagcacttcacatgctgtcaggtgtattacatgtccgggcatccagcgataatgatgtgctgcacgagtctttaaagaaatctgtgaaattaaaaaacaatgtgacaagggatatatggacacatagtattcacacactcagaaaatatgttggtgaactaatcctacatattngcttttttttctcaaaattatgggtggttaactgttctcttttaaaattaccttatatctagtcttacttatttttctaattctatgtktgtggattgcgtaaagatttgaaaacaccctgaaatataggttaagttctttgaaagaaaactctagcagcatttcc

SEQ ID NO: 529897 - DNA, 526 bp, Homo sapiens
gaatcacttgaggtcaggagtttgagaccagcctagccaacatagcaaaaccccatctctactgaaaatacaaacattagctgggtgtggtggcacatgcctgtagtcccagctagtygggagtctgaggcaagagaatcgcttgaactggggaggcggaggttgcagtgagctgagatatcaccatggcacttcagcctgggtggcagaatgagactccatctcaacaaaaaaaaaaaaaaaaaggagagagatgccactgaacagataagttaggactaaatggggaggccctttgctttggctgcattgactgccactctgtccttcagtaacacttttaccctagaaaagggatgttgaagaatttaaaagttcttgggagactcatacatactcaaatcaaaatgttcatatatgctactgaggaccgtatcttaaaacaagaaaagaaaatgctcatatagcaccttatatcttatgtcagttatttgtttctttcagaatcatacttgatatttccagc

SEQ ID NO: 529898 - DNA, 603 bp, Homo sapiens
acaacactacaagtaaccacatagctgttattgatggtgaattcttactccttctccatagaagacatttctggatcattgtaaaggcagctagttctgagtgcaaggaaaaaataggaagcagtcaacatttccccactgtcaccactgtgaaagcacaacagatttgaggcatttgaaactgtttaatgtggtcccattgctaatactgaacaaatccatacctgaacagatgataagattaagctgtaacccttaccattggttttgaaatacaagtgattgcccatgatataaaaacacaaagcaaagattaaaaactccaaacacctccagtggtctcttctgtcctcatttttccctgccttttcaatttgtcttattcaggggacatattacaaaattgttttggtaccccaaataataaaatacacacagargaaaatccctctcaagcagcctaattttattcacccatgaacacagttaattttcagttttcacgagaatgaggatttcccaatacactgaaagaaaaaatgtcagcgtcagctctcctcattgttgttgttacagaaataacaggacacttaccactccata

SEQ ID NO: 529899 - DNA, 546 bp, Homo sapiens
atactctgctcacccagttcctgactgcataaaatgtgactggagtgtgaactatgttcatttcctgtacaacagtttttcttaccaagtaaaaagtcccctcatacctgctctactgaaaaaggcttaatccttttcacttcgccaatgtgaatttcatgctgtaatgggccaagttttggaaaaacaaagcagttgttttatacctgcccaactttctgttcacacaggtgaacaggactatcagtggtgaaatctcgccaasatctctcgtaaaagatccttgatttaacaatgactgacatctgcgcactttcccgttgactataattctcttcacaaggccacaccttgcggaacaaactttaaaagagcaaccagtgctaaactgcaggcattcttctttcctagctccagacatccctatctaggctgtttatttttcagctttctaatataatgttgggttgatatgtctgtcatatgacagcaagaaaaccaattacatgagtcacgctctaaagtgatcaaatgctggccagtgaa

SEQ ID NO: 529900 - DNA, 629 bp, Homo sapiens
gccttcctaaagtgctaattattacacaattaagacagacataatatgactagaaagcctaagaaaatctaatgcaatctcacagaagctttttaaaatttttttccatctctatctccaaactacctaccaaaaaacccaaaatacaaaggagtacctctcgcctatgacttctwaacaagcgaagtcaggagtagcaccaaaccttcccctggttctaacatcacctagtcagatctttagaggagaaaagcaatcctatctgttaccttgtttcccatcccgcattttaagagataagaaacccaggacctgaaaagtgagtattttcctaaggcactcagggtgaaacctggactagaacctagatgtccctccataaaaaacaagattttgtactcttactccaccccaccacgtgagtggggaaaagcagagttttgagggcctacaatcctcaagtctgatcactgggtctctcacatctaattacaatatccagccccatttccaacttaataagattaattctttgtcactgatgctcaatagtaactcttgctactcccagcagccaacaccctagtttgaaagacatgcaggtcaccagtgcatcttctattgagagc

SEQ ID NO: 529901 - DNA, 496 bp, Homo sapiens
aaagaccacctaataggaaatataaaaagccatttcaaaaatgataaacaaaagaaagacgttaatcatttggggattttcctagtttaaaacaaaccacatctccgtaaaagaaatatggctaaatggctataacaagtaagggccaaagcaccctcatggctactaataaataaaacggtacaaacatccctttcaagtctaccatttgagagagtggatactaacaagagatatgatttgctaagctaaataaaagccttcattaacaagaagtgacaggatcacaaccctgctgctgataaactgccaacatacccaaggtcttcaatgaagggttgcccatttaacatactgcagctttaaaatgagttgctttagaacgaacagttctatgtcaaggcaggcctacaacatacaaaacagatggagctgctactgtaccttgggyttgtgtgtgtacccatgcacgagcatgagcttggcatataccaca

SEQ ID NO: 529902 - DNA, 582 bp, Homo sapiens
tggtcatcatgagataagcagtggcagggaaattttttttgscaagtaaatgagcactggaccatcatacttggaggagcttaaaaaaaaaaaagaaagaaggtctacttgctttaaaattaatactgtgtaaggtcaatgactaagaattttctaatgtagacaaagcattttttccacatatgcgtatctaagacagcccctatcactttaccttttctatttaaagagcatgcattgcacattattaccacctgatggctgaataagaaaattgcagggtttcatttttcatttcaggtaaattgagtaagttcactttgaaagccttaagtatgaagaataaatagtgaaatgatagcaaatcctttcacttatctactagcgcctattaagaattaataacctctagaatttagctgttccattagaaaagcatcagattagcaaaaaaaaaaaaaaaaaaaaaaaaaaaaaacagcctctacacagctagagtcacctaaatcggtggtcctcctacttaagcatacctaagaacaacctgtggctcaccctcagagatttattcagtaggttctg

SEQ ID NO: 529903 - DNA, 582 bp, Homo sapiens
tggtcatcatgagataagcagtggcagggaaattttttttggmaagtaaatgagcactggaccatcatacttggaggagcttaaaaaaaaaaaagaaagaaggtctacttgctttaaaattaatactgtgtaaggtcaatgactaagaattttctaatgtagacaaagcattttttccacatatgcgtatctaagacagcccctatcactttaccttttctatttaaagagcatgcattgcacattattaccacctgatggctgaataagaaaattgcagggtttcatttttcatttcaggtaaattgagtaagttcactttgaaagccttaagtatgaagaataaatagtgaaatgatagcaaatcctttcacttatctactagcgcctattaagaattaataacctctagaatttagctgttccattagaaaagcatcagattagcaaaaaaaaaaaaaaaaaaaaaaaaaaaaaacagcctctacacagctagagtcacctaaatcggtggtcctcctacttaagcatacctaagaacaacctgtggctcaccctcagagatttattcagtaggttctg

SEQ ID NO: 529904 - DNA, 235 bp, Homo sapiens
agaaaaaagcagcagggggtgagagtggggaggggaggagcagggctgctgtttaaatacaatggtcagagcaggccctatcctgcaggtaacatttgatccaaggcttgaaggaactagctcaagtctaacagtgaagatgtgcaagacgttccagcccaagttctgccayacccgcatcacgttctgccagtcctaccagctaaatcggccccttgtctgcgttagcattggt

SEQ ID NO: 529905 - DNA, 525 bp, Homo sapiens
actgagagaaattagtgggtgagtttaacagccattagagagagagaaagcgtgaactaatgaagtagaagggagatttttttttctctgacattttgtcagaaaaygaagtcattactggagatttctttttttaaactggaagctttataacaaaatatgctttataccgaaatataccgaaaggatacactttctcccctctgctgtgtcaaaaaagttctattttttctcataataggtcctcatacatgtgctattgtgttcttactaagtatttgataggatttttgctatttgctatcatgaatgggacattcttagtaaattattctaagatgtattcaattgattctcttgaactgttaaagtataatcttggctgcaaatcaggatacgtagtcttgttctttccaacacacatggctgtttcttaatttacagatatgatcccatttctagattaaacacttgtggtgaatattttttaaataattattaaatttgatgtctgctgcagatttt

SEQ ID NO: 529906 - DNA, 485 bp, Homo sapiens
tgaattttgttaacttgataagttgcctcaagcagcaacagagtctaaaatgtacagacaaacccagcaatgaaaatcactgcttgaggaagattgtaacagcttgaacctggcaaacagtaaataagactgggtcattttcatccttttatacccatctggtggtggtggttagttttctaaaagggtagagtactccgaaktttctgtggtctggtaaattttgggtctgtggttacgcgactgattttaatcacatctctactctgggataccccaatacctgagggttaactgtctgggtacccagtaatatcactgaatcttcaaatcctggacagaaaactcagatgaagtggttagtcaccgtgtcatggctggacagttaatgggtgcttcattctagctgagctgaatccaagtcaaagacctaaccaaaaggggagggcacagaagtaagggcttttttttttttttaatgaact

SEQ ID NO: 529907 - DNA, 507 bp, Homo sapiens
gtccaggcatctgtgtggaaaacaagaccaggcccaaagagaagaccagggcttggcgagggtgaagggctgagcgaagtgggaacagccgtacacgtgcgtgtctcacagacacgaagccctcatgtcataaaatcctggtttgttgcgatgaaactgaaaatgctacatggcaattgcagaggrcaaaatacttagcattgaatgacactgaaaatacccctgcgtcagggcatgtgggatgcagctagaggtgtgtggagaggaacatgaagccaaaaaagaaatacggacattcacaggccaagatccaactcagaagactagaaaatgaacaacccagcaaacttaggagatggggaaggaagggaattcagaaggtgatagctgcaagcatcggcagaccagtcctagcaaaatggagtttaaaagggggtaagtcacaaataaacaacactagaaacgaaagtcaaacataactacagataaagatttttaaaatacaat

SEQ ID NO: 529908 - DNA, 506 bp, Homo sapiens
attctcctctcctgggccttcccctccccatgcattgcactgtaagtcttctatctctttgtgcagaagggagtaacagcaggaattgtttaagcagctctcgtagcccttccatatgcacatttttgtagcacaccaatattaaccaaggtgtagattgggcacaatttgcttcctaagcaaattcatcatgcaggagcccatctttcctcttgatgtgatgttgactctgctctcccttccagtggcaaacagatggaaactggattgggaaagcatcccatggaacaacaatcttttcttcctgtgggacctagtgcatgatccaggtggggtctggaaggataggctcagggacaacgagatgtgggggcatgaatggcagccaggcaagctgggctagctgagcatagctcagatctcagtctgcagaggtcagcccyggcagaacatatgtgtcggcctcctaccccacagatgagctggaacggctcgcagggcttcag

SEQ ID NO: 529909 - DNA, 476 bp, Homo sapiens
gcaaggaaagttttgcctgtccaaataacaacaacaacaacaaaataactcatagaggaatccactaactcatttacctacagagctgcaaggggaatccactgaaagctgcagagtggggaagtgaggcgggaagcatgaggcactcccgtgtgacgctgtggtggtgggtaactgggcccatgcccgcagcttacctcctggtggtggcaggcccagctcctctcttgcgacagtgacctgctggtcacatcacaccaccgctgggtccaataccatattgcatttctccatcatagacgcctccccctagagccaactggaggttgcagtttgytcaatgagacccagatttgaaattcaagatatgtgttgttttcctctgtgggatactggtgttgttagcatgtcacttgttggccctttagggataggttccaagttgccaatccacccagccctgtgtggccctaagc

SEQ ID NO: 529910 - DNA, 558 bp, Homo sapiens
aagcaccagactagcagggcgacaacctggactttatctactttggtgagaccttgttcaagtcacagaattacagaatatcaactagaaggaamtttaaccataagttgcaagcctcttatttttgatggtgtgggtgttggttcacagagacaaaggggctaagtcaaaactgtagattggtaaaatcaggattaaaaccaagatctgttaactctgcagttgcctactaatatctcctttgatgtccataatgttcccgttatacagatattattattttctctgtttaagaataaaatcatctgtatccaaagagacttcaccttggggtccttaagtaaatataaggattgaaattacatccctggaactagtgtttcaattataagctcagaatgatttttaacactatctgtgaaataatgtgctgaaaactaaggggtcttcctgttttattactgctaaccattgcctctgccacataaacccttccttggaaaccatagcatgtgccatagtgagcttacttgaaagtagtctcctaagagagtcaaa

SEQ ID NO: 529911 - DNA, 578 bp, Homo sapiens
ctttgctttattttctgttttatgtattataaaaacctaagcaaagcatttgttcccatccagaagttgtagcagtctgcatggccactgtgactaatttagcaatggtgcactggtggccatccttgcttcgccaacccctgccgtgacacctcttttccatgtgacacgactttccttggagggtatttctgcttctctgtccactgtgcaccatggtttctccgtggttctaaagtttcctaacagtggttgccactgacctgccagtgccaccgttcatcccttgagtcatcacagagcaagagattctcagaagsctgaggcaaagttgaaggggatatttaactcctcctcctcccccatttatgttacagcttattagagaggtcctatggcagtgtagactgttcctccttgcttgcctgcatttgctgaactagagctttcactgtctgcttgcagcacatatacccttccagttcactggcttagcaacagattcaaagaacggtcttagtactgtacctgaaattatgatccactctgatgattagactttgttcttgggtcacctg

SEQ ID NO: 529912 - DNA, 317 bp, Homo sapiens
ctgagcattctggacctgagagctgctgctgacttgcttttgctgcctgtggttccctgtctgtaatctggaaccatatgtgtctacaaaactactttgagataaataataaaaatggggaatgggaaaagaggtggcagttgccatggaaacacaggagtctttgtatgacttgatttggggcagtgacattcataaaggtgtgtgaaatgggagcattttcctgtgacaccatgtggaagcgggaagattacaggtgagaccyccaattcaaagcagtagccggtggacccgggtggaggcatagaaatagccca

SEQ ID NO: 529913 - DNA, 626 bp, Homo sapiens
ctgaatataagtatgattttctgagctgactacaaatggaacaagctgtaagagtattttgttcactgcaggtgttcaaatataggctcaatatatagtagttatcatgttgcctcagttactctaagatgttctggctctaggaaaccaaagatgacgagaagaatatggacacacattaagttgaggaaakaattgggttatggggtatctatctctctacaaacttgcaaataagcacaactgttcactgatgttaagccagagaatatttggaactcattaggttttacttccttgtattttagtgtgtgtctccacatacttgaaaaccacattaacaaactagatttgtacccttgcactaaggcttacttgtctgatttagggcaagttatggacctactctaggcctcagtttccttgtctgtaaaatggggttattaataagagtgcctgccttataagattattatgggggttcattaaggcaatcctggagagtttcactctgcctacctcacaggaagcattcaaaatataatctttttattaaaataaagacaaaagagtgtcttataaggggattttcccataccataggaccatttgtctctcaaaaaaag

SEQ ID NO: 529914 - DNA, 520 bp, Homo sapiens
ctgctatagctttgatttatgactaacatcctaggacagagatggggaggaagctgataaacagaggctatgacctgctgtgggcaataatgtytcaggatctcaggtgccacttcacagatgggacataggtgttgcctggttgggttctgagtatctgggtttagtggggctgagctgagacagccaaagagaaagcacataaatatccaagggagagaatgtgtctggcttcagaccttacagatcaaaattgtctttccagataaaggtctaaaagagagagctgaataaatcaaacaagaggtgacgagaaattgaggaggaagtgaagcacagaagatctgagactgatatctgcactgggaagggatatctggaactctctctctctctctttctctctccatgggttctggggttgcacattggttgagataaagatgaatttcagttggaccagcagatattggagaatgatgagagcagcagttaaggaaggtaggggaaatattatgga

SEQ ID NO: 529915 - DNA, 622 bp, Homo sapiens
attaaaaaaaaacagaaataaatcacaagaaatagaaatgaattatgaaaatagaaattagaaatgaattacaagaaataaaaaaatggaaaggaagaagaaaataattcaataaaatgtaaagacaacaaaaaaacacaaaaccttgggatagcccctcttttcttttctcagaataaaaatctctgtcctcctcaaaaccatgattctgactagcctgcaggtacagtccctggcagaagccatttgtaccggcagcagtggccctgcttggctgggtcagaggacactgaatgaatggtaagcctttgtcaaactcttaatttccacacactcggtgttcctatttarctatttgtttatctgtttataactcattatccacatcatacaaaaatacattctcatcctcaaacattccagcaatttcagagtatgtaaaataaacattaaaaggttcagatggcctcccattctcatattttcttcttttcttcttcttcaccatactttccaatgatgattttggcaaatagctctgtcttttgtttattttgtagtgctcttacacaaatagttaataaatgtaaacactttatttatttttatttttatttttgag

SEQ ID NO: 529916 - DNA, 513 bp, Homo sapiens
tgattatgcattcaaaattatggagtccaaaaagcagtagatgacatagtgaaagcactaaaagaaaaacgctatcaacaacaattctatattcatcaaaaaaacctttcaaaaacacgagagattaagatagtctcagataaacaaacactggagaatttatcattagaccacctgctttacaagaatactgaagagattctttctagctcaaaagaaaaaacactagccagtaactcaaagccacataaaaaaatraagaataccgttaaaggtaactacataggtaaatacaaaagacggtataaatagatttttgtttttctttgtaacttttctttttctacttgatttaaaaaaacaactgaataaagtaataattacaaaactatgttgatggacctatcatgtataaagaggtcatttgtatgataatggcaccacagctttgcttcataagagcaaagctgctatatacccataatattatgtcagcattaatgaaaacaaaat

SEQ ID NO: 529917 - DNA, 604 bp, Homo sapiens
ctgattcattattttccatttatgtaaaataaaattctaattttaaattttaatccatggacaaattctgctgcatccttttcactttctccccatcatcattcatcaccagatccatttggggaaggactggccaagttctattttcctaggacagagcagctcaagaggatatacggtcacttaattccatcagagcctcatgaatgatgctagttgtttaaatgggtgcttggctgagtccatctcccaggcaaagcataagtcagacaagtggaaaggccacagggtgtgctgcttctatgcaaatgatctttgttccaaccccacaaacactttttgctgttgttaccatgggttgctttgaaacaattctgctttcttttgtttcactgattcatgctgtatcctgcccagaaawctagttttgacacctcctacatcttctgatttctcccacaaacaaaagagtcagactggaaaataaaaagaatgtatctggctagtgaactgaggaattcaaagaatgttctttccttatattctttccctacccactgtggagatattactgtcctcactcggttattaagaaattcaatgg

SEQ ID NO: 529918 - DNA, 599 bp, Homo sapiens
tgggatataaatatcacatgagcaatattaaaacattctcatcctcaggtcttatcccagattgattaaataagaatctgcagaagtgagacctaacattttaaaaatcatctaggcaattccaatgtgtagccaaagttgagamttactcatctaaaacatcagtcaatgaccaggcaaagtggattttcaatacagttgagaaataagagaagagtgcttttcaggcagcgaatgaatcttccatatggcctttatcagaccagccactggtgacctgaacattatttttgtgttgtctttctaatagcagtaaccacatggtatgtactaattatcagagtgaaaactcattttgaggaactagttttatagttgataaacttccattgaatatttatcattgaattaatctaaacacaatttttaatgcacaaagtccttctatttctcaccaggtcactaaactccttttaaattttttattttatggttcaagctggcaaagaaacatctgcatttcacttctggccttatgtaattcaccatttcacaactaaatgcaagcaaaaatagctgtaagccagactgtttggaat

SEQ ID NO: 529919 - DNA, 603 bp, Homo sapiens
ctgctagaaaattgtggtagtaatagctcaaaaaatgtactttctctagaaagtgatgagtagctagaaatctcattargtatcattatttcattaaaaactgtcatcttcttctttgatattttattccaccaatattaaattatgaattatttaatgatttccatttaatatatcttatcacaaaaaagtttgtctagtttgtgctttctcccattttcatgaatataaagctcagaattgttttagcaaataatgctacagcaaaaataaatattgcaataatgcataaaccataatgctataaaatatttttattcatgcccatggtttttattttttaaaaaaatagttactcatactgccattttatgcacttgccccctttttatcttactaatttgaggttacagggaactggcttggccactttatattgttgatgaggtcactaaccttctccccttggctgatttggcattacatgaaagattacataaggtcaaaaggtaaacctataaccaataagcaacaggaaaggctcttgagcactgtggttacaaatcatgtgctacataacacgcttatagatgtgttatgccc

SEQ ID NO: 529920 - DNA, 603 bp, Homo sapiens
ctgctagaaaattgtggtagtaatagctcaaaaaatgtactttctctagaaagtgatgagtagctagaaatctcattaggtatcattatttcattaaaaactgtcatcttcttctttgatattttattccaccaatattaaattatgaattatttaatgatttccatttaatatatcttatcacaaaaaagtttgtctagtttgtgctttctcccattttcatgaatataaagctcagaattgttttagcaaataatgctacagcaaaaataaatattgcaataatgcataaaccataatgctataaaatatttttattcatgcccatggtttttattttttaaaaaaatagttactcatactgccattttatgcacttgccccctttttatcttactaatttgaggttacagggaactggcttggccactttatattgttgatgaggtcactaaccttctccccttggctgatttggcattmcatgaaagattacataaggtcaaaaggtaaacctataaccaataagcaacaggaaaggctcttgagcactgtggttacaaatcatgtgctacataacacgcttatagatgtgttatgccc

SEQ ID NO: 529921 - DNA, 611 bp, Homo sapiens
catataaaattttacattctcttaagaaattgaatagtaattttattgtattaccttaaaagaaagtgagtaaataatggttggttttatgtcatatagatgttaatttgtatatagaaactgtatactrgtgatgaattcctgttaacccaattatgttatctacagcagcatccaatataggtgagcaatattcattaccaggccaagagcagatgtgatagaaccagagctagagttatgcttacagatgagataaaacagagaaaaaaatactataagagatgtgaaagatgttgacagacccctcattttttttttctcctgcaaaagtccttcttcatccacattgaaattttctcttccttatgccctgctaggctccagtagccaccagtcccaagcaggcctgcctgatttgtttaaactggaaggaagaaaaatatatgcagatcttctctggggttgaaaatttgatagttccctgatgttcagcctggttgagtaagcaagtaagctgtgagagagaataaaactcacaaaaagaagtaaagatgagaaacaaagtgctggcagcatctgagttgctgaatcccgtttttcctaagatt

SEQ ID NO: 529922 - DNA, 611 bp, Homo sapiens
catataaaattttacattctcttaagaaattgaatagtaattttattgtattaccttaaaagaaagtgagtaaataatggttggttttatgtcatatagatgttaatttgtatatagaaactgtatactggtgatgaattcctgttaacccaattatgttatctacagcagcatccaatataggtgagcaatattcattaccaggccaagagcagatgtgatagaaccagagctagagttatgcttacagatgagataaaacagagaaaaaaatactataagagatgtgaaagatgttgacagacccctcattttttttttctcctgcaaaagtccttcttcatccacattgaaattttctcttccttatgccctgctaggctccagtagccaccagtcccaagcaggcctgcctgatttgtttaaactggaaggaagaaaaatatwtgcagatcttctctggggttgaaaatttgatagttccctgatgttcagcctggttgagtaagcaagtaagctgtgagagagaataaaactcacaaaaagaagtaaagatgagaaacaaagtgctggcagcatctgagttgctgaatcccgtttttcctaagatt

SEQ ID NO: 529923 - DNA, 546 bp, Homo sapiens
ctgccgtgttggctttgcattttcaggaaacgctctgtgccctggcgcttctcctcagccaattcgccaaagtgacccatgccttccagagacacattatcacggtgggaatagaagcccagacagaggcagatgtaggaggcccgcaggtgcaaattgaccaggcggttgatggtagcctcaccctccgtggaataattttgatgaatctgggagctcatggttggttggcaagaaggagctaaccacaaaaacggtgttggctggtcccagaagcagaagatggccaagaagatggtcccggagattgyaagtggagaggagatcccaaggtggtcagaggctggaagaaagagagtccctggatcagttccgtccaaacactgttgaagcaagacacagatctctgggccctctgaatgggctgccaatgtatttctttcttttttgagacagagtctcgctctgtcacccaggctggagtgcagtgacttccgcatcccgggttcaagcaattctttctcagcctcccgagtagctgggatt

SEQ ID NO: 529924 - DNA, 653 bp, Homo sapiens
attcacattgggagctaagtactatcagtgcatccatgtgtgaattaatacagtataacacactcgtggccatggaatgtcacacagtgatgatgattgggcttgtaaaatgcctyaatcaaatattatttgaaaagaacaagtatatgctgtcacattgatgacaaggtttaaaagcgttgagctaaatacattatgcttcactatagtcaatagtccattaatcccatcaattgtgtaattattttgaattgctttatttgaactatatttcacttctgaagtcttatatgaataataggacattggaaaagtaaattaaagtcagcagcatatctttataacttcatatccagaaatgtaagcacagtaaaaatatgaatgtgattatattcacttttatgtatttagggacacagacatactctactggtaattttgcctgtctgtccctcttatatttggcccttctttttctttaatagctatgtccccccaatctgtgtgtaagtgtttcagtcatttccatatgtaaaatttaccttcttagatcctgcatgcctctccttctgttcacaggaaatattctcacagtttccattaactgttaccacttctatatgtttactccattatcaactgacaaaaatcag

SEQ ID NO: 529925 - DNA, 653 bp, Homo sapiens
attcacattgggagctaagtactatcagtgcatccatgtgtgaattaatacagtataacacactcgtggccatggaatgtcacacagtgatgatgattgggcttgtaaaatgccttaatcaaatattatttgaaaagaacaagtatatgctgtcacattgatgacaaggtttaaaagcgttgagctaaatacattatgcttcactatagtcaatagtccattaatcccatcaattgtgtaattattttgaattgctttatttgaactatatttcacttctgaagtcttatatgaataataggacattggaaaagtaaattaaagtcagcagcatatctttataacttcatatccagaaatgtaagcacagtaaaaatatgaatgtgattatwttcacttttatgtatttagggacacagacatactctactggtaattttgcctgtctgtccctcttatatttggcccttctttttctttaatagctatgtccccccaatctgtgtgtaagtgtttcagtcatttccatatgtaaaatttaccttcttagatcctgcatgcctctccttctgttcacaggaaatattctcacagtttccattaactgttaccacttctatatgtttactccattatcaactgacaaaaatcag

SEQ ID NO: 529926 - DNA, 653 bp, Homo sapiens
attcacattgggagctaagtactatcagtgcatccatgtgtgaattaatacagtataacacactcgtggccatggaatgtcacacagtgatgatgattgggcttgtaaaatgccttaatcaaatattatttgaaaagaacaagtatatgctgtcacattgatgacaaggtttaaaagcgttgagctaaatacattatgcttcactatagtcaatagtccattaatcccatcaattgtgtaattattttgaattgctttatttgaactatatttcacttctgaagtcttatatgaataataggacattggaaaagtaaattaaagtcagcagcatatctttataacttcatatccagaaatgtaagcacagtaaaaatatgaatgtgattatattcacttttatgtatttagggacacagacrtactctactggtaattttgcctgtctgtccctcttatatttggcccttctttttctttaatagctatgtccccccaatctgtgtgtaagtgtttcagtcatttccatatgtaaaatttaccttcttagatcctgcatgcctctccttctgttcacaggaaatattctcacagtttccattaactgttaccacttctatatgtttactccattatcaactgacaaaaatcag

SEQ ID NO: 529927 - DNA, 573 bp, Homo sapiens
tttttagggtacaacagtggagggcagaagagtccaaacagcaggttgtcactattgctgagattgtaggcatttacaaagcacagtgaaagtgagcatccacctttcctattctggtttccttagtttccataacagttagtgaggtcagaaacaggatcagataggcaaatctggtgtaggatgtatttttctacacttatgtggcagaatgaaaaaaaaaatctgtggtactcagagctctgacacaggcgttattatttatctcaataatctcttctttgtctttccatatgtctttatagattttccttgaaaatagaatatggtaaagtaacccaagtgaggtccccactttattttgtttccctgtggttttctcatrataatatcattaacttcaagaagaaatgtatttcccatagcacacacagtttgctctacccttcatacagctacattccatcccttgttctaagtaccctccttaggggcaatgagaatgaaaatttctgcagtatttccctttgtatgttggttgcagctccataatgactttttgacctgtggaga

SEQ ID NO: 529928 - DNA, 522 bp, Homo sapiens
ctgtgcgcttatgcacaattagtgcttttcttctggagatatgtgcatctgtatggcagagcgggggcagacatgcttgtggacctgtgtgtttgtataactaaattgtttccacctaaattcagaaagaatgttttctctctacctcacagtttaatatcatagatgctgaagggaaccagagttggcataacgaagcccactttggaacgttcttttggtcagggagtgctggaatgggtggagaatggcatgggacatcaaagtgtagctgtcgattgctcaagtctgactcatacttcccatccacaaaggatgaaccaggtcctggaataagtagaaggtagttgttggaatgacaagagagtttccataggggtcctgacaacctgacgtttcagtttagggtgctatatagcttctttggctatttttattttcagaaataattaatgatgtatsttctaagtcaaatgtggtagctctttatgtgtaatttgactttcttccttgtgtctaagt

SEQ ID NO: 529929 - DNA, 531 bp, Homo sapiens
taaacccttaagatggtgcttaatgtaaatatgcaatagattttacctgctactgttattatcagccactttcattatttcatgaaacatatggctttatcaaagtaaggacataacatgtattacaaatgaatattctctttaaagcagggaagcctatgtttatattgttcataaacatacttgttacttgttctatattttcttccctagaaagaaattctatgtgcattgttmaagaaaaattgtaccagataaatgtaaacagggaagaaaggctttattcaagactattgcagttgggatcaagactactgcaataggagagcgagattatcaactctattgagacaaaagataagcaagtttttaacttctgggatgaactattggaaaagcaccgaaggatattagtggggagttggtcaaagtgatgatgctatctacatgtgctaaattgatgcttaccaaaatcagaattctgcccttccacagagactgggagaaaggggccctacatttcttgattat

SEQ ID NO: 529930 - DNA, 639 bp, Homo sapiens
gttttgttttctagttcttgtacatagtaagaatcaaaaaatatttgtagaatgaatatattgaatgcatcttcacatactctctctcttcatgctcacagtttataaagatactcaagattctttcatcctgaaacaatttggacaaaacaacaacaaaaataaatctgttttaactccactgctctctctagttactttctaatctcttctttattcttctcactcacatctctagaaagattattctctttctcacgtctcatttactctgcactacacttatgcccttacccccacttggcgctgctccactgaaattgctcttacttggtttcctaaggacgtcgtaaagccaagtccaagggggcagttgtcactcactcctcttcttacagtcttaactgtatctgacacacctgattattttcttayatatttttgaaacctttcatttcctgtggctctggtggcaatacaccctccagatttctttcttcttgtcttttcattgttttccttaagggctcctttccctcccccatcatgaggatcctctccatttgctttccctgagtgatgtcaccaggtatttggtcatcatgtcttcttaggctcctcctggctgtgacagcttct

SEQ ID NO: 529931 - DNA, 475 bp, Homo sapiens
ctattggtgctggccaggggttctatacagcaccctgtttgccatagatgctttgagtatggtgaaatctgctgggtcataagctccaagtggtggagcagcttgtgccgcagtctgaatgaacttgctgcagagccttctcctgatctggtttccactcaaagctaacagcccctccctggggcagcaggcccctgcgttatcgtgggactggtttcccacmctctacttggcatctgttttaccagggaatctgatgtgcttgctacatcctgttcctgggatccaatccacatgtgattaatgtaggagaccagtgtgcattttgtaaaatgtacagacaagcaagttcgctgcagactatcactgacacatcaggggactcgctcagactcagactgtgcggctcggccccaggcccagctcccgtcctcccaggcctgcacagtgactcagggttacagaagattctcca

SEQ ID NO: 529932 - DNA, 475 bp, Homo sapiens
ctattggtgctggccaggggttctatacagcaccctgtttgccatagatgctttgagtatggtgaaatctgctgggtcataagctccaagtggtggagcagcttgtgccgcagtctgaatgaacttgctgcagagccttctcctgatctggtttccactcaaagctaacagcccctccctggggcagcaggcccctgcgttatcgtgggactggtttcccacactctacttggcatctgtyttaccagggaatctgatgtgcttgctacatcctgttcctgggatccaatccacatgtgattaatgtaggagaccagtgtgcattttgtaaaatgtacagacaagcaagttcgctgcagactatcactgacacatcaggggactcgctcagactcagactgtgcggctcggccccaggcccagctcccgtcctcccaggcctgcacagtgactcagggttacagaagattctcca

SEQ ID NO: 529933 - DNA, 449 bp, Homo sapiens
gcaccgccccctggaggggtgctggtaccacccctgatttctcagaccagcggtctgaagtgcagagaggggcaatgatgtgcccggtcacagcccacccccttcacctgtcatctgccaggaccttggctcactctgcgtcctccaattccagcctccactgactggttcccctgctctgctctacctgctgagggcctgagagggcccccaaattgtggccagctgcggccagcccccgagggaggagagcttgttctcaggcaggttcccaggaccccctcattcctgggaaccaaaacctctggagagggccagggaatctgtattttaccacctccctgggtgagtctgacctgctccaatgtctgggcaccactgttggttccctcctttcccatctcctacagaccgcccyggcccaggccctcccgcagaccctctctgtc

SEQ ID NO: 529934 - DNA, 629 bp, Homo sapiens
tgcggccagcccccgagggaggagagcttgttctcaggcaggttcccaggaccccctcattcctgggaaccaaaacctctggagagggccagggaatctgtattttaccacctccctgggtgagtctgacctgctccaatgtctgggcaccactgttggttccctcctttcccatctcctacagaccgccctggcccaggccctcccgcagaccctctctgtctgtgctgagccagggctgactccgcctccaatgctcctgcgatcctcacagcaatgccacagcaatgccacaactctgagctgctgccaccmgtcaatggggaagtccagcgaggctcccaacgggaaggacacgtccaagctctgagctgggctcctgccctgtccctccttgtatctcccctggactcccctccagggccccctgagttcacaatgggcacagcctctgagggaccctgggtggggggcctgctgaatctctcacacagactgtgcaggaaggactgagctgctggcttgcgagcccccaaccttggatctatggtttccatgttcttcagtggcaggaagaaatccagaacaccccgccccccacctcccccagtgtttataactctgctggc

SEQ ID NO: 529935 - DNA, 599 bp, Homo sapiens
tgctgactcctcttcagtggtgaaaggaaatgaagaaaagaaatttgtctcatcctggggaaggccccaaacctcatccccaggaggtctgcctgcctggcattttacaaggcagtgggcctcttggaggcagggagccgagatcaaaagtacatcagacattgcaccagacaaggtgacttgccccccaccccccttggattggcaaggtgttctttccagaataactgccaagatccccctccccagttctctctttgccactattgtggctctggrgaaaagattagaaaggcagtgctaatttaatttgccagaatgaataaagataagacagtgactcagggtgatgaagtgctgggagcccataattcacatgcctgatagcccacgttggagctgattcagccaggacagcctcggtttactgtctctgtcgctgaggaaggctggcttccccgcctaggcagtgggtgtgagaggcttataaatgggcaaatgagtttaaggggaggaaggagcggagatctgtgggtccttctagtgcccatggctgccaccaggatgtggggagggagcactcagatcattcattcatg

SEQ ID NO: 529936 - DNA, 631 bp, Homo sapiens
cagctttttaaaaagaattcatttgcagcatgaaatctaccgagtgagtgtgtaaaccatggagtcattacaatgtggtggaattgctttgctttgaattgagttgtggctctgtctgtaagtacctgctcctttcactgtttcaagctgggatactcagagaagcgtgcagacctggctgggtctgtcagccctgccttggccccgtgtggtaatcaggtaaactcccacctgtgccctctcacctggacggtggrggagtctgagggaggcctcaattctgaatgctccctgaattccccatctgcttgagcccagaccctactctggtcaactctgtcccttagtaaagtaaccaaccatttccagttggcagggaccgagtgcattcttggtatgaggcacttccagcgctgaaaccagagaagtcccaggccacgaggatgacttggtcaccctgttctttgtggctccttacattactaccagtgagccaagacctgtgaggagaggcaggcgaggcctccatgccctgccctgagggaccagccgtggtgctggtgttcgctgatgtgcacagaagagcagggctccttagggaggcgtggctggagaaggtgacagagcctca

SEQ ID NO: 529937 - DNA, 631 bp, Homo sapiens
cagctttttaaaaagaattcatttgcagcatgaaatctaccgagtgagtgtgtaaaccatggagtcattacaatgtggtggaattgctttgctttgaattgagttgtggctctgtctgtaagtacctgctcctttcactgtttcaagctgggatactcagagaagcgtgcagacctggctgggtctgtcagccctgccttggccccgtgtggtaatcaggtaaactcccacctgtgccctctcacctggacggtggaggagkctgagggaggcctcaattctgaatgctccctgaattccccatctgcttgagcccagaccctactctggtcaactctgtcccttagtaaagtaaccaaccatttccagttggcagggaccgagtgcattcttggtatgaggcacttccagcgctgaaaccagagaagtcccaggccacgaggatgacttggtcaccctgttctttgtggctccttacattactaccagtgagccaagacctgtgaggagaggcaggcgaggcctccatgccctgccctgagggaccagccgtggtgctggtgttcgctgatgtgcacagaagagcagggctccttagggaggcgtggctggagaaggtgacagagcctca

SEQ ID NO: 529938 - DNA, 631 bp, Homo sapiens
cagctttttaaaaagaattcatttgcagcatgaaatctaccgagtgagtgtgtaaaccatggagtcattacaatgtggtggaattgctttgctttgaattgagttgtggctctgtctgtaagtacctgctcctttcactgtttcaagctgggatactcagagaagcgtgcagacctggctgggtctgtcagccctgccttggccccgtgtggtaatcaggtaaactcccacctgtgccctctcacctggacggtggaggagtctgagggaggcctcaattctgaatgctccctgaattccccatctgcttgagcccagaccctactctggtcaactctgtcccttagtaaagtaaccaaccatttcyagttggcagggaccgagtgcattcttggtatgaggcacttccagcgctgaaaccagagaagtcccaggccacgaggatgacttggtcaccctgttctttgtggctccttacattactaccagtgagccaagacctgtgaggagaggcaggcgaggcctccatgccctgccctgagggaccagccgtggtgctggtgttcgctgatgtgcacagaagagcagggctccttagggaggcgtggctggagaaggtgacagagcctca

SEQ ID NO: 529939 - DNA, 631 bp, Homo sapiens
cagctttttaaaaagaattcatttgcagcatgaaatctaccgagtgagtgtgtaaaccatggagtcattacaatgtggtggaattgctttgctttgaattgagttgtggctctgtctgtaagtacctgctcctttcactgtttcaagctgggatactcagagaagcgtgcagacctggctgggtctgtcagccctgccttggccccgtgtggtaatcaggtaaactcccacctgtgccctctcacctggacggtggaggagtctgagggaggcctcaattctgaatgctccctgaattccccatctgcttgagcccagaccctactctggtcaactctgtcccttagtaaagtaaccaaccatttccagttggcagggaccgagtgcattcttggtatgaggcacttccagcgctgaaaccagagaagtcccaggccacgaggatgacttggtcaccctgttctttgtggctccttacattactaccagtgagcyaagacctgtgaggagaggcaggcgaggcctccatgccctgccctgagggaccagccgtggtgctggtgttcgctgatgtgcacagaagagcagggctccttagggaggcgtggctggagaaggtgacagagcctca

SEQ ID NO: 529940 - DNA, 658 bp, Homo sapiens
gactagtaaaagagttctagaattttaaaggcggaaagtgtgaaagttgtcagcatcaaaatgccaaacttgaatgaaatgaagtcagcagaccatgaaggaaaagctctcgcacacactttcctgtgatgggaactkccattgaagatgttgccaatccacaaccttgcaacaaaggctaatgttctgaggacatctttccagtaatagccagtcctaactgtaaacttgcaagtggtctaacttgcaatcagagtccctgcaatcagggtgcgttctgtgaagactctctcttggcaagagccagcacacatattaagtcctgtgagtaagctcctgtaaacaaataaacttttgtttcagaacaccctgcatgtacttctcctttctgtctttaaactttcccacgtctcaaccaccctggatgcacctatgatttattataatgtgcatacctgaatttggtatgcatatggtcccctgctcattcttaaataaactcatttctttggagaactactttctctcttgttattttagcttgacataatctggcatcagaagtaggacccaaagtgagctcatcttggaatgatcatcagcccctgaaaccatgcatggtattcacttgttgagccctttgatttcttcatttcca

SEQ ID NO: 529941 - DNA, 658 bp, Homo sapiens
gactagtaaaagagttctagaattttaaaggcggaaagtgtgaaagttgtcagcatcaaaatgccaaacttgaatgaaatgaagtcagcagaccatgaaggaaaagctctcgcacacactttcctgtgatgggaacttccattgaagatgttgccaatccacaaccttgcaacaaaggctaatgttctgaggacatctttccagtaatagccagtcctaactgtaaacttgcaagtggtctaacttgcaatcagagtccctgcaatcagggtgcgttctgtgaagactctctcttggcaagagccagcacacatattaagtcctgtgagtaagctcctgtaaacaaataaacttttgtttcagaacaccctgcatgtacttctcctttctgtctttaaactttcccacgtctcaaccaccctggatgcacctatgatttattataatgtgcatacctgaatttggtatgcatatggtcccctgctcattcttaaataaactcatttctttggagaactactttctctcttgttattttagcttgacataatctggcatcagaagtaggacccaaagtgagctcatcttggaatgatcrtcagcccctgaaaccatgcatggtattcacttgttgagccctttgatttcttcatttcca

SEQ ID NO: 529942 - DNA, 578 bp, Homo sapiens
tgctagtgagaggatttgacataatttctcaaacagaatcttccaattttattattggaagagatcttagagacagcttgcgattattaaaaaaacttcaatgaatcgtttaaaataatgacattcatctcatgtttgtgggccacattgagaagtacaggaataagaaagcttaatataatattatttaggttcaattggcttgaatattagactcttaaaatggaactcattatttgtgtttaataatgaggactctaartgccctgaaggaatgtccacgtcttatacatgtttgaattattagcacctaactcaggtcttggcacttaacatttaataaataataatgaagatagtacccgttttgtttacatagattatcccattgtattcttatcacaaatacttttaccacaatgttaaaagagggatttaataatttattacaattacagagctactaaataagatttgggcccaagaagtcttgctgtcagtcacttcattaaaatacctctgtgtttgctgagtgtacaataacaatgttttctccttatcagttccattctaggcca

SEQ ID NO: 529943 - DNA, 578 bp, Homo sapiens
tgctagtgagaggatttgacataatttctcaaacagaatcttccaattttattattggaagagatcttagagacagcttgcgattattaaaaaaacttcaatgaatcgtttaaaataatgacattcatctcatgtttgtgggccacattgagaagtacaggaataagaaagcttaatataatattatttaggttcaattggcttgaatattagactcttaaaatggaactcattatttgtgtttaataatgaggactctaaatgccctgaaggaatgtccacgtcttatacatgtttgaattattagcacctaactcaggtcttggcacttaacatttaataaataataatgaagatagtacccgttttgtttacatagattatcccattgtattcttatcacaaatacttttaccacaatgttaaaagagggatttaataatttrttacaattacagagctactaaataagatttgggcccaagaagtcttgctgtcagtcacttcattaaaatacctctgtgtttgctgagtgtacaataacaatgttttctccttatcagttccattctaggcca

SEQ ID NO: 529944 - DNA, 641 bp, Homo sapiens
ctgacctgcctcaggtcacatgccaggtgaatgaagagaagctacggtccctcagtgatctcctgcatagatatttacatgtatgcaaaaaagaacctatgaagaaaatataaataggaggtagcccaccagtgggctaaagaaagaactgcagtttgggaaacctgaattctaactgtcgtttaaccacacattttctttgttttaagacagattccttattatcttggtgtctcagttcataaagtgaacagacactgatgttcttaactattgttaagaataatgaattggtctgataatgcaaagatagatagatggataggtagataggtagataattgagaggtaggtagacagaataaaagcagcctgacaaatgtttaaaatccagctacctgttaagtgctaaagagaagaggcctcaggaagttcacatgtgtgcagttcccaggcatgtttcagaaccagcttcctcactcaggaatttgctygaagggctgggagtcttgccacgaagtacatcaaagttcatttgtatttgcattttagctgtctgtgacaagctttgtagtaaacacactacatttaggcagtcactttggggaatccatcagtagtctcttgctagggctcacatc

SEQ ID NO: 529945 - DNA, 637 bp, Homo sapiens
tgcccatctaatttttgcatttttagtagagatggggtttcacccttttggccaggctggtctggaactcctcacctcaagtgatctgcccacctcagcctcccaaagtgctgggattacaggcgtgagccaccatgcccagccatgattaaatttttcttgtctgctttacagggttgttctatgactcaaataatattaaggttttggaaatgatttgtaaatcacacagatctctattgcagaattaaaggattcacaccattatccttaaaggttacttgcccctatcatatccatagctactaaaactatcaccttaaaaacacgatttcccaagctcactccctgcttcagaagtgaccatggatctcaatggcacaagatttaaatcagagcatcccyggtctgacttctaggagctttctcaatgccgaacttgatcttgtctttgttgctgcaaaccatgcttctcattgacctttgatgcaaactctaccccaacaaagtaaatcttcacatcattggcacatatactgtaggttttatattctggaacttcctatatgctttccctcatatacgacattccagcccacctaaaaatgcagatcacttctaatgcttcatttaatat

SEQ ID NO: 529946 - DNA, 637 bp, Homo sapiens
tgcccatctaatttttgcatttttagtagagatggggtttcacccttttggccaggctggtctggaactcctcacctcaagtgatctgcccacctcagcctcccaaagtgctgggattacaggcgtgagccaccatgcccagccatgattaaatttttcttgtctgctttacagggttgttctatgactcaaataatattaaggttttggaaatgatttgtaaatcacacagatctctattgcagaattaaaggattcacaccattatccttaaaggttacttgcccctatcatatccatagctactaaaactatcaccttaaaaacacgatttcccaagctcactccctgcttcagaagtgaccatggatctcaatggcacaagatttaaatcagagcatccctggtctgacttctaggagctttctcaatgccgaacttgatcttgtctttgttgctgcaaaccatgcttctcattgacctttgatgcaaactctaccccaacaaagtaaatcttcacatcattggcacatatactgtaggttttatattctggaacttyctatatgctttccctcatatacgacattccagcccacctaaaaatgcagatcacttctaatgcttcatttaatat

SEQ ID NO: 529947 - DNA, 591 bp, Homo sapiens
gatacctacccacgcttctctctacctcaacccattaagacatattgaggggtaaaaartgacctttttcagagtgtgctctgcaagaaactttgtgtcttaacaatattaattcgtttccaatcactaaattctccgtaccaatcagttatttttctgctgtgtgcctatttctctgctaagcataatgactgaacaaaaaatatgtatgacaacatgtctatccacaagtagcttattctggttgccagaattctaagatgacccctgatgtcccatgcccttgtgtaatcccctccccttgagtggtagcaggaccttaatttgcttctagccaatagtatatggcaaaagtgatgggatattgcccccgtgatgatgtcacattatcaggcaaaggtgaggggatttttgcagatgtaattaggatctctaatgagttgactgtaagttagtcaaaagagagattatcctgggtgggtctgccctaatcagatgagccatttaaaagaagatcgagaggtcagacactaaaagcagcagattcactctctcccttgctggccttgaaaaagcaagctgccatgagat

SEQ ID NO: 529948 - DNA, 529 bp, Homo sapiens
aaaaaagtggagaagctaaacaacaagtaactctaaagctccaggaaatgtgctaagtttgcccctggctgggagtacttttagatccccatcgcccctcctctgcccccgtccctttcaggatctgcctytttgaacatgtattccagtttgagaaacatggaatgagagcaaggaaccatttgtgcagctgaaagaaggactaggtgcatttctttttttttttttttttttttttgatacggagtctcactctgtcacacaggctggagtgcagtggcgcgatctcggctcactgcaagctccgcctccccattcacgccattttcctgcctcagcctcccgagtagctgggactacaggcgcctgccaccacgcccaggtaattttttttttttttcgtatttttagtagagacggggtttcaccgtgttagccaggatggtctcaatctcctgacctcgtgatccacccgcctcggcctcccaaaatgctgggattacaggcgtgagccaccgcgcccggcccc

SEQ ID NO: 529949 - DNA, 529 bp, Homo sapiens
aaaaaagtggagaagctaaacaacaagtaactctaaagctccaggaaatgtgctaagtttgcccctggctgggagtacttttagatccccatcgcccctcctctgcccccgtccctttcaggatctgcctctttgaacatgtattccagtttgagaaacatggaatgagagcaaggaaccatttgtgcagctgaaagaaggactagktgcatttctttttttttttttttttttttttgatacggagtctcactctgtcacacaggctggagtgcagtggcgcgatctcggctcactgcaagctccgcctccccattcacgccattttcctgcctcagcctcccgagtagctgggactacaggcgcctgccaccacgcccaggtaattttttttttttttcgtatttttagtagagacggggtttcaccgtgttagccaggatggtctcaatctcctgacctcgtgatccacccgcctcggcctcccaaaatgctgggattacaggcgtgagccaccgcgcccggcccc

SEQ ID NO: 529950 - DNA, 611 bp, Homo sapiens
gctgggactgcaggcgtgagccaccgcacctggcttctacgggagtcttgaagacagaaggctgcattcgcagtgtggggcctcttggcattccacagggacggggcggaccttaccttcaaattactggtaaatctgctatcgcacgtctgagggctactgagggaatgatgtagacgcctgtctatttgctggaaactcactgaggctggaaaagtggtgagcattgctcaaaaacattgcaaggcaaacaatctacacaggactggggcaaaacctgacagttgagactcacaacactccactgttctctctctttttttttttttttttgagactgagtctcactctgtcacccaggctggagtgcagtggcacaatctcagctcactgcaagctccacctcccaggttcatgccattctcctgcctcagcctcccgagtagctgagactataggcgcccgctgccacgccyggctaatttttttgtattttttaatagagacagggtttcaccgtgttagccaggatggtctcgatctcctgacctcgtgatccacccacccgcagactcccaaagttctgggattacaggtgtgagctaccatgc

SEQ ID NO: 529951 - DNA, 611 bp, Homo sapiens
gctgggactgcaggcgtgagccaccgcacctggcttctacgggagtcttgaagacagaaggctgcattcgcagtgtggggcctcttggcattccacagggacggggcggaccttaccttcaaattactggtaaatctgctatcgcacgtctgagggctactgagggaatgatgtagacgcctgtctatttgctggaaactcactgaggctggaaaagtggtgagcattgctcaaaaacattgcaaggcaaacaatctacacaggactggggcaaaacctgacagttgagactcacaacactccactgttctctctctttttttttttttttttgagactgagtctcactctgtcacccaggctggagtgcagtggcacaatctcagctcactgcaagctccacctcccaggttcatgccattctcctgcctcagcctcccgagtagctgagactataggcgcccgctgccacgcccggctaatttttttgtattttttaatagagacagggtttcaccgtgttagccaggatggtctcgatctcctgacctcgtgatccacccacccgcagmctcccaaagttctgggattacaggtgtgagctaccatgc

SEQ ID NO: 529952 - DNA, 378 bp, Homo sapiens
agactatcttccattaaacagcactgttctctggtcttagttacccctccacmcccagagattgagaaaccacctcagtccatacccatgctgactgctaccacctctgtgaaaacttctccccatcttcttcccaaatggccacacctgaggtcaatcttgacttcctcccacaaccaggatcctctcccctaaggagctatcggtcactgatccgagggccaggactcttttcccaaatctgccctcctttatccccagccccattgaagcagggcccaccactgagagcttcaggccatctcatcaatattagatgcttttcccttttgctaccctactgatctgtgtgttgatctttctcttcccacaaggcag

SEQ ID NO: 529953 - DNA, 378 bp, Homo sapiens
agactatcttccattaaacagcactgttctctggtcttagttacccctccacacccagagattgagaaaccacctcagtccatacccatgctgacygctaccacctctgtgaaaacttctccccatcttcttcccaaatggccacacctgaggtcaatcttgacttcctcccacaaccaggatcctctcccctaaggagctatcggtcactgatccgagggccaggactcttttcccaaatctgccctcctttatccccagccccattgaagcagggcccaccactgagagcttcaggccatctcatcaatattagatgcttttcccttttgctaccctactgatctgtgtgttgatctttctcttcccacaaggcag

SEQ ID NO: 529954 - DNA, 378 bp, Homo sapiens
agactatcttccattaaacagcactgttctctggtcttagttacccctccacacccagagattgagaaaccacctcagtccatacccatgctgactgctaccacctctgtgaaaacttctccccatcttcttcccaaatggccacacctgaggtcaatcttgacttcctcccacaaccaggatcctctcccctaaggagctatcggtcactgatccgagggccaggactcttttcccaaatctgccctcctttatccccagccccaytgaagcagggcccaccactgagagcttcaggccatctcatcaatattagatgcttttcccttttgctaccctactgatctgtgtgttgatctttctcttcccacaaggcag

SEQ ID NO: 529955 - DNA, 548 bp, Homo sapiens
ccctcacccagactgtgtctacaccgcccccttgtggtgtagccttctcctgttggttcgtattcagayacaactttttttcttactataaatgtgttgcattttcattatagaaaacttagtgacaaaacaaaataattgcatacagaatcaaaataaagactaccccgaaagagccactgacaagatgtagtggatttccttccagtctttgtatctacttcgacgtttacatattttattcaacaaaccaatatacatattttattgaaatattcgctacgagcttttctctgtcattttttttcttctaggctaggatttttaagtgctacatagtagtctctcatacagttagttaaaatttatgtaacgaattccctattattgaacatttagattgtaatgttttgtgcttatgaatagtaatgcaatgtattgtacatacatctttatatacatttctgttactttagaatatctagaagtggaattgtcaagttaaaggatatgtgagatctttaaggctttttatgcagattatcaaa

SEQ ID NO: 529956 - DNA, 548 bp, Homo sapiens
ccctcacccagactgtgtctacaccgcccccttgtggtgtagccttctcctgttggttcgtattcagacrcaactttttttcttactataaatgtgttgcattttcattatagaaaacttagtgacaaaacaaaataattgcatacagaatcaaaataaagactaccccgaaagagccactgacaagatgtagtggatttccttccagtctttgtatctacttcgacgtttacatattttattcaacaaaccaatatacatattttattgaaatattcgctacgagcttttctctgtcattttttttcttctaggctaggatttttaagtgctacatagtagtctctcatacagttagttaaaatttatgtaacgaattccctattattgaacatttagattgtaatgttttgtgcttatgaatagtaatgcaatgtattgtacatacatctttatatacatttctgttactttagaatatctagaagtggaattgtcaagttaaaggatatgtgagatctttaaggctttttatgcagattatcaaa

SEQ ID NO: 529957 - DNA, 548 bp, Homo sapiens
ccctcacccagactgtgtctacaccgcccccttgtggtgtagccttctcctgttggttcgtattcagacacaactttttttcttactataaatgtrttgcattttcattatagaaaacttagtgacaaaacaaaataattgcatacagaatcaaaataaagactaccccgaaagagccactgacaagatgtagtggatttccttccagtctttgtatctacttcgacgtttacatattttattcaacaaaccaatatacatattttattgaaatattcgctacgagcttttctctgtcattttttttcttctaggctaggatttttaagtgctacatagtagtctctcatacagttagttaaaatttatgtaacgaattccctattattgaacatttagattgtaatgttttgtgcttatgaatagtaatgcaatgtattgtacatacatctttatatacatttctgttactttagaatatctagaagtggaattgtcaagttaaaggatatgtgagatctttaaggctttttatgcagattatcaaa

SEQ ID NO: 529958 - DNA, 624 bp, Homo sapiens
taagaagatgcaagttcattattgcattctttatcagtgagagcaatgggtgttctttatcttactatgtcttttgacattcctccagtaaagggagaatgagccccattttacctatagggaaactgagacctaaagtgggtgggagactcatttgagtcttggcgttacgataagccctggaactcaggcaaaagccccatctctccctttctaatggactctcccacctcatcgctatcacccgcgttacaattttgagggcatgacttggctgtggtcccacttgctaaatgtgcgacaaaggcaagccacccgcctgactgcactgctgcatgggtgtaatgaggtgtgaaagtgaggaagtggagaaggggtgcaggtgaaccatgatgcctgttaacaagaggattcagtccaagttgatggcccccaggccctggagcatggggtctaactggaatgrgaccaggactagagcttggtattatgggagacccaagggttccctgcagaggaagagccctcctaccgacacaggtgggcagaggccggtcccaggtccggcgctctccactcagacacagcagctcctcactaccccgcaggctgtatccagggtca

SEQ ID NO: 529959 - DNA, 503 bp, Homo sapiens
tgccaaacctccctgaggacacgacccactcttcacaggaaaggcatcgccacccagtgagctggccacccacttggttcccctgggagggctgggacgtggctgaagcccagttctctctgctacattgaactgaccctgagaccctggtctcttactccccagtcctgggagggagccacagacacagggaggacatagaaggccctccggtttgagagggcaggaaacagctttaccccacattcctctggccttcaccccactgtctgtgyggagcaccttacccgcaccttccagccctgctggggaggagatgggtagaggtctccactctgaacagtgctctctgagcccaggttctcagcttactccttagaggagtgggctggctgggcaggcagggcaggggtggagcccttgatgacccctgcacattactcccaggcctccacctccacacggccttctccctagaagcatcaggagagtcctgctgcatc

SEQ ID NO: 529960 - DNA, 572 bp, Homo sapiens
gctgcaactggaaaaagagagtaggagttgctggggggaagtttgcttctaggacctcatcccttagggctttataaataygagcttttgccttcgagaggaaaagccttttggctggtcatctttcctcatctgcaggtgtcagtgctgatcaaaggctgggcatctgtgacaggggtctgtcctcaagggcccccagcccaggctgtgctgctgtgggggaggctgagtggggagctctcctgccttgagctcaatagtgaacttcaaaccggttttggaacgaggtggtggaaagcgaagggacagactgttcactgatttccctagcttcagaatggaacaggggagcgggtatgtgtggttaaggtacgagaggattgtgtgagggcatagggagtatctgatgttcacgaagtagaattggtatttgtttttgttttttttttagtttttgtttttttttttttttaagacagggtcgcttgctctgttgcccaggttggaatgcagtagtgtgatcacagctcactgcagcctcgaactcccaggttcaagcaatcctcctgcct

SEQ ID NO: 529961 - DNA, 572 bp, Homo sapiens
gctgcaactggaaaaagagagtaggagttgctggggggaagtttgcttctaggacctcatcccttagggctttataaatatgagcttttgccttcgagaggaaaagccttttggctggtcatctttcctcatctgcaggtgtcagtgctgatcaaaggctgggcatctgtgacaggggtctgtcctcaagggcccccagcccaggctgtgctgctgtgggggaggctgagtggggagctctcctgccttgagctcaatagtgaacttcaaaccggttttggaacgaggtggtggaaagcgaagggacagactgttcactgatttccctagcttcagaatggaacaggggagcgggtatgtgyggttaaggtacgagaggattgtgtgagggcatagggagtatctgatgttcacgaagtagaattggtatttgtttttgttttttttttagtttttgtttttttttttttttaagacagggtcgcttgctctgttgcccaggttggaatgcagtagtgtgatcacagctcactgcagcctcgaactcccaggttcaagcaatcctcctgcct

SEQ ID NO: 529962 - DNA, 572 bp, Homo sapiens
gctgcaactggaaaaagagagtaggagttgctggggggaagtttgcttctaggacctcatcccttagggctttataaatatgagcttttgccttcgagaggaaaagccttttggctggtcatctttcctcatctgcaggtgtcagtgctgatcaaaggctgggcatctgtgacaggggtctgtcctcaagggcccccagcccaggctgtgctgctgtgggggaggctgagtggggagctctcctgccttgagctcaatagtgaacttcaaaccggttttggaacgaggtggtggaaagcgaagggacagactgttcactgatttccctagcttcagaatggaacaggggagcgggtatgtgtggttaaggtacgagaggattgtgtgagggcatagggagtatctgatgttcacgaagtagaattggtatttgtttttgttttttttttagtttttktttttttttttttttaagacagggtcgcttgctctgttgcccaggttggaatgcagtagtgtgatcacagctcactgcagcctcgaactcccaggttcaagcaatcctcctgcct

SEQ ID NO: 529963 - DNA, 593 bp, Homo sapiens
agaaaaagctgaggcacacgcaggcacaaatatcaccctgggtactgcaccataaaccaggaaaaactcccaacacataacttctccctgaggagagaagggtatggaccacatgtatatgaccctagctccaaggttcccatggtttgacttttaattcacctagctctggtagtggaagggactaggcatacacaagtctccctagaccacagaacaaagtagcaaaaccctaaaaggagtttgttggtatactcctccaacttctgctaacagcagagcttctaactagcctgaattagggagttaaccgggctgacaaactacaatattcctctgttattgatggtttttctttccaaagtttcagttaactatggccaactgcagtctgaaaatattaaayggaaaattccagaaatagacagtttgtaagttttaaataactgttatcaccatatgttgttataattgttctattttataattagttattatgtttccttcattattgtgcctaatttataaatgaaacttcatcataggtatgtataggaaacaaagcacagtatatatagggtttggtgccatac

SEQ ID NO: 529964 - DNA, 618 bp, Homo sapiens
ctgcccgaagtagtattcaggtgtagagctctttcagcttccactttaggtcctctctccctggaggatcagggtagtgtgaggttagatctgagtaatgaattcaaactgacttggatttgaagcccgaatctcccaattggtagcatctgtgctagggaaagttcttcaaaaccttcatttgtgaaacagtactaaaacagtagtacctaactcagggtttcatggaggcaaaatgagctgatgcatacaaaactcggtgtacttggtaaatgccctgtaatgctggctgatattaattagctaatagagtycaatgatacagcacagaggctggggacagacagggacaagtgacagattcaatgctatcaatagaattgcacctcccctctcaccctgaggacttgatattgggtcaagttttcccttatgtatctccctcttctcttaggaatttcactgccaggaggcctctcaggccttataataatctcctaaagggagtcaccaattcttcagacatatctgagtcccagagctgatacatcttaggctcaacatgggaactgctccctcttgttccctattcatttgactctatctctttgtccacct

SEQ ID NO: 529965 - DNA, 624 bp, Homo sapiens
tgtttatggtgcctctgaataaggataaaatccctcactagctgtttttttgatcctttaaagttcactttgatcagtgtaaagtttgttaatggaaaatcagtgtgcttttaaaatgactctggttctggccaagaggctgctggacattcgattattgtcttacatctttctcctggtcctgcctgaggtttggtagagctggtggtgaattcattcaaccaatattagggagctcctgctctgtgccaggcaaggatctaggtgtagaggatacagcaatgagcagactgccactgccttcacggagcttcccttctagaggtagaggagagacgttctttttttcggttatctgtgatagatggtatgaagaaaatgaaatagaatgayatggtattaggtatctattgctgaataatacaccactctaaaactcagtggcttaaataataactgttcaatttgtccacaattctacaatcagggctgggctcagcagggctgttcttactagtcttgctgatggtcacccatgtggctgcattctgctggcaggtcaccaggtgttgtctggggtcatctgagatcagtggggcctcgctctctctctccatatagtgg

SEQ ID NO: 529966 - DNA, 489 bp, Homo sapiens
ctggagcacaggcctgttgaagagctgcatgaagagtgatgaaccaaaggtgatttgccttccaggcatgagattctgacataaccaggagagctggtatcagaagacaggatccaaccaggaaaacatacagcactgtgagttttgacagcagggcatatttaaagcaatatgacggaaaagtttcaagctgaaaggaatgaggcaacccagtgattagcaacagcaggaagtagttgtcacccctagctaggctggagagtcaaagggaagagatactgttaccagagcacaggggtggaggggctgaggtgtcacctggaaccatggggtaggtgtttctgttgggagctggagccaattaggagaagcatctgttgccatagacrctgcctcagacagggaaggaggaggaggacaaacaccttgctttctcctgccttccaatctcttgctaatgccttgcattggtccactccagccagaagt

SEQ ID NO: 529967 - DNA, 651 bp, Homo sapiens
gagaatataaatataatgaaaactatgacttcttattccraaattacacttatgaaaacacattttatgtgtcatttcaggatgtttacagatactgatgaccatccctagaattcatattgagaatttccgtgccacattaacttccagatgtccttgggaaaagtgtctactatgctgccttggtttcctcaatgagagtgagaacaaatggatctgaagaggtgatcttggccctaatttccaagttctgggaagataaacagggttttcttttgaatccttcggagcctgggagcttcaagagaaactcaactccaggcacttgaactgacagagaatttagattctcctccagggaaaggggcagagcatggatcctggctttgagccgcctcccagcttttctgttgtccttgaggctgctacgttaacactgtccttgctttgtgtggttttgctgttactacctgtcctgtggatttctgacaattacaagccgtgtaccccaccacacatgcaagcatttctcatttattctgagtactttaaggactgcccaatctgaatgcagagaactatgtctcattcatttttgtgtgtccaggccctcacagggtttggggatcctgatatagggttggattcggt

SEQ ID NO: 529968 - DNA, 592 bp, Homo sapiens
cctaaagacattaagattttatttctgaactgatcaccccttgacatttaaaatggggaaaccaatgctcaggagccttggccaaggtcatgcacctggttaataataaccacattgaagttaaaagtgcagaatttcctctcattccagtgactttcctcagctaaactatacctgctttcaaccttgtaagtgactcaggatcttataggatttgcagataaatcctaacacaatattcaaaatggccatagattgtacataagaaatccacaaatacatagatctttcccctttgcttgtgtctgctagttacctyattagcatcagtcatttaattttgtatattgatatagttatattctaaaaagacttacattacttttcaaaaatacacaaaatacgttgagatgacattagaagtagttgataaagtgaatgcatgggactacaatagtaaggaaataaaatcaagctaagaatgaggttgatataaaatacatatcatgaagcattatttgcttgccacacaaaagaggtatatttgcctctcaatatcccagcagtcaatgattcatttattccatcatat

SEQ ID NO: 529969 - DNA, 633 bp, Homo sapiens
ctggcattttccttagaaatagttggctttgcctcaaatataactttccctgaagcagcttgatgctcaccagagcagttgacctgcatcacaatatgttctctcttacatctcctcgatagatatgagatgagctgttactaagctctgtccaagtcattggagctatgcataaaaaataaataattgtgcatgactaaaatgaatgatctattatcagatgcatttgcataattaagcttgctcaaaaaaattggcagagcacaaactggcagagtggcgttgcataatatcgaccacaaagcctcagactgtgattctagcaaaacacaatgaggtcaggactctgtgtgtgcagattagataaatggatcagctcagtggcagaagaacaaactgcatgcttagaatttttaaaatgtaactcctttttgtatagaataatatgacttctgagcaagaatgagrgcttgcgagagtggtggcttacaccaacagcaagaaaccaggctggttgtcagaatatttggggcctgggtttagttgcgtcttgtatgtgttttctggcctctggccagacacataatcatctttgcttccatttcatttttaaaatggtgtaacagtagtttc

SEQ ID NO: 529970 - DNA, 529 bp, Homo sapiens
cagcagcaaccagcagcctgggctctagtccagtgtttcctgtaaaagagcctccaagagggagatacggtcgagaaaggggatgtggtctcttcatagacatgtaccctgataacctagaaaggcagacatcagagtaccacagtactgaagggaaaatcatcagcacaaagaaaacctaagatttctgtattttccttttaacttaagcttttctgcaacycccacaggaaaacgcaggcaacaggccaagatttatattaccactgatcctgtttgattttaagagaagaaattctactcagatgtaagtgtgatctatctgtgacatctgtcacctattagttacaagagctaatttagtttccttctcctgtgtcatgcttctactggagctgccttcttggtcaaagataaacttttcaaatatgaagacagctttcttttctatcaaggatgcataatattcatatgcttcaaatttatgttaccaacttaaatggtgccgccattttattcattattgtca

SEQ ID NO: 529971 - DNA, 335 bp, Homo sapiens
cacagatactctctgtaccatctttgtaacttttctgtaaatataagattattccaaaatgaagtttacttaaaaaaaaaaaaagcatagaggtttggcatacttgggatgtcttccaagtctcttgttgagaaccacttccactttcttccctaacaataaccaaaaactaactagcaattccccactcagcccctcctcagccctgcctgcccctcactcaggcatgttttcttctgctaamccaggttcacacgaggcactggtgctgccgttactcaataaagcaaccaggtacagtggttggttttgcttttgttttaatccaaatgatt

SEQ ID NO: 529972 - DNA, 530 bp, Homo sapiens
tagcggccgtggaggaggtcggctcagccgggcagtttgaggagctgctgcgcctcaaagccaagtaagcggggcggcgagcggtaggagtgaggagccggagcgggagcggccgcgagaccgggccggtgtggggcggcgggtggcccakcctggcttcttggtgcccggctcccttcggcctcgggggaccgggcccggcgccacccgtagactcccccgagcctccgcgtgagtggcccgagccgcaggttccccgccccggaacagcgagcagggcgcgaggctcgcctggaagccccggccccagccctggctccgaccccgacggctgtccaagcccgggggacgcgaccttcccggcctctggcctgggcggccccgccgcgggacggaggcggtggtgactcagccgtgccgcagtggcggggcgggggacggggcggcgccgagaccccggccctccgcgccacggagcgggacccacggctgcgggctccacctttcctgtgcccgcacgggggggagcg

SEQ ID NO: 529973 - DNA, 530 bp, Homo sapiens
tagcggccgtggaggaggtcggctcagccgggcagtttgaggagctgctgcgcctcaaagccaagtaagcggggcggcgagcggtaggagtgaggagccggagcgggagcggccgcgagaccgggccggtgtggggcggcgggtggcccagcctggcttcttggtgcccggctcccttcggcctcgggggaccgggcccggcgccacccgtagactcccccgagcctccgcgtgagtggcccgagccgcaggttccccgccccggaacagcgagcagggcgcgaggctcgcctggaagccccggccccagccctggctccgaccccgacggctgtccaagcccgggggacgcgaccttcccggcctctggcctgggcggccccgccgcgggacggaggcggtggtgactcagccgtgccgcaktggcggggcgggggacggggcggcgccgagaccccggccctccgcgccacggagcgggacccacggctgcgggctccacctttcctgtgcccgcacgggggggagcg

SEQ ID NO: 529974 - DNA, 592 bp, Homo sapiens
gcaaggccatggggtgcagagctgcagcacttaacaggcaaattgagcctccttctcccacactggcttcattccatttcttccgtctccttcctgctctgacaacaaagcttyaactcagaggccgtctcttgcccaccttgacttcataaaagtcgctttcacctctaataggctttgggcatgtggaatgtcatattatttgtaccactgtaattcagtattatgaaacgatggttgaagaaaagcctagttggttataaaaataaacaaagaaaataatcttgagaagacacaacaaaagtgaaatagcaaaaaagaatcctcaactctgggttttgaggattaaaatctaatcttcggcatcactaaggcactcatctacccgtgcatcctaaaagcacagggatgccactcacaagctgctgctgggggcaggagcaggtggcctggctggccagttagagccatgcccagatgctgaaggtcagcaaccctcgtgcatttatgccaaggagggcagaggtggaccctgcataccaggccccatagcaagaaaacgggttcctgtatggagtcaacagccacaatg

SEQ ID NO: 529975 - DNA, 599 bp, Homo sapiens
aatcttctaaaagagtcagggcatattttatagttgaatccataaagaaacacacacacacacacacacacacacacacacacactcaaagaattaaatagaatgttgtatttgcaataaaaataggactaagatggtggctgatttgattgtaaaaaaataaaagtgctaactgtgttacaagcaggggattttattgaaaaattagtgatttctgttaaacaaaagtaatgtttagaatacaaggaagattggtttacattttaaaataagacataattactcacagatgatatcagcaaaataatccttattcttgttagcaattacaataaragagactctaaatgtgtcacagaatgtctggggtgcattttacctgtgtagatgaaaaggttgtattagaatgctaggaaacataaattagctctcctaaaatattgtaatgttttgggtgggggtaagtaaaaacttttttctgagccttctaccttcaataaacaccatgcctacttatttgtcttcttactgatctccatttcaaattattttactttcttatttcattgaatgactgcgtgacaactatatgttactgt

SEQ ID NO: 529976 - DNA, 660 bp, Homo sapiens
ataagaggcaaggattaattcaatttaaaataaattttgagaaacatttgaaagtctaaggtttcaactggtggaaagaaaattgaaacatatacatattttttcttattgcaaaatacatagccttcctagaaaaatttaacactggatataagaaaaagctaacatcacatttctgacaaaaatattaagaatttacaagttttgtcccatgctctttaaataatgtcatagtatagagttattaatatttccctagatcaatatataaaacaatattgaatagctacataaaatgtcattgatagactacattctattttgtattttattttactttattttattttattattattttccctttacttgttctaaaaaaaattggatacatgtgcagaacttgcaggtttgttacatatgtatacatgtgccatggtggtttgctgcactctaagttccctctcctcacctcccatcccccaacaggccctgctgtgtgttgttcccctctctgtgtccatgtgttctcagtgttcaactcccacttgccagtgagaacatgcggtttttggttttctgttcctgtgttagtttgctcaggatgatggcttccagcttcatccatgtccctgcaaagmaaatgaactcagccttttt

SEQ ID NO: 529977 - DNA, 593 bp, Homo sapiens
cgcaaactacattcataaattttattttctgatactgaattcccccatgcattgcttggtattatgtatatattttctaatcttagcaaaaaacatgtgaaattaggtctgcacagaaccagaaacgtgaattatgtttcccaacttcttgacattcccttcttccttacgccccataaatcatcaagtcaaaaagattctcatcctaaagatgtctaaatttttaattcactcggtagttataatagtggattccagagtcagactttcttaatttgaatatctctttrccatttatccatgtgatcttcagggaatgatttaatctttttgtgcatcagtttgtctgcaactttcctttgcttaaaactgctatggttctttcctttgctgtttgaataaataacaagtcacttcttgtccacaagtctctgcacaatctgtctcttgcctatacttctggcttcatgatagaccattttccaaatgcagtgacaccagttttctttcacactgatgcactcgcaggttttatttcatgctctgtgatatgtgtctaaactgacttcctaagggagagggagacttggttg

SEQ ID NO: 529978 - DNA, 310 bp, Homo sapiens
gtcttcaccactgctcatcatatgcactttttttaatggccaataagtagggcttgcactaaacggtcagagatgaattttggttctatataaggaagagaactttcttacagtcaggactggacaaataggaaactttgtgtcccagtgtgtaatgagctccttgtcacagkagattttcaagaacataccaaaatgttctaccaattattggagatgatgaacagggtgatttgagtactagacggagggctggactcaagtatcttaaaggctttttcaactctgagaagccatgactccatgacta

SEQ ID NO: 529979 - DNA, 615 bp, Homo sapiens
agccctgtatgccattagctcgacgtggcccgctgaagacgatatagcctgaaacacagacatcagccagtcatgaccgtggcatttgagacctgggtcatttttaatccttcaaaaactaacctgtctgagcaaataaaatctagtttaaggttttagagtattcacctcttaaagaaatatgagcacttaagatggtttcagttcctaaggacagagcagaagagctctctgaagaattacaaagttggagatgactttttcttcttcttaggaaaaaaatcctattcattattcaaactcccatcttgtcactcctcactctctgtgagttaatcctcttcaatctatgctaaagttactcccagaatataaaatgctggactcattttcatcccttagtgacagtcctagctgtgtttcctttaacatccaagttccgcatatgaacayggctctcctactgtatttcttgttagataatccattcctgaaccaattaattcagaatgcaactctctagagatcaagctaactaaaagtcatacttccatgttatctcatgaggacatgcactaccttccttcaacaccttttcaaaaccaagctcttggc

SEQ ID NO: 529980 - DNA, 623 bp, Homo sapiens
tggtgaaatcccgtctctactgaaaatacaaaaattatccaggcttggtggcgcacacctgtaatcccagctactcaggaggctgaggcaggagaatcgcctgaacctgggaggcagaggttgaagtgatccgagattgtgccactgcactccagcctgggcgacagagtgagactccttctcaaaaaaaaaaaaaaaaaaaaaaaaaattaaatgtagatataaatatacatgcaaaaggatattccttgcagcaatgtttgtaacagtaaaaactasaagcatcctcagcgtctatcactggggtcagattaatgaattttagtaaaatactatgcagaatcaaaatcatgctgtttttgcattgtggtaggctatattcattaccccaatttttcacagctcctggtattcacattctttgttagtatatgcccacactgattctgcacttgaccttgtgatgggcttcagtcaatagggtaatggcaaattcaatgcaaatagaggtttgataaaactctcattgcctctgcatcagctcttggatccctgcctctgtaattataacatgcctgagctagcctgcttaagagacgtgagaggtaaatggtgaaaagcca

SEQ ID NO: 529981 - DNA, 547 bp, Homo sapiens
acagtttattaacgtgaatcatcttaggtcccacctcaggtcagatgaatactctgcatttcaacaagattccctgggtgatttatttgtacattacagtctaasaagcaaagtcctaagctatgtctatcatggaaagttatatacggctgcatagatgcacgaactgttagaaaaggacatcagaagtcattctggccagtgatttttctggccattgtggtggctcacgtctgtaatcccagtgctttgggaaggtaagctgggaggatggcttgaggccaggagttcaagaccagcctgggaaacatagcaagcccatctctacaaaaaataaaaagccttagctgggtgtggtggtgcatgcctgtagtcccagctactcaggaggctgaggtgggaggctcacttgagcccaggaggttgaggctacagtgagctctgatgttgccactgcacttcagcctgggagacaaagccagacattgtctctaaaagcatatttttaaaaaggtggatttcgtgagccagcttgaaggagagttgt

SEQ ID NO: 529982 - DNA, 543 bp, Homo sapiens
gtttattaacgtgaatcatcttaggtcccacctcaggtcagatgaatactctgcatttcaacaagattccctgggtgatttatttgtacattacagtctaacaagcaaagtcctaagctatgtctatcatggaaagttatatacggctgcatagatgcacgaactgttagaaaaggacatcagaagtcattctggccrgtgatttttctggccattgtggtggctcacgtctgtaatcccagtgctttgggaaggtaagctgggaggatggcttgaggccaggagttcaagaccagcctgggaaacatagcaagcccatctctacaaaaaataaaaagccttagctgggtgtggtggtgcatgcctgtagtcccagctactcaggaggctgaggtgggaggctcacttgagcccaggaggttgaggctacagtgagctctgatgttgccactgcacttcagcctgggagacaaagccagacattgtctctaaaagcatatttttaaaaaggtggatttcgtgagccagcttgaaggagagttg

SEQ ID NO: 529983 - DNA, 460 bp, Homo sapiens
gggtgacagagcgaggctctgtctcaaaaaaaaaaaaaaagtgaaaatagagttgaaaccaaatgaaggggggacactataaataagtaaacaaattgatattatgaaatattatgtgactaaagaaagaaatagcatgcaaagagagaacacracagtgagagtgggagctgtgggtagaccagaaggctttctgaggaagcaacatcatagccaggacaagaacttggttttcaatcatgtgacatgcagtaaacaaaaactgcaacctgagatcacagcatgcctatttgtgcagagtttaatacattccagggaactggtaaggaataatatacccagagattctccctgtaatactgacacagtagagattttgaattctgctttagtaagagagctaaattccttgcctatgctgactgcactttcctcccatttctatttttctccactctta

SEQ ID NO: 529984 - DNA, 525 bp, Homo sapiens
aaatgataatttatctcaataattttaagaaatgtatatttgaagatagttattagtcaacattcaactaagctaagctgcagaaacaaatgaactctgaaatcctagtgacttaaacaaaggcttatacttcattcttttttaagtccattgtggctcaggcagtccttctctatcttgcagccattcatgtagaaaatatgtcctccaaaattaccatagcagaggaggagaaatataaaggagacacactagggtgtaattgctttttacaaatcattgttcatatttcattgccagacctagacatatggctctttaactgctgggaaggttgtgaggctgggaaatgtaaagaaacagagtaatactgggtgagcaataattgactcttytacaaagatctatagaaaagctttgatgtgataatttttgatacacacacacatacacgccatatatggccatattaaaaatctaccttgaacatcacaaagctcaattcttcatgcttttagttggttt

SEQ ID NO: 529985 - DNA, 607 bp, Homo sapiens
atatggcttactttcatttggggctattatgaataatgctactatgaaaatttttgtgcatatttttatgtagacatatgttttcaattgtcttgggtatatatgtaggaggggaatctggatcacatagtaactctgtgtttaacatttacagtgactactaaactgttccaaaataactgcaccattttcaatcccaccacaatgtataagcattccagtttctctgtatccttgccaacacttgtttgccttttattgtttaaccatcctagtaggtgtgaagtagtatctcatagtggttcctggttatttttttaaaactcttattgatgtccaaaataaatgcagaatagtgcacaaacttaacttgtctaaccagcattcagatgggaacagagaatgatacgagcraaattcaattttgctctttcaatcaccaacttatccctttagaaaggtaacaactattctgatttctaagagcatctattaattgtgcttgttttgtcctttgtataaatgtaaccatatttcatataaactgaatggcttaaaatgcaaatgaaattgctttctaatcaacactggaaaaactacataacaa

SEQ ID NO: 529986 - DNA, 607 bp, Homo sapiens
atatggcttactttcatttggggctattatgaataatgctactatgaaaatttttgtgcatatttttatgtagacatatgttttcaattgtcttgggtatatatgtaggaggggaatctggatcacatagtaactctgtgtttaacatttacagtgactactaaactgttccaaaataactgcaccattttcaatcccaccacaatgtataagcattccagtttctctgtatccttgccaacacttgtttgccttttattgtttaaccatcctagtaggtgtgaagtagtatctcatagtggttcctggttatttttttaaaactcttattgatgtccaaaataaatgcagaatagtgcacaaacttaacttgtctaaccagcattcagatgggaacagagaatgatacgagcaaaattcaattttgctctttcaatcaccaacttatccctttagaaaggtaacaactattctgatttctaagagcatctattaattgtgcttgttttgtcctttgtataaatgtaaycatatttcatataaactgaatggcttaaaatgcaaatgaaattgctttctaatcaacactggaaaaactacataacaa

SEQ ID NO: 529987 - DNA, 526 bp, Homo sapiens
cagagcccttccccttcggcaggataaygtgctgtttagctaacttgctggctctgttgccctgcaaacctgagcaaagtggtaggtctactgtgttcctaggtgacactacttctggaagaaaaaaaaaaaaagaaatcctgattgacaaatcacatctggactaagaaaatgataaatacctggtaggaaggcttatctatccttgggctttcccaggttattgggcttgtctttggtagaccctttggaagctctgcttatggagctattacaagggttatgagctccatggaacatgaagcttctatgccaggacagctcctgcacctgcctcacgtgagtctctcctgaggatagctctggggcagcgccacggaccaccacctagactgcaatggaggctcctcccaccggctctaacacgatgccacgctgccagcaaactgcacttcctgtcctgtgtgcttccaagacaatctgataccaagcatggcccatggcatcttgtgagtctgaatgctca

SEQ ID NO: 529988 - DNA, 521 bp, Homo sapiens
aataataacttaaaagaaacagaaagatatcttcttgtgtgaaagaagtctgaagatgagtagcccagggctaggrtggagactctacacttatcagggatttcagcaccatctgtctttctgttccactgtccctagtatgtagcttcagaaagatgtcacctcatgattctttatggctgctggagttccagccatcacacctgtattccaggcagctaactaggagggaggagaagaagcaagaggacttttacaaaacattttctgtgttacaatgtgctaaatattgtgccggatgttgagagtacgagtgaacaaaatagatgctcctgtatttctttcatagtcagcacaaatgaacatcttccttgacacctttcagtctctcccatctcttgtctgatccctcagcgaatcctgccagctctgctgagacccatgtccagaatcccaccacttgtcaccacctctccctcgcttgctgttgttctgtcttcaggtctctgttcctgtcacct

SEQ ID NO: 529989 - DNA, 538 bp, Homo sapiens
gatggatagatgagtgggtgggtgagayggatggttggatagatgggtaggtgggcagatggatggatagatggatgaatggatgggtgggtgagatggatagatagatgggtgggtagatgagtaaaacggatggatagatggatggatgggtgggtgagtgagatggatggataaataaatggatggatggatgagatgaatggatgggtgagatgtatgtatggatggatgtatggatggatgggtagatgagtaagatggatgaatgggtgggtagggagatgagtaagatggatgggtggatgaatgggtggatgaatggaaggataaagatgaatcggggctgggtgagatagatagatgaataaatggatgaatgggtaggtgagatggatgggtggatgaatggatgggtaagatggatgaatggatggtaagtggatgggtggatgcatgggtgggctttggaggggatgtggaaaggcagggtctgatgtggggtcagatgcccccaacacccaccactgcagatact

SEQ ID NO: 529990 - DNA, 550 bp, Homo sapiens
tagggacgctgtgttagatctytgtttagtgccttgacatccaggcataaatcaaacatcaaacagctcaagtgatgcataaaaaataatttcaccatagcccaggtgctgaattatagcagttgagctataattatttgatacatatctgcgaagctgagaaaattctgcctcaattaggaataaagttaagcttccaaaattttctctgaacagttctatctttcagggagaagtttccctcctttgcccacgttcacttagttcggtttttttacatcctaaaactctagttggcaatgttcatgataataacattgagtttttgcaaaagctgcagatttgaagggaagaggtaggaagtgggaaatggaaaacatccatctttagaataacataaatgtcttataaccaattgtgaatgctaccaggggcctcttagcccaggaaaggggtggacagagagaaacctcagccagcatgaacaatgaccagcaatgatcagccgcctcctgtgtcagacactgggctgagagacatcttcggcttg

SEQ ID NO: 529991 - DNA, 675 bp, Homo sapiens
tgtttatatatttatatggttgtgtgcatgtgtataygtaatgtgtgcaaatgtgtgtgtgtgcaggcaagcacattagatcaggagatctcaattcaaacatgttcagccgccagcaaggttgtataaatgtgaaaatgggatgggatagagagaaagtgactctggtccttcaaatatagggcacatatggtatagagtgccgaggactgtggcaaacaggaagcctgtatccctgagtgcagcagatgcaacctcgttgctgctgcatgaggaatgcggatccagtgttaccaggaatcctcatttttcaagagaagccagaaagctggatttttatgtgaaatggcttgatttttaagaatctattgtcagcccattgaaggagattgttaaatgtctcctgggtcaaagaaaacacatgtgaggcttgaatttggcctgtggacatccagtgagcagtcgatcgccactgtggtcatttctttctgatgtagaagggactaccctaccaagctgggcttttcccagaagatcctgcactggcttggaggaatggatcctaatggggtggttttgcccacaggaggcatttggcaatgcctggagacagttttggtgatcaaaactgggtcgttgttgttggtggtggtggtggtggtggtggtggtgcgc

SEQ ID NO: 529992 - DNA, 519 bp, Homo sapiens
ctgggacggggacccaggtggggcatgcaccccaacccccttgctcactattctgttctcatagaagtcttgcttatttatttaattatttattttggccrggtgtggtggctcacgcctgcaatcccagcactttgggaggctgaaggaggcggatcacctgaggtcaggagtttgagaccagcctggccaacatggtgaaaccccatctctactaaaaatataaaaattatccaggtgtggtggtggacgtctataatcccagcttctcgggcatgagaatggcttgaacccgggaggcggaggttgcagtgagccgagatcgtaccactgtactccagcctgggtgacagagcgagactctgtctcaaaaaaaaagaaaaaagaaaaaaaagaaatcttgcttatttttaaccttttaggctctccatctgctctgaaatcttctgatcaaatctcaggaatcagcacacaattctgtgtttctgctgttacactggatctggctttgggaggggc

SEQ ID NO: 529993 - DNA, 519 bp, Homo sapiens
ctgggacggggacccaggtggggcatgcaccccaacccccttgctcactattctgttctcatagaagtcttgcttatttatttaattatttattttggccaggtgtggtggctcacgcctgcaatcccagcacwttgggaggctgaaggaggcggatcacctgaggtcaggagtttgagaccagcctggccaacatggtgaaaccccatctctactaaaaatataaaaattatccaggtgtggtggtggacgtctataatcccagcttctcgggcatgagaatggcttgaacccgggaggcggaggttgcagtgagccgagatcgtaccactgtactccagcctgggtgacagagcgagactctgtctcaaaaaaaaagaaaaaagaaaaaaaagaaatcttgcttatttttaaccttttaggctctccatctgctctgaaatcttctgatcaaatctcaggaatcagcacacaattctgtgtttctgctgttacactggatctggctttgggaggggc

SEQ ID NO: 529994 - DNA, 618 bp, Homo sapiens
catgaattccgtaagtggattgaatgcttggcgtctctacatatttcagcacttgctgctgagctggggacatcttgggctgtaagcctgatcttggaattctacagttttaagcaaagaatattaatcagaaaataccaaagttaattttccaaagttttattcccccaaatcacatgcaacaaccccgccttctgatgcctctaattgctctcccaacagatgtcagtttttaataaagagtgtaaccaccgcctttccaaaaatggcttattatggttttactacactcaaacatcacaggagggcaagagaaaaatcaacgatgaagtgagggagggaaggaaatatggcatggagcataaaatgtaaagccagccaatcaatatttaccctttcaagagggagagagagagaggagggagggagggagggagggagagagagagagagagggtgcgcatccgagtgagccagtgttagccaagaagcagggagcagggctcgaaagtcgcygagcgccgagtgcgaggagctgttgattgttttctggttgaaagaagaagtgatgataaggctgggataaagtgagcgccggcaggggcgcagagcccgcag

SEQ ID NO: 529995 - DNA, 480 bp, Homo sapiens
aaaaatcagtaggagttcatgtggtcaaggattctcagggggcacagaatctgacctgggatttgaaagaatttgagttggtggttccyagcattggaaatcagggcatggcaggaggaaaggcacagaggtagaatgctgtagggtgtgatatagtgatgtttaaggaagattaatctggggatggcattcgagaaagattgaagaagagaaagggtagagaaacccatcagaaggctgtgttaaaggcattgcaggcatgagaaataaaggcctgccacccatgcagagccagcacatataaatgatgggatgtatgagagagacctggaagtatcaacagaacttgatgactgatcagatatggtaggcagagcaaatctattcttttagtaactcaacgccaaaaaacatttttattgattcctcttatatccttctctcccacatctaatccgtcagcagcttttatttgcattt

SEQ ID NO: 529996 - DNA, 562 bp, Homo sapiens
aacaagcttagaaataacatcttacagacccagtctatctagtattgcaatatttctcaactgtcagtcattataccattttcatgatttttgaatatcatttttttattaaattgaattttttaaaagttagttttgctctaaacaatattcctaaagtcacagaagtgatagggtaattacattgttttctaagatgttgacacagtacataactattaatattttagaagtttgagtatcatcaaaamtcttctcacttatgacaatggtacacataccacactttgggttatataataataaagtgttgcataagagacttaaagaggtcttccatttcaatgtttttaacaatatcaactgcattcagagtatttattcattcaataagtatctgcagccgagcacagctgctcacgcctgtaatcccatcatattaggaggccaagatgggaggatcttgagcccaggagtttgagacaagcctgggcaacatggcaaaactctttgtctctacaaaaatacaaaaattagctaggcatggtggggtgcacctgtg

SEQ ID NO: 529997 - DNA, 546 bp, Homo sapiens
taacaagtctaatttcatctctccaacgtattctgggtcacatgcaaaaargcagaaacataccaaaatatcctctttccatgacagatcatttagagaaataaacttaaggtagacaaagcagaatcccagggctttatggaggggaacaaatgtttattcatccattgctctcacttagaatttctatttgtataccagtatgtgttactaattgaaggcaaatgtagttaagattccctaggccgagtgcggtggctcaccagcactttcggaggccaaggcgggcggatcacttgagcccaggagttcaggaccagcctgggtaacatggtgaatccccacaagaaatacaaaaatgagcccggcatggtggcgcgcgcctgtagtcccagctactttggaggctaaggcaagaggatcacttccacccgggaggtcttggctagagtgagcctaacggcactacagcacaccagctggggcaacagagtgagaccctgtctaccaaaaaaaagtaagaaagaaagattccctagcctccgt

SEQ ID NO: 529998 - DNA, 593 bp, Homo sapiens
tattaatgggtccagccaaggtccaccaacctgcagccaactccctattcaagagaataacaggttgggggtggtttctcaggcagcattcttgtaggcataggtgactgatccacgctgtgagatggaaatgaaatcgcagtgagctgaactgaaaagaggatggaacagaagaagttccggtgaatagaggtggagcagacattgtcaactgcccaaccacagctcttttcaactctcctccctaggtgggagaacacttttttttgagggggcatcagcacatgccttcaaggaagggaccccctcctgaaactgaggggataaaacaagtctcaggatggaagcccacacrctgaggatggtagaatgcaaacagaaagagaacacaggttttggaagatgtctttcagccattgtatcaacaattcttgaactactggggcagacactgctcagtgcctgcccaatgccctcgctccttttcttccttgttgacagaaccctgactttattgggatggcaatgagccagcaaaacgcactcactcccctagactgccttgcagccaggaatggccacgtgatccagca

SEQ ID NO: 529999 - DNA, 650 bp, Homo sapiens
cggtggctcacgcctgtaatcccagcaatttgggaggcagaagccagargatcacttgagcccaggagtttgagaccaccctgggcaacatagtgagaccccatctctacaaaaagtagaaaaattagctgggcatggtgatgtacgtctgtgtttccagctactcaggaggctgaggtgggacgatcgcctgaacctgggaaggtcaaggctgcagtgagctgtaattgtgccactccactccagcctgggcgacacagtgagactttgtctcaaaaaataaaattaaataaaaataaaaatttttaaaagtgggatatgatgaacatgcaatcaatgcacaggtcttacgggtttagtctgatgaattccaatgaatcaaacacccaaaacaacattcaaaacatttctaaaacgaagttccctatatccctttccaaactccccatccctggcccagccgagggagccactgatctgcttgctgtcaccaaagtttagttgtgtttcatctagagtttcaaaaaccaggagcgttctttttggtctcaacacaatgcctgcaagatgtattgcattgttgcaaatatcacgcacttgttcctttttgtgactgagtagcgttccactgcaggaggacatctgggttt

SEQ ID NO: 530000 - DNA, 651 bp, Homo sapiens
cggtggctcacgcctgtaatcccagcaatttgggaggcagaagccagaggatcacttgagcccaggagtttgagaccaccctgggcaacatagtgagaccccatctctacaaaaagtagaaaaattagctgggcatggtgatgtacgtctgtgtttccagctactcaggaggctgaggtgggacgatcgcctgaacctgggaaggtcaaggctgcagtgagctgtaattgtgccactccactccagcctgggcgacacagtgagactttgtctcaaaaaataaaattaaataaaaataaaaatttttaaaagtgggatatgatgaacatgcaatcaatgcacaggtcttacgggtttagtctgatgaattccaatgaatcaaacacccaaaacaacattcaaaacatttctaaaacgaagttccctatatcccttwccaaactccccatccctggcccagccgagggagccactgatctgcttgctgtcaccaaagtttagttgtgtttcatctagagtttcaaaaaccaggagcgttctttttggtctcaacacaatgcctgcaagatgtattgcattgttgcaaatatcacgcacttgttcctttttgtgactgagtagcgttccactgcaggaggacatctgggtttc

SEQ ID NO: 530001 - DNA, 651 bp, Homo sapiens
cggtggctcacgcctgtaatcccagcaatttgggaggcagaagccagaggatcacttgagcccaggagtttgagaccaccctgggcaacatagtgagaccccatctctacaaaaagtagaaaaattagctgggcatggtgatgtacgtctgtgtttccagctactcaggaggctgaggtgggacgatcgcctgaacctgggaaggtcaaggctgcagtgagctgtaattgtgccactccactccagcctgggcgacacagtgagactttgtctcaaaaaataaaattaaataaaaataaaaatttttaaaagtgggatatgatgaacatgcaatcaatgcacaggtcttacgggtttagtctgatgaattccaatgaatcaaacacccaaaacaacattcaaaacatttctaaaacgaagttccctatatccctttccaaactccccatccctggcccagccgagggagccactgatctgcttgctgtcaccaaagtttagttgtgtttcatctagrgtttcaaaaaccaggagcgttctttttggtctcaacacaatgcctgcaagatgtattgcattgttgcaaatatcacgcacttgttcctttttgtgactgagtagcgttccactgcaggaggacatctgggtttc

SEQ ID NO: 530002 - DNA, 616 bp, Homo sapiens
cctgtccccatctcagctgccttccctccactgggcctgggttcctctccaagatcagggctcagagagtaaaaataatacataagactgcactgggattcctcacctwgggtctgtaggtggctcttaggctccatgaccaccactcccataaagttgctaacattttgtgtctatatgcaattttctggagatttgactcaaagttttcactaagctttcaaacttcaaaaacttgatactgctgcatcagggaggaacacaggaattttcctgcctcctgacctcagttccgatcttatgacatagcatgcattcacctgtatatccatccaacttacctatccatccattcattctctcatccaccatccatgtactcctccatcctatttccccatccactcatccacccattcatctattcatccaccaatcaatctaaccatccatccatctttccatccatccatccacctatccatccatctattctcttatccaccctcctacccaccaatctattcatttatctacccatccattcgcctatccgtgcacccactcatccatccatctatccacctacccatccatctatccacctacccatcca

SEQ ID NO: 530003 - DNA, 481 bp, Homo sapiens
ccaatcttgatgacctatcgtttgcataaaatgcattgacataaaatgcatcactcttgacagagcctccctagagagtaaagcaaacaagcattggtaacagacactgaggctgaaaatgactttttaaaatgcatttaaacaggagcactttcttcagctaatctcartacttgcccttaggacaaaatgtaaattagaacagcggaagcaatattggtttgtaatagtcttttcagggtaactacagggtttgctgggactactcgatatttcagactgctttagataacagaaaaacacattgattaaaccctaacttaatttctttcagatttagcaggtattattcaatgaggttgctaaaagttatttttatccagtcacatgaaatatttattctgattgtcagaataaattgtcatcttatttcatctttaaaaatgtttttgttttctacttcctatttttgaaatgtatt

SEQ ID NO: 530004 - DNA, 607 bp, Homo sapiens
acagcttctctttctgactgtcttgtgctggcatccagatgagcttgagcatcacttattgttttaatttggtgaatgtgaaattgagaacctcacctcatagacagattgggtatttggtgtgaatgagcggatatgctaacacaagtccaatttctgtccaagctgatagtcgtaggggaatttttaccatctctctggtgtcaattttgaaattgatacaaaatcccaatgggtatcatgactattcattagtcattctatggtctccatgtatcttgtttggttactaatgaattcctgtgacayattttacttcccaagaaggatgctctaaaaattcctgccaactggtcattaaaatccactacaattatcatcaatggaatcaaattactatcaattacatagaggagttaatccacactgaataattttaaacaaaaacattttcaattcatattaacaagatacaaaccaaaggaaagaatgaccaaccaactgtatatctggtgtctattatcaaggttccaaatgcaacccatttccatttgtactattattagaaactacgatttgctaagtgactaccatgcgccagaaatga

SEQ ID NO: 530005 - DNA, 512 bp, Homo sapiens
attgcactaaagcaccagaaggtctaaccttctatagttctaagaaaaactgcaggagagagccaggatgtgggagctgtccttcccagtgggtctcagrgacacatttttgatggtggtggtgggaaacagaaccactacttatgtcaagagactttaagccaattaaaactaagctccttttaaaattttttcgagtactaaggagatttttaggtggtctagctctcttggaatacaaactacaaactattttctttggctgctctttacctcttataagtcaatgagaggattaatggtaaaaggctttatttctgatctttggaggacaagggaaagctaaacaggagaactagatcaatatagcattgtttcttctcaaaaggacttagaatcattgggcattaaatatgggagccctcagcatcacctgggccaagtttcatagtttatagtcagaagtactaagggtcactcaaaccactagttagagggagcatagggtttag

SEQ ID NO: 530006 - DNA, 588 bp, Homo sapiens
ctgctgcctgacgtttaagcctcctgtgaagcttcaaacaaagggagacagaaggaaactgtcacagtcctgaaattaaagtaacttatcctgagcaagctgccacaaacgcagggactggacttgtgacctattcagtccccactmcccataaaatacctggttctgagctgacattccagggggactaagggagagacaaccattcaggaaggaatgagtgaagaaagagggaaagagggacactctctaaatgaagaaaaccaacaaatgtcagccaacacagcaaatgcaatggaaaaaataatccaaaaagggtatatatattttcaggatcttcacagagatagtggaaggaataacattcatttaaaagatgaaatgaaaacatgcacaaatgaaattagaagaggtaaatgaaaaatatgataaatgaaaaatacagaaaccgaaaagcttaatgaattagatcacctctagtctgtacactctcaaaaaaagattagggaattgaaaaactatgctgggagtacactactgagaaggagaaaaaattatgaatgggcagttaagagacatggagaatat

SEQ ID NO: 530007 - DNA, 487 bp, Homo sapiens
tagctagcccacagagccctgcatcagaatcccctgggtgcctgttcaaatacagattccagggctcctctccagacctactaaatcacagttcccagtgctgggacccaggaatctggatcatatgagttcacagaagggacatactgagcacactggcctgtatcccctattgaaccagagatgcacatatgcacactctgtataccaaatcccaagtggctaagcttacccaaggttattgaagtggaagcaggatccaagcactaaggctgggggtctcagtggttatgggttatgggttatggatagagcagccagtgagggatacagaaaacaagaagtttataaacttagcatgaaccaggattatacatcacaagaatgaggacgtttctagtggaagcatcattggatagttgaatgttgggttttgccccacccccccyattctgaagtactaggtgattatactggaaccttaaca

SEQ ID NO: 530008 - DNA, 627 bp, Homo sapiens
agccttatagtggggccagcaatcatcctgataattaatgagatcagatgatggatttggatactatctgcaggcttttaacgctgacagaagagaggggaaaagctagatactggaagaagatgggaagaaagaaaagcataagagtaggaggagagagtgcatcacctgatatggytctgtgctgtagggagggactctcaaactctgagcaagtggttcagaaggtctgtgggggcctgagaatttgcatttctaacaagttctcagatgatgttgatgcagctggcttggggactacactttgagatccagtataagagtttatgggaagagactaggaaagatgtttaccactttctgatatcgactaattttttttcagtttgtcgaccaaattaaaagtgatttttagatcattattaaaggctttaaactacaagttgagagccttgaaaacaaacaggaaggatttgacatcattacacatgcacactgagagcctgagcaataagggtgaatgactgggctgctctactgtcaggctgtgcatagtattaagtgagattgtggatggccatagtgcaagtgacttctaacattgtcctaatagaatggtgtatgtgg

SEQ ID NO: 530009 - DNA, 313 bp, Homo sapiens
ttgatgcagctggcttggggactacactttgagatccagtataagagtttatgggaagagactaggaaagatgtytaccactttctgatatcgactaattttttttcagtttgtcgaccaaattaaaagtgatttttagatcattattaaaggctttaaactacaagttgagagccttgaaaacaaacaggaaggatttgacatcattacacatgcacactgagagcctgagcaataagggtgaatgactgggctgctctactgtcaggctgtgcatagtattaagtgagattgtggatggccatagtgcaag

SEQ ID NO: 530010 - DNA, 313 bp, Homo sapiens
ttgatgcagctggcttggggactacactttgagatccagtataagagtttatgggaagagactaggaaagatgtttaccactttctgatatcgactaattttttttcagtttgtcgaccaaattaaaagtgatttttagatcattattaaaggctttaaactacaagttgagagccttgaaaacaaacaggaaggatttgacatcattacacatgcacactgagagcctgagcaataagggtgaatgactgggctgctctrctgtcaggctgtgcatagtattaagtgagattgtggatggccatagtgcaag

SEQ ID NO: 530011 - DNA, 313 bp, Homo sapiens
ttgatgcagctggcttggggactacactttgagatccagtataagagtttatgggaagagactaggaaagatgtttaccactttctgatatcgactaattttttttcagtttgtcgaccaaattaaaagtgatttttagatcattattaaaggctttaaactacaagttgagagccttgaaaacaaacaggaaggatttgacatcattacacatgcacactgagagcctgagcaataagggtgaatgactgggctgctctactgtcaggctgtgcatagyattaagtgagattgtggatggccatagtgcaag

SEQ ID NO: 530012 - DNA, 643 bp, Homo sapiens
ctgcagccgcgcgcccgcccgccgccgagtgcgagcgcctgcgaagcaaacctgcccscgcggccgcctctgagcatgctcagtgccgccgtgggcgagcccgagcgccctggcccggggcaaagagcagcggctaggggctgggggctgggggccgggacccgcgacccgccccaggcctcggagcgcggaggtggcagaggaagggaaaggccaatgtaggggcgggggccctgagccaaagacccgggagaaaccgatctgggtgcaagagccggtgcgactttcacggcttgtgggaagtttgtgggctagaaaggtgggctgcttctgtgagcttctctgtgagactatattcgaaaggacaaccaggaaacatttttttttttctctaggaaaaaacgaatagacccagccgatgggtttttatcctgtgcgctccttcctttattcttacgatagcaaactcaaagatctaatggggcctgacaggcactgtaactgggggaaggcgaactggagagagctccgaaggcagggccgcttatctgctctcagggtcccttgctatcgggcaagaattagacctagtgttgctagattttctgatttttccagaaatgacggagtatattcatgtaca

SEQ ID NO: 530013 - DNA, 590 bp, Homo sapiens
ggctttgtggtgcccatagctcattcgattttgggaccttcttaatatacaaaatcatcaatattaacttagatattaaaggagggaaggatgtgccatcccacaacatgctgaattggtgtattgattattttgagttgaaaacattggagaaattgtagtttagaaaaggctagctgacctgtctcttcctgcatgcagcaagccataaacgttcctctgggaggggtactctctctgtaccagggtgagaagatggcccttatcatgagacactgggaattgagaactgtaatggatctggataaatatgcttaatgaagtaactcttatctttcactagttttacatgtcccccaatatatctcctactgactcccctagaaatgtactactcctagccagattttctttgtcttgacatttcttctcaaatttatcattctttgtctaaaaagcataaaagcatcttgctttggccactttttaattttctttcttgtgaagatccccacgtacatgtaaaatgaataagatttgtatgtttwctcttgttaatctgcctggtgtcaatttggtttctagatcca

SEQ ID NO: 530014 - DNA, 526 bp, Homo sapiens
ctgctgctgctgctcggccgtcttgaggaccaggcgccccttgctgagttggatgatgtactccttcaccaggtgcaggtgcaaggcctccatgagctcctgggagggcaagcagccaggggcgtgtgagctgtctgctgatggggagctcgccacctcccttgaagccttgtagccaggcctccagagagaggcagatgccagagcaaaagactgcacacgtgctcgtgcgtccacatgtgtgcgttcacatgctcatgcgttcacatgcgtgtgtgttcacatgtgcatgcgttcacgtgttcacatgtgtgtgtttacatgctcgtgccttcacgtgtgttcatatgtgtgcatgtgttcacatgctcgtgcattcacatgtgtgtgttcacatgctcgtgcgttcacatgttcgtgccttcacgtgtgttcacatgtgcacgtgttcacatgctcgtgcattcacgtgtgttcacatgtgcgygtgtgagcacatgtgcgtgagtgtacacagacgtgctag

SEQ ID NO: 530015 - DNA, 567 bp, Homo sapiens
gacttctgattctggtcaaaatgggacaaggaccaggtttaccctctgctctgaaacaactgaaaaaccygaggctgggcgtggctcacatctctaatcctagcactttgaggggccaagttggcacatcacttgaggccaggagttcaagaccagcctggccaacacggcaaaaccccatctctacattagcagagcacggtggtgtgctcctgtagtcccagctacacgggaggctgaggcacaagaattgcttgaacccggcaggtggaggttgcagtgaaccgagattgcaccactgcacttcattgggtaaaagaacaagactctgtcaagactctgtcaagagcctgggtgacagcacgagactctctctctaaaaaaaaaaaaacaaccctgagaaagagaaaaatctacaagacgagctttcgtgacactgagcgtcaggcaatgaaggaaaacgggaatcaagtggggtgagccctgagatgcccggctagccgcgtggagagtctccaggccatggggtaaggagacgggaccagcctcctcctgagcggagcacag

SEQ ID NO: 530016 - DNA, 372 bp, Homo sapiens
cacggtggtgtgctcctgtagtcccagctacacgggaggctgaggcacaagaattgcttgaacccrgcaggtggaggttgcagtgaaccgagattgcaccactgcacttcattgggtaaaagaacaagactctgtcaagactctgtcaagagcctgggtgacagcacgagactctctctctaaaaaaaaaaaaacaaccctgagaaagagaaaaatctacaagacgagctttcgtgacactgagcgtcaggcaatgaaggaaaacgggaatcaagtggggtgagccctgagatgcccggctagccgcgtggagagtctccaggccatggggtaaggagacgggaccagcctcctcctgagcggagcacagcc

SEQ ID NO: 530017 - DNA, 528 bp, Homo sapiens
gcaatataatttttcttccgcaaagaacagaaacacttttcaaatgaatagttcaaaagttaattccatatgccaattcattctttcacagatagggagctggcttccttacaagttgccaggactagaggcaattaccttgcttggttttttgttgttgttgttttttgagatggagtttcgctctgtcgcccaagctggagtgcagcggcacgaactccgctcactgcaagctccgcctcccgggttcacgccattttcctgactcagcctcccgagtagctgggactacaagcacccgccaccacgcccggctaattttttgtacttttagtagagacggggtttcaccgtgttaggcaggatggtctcgatctcctgatctcgtgatccgcccaccttggcctcccaaagtgctgggattacaggcgtgagccaccgtgcccggccaccctgtttgtttatttttttgacaatctgatgggrccaaaaaactaatgttttatgatttttaaacaactttattga

SEQ ID NO: 530018 - DNA, 524 bp, Homo sapiens
agttgcacccctacttcacacccctctctccatataaaagaatgaagttgtacccctacctctatggcaaatccatagagatagaaagtagattagtttcctagagttgaagagaggagggattgacgagtgagtgcttayaggaaaaagttttcttttggagatgatgcaatgttcaggaattaggtagtgatgatggttgtacagccttgcaaatatactaaaaaccaactgaactgtacatttttgaagaacaaattttatggtgtttgaattacatctcaatgtaacaaaataacttgaagcaggagagattgctcattaaagataaaaattctagaggtcatcttagactcaagcttctttgagaatatggctctagaaatctacaagtttaacaaatatactcaggtttatttcctaatgactaggaaatactgatttaacagttgtgtatacttgtacattgaaatgtgtttaggctaaaggacatgtgctttttgatcattttaatcatcagcagc

SEQ ID NO: 530019 - DNA, 477 bp, Homo sapiens
tgcctgggaggctgaggtgagaggatcgcttgagcccaggaggtcaaggctccagtgaactatgatcttgcccctgctctctagcctgggggacrttgggaccctgtttccaaaaaaacacaaaaattagagtaaaaacttcaagatgattttatgttatggaccatgagatctccctgcttggcctgtagtgctttggtggcccatgtggcagaggggtggctgcaccgctgtgcccacccaccttgctgcccaggccaaaatgtaacacactgaatactatgtccttgggtgctctcactccctccagggacaccagagactcattgcaattggccactgatgtggcttgctcccctcatcagctctgaccagtgatacccatgtgagtggttgagggcaaggacacacctgtcttcttgggtcccttgaacatggcatgagggtgtggcttgcccacaggaggctcaagggata

SEQ ID NO: 530020 - DNA, 604 bp, Homo sapiens
tgccagaacagtatctggcatacgataggctctcagtaaatgtttgttaaataaataaatacattaaaaatcctagtactcaacttggggtgattcatcaagagatttcaccaaagaaattaattcataaatctgaatttcaatatagtgtcctttttacttctatcctgaatttgattttgaggtagaagggaaaaaatctcattatcaattaatattggaaagctgctagagtttacacaagcctttttatgttagaacaaaactatgttgtaaygccattatttctgtttattagggaaaacagaacaatacacatttcctaataatattggtaggatcaaactgacctatcatctctggataccttgggatgagacaaaaccaaacgctttctggtaaaaatgaatagataattaagcaacattttcttcttctttctctttttatccccacaaaaattaaggcagttttcatgacacttctggggaaatgagaaaaaatataatgcattacactcagataaaacagagatactgttgtagttctctaggaaaagctgcatatccatgactctctcatcctaacatttgcctataggaat

SEQ ID NO: 530021 - DNA, 603 bp, Homo sapiens
ctgcacctaggaaaaaacaagaggtacctctcctcttgccaccatttcagtgaatgatctatagcagactttggaaacatggcaacaatattcagcttacttttaaaacagatggcatgctgagaagtaatcatagactcaacattcacattctttgctggcattataaaaggccaattgcaggaaaagcctaagatctctttctcttaaayactctagctagtgacaaatattcaagatggttcaaactaaaaaactaaaacccctgctcacactatccacaggataggaagtttgcgtcacagctaaatcttagagtacatcatagaagctcattgtctgactctgggcaggtcatgaaaactctgttaaatcttgatggcctatcaggcagtatcttgctcagttgagccgagtagaaaaatatgtcatttgctcttatacacttttaattcattttgtgcatagggttttggattatctcagagaataaatttaaaaaacatggagaataaatttaaaaaacattgctagtaaaaacaaaacaagaaaatagaggatgataaaagactattttcttgacagtttcacatcctgtgaaaa

SEQ ID NO: 530022 - DNA, 530 bp, Homo sapiens
caaaccaatcatgaaatatgtgcacaggattggaatatattgaagatgacacaaattaagtagtagacaaacacagtgactatggaacaatgacagtgtatttctaaggaaaaagtatcaaaaagtacatgctatcattcatttagccaacacatcgagtgctgaacttaattatataaataataacagcttatgtgtatatgtaaagaaaatacagaacagacataaggataataatattacctttaagtgttgaatattataatgaagatgatggaaatcatccatcatctcactattgttcactgtaataaacgtgtaagactttggaaatcagaaagtaayaagttataaggaagttataaggtgtcatgctttaccatatcttacttttttaaacatgccatgctctttcaatatgtcatgctatattgtcatgcttttccccataagttataatatgtcatgctttttattttgcaaaatcccttctcctaagagtttaataataatgataccaatgggatggc

SEQ ID NO: 530023 - DNA, 489 bp, Homo sapiens
tttcctgtcgggcaccctgcagagtgtccaggtctgacctaaatgttactccttattgctgggcctcctctaacgtcagtgtcagctacccacctcctttcatcacttgaatttctaaaccaactggcatcaccccttctaagctctgccagttattctgctattcagaactctccgttctcaaattacaatgtgtataaaatgtccagcacagtgcctgacacagagcaggcactcagtaagtgctagagcccctttccttgtatttyatagtctaatctttgatctgacatttttcctgtctctgtgtctttttacgatcaggtggatatacataggtacttctttatggttagcaaaccaaaaaatcacaatccattactttctatttgtatgtatctgtgaatgaagctttttttccttttacccctgcataagatacttcttaggttatctacaccttaataactcatttgcaactgtatagat

SEQ ID NO: 530024 - DNA, 512 bp, Homo sapiens
taaaatttataatattgggtaataaaatgaatttaaagcttagtcgacatttttgtttgttggatttttctgcctatgttactgatacccttctgttttgtgagaattattggctaatcatagacatgattattgttcatatgagaacatgcatataaacttgcaacatgtcctggtaacctgtgcatgcgtttatccttagagctgaaaggccatccaacattttttgtgacaaaagatgggcaaactttcagagacagagaaaggaaattagcttcaccttttctrttataagaatgatcagagttgaatggatatgaaacagttcattcttgtttcacggccactggaattagaatagtagctgactgttttgtgtatgagaaagattcagaaaaggaaaactatagtgttaactgtccaggcagtctatggtattttgttaattggatttgtcaaactttgtacaagctggactttatgagtgttccttggttgtggttggtataatt

SEQ ID NO: 530025 - DNA, 512 bp, Homo sapiens
taaaatttataatattgggtaataaaatgaatttaaagcttagtcgacatttttgtttgttggatttttctgcctatgttactgatacccttctgttttgtgagaattattggctaatcatagacatgattattgttcatatgagaacatgcatataaacttgcaacatgtcctggtaacctgtgcatgcgtttatccttagagctgaaaggccatccaacattttttgtgacaaaagatgggcaaactttcagagacagagaaaggaaattagcttcaccttttctattataagaatgatcagagttgaatggatatgaaacagttcattcttgtttcacggccactggaattagaatagtagctgactgttttgtgtatgagaargattcagaaaaggaaaactatagtgttaactgtccaggcagtctatggtattttgttaattggatttgtcaaactttgtacaagctggactttatgagtgttccttggttgtggttggtataatt

SEQ ID NO: 530026 - DNA, 590 bp, Homo sapiens
aactccaactctgccaattcctaattctgcaatttaactaaaatagatgagcctcagctttcttatctgtaaattgtatataatgattactacataataggatagttatgcagtccacatgaaataagttatttgaagctgctaccttcctttaaaaatgtaaagagaatattgaagtcagtgcaggaccattataaagtttatttgattactttcagcttgggtgaagctttaaattcttagttaaattccttcgctaaagcattcacttattgtctattatttttctagttatctagatgcattggggaattaaagtcrtcatttaaaaatcatcccatggatatcaaaagctcataaattgttagatgctaatgggaaagtcaagaatctgcttcaacttataattgtaggcgtacacagagctatctagggaaatgcaagggttgccttaaattcccagaataaaatactttgcagatttcaaaatatgtcactcactataaaattaattatttaccagccactcacatactaatcagggttgaaagtatgaaagaccacaggaaagaatggatggttacctttct

SEQ ID NO: 530027 - DNA, 419 bp, Homo sapiens
cacttatttaatgaaacagcataaagtccagaccctattttaaaaattaatcttcccctttgggaggccgaggtgggtggattaggaggtcaggagatcgaaaccatcctggctaacacsgtgaaaccccgtctctactaaaaatacaaaaaattagccaggtgaggtggcggtcgcctgtagtcccagctactcgggaggctgaggcaggagaatggtgtgaacccaggaggtggagcttgcagtgagccgagatcgcgccactgcactccagcctgggcgacagagcgagactccatctcaaaaaaaaaaaaaaaattaatcttccttattgttacaaattatttttaaacaaaaccgatgttaattaaagcaaatcaaataacccaagttagccatctttggacctttccctttct

SEQ ID NO: 530028 - DNA, 646 bp, Homo sapiens
cccaaagatgggggctgagtggctttgctgttttcagyactgagctacagaactgtcaggaattcaagaacaacagacctggtcccagttccttctataggtgctcttgatctaactggagcttcatggtgattacatagaaagtcatcagaggaccatcagtggccttccaagctgtggttacacacacaccaaggggtttgtagagatggtaagtgctcaaggagacagaggattcgccaggacagaacagttgaagaagccctcattgaagcctcaagctgtattttgaaggctgggaaagactcttaggagtagagagcatgggcggggtgcagagtgggtgcacgtggaattggagtggatacagacaccccatggtagggcatgtgtaggatagagagaccagcctgccaggccagatgtcagaggaggagtcatggggagacagaatttctttggttcctaaggctgacaacgggtctgagggtccctgtgccctccccaactctcaaggtcccatgggtggagatgacacctggtctccagcatcatttcactctccctcctgtgtagaaaccaaacttgaagctgtccatctccaggccctctgcagttagagactagaataggattcgcgttcagc

SEQ ID NO: 530029 - DNA, 544 bp, Homo sapiens
agggactagagtgctgctgccacaagccaaggaacggctggggccaccagaacctggaagaggcaggagggttctccttggagggagtgtggccctgctgacaccttcattttggactctggcctccaaaagtgtgagagaatrcatttctattgttttaagtcacccagttttgcagaatttgttatggcagccctaaggaatgaatacagataccaaagtggagtttgcccctaccactctctctggcccacccctcgtctaacccatttaatgctcatttaacgtgctgtttcctgaaacacaaagttattgggaaccagagcattcattttcccatccttcatggccacgacacatccagtgttatttatgcgtttctccctggatgacctaaatctggagagtagctgccctaccaagctcagtgcccaccaaactttcatttggtcgagcgccagttccatgtaactatataatacctaggactgcgtaaaccacagaacctaccaggaacactttctctgccataaaaggcaaacag

SEQ ID NO: 530030 - DNA, 544 bp, Homo sapiens
agggactagagtgctgctgccacaagccaaggaacggctggggccaccagaacctggaagaggcaggagggttctccttggagggagtgtggccctgctgacaccttcattttggactctggcctccaaaagtgtgagagaatacatttctattgttttaagtcacccagttttgcagaatttgttatggcagccctaaggaatgaatacagataccaaagtggagtttgcccctaccactctctctggcccacccctcgyctaacccatttaatgctcatttaacgtgctgtttcctgaaacacaaagttattgggaaccagagcattcattttcccatccttcatggccacgacacatccagtgttatttatgcgtttctccctggatgacctaaatctggagagtagctgccctaccaagctcagtgcccaccaaactttcatttggtcgagcgccagttccatgtaactatataatacctaggactgcgtaaaccacagaacctaccaggaacactttctctgccataaaaggcaaacag

SEQ ID NO: 530031 - DNA, 447 bp, Homo sapiens
gcagccccacagcctctcctcactactggctgccccttggtgcacgagcattccacagcctggggaatgtcatggcaccagtaaggcattgtgccaccacatccccagcccaggttatttgaggtaaagggagaaatgacaaaggaagtgccagcacctgcttccgcactccccttcccagcttctctggaggctccttccttcagggatgtcacattgttccttcctcccttcacgacctccctcaagcttgctgcctaagcagcctcctaatgtcacttctgtgatttctcacttcggggtatttttacccatgggtgtgaggaacaaggaagcaacatgtcgtggaaggagggtaattgcccatggctcctctrtcaaatgagagcacaggaggagcagaagagacttctccaggggcacgcagcttctccctctccttggaga

SEQ ID NO: 530032 - DNA, 506 bp, Homo sapiens
ctaggcctccaggaagcaatgtgttgagagggtgtttcttgacttgggctcatctaatagcaagatgcgatggaaactgacttgctatgtctggccagtctgtgtcaagaaacccaggcagaagaaaacaagggaactctttgtacttcatgtttatattaatgattgttgttgggcccagaaggggaatcttgtcccttccttgtcactcagaattcccaaatatagcccagttggtggcaaatttctaagaaaacgttttagccgtgaaatgaaagtgttattctttaggaaaaagaaattaccttgggttttgtaaggagcagaataactgcactgaattctagatgctcatttttatttgtgttggataggagtaatctttctagcctatacttttcaactcaatgtttatttagtcaacctcttggagaactgagcactgccctggcggaacattatagtgtgkatggaatgcacagaaagccatgagcccttgctttgca

SEQ ID NO: 530033 - DNA, 555 bp, Homo sapiens
aactcatcttctggctggatgcggtggctcacgcctgtaatctcagcactttgggaggccgaggggggcggatcacgagatcagtagattgagaccatcctggctaacatggtgaaactttgtctctaccaaaaatacaaacaaaaaaaaaatagctgggtgtggtggcgggcgcctgtagtcccagctactcaggaggctgaggcaggagaatagtgtgaacccaggaggcggagcttgcagtgagccgagatcacgccactgcactccaggctcaaagacagaatgagactctgcctcaaaaaaaaaaaaaacttatcttctacaatagtctttattttccattagatcccctacatatttcccagtcacttcccctataatttatgatcctttgaagcccaagcactgtttcctaaatctaatcatttctttgtttcacttcttagcttggtgcaaaagtaattgcaattttttgccattgaaagtaatggcaaaaaccaactgggcacaatggctcmtgcctgtaatcccagcactttgggaggccaaggt

SEQ ID NO: 530034 - DNA, 588 bp, Homo sapiens
cagcttatttgggaaatatccacagcagcaaagtcctagagcaaatatgtgtcgatttcttgtccttgaaattagagagaaggagacttgagacatagtgtgatgatccatcatggcactcaatgtgcacaagtcaaccagccataccaagggttcgaaaaacatctgaaaccccctagtgctatgggagaaatcactttccatgcatgggttttctattcaaattcactaagatgaaaaaaaatagtggctcctataagaaattttcgctaaagctggttacaaaagtctgagaccagtcccaagaagtcccccaatctgaaaaatttgacaaatataactgaccttgttggtgacagtgcaacctaagccactggatggctgataccagaatccatcctgatccagccatatcagttacctattgccacaatactgctacataaatacaaccacaaaatctcagtggcttatattaataaacatttattttgctcacaagttgaccgtacacctggttaatcccgatgctctgggacttaactgatcttggttggattcatkcatgaatcagcagttagctagaag

SEQ ID NO: 530035 - DNA, 380 bp, Homo sapiens
agttttgtttctatgttagggaagtttctattgatctatcttcaaktccactgattctttctttagctgtgtccagtctactgatgaacttatcaggggcattatttatttctgttagtgttttgatttgttagtatttccatttgattccatttttctgcttatctaatccatctattcttgcatgtggtcaactttttctatggagcccttaataaactagtcatacttagttacttaaattttctgcctaatactttaaaaatacttgttttatctgagtcaactggctgtttggcacaatgtagccactcaaatcttagtgaaaagagtaaatgaatgaataccaaaataaataaggagtacagaaagctcaatta

SEQ ID NO: 530036 - DNA, 518 bp, Homo sapiens
agcttctcctgcctgatgacccacaaaggtggctggttctcttcccaactatcccattgaggagggctttttgatcagmggcagatccttgggccctgagcccgcagaatttatgatcatgagtgagtattgtggttctcatagagaatgatgcattgttcaatgtagggaaaatgtttagcagagattcatgaggaagaaggagagggcattgttgttgagtgctagaaaacacatagaaagaagaacaatctatatttagagagaaaatgaaaagattggagatcaaaagcgacctcagaagggctatctttctcagaaaaagcccactctgtttactataggagcttacatggctgcagggaaacctcaaatccttcttagaaaggtaggatagagttacagtgaggtctggggatatgcgagacaatgctcagacctcagcattttggttcaaaataaacaaggtgactcataacaaattgctttgattaaaacattatatttggcaaatgaag

SEQ ID NO: 530037 - DNA, 549 bp, Homo sapiens
ctgacaggctctggtgtgtgttgttcctcatcctgtctccatgtgttctcattgttcagctccctcttatgagtaagaacatgttgtgtttggttttctgttcctgcattagttttctgaggatgatggctttgttacatcatccatgtccctgcaaatgacatgatttcattcctttttctggctgcatagtatttcatggtatatctgtaccacattttttaaatctgatttatcattgatgggcatttgggttggttccaagtctttgctattgtgaatagtgctgcaataaacatacatgtgtatgtgtctttatagtagaatggtttacaatcctttgggtatatacccagtaattggattgctgggtcaaatggtatttctggttctagatccttgaggaattgccacactgtctgtcacaatggttgaactaatttaaattcccaccaacagtgcaaaagcgttcctagttgatttcttttcttactttgtgcatrtattttaaaagtcagtgtgacaagaggtgtgtatgtgtagtgaggc

SEQ ID NO: 530038 - DNA, 554 bp, Homo sapiens
ggaatacttaagaacgctcaatactttctgatgtttttaataaaaataggttttaatacttaaaaattgcaagatgtaggtttcaytggatgctggtctaaattagaataaaccatagttgaatatttccttatcacttgagaaatgctattgaatgtcttttgattgttttcttagccacagctgagtgtagcaatttttttctgaacatatttgagagtttgcaaaactgcttacaatagacacttacacaattatatgtttgaatttagttagtaggactctgaagtagttatatatttaaatctgcagaatgaggctctggtatttgttcagttgtaagctttggcagtgtggcaaatctatacgtttatctctttacctattaagcttgcagttacctacgtgatatactctttttccttggaagatatctgttttcattgtattctgaaatttgtttcatcttcctttcatattttttcatttaattcaaggattaactttattatgtctcttctccctttccccaacctaccaatagccacaacatt

SEQ ID NO: 530039 - DNA, 574 bp, Homo sapiens
gcaggccagggcctcataaactctaggtactcagtaaggattgtaggatgaaaaatatgtttttcaaattttggattatttgattcatattaaaattttatagcttaacatagttcttaaaccaaaggaataactctttaatggtagaaacttatacattatggatagctagtaaggataattttttttagaagaatagcgttttatgtgtatctttcaggaacaatctatccataaattagcccttttatgattatttctgtttcattaggtacacacacacacacacacacacacacacacagacacacacacacacacatgggagaggacmaaaggagtgcagttattaaaataataaaggatttatccttttatattattgcagtctggaagggtttacatttagagcaagttttatttccctttctgtgagagagaaataaattgaaatccatgagggataaacaatcccccttatagatcttaaagagtggagttgtgaacactaaaatttccatgaacagcagcagacaatccccaacttattaaatgggatggaggccaacattca

SEQ ID NO: 530040 - DNA, 535 bp, Homo sapiens
agaagagttcctatgaagctgggatttacatacttcattctccgttcctggtcatttcatccacagcttgactgttgtcaatcatggttccttgcctttggagtggtactataaaggtacagagaatgcccatctcagtaccaaaatttcaccatgaaaaatcataacagaaatgacaaagcttaaagaaaagtaygccggatttcagaagtatttaccataataatttttaagaaagcttaccataaatacttccaaaaacaacaggctttacaaaatattatacaacatcctgtgtacagcagtaagtatctactcaggccatttgtcaagctgtttagtaattagtttctcatgtaccctcttgtctcaagaaggtcaataatcatctgatttcctctccagctaatgatctgttagcctacttttaacaatggaagaaggaactggtatatgttttaagtcaaccagttctccttaagtctcatagtttctgtttcaacatcatgttattgtgtacttacagaagcaatct

SEQ ID NO: 530041 - DNA, 549 bp, Homo sapiens
ttggcggtggctgtgacaggctgggtaggcctgtcccaggcctgcagatggtatattggaatgggtgctagctgtggtggtagtggcaaattgggtgggcccatccttaggcccccatgggaagtactcaggtggcaacagtggtggacagggcagagtgatctccaggcctccagagagtgtccttgggcactggggagggcagatccaggccagcaggacctgtcctcaagtatcctggtgatacatgcatatgctggctgaggtagacagggaggggtttttccgcagccccccagtgaattgcttggatagggatagcaacaactgcmctgtggcctttctgctggggagggagtggttgctttcaatgtgcagcacccataagcagggagctggggagtgtgcacttcagcccaggtagcagcttcgtgtggtggtgtctatccttagcacacataaaaatgtgcagtggcaccatttctgggggcagtggggatgctaccagtggcttgtgcttcaactctgttggcagcagccaacagcgtg

SEQ ID NO: 530042 - DNA, 555 bp, Homo sapiens
cgtgttgctattagaaactgccctgcagtgagtatatacaagactgcaaagtaaaccaaacccagcgaggcagccattgaattagtatgacttgacctgtatgtgtctactgcttatttggtcctggtatatgcattacagagggagcattggccctgcccatacctgaagcctacagttcgtcacaggaaacagcaggaaaatatgggacagaaatgtacatgattcatccttgaaagtgtttttggggggtagttttatgggaggatttgagaattggtttataaagaagaatggaaggagattgctccttcatttgtaggaaaacttgggcaaagatttggacagaaatgtatttatattcaytgagtcactgagtgaatgagaacctgggagtgcagacctgcccttgagatgcttttggtttactgggagacaggcacgcaaaaccagaaccaagttcagaatgctgtgggggccgtggttagagcaagaataattctgtgtggtggggcccagaagccttcacacatgatgtctgagcacctgccatga

SEQ ID NO: 530043 - DNA, 626 bp, Homo sapiens
agctggagaggacaaactctaggccacagtgctggaggcgagtggcccatggaggggcaggcttctcctctggcttctccccctcaatgctgaggctgagccccggaaaggaaaagatgcgggccagccctgcctcacctaccaccagggagtgtggcaattaaggcctggtgcccgatacttactctgccacctctgctcctgctagtacacaagacatgccatgcgtgcagccaatcatttgtctatctactgagctgtagtcattagataaatatttgctaaatgtatacaaatggacagatccatgctagtttaaggggactsacaatgaatcaaatacattctctgccctggggagcttacatcctggcgtggcagggagagaataaatacaggtgaagtatccttaatctgaaaatctgaaacccaaaatgctccaaaatctgacttttggagtgccaacaagatgctcaaaggaaatattcattggagtatttcgaattttcagatttgggatgctcacctgatacaatgcaaatattctgaaattaaaaagaaatctgaaatccacaacaattctggtcctaagcatttcagataaggagtactcaacctgtatctca

SEQ ID NO: 530044 - DNA, 483 bp, Homo sapiens
acagtgaaggcatggacatcactgactctcactttattatccggaatggcaagtggatggcactccatggcactcctgccgaatcttccttgtgcttttcatcctgcctttagcttattgagaagacaggcattgtcctgtagtgtgtgtgtgctttggctccctcctgtacttaaaaatcctttgtctctttctacaatctctccttcctttctgtctcttccagattaaacctccctactgccctcaaacccacatcttccaacttgcactgggctcttgtcccttgctgtactttttcttgcttatttcttcttttttccccaaagacttattaattgtatatgaacacagtcatgcctctccatttcaagttaccatcctctctctgccttcccctcaaacccmgtcaaaacagtagtttacatgtgctgcctcaacttcttcactagctgcttagtcgccaattctttatcttggctg

SEQ ID NO: 530045 - DNA, 625 bp, Homo sapiens
gccaggctgaaagaccagcctgggcaatacagcgagattctcatcttaaaaataaaacaaaataaaataaaagtaattaggtccccaggccagagcattaaagcattggaataattttataaagtttgtttacctgtattatatttcatttaatttggggtcatgaaacccaactgagctctgggtagtaaggtttctactagtaggggcaatcaccttgtggtgcagtaactcacattccttactgaagggctgtttttctagattcccaaattacccaagggtggttcccatggcttggggaggtggtgatgaggtagaccagatggcccttcccttcygtccagagtcagatcaacaatggacttggtcttaccagctgtgtgacctggggactatccataacccctagaagcctcccccttttctcatgagtggggaccctgtgaggattacaggaggtgatggagtcacagcccttctggggccatcacagtatataacccacagtcactgcattttcagcctcccttggcactgacggtgcagggaaagaaagctccctggaaaggcgattgaggagaacacggttcctgtggtagcctcgctagggtcatggccatca

SEQ ID NO: 530046 - DNA, 598 bp, Homo sapiens
tcccgccttactggactgaaccaatgtacatcttgcacatattgattgatgtctcatgtctccctaaaatgtgtaaaagtaaactgtactctcgaccaccttgggcacacgtcatcaggacttccctgaggaagtgtcatgggtgtgtccttaaccttggcaaaatcaactttctaaattgacsgagacctgtctcacatattttggcttaacagtaacaatacaggcatttactgtggcttaaagatagacaacagtatgcctctaaattgacagtcatgagccatgggacaagggtgttactgggaaacagatcgtgctctagcctatccagggtatggagccagtgccatcccctcacttcctgcagagacctcaaggactcctggccacccccatcagggctggtgcctgcactcatcactgaagtactcgtaagcatgccaggggatccagctctgctcagctttgtcaccctccctcgattaaacaggaagctaagggcactgggcactccactactcagctcatcacaggaaacaacagagagcatctcacaggaaacaacaaagtgcatacatatctgcttgtgttgcag

SEQ ID NO: 530047 - DNA, 598 bp, Homo sapiens
tcccgccttactggactgaaccaatgtacatcttgcacatattgattgatgtctcatgtctccctaaaatgtgtaaaagtaaactgtactctcgaccaccttgggcacacgtcatcaggacttccctgaggaagtgtcatgggtgtgtccttaaccttggcaaaatcaactttctaaattgaccgagacctgtctcacatattttggcttaacagtaacaatacaggcatttactgtggcttaaagatagacaacagtatgcctctaaattgacagtcatgagccatgggacaagggtgttactgggaaacagatcgtgctctagcctatccagggtatggagccagtgccatyccctcacttcctgcagagacctcaaggactcctggccacccccatcagggctggtgcctgcactcatcactgaagtactcgtaagcatgccaggggatccagctctgctcagctttgtcaccctccctcgattaaacaggaagctaagggcactgggcactccactactcagctcatcacaggaaacaacagagagcatctcacaggaaacaacaaagtgcatacatatctgcttgtgttgcag

SEQ ID NO: 530048 - DNA, 511 bp, Homo sapiens
tgtactctcgaccaccttgggcacacgtcatcaggacttccctgaggaagtgtcatgggtgtgtccttaaccttggcaaaatcaactttctaaattgaccgagacctgtctcacatattttggcttaacagtaacaatacaggcatttactgtggcttaaagatagacaacagtatgcctctaaattgacagtcatgagccatgggacaagggtgttactgggaaacagatcgtgctctagcctatccagggtatggagccagtgccatcccctcacttcctgcagagacctcaaggactcctggccacccccatcagggctggtgcctgcactcatcactgaagtactcgtaagcatgccaggggatccagctctgctcagctttgtcaccctccctcgattaaacaggaagctaagggcactgggcaytccactactcagctcatcacaggaaacaacagagagcatctcacaggaaacaacaaagtgcatacatatctgcttgtgttg

SEQ ID NO: 530049 - DNA, 512 bp, Homo sapiens
ttgcatgtctcagcttgatgacttataatttactgtcatctsaagtaatagtttgaaatagataaaggaaacacctaaatatgatctttatttggaagactgagttcctttgtttaactaaaaattcttaatgaatctctgttgctcaaagtctttttcagttttatctcccactctctggggtgcaaacatactcagatgttctaatccaataaggcctcaaattcattcagtgttctctattatctttgctatttccacaagccagccaagagtaatatttcgagtccatagctaaagataatttatttctttttatatataaatccaatacatttgtttgtaatagatgcacagatatactgcatacataagtttaaggattcatccttctttcatcttgtggcttcagcgtgcctcagggcctttgagtactctgtttaaagttggctgacttgaaaagacaggcaaggtagagatgcattggccttttaacagtctttgcctttaag

SEQ ID NO: 530050 - DNA, 512 bp, Homo sapiens
ttgcatgtctcagcttgatgacttataatttactgtcatctcaagtaatagtttgaaatagataaaggaaacacctaaatatgatctttatttggaagactgagttcctttgtttaactaaaaattcttaatgaatctctgttgytcaaagtctttttcagttttatctcccactctctggggtgcaaacatactcagatgttctaatccaataaggcctcaaattcattcagtgttctctattatctttgctatttccacaagccagccaagagtaatatttcgagtccatagctaaagataatttatttctttttatatataaatccaatacatttgtttgtaatagatgcacagatatactgcatacataagtttaaggattcatccttctttcatcttgtggcttcagcgtgcctcagggcctttgagtactctgtttaaagttggctgacttgaaaagacaggcaaggtagagatgcattggccttttaacagtctttgcctttaag

SEQ ID NO: 530051 - DNA, 582 bp, Homo sapiens
tgccttttttcctttcttttcagaaattgacaaaytgatattaaaatttgcatgcagatatgagaaaccaagaatagctaaaactgtttaaaaacaaaaaacgaatttggagtactcacttcctcatttcaaaacctcctataaatctacagtaatcaagactttgtggtgctatcataaggaaagtaacagtggaataatgagttgattcaaaatgagtaccaagacacttgaatgggggaaaagatattttccacaaataatcctggggcaactagatatcatcatacaaaataataaatttaaacccctgcctcatacatatacaaaaattaagtaaatatgtatcaaaaaaataaatagaagagctaacaccataaaactcatagaagaaaaaaatagaagtaaatctaagaccttgggttagataataattttatagatgtgacacaagtgacaaaagacaaaagtaaacaaattcaactacataaaaattaaaaactagcattcttcaaatgaaaccaacaagaacacaaaaagatgtcatgtaaggtctgaaacttagtcacaatagtatttgct

SEQ ID NO: 530052 - DNA, 582 bp, Homo sapiens
tgccttttttcctttcttttcagaaattgacaaactgatattaaaatttgcatgcagatatgagaaaccaagaatagctaaaactgtttaaaaacaaaaaacgaatttggagtactcactycctcatttcaaaacctcctataaatctacagtaatcaagactttgtggtgctatcataaggaaagtaacagtggaataatgagttgattcaaaatgagtaccaagacacttgaatgggggaaaagatattttccacaaataatcctggggcaactagatatcatcatacaaaataataaatttaaacccctgcctcatacatatacaaaaattaagtaaatatgtatcaaaaaaataaatagaagagctaacaccataaaactcatagaagaaaaaaatagaagtaaatctaagaccttgggttagataataattttatagatgtgacacaagtgacaaaagacaaaagtaaacaaattcaactacataaaaattaaaaactagcattcttcaaatgaaaccaacaagaacacaaaaagatgtcatgtaaggtctgaaacttagtcacaatagtatttgct

SEQ ID NO: 530053 - DNA, 582 bp, Homo sapiens
tgccttttttcctttcttttcagaaattgacaaactgatattaaaatttgcatgcagatatgagaaaccaagaatagctaaaactgtttaaaaacaaaaaacgaatttggagtactcacttcctcatttcaaaacctcctataaatctacagtaatcaagactttgtggtgctatcataaggaaagtaayagtggaataatgagttgattcaaaatgagtaccaagacacttgaatgggggaaaagatattttccacaaataatcctggggcaactagatatcatcatacaaaataataaatttaaacccctgcctcatacatatacaaaaattaagtaaatatgtatcaaaaaaataaatagaagagctaacaccataaaactcatagaagaaaaaaatagaagtaaatctaagaccttgggttagataataattttatagatgtgacacaagtgacaaaagacaaaagtaaacaaattcaactacataaaaattaaaaactagcattcttcaaatgaaaccaacaagaacacaaaaagatgtcatgtaaggtctgaaacttagtcacaatagtatttgct

SEQ ID NO: 530054 - DNA, 582 bp, Homo sapiens
tgccttttttcctttcttttcagaaattgacaaactgatattaaaatttgcatgcagatatgagaaaccaagaatagctaaaactgtttaaaaacaaaaaacgaatttggagtactcacttcctcatttcaaaacctcctataaatctacagtaatcaagactttgtggtgctatcataaggaaagtaacagtggaataatgagttgattcaaaatgagtaccaagacacttgaatggrggaaaagatattttccacaaataatcctggggcaactagatatcatcatacaaaataataaatttaaacccctgcctcatacatatacaaaaattaagtaaatatgtatcaaaaaaataaatagaagagctaacaccataaaactcatagaagaaaaaaatagaagtaaatctaagaccttgggttagataataattttatagatgtgacacaagtgacaaaagacaaaagtaaacaaattcaactacataaaaattaaaaactagcattcttcaaatgaaaccaacaagaacacaaaaagatgtcatgtaaggtctgaaacttagtcacaatagtatttgct

SEQ ID NO: 530055 - DNA, 684 bp, Homo sapiens
gcaggagggaacagggaggtggctgtgcttggaggccgggtgttttgccgacgataatggggcatctctggcaccatgttgctggtcggaacagttttggagttggattttgtcctgcagtgatgtctttgaagaggaaagcacttttgaatatttgcattgctttgaagccagtgccatggagatattgtgacttattgccagtcagaggcaaagctgagtgtgtgaggttttgaacaaaggttgttgaaaaaaggagataatcattaattttttcagtaaaattcattgaaccccaagggcaatttggaggggtcatagctgtttttagaatctgttgctaatcactgtatatcgtagatattaagcctaggttaagagcattagtgtgggtacagagtttagatttgccartttgtgactttaggcatgtttaacctttctaagtctgtttttccatctgaagaatggacatagagaaaatttatcactgggctttttgtgggggacagatgaggtaaggcataatgcatttaaagtggcaggcacagtctaaatactacctagtgctcctgcacaggcatagaaaatggaaaattgtttatatattttaccctcctccaaaacactcttagaccatctgatttttatttgacttatctgaatcctgaatagtttttactg

SEQ ID NO: 530056 - DNA, 588 bp, Homo sapiens
ctacattactttacaatgtacrtaatgtacttcgtaattaatgaagaacctagggcttcataatgcagttaaattggttcctttttcctcctgcctcattcatttgcttctactctttgatgagtgcagctaggtgctaggcttggttccttgggtagaaatggaaaaaggaggtcacagcaggagtccaaacctcatcctttcttcaaattaagttgttggagttttccattgtgtgggggagttgttttttgttttttgttttttgttttttgtttttcctgacaaagcctttagttcatgaacagttttatgtaagggaagtgcatctaataacataagcttggtctcagggacttccagcttcagagcagagtaatgtaaaatgaaaagcaaaacaccaggcaaattctgaggagcaaaggggctgtggcgttttacaatcagagaagtcatcattcttgctaaaagttatttgtgtataatgtgcttttgaaacaggtctcctgacttttatgaagaagtgaaaattaagctccccgctaagctcacagtaaatcaccacctcctgttcaccttctaccatat

SEQ ID NO: 530057 - DNA, 614 bp, Homo sapiens
agagaatgtttggaacctacttccgagttggtttctttggatccaaatttggggatttggatgaacaggartttgtctacaaagagcctgcaattaccaagcttcctgagatctcacatagactagaggtaagaaaagtgattctgtgcgcctgacctggtacactttacaaaaacaagttagagtgggtcatcaccaaaaataaacaaataaagagttatggattcatcattgatctctacataaagttttcccctttgcatttataaaaggcaaagtagaaaggtattaggtgagatcatgaggtgatgtaatattttgatagtttttccctaatactctgtgtatgcttttcacagtttggaattttatatggtgaatatttattttgaagtctgtgcaaaattcaatcaaggtcatgtgctttcttatcaccctttccaaatattagtagtttatactagtagatagagagtagtagagtttttcaacatgaagtttagcatcttgactttgaagtaatctagccaaatgactgaatcacccctagataatggtgaggccatcctttaggtatcactggatggcacctggggtccttctgatgtggagct

SEQ ID NO: 530058 - DNA, 614 bp, Homo sapiens
agagaatgtttggaacctacttccgagttggtttctttggatccaaatttggggatttggatgaacaggagtttgtctacaaagagcctgcaattaccaagcttcctgagatctcacatagactagaggtaagaaaagtgattctgtgygcctgacctggtacactttacaaaaacaagttagagtgggtcatcaccaaaaataaacaaataaagagttatggattcatcattgatctctacataaagttttcccctttgcatttataaaaggcaaagtagaaaggtattaggtgagatcatgaggtgatgtaatattttgatagtttttccctaatactctgtgtatgcttttcacagtttggaattttatatggtgaatatttattttgaagtctgtgcaaaattcaatcaaggtcatgtgctttcttatcaccctttccaaatattagtagtttatactagtagatagagagtagtagagtttttcaacatgaagtttagcatcttgactttgaagtaatctagccaaatgactgaatcacccctagataatggtgaggccatcctttaggtatcactggatggcacctggggtccttctgatgtggagct

SEQ ID NO: 530059 - DNA, 614 bp, Homo sapiens
agagaatgtttggaacctacttccgagttggtttctttggatccaaatttggggatttggatgaacaggagtttgtctacaaagagcctgcaattaccaagcttcctgagatctcacatagactagaggtaagaaaagtgattctgtgcgcctgacctggtacactttacaaaaacaagttagagtgggtcatcaccaaaaataaacaaataaagagttatggattcatcattgatctctacataaagttttcccctttgcatttataaaaggcaaagtagaaaggtattaggtgagatcatgaggtgatgtaatattttgatagtttttccctaatactctgtgtatgcttttcacagtttggaattttatatggtgaatatttattttsaagtctgtgcaaaattcaatcaaggtcatgtgctttcttatcaccctttccaaatattagtagtttatactagtagatagagagtagtagagtttttcaacatgaagtttagcatcttgactttgaagtaatctagccaaatgactgaatcacccctagataatggtgaggccatcctttaggtatcactggatggcacctggggtccttctgatgtggagct

SEQ ID NO: 530060 - DNA, 533 bp, Homo sapiens
tccagggtgcccacctggagcagggattagaggcctcccaaaacaccttccacctcccttccggaagcatccaccagcctgaagttctgcaatcccaggggcaggtagagtgcccgcccctggccagtccaggcacccactaccctcacccacaccaggagggtctgcccagcacaccctgttttgagtattctttgctttcacctttctccctttcctggctctgtaataaacagcagaaaacaaaaaaccagtggctggtggcatgcacagagcagtagctctcagcagcgtggcctgggctgcccctgcaccctgccacctggccctcacattgggcgcaatgagccaggataatcagaagcttccagcatggagcagggccstccacagcgaggctgtccccagcagcgtgctccaagcacccatttggtgtccttgtgcgtcacatcttgccagcctttcacaagccattcccttgaatgacgacaagcagtcttggtacgctgggttaaaagtctttcaaatggggc

SEQ ID NO: 530061 - DNA, 638 bp, Homo sapiens
catgctaggagggaaggagggaggtctcatttgtgtgtgttttctccgcacgtagaggtgcttctggcctgagtttactttcttgaaagtgaaatgaatacaaggctttgggtgcacagggagtgtttgttgtcactgatgttttcttgttgttgtcgttgatgttgtcaccaactttggccccagtggaaactgcacatgccagtcataggacctgtcaatgtcstcaaggaggagactcttaaatttagtgcctaaattccatctggtgagctggcaaacactggaacttcctgctgtgtccgagacacaaccagcacttgataaatatatgtataaatgaattaaaggacaaatgagcaaatagtgagcaatggaatgttctagaagttattttttaaaaatgaaccagatgatttagtgctagaagacctggcttagctctgtgggtgggagctcctaggtcttggctcatccccagccccacctctcccagccagagcagccacacctcttctcattctgtttgttcacacactgtcccaggcagggctcctcagccatgcacttgacatttggggccagatcattatttgaggtgggtgctgtcctgtacattataaggtgctttccagcat

SEQ ID NO: 530062 - DNA, 638 bp, Homo sapiens
catgctaggagggaaggagggaggtctcatttgtgtgtgttttctccgcacgtagaggtgcttctggcctgagtttactttcttgaaagtgaaatgaatacaaggctttgggtgcacagggagtgtttgttgtcactgatgttttcttgttgttgtcgttgatgttgtcaccaactttggccccagtggaaactgcacatgccagtcataggacctgtcaatgtcctcaaggaggagactcttaaatttagtgcctaaattccatctggtgagctggcaaacactggaacttcctgctgtgtccgagacacarccagcacttgataaatatatgtataaatgaattaaaggacaaatgagcaaatagtgagcaatggaatgttctagaagttattttttaaaaatgaaccagatgatttagtgctagaagacctggcttagctctgtgggtgggagctcctaggtcttggctcatccccagccccacctctcccagccagagcagccacacctcttctcattctgtttgttcacacactgtcccaggcagggctcctcagccatgcacttgacatttggggccagatcattatttgaggtgggtgctgtcctgtacattataaggtgctttccagcat

SEQ ID NO: 530063 - DNA, 638 bp, Homo sapiens
catgctaggagggaaggagggaggtctcatttgtgtgtgttttctccgcacgtagaggtgcttctggcctgagtttactttcttgaaagtgaaatgaatacaaggctttgggtgcacagggagtgtttgttgtcactgatgttttcttgttgttgtcgttgatgttgtcaccaactttggccccagtggaaactgcacatgccagtcataggacctgtcaatgtcctcaaggaggagactcttaaatttagtgcctaaattccatctggtgagctggcaaacactggaacttcctgctgtgtccgagacacaaccagcacttgataaatatatgtataaatgaattaaaggacaaatgagcaaatagtgagcaatggaatgttctagaagttattttttaaaaatgaaccagatgrtttagtgctagaagacctggcttagctctgtgggtgggagctcctaggtcttggctcatccccagccccacctctcccagccagagcagccacacctcttctcattctgtttgttcacacactgtcccaggcagggctcctcagccatgcacttgacatttggggccagatcattatttgaggtgggtgctgtcctgtacattataaggtgctttccagcat

SEQ ID NO: 530064 - DNA, 638 bp, Homo sapiens
catgctaggagggaaggagggaggtctcatttgtgtgtgttttctccgcacgtagaggtgcttctggcctgagtttactttcttgaaagtgaaatgaatacaaggctttgggtgcacagggagtgtttgttgtcactgatgttttcttgttgttgtcgttgatgttgtcaccaactttggccccagtggaaactgcacatgccagtcataggacctgtcaatgtcctcaaggaggagactcttaaatttagtgcctaaattccatctggtgagctggcaaacactggaacttcctgctgtgtccgagacacaaccagcacttgataaatatatgtataaatgaattaaaggacaaatgagcaaatagtgagcaatggaatgttctagaagttattttttaaaaatgaaccagatgatttagygctagaagacctggcttagctctgtgggtgggagctcctaggtcttggctcatccccagccccacctctcccagccagagcagccacacctcttctcattctgtttgttcacacactgtcccaggcagggctcctcagccatgcacttgacatttggggccagatcattatttgaggtgggtgctgtcctgtacattataaggtgctttccagcat

SEQ ID NO: 530065 - DNA, 575 bp, Homo sapiens
cagacaagtcacagtgagcataggactgggcagtttgaataattctgccaagctcggtctacagggatggtctctagttgcctggcacccggccctgaggtgatttagggcaggaagaatattggtttggggtgtgagagtcagatgaaggaggcggttggggggacacaggctctggagtggttgggttgtacatgaaaggcaggtttgcaggcacattgcttgctggctctaggaatcggccagccctgggaggagcagtctctccaggattctcaagaccccaggatgtcacagcatcataaaatacaggaaataaaaaccattattaatatggtttatttccttatagggtgtttttcctgaatgtgccatttgattccatcatggagcggctgactctgagaagaattgatccagtcactggggaaaggtttgtgctgtgttcctggtggttggcagtctggggactgccaggggccagacccaactgactgaccaatgccatggtggaaacactgcagggataacactggtgaccactgarggacgattatcaaaatggactttatcca

SEQ ID NO: 530066 - DNA, 527 bp, Homo sapiens
ctgagccaagcttcctgggcccacctcctttgcttctgccctggttgcaggcaggctgaacgccaggccagcccaggccctctctgaggggccttctccagaggtcctgcctcctgcatcttccctgtgcctggcggctcagtctccacactgcctccctgccctgctcagccactggataccacctcctgaaattccatcaggggcctcccctgcccagggctcagttcttcccaaagacccctggggggaagagggtgtgtaccctgaactttctctgacaatgtgcccctgaccaggaagcctccatccagcctcaggaggcccccgttacagtctgcacatccaggttgtaaatgccccatgctgggtgatgaagctctgccccttggaccagcccccaggctggargagacagcggacctcaaagctggccagcacaggcctggctctggtcacttccctctgtggctctccccttctgcctggcattcctggtccctggaagggatctcaaatgaaacgcc

SEQ ID NO: 530067 - DNA, 259 bp, Homo sapiens
actgtgctgtcctgcctgtcactgactcccccacgtttcgtgaacaaggtagccgcaccatccagccctagagagacagcactgactgatgaaagtggggagacagattctstcccactgcaggagaaatatgagttggttcagtcaccttgtagggcaccgtgacagcatctactaaaatgtgaaatgcacataacgtactccacccattcaacatgggacaatgacacttctcagctcctacccttgaactcatacg

SEQ ID NO: 530068 - DNA, 505 bp, Homo sapiens
tcccattgctgaattactttttttttttttgagacagagtctcactctgtcgcccaggctgcagtgcagtggcacaatctcggctcactgcaacctccgcctcccgggttcaagtgattctcctgcctcagcctcccgagtagctgtgactacaggcgtgtgccaccacgcccggctaattttttgtatttttagtagagatgaggttttactgtgttagccaggatgatctcgatttcctgacctcrtgatctgcccgcctcagcctcccaaagtgctgggattacagacgtgagccaccgcacctggcctaagtatcttaacatgggcagttttcacatcttcaagtttattcccaatgactgttcaactcttctttttttttaatttaaaaaagttttaaaaccaagtgcctccttttctgttgatcggtacaatttgatcacaataaatatgtcctttatagctcagggtaaattcaaacattcataagaatgcaaataat

SEQ ID NO: 530069 - DNA, 624 bp, Homo sapiens
ctgccgggggccacactccgaagtgcgaacagaatctgaagcaccctctcacgggaaatgccggcatctcactgacctgattctgagcaagcaagagggygctggattgtcccactctttgaagctcaaaatgggcttctgtaagcaccgaacgcacgtcacctaatttatctctcatcacaccctgtgagcaggtgccattgtcatcatcccccctttagagacaggcgaattccgcacccccataaaacgactcactcaaggtcattatcagccctacatctataactcacggactcgtgtctagagagttctgcctggctgattttctctgttcttctaactactccacaactaaatgtttcacaaagccatttcccccccaaatatttatgttctcaaatgtttattgcctctctatcatgatcaagattttatgagcactctatatcagttgtgaattaaatacataatttcggaatcatcgcattccagtttggtgctacatttgtctctattacaccgcagcagttgccgtgggcacccgacagatgacaacggaatgcgtgtgtccaggggcagccagagtgactgacatttcaatccagaagctgccacggggac

SEQ ID NO: 530070 - DNA, 624 bp, Homo sapiens
ctgccgggggccacactccgaagtgcgaacagaatctgaagcaccctctcacgggaaatgccggcatctcactgacctgattctgagcaagcaagagggcgctggattgtcccactctttgaagctcaaaatgggcttctgtaagcaccgaacgcacgtcacctaatttatctctcatcacaccctgtgagcaggtgccattgtcatcatcccccctttagagacaggcgaattccgcacccccataaaacgactcactcaaggtcattatcagccctacatctataactcacggactcgtgtctagagagttctgcctggctgattttctctgttcttctaactactccacaactaaatgtttcacaaagccatttcccccccaaatatttatgttctcaaatgtttattgcctctctatcatgatcaagattttatgagcactctatatcagttgtgaattaaatacataatttcggaatcatcgcattccagtttggtgctacatttgtctctattacacygcagcagttgccgtgggcacccgacagatgacaacggaatgcgtgtgtccaggggcagccagagtgactgacatttcaatccagaagctgccacggggac

SEQ ID NO: 530071 - DNA, 535 bp, Homo sapiens
ggggtaccaaagggacagaggccaacacacctgggggaggcaacrcgaaggaaatccacatagaataagagtaaattaatgtgtttattacttactgcttggcgtgtgtgtgtgtgtgtgtgtgtagaaaaatgaaagaaaaatgtagagttttttcaataataaaaagggagttgcactgcggggcccctaaagcttgtgaaaaattaaactcgacggattcaaactgtcctatttccacttcaaaagagaagaggcactgagctcttcccaacttatcttcaaacgcccagcaccctagaaagtttctttaaaaaaataaaggctcctgttcccccaagcactgtaccggttactgtacccactgtctctccctcttctaattatacccctgtgagtctattaatcaacttgtaaattatttagagagtcatgcgctgtcttcagcgagtacaaacacaccgcatgcaaaggcttgctggaaacgggcagagggtccctcagggtctcccctccacaggaagacagcttgcag

SEQ ID NO: 530072 - DNA, 471 bp, Homo sapiens
tctctttccaagcaattgctaaaactacaaaattataacgtgacttgaaacagagataaaatatagaatgtaagtataaagaaaaattaatggaaaaacgtaaacaaccctaatatgcaaagagcactgacaaaccaattaggacaaaaaattgcttaactggaaaatgggcaaagggaaaaacagttaataggccagggctatagagaggtggttcacaaagataaaacacacgtgaccaattatcttatgaaaataygttcaactttaccaacctcaccgacaatcataagaccacaattaaaaataaatacatcttttgtcacataacaaagtggcaaagattcaaatggctggccatggcaggcagaataatacctcccaaaaagatgtccacatcctaatcgctggcacctgtgaatatgttccctgatatggcaaaaagggctctgcaaaggggactaaattaag

SEQ ID NO: 530073 - DNA, 588 bp, Homo sapiens
ctggtacaccctggaagagcagcaaaaacgaggaggagtttcagcccaagcaaatagcaggtgagtgcgagggccagtgtgaggtctcaaggtgctggagcagcctgggccacataagccctgggagctgccaggcaagctcccttctaggaaaggatcctgccctgagaaggacttcatggaaatggaatcacaagtgagtggaacagagaccttagagccaatgcaagaagaggtccacatcagagtcagggaggaagcaatgctaggaaacctcagacagcaagtctgtctgaacaggacatgctgcaatggaagcgggagctggggatattagaaagcctattcgaatacatttcaaataatggaaaaataaacaaaactgaagacattacagacattagacttkgacaagtcaaaggtatatgtagccatttctggcctagccactaagaaaagacaaaaagagagtatttaatttcaacctaataaaggagaaaatagaatgataaaaaaataaccgaacaaaaaggcggcaggacgatcttggtttctaattctccaataaaaggaaatcactcgagcaag

SEQ ID NO: 530074 - DNA, 569 bp, Homo sapiens
cttataacgagattctgtggtttaactagcacattggcaaagatcaacacatttggtaacatcccatgttgacaaaaagaatgaggaaacagccactcctgcttattgtaagtggaagtgtgaactggcatgttcttaatgaatgacartttggcagtgtcttttcaaattattcacatactcttgacccagcaattgcactttcaggaaattatgcttcaaatacacttacagatgcacacaaagatgtacgtacatgaaatttatgtagagcattcctcccaaaaaagaccatatttgtgtattggaagtaattaaaatattcaataatagacatcattttaaaccattacaatacaacaaaataacaaaatattatggcactattgaaaatgctaaggtagctctatatgtaatattatgaaacaatctccaaaatatactgataagtttaaaagcaaggttcagaagagtttgtacagaatagagaaatgtgtgtataaaataaggaaggaaggaatccagtttggttttatggaactcagagttggatccttctgttttcagca

SEQ ID NO: 530075 - DNA, 583 bp, Homo sapiens
gaaatacaaatagacttataacgagattctgtggtttaactagcacattggcaaagatcaacacatttggtaacatcccatgttgacaaaaagaatgaggaaacagccactcctgcttattgtaagtggaagtgtgaactggcatgttcttaatgaatgacaatttggcagtgtcttttcaaattattcacatactcttgacccagcaattgcactttcaggaaattatgcttcaaatacacttacagatgcacacaaagatgtacgtacatgaaatttatgtagagcattcctcccaaaaaagaccatatttgtgtattggaagtaattaaaatattcaataatagacatcattttaaaccattacaatacaacaaaataacaaaatattatggcactattgaaaatgctaaggtagctctatatgtaatattatgaaacaatmtccaaaatatactgataagtttaaaagcaaggttcagaagagtttgtacagaatagagaaatgtgtgtataaaataaggaaggaaggaatccagtttggttttatggaactcagagttggatccttctgttttcagca

SEQ ID NO: 530076 - DNA, 400 bp, Homo sapiens
ttaactgtcccctgtataagaccacggagaacaaaaatttaattaattgtaagtgaaaatgctttgaacataataaacagttattcagaaaaaagtaagtttactaggcctgttagtggtaatattacaatgacatttataagggactagggtgaacattatatttgtgagctcagcaaattgttctaccctttcttgtgctaatgtaaccagtttgtcttcacctcaaaacatcacccacggatacaggcacatgacccacacctagccaaataatacctctttccctagctaggttaagggaggatctgatagatgacccaasagggctaggcagtgtccctccattggattgccatatgcatgatgagactgcatttactaaatcctggcatttgga

SEQ ID NO: 530077 - DNA, 516 bp, Homo sapiens
cttcacttattcttttcctagattcctgcagctgagcgtaagcaggggcatctgtatcacgcagctggagaaggaagtcatcccagmaaaacattccaggtaatttcttcccataactttcaaaagggtggcccacagagcacctgcattagaatcacctgggatatttattaaaaatgcacattcacagccggggtcatgactcatccctataatcccagcactttgggaggctaaggtaggaggatcatttgaggcaaggagtttgagaccagtttgtgcaacactgggagaccccatctctacgaaaaaaaatttttttttaattagccaggcatggtggcatgtgcctgtggctactaaggaggctgaggctggaggatcacttgaacctgggaggtcgaggctgcagtgagccattatcattccactgcacatgcctgggtgacagaatgagaacctgcctctttaagaaaaagaaaagaaatgcatattctggggctacagcctagtcac

SEQ ID NO: 530078 - DNA, 516 bp, Homo sapiens
cttcacttattcttttcctagattcctgcagctgagcgtaagcaggggcatctgtatcacgcagctggagaaggaagtcatcccagcaaaacattccaggtaatttcttcccataactttcaaaagggtggcccacagagcacctgcattagaatcacctgggatatttattaaaaatgcacattcacagccggggtcatgactcatccctataatcccagcactttgggaggctaaggtaggaggatcatttgaggcaaggagtttgagaccagtttgtgcaacactgggagaccccatctctacgaaaaaaaatttttttttaattagccaggcatggtggcatgtgcctgtggctactaaggaggctgaggctgraggatcacttgaacctgggaggtcgaggctgcagtgagccattatcattccactgcacatgcctgggtgacagaatgagaacctgcctctttaagaaaaagaaaagaaatgcatattctggggctacagcctagtcac

SEQ ID NO: 530079 - DNA, 576 bp, Homo sapiens
tgtggaatttacttaactttcctgagcttcagctacaaagcactcaatgcctagcacatacaagttactcagtaagtgtaatttctgctgtttataccattttaataaaatcttcatataaggcaatattttaacttcccatgataaagcttccaattaatatggaagttcatattccaatagttcttaatcagttactttcttgataccatgaaagtcattttcctttttttctaaaaccaaaaggtrtattatatttactttcaattatataaaatgagttttggctaaatgaataaagaggaaaaaagaagttaaaagttagtgattttaaacatcccaaagttagaactgtctaagattcatggcttaaacttccagagaagcacggtcaagagagctggaaaagacctatatctgtgctgtccaatatggtagccacatatcatgtatgttacctgaaaggtgaacagttaactgaggaactaaattttaaatgttatttaactttaactaacttaaatataagtttagccacatgtgactaatggtaccatattagccagtagctctaga

SEQ ID NO: 530080 - DNA, 485 bp, Homo sapiens
ggctgcacaactcgcccagcagcaggaagccctgattctgcctttctctctgactctgtggatgctccttctcacttgcctctcttcccggcagcacctcttcctctgattccttaaatgttggtgctccttctggtccttctgtggcccttggtacatccaaccggtgcaaaatgattcttcctcacccccttatccaaaatggggactcttagctgctacatttgtattgagttaccccgtctcccacgacacacacacacgcacacttatttgatggggtcaaggatagattcatagattagtgattcaaactggcccaatgtgagtctctcctccagaaacctagaaytggagtacagcattgttgtgatgtacgtagaagctttgtaaacccgaatgttctgactacatgtttgactctagatggtcttggtcttccagagttttacgccataagcatgcagatctgcttctcttaagct

SEQ ID NO: 530081 - DNA, 508 bp, Homo sapiens
gtgatgtgagactactgtgacatggagatttctatartatcatatttattatagcaggattttattggtttttagcaaagtggcagtgacattaaaggaatctaaccaagctgctttgcctgaacacttccaaagggaggtctgagattccagaacacgttatcattttgaaatgctagtcaatccaaagatgggattaagataagcaaattagcttactatccacattggaatgcaagtcttccaaacagtgaaatatctcagagcatactcttatctcatcatctcgttttttggaatgaattattctgcctacaaaaaagcctcgctgaaccaccagggtaactggcaacctgtggagaaaccacaagctaccccgaaactaattcacgagagtcccctcagcagatcctattttatgtaaataaattttttcattgttaggtgtaaaatctgcaagtcatttcaccaactttgactgcatttctcagccacgcaagtctgcagc

SEQ ID NO: 530082 - DNA, 651 bp, Homo sapiens
cttcacttccttccttttcctgagtttattcccttttacttctattggtagcacttaaagtgatccttcctgctttgaacaattcaccatgtaaataaaataacatcaaagaaccagacttaatacactccattccagcatgggctcccacaggttgatctgaaggagactgaagaattaatcacccaggatagaagcctcaagcttttcatatgcttaatgctcaagtcactttcacaaaaaatgctctccttcccttttgtttttatgtttagttttctaaacactgtcattctgtttccgcttcagctccagatccccaggatgtcttggcaccaaacacatgtaaaacagataaacaccttcttgcacactctaacaagtgcagcaattagtctctgagcacagcttgctctccaccatggcaactcatttggtgctgtttgttatcataggaaaacaactttgaatcascaacatttgtttgattccccagttttcacccctgttggcatggtggcttctgtatatccttttcatatcataagttctgcacctctaagaaatgagctgcacccagcatacagcacttgactcctgtatgtcaccttgtcacattctcttggaactttcagctctgggtaatcttca

SEQ ID NO: 530083 - DNA, 581 bp, Homo sapiens
gttacactgatgattaatatcaataatgccattactaagtattacactagtcaatggataaaatattactgctgcatgatagcggcaaaagtgataaaactgtcaagagataagatattcaaagcaaaaagtcactcacgactctgtacctatgtttagaggctttctcacctttcacagtggatactgtatttattatttttaatttctttcctaaatttcagtatggtattattaattttaagctaaactaacattatttttgtaaagtayattttaacaattgtattggaggctgcaataaatttgtcaggtcattctaattgttcattttgcctcggagatgtactctgaagtatgtggaagcaactggtatcacaaaataagagtcatatacataatgaaatacaaacataatgaagtatcatattgttccattacagaaaaaaggagaaacttttatcttttgtgactggtgtaaggaaaatggacatttttcataaacaaaccctagtggtttttattattattattattattatttttttttttaaaagcccaggcctccctcagcctcccaa

SEQ ID NO: 530084 - DNA, 581 bp, Homo sapiens
gttacactgatgattaatatcaataatgccattactaagtattacactagtcaatggataaaatattactgctgcatgatagcggcaaaagtgataaaactgtcaagagataagatattcaaagcaaaaagtcactcacgactctgtacctatgtttagaggctttctcacctttcacagtggatactgtatttattatttttaatttctttcctaaatttcagtatggtattattaattttaagctaaactaacattatttttgtaaagtacattttaacaattgtattggaggctgcaataaatttgtcaggtcattctaattgttcattttgcctsggagatgtactctgaagtatgtggaagcaactggtatcacaaaataagagtcatatacataatgaaatacaaacataatgaagtatcatattgttccattacagaaaaaaggagaaacttttatcttttgtgactggtgtaaggaaaatggacatttttcataaacaaaccctagtggtttttattattattattattattatttttttttttaaaagcccaggcctccctcagcctcccaa

SEQ ID NO: 530085 - DNA, 530 bp, Homo sapiens
tgtaaaatggggtcatcatactggcctcagaagaatgttgtggagactcaatgagaatgcaaagaagccgttagcacagtgcccagtgtctaaaatgcgttctgtaagcatcaggaggggaggrggaaaagtgggccggggacggcggagctgccacggttccaatagctctccagttcctggttccagaccttccgggaggcctgcagggaatgggtgttgctgcatatggcggaggtggaggtccatttcatgttttccacatgggtactcaatttcgtcccaaaattacttactgaagactctctctgtcccctactgctctgtggaccacctctgtcatggattatgtgcctgtgtgtttgagggtctgcttctgggttctaccttcccctctattagtctttgtgtctgtccttgtgctgaaaccacactgttttaatgactagagcgttgtgataaggatggcctgacccctcctacctgttgcccttgagaacctctcagctattcttagccagtgttctaaa

SEQ ID NO: 530086 - DNA, 620 bp, Homo sapiens
tgtcaacagcatcatcgccaccacggggtgctccatgtgcttggaggagagtacactctccggggcaggcaagcagggcagtcatgggcaggcagtaaggagaggaaaccggtttgggccacaccatgaaggtttaatgacccaaggttcctgtggcacagtgattaagagccagtcttagggagtctgaatgaaggacctggacttgaatcctgactttgccaccccctggcttagggacgttgggcccgtcatttctgcagtgtctggcactttggaagtgctctggaagtcattgttttcattactattctttttcctagaggccacgcttttggcctctaggaaagctcaggttcctctcttccctaacctacagctaagccacaccyctgaggagccaacgtaggtggttaaggccaaggttattactggagggtgaagtctgggagcggagctttcctagaaccagtccacctgtgtgtgccctctcctttgtttccgtgtggctgcaggctggaggaccagggattgtctgtcataaggaaggagttcctacccctgcacatgctaggcaggtaaaggcttgttcccgcttacctgagccagggattcaacac

SEQ ID NO: 530087 - DNA, 508 bp, Homo sapiens
ttggggtcacatattcccattctggggcctcacaaacccccgaatccagccgggaccccatgccaggagytggtctagggacagcatgcttgtgacccacagactgttaaagccagaagggacctcagagagtcccttatgctggaggcgccctgtcagccgtggctaggggccccttgctctatgctgtgccttgctgcccacaggctcccagacaccagtgcccactctgcccagccccggactgggtgtggctcgcagatgaacaagatgcagggcctgccttgaggggtgtctcctagaaggaaagccagactctccggcccagccagagagtccagacatggcagggacccgtttctcagatgaggagcctgaggctcagagaagggaggcgatgtgttcagggccacccagcagaagcctgtggggctgggcaaccttctcccactttatgggaggagctgcagccttggctgggagctgggcggggagtagccaggaccac

SEQ ID NO: 530088 - DNA, 508 bp, Homo sapiens
ttggggtcacatattcccattctggggcctcacaaacccccgaatccagccgggaccccatgccaggagctggtctagggacagcatgcttgtgacccacagactgttaaagccagaagggacctcagagagtcccttatgctggaggcgccctgtcagccgtggctaggggccccttgctctatgctgtgccttgctgcccacaggctcccagacaccagtgcccactctgcccagccccggactgggtgtggctcgcagatgaacragatgcagggcctgccttgaggggtgtctcctagaaggaaagccagactctccggcccagccagagagtccagacatggcagggacccgtttctcagatgaggagcctgaggctcagagaagggaggcgatgtgttcagggccacccagcagaagcctgtggggctgggcaaccttctcccactttatgggaggagctgcagccttggctgggagctgggcggggagtagccaggaccac

SEQ ID NO: 530089 - DNA, 508 bp, Homo sapiens
ttggggtcacatattcccattctggggcctcacaaacccccgaatccagccgggaccccatgccaggagctggtctagggacagcatgcttgtgacccacagactgttaaagccagaagggacctcagagagtcccttatgctggaggcgccctgtcagccgtggctaggggccccttgctctatgctgtgccttgctgcccacaggctcccagacaccagtgcccactctgcccagccccggactgggtgtggctcgcagatgaacaagatgcagggcctgccttgaggggtgtctcctagaaggaaagccagactctccggcccagccagagagtccagacatggcagggacccgtttctcagatgaggagcctgaggctcagagaagggaggcgatgtgttcagggccacccagcagaagcctgyggggctgggcaaccttctcccactttatgggaggagctgcagccttggctgggagctgggcggggagtagccaggaccac

SEQ ID NO: 530090 - DNA, 323 bp, Homo sapiens
acctggagacacgtgtccctgatgtggcgacgtgctggtggagatgtttgcataccccacacggcgtcattgcctatctttgcatgtctgcatctgggaggcctctgggcctcctgtccgcagacctgacgtcccagtgttctctccttctgccagccctctggttgctycccgacctcctctccccacacctgtggcagggaccacccgaaggccacctctcatccctggatgcccgcgggcaccagcgccccctaggggcaggccccgccctgcaccctcttctgggctctccattcacagccctccccgggcagttccag

SEQ ID NO: 530091 - DNA, 323 bp, Homo sapiens
acctggagacacgtgtccctgatgtggcgacgtgctggtggagatgtttgcataccccacacggcgtcattgcctatctttgcatgtctgcatctgggaggcctctgggcctcctgtccgcagacctgacgtcccagtgttctctccttctgccagccctctggttgctccccgacctcctctccccacacctgtggcrgggaccacccgaaggccacctctcatccctggatgcccgcgggcaccagcgccccctaggggcaggccccgccctgcaccctcttctgggctctccattcacagccctccccgggcagttccag

SEQ ID NO: 530092 - DNA, 600 bp, Homo sapiens
ctgggactacaggcacgcgccaacgcccagcttgttttttgtgttttttcgtaaagaaggatttttgccatgttgcccaggctgctcttgaactcctaggctcaagcgatcctgctgccttggcttctcaaagtgctggaattataggtgtgagcaacagcacccagccttcctcttcattttgtaatgctaccgcctattattatgcattgtcttgtttctttatacttttttttgctgaatattctattcatattctactaatattagtattaattttatcaacttttaaaaaattaataaaccattttctcttttcatttttaatcattccataacattttaagatgtgtttataaacaccacataattatrttttactttttagtccagagattgtccaattcaatattagaaaagtgagtttaacctgtatctactttgtataattattaatatatttacactggccaggtgcagcagttcactcctgtaatcccagaactttgggagaccaagatgggtagatcacatgcgaccagcctggccaacatgccaaaaccccatccctactaaaaatacaaaaatcagccgggcatg

SEQ ID NO: 530093 - DNA, 608 bp, Homo sapiens
caggatactggagtgggtgaactgtaagaacccttccaattctgaggttgaaagaatgtatgacattcaattattccatgttccagaagcccacaatttaaatttgggggttgagagaaatgtagctagaggtacactayagggtatagtttagggtaaagtatagcctgatgtctcaagcaatttttccctattccatgaattttagggatgtctctgtgtgttgtcatggaaacaaagcacaaggattccaaattttcctgctgtgtgatatagccattgagtggaggttctgagtacgaggtctttggtcctgctttgggtcctctgctgactcacaccaaacctgggatgtttattactctctaacttatcacctcctttcaaaactatcatggagatactgaaaacacttttcctaggatagtcatgatgattacatcatacaaaatgttcttagtatttggaatgaaaggtatggtaattaattccggttagcccagccaggaaagtcacctgaatttccgtggaatgacatttcctgatattgttatgtgctaggtgcaaaaatttggcccaggacaaagttccagtaggcagattcacag

SEQ ID NO: 530094 - DNA, 493 bp, Homo sapiens
agaacacatggacacaggaaggggaacatcacactctggggactgttgtggggtggggggaggggggagggatagtattaggagatatacctaatgctaaatgatgagttaatgggtgcagcacaccagcatggcacatgtatacatatgtaactaacctgcacattgtgcacatgtaccctaaaacttaaaatataataataataaaatataaaaaaagaaccaaaaaacattcatcatgaaaaaagattgacaattatttagtaaaatgagcaacttgttcataatgcagaaaaaaggaaagaacaatactagccacaaagagaatgcatttgcattacatataattaaaagagattttacattcagaattattaagatgattccaactaataacraccaaaactcccaaaaagataaataaaagaaatcaaactgcatttccaaattttagaatcattaaataccaattaaactgtgaacatgtattcta

SEQ ID NO: 530095 - DNA, 591 bp, Homo sapiens
gtaaaattttaagtggatgattccattctcattgattcttctcctagtaaaaatgaaaacttgctcaagtcattcacaatatattggcatcaataacaataccataaaatttacaacgcacctttgaaatgaagacattgaggtcaaactagttttcaatgtttcaatttaaagaacatttaatattaattatatcattagaactcttttaatgtcctgaaaccttggagcttattatgtcagggaaatctgacaggattttttccgaaatttgatgacaatcttaaaaatgtttagacataagtggtgaacttgaaatgacttcaaatatttccacataacaagaaacaaatttaaatcaaacatactaaaagaaagactgaattattttttctattttatgtacactgaaaatattataaaatggtgtcatatgaaggaaaagtcaaaaaagtattcaacaaaaacgtagaaattcaaggtaacaaagactttatcacacaatgactatacctaytatattttgtgtttctatgatatttcattgtggttttaatttgcatttccctaatagttattgatgttgagtat

SEQ ID NO: 530096 - DNA, 407 bp, Homo sapiens
agtaacaaaggtctgacttagttcattcgcattcccttagtatctatggggaattggtttcaggagcccatgcagataccaacatttaactcaattctgacattgtctactgagagatagtctcctatcctccaatttcaaatccaaaatgagtgaattttcaagcgacttatataaaatagcatggtgtttgcatgggacctatgcacaatcttctgtgcacttacatctctagattacttataatctagattataagtaatacaatgtaaatgctatagaaataattgatatcctgtgtttttatttatattgctttttattttcattttattatttttagaatatttttgatcsatggtagattgaatcctcagatgaggaatccatggatgtgcaactcatgg

SEQ ID NO: 530097 - DNA, 336 bp, Homo sapiens
gctgtatttaatttctcattcattcattagacagttattgatcatccactgattgccaggtactttagtagccttttctaagyaggtacagatatgccaatagtcaagctgaaggatagtcatgaagagaggtacacccttcaatctatccgtggcagaatttgggacactagcaacataaatatgggaatattcaatattaaaaaaaaatctggagttttccaaacctgatggagacttttttctcacaaagaaaatgttttgtaagtagaagaataatgaggatgtgatttcttgattgtcgtaggagaacatacttcaatgttactgaatcac

SEQ ID NO: 530098 - DNA, 616 bp, Homo sapiens
aataacaattctgtggaaacctttccacaaagaagagacctcctaggacacttgaaatatactcagatgtctgtcaatccacatgcagttttctgttacatggctgagagaagaatatttgaaaagaatactaagctggtatttcttcgtttaatgtttggaggcctgtactatactagcaaattcctagttatgtgttcaaatgatcctaagtctttgtacaatttgcaatagaaagacattttctacatcagcttctactgctatgtccrccactccaactttctctcctttaggttttcatttcatgtctggtgattggaaagactactgaagcaatatattcacaattttgtgttcttttttgaagaagacccctcaaaattgtaaaagcttctggcttcataaaacctaaatttacctatcatcacagaaaagaaatttatgagtctcttaaattaagcctccccctctcaattagagcaaaactcaacctctttatgatccatgcctactcttccaatgttatcaaatgtctctctcctccactaaatccaggattcagattttatgatctttgaattttattaaaaaggtcaagttcttcgctgcctca

SEQ ID NO: 530099 - DNA, 543 bp, Homo sapiens
taaaaacatacctggaatcagagtaatcggtgactcaggagtctttacctagttgggatgccctgattaggactctaagttctgccttctgtgccgatgaacccagagggagtgtctctgcatctaggatctgtcacagggttacaatagcatactcagccttctgttgtcsgtggtgcataaagctgctttcctcagtgaatatttttaagtccaggtttttaaagggaattttggtcatgtctggttgaatagaacacacttgctcagtaatttatatgcaatcatgtataggtttatttagcaggatttaaagcagaaacagctctcaaagtaacactaggattatccaggaggatgacctgatacctattcagtcttctagaggtaagtcagtagctccacttctgttccaacaaatagcatacacagtatggggtgtgtacagtgctaggttaacccaaagtgaactcttctgcctcctggagaagatcacaagtggtgccagtggctcagagataagaagtccaacccatcataaca

SEQ ID NO: 530100 - DNA, 543 bp, Homo sapiens
taaaaacatacctggaatcagagtaatcggtgactcaggagtctttacctagttgggatgccctgattaggactctaagttctgccttctgtgccgatgaacccagagggagtgtctctgcatctaggatctgtcacagggttacaatagcatactcagccttctgttgtccgtggtgcataaagctgctttcctcagtgaatatttttaagtccaggtttttaaagggaattttggtcatgtctggttgaatagaacacacttgctcagtaatttatatgcaatcatgtataggtttatttagcaggatttaaagcagaaacagctctcaaagtaacactaggattatccaggaggatgacctgatacctattcagtcttctagaggtaagtcagtagctccacttctgttccaacaaatagcatacacagtrtggggtgtgtacagtgctaggttaacccaaagtgaactcttctgcctcctggagaagatcacaagtggtgccagtggctcagagataagaagtccaacccatcataaca

SEQ ID NO: 530101 - DNA, 572 bp, Homo sapiens
ccaaccatgaggaaaccaaacaaaccaaaattgaggaacattctacaaaataactgaccagaactctttaaaaccatgaaagacaaagcaagacagaggaactgtcagagattagaggatactaagatgacagttcacctcgacatcatgtgtgatcctaaactgaaccctgaaccagaaatttgaattggacattagcaaggcaacaagtgaaatttcagtaagattgagagattatagtattacctcygtgttaatttcctgattttgatcattgtactgtgcttatacgagattttttaaaaatctcgcccccaaatattggaaagatgggattttaacatttggggaatttgggttaagggtacagaggaatttctggactactttgcaatctttctttaagtctgaaattatctcaaaataagaagttaaaacaataacattacaggggcttctgcttcactggcttcagggtataagccctttgatgtggcaggcaaggccctgcccacctcctcagcctcatcgcttgccactcccctacaagggacctgtgtgcagccatcctc

SEQ ID NO: 530102 - DNA, 572 bp, Homo sapiens
ccaaccatgaggaaaccaaacaaaccaaaattgaggaacattctacaaaataactgaccagaactctttaaaaccatgaaagacaaagcaagacagaggaactgtcagagattagaggatactaagatgacagttcacctcgacatcatgtgtgatcctaaactgaaccctgaaccagaaatttgaattggacattagcaaggcaacaagtgaaatttcagtaagattgagagattatagtattacctccgtgttaatttcctgattttgatcattgtactgtgmttatacgagattttttaaaaatctcgcccccaaatattggaaagatgggattttaacatttggggaatttgggttaagggtacagaggaatttctggactactttgcaatctttctttaagtctgaaattatctcaaaataagaagttaaaacaataacattacaggggcttctgcttcactggcttcagggtataagccctttgatgtggcaggcaaggccctgcccacctcctcagcctcatcgcttgccactcccctacaagggacctgtgtgcagccatcctc

SEQ ID NO: 530103 - DNA, 511 bp, Homo sapiens
taaaaaaatagaaaaggccaggcacagtcgctcgagaatataatcccagctactctaagaggctgaggtggagggatctttaggccaggagtttgagaccagcctggggaaacatcacgagactccatatctgaaaacaatttttttaaaaattagccaagcatgcctgttaccagctacttgggaagctgaggcaggaggattgtttgaagccaggagtttgagaccagcctgagcaaactcagtgagatcccatctctacaaaaattacmaaaattaaccagcatgttggtacacatctgtcgtcccagctacatgggaagctgagggaggaggatcacgtgacagttgagcccaagagttcaaggctgcagtgagctatgatcaggccactgcattctagcctgggcaatagagcaagaccttgtatctaaaaagaaagaaagaaaagaaaaaagataaaagaataggaaatatcatagtggacagcacataagtagaggtgaagcca

SEQ ID NO: 530104 - DNA, 511 bp, Homo sapiens
taaaaaaatagaaaaggccaggcacagtcgctcgagaatataatcccagctactctaagaggctgaggtggagggatctttaggccaggagtttgagaccagcctggggaaacatcacgagactccatatctgaaaacaatttttttaaaaattagccaagcatgcctgttaccagctacttgggaagctgaggcaggaggattgtttgaagccaggagtttgagaccagcctgagcaaactcagtgagatcccatctctacaaaaattaccaaaattaaccagcrtgttggtacacatctgtcgtcccagctacatgggaagctgagggaggaggatcacgtgacagttgagcccaagagttcaaggctgcagtgagctatgatcaggccactgcattctagcctgggcaatagagcaagaccttgtatctaaaaagaaagaaagaaaagaaaaaagataaaagaataggaaatatcatagtggacagcacataagtagaggtgaagcca

SEQ ID NO: 530105 - DNA, 511 bp, Homo sapiens
taaaaaaatagaaaaggccaggcacagtcgctcgagaatataatcccagctactctaagaggctgaggtggagggatctttaggccaggagtttgagaccagcctggggaaacatcacgagactccatatctgaaaacaatttttttaaaaattagccaagcatgcctgttaccagctacttgggaagctgaggcaggaggattgtttgaagccaggagtttgagaccagcctgagcaaactcagtgagatcccatctctacaaaaattaccaaaattaaccagcatgttkgtacacatctgtcgtcccagctacatgggaagctgagggaggaggatcacgtgacagttgagcccaagagttcaaggctgcagtgagctatgatcaggccactgcattctagcctgggcaatagagcaagaccttgtatctaaaaagaaagaaagaaaagaaaaaagataaaagaataggaaatatcatagtggacagcacataagtagaggtgaagcca

SEQ ID NO: 530106 - DNA, 569 bp, Homo sapiens
tggcaagattggtggaggctgaacatattaactagtcattaaatgaatcatggtctttctgtcctcaacatttacaggattgctttggctctggcatctgttgttagtcaatactgattaaggacccacctattcttggtgataggtgttcattaaacattctaaatataccctgtcctcaagagaatwccttactgggcctgggggttgttcctcctgcacccccacacaaaaagagacttccttctaataaaggcaagataaatatccaaataacacatgagaactgataatgacacatgcagccaatctgatgactgtgtagacttcattccatttagatctatagtttcacagaatcaagaattttatttttttcccctccttttcattgttgttatgagccatgtaaggggactcattgtcccagggacgggtatttgggagggggagatctttatggataccctttcttctcagtggcttattgctatttggcatactaaagtacaatttgctagccaggaggagtttctggctgtagatcaaacttctccgctcatgcctgg

SEQ ID NO: 530107 - DNA, 557 bp, Homo sapiens
tgtagatgctgggaagcaacattcggtaaggcatggctgataggaatttcccartagtcactgggaagagcagacgaggaagctctgggttcttttagtgcctaatgactgaaaatgaggccttgctctgtgccctggcaggaatactaggtattggaagaactgggcacgtgggatccaagtttctagcctctagcagaaaaccaagaaacagcagtcacctttcccaatccattttccaaatagagctcaatatcctattgctttggaggggttgggggtgactgtaaacccaggatttggtttcaggtatcaggtgttcaggggcaagagtagtggtacctccttcagagtggcattgcaagaatgaagaatgatatttgaagatagaatcaaagtggggcacgcatcttaagtagggagcctcattaacctttcctgaattgatctacattgtgcccttgaatctcattaaacagaattagaacccaatttaaggcagatgcgcatagggagtagcaacacaattgtagttcttgaatacactgtacttttat

SEQ ID NO: 530108 - DNA, 557 bp, Homo sapiens
tgtagatgctgggaagcaacattcggtaaggcatggctgataggaatttcccagyagtcactgggaagagcagacgaggaagctctgggttcttttagtgcctaatgactgaaaatgaggccttgctctgtgccctggcaggaatactaggtattggaagaactgggcacgtgggatccaagtttctagcctctagcagaaaaccaagaaacagcagtcacctttcccaatccattttccaaatagagctcaatatcctattgctttggaggggttgggggtgactgtaaacccaggatttggtttcaggtatcaggtgttcaggggcaagagtagtggtacctccttcagagtggcattgcaagaatgaagaatgatatttgaagatagaatcaaagtggggcacgcatcttaagtagggagcctcattaacctttcctgaattgatctacattgtgcccttgaatctcattaaacagaattagaacccaatttaaggcagatgcgcatagggagtagcaacacaattgtagttcttgaatacactgtacttttat

SEQ ID NO: 530109 - DNA, 557 bp, Homo sapiens
tgtagatgctgggaagcaacattcggtaaggcatggctgataggaatttcccagtagtcactgggaagagcagacgaggaagctctgggttcttttagtgcctaatgactgaaaatgaggccttgctctgtgccctggcaggaatactaggtattggaagaactgggcacgtgggwtccaagtttctagcctctagcagaaaaccaagaaacagcagtcacctttcccaatccattttccaaatagagctcaatatcctattgctttggaggggttgggggtgactgtaaacccaggatttggtttcaggtatcaggtgttcaggggcaagagtagtggtacctccttcagagtggcattgcaagaatgaagaatgatatttgaagatagaatcaaagtggggcacgcatcttaagtagggagcctcattaacctttcctgaattgatctacattgtgcccttgaatctcattaaacagaattagaacccaatttaaggcagatgcgcatagggagtagcaacacaattgtagttcttgaatacactgtacttttat

SEQ ID NO: 530110 - DNA, 639 bp, Homo sapiens
gtagatgctgggaagcaacattcggtaaggcatggctgataggaatttcccagtagtcactgggaagagcagacgaggaagctctgggttcttttagtgcctaatgactgaaaatgaggccttgctctgtgccctggcaggaatactaggtattggaagaactgggcacgtgggatccaagwttctagcctctagcagaaaaccaagaaacagcagtcacctttcccaatccattttccaaatagagctcaatatcctattgctttggaggggttgggggtgactgtaaacccaggatttggtttcaggtatcaggtgttcaggggcaagagtagtggtacctccttcagagtggcattgcaagaatgaagaatgatatttgaagatagaatcaaagtggggcacgcatcttaagtagggagcctcattaacctttcctgaattgatctacattgtgcccttgaatctcattaaacagaattagaacccaatttaaggcagatgcgcatagggagtagcaacacaattgtagttcttgaatacactgtacttttatcttttagagaacaagccccccttaaaaaaaaaaaggtaaaagtgaacttctgtttccttttcagcgtcaagccaagtacacgg

SEQ ID NO: 530111 - DNA, 639 bp, Homo sapiens
gtagatgctgggaagcaacattcggtaaggcatggctgataggaatttcccagtagtcactgggaagagcagacgaggaagctctgggttcttttagtgcctaatgactgaaaatgaggccttgctctgtgccctggcaggaatactaggtattggaagaactgggcacgtgggatccaagtttctagcctctagcagaaaaccaagaaacagcagtcacctttcccaatccattttccaaatagagctcaatatcctattgctttggaggggttgggggtgactgtaaaccyaggatttggtttcaggtatcaggtgttcaggggcaagagtagtggtacctccttcagagtggcattgcaagaatgaagaatgatatttgaagatagaatcaaagtggggcacgcatcttaagtagggagcctcattaacctttcctgaattgatctacattgtgcccttgaatctcattaaacagaattagaacccaatttaaggcagatgcgcatagggagtagcaacacaattgtagttcttgaatacactgtacttttatcttttagagaacaagccccccttaaaaaaaaaaaggtaaaagtgaacttctgtttccttttcagcgtcaagccaagtacacgg

SEQ ID NO: 530112 - DNA, 639 bp, Homo sapiens
gtagatgctgggaagcaacattcggtaaggcatggctgataggaatttcccagtagtcactgggaagagcagacgaggaagctctgggttcttttagtgcctaatgactgaaaatgaggccttgctctgtgccctggcaggaatactaggtattggaagaactgggcacgtgggatccaagtttctagcctctagcagaaaaccaagaaacagcagtcacctttcccaatccattttccaaatagagctcaatatcctattgctttggaggggttgggggtgactgtaaacccaggatttggtttcaggtatcaggtgttcaggggcaagagtagtggtacctccttcagagtggcattgcaagaatgaagaatgatatttgaagatagaatcaaagyggggcacgcatcttaagtagggagcctcattaacctttcctgaattgatctacattgtgcccttgaatctcattaaacagaattagaacccaatttaaggcagatgcgcatagggagtagcaacacaattgtagttcttgaatacactgtacttttatcttttagagaacaagccccccttaaaaaaaaaaaggtaaaagtgaacttctgtttccttttcagcgtcaagccaagtacacgg

SEQ ID NO: 530113 - DNA, 557 bp, Homo sapiens
tgtagatgctgggaagcaacattcggtaaggcatggctgataggaatttcccagtagtcactgggaagagcagacgaggaagctctgggttcttttagtgcctaatgactgaaaatgaggccttgctctgtgccctggcaggaatactaggtattggaagaactgggcacgtgggatccaagtttctagcctctagcagaaaaccaagaaacagcagtcacctttcccaatccattttccaaatagagctcaatatcctattgctttggaggggttgggggtgactgtaaacccaggatttggtttcaggtatcaggtgttcaggggcaagagtagtggtacctccttcagagtggcattgcaagaatgaagaatgatatttgaagatagaatcaaagtggggcacrcatcttaagtagggagcctcattaacctttcctgaattgatctacattgtgcccttgaatctcattaaacagaattagaacccaatttaaggcagatgcgcatagggagtagcaacacaattgtagttcttgaatacactgtacttttat

SEQ ID NO: 530114 - DNA, 592 bp, Homo sapiens
tatatttggcacccaggtgatccatttgaatgtctcctaataattccctgcccaatttttatggtaaatggacacatgcaatttccacagtctgagaagggcacggggaccatgggctcagaaacaatcctcagggataaaggtctgttactcgaccagccaggtcactgagaacggcagacatggtggctgagactgagggtactctagaatggatagtagatgaagaagaccatgagcatcagttgtggcttcaaagccagctgcagtcatgcaggccatacacygtcccactaccctgcctcatgttcacctccctaggaaaagggccaagccaaaccctggagaagttattcccaaatgaggggagcatcctgtgtgaagcaagcccatctgaggcctgcaaggcatgggctgtagtcgatgctgtggtcgttccacagcccagcccaatggcggaggtcatcattccactgcctgccaaaggtgttgcttgatgatggcacataactaagtctctctccaaatatcagtcaaggggtcaatgaagggtggagagtaccaacacctggactccagcctctacttgcaa

SEQ ID NO: 530115 - DNA, 592 bp, Homo sapiens
tatatttggcacccaggtgatccatttgaatgtctcctaataattccctgcccaatttttatggtaaatggacacatgcaatttccacagtctgagaagggcacggggaccatgggctcagaaacaatcctcagggataaaggtctgttactcgaccagccaggtcactgagaacggcagacatggtggctgagactgagggtactctagaatggatagtagatgaagaagaccatgagcatcagttgtggcttcaaagccagctgcagtcatgcaggccatacactgtcccactaccctgcctcatgttcacctccctaggaaaagggccaagccaaaccctggagaagttattcccaaatgaggggagcatcctgtgtgaagcaagcccatctgaggcctgcaaggcatgggctgtagtcratgctgtggtcgttccacagcccagcccaatggcggaggtcatcattccactgcctgccaaaggtgttgcttgatgatggcacataactaagtctctctccaaatatcagtcaaggggtcaatgaagggtggagagtaccaacacctggactccagcctctacttgcaa

SEQ ID NO: 530116 - DNA, 592 bp, Homo sapiens
tatatttggcacccaggtgatccatttgaatgtctcctaataattccctgcccaatttttatggtaaatggacacatgcaatttccacagtctgagaagggcacggggaccatgggctcagaaacaatcctcagggataaaggtctgttactcgaccagccaggtcactgagaacggcagacatggtggctgagactgagggtactctagaatggatagtagatgaagaagaccatgagcatcagttgtggcttcaaagccagctgcagtcatgcaggccatacactgtcccactaccctgcctcatgttcacctccctaggaaaagggccaagccaaaccctggagaagttattcccaaatgaggggagcatcctgtgtgaagcaagcccatctgaggcctgcaaggcatgggctgtagtcgatgctgtggtcgttccacagcccagccyaatggcggaggtcatcattccactgcctgccaaaggtgttgcttgatgatggcacataactaagtctctctccaaatatcagtcaaggggtcaatgaagggtggagagtaccaacacctggactccagcctctacttgcaa

SEQ ID NO: 530117 - DNA, 592 bp, Homo sapiens
tatatttggcacccaggtgatccatttgaatgtctcctaataattccctgcccaatttttatggtaaatggacacatgcaatttccacagtctgagaagggcacggggaccatgggctcagaaacaatcctcagggataaaggtctgttactcgaccagccaggtcactgagaacggcagacatggtggctgagactgagggtactctagaatggatagtagatgaagaagaccatgagcatcagttgtggcttcaaagccagctgcagtcatgcaggccatacactgtcccactaccctgcctcatgttcacctccctaggaaaagggccaagccaaaccctggagaagttattcccaaatgaggggagcatcctgtgtgaagcaagcccatctgaggcctgcaaggcatgggctgtagtcgatgctgtggtcgttccacagcccagcccaatggyggaggtcatcattccactgcctgccaaaggtgttgcttgatgatggcacataactaagtctctctccaaatatcagtcaaggggtcaatgaagggtggagagtaccaacacctggactccagcctctacttgcaa

SEQ ID NO: 530118 - DNA, 532 bp, Homo sapiens
tatgccacccatgaatagaattagacaaatatgaagattttggaaaagtcaataatatcaaatcaaaggaagtttgttggtaaattatacatgaaattgctagatgacagaaaactaaaattattgctttatttcatgtattttatatcatatttctaggatttctggaattactcatttataatgcagaggcagtttctgcagagacttctaatggtactaatgtctgtcaaatacatgagaaaattctgatcattgtgataagcctcacaaaatatatatttaaacaaaaagaaycaagcactcaggaaaaataaactttcattaaggcaatgcgattattgagaattgataggctaagctttaaccttttgccttgttactttgccaaaagcttggatattaatgaaaccaagcataaaaggtgaatggagaacagccagagaatttattagctcttcaattgaggcatcagtctgttcaaaggctaattagaccaatctgtgaatgtatcaatcccataattactcag

SEQ ID NO: 530119 - DNA, 448 bp, Homo sapiens
gtcacttactaattgctgactaagtaccttaagaagagttcagaaaaaaatacttattcaaggccttgattaatagggtgtatgatactgttctcacagtcttggtggggataatcagaccaagaaaatactgaagtctcaataatgttttaaatattcattgtattataaagatttaaatagccaagctctattgttactgaaacatcaggggtatcgtctaggtcctgctgcttgctgcacagaaagccaatcactaaaaggacaggttttgccaaggaagaargctttaatcaggtgctgcagccaaggaggtgggagctcagtctgaaatccatctccctcactgactaaaactaggggcttatatataaggaaagaaatgtaacaatgtgtaagaaaaccagaactagggagaggcaaggaggcatctggggccatgatttag

SEQ ID NO: 530120 - DNA, 448 bp, Homo sapiens
gtcacttactaattgctgactaagtaccttaagaagagttcagaaaaaaatacttattcaaggccttgattaatagggtgtatgatactgttctcacagtcttggtggggataatcagaccaagaaaatactgaagtctcaataatgttttaaatattcattgtattataaagatttaaatagccaagctctattgttactgaaacatcaggggtatcgtctaggtcctgctgcttgctgcacagaaagccaatcactaaaaggacaggttttgccaaggaagaaggctttaatcaggtgctgcagccaaggaggtgggagctcagtctgaaatccatctccctcactgactaaaactaggggcwtatatataaggaaagaaatgtaacaatgtgtaagaaaaccagaactagggagaggcaaggaggcatctggggccatgatttag

SEQ ID NO: 530121 - DNA, 592 bp, Homo sapiens
tgtgttttctctgtatatcttactatttaatttatctctttttctctagactggatataggtgattgcgtaagggatgaaggatgatatttgttctcatttaatgagttctcaattggtatgtccagagcctttgtcaaaatgatttttacataatgactgtgatttgaagacttagatggatttcaaaagcctaggaaatttcttgctctcctattatatcatatttattttttataagaatctaacaatgatcaattttattaacattacatttattcttattgctgttgttattgcaccattgcatgagaatatttaatatattttaaatctttttatattgcagatggtgtctttttaacacccacacaatacttatacacrcaaatgtcttaccctttaataataactattgacttactattcctgggtaaccagctttggcttcctcttaatttattaatccttatcatttaaagcactatataaatgtaaatatagcatttcttatctatttaaaatattatccatcatattacattccttccagctatatccaagggttgaaaaacatttgcttatatttagtg

SEQ ID NO: 530122 - DNA, 564 bp, Homo sapiens
atggtggtaaactccattttcttcagtgtacatttttcatgttcattttgatctgattgagattggtaacttgtttggtaggagacagaatttagttacattgcaatcttgttttattatgcataagtttcctatctctttcaataattttgatacttctttattttttcccataacatttccaatttcatataggccttcaattcttttggtctaaagttattcaaaatgtatttttaatgattttggcttcctttatatatgcaattagatacccttttaaaacatttctgaagctacttattagtacattctatctatctcttctctttgagcttacttgccaaagttggtctattttatttttatttttaagcacaaattttggactttaattttttaaaattataccttttcattgtttggtttttacttttatcaatttgttacttaatattttcatttttatttggaagcttattgcactgwttttcaaattttcatatattaaacaggttataaattgcaaagttgtctgtaaatttcccattgcctactacttca

SEQ ID NO: 530123 - DNA, 612 bp, Homo sapiens
aatgtatttttacagcattggagccagaatatctgggtttaaattatagctatgccttttatgaattgtgttgtctagggcaaataactcagctccctaagcctctacttcctcctctgtaaaacggtgactgtaataattacctcctagagttgttagaaagattaagtgaattggccaggcatggtggctcacacttgtaatccctgcactttgggaggccraggcagttggatcacaaggtcaggagatcaaggccatcctggtgaaaccccgtctctactaaaaatacaaaagaattatctgggtgttgtggctcgcgcctgtaatcccagctactcaggaggctgaggcaggagaatcacttgaacctgggaggcggcgattgcagtgagccgagatcacgccactgcacgccatcctggcaacagagcaagactctgtcacaaaaaaaaaaaaaagaaagaaagattaagtgaattgaagtatgttaaatgcccaagataatagatgttcagaacatggtatttctaattccctccactatcatgctgcagtaccatgtggtgattatgggcagggactgtggggctcttagctccattgcctcac

SEQ ID NO: 530124 - DNA, 487 bp, Homo sapiens
ctgccaatgagagcggcagggcactgcgcacccctcccacagccttgtcagggatggctccagagtgagctgccctcagcttggggaggtttcagctgaagccctctttctgactccaaccaggtctggagacagagatctcactctcctctaaactaygcaagaatgggtgttgtcggtaaccacccagactggtctgggtaggttggcccagcccccacccctgggggcactcaagaaacctatttaacccctctaaacaaagggtaggtcctcatcgctgccctcctttacccagaccctcctttgccctctgtgcttccagtggctggactagaaagagttaagctttgtaaagagggagcctaacctggggccccccatcctgggtactggcagcagcagccttgaaaagatccggccttattctctagggaaggggtagttaaggaccctgggcagggggctggaagctaattaagggaat

SEQ ID NO: 530125 - DNA, 653 bp, Homo sapiens
gtctgagcaggaggtagcagcttctagccaggcacaccccaaccccacattctattgtccctcagtttccttctcaggaaaatggggactttgctccttttagcatctcaggaagcagtctggacacctgtgccctcctctaggcccttggatgagcccagggaatagggaaaggccaaagcagccccagcattcgcagaccctgcgccctgggcctctgacttcgggccaggcttctgctccttctagggtkggcctggctgccctgccttcccatcctctctccatggttctctcccagagactccaccttgaggtgggggccctgagctcttggggtgagggaggggcacatgggtagatgattctgtggaggagatcaggcctcttgttcttgctgcgtggcactgattcctccttgcagatgggtgagggggccagttttccccatctgtaaagcgaggacttcccatggccattttccctcttgggcttcaggctgctgaatggaagatcaagaagtgtgaagggtgcttggggtccttgtgacttgagtgttgcctaggaccctggcccacaggacccaaggggcttcttgtctcaggttgaaacctttttatcagaatgtcatttccttctctgctcccagggaa

SEQ ID NO: 530126 - DNA, 532 bp, Homo sapiens
gttattgtggccagtccgcctgggttcgcttctctaaatttccatgggataggaactatagatcatgaagaagaaacaggaaccttgactcttcacggaggagcccaggaggtcagaaccatccaccaggagggtgagcggtagctgcccagggcatccctggaggaagtcgtcatactgaggaagaaattgccaaagccaagagctcccagacctgggcagctcaggagctgacagaaaccaccccccargtctggagttcaagggttttcctcgtgggctgctggtctgtctctttcccttctggggcagccgtctctcctccttcagctcattcccgtgttccatctgaggggcgggaggaaggcaggagggggagatggcaggacccagacagatcctcaggactctcccagcctctgttgccatggcaacactgctatttttatcccgttgttcatgatgctcaaagctctaactttctctgttccagagaggccaggctggtttctgccctcatcctttaacacag

SEQ ID NO: 530127 - DNA, 601 bp, Homo sapiens
ccttaaaaatattttccaagatttattaggccatggaattatgaatggctccttaagtaattaaaaaatttatacagttcttttggaaagccatttggcaatatgtgccataagctctaaaatcccttcaatgcagtcatcccactctggaggatatatcttcaataaataacttgaatacagaaaaactggggactcaataatctaattgtttaatataaggggagtggaacaatgtgtattaccataaatagtttatgtttctgctctattattaagtggaagaatcaggatataaaatgtaatactcagtatgacctcaatatgttatgaaaataaacagaagaaaatataactaaatattaatgacagtaaaatttggggcaattcttttcatttatgatctttcttatgttctctgtaatgagactgtattacttttataatcatcaaaaaatgaacyacattgaaaaatttattggaataataaaatgttggtcacattggtattggctaaaaggttggagccctgtaatgactttaatgaatggtcctggtgtactttctgtactctggcctgcgtgatagcattagcatgtat

SEQ ID NO: 530128 - DNA, 404 bp, Homo sapiens
tgatgatgacattgataactactattattgartgtatatcagaaaccaggcaaattgatgatttctttacatgtgttatgatgaatctttgcaatgttctcagacatatttcatttaaaaatgagaaaacaggatcagagatgttaagtagttgacccagtgatgcatatacagtaggtggcagagctggaattctaactcagctcaaaatgggtttcccatagtatatttaacttcataaacttgtgaagattaaataagataaggaatgtaaagtgtttggccaagagtaggcactcagtacatggtagccaccataaccattatcaagttggtaggtacaggtgttaaaaatcgaatataatttttagagtaagaaagaagattggctgctaattcaaaga

SEQ ID NO: 530129 - DNA, 539 bp, Homo sapiens
tgagcacccagttagcagggtccatggtccggcctgacagcctgctagctgtgtgaccttggacacatccccttttctctttgagcttcagtttcttcatatgtgaaaatgkgcagttccttcctccagacattgtggtgaagatgacatgctgtatatagcaacaggagggcggttgtagagcagtaataatagaaaccataatatcaaaagctaccttgaagatagaaataaagcttaggatttggagtcacactgacttggtggctctgccacttaccatccatataatccaaaggctatgagcctctgttttcctatctttaaattgggagttatagaggtcctaccctgcagggagaggattagtgagataatgtgtgtaagtatttagcacagcacctggcttaatggtgagtacacagaaaatgttaactctttttgctgttgttattgcattcttatcaaatccctgcctattaaaagcaggcattactctaagcattttatgaaatgctctaccaaatgtaagcccctat

SEQ ID NO: 530130 - DNA, 605 bp, Homo sapiens
tctctttcccataggcggtataatatggcatacagaacgtggtctttggacacaggccttggttcaatcccagttctgttatttacttagtgtataacctgggcaagtgacaagctatctaagttaagtttaaactatttcaacctactcctttctaaaatgggactgatcattcctattgtggcatgatgtgtgaacactgagtgagctaacacatggaatatctccacccagtacataatagtgcctatgaagtcaccrggtgcccttgtcctccccactcgctcctgggctaaccacttatactgcagaaatgcccattaagaaaacctgattttacaaactcctcagcctccctctttttctaacttttcagattccaaatcaggagccaaaagcctcagtgtaggctgcagcatttctggcaacagcagtaatagcaacacttgactgtgattgctagctctgaaccaggcactgtccagagcacattacatggcatggattaactcattcaacactcacaacaaccctgggaggtagacagtattaaaatccccatcttacagatgggaaaactggggcaagagaggttaaacaatttg

SEQ ID NO: 530131 - DNA, 624 bp, Homo sapiens
gcttcaccattttttaactgtatggccttaggcaatataattaaccttcatgaacctcaggcatctcagctataaatgaaaagtatgagctaagtgtctaagagtgcttgggctctcaggttctatgattctttgtragtcacagactccccttgctggctgggaccctctttggggtcttagatggcaaatctctgcagtcaagtcatgcttctcaagtcagactggaattctcttctcccagcatcacgtggcaggctgttgccagatctttcatgagcataatcacacaacaggcatcctccagcccccattaatcagcctgtcctgtggctttaattcagcagcactccaccatccacctaagtaatcactctggcttctgccagtgaattcttttcatccacttttgtttatcactgttgaagcattttttaatcaaaacaattaaatttgctaaatcttcccccaattagtaatgcattaaaaattaaaagtgtttgaatggaaatggcagaagaagccctttgctcagtgctgagtgccggtgctcagagcatcactttccccaagcactttcagctcaggagtgactcagaaactgatatccaaagaggcacagag

SEQ ID NO: 530132 - DNA, 496 bp, Homo sapiens
ggaaaaattcatttcaaaactgcaagcagttttctggagaatttgacacttggatactcttagagtcagattattcttttatttttgaaaaactatctaaatgggcccttcagttatacaaatgaaaaattttaaatccaaatcaagaaaggtcacttttgagaagttggtagctttagggagttaaattgctattgctacaaagttaaaacagacaaacaaaaataatctacttgatatctccccttgacatctcagacaactcaaactcaacaacagaacttatgatttccccttccaaaaaaccctgtacttcacagtcacccaccactcactcccatcttctggttctcaatcaaaggtacttctagtcattattgattgtcttttgcctgttctggcagatctgatccttcggcaaktttcgtcaattctgtcaccaaaacacatctcacatctgtccacttgtctctttttctactgccaccctgggtcc

SEQ ID NO: 530133 - DNA, 568 bp, Homo sapiens
aaaactcacatccacagcctccttgcagccagagagacmcacatgacacatttctggccaatgaaatacggtgaaagtcacctgggaaacctcctttctcaatttaaatgtatgcgctgaccactattaaagctgctcaataataagggaaggcagaaattcattcatccatttaacagacatttatcaatacctcctgaattgatcagaatacagactaggcagctataataagtgccttttgtacccaaaggtagaaaagtttaaacaagatagaagtatatttgtctctcatgtaaatgttactttacaaataaaaacagttcagttattcagtctagggtcatggcaacagctcagcaaggatgaggacccaggctccttccactttgttgctctgccatcccaaaagtgtgacctttattcatatggtcaaagatagagctgtgctccagcccaacagaaggagaaaaaggagatggcccactgctttccttttaaagcacaagttggaagttacaattatcacctctgtttatgtctctttcaccagaacctcacatgacca

SEQ ID NO: 530134 - DNA, 494 bp, Homo sapiens
atcctattaacacacaagccagtcttccaacaaataccaaaaacattcacatcaccctttctaactccattgcaattttttgagacactcttttcactgaaatgtcttcatgtcttctttgcatatccttggttcttaggtgccattgaggatctggtgttttggtcgttttctcacctttatcaagaaggggttcttaattctggaatcacgcgctaccattttcactagattcccaaagcatccctggggcaacgagcataactggtttgctttccccgctgggagtggaaaatatgagatttccaggtcacagaagccagagatggagatgctaaaagctttgtcacttcacagttttctttgataaaacttcctttcttctgtgaacyaaccaatgaaagctgtttctagacagagttgagatgatgaacagtgttaactgagatcgactgagaagcagcagggcccctcctgcctcccacaggcaccag

SEQ ID NO: 530135 - DNA, 619 bp, Homo sapiens
tgaaccttcatgctagacattttcaatgagacggtgtacattaacaagcttgaaggaaactygtttattgtagctacatattttgaatcttgacatctagtaaagaaggcttagacttaaagaaaatcaagtttaggctcggtacaagtcatttccattctgtgggtatcttttttctcatataaacctcctacccaaatatatcatgtagttacatcaagacttaaattattgaacaaagtattttggaaagcttaatatgccctcatgaccaccgccccccccacccccgccaaaaaaagatagtatagtcgttccttggtatcagtggggaattgactctaggaatccccataaataacaaaatcggacgtgctcaagttccatatacaaaatggcatagtatttgcatataacctatacacattctcctatataccttaaatcaattctagattacttataatacctaatataatgcaagtgttatgtatataattgctatactgtttttgcgttttttattgttgtattacttttatttttttctgaatattttaaatctaaggttgattgaatccatgaatgtggaaatcattcacagggatggccaaccgta

SEQ ID NO: 530136 - DNA, 619 bp, Homo sapiens
tgaaccttcatgctagacattttcaatgagacggtgtacattaacaagcttgaaggaaacttgtttattgtagctacatattttgaatcttgacatctagtaaagaaggcttagacttaaagaaaatcaagtttaggctcggtacaagtcatttccattctgtgggtatcttttttctcatataaacctcctacccaaatatatcatgtagttacatcaagacttaaattattgaacaaagwattttggaaagcttaatatgccctcatgaccaccgccccccccacccccgccaaaaaaagatagtatagtcgttccttggtatcagtggggaattgactctaggaatccccataaataacaaaatcggacgtgctcaagttccatatacaaaatggcatagtatttgcatataacctatacacattctcctatataccttaaatcaattctagattacttataatacctaatataatgcaagtgttatgtatataattgctatactgtttttgcgttttttattgttgtattacttttatttttttctgaatattttaaatctaaggttgattgaatccatgaatgtggaaatcattcacagggatggccaaccgta

SEQ ID NO: 530137 - DNA, 604 bp, Homo sapiens
ctggccaacatggggaaaccctgtctccactaacaatgcaaaattagccgggcgtggtggctcatccctctaatcccagctacttggaaggctgaggcaggagaatccttgaactcgggaggtggaggttgcagtgagctgagatcgcaccactgcactccatcttggcaaaagarctagactctgtctcaaaaaaaaaaaaaaaaaaaaaaaaaagtttaaatgtttgacattttttttctggtaagaataaagagaataggctgataaggaataaaagtaaagtttattattttgtagaaacaggaatcagttcagtaacaacatttgattctctactataatttgtcagcttttacacaggtaagggcatagacccatgtgtgtttgtgtgtgtgtatacttgtgttggaaatattatctgtggaagtgtatacagtttgaaagtgaaactagcccagatgagcgatttaggagtcctctagatcatgggttcccaacccctgagccacaaaccagtcctggtccccggcctgttaaaacctggctgcacagcaagaggtgagcagcaggtgagtgggaattaccacctgagctcctctca

SEQ ID NO: 530138 - DNA, 604 bp, Homo sapiens
ctggccaacatggggaaaccctgtctccactaacaatgcaaaattagccgggcgtggtggctcatccctctaatcccagctacttggaaggctgaggcaggagaatccttgaactcgggaggtggaggttgcagtgagctgagatcgcaccactgcactccatcttggcaaaagaactagactctgtctcaaaaaaaaaaaaaaaaaaaaaaaaaagtttaaatgtttgacattttttttctggtaagaataaagagaataggctgataaggaataaaagtaaagtttattattttgtagaaacaggaatcagttcagtaacaacatttgattctctactataatttgtcagcttttacacaggtaagggcatagacccatgtgtgtttgtgtgtgtgtatacttgtgttggaaatattatctgtggaagtgtatacagtttgaaagtgaaactagcccagatgagcgatttaggagtcctctagatcatgggttcccaacccctgagccacaaaccagtcctggtccccggcctgttaaaacctgsctgcacagcaagaggtgagcagcaggtgagtgggaattaccacctgagctcctctca

SEQ ID NO: 530139 - DNA, 614 bp, Homo sapiens
gagagagggggaaagggagatttccagaaaagaggtttatcatartttcaagcaaaaaacaaacaaacaaacaaaaaaccctctgagttgaagtttatcaaaagatggcatcagacatacagcctccataattaaacctgctgcgtgtaacccttccttgagagaagacaggtatattatgagtttctcaggtcatatgaaaaaactccatgtcatcctaatttcaagccttggtcaatcttcaatgtgttttttccttctgctaaaaatatatttgcaattttattctgtgggatctacttcctgtcattaatgggttggaacaatgaaagcactttgccaaatatctcaactgtaaaatataaatcatgttttatgccatcaagatgagcaaaacattttttcataaatttccagtttcacctatatgcagttttggcaaatatataattcccaggtagctttgtgtaaactgcttggctctgatgctttttaatgacctaagtaatgttttggaagcagcatcgctatgttttataaaaccaagttattgattgtctaaggacaatttaagatcaagtttgaaagtcagagggcctttgtggcagtataaa

SEQ ID NO: 530140 - DNA, 482 bp, Homo sapiens
aataaataaaccttctcagggtgtttgtaaaatctttctcaaaactatctatgctccactgatacttacaataccttagtttttctgataccctagtttgagttatcattatctgccttcgctaattttttttctctcttacccttttaaatgtattcttccactgtagtgagagtgatttttccaacacacaatgggtaaagaaccaaagccttagctttttcctagagawcctgcatgcgcctgccctgcttgcatctggagcctcagcaaagaccttccttacttcttccaacttgctatgtgcctttgaatttttggacctttatacatattgtcttctctgcataaagttcgtcctccaattcaacatatgtaaatactaaatctaagtcctctcatcaaggaaaatggactcttattccaataaatgacattgttttaagataaaacaaaataaaattaacatatagttatatgct

SEQ ID NO: 530141 - DNA, 482 bp, Homo sapiens
aataaataaaccttctcagggtgtttgtaaaatctttctcaaaactatctatgctccactgatacttacaataccttagtttttctgataccctagtttgagttatcattatctgccttcgctaattttttttctctcttacccttttaaatgtattcttccactgtagtgagagtgatttttccaacacacaatgggtaaagaaccaaagccttagctttttcctagagatcctgcatgcgcctgccctgcttgcatctggagcctcagcaaagaccttccttacttcttccaacttgctatgtgcctttgaatttttggacctttatacatattgtcttctctgcataaagttcgtcctycaattcaacatatgtaaatactaaatctaagtcctctcatcaaggaaaatggactcttattccaataaatgacattgttttaagataaaacaaaataaaattaacatatagttatatgct

SEQ ID NO: 530142 - DNA, 612 bp, Homo sapiens
ctgctgtgcatagtctatgtaaataagaaagtatyttaagtagcatgcacttatcccacagcatatcttgattatccctgaaatccataactgcgcatgactctgtgaggacttggattccttataatttccttagcccttgaatacctgcaattcaactcctgggagcattcttgccagctcaactgccacatgtttggaaacacagaagagcaggcaagaggataattatgtgttcttcaaagtctggaaaagcctcactcttgtgacttaaatcctgcttgatatgctctcagcaagctactatcttgacctagtagtaatcacttttgaaaagtaagtagcaaatattcgtcctgatacacacacacacacacacacacacacacacacgcacacacccctatatctgtatcttcaggttttaaaaatcttttgctttgctcatacacccagatgctttgagaatgaaaggaaatttccttaagtttcctcgttttacatcttgagtaaattttaaaaaaatgaatcataattcaaagcaaagcaaattaatagcttttaaattataagtaaaatgttattcacatgctgagacactgtccataaaat

SEQ ID NO: 530143 - DNA, 612 bp, Homo sapiens
ctgctgtgcatagtctatgtaaataagaaagtatcttaagtagcatgcacttatcccacagcatatcttgattatccctgaaatccataactgcgcatgactctgtgaggacttggattccttataatttccttagcccttgaatacctgcaattcaactcctgggagcattcttgccagctcaactgccacatgtttggaaacacagaagagcaggcaagaggatmattatgtgttcttcaaagtctggaaaagcctcactcttgtgacttaaatcctgcttgatatgctctcagcaagctactatcttgacctagtagtaatcacttttgaaaagtaagtagcaaatattcgtcctgatacacacacacacacacacacacacacacacacgcacacacccctatatctgtatcttcaggttttaaaaatcttttgctttgctcatacacccagatgctttgagaatgaaaggaaatttccttaagtttcctcgttttacatcttgagtaaattttaaaaaaatgaatcataattcaaagcaaagcaaattaatagcttttaaattataagtaaaatgttattcacatgctgagacactgtccataaaat

SEQ ID NO: 530144 - DNA, 610 bp, Homo sapiens
agctggaaactcttccagcttatagagcaaggtcaggtgtytctctgggatcttagctccttgatgccggtgatttcagcatcaggatgttgttcatagtgtgtcacctgcagcgactttttgaaaacaaagctgtgagggtgaatgctgtgaactccctctgtgtcatctgcagtctcattgtcctgatatcacctgtcttacagaaatgtactcaggaaggaaacgggctaccaggaggctactggtgcctcagtggagagacaaacctatctccaaacatgactgacacttctgcattttagaaatatggtctgggtcagcactcgtgaaaaaggaaaaaagcaataaataaaataaaacatgctctggcaaaaggcagaaacatggcaggcaatctccagacccttccatcatccctcctcttcctcttttccatctacctttcttggtgttgcttgttttcctaatctaagaagaacctccaaacttccataaattttgtttggcaacaactatgattttctttttattattattttaattgttgagaataataccaacataatgttgctgctgcagaggattatgccttagaaagctgaaaact

SEQ ID NO: 530145 - DNA, 546 bp, Homo sapiens
ataggtgccccttatcaggtaaaggaggcaagaaaagcattttgacaaatcacttagaattgaagtattcattaaatgatttaggtgaaaatgcccaaacataggtactaagctgtaaaactcagttatatcagccttcttgttcaaagaaactaaaataacatgctgctagattctgagatggaggtggtcttcactgggcttgagtttactatttgtggagaagatttccaggcatggtaaaggagtttggtatgttagtgtacataaaactctttctattacaataatatccaaaagattatctcccttgcagkcactgacatttgaagaaatttctgtgggagttgtattgaaaacccatgaggatttgacatttccgtattggtcatttattagcccactgttttgctgatggatctgccttgactttaatctttatcttcctaagccagcaaatgacagaaggggaaactcgactttaaaagtaacattagagacactttaacacacgataaacatttaaaacattttgctacatgaaat

SEQ ID NO: 530146 - DNA, 546 bp, Homo sapiens
ataggtgccccttatcaggtaaaggaggcaagaaaagcattttgacaaatcacttagaattgaagtattcattaaatgatttaggtgaaaatgcccaaacataggtactaagctgtaaaactcagttatatcagccttcttgttcaaagaaactaaaataacatgctgctagattctgagatggaggtggtcttcactgggcttgagtttactatttgtggagaagatttccaggcatggtaaaggagtttggtatgttagtgtacataaaactctttctattacaataatatccaaaagattatctcccttgcagtcactgacatttgaagaaatttctgtgggagttgtattgaaaacccatgaggatttgacatttccgtattggtcatttattagcccactgttttgctgatggatctgccttgactttaatctttatcttcctaagccagcaaatgacagaaggggaaactcgactttaaaagtaacattagagacactttaacacacgataaacmtttaaaacattttgctacatgaaat

SEQ ID NO: 530147 - DNA, 494 bp, Homo sapiens
ttcaatgactcactccttcacattacctttgaaaaatgaagtgttcttccaaatttgacattctatttataaaaatacacgaaggaaatgtgtttaaaattaacattctaagaccttaatgtcacttgctgaatagcttgacaattatttttgtttcttgagaagcatgattactcccaagttgttcatagatttaaacagataacattgccataaaatcagagaacattctcagtcaagggtatgaagataaaagatttcctrtgggagaggcgattattgagtggtgttcctggctgtataatggtatgtttcaactttaagaaattgactccccaaacctatgtttattaactgcaatgaaatataagcaactctagggttatattcatctaggaagatataaaacaaatgaatggggaaaagaaaaagtcttctggccaggattgtcagagactgcatatggagtgagaaataaaaaaatgaaaagaggt

SEQ ID NO: 530148 - DNA, 494 bp, Homo sapiens
ttcaatgactcactccttcacattacctttgaaaaatgaagtgttcttccaaatttgacattctatttataaaaatacacgaaggaaatgtgtttaaaattaacattctaagaccttaatgtcacttgctgaatagcttgacaattatttttgtttcttgagaagcatgattactcccaagttgttcatagatttaaacagataacattgccataaaatcagagaacattctcagtcaagggtatgaagataaaagatttcctatgggagaggcgattattgagtggtgttcctggctgtataatggtatgtttcaactttaagaaattgactccccaaacctatgtttattaactgcaatgaaayataagcaactctagggttatattcatctaggaagatataaaacaaatgaatggggaaaagaaaaagtcttctggccaggattgtcagagactgcatatggagtgagaaataaaaaaatgaaaagaggt

SEQ ID NO: 530149 - DNA, 484 bp, Homo sapiens
ctgctgcatttatacagctgctgcagggaaattccctgcgacactagagacaggtaaataaactgcattcgttccaaagcagggggaagggtcttctatcagtgamgagtttacataatgcaacggaaaaccagtgagctctgcagacctgtcaaggaggatgcaaggcttgagctcctctcttcccaccatctctaaacattctccaacagcctgctcttcactgccaggagacccacagaacttacacctgagaatgagtaacaatctgcttacgcttaccccatgctttcctacccacctttattattaaaatacagaagaaaaaaaaataaaaagaagtagaaaaccctaaccacctatttctgaatccaaagtatggagtaaccaaacggggccgaggagttttcccttctctgaagagaggagaacaaggcgccgcctccaatctacactacgcccagtaatgcaatgacaagccctg

SEQ ID NO: 530150 - DNA, 595 bp, Homo sapiens
tcctttctttgttatgaatacctgtttatactaatgttccattatgacaaactctcctcactggcttggaagagtatgatatcataatctgagaaaaygttaaatgatgctttctaaattaaatgcttcattaaacctcagagatccactctaaattttatttcccacatgataatttttagttaaggctaaagatgaaaggtaaagtggacagataatgtttgcataggtaaccgaggggaagcaatatgagcatagctaggcttagcccctaaaaacattgtgatgcacagtgagttagttaagagtatggtctctgacttagacaacctgagtttaaattcagttaggttggccactaactattaggttggtgcaaaagtaattgtggtttttgccattgaaagtaacagtaaaagccatgattacttttgcaccaaccaaatagtttgtgtaattagattgggcagcttactacaacgctttaaaattgaatttcttatatgtttaatgggtataatagtatctactgcaaagggttattatctatatgcagtatatagtaaaccactcattattgttcaaagtcatggtt

SEQ ID NO: 530151 - DNA, 595 bp, Homo sapiens
tcctttctttgttatgaatacctgtttatactaatgttccattatgacaaactctcctcactggcttggaagagtatgatatcataatctgagaaaatgttaaatgatgctttctaaattaaatgcttcattaaacctcagagatccactctaaattttatttcccacatgataatttttagttaaggctaaagatgaaaggtaaagtggacagataatgtttgcataggtaaccgaggggaagcaatatgagcatagctaggcttagcccctaaaaacattgtgatgcacagtgagttagttaagagtatggtctctgacttagacaacctgagtttaaattcagttaggttggccactaactattaggttggtgcaaaagtaattgtggtttttgccattgaaagtaacagtaaaagccatgattacttttgcaccaaccaaatagtttgtgtaattagattgggcagcttactamaacgctttaaaattgaatttcttatatgtttaatgggtataatagtatctactgcaaagggttattatctatatgcagtatatagtaaaccactcattattgttcaaagtcatggtt

SEQ ID NO: 530152 - DNA, 654 bp, Homo sapiens
gtccttatggatacaaccatcaatagaagaaatatttacaaatatatggggataacccactgcaactccagaatagtgattatctttggagaggaataaaaaggatgaaagggttagaatctagatgtcactataaaattttattttgacagaaaaagataagttacaagcatgacaaaatgttaaaatttgttaaatctggaaatcagataaatggatggatattattttatgttttgccagattgaaagattctattaaaaattaaatcaaatactctacatatgttttactatagtcatctgagtatattagcctattatgactagaactgaactgtrtcttgttttcacacattaactacatagttagaacattataaacacatatgttctctcattttcccacccaaaccaaggtaggataaagttctcagctttcctttaccatgacacgcccccaaccaaaacactactctcaaacattgctactttagcttaggctatttgtgaaattctcagccccatctaaaaaagtaaggagcaatctcctattgaatatcagattttcccagtgtcttaatgacagcacaagtgtcatgagttatatcctcacggtctaaaataaattttaaaagatgtttaacattcagct

SEQ ID NO: 530153 - DNA, 586 bp, Homo sapiens
aggcaactagagcccaatcctgctgtgagccctctgagagcctatgaaacccaactcarcatgtcccactaaggggtgatgaagctgagatatttatttacaaattctgcccttcaaccaggtagctccaggtaatttggtcttacgcacttccagcgccccctgagcacaggccaggcgcactctggtgtatggagaactgtagtcagagagacaccaagggtatgtatagcagtaactatagttggttccaataacttagcctgccatattcccaccatccttcagcttttggcctcccagccctgaagtactgtggattgtgtcccccactttattttatctcatggtcccctgtattgttttatttatagcacgatcacaaatgtaagcatatagttatttgtgtgattcaacacctgttttgtctagtaccttgctactcaaatgccagcaacattgacagtaaagggagtatattagaaatgcagactcagccctactccagacacactgaaccagaatttggatattaacagactcttgttgttttctgtacacacattagacatttgagaaactctgc

SEQ ID NO: 530154 - DNA, 437 bp, Homo sapiens
taaggatccagtactattcctcagtaaatatgaatattcacaaaaatcataagtgaataaatgtctgcaatagtataatatgycaaataagcatgagaataaaatatgaaagctgaatagattagtactaattaaaaacatttaaataatatttaaagattttgccaaaacctaaaatataataaatgaaaagatatgcttaaccaagccagttaaaaaaattatttctatttcaacagtttttggagtacaggtggtttttggttacatgggtaagttcttcagtggtgatatctgagattttggtgcacctgtcacctgaacagtgtatactgtacccaatatgtaatctattatccctcacctctctccccgtctccatcattgagtcccaaaagtccattatatcattcttatgcctttgcatctacatagct

SEQ ID NO: 530155 - DNA, 437 bp, Homo sapiens
taaggatccagtactattcctcagtaaatatgaatattcacaaaaatcataagtgaataaatgtctgcaatagtataatatgtcaaataagcatgagaataaaatatgaaagctgaatagattagtactaattaaaaacatttaaataatatttaaagattttgccaaaacctaaaatataataaatgaaaagatatgcttaaccaagmcagttaaaaaaattatttctatttcaacagtttttggagtacaggtggtttttggttacatgggtaagttcttcagtggtgatatctgagattttggtgcacctgtcacctgaacagtgtatactgtacccaatatgtaatctattatccctcacctctctccccgtctccatcattgagtcccaaaagtccattatatcattcttatgcctttgcatctacatagct

SEQ ID NO: 530156 - DNA, 437 bp, Homo sapiens
taaggatccagtactattcctcagtaaatatgaatattcacaaaaatcataagtgaataaatgtctgcaatagtataatatgtcaaataagcatgagaataaaatatgaaagctgaatagattagtactaattaaaaacatttaaataatatttaaagattttgccaaaacctaaaatataataaatgaaaagatatgcttaaccaagccagttaaaaaaattatttctatttcaayagtttttggagtacaggtggtttttggttacatgggtaagttcttcagtggtgatatctgagattttggtgcacctgtcacctgaacagtgtatactgtacccaatatgtaatctattatccctcacctctctccccgtctccatcattgagtcccaaaagtccattatatcattcttatgcctttgcatctacatagct

SEQ ID NO: 530157 - DNA, 599 bp, Homo sapiens
ttcttctaaacatgtttatttaatcatttctcttttcattctccttgttgtaccttcatccaagcatattgcacctcaatttattgcctcttaccataggtggatccgtgtttaatgaaacttgaagctgataccatttgaggaatcctatttcagaaaaataatacaaaattatgacgtaattatgcatattgaaagwagtccatgcagggaaggagcttaggcttagcttcacggtaaagctgccactgtgcttcactggttgatcaggtgtttggagtagagtggtaacaagtctggcaaggctcctgttcccatggcacttgagttctaaccataagaaataattctaccaccttaaggctagcactgggtcatggtccatgatgctgatttaatatgagcataacattggcacaaatatgggaagttagacattaaaacaaactggttgacaactcattttcttcctgtcttccttctttttctgttttatttatttaataaacacataataattgtacatatttatggggtacagtgtgatgtttccatatacaaatacattgtataatgatcaaatcaggagagttagcata

SEQ ID NO: 530158 - DNA, 599 bp, Homo sapiens
ttcttctaaacatgtttatttaatcatttctcttttcattctccttgttgtaccttcatccaagcatattgcacctcaatttattgcctcttaccataggtggatccgtgtttaatgaaacttgaagctgataccatttgaggaatcctatttcagaaaaataatacaaaattatgacgtaattatgcatattgaaagtagtccatgcagggaaggagcttaggcttagcttcacggtaaagctgccactgtgcttcactggttgatcaggtgtttggagtagagtggtaacaagtctggcaaggctcctgttcccatggcacttgagttctaaccataagaaataattctaccaccttaaggctagcactgggtcatggtccatgatgctgatttaatatgagcataacattggcacaaatatgggaagttagacattaaaacaaactggttgacaactcattttcttcctktcttccttctttttctgttttatttatttaataaacacataataattgtacatatttatggggtacagtgtgatgtttccatatacaaatacattgtataatgatcaaatcaggagagttagcata

SEQ ID NO: 530159 - DNA, 596 bp, Homo sapiens
ctgaaaaatgacaataataataaattgcaatatacttttaaagagtagcagttatatttggacagaactttattttttccagcatgtgaatcattacctaataatatttcatttaattaatcagaaaattgtgagtcaatagctctgcttacaaaacctataaacagaaactccaattcaaccttatcgctactaaattttaatgttaagagacaacacaaattaattaaagacaaartgattcacaaaataattacagcctcttgttgccttagggaataataaagaactaacttatttcagtagtgaggctattaatggtgtgcatgacaaagagataaacccaagtatagttaattccatttaaaaattgcctctggcaaatgaagaaaataagtgaagaaaagaagtgcttgtgtatatatgtgtgtgtatatacatatatgaagtgagagaattagtaaattttaacctaatttgttttttaaaataattaatgtataggccttttctgttgtgactttgaaaaagtatttgaaaacactatatttattttgctgtttatttatttataatctatatatctattatataat

SEQ ID NO: 530160 - DNA, 596 bp, Homo sapiens
ctgaaaaatgacaataataataaattgcaatatacttttaaagagtagcagttatatttggacagaactttattttttccagcatgtgaatcattacctaataatatttcatttaattaatcagaaaattgtgagtcaatagctctgcttacaaaacctataaacagaaactccaattcaaccttatcgctactaaattttaatgttaagagacaacacaaattaattaaagacaaaatgattcacaaaataattacagcctcttgttgccttagggaataataaagaactaacttatttcagtagtgaggctattaatggtgtgcatgacaaagagataaacccaagtatagttaattccatttaaaaattgcctctggcaaatgaagaaaataagtgaagaaaagaagtgcktgtgtatatatgtgtgtgtatatacatatatgaagtgagagaattagtaaattttaacctaatttgttttttaaaataattaatgtataggccttttctgttgtgactttgaaaaagtatttgaaaacactatatttattttgctgtttatttatttataatctatatatctattatataat

SEQ ID NO: 530161 - DNA, 447 bp, Homo sapiens
ctgtcattgtcacccactcttgtaaacaagaatgcaaatgaaaagagccatgttggattctgttctttgagggactctagagacaacttggcatctggcagatggaaaataaaaatagtaggtttatgttttactaattatagatttccaaaacaatacataggtcaggaaaacacatgttaaaaaatgtaaagcaaagcacagctatctacaagttactttagagaaacattctcatgttttaggtgttaaacttggaggtttgctagaaaaatttatttttagcagaagcaatgggtatgtgtgagtatgtgtatgaatgaaatgagagwaatggaaagagggagggatggggaagaagaagaagagaaaatgaggagagaggaagaaagacacccccgccacccacgcagggagaaggaagaagagagagagggaggaagggaa

SEQ ID NO: 530162 - DNA, 425 bp, Homo sapiens
agctggatgacagaaactatggttggacattggagggaagcagtttgacttcagaggggcagcttgacagtgcagcttcagagatgagtctggtgcagcttcagagaggagtccaggaatggccagactccagaggaagattaccttcctgctctgttcttcccattgagagccactctcatcagcaataaaatcccctgtgtttaccatcttcagtttattcacgcgacctcattcctcctggacactgcmcaagaacttgggtgccacaagtgcaggtgcaaaaggctgtcacactaaccctccactgagctgttaacacttaaactgtctgtggacagaaaagcgaaagagtcactgtaacactccttctggggcttcaggggtcgtgagcaacccactagatgctgctgcagggcacacac

SEQ ID NO: 530163 - DNA, 537 bp, Homo sapiens
cagccttgcttctcacatcagctcatcttcttgcaaactattgcttcctgtggtatgaaaggaagttccagtttcagtcatattggatggaaaatagctttttaatgtatgttatctgtagtgtgtatggtatgaaaggctcctgtgatatgagcccctccatctttatctcccataattcctaaataaattctgcccagtcataccaacaggctgaatttctctgtttgctatagaaattactttttcagcctgacctaacctctaccttttggtatccatccacctttctattgtcagccttctctgaccacctctgccaggttggggtctgcttgtctgtgctctcatagttcactgtgcttaactttattgccatattgcactggtgtatgttggtttccttatctttttacctactagattctaaatccctagaaggcaggacttatctatgtcttttacggaacatactaggaaaatgacagacmctagctactctataaatattaatacaggaataaataattcaaagca

SEQ ID NO: 530164 - DNA, 546 bp, Homo sapiens
gtttttaataactttcatttgaaaacktgtctagtttttcatatgatttttcttttaaccacagtctaatttagaaagatgtgcattaatatgcaaatatttctttattttacatttatttctactttaattccctttaattcattaaacatagccttccgaatccactgagacttttttattaacataaacagtatttggtttatatttttgagtgtttttattcacttgaacatgatgtattctgccattgttagctgcagttttctatgtatattaattagttcaagttggtcaataactttttttcaaatactccacatgcttatctgttccacatttgtaaattttcatgtctctctttagttctgtccactatttcgtatatattttttgaagcacatgttaattaaaataaaatttattcttcataaatcacctttgtgtcataattacatgctgttctttacctgcaatatttcttgtttcaaaatgtacattttctgggaaaaagtgcacacacatattattcagattttgtgtgtg

SEQ ID NO: 530165 - DNA, 546 bp, Homo sapiens
gtttttaataactttcatttgaaaacttgtctagtttttcatatgatttttcttttaaccacagtctaatttagaaagatgtgcattaatatgcaaatatttctttattttacatttatttctactttaattccctttaattcattaaacatagccttccgaatccactgagacttttttattaacataaacagtatttggtttatatttttgagtgtttttattcacttgaacatgatgtattctgccattgttagctgcagttttctatgtatattaattagttcaagttggtcaataactttttttcaaatactccasatgcttatctgttccacatttgtaaattttcatgtctctctttagttctgtccactatttcgtatatattttttgaagcacatgttaattaaaataaaatttattcttcataaatcacctttgtgtcataattacatgctgttctttacctgcaatatttcttgtttcaaaatgtacattttctgggaaaaagtgcacacacatattattcagattttgtgtgtg

SEQ ID NO: 530166 - DNA, 626 bp, Homo sapiens
tgctggctttttggacacccactcccccgccaggaggcagttgcaagcgcggaggctgcgagaaataactgcctcttgaaacttgcagggcgaagagcaggcggcgagcgctgggccggggagggaccacccgagctgcgacgggctctggggctgcggggcagggctggcgcccggagcctgagctgcaggaggtgcgctcgctttcctcaacaggtggcggcggggcgcgcgccgggagaccccccctaatgcgggaaaagcacgtgtccgcattttagagaaggcaaggccggtgtgtttatctgcaaggtaagcgccccttcgctcgaggtgtggtttaattgtctcattttgtttgaaatcctgcggtgagaaaccagtcgtgttgagaacaataaaagaccaaaaaacgatcaccaaaaccaactgtcctgaaagctactggaaakttggaaaatgcatgctttgattaaatgtcttcattcaagacactggcaagttaacttatttagtttgtgccgtgagctctgggttgattgtgctaatatgaataactgaaaaacattttatttccctatggttttcctcgatggacttccccactatgggtgaaatgacaatgg

SEQ ID NO: 530167 - DNA, 595 bp, Homo sapiens
acatgttcttaagaattacatgcaaatcagttattaatgatgagttctctggtgattttggagtgttttatcttcctaatattaaattaattgagggccttaatattttgttttgaaagaatatatttaaaaaggctgggtgtggtggctcacgcctgtaatctcagcactttgggaggcctaggtggctggatcacttgagggcaggagttcaagaccagcctggccaaataatgaaaccttgtctctgttaagaatacaaaaaattagctggccatggtggctcaagcctgtagtcccagctactcaggaggctgaggcatgagaattgcttgaacctgggaggccgagtttacagtgagccgcgatcatgccactgcattccagcctgggcaacaaagcaaractctatctctaaataaataaataaataaataaataagaatacatttaaagataataattggccaggtgtggtggttcatgcctgtgatcacagcactttgggaggccgaggtgggaggattgcttgaggcaaggagttcaagatcaatctgggcaacacagtgagaccctatctctacaaaaatttaaa

SEQ ID NO: 530168 - DNA, 582 bp, Homo sapiens
tacagtgattttactcttctgggtgtctctggtggtgcaaagcacatgggaatcactattgcatgctgtttgaagggttactgagggaatgccacaggcacactacttacatgttctaaattgtcaggccttgaaaaagagaaaaaagtcaaaagcaaaattcattgtagactgaagaaaatacacaaattaacagccaagaaagtcatttgcaaagggtgaggcctcaagttgtcaaaattatgtttccttgcgtcgctacttagatttttctagatggaggaaaacccttcaaagagtagagattccatcgggagaggcttgagaattagctgccaggctgccacyttagacaaatctttgacaaattcttgcttggaggatcctgggaaaagacctcacttttccttcaaaagggtctcaggatcactttaaagtcggcagtgaatcccaattgctcctaattaggccttctgttttgttaattgctctgggaactccctgggagagggtagaaagccctggacctgcagtggtttggcttcaagtgtgtacgatggcccgtggagagcgagcaggacc

SEQ ID NO: 530169 - DNA, 653 bp, Homo sapiens
atttccaggtactctgttctgtcttttttgttttgtttttttttttgagatggagtctcactcttgtcacccaagctggtgtgcagtggtgcattctctgttcactgcaacctccacctcctgggttcaagtgattctcctgcctcagcctcccgagtagctgggattacaggcacctgccaccacgcccagctaatttttgtatttttagtagagatggagtttcrccatgttggccaggctggtctcaaactcctgaccgcaggtgatccgcccaccttggcctcccagagtgctgggattgcaggcgggagccaccgcgcccagcctgtttttaattttaacaattgcttgtaataaatagatgctattattgtctctactttacagatgaataaactgacatacagagaacagaacaagatttttatcactaaatgtttgctattttaaaaggcaagcaagaatactggcaaccacttctatttataatgagaaaaagctatactaaaggtgggctcagttacattaaaattcattctatacaaagtcaaaccagaaggagggatctgtttttccttcagaaatatcatctgacccgtcagaatagtgtcaagaaacaaacacctagacttacatacaataaagtgaca

SEQ ID NO: 530170 - DNA, 653 bp, Homo sapiens
atttccaggtactctgttctgtcttttttgttttgtttttttttttgagatggagtctcactcttgtcacccaagctggtgtgcagtggtgcattctctgttcactgcaacctccacctcctgggttcaagtgattctcctgcctcagcctcccgagtagctgggattacaggcacctgccaccacgcccagctaatttttgtatttttagtagagatggagtttcaccatgttggccaggctggtctcaaactcctgaccgcaggtgatccgcccaccttggcctcccagagtgctgggattgcaggygggagccaccgcgcccagcctgtttttaattttaacaattgcttgtaataaatagatgctattattgtctctactttacagatgaataaactgacatacagagaacagaacaagatttttatcactaaatgtttgctattttaaaaggcaagcaagaatactggcaaccacttctatttataatgagaaaaagctatactaaaggtgggctcagttacattaaaattcattctatacaaagtcaaaccagaaggagggatctgtttttccttcagaaatatcatctgacccgtcagaatagtgtcaagaaacaaacacctagacttacatacaataaagtgaca

SEQ ID NO: 530171 - DNA, 653 bp, Homo sapiens
tctctattaaaaatacaaaaattagccaggygtggtggcaggcacctgtaatcccagctactccagaggctgaggcaggagaattgcttgaacccagtgagaggcggaggttgcagtgagcagagatcacaccactgcactccagccagggcaacagagtgaggctccatctcaaaaataaaaataaaaaacaaacttccaattgttctaactgctttatagtatttatctccttaagaccccacagaagccagtgagagaatctggctcccaactgcggggacaacactgaggtgtggcaccttcttggctctggagggagctcggtccctggacctgcattctcccacaggccctgcctcctgcccacttgtctcagcatctggttgtggaaaaaaaaattgccatgtgatactgcagttgcatgtgatgattcagagggtaagggaacctgaacagagcttctcagcatcccaggacaacttataagtctcttctggtgccagcttcccaagatgattttggtctcctattatggggagctcaggtgaaatatgggcactgtgtgcctactcactctgcatctgaatagtcctaaagcctcatagaaaggttatatcctttctatcttcatatccttgatacaagactcc

SEQ ID NO: 530172 - DNA, 602 bp, Homo sapiens
ttccaaatcctccatcgcgcggtggccgcggccgccctcacccggctccatgcgcgcaaacggaagggcgcgaggtttgcgcggagagccaggcagccccggcgcctccagcggggcggcgcagctcgagacccggcgacccgccggcaggggcgtccagccccgcgccacacttgccagaaaatagcccgcctgaccacagccggccctggcgcttgcacattaagaaactcaaattaagaagtgggtgaattgggaaaggagggagccgggggcgtttgcaccgtgtatctcaggtatgagcacttttcactgacrttgatgcaactgcattagagttaatggcagcagcctgcttctcattattaattgtctttgtgtttggataaagtatgtaatcttcttctcaaccacaccattaaaataggttgccttttcaattaagaactgtcgtgagcacagcagtcaattttcctaatgaagatgcattatattttcacttttttaaaaaataatggaaaatcccaggttttcattagacacgattacagagaaatacaagagggctcctctaaaattcatgcggtcatgtagtgcattaa

SEQ ID NO: 530173 - DNA, 496 bp, Homo sapiens
gcttcatcctgagttaggaggctatcactgtggcacaaggaaatgtattttacataaaaagagagagacaactaccagtcaggccttctgtgtgactaaggctcaaagcrccaattctttttaaattctgctgactcctgctgcaggccgtcctggctgatcctcagccgagccgacagggacattcatctgagaaagaagattctaatgggggtgggaagcagtggtgcatggcaggggtagtgggtccccaggagttgtggtctagaagggtcatggtgagttgtagaacagaagcactcagcataggttaattcagtacccaccatgagagacacactgctgtaggcatggcggatgtttgtgaatggcatgtggtcttcacacattagagacgcttcccgcggaaatctgcatatccacatgttggcggtcctacagagggacgatttctgcctgagggagtcagagaaggtgtctggtgtaggtaacttct

SEQ ID NO: 530174 - DNA, 496 bp, Homo sapiens
gcttcatcctgagttaggaggctatcactgtggcacaaggaaatgtattttacataaaaagagagagacaactaccagtcaggccttctgtgtgactaaggctcaaagcgccarttctttttaaattctgctgactcctgctgcaggccgtcctggctgatcctcagccgagccgacagggacattcatctgagaaagaagattctaatgggggtgggaagcagtggtgcatggcaggggtagtgggtccccaggagttgtggtctagaagggtcatggtgagttgtagaacagaagcactcagcataggttaattcagtacccaccatgagagacacactgctgtaggcatggcggatgtttgtgaatggcatgtggtcttcacacattagagacgcttcccgcggaaatctgcatatccacatgttggcggtcctacagagggacgatttctgcctgagggagtcagagaaggtgtctggtgtaggtaacttct

SEQ ID NO: 530175 - DNA, 675 bp, Homo sapiens
tggcctgggtgacagagagagaccctatttaaaaaaaaaaaaaaaaaaaaaatggtagtagcaaccagctcttaatagagtgctttgcattggtctaagtgccggacaccattggctcattctatccttacagccattttagataaggaaactggtaaagagaagtcaactaaattactcaaattaacacactaagtggcaccgcctgctttcagcccagacagtgtgtggctttagagctcaggctttaaaggcagagaatgtacgctgtgtacagatcccttygaagaggacccggaagactcactccccaaaaatctttctttgacccactgtcctagtactagagatagcatcatttggcattaatgtctccatgtagatagcctactcagccagaccctcttattaaaatgcaaacactctgagcagggatgataccagacactagttcttctgaacacacatttgccaaattgccaataacttactcagtgctaagaatttatgtctaccctgccgcttgcatgctttcttttgatttttaagtcagcttccgcttcttgtcccaagctagggtcacttgggcagtaatttttctgctttatggcaacacagcgaggcctcctccctcggacatgcattctattccaggggcccagggaggcccattcc

SEQ ID NO: 530176 - DNA, 545 bp, Homo sapiens
tcttatgtcacatagttctttacatattctttaaatattctttacatgtcaacttggcatatagttgaattaaattaaatttctttaccatagaaactccttgccttgctgtatctcttagatttttatggtttttaataatatgatgttttggcaattggtttaagcataaactgttgttttattttctttacattcataaatcatgtcttaaaatatcaagaaaycctagttctgactggtccacttaatgtaattccattcttcagcagcattaggtaatgttctttaatattgattgtgatgatggttattataagacaccatcaagtggaccaatatatgcattatgggaattccaaaaggggaagagagaggaaaagggaggagagagactatttgaagaaattattgccatacttcccaaatttgaggaaagacatgaatccagaagtctgcacaggccagtgaattctatgtaggaaaaacactaaaagatccacaatgagacacattatgatcaaactgtccaaaaacaaagagag

SEQ ID NO: 530177 - DNA, 305 bp, Homo sapiens
cattttatctgactagctgcctataggcggtcattcaggtgacttccagtccctggctattacacatctgtatcccaaggtggcgcttttcaaatgaaatccctgaagggaatttattttcttstgatttcccctcttccccaatgtcatctgctgaaattctggtacttgggttctccacaggaaaataccggcttccttcagccggggtacctgaaccgtacctgcactgggctgctggggagggtctcatggcctcttcgaatgccgttggtgacctagggtgtctatttgaaagttacttg

SEQ ID NO: 530178 - DNA, 592 bp, Homo sapiens
ctgttctgtgatgacacgactctgggaagactaacctccccccgccatctcctacagccagaattcttatttcccaaaacaaaaygtgagaagcagaaatactgagaattttttaatgttccaaaaagtactctgtgctccttgaaggacattttctgacattatttcaaaatactttatgaacagtaattaattcttgagaaggaccaaaggagaacccagatgtgccataagccaaaaacagccagatcattcacaaactgcagtgaagggaaagagaagaggaagtggttacctgctgcaatatagagagaaaatgtttaaaaaaaacagtaggaagcttagatttccactatgggggctcacacagaaactcaatttcatcaaaaatctataaattaagtaattaagaagactagtcaagatttgggtagacccttgatcaaagagtaaagtcttacccactttacctccactatctgaaataattagtacctctcagccaatgaattttcacaaaataagggactcttcttctaatggtatggccgtttaccaatctggcaggaacatcaattcccctctcacattt

SEQ ID NO: 530179 - DNA, 627 bp, Homo sapiens
ctgttggggtgaataactcttagaggtttggaaccagaaataaagaaaaagaacaaaataaaatggaagtaattaatgttgggtaaataatatctttggcctaacaagttcttggctccattgtcagcatccgtgttttctattaaattgttgtctttgtgaggcattattacagttcttccctcttaaagtctgttttgaataaagaaaccgaaggttggatgaattctatagttaggttggtctctctctaatgaagattaaagttctggcatgtcttagctctgcatggcaataattacttttaaraaaatgcacttagggtggtgattatggcattgtaaaagtcttatgaaaatgagatgtatgtcaagagaaccttactatcaaaatcagttttgtgcattgcacccatgcttcgcatctgtcagcaaaagcaggctttctcaggtttggtgaaaggaatattgccgtggcctttgaggactgatgagtttccactaatttagagcaaaattaacagaatcctatgagcctggaggaagcagttcacttttgtttgtgttgcttttagcatactgctcatttcaaccctgcttagagaagtggcagatcttataccctcag

SEQ ID NO: 530180 - DNA, 627 bp, Homo sapiens
ctgttggggtgaataactcttagaggtttggaaccagaaataaagaaaaagaacaaaataaaatggaagtaattaatgttgggtaaataatatctttggcctaacaagttcttggctccattgtcagcatccgtgttttctattaaattgttgtctttgtgaggcattattacagttcttccctcttaaagtctgttttgaataaagaaaccgaaggttggatgaattctatagttaggttggtctctctctaatgaagattaaagttctggcatgtcttagctctgcatggcaataattacttttaaaaaaatgcacttagggtggtgattatggcaytgtaaaagtcttatgaaaatgagatgtatgtcaagagaaccttactatcaaaatcagttttgtgcattgcacccatgcttcgcatctgtcagcaaaagcaggctttctcaggtttggtgaaaggaatattgccgtggcctttgaggactgatgagtttccactaatttagagcaaaattaacagaatcctatgagcctggaggaagcagttcacttttgtttgtgttgcttttagcatactgctcatttcaaccctgcttagagaagtggcagatcttataccctcag

SEQ ID NO: 530181 - DNA, 627 bp, Homo sapiens
ctgttggggtgaataactcttagaggtttggaaccagaaataaagaaaaagaacaaaataaaatggaagtaattaatgttgggtaaataatatctttggcctaacaagttcttggctccattgtcagcatccgtgttttctattaaattgttgtctttgtgaggcattattacagttcttccctcttaaagtctgttttgaataaagaaaccgaaggttggatgaattctatagttaggttggtctctctctaatgaagattaaagttctggcatgtcttagctctgcatggcaataattacttttaaaaaaatgcacttagggtggtgattatggcattgtaaaagtcttatgaaaatgagatgtatgtcaagagaaccttactatcaaaatcagttttgtgcattgcacccatgcttmgcatctgtcagcaaaagcaggctttctcaggtttggtgaaaggaatattgccgtggcctttgaggactgatgagtttccactaatttagagcaaaattaacagaatcctatgagcctggaggaagcagttcacttttgtttgtgttgcttttagcatactgctcatttcaaccctgcttagagaagtggcagatcttataccctcag

SEQ ID NO: 530182 - DNA, 393 bp, Homo sapiens
tggatgatatgaaaataaatgccactgtgctcagaaatcaggcattacttgcacacaagggaactgcggatctgaaaataaattttgattgtgtttatattacatagtaatatacatataaataaagcattattagagatgtaatagccaaatcttccaccaattagattagatattaatattgtttatttaataaatatgaaggaaacaataccaaaatggttatcattgrgtttatctgtacaacgctgaaacagagaacaaatactgacctagtaccttcaaaaatgccccatgtgctgaatgtgaggattaggcaaggtttatctttgtgcaatgaagacacatagtattctcctctgaacgtgcatcatctgtcattttcttctgaat

SEQ ID NO: 530183 - DNA, 538 bp, Homo sapiens
gaacacactgggttttgttcttcacaaaggaatatcgttgctttctaaagcagaaacttaataaaatctttaaacaatgttaattgtgtccaatacaggaatagtgtgcctccagatcttctgatgaattgagcaatgtttatttaagttagctgcactctctatgagtgaatacacaaatggcttgcccaattgttggtgtatttggtgaaatgaaaatagagcaactgacatcaaactggatgcttccagctcacggccagtatctctggctgtggtccttgctggaatcagtggccacagtacactaagatgtgtatgtgtatgtattactaaacaatggtaattttacaactgaacaatgtactgattctaaragcaacagaagatgaggaggttgaatagctctcctttatcaggtaagaggtacaacaacagaaacacaaaagcccaagtggcctggaaaagattgctttaatatctgatttggacacttggcatttgtcttgtaccttaaagatcaagtgagctttaaaac

SEQ ID NO: 530184 - DNA, 603 bp, Homo sapiens
tgcattttgaagttgcaataagtgtgaggaaaatgtgcttgttagctcagctctagacagatccatggatagaaagacatagacatggatccccatccagctaagtatttgcaatccgcaggtgaagcctggaaacccagagaaatggacctgttccatccgtgacagaagcgctcccaggacctaaattaaagggatgttagaatgttttgagaatcttggcagggccattaggtagtgtttgtagcttttggatgcttttggtggagggaaaatgagatgggctcacttgggaggtctgcctgcagtttccatccaaatttctaatcaacgttgtggttttatcatccatttccggaatcattaccccttaaaatgtgaggaaaacgactctccttttcttcaactccccaacttttccaaataccgctgcgagtttttgttgccaacagcttttcccaatgtgcgtgtacttaccaacgtccagactcctccctcccatcggccagccttgcttggtctagctattattcaaaggggaacatgcgtgagatatcacttygtttttgccatctaatggattccaccccccaaagtatctga

SEQ ID NO: 530185 - DNA, 666 bp, Homo sapiens
aagttaatggttgaaatcaaacaagtaatgacttgggggagatatggaaacatgagctagagtattaaaccaagaatataaaatcctagatccctggactttcatttaaacatggcctatcttgttaacaaataaatgagtaaataagtttgtaaaatggaaattgagagtagaaatgccctactaacttgaaaagttggatttcaagaattatcataaagtctaaatatattttaagtttttctaagtggaatgaagcaataagaatatatttcacagtaaaatccaagtttttgacttttagaaatgtaatttcaggtttgcacccctgaaakaatcaagcattatgcttatttagaactgaaatggtaactacaaaaatctatctcatttaatttcccaccactgcctttaatgacctttagcaacctgagccacaaatctacgaataaaaatgcttctccattaagttagtgcaaatgagggagaaaagacaaaggaaaggagagggaaagaggaagagtcagagctagatgatgagtaggctgttgcagggatcaatgatgctggcataatgaaatgtcttaaagactgccaaaacatcagagaacattatatatagaatgaagatatatgtcattaaagtaaaaaggttagcagagatag

SEQ ID NO: 530186 - DNA, 636 bp, Homo sapiens
ctgctggtccaagccctgcaaatgaagacagacatttataagatctaataagctgaggactgtgtgggcagaggagagcaacaacttctagacaaaccctgccaaaaaaatatgcttgcaaaagttcgtacaaaaaggaggcaggtgtggcttctttaaatttgtttgtcaaaaaaatttatttttagctcctggagcaaatatcagaagtggttaagtaactgtacttgtaatttagcagcacaataagaatcacaagaatatgtggctgttgaactcaccccaggacaccctaaatttactgggtagtggcatcaatgccatgacttgctggtcagagatctctaagtaattctgaaaattaggaatatatatatatatatatatatatatatatatatatawaaaatatattaccgtataagtagaaatatatatatatatatataaaacagtataagtaaaaatgtgatactagagaggagaaagggagtaatttattccacattcagtagtttagtgcctcggtttcattcagtgttctcagaatttaatttaatttaatacaattattaacagttcatcattcaatataaattattttcaaatgaacaaaaccattcacattagtcaggc

SEQ ID NO: 530187 - DNA, 660 bp, Homo sapiens
cagctgaagagaaaattagtgacctataatttcagtacgtaaaaagtatccaggtctaagattaacacatatatttgtggtcccagaaaatgacaagagagaaaaggggcaaaagcaatatttgaagagataatgaccaagattttcaaaaataatgaaatatatcaaaccacaaactcaagaatcattatgagctccaacaatgtcaaagaaatcaatttctaggcatatcataggaaaaccaaagacaaggagaaaatctttaaagcagacagagggtaaaaaaaagacaccttactttcaaagcagcaagaaagtgataatgacaggtgctgtctcaacagaaataatgaaagctacaaagtaaagtttgtcttcaaagtgatgaaataaaatacttgctaacctaaaattctayttgaaataaaaatatacttataaatgaaaacaaagggttttttgaagtaataacaataatagtttcttgccagcagaattgtgtaaatataaatactgaaaggcattctttaagaaggaatataactacagagaaaggcacagacattgaagagtaaagagcaatgaaaaaggtaaatatggggttaaagctaaataaattttgtcttataaaacaataataaaaatgcctagtggacttaa

SEQ ID NO: 530188 - DNA, 645 bp, Homo sapiens
tattataaggacaatcttaacccatcaaaaaaggatgcaattatttccaggttcaggggtcaggaaggtaaatagtatttttgaaaagcttctcatccaaaatggatacatattttaaggggaaaaagtcaggcactaaaagtgttgaacctcagttacccagaaaaatcagttasgtggaacactcacagtatcgtgtggcctaatagatgacccatcatcattgaaataaatcttcataccatactggaatgcacactgaataaattttgttgtgatttacatatctccctgagctatactctgatgagtaaaatttgcagtgaacaggttttcacaactaattatgtaagttatctgaggttacattagatcagaatagcttacattctttcctcctgtgatgaatacaagacgtttctttttttcattttttttcatcatcaggtaaagaaatgtgtgagggaaaatataaagaacaagtctgaaaggtaattttataatgtgtgcctacttctgtactagacttgctgagttatcaatatagcccatggagaagtagatttaaggaaagaacttcagtgccaggagatgtttaatgaaccctatagatgatgagaataagaaataacatttacttcttcc

SEQ ID NO: 530189 - DNA, 645 bp, Homo sapiens
tattataaggacaatcttaacccatcaaaaaaggatgcaattatttccaggttcaggggtcaggaaggtaaatagtatttttgaaaagcttctcatccaaaatggatacatattttaaggggaaaaagtcaggcactaaaagtgttgaacctcagttacccagaaaaatcagttacgtggaacactcacagtatcgtgtggcctaatagatgacccatcatcattgaaataaatcttcataccatactggaatgcacactgaataaattttgttgtgatttacatatctccctgagctatactctgatgagtaaaatttgcagtgaacaggttttcacaactaattatgtaagttatctraggttacattagatcagaatagcttacattctttcctcctgtgatgaatacaagacgtttctttttttcattttttttcatcatcaggtaaagaaatgtgtgagggaaaatataaagaacaagtctgaaaggtaattttataatgtgtgcctacttctgtactagacttgctgagttatcaatatagcccatggagaagtagatttaaggaaagaacttcagtgccaggagatgtttaatgaaccctatagatgatgagaataagaaataacatttacttcttcc

SEQ ID NO: 530190 - DNA, 645 bp, Homo sapiens
tattataaggacaatcttaacccatcaaaaaaggatgcaattatttccaggttcaggggtcaggaaggtaaatagtatttttgaaaagcttctcatccaaaatggatacatattttaaggggaaaaagtcaggcactaaaagtgttgaacctcagttacccagaaaaatcagttacgtggaacactcacagtatcgtgtggcctaatagatgacccatcatcattgaaataaatcttcataccatactggaatgcacactgaataaattttgttgtgatttacatatctccctgagctatactctgatgagtaaaatttgcagtgaacaggttttcacaactaattatgtaagttatctgaggttacattagatcagaatagcttacattctttcctcctgtgatgaatacaagacgtttctttttttcattttttttcatcatcaggtaaagaaatgtgtgagggaaaatataaagaacaagtctgaaaggtaattttataatgtgtgcctacttctgtactagacttgctgagttatcaatayagcccatggagaagtagatttaaggaaagaacttcagtgccaggagatgtttaatgaaccctatagatgatgagaataagaaataacatttacttcttcc

SEQ ID NO: 530191 - DNA, 483 bp, Homo sapiens
tggtgaaagaaaccaaaaaagactgaccttcttcttctggcttaggattcttcatttttgtgtttcactgtgtgatgaaggagagtgtgcgggagcagtggcagatacacctctgctgtgggtggttgcgattggataactcttctggtaagatgtcagtttggatgaagttttgaatattacatgttttacaaaactgatcagattaatttgtctcctaacttgagtacttacagcatatcagcatcaaaacacaggctgtttccatgtcataaaaatgatttgtgcttttgagctgagatgagtgaagtcaagtgaagaatgtgacttgggccatattttaaactagggatgcttttgttttggcccagattccctggattgcttaccytcactgtcacatcagtctcaattcaattaaaagaacactgaatgcgtgcctactgtgttccaggcactgggtctcaggggcttctggctggt

SEQ ID NO: 530192 - DNA, 572 bp, Homo sapiens
gcaaataccatatccaggatattgatgttgtcttaccaagcaatcgacctggaaaaccaacattaaagtgctcatcagttgagaggaactgagccagtggggcaggtagacctgccacaggttctaaaactgaaatctgggtccttccattgtactagtgacagccagaagcttgattctattagcagagagtgaaaaatcatgccctctgtaccaccaggcrttctcaagcttgagaaatagccaaactttcagtgcaagaatatcaaatatgtaaggggtataaatgtgtatgttcacattttatgtcatcttctcttgaaggcctccgagtttgtacataaatatcctctcctaggttaaggttaaggtcaataatgctgcctcttattcacaatgtaggaagaacatatgcactggttgtccaaacagtgctgtcaggatgaattaattcaccccggattttatataaaacagtccaaagaaagcaccatatccttcccttctcttctaattgctttattttttccttcatttgataaaattttcttatgcttctactatgtgcaaag

SEQ ID NO: 530193 - DNA, 522 bp, Homo sapiens
tgaggaaaatttactgataccaagtcacagaaaaaagcccaaggaactcaatttttacgcattcccatccaatttacccttgctgacttttgggggggaagtgtagcttttgaaaccagttgtattatttcactttaagatgccttctagtatattcaatagacccatcagagttatatgttcctttttcagtctcaagctgccctcaccatatgagattggttactgtctgaggactttcagagaaggatttgaatgcaatttcaagggccagacagagcagctttcaaaacactgcaagcctaggaaagcagggttagtggcccaggaggggtgagagactggttttctstttctcatttcacttcaagctaaagcaccttttgatcccaaccaggtgaattggaaacagcatggcgtttctaattgaatgaccccacccatccaagctctgtaaaatggcaattatcagtaactacattattgccagcatcttccgcattagcccatggagactggtga

SEQ ID NO: 530194 - DNA, 644 bp, Homo sapiens
ctgtaaaatacagcaagttcctaagagaaagatgctctctaaaggtatagtattactataaatttcaactacttccccaagcttgaaaatgctgtcctggagagaatgatcacttaacaatcattgactcatttcccaagctcgtaggaaaccagcctaactcccaggcatggtaaatgtaaaggaatggggtaactggggcacagggcagagaaaatactagccaaagggacactaatctatttaccaaatctgtgtcagtcataaatacgggcttataatgacctggtgtaatgataacaaaaaaatggacttaagaaactccattacctatttataagtggaaatccatcgtcttaaaatagtgtattttctggttttcttattgctgctcacaatttagcgtgcggcagtatcagggaractgagtctcttctttagccctggagaagtgtgtcaccccaatctccataagattttcacagtggctatttgaacaaggatagttcccttggagttaatcttttaaactcaaggcaaaaatcccttgagctcatctcatatatatgaggttaaacatctctgaactgttcataatcttggagaactgccatcttttggcctgcagataaatacaacacttc

SEQ ID NO: 530195 - DNA, 656 bp, Homo sapiens
gcagcaccagtggtggtggccaccactccctcggggagctcttttgtcttaggcaatggaggcagtggctgccactcctccctcaaggagctcagatggtttagacagcaggcagcagcagtggtgatggctgcccctccccctgagaactcagtaggcttaggcagattccagcagagaggctgttgagaatctgcrtaggtccgtagttgggacccaaggccccagtggcatgggttcatctgtgggatcttctgatccatgggttgcacagttccatggaagaagcacggttttccaggctgggtagcatgctcacttaccgcctcccttgtctggaggtatgggctcccctgccctgtgtggcttacaggtgggctgacccaccatcctgctcctctccgtaagtcacaccagccacctaatcagttctgatgacagaacctggttatcttggttgctggtgcaggattcacacactgttttggttcttttcggtgagagcctccaatcacactgcatctaagttggccatcttggccccacactccaaatacatttttaaaaaattaccttgctgcatttatattacagagatgacacaatatggttaaaacttatgtacatctctcttaactaaccatctatcatgggac

SEQ ID NO: 530196 - DNA, 656 bp, Homo sapiens
gcagcaccagtggtggtggccaccactccctcggggagctcttttgtcttaggcaatggaggcagtggctgccactcctccctcaaggagctcagatggtttagacagcaggcagcagcagtggtgatggctgcccctccccctgagaactcagtaggcttaggcagattccagcagagaggctgttgagaatctgcgtaggtccgtagttgggacccaaggccccagtggcatgggttcatctgtgggatcttctgatccatgggttgcacagttccatggaagaagcacggttttccaggctgggtagcatgctcacttaccgcctcccttgtctggaggtatgggctcccctgccctgtgtggcttacaggtgggctgacccaccatcctgctcctctccgtaagtcacaccagccacctaatcagttctgatgacagaacctggttatcttggttgctggtgcaggattcacacactgttttggttcttttcggtgagagcctccaatcacactgcatctaagttggccatcttggccccrcactccaaatacatttttaaaaaattaccttgctgcatttatattacagagatgacacaatatggttaaaacttatgtacatctctcttaactaaccatctatcatgggac

SEQ ID NO: 530197 - DNA, 656 bp, Homo sapiens
gcagcaccagtggtggtggccaccactccctcggggagctcttttgtcttaggcaatggaggcagtggctgccactcctccctcaaggagctcagatggtttagacagcaggcagcagcagtggtgatggctgcccctccccctgagaactcagtaggcttaggcagattccagcagagaggctgttgagaatctgcgtaggtccgtagttgggacccaaggccccagtggcatgggttcatctgtgggatcttctgatccatgggttgcacagttccatggaagaagcacggttttccaggctgggtagcatgctcacttaccgcctcccttgtctggaggtatgggctcccctgccctgtgtggcttacaggtgggctgacccaccatcctgctcctctccgtaagtcacaccagccacctaatcagttctgatgacagaacctggttatcttggttgctggtgcaggattcacacactgttttggttcttttcggtgagagcctccaatcacactgcatctaagttggccatcttggccccacwctccaaatacatttttaaaaaattaccttgctgcatttatattacagagatgacacaatatggttaaaacttatgtacatctctcttaactaaccatctatcatgggac

SEQ ID NO: 530198 - DNA, 656 bp, Homo sapiens
gcagcaccagtggtggtggccaccactccctcggggagctcttttgtcttaggcaatggaggcagtggctgccactcctccctcaaggagctcagatggtttagacagcaggcagcagcagtggtgatggctgcccctccccctgagaactcagtaggcttaggcagattccagcagagaggctgttgagaatctgcgtaggtccgtagttgggacccaaggccccagtggcatgggttcatctgtgggatcttctgatccatgggttgcacagttccatggaagaagcacggttttccaggctgggtagcatgctcacttaccgcctcccttgtctggaggtatgggctcccctgccctgtgtggcttacaggtgggctgacccaccatcctgctcctctccgtaagtcacaccagccacctaatcagttctgatgacagaacctggttatcttggttgctggtgcaggattcacacactgttttggttcttttcggtgagagcctccaatcacactgcatctaagttggccatcttggccccacactccaaatacatttttaaaaaattaccttgctgcatttatattacagagatgacacratatggttaaaacttatgtacatctctcttaactaaccatctatcatgggac

SEQ ID NO: 530199 - DNA, 414 bp, Homo sapiens
atactcactgccagggttcttggcttcattcttgaagtcagtgagaccaagaacccaccaattccggacacatcctgaccctgtgatccgcctgcctctgcctcccaaagtgctgggattataggggtgagtcaccgctcctggctttctaacctattaatttgaacacttgctcatcaactttaacaaatctttttacttgtgatagtcaagcctctttgaaagtcccaagttcctgtaggcctgtaagggtcagctcctccaccttattgctggcccaaaacttaattcactctatacaatgagcatgttggcatttctttgccctgttgactgttttgtcttttactacttcttacttacatttgaagggaagygctacaaaaatattttttacatgctgaagggacagaa

SEQ ID NO: 530200 - DNA, 444 bp, Homo sapiens
agtcaagggaggtttgtagattttttactggattttttactggattttttaaggtaagagagacctgagcatgcttatggctgtggaaaagtagagaagaggctgaagagaccaggaattatcaatcaagtgacccatcgaggtagaaaaaccctggattggcagattactcaagcttttcatgtacacatgaatcatctggggatcttgttaaaattcagattctcattcagtaggtctagggcgaggcctgagagtttccattctaagaagcttccaggtgatgctgatgcttcttgtcgatgaaccgcactttgggaagcaaggcactggagctctgaattgcatttgtgtgtycatttgtccatctccgtccctagaccctgaagcaggatccttccagataatccctactgtcgaacacagcacatgtcatataaaagt

SEQ ID NO: 530201 - DNA, 536 bp, Homo sapiens
agctaggggaccaggaggcgattgctagggtataagcgacgttgctgtacccctgaagatggctgcctgggtctagcttctctccagtccgtagtattgcccaaaaagtgtggccccatcatgcacggcttctctcctttcccttctgctcccccacctcctcacacttccccccaccaaccctccaagtctccagccaggcccccgtagttcctagagttagcttgaatttgattctgagcttcctgatggtcaaagcaaaatgggaaatgcaatcagttgtgttcttctcattgtccaccagtggaggagagtccagttcctyaatggaagccatttttttttcctgacatttagagtggaaggaaattttcacatgggttttcagtgggtagaccagtgaggcaatggtcacggtcctcaacagcacatttagaggccctgcagtaggttgtatagagcttgtcttatggatgagtatgacgcccacatgctaatcagtgcatttctgcaggggcagggctactgtgaccatg

SEQ ID NO: 530202 - DNA, 614 bp, Homo sapiens
cctgcaaaaaactagaaacctggaagggctgcacattccatgaaatgggcactaggtaagttttacccacaagctgaaggaggcagtagggaaacttgattctacatgggactcagacaaaaacaaaatatttctaaaaaattcaaggatrgaaataatataaaaactggaggcatattagtgaaatcactgagatgcctcgcagatgcatataaaaaaactttcatctggctccttccacaatttagtatgtacaacatgcctacagaataaataataactactaaataagctcacaatttaaaaatgtcaaaccacccaagaaaatgagggaaagttaggagacataacgggcaaaatgagtattccaagaatccaagatagcagacaatttgaaagagactagaaaatgattaaagagatgaaaaagactagaaaccattataaaagaataaaatgccatgacaaaagaaggaacagactagaaagagaatcaaataaattttctagaaataaaaattatgatgtgagaattaattaaaaattcaactgatggattaaataccagataagacatagctgaatagaaaattactgatttgggaggagacaaa

SEQ ID NO: 530203 - DNA, 614 bp, Homo sapiens
cctgcaaaaaactagaaacctggaagggctgcacattccatgaaatgggcactaggtaagttttacccacaagctgaaggaggcagtagggaaacttgattctacatgggactcagacaaaaacaaaatatttctaaaaaattcaaggatggaaataatataaaaactggaggcatattagtgaaatcactgagatgcctcgcagatgcatataaaaaaactttcatctggctccttccacaatttagtatgtacaacatgcctacagaataaataataactactaaataagctcacaatttaaaaatgtcaaaccacccaagaaaatgagggaaagttaggagacataacgrgcaaaatgagtattccaagaatccaagatagcagacaatttgaaagagactagaaaatgattaaagagatgaaaaagactagaaaccattataaaagaataaaatgccatgacaaaagaaggaacagactagaaagagaatcaaataaattttctagaaataaaaattatgatgtgagaattaattaaaaattcaactgatggattaaataccagataagacatagctgaatagaaaattactgatttgggaggagacaaa

SEQ ID NO: 530204 - DNA, 614 bp, Homo sapiens
cctgcaaaaaactagaaacctggaagggctgcacattccatgaaatgggcactaggtaagttttacccacaagctgaaggaggcagtagggaaacttgattctacatgggactcagacaaaaacaaaatatttctaaaaaattcaaggatggaaataatataaaaactggaggcatattagtgaaatcactgagatgcctcgcagatgcatataaaaaaactttcatctggctccttccacaatttagtatgtacaacatgcctacagaataaataataactactaaataagctcacaatttaaaaatgtcaaaccacccaagaaaatgagggaaagttaggagacataacgggsaaaatgagtattccaagaatccaagatagcagacaatttgaaagagactagaaaatgattaaagagatgaaaaagactagaaaccattataaaagaataaaatgccatgacaaaagaaggaacagactagaaagagaatcaaataaattttctagaaataaaaattatgatgtgagaattaattaaaaattcaactgatggattaaataccagataagacatagctgaatagaaaattactgatttgggaggagacaaa

SEQ ID NO: 530205 - DNA, 557 bp, Homo sapiens
ttccagagcaggtgcaagaccttggcttctctggaagcactctcggttctgaggcccaaagctgttttcttgcacaatgtaggcctgctctggggccccaacttgctagcaatggggagtggggggtacagtagatcctggaaggtggctgaggtagtagaggctcagatcaagtcccacttcgtcaccttcctcctggcccagtcagtttcttcttcctgttaccgctccctgcctccgtccccctaccactgcttccccccaccactgcttcagagccrgatagcttctttggagaggagcagggacttccaggaaatgggcttctgagtttggaggagtccccacccactattccaggctcatcattttcatcagcacgataacctcctgctctcttcctgagcggttcccctaggtatctttaccagttataaaacactcatagccagggtcctacctgacggtggcctaaaccttcagcttcacccattttgcagaatatgatattgaggtcagagagacaaaaggactgactcaagaagttcacattggca

SEQ ID NO: 530206 - DNA, 592 bp, Homo sapiens
cttaatgatttataacaattgataatgctttcccagtgatatttataactattttaaaagaaaatgaggaaaacataattttctttgcttttttacatacaaatttaatagtcagacaatgatttgaaaagtaaggattttaagctgaactacagtgacttttttgccatatatttatttgtaactatatttatgtctggtatatccatatattgacatawccagcaatatctctgtagacacatacacacagagaaagtgacatacacaaaaatataaacattaggtcagatgccagcttacttccaggtgaccaaaaagagaacctcactcccagaactggacattttattatgacccactcttctcccaaatgccatgagttttctggttgtccaatatgcttcgagtttgcttagttaaaataagtggtttgaatattagggaaaacaaacaaacaatctgaatgtatttgagggaacacttaagctgactgattagaaaagggcaagaggctccttgctgagctcaagtagccaggctccagatggcctgtgtgtgtgtggtgagactatagggtgaacagaaaaga

SEQ ID NO: 530207 - DNA, 629 bp, Homo sapiens
gagaggcccctgctgatggactggtctctccctaggaatctggggccagaagttaatgtgaaacttgcacaaaagttgccccccacctcccatccaattcttattcttaggaactttgagacctagcctcagtcacaataagtcaccaaccactgcccctatttctgggcgggggaaatctagactttaagtaagtaaacccaaggctaagttctggtgccgctgtttattagctagatgactttgaatcactttccctgtggagcctcagtttcctyatttgataaatggggataaataatagcactctgggctgttgcaatcatcaaatgaaaagtactgcattcatgtgaagtaatattattgctcttcattgtttattagtgcgaagcagattagttatagggtttgaggcttttagtctctgggttcaaatcaccactctgtctcttttattttttatttttatttttgagacagggtcttgctctgctgcccaggctggagtacagtggcacaatcatagctcactacaacctcgacttcctgggctcaagtgatcctcttgcctcagcctcccaagtagctgggattataggcttgtgccaccacacctggctaattttttt

SEQ ID NO: 530208 - DNA, 557 bp, Homo sapiens
tttaatttattttcatgtaattttatggctttcaacacttccttattctgtcgttaaattctcagtttttatagtttaatggtatattctctgtagtgcaggcattatatagctctttttctgtagctattcatctatattcataatacttataattaggaaattgttagaagacgttttcagtatgaagggaatcaagttgaaaattatgtaggaataagaagggagagaccaaaaattggatgaaatgagtcacttatcaagaagagtaaaacagtgtttccaaactataatgtgatcagaaagaaccataatctttggaaactatgaaattaatattgttaaagaaatttttgatcctccaaattttaaaatgtccaggaaaacagatactgtgatgaaaaacataataaggtcattaagtttgggttaattggtgtcttagctactgacatgattaatgcaagggattctgaaagtcatacaaaattatacaatatagaagaaarcaatttattttacagagaatctttttattcaatagtttttaattctcc

SEQ ID NO: 530209 - DNA, 624 bp, Homo sapiens
acaggttgaaaaagttcaagtagaggatgaaaacctgattgtgaacattagtgttatttatagagtgctatgtcatgcagaatagaggttaggaaggggagtttcaaagaaacatggcagatgttactattaatataaacaagattgtaattcttaagtaaataatttgtttccaagactaggaaaatagataaaaatgaaataaatacatggattttatcattattctttccttgctattaacattcattggtagatcagtaggtatttggtctttattcaaagaatatatgtgcattgtgtgcaaacttacacatacacattgattttctagcaactggtagagtctgataacactaagtacarcaatctaaatggacatcattgatgtaaaaagttagaaaaagagttctataaaggactgagctctactaggggaaatatgtcactacaagaacttgcttaaccttctgtttctgttttctattgctgcataatgaaccaccccaaaatttagtagcctaaaacaataactattttattgctatcattctgagtgaggaatcatggctgggagcagtggggactggctcatttctgcttcacatggtgtgaaccaaagca

SEQ ID NO: 530210 - DNA, 624 bp, Homo sapiens
acaggttgaaaaagttcaagtagaggatgaaaacctgattgtgaacattagtgttatttatagagtgctatgtcatgcagaatagaggttaggaaggggagtttcaaagaaacatggcagatgttactattaatataaacaagattgtaattcttaagtaaataatttgtttccaagactaggaaaatagataaaaatgaaataaatacatggattttatcattattctttccttgctattaacattcattggtagatcagtaggtatttggtctttattcaaagaatatatgtgcattgtgtgcaaacttacacatacacattgattttctagcaactggtagagtctgataacactaagtacagcaatctaaatggacatcattgatgtaaaaagttagaaaaagagttctataaaggactgagctctactaggggaaatatgtcactacaagaacttgcttaaccttctgtttctgttttctattgctgcataatgaaccaccccaaaatttagtagcctaaaacaataackattttattgctatcattctgagtgaggaatcatggctgggagcagtggggactggctcatttctgcttcacatggtgtgaaccaaagca

SEQ ID NO: 530211 - DNA, 617 bp, Homo sapiens
tttataaagtcaggtattttcttgaaaattattgcatttgagagggggcaagaagtgaatgagtatatagatgaaacaatattgtccaaaactttataattgttgagtctggatcatgacataattgtggatcatggatrtgtgtgggcttaaagagcaggctttcttaccccttactgtgaaaacagtgaatctccaagctcagtgttccctggctgcaacataaatccattgtatgtgttgcatccttctgggtccctctgcatcatcctggtgggactttgaacaaggagaccagatgcaacatgatacttatgctacttgctgtgtcatgagtaatgatgggactcatatgacccaggagtcttgtgtcttctgccaatatccataaaatagtacaggctcttattagattacaagtagagtaaaatcccaaactctgacaggtatctgtgttttggttttggctatggtgtttggttgaaatcacaaggcacaaatttggccatgtagttttgttattacattgaggaaaaaatcagcttgtcatgtatctgcaccaaattttaccaacctggaaatttagaactttactatttagtgaattaaaaattttt

SEQ ID NO: 530212 - DNA, 571 bp, Homo sapiens
taatggtgcctccttacctttggtaaaaattcaaactttgcagcaacctggaccttgctccatcccttgtttcttagctctccccaacatgtaccctgtactttatccacgtgcaacactttatgattcccacaatgtcacacttttgtgcctttaatgtattgtttcatctgccagcttattctttcagtgactctgtacctctgtgtaattctggaaggcttgtgcatggtgtcacctgtccctagagtcctttctctccccctctgatgctctgatgctggattaggtgcttttccctggtggttctttatcagccttcatccaccacacctgtagcatgggctgcatgatgttctgatttctcctacacagtctccattctcagtctgagcatctgaaggaggatggggactttatcccttcatcycaggtctgtaaatgtcgtgtgtatgaatgaatccacaccagtcccttcccatagacaacatagaaaggcccaggtcccagaagtatcaaggtctaatgctgctttagtatttgtcactccttcaacccagtgaaatagagc

SEQ ID NO: 530213 - DNA, 483 bp, Homo sapiens
gctgtgctctggtggggggcagaggcagaaggaccttcatttgaagtaamagtattgttttagcagccttacctgctagaaggctctgctgctataagaagaaccatgaagattctgccagagacctgttgagctctgaggaatgcctcatcatattccacaccgatttcagttacttgtatatgctggacttcctcagtttattgaaaggtcctaggaactatacccaactaactttgtatcatgctttacaatttatactgcattttcacatacatgtcatttaataggaagggagaggtgtaagagaaaaagttaagcataacgcttctcaaaccttggggtacattgaaacatgcgtgcctgtgttgtgctcttaggaggctgagtttgatgagggtggtcaaaagaccatgctttgagaacaccaatggtagttctccgaatctgggtgtttctcacattaccatagggcactgataa

SEQ ID NO: 530214 - DNA, 483 bp, Homo sapiens
gctgtgctctggtggggggcagaggcagaaggaccttcatttgaagtaacrgtattgttttagcagccttacctgctagaaggctctgctgctataagaagaaccatgaagattctgccagagacctgttgagctctgaggaatgcctcatcatattccacaccgatttcagttacttgtatatgctggacttcctcagtttattgaaaggtcctaggaactatacccaactaactttgtatcatgctttacaatttatactgcattttcacatacatgtcatttaataggaagggagaggtgtaagagaaaaagttaagcataacgcttctcaaaccttggggtacattgaaacatgcgtgcctgtgttgtgctcttaggaggctgagtttgatgagggtggtcaaaagaccatgctttgagaacaccaatggtagttctccgaatctgggtgtttctcacattaccatagggcactgataa

SEQ ID NO: 530215 - DNA, 605 bp, Homo sapiens
cttggtaattgggggacaagagtgtgacagaaggatagattacaagggcacatgaggaaacttttagggtgatggatactcccattacctcattacctttgttgtgatgacgctttcacgggtatgtgcactttttttttttttttgagacagagtctcactctgccacccagcctggagtgcagtggtgcaatctcagctactgtaacctttgcctcctgggttcaagtgattctcctgtctcagcctcctgagtagctggaattacaggtgcacaccaccaagcccgtttaatttttgtatttttagtagagatgggttcactatgttggccaggctggtctcgaactcctggcctcaagtgatacacctgactcagcctcccaaactgttaggattacmggcgtgagcaatcacgcccagccacatgctgaaactcatacaattatagtttcaatgtatacggcatattgtgcattaattgtcatccaatacaactgttaaaaacagagtcccaaaatattttttagtatttatgaagcaaaaaattatttttacaggcttattagtcattaagatttcttcttatgtaaaatttctgatga

SEQ ID NO: 530216 - DNA, 494 bp, Homo sapiens
cactaccttacttagctcatgtctcatcattttattcagaattactaggtaatcttaaataatagctctacccctagtattgctcatctcaaattctccctcatggaatatctttcatatcaatgtgatgtgatcacatcacagtcctgtaaaaaaaaaatcactacttttccctcagcataggattttgtccactttcttcatatggtacataaagctccttccagtatagccctacctaacatttcccgttttatctcccaccactccactcttcatactcttcacccctagtgctacttactactcaactgaactaattactgcttccagaacccacaatgcccataggcctttgcttccactgatcttattttctagaatgccctcttgctttgctatctggtaatttaccyttactcatcagaaccacctaaattgggaagggaagtttgcccagaccaagagatgctatgtagaccagaaagaaatat

SEQ ID NO: 530217 - DNA, 338 bp, Homo sapiens
caatttcactcactgcatctgtcatagccattggtgtgcctgtgtgttgaatgtctactaccacccaagacagcaaagtccactagggcagggacagtgtgtctgtgtgtccatggctacagatgcartgtggaacacatggaagccctaaataaatacctgttccatggatggatggatggatggatggatggatggatggatggatggacagacagacagatggacaaacgaatggatggatgagagtcagacagatgagtgaagagaaggacaaggctcaggctgcagcccagagaggcggtgggctgggctcacctggacaggggtacctccca

SEQ ID NO: 530218 - DNA, 475 bp, Homo sapiens
cattttctaaaattgcttttttactttaaaagcaaaagttactataaaaattagaaatkatagctcaacaaacagaaacattatctatactttatctctggatgttttttgccttgatatacgtcttttaaaccttttctagcctgtattttttcaataatgaaagaatggtatacacagtgatttaaaatcttctccctcccatccatgttatgaacattttttcatatcagcacatattctttatcattattaaagattaattaattaattccattttatatgatgaaatctgttgtgtccaaatttctcacttagaaactgctgcattgaatatatatttagcagtgtttctgtacctgcttatttcctgtgtaagttaatttttctgaaaagatgaaattatacaactcttaaaattctctcattctgaaggtatcttttgttactactcctaataactaccatttatgaa

SEQ ID NO: 530219 - DNA, 569 bp, Homo sapiens
aacagccatgaggcaggcgggagcgagagggctccgagaagcttcagttcccccaattttgcaggcttcagggacccctgggggttctccactcctgggaggagagggtctctgcgtccttaaatggctgtgcatttagctctgaaggtgggacccctgaggacgcaggcaggctgagctgatggcttttctgtttgtgacacgagagattygagtatatgtgaatgtatctctccctgggggagctctttgcaggtggggggtggtggaggtggcagggagggttggtgcttggtttctccccctgccagaaaaacccaaaagctctacccagcaatctttgtccctggctgcctcagtttcccaacttggtgctctacccactagagtttataggaggcataactgtggtttgggaatctcggatcaaggggaagatgacaggtaaccagggcttgctctctgtactgggatggaaaagctctggccccaccattaccacctgtgacaatggcctactatgtgcagggaagtcatctcttcaattgttcaacaagtgtttgctgagc

SEQ ID NO: 530220 - DNA, 569 bp, Homo sapiens
aacagccatgaggcaggcgggagcgagagggctccgagaagcttcagttcccccaattttgcaggcttcagggacccctgggggttctccactcctgggaggagagggtctctgcgtccttaaatggctgtgcatttagctctgaaggtgggacccctgaggacgcaggcaggctgagctgatggcttttctgtttgtgacacgagagatttgagtatatgtgaatgtatctctccctgggggagctctttgcaggtggggggtggtggaggtggcagggagggttggtgcttggtttctccccctgccagaaaaacccaaaagctctacccagcaatctttgtccctggctgcctcagtttcccaacttggtgctctacccactagagtttataggaggcataactgtggtttgggaayctcggatcaaggggaagatgacaggtaaccagggcttgctctctgtactgggatggaaaagctctggccccaccattaccacctgtgacaatggcctactatgtgcagggaagtcatctcttcaattgttcaacaagtgtttgctgagc

SEQ ID NO: 530221 - DNA, 588 bp, Homo sapiens
agactagagtgtggtgggaaaaagagaggccccttccggtgccctttggagcatatcttctggatggcatgcctctggtgtggctgctgtcagccagcagtatcttatctatctgtctrtctatctatctatctatctatctatctatctatctatttatttttgagatagggtctagctctgtcacccaggctggagtgcagtggtgtgatctcggctcactgcaacctccgcctcctgggttcaagcacctgccaccacacccagctaatttttgtatttttagtagagacggggtttcaccatgttggctaggctagtcttgaactcctgacttcaagtgatctgacctctttggcctcccaaagcattgggattacaggcgtgagccactgtgctcagccttattaatttatatctaatagattttacacaggatttgagttggctaataggtggtgccgagtaaagtcttaagaaatagtataaagtaagaataagggtaaatataaagtaaatgaaatgttgagactacgggaaagagccaaccacaggtattgaggctgtatgacttggcatagttgttgc

SEQ ID NO: 530222 - DNA, 644 bp, Homo sapiens
cacattgaatttgcctgatgttttctcaatatttgattaaggttatgcattattgggaagaatgccacagagatgatgtgtacttctcagtgcatggtatcaggaggtacctgatgttaacatgtgtttttactggtgatgttaatcttggtatcttggttaaagtgctatctgtcatgtttctccactatagagttattatttttccctttgtaataaaaaaaatgccttggaaaggaggggttactttgcaaatttcctgtttctccttaaacttttgcacactaattttagctcttgcctgcaataattattattgtgtatgctgattttctatttccstcattccttctacatttattaattaaaattcttctgtatggaagagctgacccaagttttccctttattttttgtttaattaattatttagattaggatggactcatggatatttatttcattctatgggttataatccaatactattgttattttgtgacaccagttgttccttaatgtcttgccttatggaagccactgaccctctctgggccttagtttcccccttccttaaaggcttttcagcaagacgaggctataatgaagaacactcatggtacatgatagatgctcaactaaat

SEQ ID NO: 530223 - DNA, 644 bp, Homo sapiens
cacattgaatttgcctgatgttttctcaatatttgattaaggttatgcattattgggaagaatgccacagagatgatgtgtacttctcagtgcatggtatcaggaggtacctgatgttaacatgtgtttttactggtgatgttaatcttggtatcttggttaaagtgctatctgtcatgtttctccactatagagttattatttttccctttgtaataaaaaaaatgccttggaaaggaggggttactttgcaaatttcctgtttctccttaaacttttgcacactaattttagctcttgcctgcaataattattattgtgtatgctgattttctatttccgtcattccttctacatttattaattaaaattcttctgtatggaagagctgacccaagttttccctttattttttgtttaattaattatttakattaggatggactcatggatatttatttcattctatgggttataatccaatactattgttattttgtgacaccagttgttccttaatgtcttgccttatggaagccactgaccctctctgggccttagtttcccccttccttaaaggcttttcagcaagacgaggctataatgaagaacactcatggtacatgatagatgctcaactaaat

SEQ ID NO: 530224 - DNA, 379 bp, Homo sapiens
cataaagattttggtagaactagaacccactatctagttaacgtactgtcctctcaaacaagtgagtgtagacaaaagtgcatggctttaaaagtcaattcaacagctcaagttaaacacagagacaagaatatcaatgtgatagatgttcactctctgtgtagcattaaaagcaggtttcggcagtatcccagcagccccaaatctcygttaactggaatttccataaaagatgctcataattcttcaagatttcatggtgccttctggatcattacagaaaagataaaatgacagttggtgcagtttttttcaaaaaattattttagctgggcatggtggctcacgcctataattccagcactttgggaggccgagg

SEQ ID NO: 530225 - DNA, 379 bp, Homo sapiens
cataaagattttggtagaactagaacccactatctagttaacgtactgtcctctcaaacaagtgagtgtagacaaaagtgcatggctttaaaagtcaattcaacagctcaagttaaacacagagacaagaatatcaatgtgatagatgttcactctctgtgtagcattaaaagcaggtttcggcagtatcccagcagccccaaatctccgttaactggaatttccataaaagatgctcataattcttcaagatttcatggtgccttctggatcattacagaaaagataaaatgacagttggtgcagttttyttcaaaaaattattttagctgggcatggtggctcacgcctataattccagcactttgggaggccgagg

SEQ ID NO: 530226 - DNA, 405 bp, Homo sapiens
attgtgcaaactggcttttccctccagcaatttcgagtgrctgtctattttgtatagcgaaaggaggtttttgtagtggatgacaaatcttgagctaaaaaagaaacatagtatgactcaaacagtgagctgagtttacatagaaattataggcctgtgctgctgtttggtaagattttggaactaattactaggtattcccaaaacaacacttctctgggcatcacgtgcatttctgaaaatttcctgagggtgattgctggccaagagcatttcctgcatgaaaatccgaacagtttcttttttattgttacactctgatgcaagatttctaagaatctttctgtgaatcaaagacttcactagaaataatgctgtgtggagtccctttactacctagggacc

SEQ ID NO: 530227 - DNA, 368 bp, Homo sapiens
agagtgtgccaactaaaatcaatccctttgctctcactgatatctgcttcctccaaactgaagctcagcctgtcctgtgtgttgccctccagccctcctgaatctcttgagtccgggctccaaggcctggttcacaagccccctgagcaagccttccttgatacttcttgcaggccaagattgcattgtgatttcaaacactcacaagcctgctccctttctagctctagctggaaacgtgtattagtaattgacaaaaaaaataacaaaatattaaatacataaatgaatgataaaggcatgtcttctaaacaagacaaagatctctctttaggccagaaagtaggrcagaaacacaaagcatggag

SEQ ID NO: 530228 - DNA, 602 bp, Homo sapiens
gttgtccattaacataattgtctactcattaatacacatgtgtggtcctggctttcatgcattaattattaaaaatttttcaagcaatcttcctgagtataaactaaagtgaaatttgtgttctatattaagattcaaaaatatgcaaatctcaagggatcccaggtctgagagctacataatttatatgaagacacaaacactttggatataattattctgctgcccatagttatttcagactaaattaatttaggcagatccagaaacctttttagcatctcagtagggaggatggcctacaattccttaagtttcatgtatcactcttgtataactaattattatcagcatccttattatcaatgatagaatgatgaaagctaaytgattaatagagtatttgagcatcagtaaacataggaaagccccctcatttttcttaagttattatttaattaagcagtgaacatgaaattcaaccccacaatacatctgcttttattttgatggagatgaaaggtgtttataagcacctttgcgaaaagattctcaattagactgttcgcctcaaaagattccataggattatctctgaagaa

SEQ ID NO: 530229 - DNA, 602 bp, Homo sapiens
gttgtccattaacataattgtctactcattaatacacatgtgtggtcctggctttcatgcattaattattaaaaatttttcaagcaatcttcctgagtataaactaaagtgaaatttgtgttctatattaagattcaaaaatatgcaaatctcaagggatcccaggtctgagagctacataatttatatgaagacacaaacactttggatataattattctgctgcccatagttatttcagactaaattaatttaggcagatccagaaacctttttagcatctcagtagggaggatggcctacaattccttaagtttcatgtatcactcttgtataactaattattatcagcatccttattatcaatgatagaatgatgaaagctaattgmttaatagagtatttgagcatcagtaaacataggaaagccccctcatttttcttaagttattatttaattaagcagtgaacatgaaattcaaccccacaatacatctgcttttattttgatggagatgaaaggtgtttataagcacctttgcgaaaagattctcaattagactgttcgcctcaaaagattccataggattatctctgaagaa

SEQ ID NO: 530230 - DNA, 602 bp, Homo sapiens
gttgtccattaacataattgtctactcattaatacacatgtgtggtcctggctttcatgcattaattattaaaaatttttcaagcaatcttcctgagtataaactaaagtgaaatttgtgttctatattaagattcaaaaatatgcaaatctcaagggatcccaggtctgagagctacataatttatatgaagacacaaacactttggatataattattctgctgcccatagttatttcagactaaattaatttaggcagatccagaaacctttttagcatctcagtagggaggatggcctacaattccttaagtttcatgtatcactcttgtataactaattattatcagcatccttattatcaatgatagaatgatgaaagctaattgattaatagagtatttgagcatcagtaaacataggaaagccccctcatttttcttaagttattatttaattaagcrgtgaacatgaaattcaaccccacaatacatctgcttttattttgatggagatgaaaggtgtttataagcacctttgcgaaaagattctcaattagactgttcgcctcaaaagattccataggattatctctgaagaa

SEQ ID NO: 530231 - DNA, 532 bp, Homo sapiens
aagaaagatacaatttaggtcaatcaaaaatgtgtatgcagccaggtgcagtgactcaagcctgtaatcccagcattttgggaggccggggtggatggatcacttcagctcaagagttcaagaccagcctggccaacatggtgaaaccctgtgtctattaaaaatacagaaattagcggtgcttggtggcacatgcctgtaatcccagctgctccagaggctgaggcrgtagaatcgcttgaacccggaaggcagaggttgcagtgagctgagatcatgccactgcactccagcatgggtaacagagtgagacgctgtttcaaaaacaaaaaacaaacaaaaaggtgttttggggggtggtggtgaaggaatgtagcttaagtttggaaataggctgtgttttcaaaaacacgaagccacaggcatcctcaagcaatgttgatgggagtagaagtgtgtatacaattagcggtagacacttgttttgaggacacgtttttaagaaagaaaaaaatgttgactttcccttctt

SEQ ID NO: 530232 - DNA, 532 bp, Homo sapiens
aagaaagatacaatttaggtcaatcaaaaatgtgtatgcagccaggtgcagtgactcaagcctgtaatcccagcattttgggaggccggggtggatggatcacttcagctcaagagttcaagaccagcctggccaacatggtgaaaccctgtgtctattaaaaatacagaaattagcggtgcttggtggcacatgcctgtaatcccagctgctccagaggctgaggcggtagaatcgcttgaacccggaaggcagaggttgcagtgagctgagatcatgccactgcactccagcatgggtaacagagtgagackctgtttcaaaaacaaaaaacaaacaaaaaggtgttttggggggtggtggtgaaggaatgtagcttaagtttggaaataggctgtgttttcaaaaacacgaagccacaggcatcctcaagcaatgttgatgggagtagaagtgtgtatacaattagcggtagacacttgttttgaggacacgtttttaagaaagaaaaaaatgttgactttcccttctt

SEQ ID NO: 530233 - DNA, 549 bp, Homo sapiens
acaggaaggccctggcttcctgaggctgtaggaataactaagtgttagagccccgtattgccaaatgtgctaatagattatttgtaggcttgagctggctttgttctgcccattaatatgttaagtctttcttttaagcttgtgtgatgttggcatggttctttaatgagattttaactagatttcctttactatctgcaaagactagaagagattttttttaatgttgaagaagagtgatctctaacttcaatgccgttaaccaatatttcctttaatgctatttgtcaatcagatktcttgtccagtaacaaactatagtatttgtgtccactctgcaccgatgggatatgaagcatatgtatttacaaggttcaagagagataggttaaggcgataggcttgaaaattttataatgaatagttttttggggggtaggcaaaagtttgcgggaggaaagtatacataatttgaaggtatcaccttactttgtaattcatagaaattgtttgagatgaatacaaacctcggtcctcaaaaagtatgtg

SEQ ID NO: 530234 - DNA, 549 bp, Homo sapiens
acaggaaggccctggcttcctgaggctgtaggaataactaagtgttagagccccgtattgccaaatgtgctaatagattatttgtaggcttgagctggctttgttctgcccattaatatgttaagtctttcttttaagcttgtgtgatgttggcatggttctttaatgagattttaactagatttcctttactatctgcaaagactagaagagattttttttaatgttgaagaagagtgatctctaacttcaatgccgttaaccaatatttcctttaatgctatttgtcaatcagatgtcttgtccagtaacaaactatagtatttgtgtccactctgcaccgatgggatatgaagcatatgtatttacaaggttcaagagagataggttaaggckataggcttgaaaattttataatgaatagttttttggggggtaggcaaaagtttgcgggaggaaagtatacataatttgaaggtatcaccttactttgtaattcatagaaattgtttgagatgaatacaaacctcggtcctcaaaaagtatgtg

SEQ ID NO: 530235 - DNA, 581 bp, Homo sapiens
agcttaaaaggtcattatctgttctctgaagggaaacttttatcccgggttgattagttttatcctgggttgataagtgtttatgcaaaagaagtaggggtaggaaaaacctggtactcactgaactcctacttcttgccctttatgtatattttcttggttaaatgtacacagtattatccccaacttgctaaataagaaacataaagcagagagaattgaaattacttaatgcaacaactttgctcaaacatttaccaagaccctactaaaccaggggactattctagatgcttggaattgcagcagtgaacaaaatgaagtcctagtcctcaaatctcttctacyttaggaagacacagagagtaaacaaagatgaaaatcaacatataatatgtctgatggtaataagtgttatgcagaaaaagaaagctaaggaagaagatagagaaagctcctgggtgaggtgaggtaggtgccaagaagaaagagtcggactagagccaggtctgtctgcctctagaactcacggtttttccactggtcccatgctgcttccgatcctctttggtgatggtttc

SEQ ID NO: 530236 - DNA, 601 bp, Homo sapiens
cttcagggcaaaatcttttggggtgtcataaaatgagattgataattggcttctgatgaatattcattgtgactaatgactttgggcaaattttacacatactatctttccattctctcactgagtgagattttgatagaatcatttccttcaacttgcacttcaattatatatttacaatatccctttgttgactacactccaaattacatactttcattacttttaaagtttgtattctgtaaggaatgaacataggcctttaggacttttatttttagaaacagagtttagagttattttaaaaataagtggcaagtgatactttatagaacagagtgcattatttctgattgagtatagatatatagtaagtcttgtaatcaactgactgtccttaagtaatgatgcacatagtttatgtyatttagtattttggaaaagagccaaataattccgttttgtttgtttgttttcttaatcaaatgagtaatgcattttaccccgattgcagaaatttggcccttagaaaacccactaatgaaatgagcaaacaccttaaaagcttgattttttgtttttttgtgaaggataagtaatt

SEQ ID NO: 530237 - DNA, 601 bp, Homo sapiens
cttcagggcaaaatcttttggggtgtcataaaatgagattgataattggcttctgatgaatattcattgtgactaatgactttgggcaaattttacacatactatctttccattctctcactgagtgagattttgatagaatcatttccttcaacttgcacttcaattatatatttacaatatccctttgttgactacactccaaattacatactttcattacttttaaagtttgtattctgtaaggaatgaacataggcctttaggacttttatttttagaaacagagtttagagttattttaaaaataagtggcaagtgatactttatagaacagagtgcattatttctgattgagtatagatatatagtaagtcttgtaatcaactgactgtccttaagtaatgatgcacatagtttatgtcatttagtattttggaaaagagccaaataattccgttttgtttgtttgttttcktaatcaaatgagtaatgcattttaccccgattgcagaaatttggcccttagaaaacccactaatgaaatgagcaaacaccttaaaagcttgattttttgtttttttgtgaaggataagtaatt

SEQ ID NO: 530238 - DNA, 545 bp, Homo sapiens
tatttacatcaacagatgccaaatttttaattattacttctgtaaggacactttgtctctttgtttccattcccactgccacacactagtttagacttttctgcttgaatctgtcttaatcatcttctaattcttctcctggtcttcacttctggatgttttgatcatgttattaactaattaatcactcttaatcataactctcatactcaaatccttaattgtctatccatcaccagtttagctccagtgagcatataatttattatccaaataagtacatttttcagagtaaaaaggacactattattaattacattgggwcaacacatatgaactggaattgtccaagcaaaccaaaatgcatggtcattttaacttccacaaggactgttgattgcttactcaataatcattcctcccttctttctgaaacacacacacacacacacacacacacacacacacacacaaaacaaacaaaaaaaaacagtttttttaagcatttactcctcctaaaaatgatttagtgatataaattgaat

SEQ ID NO: 530239 - DNA, 478 bp, Homo sapiens
cgtgatctacttgctttccatagcaatttctaccacacagtataatttactcacttgttatgtttattgttttctgtctataccatctactgccactataatgtaagttccaatagggcaggaaattcgtatattttgttcactgatatatcctrggtgcctagaagagtgtcagacacttcaaagttgtttgataaacatttgttgaacaaaataatgaacttgagcattaagctcttcaattagtagatggttatctataagtttaatgagatgaagaatctaaaaagagaagaaagaatgagaaagaaaatgaatgaatgcagtttggtgcccagttgaatccactggatccctatgagacatcagtcatgtttctgtacactggaaaagaaagaagggcaaggaatctatgttttgttggcactctgtttttgctgtttaactttatattcagcatcatgcatttggtacgttt

SEQ ID NO: 530240 - DNA, 562 bp, Homo sapiens
tgagtagggataacagctcaggtaaactataaggactagagctttatatctggaatcttacgtttattaatattggttaaattcatgggtataaatgaggttaaaagatatgtgggacatttctataaattaytctttctctttcttctttgccattttatatctttggtttttgtaaagcctaattcatttcccatatatccaactctattgaatatctttctaactggaagcccttataggcacctcaaaaacagaatatataaaattgaactcctacttctaacaaatccaatccttctattctgttctttcctttcaagaaaaataaaaagtatcctttcagtggcagaattttagtcatttagaatcctgccttttttcaggattccatatccactcagttattttacttccttagcgtacctttataaccttttctccatttgaacatagcatttatttttttccttttatttttatttgacataaaataattgtacacatttatgggatacagagcgatattttgataagtgtatacaatgagcaatgatcaaat

SEQ ID NO: 530241 - DNA, 616 bp, Homo sapiens
agtagggataacagctcaggtaaactataaggactagagctttatatctggaatcttacgtttattaatattggttaaattcatgggtataaatgaggttaaaagatatgtgggacatttctataaattattctttctctttcttctttgccattttatatctttggtttttgtaaagcctaattcatttcccatatatccaactctattgaatatctttctaactggaagcccttataggcacctcaaaaacagaatatataaaattgaactcctacttctaacaaatccaatccttctattctgttctttcctttcaagaaaaataaaaagtatcctttcagtggcagaattttagtcatttagaatcctgccttttttcaggattccatatccactcagttattttacttccttagcgtacctttataascttttctccatttgaacatagcatttatttttttccttttatttttatttgacataaaataattgtacacatttatgggatacagagcgatattttgataagtgtatacaatgagcaatgatcaaatcagggtaataagcacatccattaccttggacattattttttgtgttggaaacattc

SEQ ID NO: 530242 - DNA, 525 bp, Homo sapiens
ttatcaaaaaacaaagctcagcttcaggtttcaattctcttttctatggaaaatcacacacaaacaagaagaaaaagacacatactctaaacacayactctaggtaatgtccacaactttgaaatactagtacatggaaatgggtggcgcaatagcatccgatttatcagaatgaagaaattcaaatctaagggcttgtagagagagatactgtaaaatgcaagcagctttttttttttttttctccgtagcatcttggaaaggcccaaagaattagaaacatcagatatcataaaagatcgaacaggataaagtcaatgaggtaagtgaaaataaagtggtttgaaaatctatatgaagagaagttattactccacattgtcaataaaactctcacctttaaggtacccaatctccacccacatccctgcagaagacaagaaatgtttctggagaaacagaaccagaaaatctttgggctgtttaaaggtggaggtaacaacacaaaattgagtttatgccaag

SEQ ID NO: 530243 - DNA, 615 bp, Homo sapiens
gttatattcggtgaacccacagttcaaataatatggcgttagaaataaaatacagtcatgcgttgcctaacgacgagatacgttctgagaaacgcctcattaggcaatttcattgttgtgcaaacatcatraagtatacttaacacaaacctacatattatagccttatgattctagactacaaacttttatagcatattactgtactgaataatgtaggtaactataacacaatgttgtgtttgtgtttctaaacagaaagggtagtatgttgcactacgatgttacaacatcactaagcaacaggaattatccattataatcttaagggaccacagtcacataatgtaatcagacattgaaatattatgtggtgcacgagtgtattcaaaaagtgctgccaggccactgccctccagcctgagacagagtgagactccttctctgaaaaaataaaagtgctgctagtcaatccaatgtaaaaatataaacttcctgtcattatcaattcatttccttgaacctaaaaataatctctcaacaaaatgagtcttccttacttctgcggtaaagtcctttctttttttcttgtcctttgttccaaggagaaaggat

SEQ ID NO: 530244 - DNA, 541 bp, Homo sapiens
ccaccatggaagtggaatatagaagagtgactgttggaaatggccaacttctcctcaagagtccatggccgtgtcagcgggagtccctggggtcattcctagctcttccctgggtggttccctcacactccacactcagcaccctcatgcctgcctgctrccttcttcaggggcaatgctcttgcctaccttttctttccagaatcgctcagttcactccctgtgtatttattgatcactggcttactgtggactggcccacgagtgatgagaaaggggagaccaaagtgccctgaggtgtcatggtgtagaagacatgactcatacaccattccccacaagggaacagcaccgtgccatcaagtgctgatctggccatcaggtactgacagtgtggtggggaccatgggggctgtgggtgagcagggggagggctgggctgtcccctgaatgggatagagccccagagtgaccatcgctaccttccttctgccagacatcatcattggcccttctccccttggcaccagggagaagctgg

SEQ ID NO: 530245 - DNA, 541 bp, Homo sapiens
ccaccatggaagtggaatatagaagagtgactgttggaaatggccaacttctcctcaagagtccatggccgtgtcagcgggagtccctggggtcattcctagctcttccctgggtggttccctcacactccacactcagcaccctcatgcctgcctgctaccttcttcaggggcaatgctcttgcctaccttttctttccagaatcgctcagttcactccctgtgtatttattgatcactggcttactgtggactggcccaygagtgatgagaaaggggagaccaaagtgccctgaggtgtcatggtgtagaagacatgactcatacaccattccccacaagggaacagcaccgtgccatcaagtgctgatctggccatcaggtactgacagtgtggtggggaccatgggggctgtgggtgagcagggggagggctgggctgtcccctgaatgggatagagccccagagtgaccatcgctaccttccttctgccagacatcatcattggcccttctccccttggcaccagggagaagctgg

SEQ ID NO: 530246 - DNA, 541 bp, Homo sapiens
ccaccatggaagtggaatatagaagagtgactgttggaaatggccaacttctcctcaagagtccatggccgtgtcagcgggagtccctggggtcattcctagctcttccctgggtggttccctcacactccacactcagcaccctcatgcctgcctgctaccttcttcaggggcaatgctcttgcctaccttttctttccagaatcgctcagttcactccctgtgtatttattgatcactggcttactgtggactggcccacgagtgatgagaaaggggagaccaaagtgccctgaggtgtcatggtgtagaagacatgactcatacaccattccccacaagggaacagcaccrtgccatcaagtgctgatctggccatcaggtactgacagtgtggtggggaccatgggggctgtgggtgagcagggggagggctgggctgtcccctgaatgggatagagccccagagtgaccatcgctaccttccttctgccagacatcatcattggcccttctccccttggcaccagggagaagctgg

SEQ ID NO: 530247 - DNA, 696 bp, Homo sapiens
ctgcactcacatatgaccctagtcgagacttaggaggtcttaggggggcaagttccaggctgtattagaccaatgttagacctgttgcatattagatgaatgagctgcaaagcaatgtaccatttctctttgatatagatgacatttctcacctactggaactatctaggtagyattttgtccaatctaaggagctgtgtgactttaggcaagtcacttaacctctctgagttcagaacttttatcttggaagttaggaaagggatccctgtgaaattgttatgaggatcaaatagataagaaacagctctgaaaagtcaaagtgttctagagtgactaagattctataacaaccattaagattagcagagatggactatggcaaacactagaaggaagctaagaactctataaggccttaaataggctgtactttctttcaccacttgtgctggcctgcccattcttctctagtgctttttctctgtgtagtgtgtgtatgttcctttttacacacacacacacacacacacgagttgtccagatccatctgtacctacatagattgccccaaacagagatatgtaaaatatacgcataactacaccttttcacactgataaaaacacccacaaacatgcacacatagataaacaaagactcccccaatcacatgcaagccagtgagggtaagta

SEQ ID NO: 530248 - DNA, 696 bp, Homo sapiens
ctgcactcacatatgaccctagtcgagacttaggaggtcttaggggggcaagttccaggctgtattagaccaatgttagacctgttgcatattagatgaatgagctgcaaagcaatgtaccatttctctttgatatagatgacatttctcacctactggaactatctaggtagcattttgtccaatctaaggagctgtgtgactttaggcaagtcacttaacctctctgagttcagaacttttatcttggaagttaggaaagggatccctgtgaaattgttatgaggatcaaatagataagaaacagctctgaaaagtcaaagtgttctagagtgactaagattctataacaaccattaagattagcagagatggactatggcaaacactagaaggaagctaagaactctataaggccttaaataggctgtactttctttcaccacttgtgctggcctgcccattcttctctagtgctttttctctgtgtagtgtgtgtatgttcctttttacacacacacacacacacacacgagttgtccagatccatctgtacctacatagattsccccaaacagagatatgtaaaatatacgcataactacaccttttcacactgataaaaacacccacaaacatgcacacatagataaacaaagactcccccaatcacatgcaagccagtgagggtaagta

SEQ ID NO: 530249 - DNA, 443 bp, Homo sapiens
gataacgtgcgagctcttgagacatgcacaccctccctggcgtggcttctgcctactttgccagcctcttcctccagccctcactgcctcccagatgcccaagttaaagcagttgtccccagttgctcagccatctcacgtggcttcacacctctgagcttttctcagaccgttccttctgcctgggtgcccttcatagtctcctctyctggctgactcttaccagacttcaatactcagctctagtggcatcttttccaggaaaccctccctaaagccctgagaactcctcccatgaactgagcacagtcagcacattctattaaaagtctctctttgctgggtctttctcttctgctggattagcaactcctcaaaaacagagactgtgagctatttatatgggcactcccagtgtcccgcatgtagtagtaataaaatca

SEQ ID NO: 530250 - DNA, 619 bp, Homo sapiens
  misc_feature (1)...(619): n = A,T,C or G
tcatttgccattccaggtactgagtctaaaaagaaaggcaaggccatctttgccttggggaatttgcaatcctggagcagaaggtatatgtgnctatgaatgaaaatacatagagggtccagtgggagcatggggagtaatggaaaacactatctcaggacaggtctggaaaatcttccgagraaagatcccaagccaagtcctgaaagaggcacaggtgttcgtcatctgggcagagtggagagtggcattccagaccaagggaaccgcctcagcagaggtgtgaggtgcttgggaaggggaggtaggtgccagatgttgggggagggtgaggctgaatcacctccaggtgtttaggggcatcttcccattcactcctctcccagaccctcccttgaagcagtctttagtggaaccatcttctgctgtttggaatccacagtccttcagggcagactaaagatcctgggccatgcaatatgcttcaaatgacctccttccttagccttcatcttcgggctaccatgagtcagaattctccgctgcaagtcccactaaccaactctctctgttagaagcacaaataaaatatgaaatttacagaaatataaatggagcg

SEQ ID NO: 530251 - DNA, 619 bp, Homo sapiens
  misc_feature (1)...(619): n = A,T,C or G
tcatttgccattccaggtactgagtctaaaaagaaaggcaaggccatctttgccttggggaatttgcaatcctggagcagaaggtatatgtgnctatgaatgaaaatacatagagggtccagtgggagcatggggagtaatggaaaacactatctcaggacaggtctggaaaatcttccgagaaaagatcccaagccaagtcctgaaagaggcacaggtgttcgtcatctgggcagagtggagagtggcattccagaccaagggaaccgcctcagcagaggtgtgaggtgcttgggaaggggaggtaggtgccagatgttsggggagggtgaggctgaatcacctccaggtgtttaggggcatcttcccattcactcctctcccagaccctcccttgaagcagtctttagtggaaccatcttctgctgtttggaatccacagtccttcagggcagactaaagatcctgggccatgcaatatgcttcaaatgacctccttccttagccttcatcttcgggctaccatgagtcagaattctccgctgcaagtcccactaaccaactctctctgttagaagcacaaataaaatatgaaatttacagaaatataaatggagcg

SEQ ID NO: 530252 - DNA, 616 bp, Homo sapiens
tgtcatttcacaaggtatggttcacagaccacctgcataaaaatgttaagtatgtctgttagaaatgcagataccttggaccctagcctagaccttctgcagaaggtgattttgtttgtgtgccctttaaaggctgttaagcactgctatgagaaaaaagaattccatgatctcttggygctcctcaaactgagactccatgattctcttgaagcagtcaccccagtcgccctgcatggatgacagcccgtgcttcttgtttaatttctggtaaaactagcctggcgagcaaggccagccctgacttactggaacacaccatgagccgtgggggtcagagagctttctccatggggaggaagactgggagggggtgcagcgggaaacctagtcagaagcagcagacagtggaagactaatgggattaatacttgggattcattagccaaggattctggaacttttccagtcctctccagcaaatggcccaaactgcccccttaatagcattaagtgaaattacaaatcagagacggtggctgatcaatctccttggggcttctctacagcttttgtgcagtaggggtggtgacagtccttcagtggggcgactggt

SEQ ID NO: 530253 - DNA, 616 bp, Homo sapiens
tgtcatttcacaaggtatggttcacagaccacctgcataaaaatgttaagtatgtctgttagaaatgcagataccttggaccctagcctagaccttctgcagaaggtgattttgtttgtgtgccctttaaaggctgttaagcactgctatgagaaaaaagaattccatgatctcttggtgctcctcaaactgagactccatgattctcttgaagcagtcaccccagtcgccctgcatggatgacagcccgtgcttcttgtttaatttctggtaaaactagcctggcgagcaaggccagccctgrcttactggaacacaccatgagccgtgggggtcagagagctttctccatggggaggaagactgggagggggtgcagcgggaaacctagtcagaagcagcagacagtggaagactaatgggattaatacttgggattcattagccaaggattctggaacttttccagtcctctccagcaaatggcccaaactgcccccttaatagcattaagtgaaattacaaatcagagacggtggctgatcaatctccttggggcttctctacagcttttgtgcagtaggggtggtgacagtccttcagtggggcgactggt

SEQ ID NO: 530254 - DNA, 616 bp, Homo sapiens
tgtcatttcacaaggtatggttcacagaccacctgcataaaaatgttaagtatgtctgttagaaatgcagataccttggaccctagcctagaccttctgcagaaggtgattttgtttgtgtgccctttaaaggctgttaagcactgctatgagaaaaaagaattccatgatctcttggtgctcctcaaactgagactccatgattctcttgaagcagtcaccccagtcgccctgcatggatgacagcccgtgcttcttgtttaatttctggtaaaactagcctggcgagcaaggccagccctgacttactggaacacaccatgagccgtgggggtcagagagctttctccatggggaggaagactgggagggggtgcagcgggaaacctagtcagaagcagcagacagtggaagactaatgggattaatacttgggattcattagccaaggattctggaacttttccagtcctctccagcaaatggcccaaactgcccccttaatagcattaagtgaaattacaaatcagagacggtggctgatcaatctccttggggcttctctacagcttttgtgcagtaggggtggkgacagtccttcagtggggcgactggt

SEQ ID NO: 530255 - DNA, 544 bp, Homo sapiens
cccccaaattgagtagcttaagataaaaataaggaacatacataataaaaaataaataaacacagtgtgtgggggtcaggaatctaggagaggcttggcagggcagttcaggcttgtagtgtctcaggagattgcactccaggtgtaggctgggctgcagtcatctgaaggcttgattggggctggaggagccacttccaaggtggcttacttatataatgggygtgatggtgctggctgttggcaaggagacccagttcctctcctcatggacctcttcggaggatgcttgagtgtcctcatgacatggtcactggcttcccccagggtgagagacccaggagaaagagattcaggcagaggctatcctttttatgatctagcctcagaagtcacatggcttcacttccaccacattctattctttagagagaagtctggctcacattcaaggggaggagaataggctgcaccttttaaagaaaaatgtattttaaaagtttgcagaaaaatgtaaaaaccataatatagggattggaccttg

SEQ ID NO: 530256 - DNA, 553 bp, Homo sapiens
ctaaacgtttgattctttaccctgccataagtcacagttttgtcctggttgtgataatgttctttttctgactgtccatcaaaggaaaaagaaaaagagtggcaattacttactttcatctcttgatttttatgctatgctataaccaccaaaaataaaaaaggaaaggagaaagaactaaagaaaggagtaataaagacatcagttattacatgaaaaaggaatcaaagaaaaatatttatatatggatattttatgtgattagtctctttgcataatttggtgaagttagatacataatcaaaactatccattacagaaattatcttcctttttttactgagactataaacttgttttatatgatattgtaacagagtttctttattgttttatatgatgatataacagagttacttggttgtatataagcaaagactttrttaaaaaaaaaaaaagtgccaattccaggcacagtggttcacactcatgcctgtaattccagaatcttgggagaccaaggcaggaagataacttgagccaggagttcgag

SEQ ID NO: 530257 - DNA, 483 bp, Homo sapiens
aaatgcccagggcatctttatttctgttacttttccaggatcttgacaagtgttgaattcaaaatcactgattaaagaattctagttatccatatttttttraaaaagctgtatctttttttttcttagagaaaggctacaataagcctgttcaaatatattaagtaaatacattctgtggtaattttgttactttttaataattaaaattaattgttattttacaatttgtgcatgattgcattcagtagatgaaaactgtcttttcttgaaaaatagtaaataatttactgctaccttttttttacattttctgattaaaattctatgtttaaaagttaggttatcagataaaagaaatagtgatgtgatcatttcagtgtactctgttaacaataagcaatgaaatagcaaaattatagtttgtttagggtgagtagaaaattgtggaaaattagtactcaccaaaagctttgaaactct

SEQ ID NO: 530258 - DNA, 514 bp, Homo sapiens
tggttgagcagatctgtccaggacacgtttatgcagatattacccagatgtgagcatctataaaccactaaaaggagttttggtttgtgggaaatcaagacaccctttgtgcatgagaccaggagctgctcagtgctaagttggtgggcaagagtgggcttttttggtttctgctcctaaatcttctggaaagttgagggaagctgaggagctgaagaataagacctgaagtattcagagagctcaccctgtatggttttatggtatctcctgtttccctaagcagtcttatttactccatacaggatgatgggaagtgtgcatgtgtgtttatgtgtgtgtgtgtgtgtgtgtgcaggcatgcgtgcatgtgtgtgtggtggggagggttagttgcaraatctggggaccttttccacagcctgtggtggaggtgtttgtcccaggccctcagcgtcccaatcacaattcggttttacccacacttgtgttccaccaggatttatagagctgt

SEQ ID NO: 530259 - DNA, 642 bp, Homo sapiens
atgcaagcaggaaaaagcacaacttcttgctttctttatgcagcttttctctgaaatgttggatggaggcgctgaaaataaatggatatccatcctgtcattttctagagtcattcatttgttaactcgacaaacatttgttaaggccgtgctacctgcagcaaaccgtgtgctaggggctggggagacaaaaatggagaagtcttggtttctgtctcattaatgcaatcaaaatgcaggcttggtaacagggcatggtatggctgtgaataaggtgaaaaactgatgttttgccaaagaagagataagaagaaattgggttgggttctgtagggggcacttttttcccctttcattgctgatcattatgttcttctagacaaatattcacgatttacctttgggggaagaaaacactgtgaggatcttaaaaatstactttaataaggtcttccaggtttgtgggggtgtgagctttggaaatgacattcatcagactcaaagtaaatactcattaaataatttcaaaataagccatgggaggctcttctaaatccaggatcaaccgaagccatccaaatttagagccggccttatctgctccccacccccatccccaaagatgagtgtgttttaatgaaa

SEQ ID NO: 530260 - DNA, 599 bp, Homo sapiens
gctgttgtcagtgggcacatataggcctaatagtttacccaagggtgcttgcaatatggaagtagaaatgtaaccaacacacaggcaaattcaaggaagaaaaaagaagctgaatcacatatgcttagatccaaatggcaccaatctaataattgtggaactggatagtaggccagagactgctcttctcactacttttgaaaaaggtgagtcttctacttagggccaaaatagaaacacagagaaaagtggaaaagyggaaactgtttttcctgctgaatatttagtagcaccaataataaatgatctattctgaagtctcagatgtcttgggcattctgcagtaccttccaggtatatttttccctaggtttatatttataaactataggtgtgttgtggggatgatctgaaagaagttatcctgccacagccagaagcaaaactctcagattttttttttttctttttttttttttggagacggagtctcactctgtcacccaggctggagtgcaatggtgagatctctgctcactgcagcctccgcctcccaggttcaaggaattctcctgactcagcctcccgagtatctggga

SEQ ID NO: 530261 - DNA, 531 bp, Homo sapiens
tgtcactcctcattcttcagagaggcacagaagccacagaagccaagctccctctctccatggatgtgagaggctgtgtgcagaagagaagccacctgcgtccctcagggccacttcaacaatggagcagcccatcctgaggtyttcggtgaactccctgtttatttaagccagactgagttgggttttccaacactagtggctaaaatatcctaactgatatactctacaaatgtaaaattctttaccagaggcttaaaaactgagagattttgaagagtgattgcccctcaggtctctgaccactcttagaaactccaacaaaccaaaattgttactttactcaacaaagcagatccaaaaataaggttataagaagatgtgtgggctgggcatggtggctcaagcctgtaatcccagcactttgggaggccgaggcgggtggatcacctgaggtcaggagttcgagaccagcgtagacaacgtggtgaaaccccgtctctactaaaaaatacaaaaattagttgggcg

SEQ ID NO: 530262 - DNA, 531 bp, Homo sapiens
tgtcactcctcattcttcagagaggcacagaagccacagaagccaagctccctctctccatggatgtgagaggctgtgtgcagaagagaagccacctgcgtccctcagggccacttcaacaatggagcagcccatcctgaggtcttcggtgaactccctgtttatttaagccagactgagttgggttttccaacactagtggctaaaatatcctaactgatatactctacaaatgtaaaattctttaccagaggcttaaaaactgagagattttgaagagtgattgcccctcaggtctctgaccactcttagaaactccaacaaaccaaaattgttactttactcaacaaagcagatccaaaaataaggttataagaagatgtgtgggctgggcayggtggctcaagcctgtaatcccagcactttgggaggccgaggcgggtggatcacctgaggtcaggagttcgagaccagcgtagacaacgtggtgaaaccccgtctctactaaaaaatacaaaaattagttgggcg

SEQ ID NO: 530263 - DNA, 483 bp, Homo sapiens
tttggaaagaaaataggcttgtctaggactaaattcatacttcytcttgtgaaaataatattttccttcttgctctgaatttttcattagaaagagaaatatctttttttgcttgaatacttttggaaatatatttttctcaattttttttcaggcagagtgttgtttttcatcacgtacttattttgatgataattcagagttactatactgggatttaactaaacgtaacttttgtaggagtcacctatgaaatagacttgtgaacaaatggataatgttttctgcttacatagagcctttaaaaacagaaaatagaaccccagctctttgtgcccctccctttcttaccacagaaacataatggtcatcaaattataattaacatcaactattttctgccttgaataaacaataaaagcctatttccacatattactgcaaaacctcaccaatttagattgctacagggaaggcttcgga

SEQ ID NO: 530264 - DNA, 563 bp, Homo sapiens
ccatagcaaatcatattgattttaaaaagaaatcttactcttttaataagaaatcttattgagaatttaaagatgagagttaaactgtaagacaaagagataacaaaccattttttccactagcttcacaacgcaacatattagagaattctgtgatgcaggctttatggcaaagaggcatattcaacttccaaagtgtgaactttaaaaccactcataactggtgtggtcaaggaattttgttcaccatgttygcatttttgggtcgagtctctgatggccaataaatacactgctgataagagattttcttgagggtttatttacatggctatttggacatctctttgttgacaaggaaaactcttaagtggccaattcatcagcatctctgtgaacatcctgtggaacacagcacatccaaatgtgctttgcttttaaagcatagtgaaaggaatttgttttggaacataggcacagatgtgttcatcaacactaacttatataaataaatatctttctaatatgtttttaccctaatctttctcctttttgttattgat

SEQ ID NO: 530265 - DNA, 386 bp, Homo sapiens
ttcaagatcctactcagaaagaaatgmaaagttcatagcggatattaagataataagtcatgtgacagaaaaacaaagcaggcattattttttaaaataattatagatatgtatgctataactaatggagaaatccctgtcttaaatcagaacttcaaaatagttctatcgaataagcacacaaagagcataaaatgtttgaagtaagaaaggcatttaagtagactagttgattttagttaaaaatacatagatatttcttcacctcactacttcctttggacctagatatttaaagggttttttttttttttttggctactggttttttagtactagaagatatgctgtagtgaaccctaggtaagttctaaccactacagaaa

SEQ ID NO: 530266 - DNA, 386 bp, Homo sapiens
ttcaagatcctactcagaaagaaatgcaaagttcatagyggatattaagataataagtcatgtgacagaaaaacaaagcaggcattattttttaaaataattatagatatgtatgctataactaatggagaaatccctgtcttaaatcagaacttcaaaatagttctatcgaataagcacacaaagagcataaaatgtttgaagtaagaaaggcatttaagtagactagttgattttagttaaaaatacatagatatttcttcacctcactacttcctttggacctagatatttaaagggttttttttttttttttggctactggttttttagtactagaagatatgctgtagtgaaccctaggtaagttctaaccactacagaaa

SEQ ID NO: 530267 - DNA, 492 bp, Homo sapiens
ttccgctatactacatccctgcgcttgaaaggctctatcagaaaagactgcagagggtttggcagttttgtcaaaggtaaggagcccagttcccttagacagtattttattcccaaaagctggttccrtgggaaatatttcgcagcaaaggtggccaggtaacctcctgtggaagtaacttaagtaatctcttgccatcctacttcccctctgtcttctacccacaatgaaaggattctattgtttgaacacaaattgttcaaaagcaaggggtgatgtttaagatgtacaggctgcctcttagggtaaatattttaatttcagaaatgctgtgaatattcgccttttcattaatttacacatgtcaattagagaatctttatttttattgtaaggcagtatagttagttattaagtcccactgccaaagttcaaatctaaactccaaactaggaataggcttgttgcctaacttcactaatcctcaatttc

SEQ ID NO: 530268 - DNA, 492 bp, Homo sapiens
ttccgctatactacatccctgcgcttgaaaggctctatcagaaaagactgcagagggtttggcagttttgtcaaaggtaaggagcccagttcccttagacagtattttattcccaaaagctggttccatgggaaatatttcgcagcaaaggtggccaggtaacctcctgtggaagtaayttaagtaatctcttgccatcctacttcccctctgtcttctacccacaatgaaaggattctattgtttgaacacaaattgttcaaaagcaaggggtgatgtttaagatgtacaggctgcctcttagggtaaatattttaatttcagaaatgctgtgaatattcgccttttcattaatttacacatgtcaattagagaatctttatttttattgtaaggcagtatagttagttattaagtcccactgccaaagttcaaatctaaactccaaactaggaataggcttgttgcctaacttcactaatcctcaatttc

SEQ ID NO: 530269 - DNA, 492 bp, Homo sapiens
ttccgctatactacatccctgcgcttgaaaggctctatcagaaaagactgcagagggtttggcagttttgtcaaaggtaaggagcccagttcccttagacagtattttattcccaaaagctggttccatgggaaatatttcgcagcaaaggtggccaggtaacctcctgtggaagtaacttaagtaatctcttgccatcctacttcccctctgtcttctacccacaatgaaaggattctattgtttgaacacaaattgttcaaaarcaaggggtgatgtttaagatgtacaggctgcctcttagggtaaatattttaatttcagaaatgctgtgaatattcgccttttcattaatttacacatgtcaattagagaatctttatttttattgtaaggcagtatagttagttattaagtcccactgccaaagttcaaatctaaactccaaactaggaataggcttgttgcctaacttcactaatcctcaatttc

SEQ ID NO: 530270 - DNA, 505 bp, Homo sapiens
agctgacttttccatgtcaggtcattgtaccctgctggtagataggatgggggrgctaatttgtcttttcatacatcaagcaagcatgtcaatagcctttgcttgctcccctggagtgagcaatactttttaactacagtgatgtactaacagtgcaactcattgaattcagtgcttctttgattgaaggggtttggtgcagatgaggagtaggcagtgatcttgtaagttatctccatattggaacaacttaagagaatgcttagataaagaaaggccatacatctattttcaagatatttctttcttttagaatatttcagtcttaggaacaatataaagttgatttttatcaatagaaagggtcatttaaaacctactgtttaaggtagaatgtcataaagcttttgtaaggctgatattaaaaaatactttgagggcattgaggttaccacaagggctcttagttaatctctttctcaggagtccttctgcatccaggccc

SEQ ID NO: 530271 - DNA, 505 bp, Homo sapiens
agctgacttttccatgtcaggtcattgtaccctgctggtagataggatgggggggctaatttgtcttttcatacatcaagcaagcatgtcaatagcctttgcttgctcccctggagtgagcaatactttttaactacagkgatgtactaacagtgcaactcattgaattcagtgcttctttgattgaaggggtttggtgcagatgaggagtaggcagtgatcttgtaagttatctccatattggaacaacttaagagaatgcttagataaagaaaggccatacatctattttcaagatatttctttcttttagaatatttcagtcttaggaacaatataaagttgatttttatcaatagaaagggtcatttaaaacctactgtttaaggtagaatgtcataaagcttttgtaaggctgatattaaaaaatactttgagggcattgaggttaccacaagggctcttagttaatctctttctcaggagtccttctgcatccaggccc

SEQ ID NO: 530272 - DNA, 636 bp, Homo sapiens
cctcgccagcccagctcttatattttaaagaaaggtaactggattaggaaaaccataataattctggggatgattttttccatttgtgttatgaaagctacaaagtaattttattctggtcacagtaaaataatgtggtttatatgactaaaaccttagatatgcttaatgcacccatataacaattacacatccaaataataataaacaataaaatgcacaaatcatacaattagtcgttcctcagtgttttcaaaggggctactgtatggtggaagatcagcaacagtggttctcaccaggagttgagtcacaatgtttaagagtgatactgttgcgygaaaaaacaatagcaaaaccagaaagatttaacaaagataatttgtttgtagacctcaagaaatctttaagagaaagcaaaaccaaaggaggatcttgttcggattggagcatcatgtcaatgctattgcagctgtgtttgaaacaactggctctccttctccgtgtcaccatgagggggtctttaaaaatcttatctaatgggttgataggtacagtaaaccaccatggcacacgtttacctacgtaacctgcacatcctgtacatgtaccccagaacttaaaattaaaaaaaaa

SEQ ID NO: 530273 - DNA, 551 bp, Homo sapiens
atgagtgacaggatgagcaaaggaacaaaagtttcagaaacaaaccaaacaaggttttatattaccttttttttatttaaaggtgaattatggtgaaaatctaagttctctcatcttacaaccttccayaaattaggatcaatggaaagtgctgctaccagcaattatgtgaaccactacagacagtaagttgattatgaaagaaaaaaagcctaatttttaattagaaagaaaacttcaattgtgcccaacacttgtactcacaagtcagacatgaaatgacttcagatcagcagctatttaatttcatccaatctctagcaagcagcttgggatattatttgcaagtacaacttttttgcattatggaatgagagagctctaatttctcaaagaacaaacatgatatatttttggcatcatttcaatgtcaaagagacttttgggaataactaggaagttgatggcatttttacattttccagttacatttctaaaacctcagttgtttcctcataatcatttccagaatctcaatggaaagtttattt

SEQ ID NO: 530274 - DNA, 551 bp, Homo sapiens
atgagtgacaggatgagcaaaggaacaaaagtttcagaaacaaaccaaacaaggttttatattaccttttttttatttaaaggtgaattatggtgaaaatctaagttctctcatcttacaaccttccacaaattaggatcaatggaaagtgctgctaccagcaattatgtgaaccactacagacagtaagttgattatgaaagaaaaaaagcctaatttttaattagaaagaaaacttcaattgtgcccaacacttgtactcacaagtcagacatgaaatgacttcagatcagcagctatttaatttcatccaatctctagcaagcagcttgggatattatttgcaagtacaacttttttgcattatggaatgagagagctctaatttcycaaagaacaaacatgatatatttttggcatcatttcaatgtcaaagagacttttgggaataactaggaagttgatggcatttttacattttccagttacatttctaaaacctcagttgtttcctcataatcatttccagaatctcaatggaaagtttattt

SEQ ID NO: 530275 - DNA, 629 bp, Homo sapiens
ttgtaattacatccagagcccgctcaccatggcgacagcggycactctatcgaatattaaatctattgatcttgagcacagagtccatctcagttttcaaatggtccgtgcagtctctttccccagggctgaagtatatctgagcttcttatgggtttccaaaggctcatcttatctcttggcacaatatgttcttttgacttgctcgtgattttgttatttcatgtggacagatgcagaccagaggaaagaaaaagagaaaggagtccaaggaaagtatagttcttgcttttcaagatcaacttttcctatgctccgttgctctcatacccaggtcatttcctgaactcctcgacctcttagtgtgagagccaactcttttatttctctcaggcactgcaccgtgctgggaagaggcacagtgggctcctggaacaaagactgccctattgaacggagccacctttgagcctataatgaaaaatgcccacaaagttgattagtcggccttgggctgcactagtcagtttgaaacatggcagaatttaactctatgttatattatcaaactgcattctagtgtatggaattctatcatggtatcacattatattatcacatcatagaat

SEQ ID NO: 530276 - DNA, 629 bp, Homo sapiens
ttgtaattacatccagagcccgctcaccatggcgacagcggccactctatcgaatattaaatctattgatcttgagcacagagtccatctcagttttcaaatggtccgtgcagtctctttccccagggctgaagtatatctgagcttcttatgggtttccaaaggctcatcttatctcttggcacaatatgttcttttgacttgctcgtgattttgttatttcatgtggacagatgcagaccagaggaaagaaaaagagaaaggagtccaaggaaagtatagttcttgcttttcaagatcaacttttcctatgctccgttgctctcatacccaggtcatttcctgaactcctcgacctcttagtgtgagagccaactcttttatttctctcaggcactgcaccgtgctgggaagaggcacagtgggctcctggaacaaagactgccctattgaacggagccacctttgagcctataatgaaaaatgcccacaaagttgattagtcggccttgggcygcactagtcagtttgaaacatggcagaatttaactctatgttatattatcaaactgcattctagtgtatggaattctatcatggtatcacattatattatcacatcatagaat

SEQ ID NO: 530277 - DNA, 558 bp, Homo sapiens
caatagatgctcacaaacagtttctggaataaaataactgttagtgacaatgaaagttttgtatagtaaaaattatccagatctcatatagcagattcctggaaaatactatttttctccatatggatttagaaaaaaagatctgtgatgaaaacattcattgatagcaaatatttattttaaagaaaatcttttttttttttttttgagatggaatcttgctctktcacccaggctggagtacagtggcacaaactcagctcactgcaatgtccacctcccaggttcacgccattctcctgtctcagcctcctgagtagctgggactacaggcgcccgccaccatgcctggctaatttttgtatttttagtagagacggggtttcaccgtgttagccaggatggtctcaatctcctgaccttgtgatccagccacctcggcctcccaaagtgctgggattacaggcatgagccatcgcgcccggccctttaaagaaaatcttaaatttgtattacaagatcatactttcttcatgccaactcttacttttcctgcat

SEQ ID NO: 530278 - DNA, 558 bp, Homo sapiens
caatagatgctcacaaacagtttctggaataaaataactgttagtgacaatgaaagttttgtatagtaaaaattatccagatctcatatagcagattcctggaaaatactatttttctccatatggatttagaaaaaaagatctgtgatgaaaacattcattgatagcaaatatttattttaaagaaaatcttttttttttttttttgagatggaatcttgctctttcacccaggctggagtacagtggcacaaactcagctcactgcaatgtccacctcccrggttcacgccattctcctgtctcagcctcctgagtagctgggactacaggcgcccgccaccatgcctggctaatttttgtatttttagtagagacggggtttcaccgtgttagccaggatggtctcaatctcctgaccttgtgatccagccacctcggcctcccaaagtgctgggattacaggcatgagccatcgcgcccggccctttaaagaaaatcttaaatttgtattacaagatcatactttcttcatgccaactcttacttttcctgcat

SEQ ID NO: 530279 - DNA, 532 bp, Homo sapiens
gtgaatgagagagctcatttacaccacagcctccatcaccagtgcagagtcaagtgggagaacagcctgctgtaagtgtacatgtaggaggcaagagtttatgtagagaagtttgtgtcagcagctatgtctctccatgacttatactctttcttaactagctgtgtatttaaggttattaaagcaagtattttggggtgtattattgttagacacccgtcttartccattttgtgttgctataacagaatacctgaggctgagtaatttataaaaaaaagaggtgtatttagcttacagttctgcaggctggaaagttcaagaagcatggcactggcacctgatcagctttcggtgagggcttttgtactgcatcagaacatggtgaagaaggacaaaggggaagcagacacatctgaagagggactgaacccaaggtgtgtcctggttttacaacaacccactcttgagggaactaatgcattcctttgagaactagtcctgtcttgccagagtaattctctcactacca

SEQ ID NO: 530280 - DNA, 593 bp, Homo sapiens
tgctatctgagacccaaattgtgatttcaccatagatgtgcattagactttattaattaggaaataagagatatgaactcttattagaaagaaattgctatccccttgagacagaaaatcaactaaatgacattattagaaacccaaacacaaggatatcaaagtgttctgtgcctgcaactggttgcctccaattatcccatttgctcaagaaaagaaaaaactagagtggttaaaagatggtacttcagttccattaaatccagaaacagaggaagattaataaaggaaagtaggcaggatacgctggaggaagagattatttattcactaagaaagartacagggagaaaggtacgttgaagatggagttagaccaacatacaaggggcagaaaaaggtacctaaattctaactgcttttaaagagggaaatacatgtttgttgttactaaatcataaatggtgtatggaacccaagagagagaagtccaggatgataaccctaagaaaacccaagtcactgagaggtgactttctaaacccacaggacctcacttggagcaactggggaactactacttaaagactgga

SEQ ID NO: 530281 - DNA, 593 bp, Homo sapiens
tgctatctgagacccaaattgtgatttcaccatagatgtgcattagactttattaattaggaaataagagatatgaactcttattagaaagaaattgctatccccttgagacagaaaatcaactaaatgacattattagaaacccaaacacaaggatatcaaagtgttctgtgcctgcaactggttgcctccaattatcccatttgctcaagaaaagaaaaaactagagtggttaaaagatggtacttcagttccattaaatccagaaacagaggaagattaataaaggaaagtaggcaggatacgctggaggaagagattatttattcactaagaaagaatacagggagaaaggtacgttgaagatggagttagaccaacatacaaggggcagaaaaaggtacctaaattctaactgcttttaaagagggaaatayatgtttgttgttactaaatcataaatggtgtatggaacccaagagagagaagtccaggatgataaccctaagaaaacccaagtcactgagaggtgactttctaaacccacaggacctcacttggagcaactggggaactactacttaaagactgga

SEQ ID NO: 530282 - DNA, 526 bp, Homo sapiens
gaaatgcaattttgcctggaataattgacctatgcacaggagattggctttctaaattgggtgcgtgtgacaaagaggtgtggtaattttgtgagtcctgttagctgttttgattctttaaagtaaggyccctgagagactgggcattgaattactatgacttgaaaggctttggaagctccagacccattccagagagagacaggtggttactggaggaacctcaactctacccagacagcaaatcctgccaactaagcctgcagaaaagatgatatgaaggggaagggtatttgttttgtaagtggactttgtactttgaattttaatacatggggcaagagaattttatttcaaactttagtacttttagattttcatgtctttgaacttaaacttgtaaagcaatctaatctttagacataaatttattccttggaatttaataatagcaaggaaattgtcttcaaataagaggcatctctttatagatgtttggttattggaatatcttcaagatagcgtc

SEQ ID NO: 530283 - DNA, 637 bp, Homo sapiens
gtaatggtggataaatgactcacttctgtctgggcatgccatggactgaattttgtcctcaatggtggataaatgactcacttctgtctgggcatgttatggactgaattttgtccccatcacccccaaattcatatgttgaagccctaaccaccaatatgaatatgactatacatggagatagggcctttcaggaggtaattaaggttgaatgatgtcataagggtgtggccctaatctaataggactggtgacctcataagatgaggaagagacaccaggggcatgcatagatgaaagaccatgtgaggacasagcttgaaggtggtcatctgcaagccaaggggacagtcctcaggagaagccaaccctgcagtcacttggatcttggacttgcagcctccagaaccatgagaaaaatatgtttctgttgtttaagccactccacctgtggcattttgttttggcagctggagaagactaagtgtgttgcacttttttttttttcttttgagaaggaaaaaagccaggagagaaacttgaagtagcaaaatggggactcaggaaaaccaagggaaggaggaggatggaggcttttggccaccacacactcacttgcttggagggctagaatttg

SEQ ID NO: 530284 - DNA, 575 bp, Homo sapiens
ggtaagatttggatgggcagtgatggagagggggcaattcagcacttgtgggggtgcccagtgcaggagtctccattattcagggcaaagcactgagcaaggacatggtgagggaaaaggtgtatgacgaggtgtatgttatatgttacacatataatagtagcattccctactactatgcaatggcatataacagcactattttacttatgcaattaaacttctccctactcagtattactatccattgattaatgtaccatttatttttactgtcaattcatttaacaaacactttttcaggtccaattatgggtctggaatttggttgtatgctgtacatccaaaggattctatggtccagtgtggaaataaaaattcacaaataattatgattcagagtcatatatgctcattaacayatgagcaggggcagagaggcttctcagaggaaatgatagttaaactttactctgagtgatgaccagtttttaagggggacaaggcagagaaggggcataaagggagatggaacagtactggagacacaaaaggggagttagaagttgcttatt

SEQ ID NO: 530285 - DNA, 628 bp, Homo sapiens
ctggggaaagatatgtttcattgttttggtcatcccagccctaggtgacaaaggccaaaatggtagtgatagtgaaaatggagatagagatggagataagaaatgttttaggaatacaatctctgaagagagattcagaataactcaggttttgagaagtttggcagaatgacataccatgaagaaacgggacagtgaggagcagaggccaggattttgaagggaagatggttatttgagtttctacattgtgctctagcctttagaaggatgtcctagtagaaatgtccagaaggcagttggagatgtcggctggattttagagggcagagctaaacatttggaagtgatctgtatcctggttatgtttgaagctttgggagtttaaagattgtcttccctgcaatgcgatactgtttggaataccacacatttataactgctggactcagcgtgaaggatgtgaagttccmgttctgcttctgccacttaccagtgtgtgacctcaaacatgacactctgccttctcagcctcagtttccttaactagaaagcagatgtaatcataccaacctcgctgggcatttgtgaatattagttgagaaaatccttgtcaagtgcttggcat

SEQ ID NO: 530286 - DNA, 570 bp, Homo sapiens
atctggcccacagcttttttwagttggtaagtgcttttatttaaattactgagtaaatttcattgctcattattggtatgttcagaatttctgttaattcctggatcaatcttgggagttttatgtttccagggattggaaatttaactatatgtacaataatgatgaacaataaagtataaaggagtaggtttagcatagcataagtattttaataaattattgaatgaacaaactgggattataaatttttttctaacttctcttatttatctagtcctgaggcagggtattttattttagtgttatttaacatttctttgcctcagtttccctacttccaaatgaggtttataatcctaaatacagaatagtagtaactatcctgaaaacctgtcgatagaacctgatagattctgatagattctggacatttctgccagcctcagacgctgtcacttcagtcatttattcaaaaatcttaattaagcattaatttattacatagttgaatttatcaacccatttacatactctacttgggacaagacagatcttgaacctactttt

SEQ ID NO: 530287 - DNA, 570 bp, Homo sapiens
atctggcccacagcttttttaagttggtaagtgcttttatttaaattactgagtaaatttcattgctcattattggtatgttcagaatttctgttaattcctggatcaatcttgggagttttatgtttccagggattggaaatttaactatatgtacaataatgatgaacaataaagtataaaggagtaggtttagcatagcataagtattttaataaattattgaatgaacaaactgggattataaatttttttctaacttctcttatttatctagtcctgaggcagggtattttattttagtgttatttaacatttctttgcctcagtttccctacttccaaatgagstttataatcctaaatacagaatagtagtaactatcctgaaaacctgtcgatagaacctgatagattctgatagattctggacatttctgccagcctcagacgctgtcacttcagtcatttattcaaaaatcttaattaagcattaatttattacatagttgaatttatcaacccatttacatactctacttgggacaagacagatcttgaacctactttt

SEQ ID NO: 530288 - DNA, 570 bp, Homo sapiens
atctggcccacagcttttttaagttggtaagtgcttttatttaaattactgagtaaatttcattgctcattattggtatgttcagaatttctgttaattcctggatcaatcttgggagttttatgtttccagggattggaaatttaactatatgtacaataatgatgaacaataaagtataaaggagtaggtttagcatagcataagtattttaataaattattgaatgaacaaactgggattataaatttttttctaacttctcttatttatctagtcctgaggcagggtattttattttagtgttatttaacatttctttgcctcagtttccctacttccaaatgaggtttataatcctaaatacagaatagtagtaactatcctgaaaacctgtcgatagaacctgatagattctgatagattctggacatttctgccagcctcagacgctgtcacttcagtcatttattcaaaaatcttaattaagcattaatttattmcatagttgaatttatcaacccatttacatactctacttgggacaagacagatcttgaacctactttt

SEQ ID NO: 530289 - DNA, 427 bp, Homo sapiens
ttaattctcatctgtagatcagcaaaaataagcttagtcttctgattcttgtaacttaaaaaaaaattagagtctatagtttttgtctaggaaacatggttgtcagttttcattgttagagtctcaaaataagtggtgtgtgtgtgcttgcttgtgtgcctgtgtgtttgtgagtgttgtgtgtgtgtgtttacatactatactccctccttctcctctggggataatctaaaaagctcaaagttcttagtcctgggtactgaaacaatgctataagggaggcatttagaaaagcttaattttaaccaggtacttacaccacaarcagaatgacatcactaagcacacagcacgttagtgaacagtggctttgtcagagctttctacccagagccctgaaatggaacattgttaattagctttaaaa

SEQ ID NO: 530290 - DNA, 648 bp, Homo sapiens
ccacatgctatgtcttggcagctctctgcttggaatgtcatatgttattcaaaaaacaatatttaattgcaggatctgcatgtctagagcagcagggagatgctacttggcttgcttgctcaaagataagttttatacaaatattaaaagattctgtaatcttgtatttgttaaaaagaataacaaattcctatttctgaggttatgagaatcttattactcaactggtcagtgcatatagccactactagaaaataaagaacatctaatmcctttagtaacttcattatcattttaacattctatatctttgcaatgtgttttcaatcatcggatagcctagaaaccaagcaaatcatgcaagaagaggtgaaccagtccttagaattaggtaatctgcagaagatcccgtacgtggatcaatgaacagaaaaaaaagttccattaactttttactcctggtatgtgcaagaaacactctggcaaccggggaaatcccagagaagccagtcacagccttaaagggtctgatggatctgtaaggcgagatccataaaatggtaactaacgatatactatacaaacaatagataaccgccaaatgatgcgatgaatggtacggaaacttgaattttaaacttcaatcag

SEQ ID NO: 530291 - DNA, 513 bp, Homo sapiens
ttctgtctctgcctccatattaaagtgtttcttttctgcaatggcatcaggtcatcatccccctggaatgtcttctggtattgctactttggccataaatctagcagtctatctgtcacttaaagagcatgacataccacaaccctggataatcagatggtgatttttgtcctttccctgaagctgttttcaattctyagaacctttttcagacacaaccatttgtctaagcgtgggtttaacttcacgctttgatatgtaactcaagtgtgctttagtcaagcctggactcaagactttcaacaagttaactcattggccatgagatgatccggctgagtttctccacgactccacagaaacaaatgggatcctcagtttcggtcacaggggatacaagcgaaaagagagagtgggatcctccattccacaaggtcagtggtgacagctcagctcttctggaaagaccaagagtcctggagggtttgtctgaatccaatggctgaataagac

SEQ ID NO: 530292 - DNA, 579 bp, Homo sapiens
ctgggtgcggtggctcatgtctgtaatcccagcgctttgggagacccaggcaggaggatctctggaggccaggagttcaagaccagcctaggcaacatagtgagacctcgtctgtacaaaaacaaaattagcttgaggccaagagttcaagactagcctgggcaacatagtgagagcctgtctctactcaaaataaaaaaaaaaaatagccaggtgtggtggtatgtggcggtagccccaggtacttgggaagctgaggtgggagggtcacttgaaccctgaagtcaaggctgcagtgagccgtgatcgctccaccgcaccccagcctgrgtgacagagcgagaccctgtcttggaaaaaataaaaggaagtcagattttgagtatgtgtctgttttcaaattccagaaatttaaggagcagcctatttccacatttcaaagaggagaaatgtggggagcgaatgagtttcatagtcatgtcactatggcgtgacaggagggcaagaaaagacaagcgacccagaagaaaagagaattagacgtctccaccctgatgccaaaggaaaaactggaccatt

SEQ ID NO: 530293 - DNA, 567 bp, Homo sapiens
gcaagcactcacatttcccaaagagttctgggaactaagggaatttgataacttcatctagatttacagagtctgggaaatgagacttaaaaattcaatactagaaatctcaaaaagttaaaaaaaaaaaactaatatacagtggatgtctttatggacatggtgttaaactgagcgctttagaagaggggagrgggagagttaacatctacactgggtactccaacgagtcagcagcggtttctgtgaatgtatggagtgcatacaatatgagggcgtgttgagtcctagaacctgcagccttgccgccccagcactgcacactccttagggcctgtcagagacaagtgaaacgatgatgattaactagctgcattgtcatgggtttgcagtagagacttaggatctagctaataaatcacaagtcgatccttaaaactgttaaaattattttatacaaaatgtttatagaaaatgacttttctttggcaccaaatttttatagggtgatgtcaacttatagtttcaatagtatatttatagcttctaaaattcatctgtaaaata

SEQ ID NO: 530294 - DNA, 545 bp, Homo sapiens
gcgtgagccaggaatgatttttaattccagagaatgatgatcataccacctcatttttaagggacctccagctccatctgtgttcctgcaaagtcctctattcatattcttttttctggctgcatagtattctatggcatatatgtaccacatttctttatccaacctgcccctgatgggcattttggttgattccatgtctttgctgtcttatagagtgctaataatatagagtgcataagagcattccattaagattttctacttttgcctaatagagaactttgatcccaaatcatggagacttgtgtttcattaggaattttcagattgacaaataagtacagygggtcaactttttcagcagcactatcagaatgattttttttttttattccagaggatgctgatggcactgcctcattttgaaggaacctcagctttgccaacccattttattacctcaacctctaataggcagacaaaagtataggcaaatttttctataaataacagacctttcctcactcgaacattcagttgcc

SEQ ID NO: 530295 - DNA, 371 bp, Homo sapiens
tttctactctggctattctgaaatgcaatattttccagacctacccaacctttggtattcatctcccagacctgtggctgcttctctttgctgagcctcacaaaatcttgtcctgtgcatggacagccamggatccttgggaaatctcatgcagacttctaggtccttcctttgtgtagatttcttctctccagtacgttgacctgcttcagagtcctcatcattgctttcttccttttcagctcagcaatactgctgtgtattgtgtgggcttcatttgcctcagccatacctagaacacaacccaaggcagaaagctggagtggacctgaggctcatcacctgtttccttccacccaccatttaaaagc

SEQ ID NO: 530296 - DNA, 392 bp, Homo sapiens
ctgcatttttctactctggctattctgaaatgcaatattttccagacctacccaacctttggtattcatctcccagacctgtggctgcttctctttgctgagcctcacaaaatcttgtcctgtgcatggacagccaaggatccttgggaaatctyatgcagacttctaggtccttcctttgtgtagatttcttctctccagtacgttgacctgcttcagagtcctcatcattgctttcttccttttcagctcagcaatactgctgtgtattgtgtgggcttcatttgcctcagccatacctagaacacaacccaaggcagaaagctggagtggacctgaggctcatcacctgtttccttccacccaccatttaaaagcagcttatttgtgtg

SEQ ID NO: 530297 - DNA, 371 bp, Homo sapiens
tttctactctggctattctgaaatgcaatattttccagacctacccaacctttggtattcatctcccagacctgtggctgcttctctttgctgagcctcacaaaatcttgtcctgtgcatggacagccaaggatccttgggaaatctcatgcagacttctaggtccttcctttgtgtagatttcttctctccagtacgttgacctgcttcagagtcctcatcattgctttcttccttttcagctcagcaatactgctgtgtattgtgtgrgcttcatttgcctcagccatacctagaacacaacccaaggcagaaagctggagtggacctgaggctcatcacctgtttccttccacccaccatttaaaagc

SEQ ID NO: 530298 - DNA, 668 bp, Homo sapiens
aagttttgctttcatagtaggcaaagggggaattcaatggcgctttttctcttctacatgaaggaaaagaatgtgatggtcattctagcagcckcaggctacagatgtcctgagagtatggatcatatgaattcaaaggtgattcttgctaattactctgatctcatcaccatatatgtatcaaaacatgcagtgactatgtaccccacaaatatgtacaattattatttgtcaactaaaagaactttgaaaaggaaagaaaagttttttacattattccaaacactcttcatgaaattcttagacataaaattgttccacctgtgtcttttgatatttggttacagaaaaactggacatatggttccttctcaggaagataaatgtaaaggtttaaaacagaccccaaccaaatggagtgtcacattctgatacgaacgcaaagtcaatgtgtgctgactgcacaagcagtgaataaacacctgaccttgtgacactggaatgttgcaaagtcatgaagtttaaacaactgatgatgtacaatttttgacattccataggcagactatatcccttgtagtttttcttaaagacagtgtttactttcattttaataatcccactcttcagcctcctagatgtcacctagtttatatccttctggtgca

SEQ ID NO: 530299 - DNA, 482 bp, Homo sapiens
tattttatgaacacagtttataataatgtacatatttataagttgtcaatgagtgagagcattatattttcacgagaagtatttccatgttgttatagccaagaaggcagattcaaagtatagacagtgatatggcagacagccaggatcattgattcatttttagagcaaattagctggagacttattaatgtaattagttagagatttattaatgctatttaaactattaaaataacctcacagtgcttttacacaggtctccccttattttcccttacctcttgctcatttatgtgacttatrtgtctggttcatgtgtctgtccttagaaaggtagtacatataaaataaaatgcacattgctgaaaagaatagcaggactgaatacagttctgtacacctatgacctatgttgcctatctgcttaatggagtggaaagcatggtggactcaaaagacgatggaactcagaggcagaa

SEQ ID NO: 530300 - DNA, 505 bp, Homo sapiens
catggaaaccaaaggtaaacccttttcatggcagaaggtagggactgtttttcttctatgttcttaatagtgaatttatacctgcatctaataatatatttttcagttctaacttctgggttattttcatctacattttcaaccacttctggtgcaaaatggttcatgtcaatatctcacaaagcatagtgagttacaaaaaacaatgtaaagcattgctttaaaatctttaacaatgaaagcttaaaaatgaaaacaggaatttaaagaagtgattgactttgttaaagttattttagcaaaaatgaaactataggataatatcaatttaaaccrtcctgtaaaaaaagtcaaaaactggagatataaacatataatatttgaggcaatatagacacaaccatgttaaaaaatacttgcacaaagatttaacgtattgatcgatcccgcatttttagaccagtgtttatcatgtgctgtttctatgtcagtcctaaacaaggag

SEQ ID NO: 530301 - DNA, 593 bp, Homo sapiens
tgtagctaagtcctttactacttcataaaaacatcaatcaaccaaacaatggttcagatagtgaaagaacgactgcacagtgaagcatgctcaagtgcttggatctacttcactcaaatacaacacacgttcattgatgcttacagcctgatcccatgtgaaatacgtcttcatagagcttagcattcagtaactaaacaactattaatttggaagatatgaattttctagaaaactgatttttctctcatycattcagagtggagaaaagatagccagagtttgagtctgggtaagccagatccctctggaagctacacagtgtctgctaggaaccaagctaaattcaaagacagtgacttcagatgttttcagccctagtgtcctttaaactgtgtgctggtgtgcctctcacttctttagattgtaaactcctcattttacttatagaaaaacactcagtgcttctttctttctttccaaggaaaatcatcagctttttcaattaatatgtgccacagtgtctgttacttttcagaaataccattccttttctgcattgcctatttccaattttgcatctgctgatgtct

SEQ ID NO: 530302 - DNA, 627 bp, Homo sapiens
tgcaggaacacagggtaccttttaacaccaccaccatcaccaatactcataataaacaaacagatgaataacacttatataatgcttattatgcaccaggcactctccaaaacactttatacttaggtactacttttatacacatttcagggaagtaaattgagacttacagtggttaagtgatctgttgtgaagtagcagatcccaaatttaaacacctgtatgttggttccaaagaccacattctttatcactattctatgctaaagctcacaagtgaagacttaataataaatctttaaaactccaaatatataactaaaatttgaagtatataattcttccatcaagaaagccttgtgaataggattacgtggaccctagctcttccatcccttttcaaaaaatctttatggttggtcagcttctttatattatatgaattctaaaatatatttgccagagaaaytcaatcatacctataaatatgattactcctcatctctaccaaaccacttaaccatcccaactagccctactaacttcatgttttactgctaatgcaaaaaaaaatctaatgcatttctggcaaacagggagtttctgtggaagtcaatggagagaaag

SEQ ID NO: 530303 - DNA, 535 bp, Homo sapiens
cactgttcacttaattagataagtggcttctgacagaacaactggtttatgctcagtgggaaagactacatgaccaggtactatagatggccaaggtctccagtcttgcagaacaacatggattttgagtttctgctccaattaaaactttcagttaccacagtggaaactgaattcatggcaacaatatccaaaattgtgatttgactcagcttcagattcgggcaggttttacaggacccagrtaaacttaggaggtaggtagtgtttgtgtttcgcacattgctgtctggcccacttcagccaagcttgtctgagcctccaccatatgtgatggttgctcaaaaactgcttctcctgagtccacttagttcaattttcccaggaagaaacaaacacacacacacactcatactcctcccatctcagatatctaagctacgatttgggctggataaactggacaacctcatctcccacccactgtaaccacacctctctgtgccaaacctcagtttagtggccaggaaagcag

SEQ ID NO: 530304 - DNA, 535 bp, Homo sapiens
cactgttcacttaattagataagtggcttctgacagaacaactggtttatgctcagtgggaaagactacatgaccaggtactatagatggccaaggtctccagtcttgcagaacaacatggattttgagtttctgctccaattaaaactttcagttaccacagtggaaactgaattcatggcaacaatatccaaaattgtgatttgactcagcttcagattcgggcaggttttacaggacccagataaacttaggaggtaggtagtgtttgtgtttcgcacattgctgtctggcccacttcagccaagcttgtctgagcctccaccatatgtgatggttgctcaaaaactgcttctcctgagtccacttagttcaattttcccaggaagaaacaaacacacacacacactcatactcctcccatctcagatatctaagctacgatttgggctggataaactggacaacctcatctcccacccactgtaaccacacmtctctgtgccaaacctcagtttagtggccaggaaagcag

SEQ ID NO: 530305 - DNA, 619 bp, Homo sapiens
gctaccctggcctcattggattggattatggatacgggtggcagccgaagcagctcagatatgacagccaaaactacattaatgcctgagttctgtttgggttcctgtttgcaagcaatagaaaataattctggcaaatttaacctcaacgcgggattccctagaaggatatctgtgtctcacatatctacaggagcttggaggaccttgctttgaaaagagacagaaaccgaagtgctttggggctgtgcatgggagcacagcaaacgttacatctgaggagcaacaggttcagcttactgcctctgctgctkcttcttcaatggggtggcccagagctgtctctacacttgtctgataggaagaggccaagtgacatgtgtggtccatagctgggctgggcaggaagagagagcgttggcccattggctactgtgtggaaatgtggatcccatttctacatctacgtagttgaagattcctccaaaaggaaattggaatgtcaacaggagttgggtgctggatagcccaaaccaatgaatggtggctacagatggttactctaacacaatgaggcgctctgttggagagcatgaatgtgagacacagagagagagga

SEQ ID NO: 530306 - DNA, 551 bp, Homo sapiens
tcttccctgcagcaggcttctctcctacccaactccaaactcatgccgcccaaggcagcagtctgtcagtgggctcagatgtagctagtgatggtctggaataagttcacattgagtatccctaagcatcttcccaattctcccatatcatgtttgcccaagtcttatgacagcattctgtgcatgatttccttttctgtactctagttttaccttcaggatgaatgttatgcttctaaccccagcccttttggttagaccttatactcttcccacatcttgtcaacaatttcatgtgaattctccctagaacactcttaagagcaaaaggacagctcagaaccrcaaaattgacacggctctggttcttaggagggccgcctgagtatccttattagagtaattgacccagagtttgtcacctctctttgcagtgtttgaagtgttgcttactgctctatcctgaaggttgtataaggaaatatgcataagaacacatttagtttagcaactacttatttaattcttaatacgtagaggaacaagcaagg

SEQ ID NO: 530307 - DNA, 601 bp, Homo sapiens
ctggctctgattccaccaacaaaggagaggctcaccatttgagtccagccacctctatgttactcacctttctctggaacatttaagaacagaaatgcttgtgttttttaagtgtgaaatacgcttcatattcttaatgtacatacaatgtgttttaggttaacaagagcttaatgcctttcatgcttatttcatattttaaattgtattcgtttcctgaacccttcctcatggtggccaacattgtggctaaagtataatatcagtcttttaaggaacaaaaatctgtaagccctagacatttccctcttgacctataactaacatcacagaakcaatctccctaaaagagtagggcagattatttttctcctggtacttgctcagagggtatcacttgtcatttttctgctctgcagaggatgtctttaccttgatgcccactgaacagccactttggagcacctgctatgtgccagcattgtgcaaggtgccaggaatacaaagatgcatagaacataatctttgacctgaaaatatccacaaatgaaaatactaaagtttatcacggaaagtgctatagtagaggtgtgtgagtgca

SEQ ID NO: 530308 - DNA, 572 bp, Homo sapiens
gtttcaattcaacaagaagatctaattatcctaaatatatatgtacccaacacagaaacactcagattgataaagcaagttcttagagaccttaaaagagacttagactcctacacattaatagtgggaaactttcacactccactgacagtattagagcatcaagacaaaaaattaacaaagatatcaggacctcatctcagcactggatcaaatggacyttatagatatctacagaactctccacccaaaaatacatgattcatatttaaaattgtaaaagtatatagcatgtgttcagggggatagtgtatatgactgtgcaatcttggacgcacaccatttatctgggataagtagatttaatcaaattctcagagatccataaccattgatctagaaaagttcaagctccttaatgcagccaaaaatctctttgacctcattgctcataattccctgcctcgctctctcactccagcatcactgaacttcttacaatctttctacaaaacataccacacttggtgtcttctctgtgcttggaccacacaattccctctatgtgtagt

SEQ ID NO: 530309 - DNA, 572 bp, Homo sapiens
gtttcaattcaacaagaagatctaattatcctaaatatatatgtacccaacacagaaacactcagattgataaagcaagttcttagagaccttaaaagagacttagactcctacacattaatagtgggaaactttcacactccactgacagtattagagcatcaagacaaaaaattaacaaagatatcaggacctcatctcagcactggatcaaatggaccttatagatatctacagaactctccacccaaaaatacatgattcatatttaaaattgtaaaagtatatagcatgtgttcagggggatagtgtatatgactgtgcaatcttggacgcacaccatttatctgggataartagatttaatcaaattctcagagatccataaccattgatctagaaaagttcaagctccttaatgcagccaaaaatctctttgacctcattgctcataattccctgcctcgctctctcactccagcatcactgaacttcttacaatctttctacaaaacataccacacttggtgtcttctctgtgcttggaccacacaattccctctatgtgtagt

SEQ ID NO: 530310 - DNA, 673 bp, Homo sapiens
cttctgttcaacttattttttaacattcatttcattatttcaatatttcttataagttgtatgagtttcatatttctttatcttctatatattgagattatgccccagttatatctctttgtctgtaagactagtaatgtcaaaaaaaatgaatttcatgtcttaaaatttatccttagtaaattctgtattttctgttgattatcccttttaaaggccaaaccctctttttaggaatttttcctgaatctcactcaggaatcacatgctgtagtttgctctattttactagatttgaaatcacccttttccatttatgtgaaaattagatttctgtttgctagtttcgatgctcacaaygcctttcacttatttgtagctcttatacttttgatcaaaattaattttataccagaatccttgaaattttttagagtagtagctttgaattcttgttattatttcattctactgtcatcgataacctcccatgttaacactattgtttctttctgtttactttcagctggttggtggagaatttgacttggagatgaactttattatccaggatgctgagagtataacatgtatgacagagcttttggagcactgtgatgtaacatgtcaagcagaaatatggagcatgtttacagccattctacgaaaaagt

SEQ ID NO: 530311 - DNA, 547 bp, Homo sapiens
tatatacacacatatatgtggatatatatacacatgtatggatatatatacacacatatatgtatggatatatayacacatatgtatggatatatacacacatatgtatggatatatatacacacatatatggatatatacacacatatggatatatatacacacacatatggatatatatatatatggtatatggaactgtaagtacacttggtgacagagtgctgggagtgaagaagcatatgccctttttatattaagagataaagatcacttctttaacttcagttaattaaaataaactgactggagaaagttaaaggattgtagcccaagatgcagcctcctaaaaatgtcaagaaagcacattaaaaaatttacgaaaagatgaaaactcagttaatacaaaattaaaaataacaagcaggcagtttcctgtataaagatgctgtttgagatagcctattttccccctttttcctgtaaaatgtataaatgatacaacaagaagtaaaaaatgtactctctatcacaaatgttatcacaa

SEQ ID NO: 530312 - DNA, 626 bp, Homo sapiens
tatataggtgtgcacacaaaagtaagggaaattctcacattccagaaatgaaaatcaagcatactaaaagaaacaagactttaaaaacaaggtaatttaaaaataaaccatgtaattaaaaaaaccctaagtaacttgtgaaaatgtaaaggtagtaattacaatgaacacctatatggaaacattaaacagattagacaaagcttcacaaagaattggtgaactgagggatagaactgaagaaattacctagaaatcaacaccaataagcaagattacaaccatgacattaagagagggggaaaaaaggaaaggtttcaaatatggctaataagagttatagaaaaggggaagagagaatgaggaagaggcaatattcaaagtaaattactaaagttttacaaaattgatgaaagacytgatttctcagattttggaagtaaaatgaattctaatcagggaaaattagtatgaaatcttaccacaaagtgaaactccagaacccaacaaggacaaggagaacaacaaagggaagttagccatataatattaaaagaaatataatattttagtaaagaaaacaatatagtacatatttgtgaataaacagcaaagtgcagtccata

SEQ ID NO: 530313 - DNA, 555 bp, Homo sapiens
tttatagaggggtggtgccaccttccaagtccttgtcttctgcagctatttggatgccttcctctacccagatatctgacaccaacttctctgtttttctcctgccaattttgcggcacctctaccttattttcctgaagtagatggagagctccttcatctttctctgcccccaaacgtgtaccttctctgtcatataattcccatccctgaacctctgcatttcttcccccaagtctccagagccttctgtgatgtgatcctctcctcttttcccctttgtataaatgcttgtcttgtgttcctttagagttgccaggtgtctcactttcaactgtgatctcctgaaggccggtagggtccccttctcactttgtggackctcttcttgccattttaggcctctgcttccaaatgcatagagcctcccttactgtttctgtgtgtctctgtcctccagatgtacggggaccctctatgcaccgaacccaatacgttcattccccgtatgatcgtcctggttggaaccctcggttctgcatcatctcggggaac

SEQ ID NO: 530314 - DNA, 504 bp, Homo sapiens
cataatggggagtggcgggagagatgtctgggcaggaagattagctttagaaactggaaggcctcaaggagtctgaggtcattggtaggccttgggatgccattaaaggtgtcagaaatattgtgatttagaagattaatccataggctgggcacggtggctcacacctgtaataccagcactttgggaggctgaggcgggcagaccacctgaggtcaggagtttgagaccaggctgaccaacatggagaaaccctgtctctactaaaaatacaaaattagccagatgtggtggcacatgcctgtaatcccagctattcgggaggctaaggcaggagaatcacttgaatctgggaggtggaggttgtagtgagccgagatcacacsattgcactctagcctgggcaacaagagtgaaactccgtctcaaaaaaaaaaaattaatccataagtagagtgtatgtagtagagtagagggatgtatgttgggggatgactggaatag

SEQ ID NO: 530315 - DNA, 504 bp, Homo sapiens
cataatggggagtggcgggagagatgtctgggcaggaagattagctttagaaactggaaggcctcaaggagtctgaggtcattggtaggccttgggatgccattaaaggtgtcagaaatattgtgatttagaagattaatccataggctgggcacggtggctcacacctgtaataccagcactttgggaggctgaggcgggcagaccacctgaggtcaggagtttgagaccaggctgaccaacatggagaaaccctgtctctactaaaaatacaaaattagccagatgtggtggcacatgcctgtaatcccagctattcgggaggctaaggcaggagaatcacttgaatctgggaggtggaggttgtagtgagccgagatcacaccattgcactctagcctgggcaacaagagtgaaactccrtctcaaaaaaaaaaaattaatccataagtagagtgtatgtagtagagtagagggatgtatgttgggggatgactggaatag

SEQ ID NO: 530316 - DNA, 622 bp, Homo sapiens
tcgtccacttatatttcattaagcaatgtattcattttagaatacatttctagatcttatgaaaactgcatgtagcgcaatctgagggtttcaattctataaaacaaaaccagtttcttatcagggccactacagagcatttcacgtagaattttttagattattgcaaattttatacatctctaaagttgtaacatgtagtagtaatgtcaagtgaactgcataattttacttgatcagatagaaaattttatatctgaataaggagttttgtgtagaagtcagtagtatagtagaaagagcactgattttggaataggaatcttaaactctttctagcaatatattttaccttggtgaaaaaccacaaaactctcatccaagtactaaacaaacctgacccagtttagcttgtgagatcagataagatgcatgtagggtggcaaggtggggtgaagagtatacaggaactctctgtactatttttgaagtttttctgcaaatctaaaattagttcaaaaattttttttaaaaagtatttttaaaaaatccagagartcagtaagtttcagtttcttctataaatggaaatgtaataatagcttatctttctccctgacac

SEQ ID NO: 530317 - DNA, 652 bp, Homo sapiens
agtcaatatattacttattgaatgaatgagtcaggcactataccaggaatttaattatggtaaaacaaatactttaaaattttactgctaaaaayagcttgagagatggaatataacatgatcaaggtctcatggttactgggtgatggaatcagaaataaatccaggcctgctgggtttcaggccaggtgaccctacgctttcaactcaaagtgttatcttagattcttaggtcttagattcttggatgggatctcttccagttttagaataaagccacttctctctggccaactgaggagtcaattttaagcatgcaaactgggatttcagttaaaaaataaaaattattttagtgttacaaattgtcagtgaaggactttctcaaagctttaatcatataaatagtttgacatctctaaggtagcagttctcaatttcatattgtggattatttcacgagaggaaaaaagagtgaccaactccatctatacccactatgtcactgaaaagaaacctcatcatgactcatgggaagaatggcatctgaaaaaatacttaagaaatgtcacaagtaaattattaatccatgccataaaacagactacagatactgtcatattataaaccttagaatttcaagaaaccagct

SEQ ID NO: 530318 - DNA, 652 bp, Homo sapiens
agtcaatatattacttattgaatgaatgagtcaggcactataccaggaatttaattatggtaaaacaaatactttaaaattttactgctaaaaatagcttgagagatggaatataacatgatcaaggtctcatggttactgggtgatggaatcagaaataaatccaggcctgctgggtttcaggccaggtgaccctacgctttcaactcaaagtgttatcttagattcttaggtcttagattcttggatgggatctcttccagttttagaataaagccacttctctctggccaactgaggagtcaattttaagcatgcaaactgggatttcagttaaaaaataaaaattattttagtgttacaaattgtcagtgaaggactttctcaaagctttaatcatataaatagtttgacatctctaaggtagcagttctcaatttcatattgtggattatttcacgagaggaaaaaagagtgaccaactccatctatacccactatgtcactgaaaagaaacctcatcawgactcatgggaagaatggcatctgaaaaaatacttaagaaatgtcacaagtaaattattaatccatgccataaaacagactacagatactgtcatattataaaccttagaatttcaagaaaccagct

SEQ ID NO: 530319 - DNA, 556 bp, Homo sapiens
tgtaagctgcaaaggcactcccttgcgggggcttagcacagtgtgattcactttggagcagtgcctatcagaaagacttgccacctggggctgggtgcagtggctcacgcctataatcctagcactttcggaggctgaggtgggcggattgcttgagctcaggagtttgagaaaagcctgggcaacatggtgaaaccttgtctctacaaaaaatacaaaaattaaccaggcatggtggcgtgcacgtgtggtcccagctacttgggagactgaggtgggaggatcacttgagccccggcagttgaggctgcagtgagctatgagagtgtcactgcactccagcctgggcaatagagcgagaccctgtctcaaacaaaaaaagaaacatgcctgctgggcactgaggggcatccttctaattgccccaagcccrcatgcatgtccatgtcacaggaggcccctgtgttacctcatccacagccacgtaggttgtcagcacctggcagagcccctcacttttgtcttttcacatcgaagggtttgaatcttggtatct

SEQ ID NO: 530320 - DNA, 500 bp, Homo sapiens
ctttggttaattgagattttgccaggaattaacatcttttagcatcaaatacttttgtttgtgtgtgtgtggttttttctttttgttttgagaagagtctctctctgctgcccaggcaggaatgcagtggtgcaatcacagctctgtgcagcctcgactgccaggctgaagcaatcctcctacctcagcctcccaagtaactgggaccacgggttcatgccaccagcctggstaattttttaaaaattctgatagagactgggtctcactatattgctcaggctgatcctgaattcctgggctcaagcaatccaccagcccttggccttccaaagtgctggaattggccgaatgtggtggctcatgcctgtaatactagtactttgggagacggaggtgggaggattgagtccaggggttcaagaccagcatgggcaacgtggcgaaaacccttctctacaacaacaaattagccgggcgtggtggtgcacacgtatagt

SEQ ID NO: 530321 - DNA, 592 bp, Homo sapiens
atagacataaagagcctgtagtaagtgttcactaaatgctaattattattgactgtgaatgggaacaatgtgagctgtcgggtgtggtcctggttggaggtctgaacaggttccagaggcaaccttccagttcccaatcccagcacccaggccctgaagggagagagctggaaaggccaaaaaaaaaaaawaataataaataaataaaaaggttaatcagtctggagagtctggagcccctgaacttgggattttagtcaggcaggctgcattcctgcattttcctttttcaaagaacatcacaacctctgtcacccaatcttcacatctccgttcccgacagcctggaagtcctccctgctgtctaacctcttggctacctcctgtgctttttgtgtgtggacaaagggagagctaatgaatctcaatgattggcactggagttggctgggagcaggacaggtggagcctgtgtgtggtccacagactgtggtgccagagaaactcaccctgggttcaaaggcctgtctggctcaggatgtagggagtgggccaggggcccccactggaaggtggaatcagagatcttgga

SEQ ID NO: 530322 - DNA, 592 bp, Homo sapiens
atagacataaagagcctgtagtaagtgttcactaaatgctaattattattgactgtgaatgggaacaatgtgagctgtcgggtgtggtcctggttggaggtctgaacaggttccagaggcaaccttccagttcccaatcccagcacccaggccctgaagggagagagctggaaaggccaaaaaaaaaaaataataataaataaataaaaaggttaatcagtctggagagtctggagcccctgaacttgggattttagtcaggcaggctgcattcctgcattttcctttttcaaagaacatcacaacctctgtcacccaatcttcacatctccgttcccgacagcctggaagtcctccctgctgtctaacctcttggctacctcctgtgctttttgtgtgtggacaaagggagagctaatgaatctcartgattggcactggagttggctgggagcaggacaggtggagcctgtgtgtggtccacagactgtggtgccagagaaactcaccctgggttcaaaggcctgtctggctcaggatgtagggagtgggccaggggcccccactggaaggtggaatcagagatcttgga

SEQ ID NO: 530323 - DNA, 554 bp, Homo sapiens
tcaacttggatgaagattccattatcaagccagtgcacagctccatcctgggccaggagttctgttttgaggtactgggtctggtgggctggggagggccaaaggacaggggtgatggaaggtggggggcagagaggtctagagaaagtggcacaggtggggacatcaaggaaacagaaacttctgggactggaggaaagggtaggccagggaggaagagaaggtagcagagtctcctcccctctgtagccctttccctcaactccacactcctttctaggtaacaacttcatcaggaacaaaatgctttgcctgtcggtctgcggccgaaagagacaaatggattgagaatctgcagcgggcagtaaagcccaacaaggtattggggaataaaggggacacaacctgtgyagggcaaaggttgcaccaacacgggaagctgggggcctagggaggaaagtgagttaaaggaggagaggcttggggaaggagaggattgaggtacagtgtatctggacaagcagggggagacccccattattctgagtccccca

SEQ ID NO: 530324 - DNA, 651 bp, Homo sapiens
ggttgtattatagatagcctgagtcatgacatgacaatgtaatgtttgcatctagcttgaggctctggctcagaaattcaagttaatgaagcttgggatgatgaggscatgcttattatacactacatagtctcaagaaggctggggaagagagttaatgattccacagtaaatcattatcaccatctaaagaaagaacaacagcaacaacaactactcacacatgagacagcctggaaggcagtgcatcctgttcattcattccccacctctggcatacctgcatggcacataatcggagtgtaatgaacatttgctgaatgtatgaattttaaaagcacaagtttgattcctccaaaaataaacacatggaattgacatatgatgcaacaattccactgctgggtatatacacaaaagaaatgaaagtagagattcaaacagatatttgtacgcccatgttcatagcagtgctatatattaatacaatagcaaaagataaaagcgacccaagtctttattgacaaatgaacagatcaacaaaatgttccatatatacatacaatgggatattactcaaccttaaagaggaagaaaattctgacacatgttacaacatggatgagccttgaagacatgtaggattctact

SEQ ID NO: 530325 - DNA, 531 bp, Homo sapiens
ggtttgaaattaaattgtttcagaaactgcaagaaaaggcaatatttcaggccgggtacggtggctctcatctgtaattccagcactttgggaggctgaggcaggcggatcgcttgagaccgggagttcaagaccagcctggacaacatggtgaaaccctgtctctactaaaaatacatacaaaatattatccaggcgtggtggcgggtgcctgtaatcccagctactctggaggctgatgcaggagaatcgcttgaacccaggaggcagaggttgcagtgagccgagatcatgctgctgcactcctgcctggygacagaatgagactgtctcaaaaaaaaaaaaaaaaaaaaaaagaaaagaaaagaaaaagaaaaaccaatgtttatatatatgatcttattttaaacctatttttcaggttactgctacaaacacccaaaattactataaaaattgtaattttgcaggtagtaccaaactcataaatttaatattttaagtaggtatgtgacggtttcattgtcttga

SEQ ID NO: 530326 - DNA, 606 bp, Homo sapiens
aataatacaaacctcacaggtacattgtgagtattggggaatgacagatgaagtgcccggcccgtggtggacactcagtgcatggcatgatgccaccttcccttgacgcacctggggaggctgcaccagtccagaccagcctagaccagactagccttgcatcacccaaggttaggcagccagggcctgggaaccatccctgccctgttttctgtttggggctttgtgtttcccagcgtttcctttggaaaaagtccagcttcctccccactggaaggaggcaggaggggactgttcacgcctgggtctggatgcccgagggagccttgtggggagatgacaagagcctggggtttggagtcaggccagtagggtttgaatccaggatctgacctttacaacactgtgtggccctgggcaagtgacttcacctctctgaggtgccaatttcctcacctstttaaggtctcatgatctctgcctcaaagggtactggatgcagatggaggggtggggtgagagaaggttctggatgcagttccccagtgtacatacagtgattccttttggggatgggctgaagaccaggggaggagccaaaggttg

SEQ ID NO: 530327 - DNA, 597 bp, Homo sapiens
atttattttgattttgttacttgtggtaaacagagttcaaaacactctctgctaccactgttccaaactagtcaaaaactatgtaaacaacccacatagtgattgtgtgacccacattttgtgattgtctcacctccccttccagcacaaggaaagttttgtttaaaaaaaaaaatgttcatgttaatttgaaattttaaagcaagttttatccctcaaaactgtcttcagtccacacttctgactgcctttataggaaatcacgttacaatgaactcctttcaaggtacttttggaaccaaaccttctctttggatatggtccaaggtaggcctaattctgttctaagacaagcactattacccgaaagttcaagaatactattttttagatgacrtaggtaagaacatgttgagaaaaacgtgtttgcacccagatgcattttatctgtatgaagatctacgtcaaaggctttgctgattctattttgttctaggaccaatatgccttgtttccctcaagttgctttaaaagattgatttggaatggacccatttggccttttgtatggtccagtttctgcacgttcacattaca

SEQ ID NO: 530328 - DNA, 597 bp, Homo sapiens
atttattttgattttgttacttgtggtaaacagagttcaaaacactctctgctaccactgttccaaactagtcaaaaactatgtaaacaacccacatagtgattgtgtgacccacattttgtgattgtctcacctccccttccagcacaaggaaagttttgtttaaaaaaaaaaatgttcatgttaatttgaaattttaaagcaagttttatccctcaaaactgtcttcagtccacacttctgactgcctttataggaaatcacgttacaatgaactcctttcaaggtacttttggaaccaaaccttctctttggatatggtccaaggtaggcctaattctgttctaagacaagcactattacccgaaagttcaagaatactattttttagatgacataggtaagaacatgttgagaaaaacgtgtttgcacccagatgcattttatctgtatgaagatctaygtcaaaggctttgctgattctattttgttctaggaccaatatgccttgtttccctcaagttgctttaaaagattgatttggaatggacccatttggccttttgtatggtccagtttctgcacgttcacattaca

SEQ ID NO: 530329 - DNA, 505 bp, Homo sapiens
gcaagactttgagaccagcctgaccaacatggttaaaccccatcgttactacaaacacaaaaaattagccaggcatggtgacgcttgcctgtaatcctagctacttgggaggctgggacacaagaatcgcttgaacccaggaggtgaaggttgcagtgagctgagatcgggccaatgcactccagcctgggcaacaagagtaaaatcccatctcaaaaaaaaaaaaaaarggggtggggggaacattgatacttctcataatatggtgattaacagagagaacacatgtgaagtacctagcatagtttctggcatattagtgccaattattttatcactccctgcccccacccccatgctacaaatgcacacacgctcatgtcacatagttaatatctagtaaagccaagttttatgtctggatctttttttttctgcctagcttcatattttgacctttctttccttttcaaacagtatttatcagtatgtgaattttgtataa

SEQ ID NO: 530330 - DNA, 545 bp, Homo sapiens
agctgccacggcttctgctagtgctgctgctcacacacttgcagacggttttaatttagatacctgaagaggaaaaaaggaatttggccaaygccctgctcagatgccgtaagtggcctttccccggttgccattaatatggatctagattacctaaagttttacattacttttcctaggtgctgaaaacgttttagaaatgagaaagtcaagacacatagaagctggaggctaaaataagatactttccatcgtcaggtaacatatacccatggtaaaccctggtagcctactttccttttcctataaacatcccccttcaacaacatcactgccaacatctgaatatatgtatgtgtatacatcatatatagatataatgcatatatatgaatatgagatgagggtggatttagattcggtaaaccgtggctcaatggccagttctagccagcaaagctttagtcaagtcacttaacttctctgagcctcagtttccacgtacataaaatggggtgattacttaatttcaaaaagtagtcaca

SEQ ID NO: 530331 - DNA, 545 bp, Homo sapiens
agctgccacggcttctgctagtgctgctgctcacacacttgcagacggttttaatttagatacctgaagaggaaaaaaggaatttggccaacgccctgctcagatgccgtaagtggcctttccccggttgccattaatatggatctagattacctaaagttttacattacttttcctaggtgctgaaaacgttttagaaatgagaaagtcaagasacatagaagctggaggctaaaataagatactttccatcgtcaggtaacatatacccatggtaaaccctggtagcctactttccttttcctataaacatcccccttcaacaacatcactgccaacatctgaatatatgtatgtgtatacatcatatatagatataatgcatatatatgaatatgagatgagggtggatttagattcggtaaaccgtggctcaatggccagttctagccagcaaagctttagtcaagtcacttaacttctctgagcctcagtttccacgtacataaaatggggtgattacttaatttcaaaaagtagtcaca

SEQ ID NO: 530332 - DNA, 545 bp, Homo sapiens
agctgccacggcttctgctagtgctgctgctcacacacttgcagacggttttaatttagatacctgaagaggaaaaaaggaatttggccaacgccctgctcagatgccgtaagtggcctttccccggttgccattaatatggatctagattacctaaagttttacattacttttcctaggtgctgaaaacgttttagaaatgagaaagtcaagacacatagaagctggaggctaaaataagatactttccatcgtcaggtaacatatacccatsgtaaaccctggtagcctactttccttttcctataaacatcccccttcaacaacatcactgccaacatctgaatatatgtatgtgtatacatcatatatagatataatgcatatatatgaatatgagatgagggtggatttagattcggtaaaccgtggctcaatggccagttctagccagcaaagctttagtcaagtcacttaacttctctgagcctcagtttccacgtacataaaatggggtgattacttaatttcaaaaagtagtcaca

SEQ ID NO: 530333 - DNA, 607 bp, Homo sapiens
tcctggctgataaaacaatagtatgtatttcttagagttaaaaggagtagwcaaggaaacatataaatctaaagccctcgatacacaatgcccttggcacaaagtaagtgcttaataaatgggagttgtttatactgttgttataaatttaactgtagaaaaacaagaaagggaagataaacaaaaagcaatcaggaaaaacattgctttattttttatttttattttttgagacagggtcttgctctgtcacccaggctagagtgcagtggcgtgatcacggctcactgcagccttaaactcccaggctcgagtgatcttcccgtctcagcctcccaagtggctgggaacacaggcacgcaccaacatgtctggctaattttttttaattattattttttgcagagacaaggtctcactatatggcccaggctggtctcaaacgatcttcatgtcttggcctcccaaagtgctgagattacaggcatgagccaccatgcctggcccaggttattcttaatctcaccttttagaggtaggtaagtattttgaaatatttttattccagacattttcctatatatgtgtatttatataagtgccaaaa

SEQ ID NO: 530334 - DNA, 499 bp, Homo sapiens
cagtggggtttgcatcctggccttttgaccccttgactttcactcaaatctgcctggtttaagaatggtcagtggctcagggtgctgaagtgttgtgtgcttcagggggaaatccatgacccagcagttccttccaggaagccacgcagggaggacccttggaactgatggctcctgcacagggcagtgtggagccctggcccaagcatgaggttactagcttcttggggaagcccagggatgttagcgcaacmccaggcccaactccgcaagcccacactgtgtcctttgggaaatgagaagcctcgagcagccagcctgaggcagttccaggcatggactgggtgagttcacagggacacagacctctctccccagagatccgacatctgcctccaaccctccatcctcctgtccccagggagctgccgtctgtgccctcccactctgctctcctgaccctggcagctccctgggtgatgggaaaggcagctttcca

SEQ ID NO: 530335 - DNA, 461 bp, Homo sapiens
tgctagaatccctgctttttaaaaattttatttttgagatggaactctgtgagacagaactcctggcctcaagtgatctatttgcctcggtttcccaaagggctgggattacaggcattagcaaccacccccggctccctggcagtttcttctgccagtrtttagtcacttcatataagaatgttccttcttagaagagcaatattgataatgtgccagggctctagagtcagacctgggatcacatttaggctgaaggttgctgtggacttgagcaaattacttattctctgaattccaaattccttatctatagagaaaataataatacctatctcacagggttcttgtgagtcttaactgaatcaatagctataatcctggcagctattataattattattgtttatcaaattttcattcatgtataaagcaacacagtgccaaaatccaaaaaaagt

SEQ ID NO: 530336 - DNA, 520 bp, Homo sapiens
tgatttactccctggaggtgagtgagggtcccctggccctgctgagaagctcctctttgcaaaaagaacttccacaacacgtctacccaccctatggtataacagatgttcccaccttccagatgtttcagatgaagtggagaatatctgatggggtgggggcacagggaaatcgagtccctgggggcttacttcccaggaagcaggsagctgagactgggtggaggatgtgccgagacacagccttgtccccatcagctctgagaagaaggtggggagtgcaggcccagttacaagaggaggcagacaccacagtgtgcaggcagcagtgttcttgtgcggagcctggtaccgtcaggtgccagtggagggtccaggggctgataatgtgccctcactaagttgctgaattaacccttattcatgagtatctctgccttggaattcatctcggcaattcctattgcctctaaaaaccctctaaaggcttttcctagcaaagagcagtaactcttcccca

SEQ ID NO: 530337 - DNA, 363 bp, Homo sapiens
atcacaacgtgaggagttcgagacagccwggccaacatggtgaaaccttgtctctactaaaaatacaaaaattagcctggagtggtggtgggtgcctgtagcccctgctacttgggaggctgaggcaggagaatcacttgaacccgggaggtggaagttgcagtacaccagcctgggtgacagagcgagactccgtctcaaaaaaaaaaaaaaaaaaaagaaaccatcaagaaggtgccaaacaggactctgtctttaacatccatgaagcctgcaaaatgtaaccccctctcccctctcactgcccctgttagctgagcccaggggtgattacaagccagggggcaggggctgcattgggca

SEQ ID NO: 530338 - DNA, 488 bp, Homo sapiens
gcaattccagggtgggaagaccccttgtccccagttgaaaccttctagtatttaagaaaccatcagggccgggtgtggtggctcaggcccgtaatccccagcactttgggaggccgacgggggcagatcacaacgtgaggagttcgagacagcctggccaacatggtgaaaccttgtctctactaaaaatacaaaaattagcctggagtggtggygggtgcctgtagcccctgctacttgggaggctgaggcaggagaatcacttgaacccgggaggtggaagttgcagtacaccagcctgggtgacagagcgagactccgtctcaaaaaaaaaaaaaaaaaaaagaaaccatcaagaaggtgccaaacaggactctgtctttaacatccatgaagcctgcaaaatgtaaccccctctcccctctcactgcccctgttagctgagcccaggggtgattacaagccagggggcaggggctgcattgggc

SEQ ID NO: 530339 - DNA, 470 bp, Homo sapiens
gattgtagtgcttagcgtagaaatttagccgtgggcaacaaagatccaaaaagaatcagagttttcagaaagaaatttatttctcacacataaacaggcaattcaagattgtcgggtrgctcctcctttatctgggactcggggtgcttctgtcctttctctcctccgtcactgggacatgattaccaacctcatggtccaggatgtgataccagcaatcattccactttcgaagcagtattacagacgaaagtctatgggaggaactttagactgttttatctgttctcctttcccaagctaatggaagctgcctgtccacctgaactaaaaatcacatacccggtgctgcagctagaacttctggctcaggggacatgatggagtttcctggctgtttcattaaaggcagtgtctgcgggcagcttcttcccgcctttactccatcttggacgatgaggtcaaaggcc

SEQ ID NO: 530340 - DNA, 573 bp, Homo sapiens
ctggattgtagtgcttagcgtagaaatttagccgtgggcaacaaagatccaaaaagaatcagagttttcagaaagaaatttatttctcacacataaacaggcaattcaagattgtcgggtagctcctcctttatctgggactcggggtgcttctgtcctttctctcctccgtcactgggacatgattaccamcctcatggtccaggatgtgataccagcaatcattccactttcgaagcagtattacagacgaaagtctatgggaggaactttagactgttttatctgttctcctttcccaagctaatggaagctgcctgtccacctgaactaaaaatcacatacccggtgctgcagctagaacttctggctcaggggacatgatggagtttcctggctgtttcattaaaggcagtgtctgcgggcagcttcttcccgcctttactccatcttggacgatgaggtcaaaggcccctgggacctccactggagccaggacaccagccctgctctgcctatagtaaggcttttgcatgtgcatgaaatgaacttctatctttttagccactgtcc

SEQ ID NO: 530341 - DNA, 568 bp, Homo sapiens
aatcaattcaatccaataaatatttttgaccatgtcccatgtttcaagctccatgtgttacgttagcaatgcaaagatgaaaatagcataatctttacagtctaggatctgaccaactaatgggaggaaattgacatgaataattaatcatattgctttctaataaaaatgtartagaagaacataccagatattcaagaaagcagtgtgtgaaacaactaattttgcttgaggaaaaagttaactataaaagggattgtatttgagttgggcaaatctaaaaggtgattaagatttcaataaggaaagaaagaaataaaagacattccaaggagaggaaagagtatgtgcagaagcagtgtggtgtgaagaagcatggcatgttgagtgattttaagttgatcagggtacctgagtaaagtaggcatgagggaaaagtaggcagtgtagcataagctaggaccagaaacaggaaggacttcatgtgcaatgctcagtagttcgaacttttacattttaacattttgaaatgttcttaggggaaaacgtgttcaacaaatatctgcag

SEQ ID NO: 530342 - DNA, 640 bp, Homo sapiens
cctctctgctaacatcgtaccttgcttatgtttatattattgtgcttttcactatactgcatttataaagtatattactatatggtatttgcctgaataagtacatgtatgacttaacagtgaagtattagccttgtttatctttacccttgctacttatctcagtacctgacatatagcaaaagctyaataaatgtttgaatgcatgaatgaatgaatgaatgaataaatgaagaaacatgttgatttagggcattcattgaggaaagttatatgcctatttgccttaaagatactgtaacgtaaaaatattttcaaacattattctaggataggataaatgaccaaacttggggaggtgtcaggatgtcatattgaagatggggaagagagaagaagaggtagaattggaacagattcagagaatgaacaaaggaagggaaatagctgtactttcaaaccccacactatgtcttttggaaatgaaagacaatgttgagtaggaatttaaaacaccggagatatggtgactgggctgatcacatctctgccacttcctaggtttgtgactttgaggaggtgaactttttttgtctttcagtctcttctttcagaatttgcttcctatatctgcttaaat

SEQ ID NO: 530343 - DNA, 461 bp, Homo sapiens
aagctcaataaatgtttgaatgcatgaatgaatgaatgaatgaataaatgaagaaacatgttgatttagggcattcattgaggaaagttatatgcctatttgccttaaagatactgtaacgtaaaaatattttcaaacattattctaggataggataaatgaccaaacttgggkaggtgtcaggatgtcatattgaagatggggaagagagaagaagaggtagaattggaacagattcagagaatgaacaaaggaagggaaatagctgtactttcaaaccccacactatgtcttttggaaatgaaagacaatgttgagtaggaatttaaaacaccggagatatggtgactgggctgatcacatctctgccacttcctaggtttgtgactttgaggaggtgaactttttttgtctttcagtctcttctttcagaatttgcttcctatatctgcttaaattga

SEQ ID NO: 530344 - DNA, 640 bp, Homo sapiens
cctctctgctaacatcgtaccttgcttatgtttatattattgtgcttttcactatactgcatttataaagtatattactatatggtatttgcctgaataagtacatgtatgacttaacagtgaagtattagccttgtttatctttacccttgctacttatctcagtacctgacatatagcaaaagctcaataaatgtttgaatgcatgaatgaatgaatgaatgaataaatgaagaaacatgttgatttagggcattcattgaggaaagttatatgcctatttgccttaaagatactgtaacgtaaaaatattttcaaacattattctaggataggataaatgaccaaacttggggaggtgtcaggatgtcatattgaagatggggargagagaagaagaggtagaattggaacagattcagagaatgaacaaaggaagggaaatagctgtactttcaaaccccacactatgtcttttggaaatgaaagacaatgttgagtaggaatttaaaacaccggagatatggtgactgggctgatcacatctctgccacttcctaggtttgtgactttgaggaggtgaactttttttgtctttcagtctcttctttcagaatttgcttcctatatctgcttaaat

SEQ ID NO: 530345 - DNA, 461 bp, Homo sapiens
aagctcaataaatgtttgaatgcatgaatgaatgaatgaatgaataaatgaagaaacatgttgatttagggcattcattgaggaaagttatatgcctatttgccttaaagatactgtaacgtaaaaatattttcaaacattattctaggataggataaatgaccaaacttggggaggtgtcaggatgtcatattgaagatggggaagagagaagaagaggtagaattggaacagattcagagaatgaacaaaggaagggaaatagctgtactttcaaaccccacactatgtcttttggaaatgaaagacaatgttgagtaggaatttaaaacaccrgagatatggtgactgggctgatcacatctctgccacttcctaggtttgtgactttgaggaggtgaactttttttgtctttcagtctcttctttcagaatttgcttcctatatctgcttaaattga

SEQ ID NO: 530346 - DNA, 604 bp, Homo sapiens
ctgcactgttaatagtgaatgctgagctccctccaattcatgcaagttattcaagcagtaattggagattcactgcttaaatgtctcctcctaaaatatattaattcgtaagttatttatcaagttggtcaaatttatggctttcataatgaaaatgtatctaaaatacctacattctgtgtgtgggtgtgtatttgtgcttacatgtgtgtatgtgttgcggatatttaaacttagtttagaaagagaacatttacaataatgaatagcattgcaaatattagaagagtgaatattaagtgatcagaaatgcacatctcaaattcttatatttttaacaagcctccgggaactcattagaatttttgaattatactaaaaccccatcccctttgtgaatggaaattttagggtttcaaggctgaataaagttgtattttagctctaggcctttgaatatctgttatacattttttggtaggtgtatatgtargatttctatttttggtaaggtggaagctgcttatatacctttgtcttttccaaagtgagaccttttatatattaaagttttacaccccattattggaatatatgattccct

SEQ ID NO: 530347 - DNA, 555 bp, Homo sapiens
tcactgcaagctccgcctcccgggttcacgccattctcctgcctcagcctcctgagtagctgggactacaggygcccgccgccatgcccggctaattttttgtatttttagtacagacggggtttcaccatgttagccaggatggtctcgatctcctgaccttgtgatcctcctgcctcggcctcccaaagtgctgggattacaggtgtgagccaccgcacccggcaagtaatcatattcttgttgaaagagctgagaagccatgagggtttcctgtcagccagagtagtctggaaactttatataggaggtaggagttgatctagtgtccagtgggtctcactatagaaccccatactgggatgggcttgcaatcagctctgcctgagtttgttgaggcttggaaatgggacagaggtgaagcctggggaagctacaacctagtactcttttaactacagtcctcctatggttctattccccagtttggccttctatacctctacctacccctccacgcgtcatcttgagttttgaattttcaccaagcagcag

SEQ ID NO: 530348 - DNA, 620 bp, Homo sapiens
tgaatttatcagtcacacacattctggttgtctagctatgtgcaagtacgatctcaacacagctcattatcatggcccaggaatactcagatgcaaggtttgctttcttttatttattcctcctcccttctttccttccttcctcccaacctcctccctccttccttccttctttcatttgtactttctctctctttatctcttgtcaacacctcttttaggatcagaaattgtakccggttcctggaagtctgtgctgcactcagcacggctgggtggaaataagtgtgctaacttggctgcaacaactcctgcatggcacagagctgactggccttgaggtctggtgagacctgactttgtgaggtcagggaagccctaccattcttgcactctgccctccattgctctggctcagctcaaagcggagcgcagtggctgaccctgtgtactttggcaaggcagcactgttgtaataggccaggatgaggtttttctcaagccactgtacagtcctctgggagactgtggatggcccaacctagctgaaaattcacttcctcttaagacttcataaagaaattgtaaaatgttcaatgaccgccttagagattggaaag

SEQ ID NO: 530349 - DNA, 620 bp, Homo sapiens
tgaatttatcagtcacacacattctggttgtctagctatgtgcaagtacgatctcaacacagctcattatcatggcccaggaatactcagatgcaaggtttgctttcttttatttattcctcctcccttctttccttccttcctcccaacctcctccctccttccttccttctttcatttgtactttctctctctttatctcttgtcaacacctcttttaggatcagaaattgtatccggttcctggaagtctgtgctgcactcagcacggctgggtggaaataagtgtgctaacttggctgcaacarctcctgcatggcacagagctgactggccttgaggtctggtgagacctgactttgtgaggtcagggaagccctaccattcttgcactctgccctccattgctctggctcagctcaaagcggagcgcagtggctgaccctgtgtactttggcaaggcagcactgttgtaataggccaggatgaggtttttctcaagccactgtacagtcctctgggagactgtggatggcccaacctagctgaaaattcacttcctcttaagacttcataaagaaattgtaaaatgttcaatgaccgccttagagattggaaag

SEQ ID NO: 530350 - DNA, 266 bp, Homo sapiens
agggaaacaggcttgaactgaccttgctgagcttgtaatgtgggatgagaagaggaagaacaaggtaaggaggactctgccaccaatccagcagggaccagataagaatcatgctggtaaacaaggaatgggttgccartgaagcctccgtcagccccaaatgaactaaagaaattaactaagaccagcttgcgacaggggtggggtggagtggagaggatgtcagagctacatgggccttcagataagcctagtccaattctgtc

SEQ ID NO: 530351 - DNA, 309 bp, Homo sapiens
aggaaagccgatcttgctggggccagcagtatcaaggaggggcaagattyccagagggggtgatatttgagtttgtctaggaagaatgagaaggtttcttcagttggggaagattttcagggagggaatggcatagacaaaggcccagacgcacgtgcacttagcctctgtgagccgtgacatggggatagtggtgcctcccttgctgggtgactgtgagcactgatgagctaaaggctgtgtgagggctgcacagatgcacattatcagctctctgcctagctcttggggtgggacagggcaggaatg

SEQ ID NO: 530352 - DNA, 599 bp, Homo sapiens
cggggactttgtgtccaacaggaagcgggctctttcttctcatctagagtcttttgatttggttcagttcagcccaacatgcatttctaagctccttctctgtgcagagcctgtgccaggcatggggacagcaggggaacatggcgcattcctgctctcccagtgaggatcctgggctgtttctggcagactaaggtctgaatcctggctccacccctgcctggctgtggtagcccgggaaagtaacccaactctgtaactctgaggccaggttcctggattgcgaaactggagcaagaattagcagcctgcagtttgctgagaggattaaacgtgatagtgtatgagaagtcttagccagtgcctggctcagtgcatagacgcactcaagatttctatttatcctagaggaacccagacagcctcwtctgccagacagcatgtgcctctggcccatccttttgtcagaagtccccggggagccctttgctgcaggcataggaagactcgtggaaggtgttcagcggagcctcaggacccgtcaggcctgagggattggcttacctgtggaggttgatggcaggaaagaagtgttcagc

SEQ ID NO: 530353 - DNA, 557 bp, Homo sapiens
tgcaaatgtgagttggttatgacgtgttttctcatgacctccctgacatgctctactgtaatggttgaggtttgagctgtatgggccaacatactgcctgggtttctgggtttctatcttgcttctatcaattcyttttttctttttcttttcttttcttttttttttttgaaacagagtctcgttttttgcttaagctggagtgcaacggcacagtctcagctcactgcaacctccacctcccaggttcaagcaattatcctgcctcaacttcccaagtagctgggactacagttgtacgccaccacacccagctaatttttgtatttttagtagagatggggtttcaccacattgaccaggctggttatgaacctctaccatttcttagaaggaataataatagttactgtttagagaattaaatgagcaaataaatgcaaacaaatctagaaaaatgcctggcattgagtaaatctcaataaatgttcctactattagtcttaatttacagatgaggaaactgaggcttagagaggttttggaatatgactgag

SEQ ID NO: 530354 - DNA, 557 bp, Homo sapiens
tgcaaatgtgagttggttatgacgtgttttctcatgacctccctgacatgctctactgtaatggttgaggtttgagctgtatgggccaacatactgcctgggtttctgggtttctatcttgcttctatcaattccttttttctttttcttttcttttcttttttttttttgaaacagagtctcgttttttgcttaagctggagtgcaacggcacagtctcagctcactgcaacctccacctcccaggttcaagcaattatcctgcctcarcttcccaagtagctgggactacagttgtacgccaccacacccagctaatttttgtatttttagtagagatggggtttcaccacattgaccaggctggttatgaacctctaccatttcttagaaggaataataatagttactgtttagagaattaaatgagcaaataaatgcaaacaaatctagaaaaatgcctggcattgagtaaatctcaataaatgttcctactattagtcttaatttacagatgaggaaactgaggcttagagaggttttggaatatgactgag

SEQ ID NO: 530355 - DNA, 550 bp, Homo sapiens
atttgcacatgctgttccctatgcctgggatgccattccccctcctccctgtgcctgagggatgagtctcctggcggtgtgagtcctcccttatacaaattgagtcattcatcttaaccctgtcttgttctcaaaagtctttgacacaaaagcactttgtctatttctctgcaagtctccatgtgcgcctctggatctacccgttcctcttcaccctgctctgtgccctggggaggccaacccacactgactgcatgcactgccttggaggcaggaggagaaggaagccaggtcctgtggttggctgtgcccctccgtggaagcacacatctcttcccctcacccttcagacctgaggatgataagggctcctcactgtcactcgccccaggttctgcactctcccttgtggcttctctatcccccgcctttttttttttgagacagagtcttgctcttgtcaaccagactggagtgcagtggcgtgayctcagctcactgcaacctccacctcctgggttcaagcaagtcccctgcttcaacctctgga

SEQ ID NO: 530356 - DNA, 418 bp, Homo sapiens
cccatacctgctagggattatcttcatcagaatctttgccagtttagctggtgaaaaaagctatcatggtttttagttttcccatattttgtattatagtataatgctggctaccttttatgatggtttactgtgtgttaggagaatgtaaaccctgagaggtttgagaytgctgtctgttttgttcactgcagtacccccggcacctggcagagtatctggtacacagtagccactcaataaaaatttgataaataattgaataagtgagtgtgctggtcattgaggtcagcactttacacagataatgtcattagtcttcacagcactccaaggccttagctagtattcataccatgtgcgcagtcccctctgacccaatgggcaccctgagggcctcaatttgaccctcaggttc

SEQ ID NO: 530357 - DNA, 418 bp, Homo sapiens
tcaacacaggaattttgcagagacaraaacactcaatggtgtatttccaggacctagaactatatgtgacccacaatgggtgctcaatatacattttctgattgaaagaatgcctggagaaattgaggcagagaggaaaaggtacatagctagtgtatggtacattttgagccagggcagtgagatattggagccagaaatcaaccaccgtactttagtcataactaccacatctatactggctattcttaggggatctgaaaggccaaaactattctggacaatcatacaaggcatattttcctttgtcattctcatcattctcattctcccacaagtgtgtggtggcattttccagaggctacatgatgtgtgataactcaactgattgaatgtagaagcagatatgagaatgcca

SEQ ID NO: 530358 - DNA, 602 bp, Homo sapiens
tgtgccctcttgcccttccaccttctgcgatgagatgatgtagcaagaaggttctcaccagatgccagcccattgaccagcctccagaactataagaaataaatctctgttctccataaattaccccgtttcaggtattctgtaatagcagcacaaaatggactaagacagtgaataaataggagtctgaaatagtttgacattttagtggagagtctcagtgtattgtaccaaacgcaggtggtacagaaagtgaacttcttcagaaaaaaaagtaagatactgttgacatctggcagagctcaggctctgccagcattgatgaaaccctgtgagatccagatggcttcgaacctgactacaagcaagctggctggtgcagtggcccacctctcctgtaaaataggtcagactctcctttcagaataagcatgctgtttgaaaagtaaagtacaacttaaatcccaatgggaagytccgtgccaacagcatggttatggtgaatcccattttaaaacttttttttttttttttttttttttttaatcgtgtatttcagtttgcaagtccggtcctgtcactcactgccttagtccacagca

SEQ ID NO: 530359 - DNA, 467 bp, Homo sapiens
tatctctcagatttggacaggaatctgattggtgtcagctgtgtaaagagagatgcaacagggacagatgtttrtatgaacaattctttcacgtagatcactttcatggaatgatgactatattttcaatattttgaaatccccctaagaaactcatgtaacaaataaaagaaagcatctatctcatctattctattcacagacctatctatatccacactaatctagaagattcttttggttgcctgcacagcagccattactctgtatattcttccctacaggaagagcctaaaaatgcagctactcttttccccagcctccatgataactgccttgtgtatttttcaggattgttagttgcagacaacaaagtccaccctaattaggttaagcagaaagggatttactactggatattagacagtttaagaacatatgggaaaaccagatagccaagcacattt

SEQ ID NO: 530360 - DNA, 604 bp, Homo sapiens
gcaaatatttgttggttagttaaaaaggaaattgtccaaaggaggaaaatggcttagaaaagaatttataaagaaatgaaatgagggagataaactcatagaacagcaggttacccattgaaatctattaaacatagacaagggagctggtctattcaaaagaagcccagaaatctgaaatcaaatatttagaatggaaagaaacttcaggataatccaattgacattcttcattcattgtggttaatcacccactaacttctctgacttgtgaattgagtttttatacattwaattttttatgttataaaatatgactctcggtaatttcctagaaacagagtctgagagaatagaaccttgaaaaaatggcagctatttcatcgatataaaaaaatattttttcttgctagagtcaagccagacatcttgagccagacttgtggtatcccttttttattttacacttcaatatggaaaagaacagatgattaacagaaagacaggattcctcacctggaaacacagaaaatgctgactggttcagaggggagctaacttcaggagcgaatccaaagtgttagaaggtcctagaagtcaaatt

SEQ ID NO: 530361 - DNA, 604 bp, Homo sapiens
gcaaatatttgttggttagttaaaaaggaaattgtccaaaggaggaaaatggcttagaaaagaatttataaagaaatgaaatgagggagataaactcatagaacagcaggttacccattgaaatctattaaacatagacaagggagctggtctattcaaaagaagcccagaaatctgaaatcaaatatttagaatggaaagaaacttcaggataatccaattgacattcttcattcattgtggttaatcacccactaacttctctgacttgtgaattgagtttttatacattaaattttttatgttataaaatatgactctcrgtaatttcctagaaacagagtctgagagaatagaaccttgaaaaaatggcagctatttcatcgatataaaaaaatattttttcttgctagagtcaagccagacatcttgagccagacttgtggtatcccttttttattttacacttcaatatggaaaagaacagatgattaacagaaagacaggattcctcacctggaaacacagaaaatgctgactggttcagaggggagctaacttcaggagcgaatccaaagtgttagaaggtcctagaagtcaaatt

SEQ ID NO: 530362 - DNA, 538 bp, Homo sapiens
cgggcaccagctgcactgccatggtctccgattcccatgcacgaatcctgctgccgagtcagtcctcctgggccccgggtggctacagagcatccaaaagcacctgcagaaaaagcagccaaaatccagacttagggagcaaaaggctcaaggggaagataggccacctttcacacagsgtggggaggaggtcagggaagacagggtgggaactgtgcttagggaggaaaaaaaaaaaaaagaagaaggaaaataggaagctgcaggttatttaaaagtgagccctccctagcttcgcaaagcggcacagacagggagaccgcatcaaacacaaacgtgaaagcttagaacacggaatgtttaactgctaccttcgccctggcagcaattcttcctttaactgacaattaaaataaaacattccctattgcagataaatcaagcagcccgagccaccccctctctctgcatctctcagcaattctgctgcataaacatgctgaatgtcacaacataccgctcgcaatctggtcagtgt

SEQ ID NO: 530363 - DNA, 583 bp, Homo sapiens
ctgcctgggactgagggcgagtctagcttctccaaaagtacgtggctgcccaataacagaaaaaaatcaaggtttgttggaaaaataaaggagataaaatggctgctgagaaagtactggtgttggctgcagaggttcagagacctgttgattgagtgaagggatggatgggtggatgggtggatgggggctgtgggggatggtaggtacattatttccctgtccctattgccactgctcctgcccttgcaaagatcaccatcattatcacttgattattaaaatggctctacatgcatatcatcgtctaccaccatttttctccttctcaatatattatctacattgatgtgagaatcccttctaaaactcagattgaatcatggcatcagcctcttttaaaaaattattccataattaaaaaaaaacccaagtccttcatatgatagtcaagatccttcacaatttgattagaacgtgtccacctctaccttcctccacctacatggtcttcccaaacacacccarttagctttagctatgctatacaattaaagagtgtatatctccacacttgtggtcc

SEQ ID NO: 530364 - DNA, 557 bp, Homo sapiens
aaggctgaagaaggatggattcttgctctctctcctggagctgcggcacccatcttctcctgtccttggatgtcaggactccaggtttcctggctttgggacttcaggaagaaaaccagtggccccccaggcttttgggcctttggcctcagactgactgagagagataccatcatcttctctggttctgaagcctctggacttagactgagttatgttatgggtttttgctgattctccagcctgcagacagcccatcatgggacttctcactgcacagytgaatgagccaattcccctgataaattccttctcgtctctctccctaaatagttatcatgtcagttctgtctctctggaaaaccctgactcaacagtctcttttgcaatataaggtaacatcttcacaggttctggggattaggacaagggcatctttgggaggctattatcctatctaccaccatggtctatgatctggagatttccaaattcctcacctatccatcttcttagtgggaaattcctcccaccctctgcagagagccatctggagt

SEQ ID NO: 530365 - DNA, 512 bp, Homo sapiens
tgctggggaaaggggagaagagggtcatcagagcaatccaaaggagaatggggcttgacaaagaggtaggagggaagaagttggagaagacaaaggaggcacagaagctcaaccaggcagagagaaaaggcccagagtgtgggtagggtccagtgtgcttaggtaaatgcaaggagttaaacatgattgmaatggaggggatgggtgtcgatgtgggaccggtggattgtcaaagacagaagagaagtgacccgactataaagtcttattattctgtgacatgctgctcattgtgctaccaatatccattctctctactcaatctctcctttttgctctgtatatgacctctaagaataaaaaccaggtatctctgcctcccttgcaaatgggtatggcccatgtgatgaaatcctgaccaatgggctgtaaatggaagtgatgtgtacaattttcaggaagcgtccttcacagagagggtgtgtctgtctctttctttcccctctcctgct

SEQ ID NO: 530366 - DNA, 604 bp, Homo sapiens
aggtcctacctccttattagtgatctcagatggggactattttacctgcaaggagacatctgacaatgcctgaagaggtttttggttgtcacatctagagagagcatgtgctactggcatatatagtagtggaggccatagaggctgccaaacaacctacactgcacaagacaatattctctcccccaccaaaaaaattatctagctctaaatatcaatagtttgaagactgagaaacctcctagagcttagcagtcaccagcatacagtagatgcccagtaaattattgctagataaatgagaggtgtgcagcttcatttacaaatctgttttgtttgcaaaatacagcaattatctttcaaacatttacaaatttctaatcctgtgatagggatttattttctttttgtatatgtgactttacagctatccattgaactgcacactgagggtacaaatatgatcatgatagatgatctccctgccctcaagtagttcaggtctggtgaggaagrcagacaattagacatgcacttactgcatagaggaatgagtgctaggacagaggtacactgagacaattgatacctgtcacatgaacag

SEQ ID NO: 530367 - DNA, 433 bp, Homo sapiens
aataagcctttctggactgagtttttaaagtctctgtaaaagttgatttgtttatatcttctctaccaccctttatttgcaccattcagatttatgaaggcaattgctgcaaatgtttgttgataatggaatctgtactcctcattactcctttggatacctgcatagtgygctcaccatttggggtctctgcgtaaatataacctcatcagagataccttccctggctactccacctaaaatggaaactcccttcttctataatttgtttctccttttaatcagctttatttttctccatagcacttttcatcaaggcaaataaaatgttattttttctttgtttattttctgtctctccataaggcaagtgagagatttcttctattttgatgactgacatatcctcagagcctagagttgttcctgctct

SEQ ID NO: 530368 - DNA, 433 bp, Homo sapiens
aataagcctttctggactgagtttttaaagtctctgtaaaagttgatttgtttatatcttctctaccaccctttatttgcaccattcagatttatgaaggcaattgctgcaaatgtttgttgataatggaatctgtactcctcattactcctttggatacctgcatagtgcgctcaccatttggggtctctgcrtaaatataacctcatcagagataccttccctggctactccacctaaaatggaaactcccttcttctataatttgtttctccttttaatcagctttatttttctccatagcacttttcatcaaggcaaataaaatgttattttttctttgtttattttctgtctctccataaggcaagtgagagatttcttctattttgatgactgacatatcctcagagcctagagttgttcctgctct

SEQ ID NO: 530369 - DNA, 433 bp, Homo sapiens
aataagcctttctggactgagtttttaaagtctctgtaaaagttgatttgtttatatcttctctaccaccctttatttgcaccattcagatttatgaaggcaattgctgcaaatgtttgttgataatggaatctgtactcctcattactcctttggatacctgcatagtgcgctcaccatttggggtctctgcgtaaatataacctcatcagagataccttccctggctactccacctaaaatggaaactcccttcttctataatttgtttctccttttaatcagctttatttttctccatagcacttttcatcaaggcaaataaaatgttattttttctttgtttattttctgtctctccataaggcaagtgagagatttcwtctattttgatgactgacatatcctcagagcctagagttgttcctgctct

SEQ ID NO: 530370 - DNA, 627 bp, Homo sapiens
  misc_feature (1)...(627): n = A,T,C or G
agcttagttctcnnnnnnnnnnnnnnnnnnnnnnnnnnnnnnnnnnnnnnnnnnnnnnnnnnnnnnnnnnnnnnnnnnnnnnnnnnnnnnnnnnnnnnnnnnnnnnnnnnnntctaagcactttacatactaacttatgcaaacatcattacaatttataaggcagttactactataggtgtatttttcaatgaagaaaccagggcattaagaggtttatcaaccttctgaagatcttaccaccaggaaatggaggaagcagaatttggaccagtttgtttagctccagaatccatgtgcataagttctagtggcaccaagggtggaaccaggaggcagtctgttctgggtgtgggcaataaggaagtgcattgtcttaaagaacttgaaaacaataatacaccttgctaaacatcagtctgttyattgtcaccaagcactggcaattctaagtgatttcagggagaaaaatacatgtttctccaaattatttgttggtcaaacaattgctgctattaatgttgacttttattgatgcgtgtataagtttcaaataggcacatgcttattgcccactaataaaagataaagttaattcagaggactctcaattctagagtaggccct

SEQ ID NO: 530371 - DNA, 467 bp, Homo sapiens
aacattaattttaaatcttcaagatttgtaaccttgacactttgttctgtgactataaatctccctcactttgtctatatgctgattataaagctataaagcaaaaaatggcatttgcaaggttacagtgatataaatgtcatctgctgatgaaccccccaaaagtatgactatgttcataggaaaaaaaatgttatcttatttcactaaactgggccacttggaggaaactttgtaatcctcacggccaaatggattctttttaaaattaaaatcaagtgctcaatattgggccacttttaattctgcttcatgtttgtactctgatgttgtacagctacttatgttccctggagtttctagctgttytacttttgttgctgttgttgacagaagaaacatatgctctcatctgatcagaaatttctaggttcctaataatagaattgcataatgaaacccacttg

SEQ ID NO: 530372 - DNA, 581 bp, Homo sapiens
ccagtgctcactgcaccctgcctggttgctcagtcctcaggctggcttaacgggcatgcgacctgtgcagcagccccctctttggtttaatactctgttgtcatcaccttgaaattcttaatactttttcaacaagggttctccacattttagttttgcacggggcctcacaaattatgtggctcatcccgccagtacctttgtggatatgattcaagcattaggcatgtctccctggagaagcatgttccagagtcatgttccagatcaaagacagggctgacaggccgggtgcggtggcttaaacctgtaatctcaacactttgggaggccaaggccagaaggttgcttgagcccaggagttagagaccagcctgggcaatacagtgagaccctttctctctatataaaaaaaattagtctggcatggtagagcatgcctatagttccagctacttgggatactgaggtgggaggatgacttgagcctgggaggttgaggctgcagtgagctgtgatgaagctgctgcactccrgcctgggcaataaagcaagactctgtctcaaaagaaaaataaagg

SEQ ID NO: 530373 - DNA, 612 bp, Homo sapiens
aagcaaatcaactgaagactatttggctccaaaatccacacgcctaggcactgggcattacttgtgtatgtgcaatgatcgtgtgtgagcatgtacttctattgcagtgagctcaggggtgggtggatcatgaggtcaggagttcaagaccagcctggccaacatggtgaaaccctgtctctactaaagataagaaaaattagccaggcatggtggtgcgcacctgtattcccagctactcaggaggctgaggcaggagaattgtttgaacctgggaggcagagtttgcattgaactgagatggtgccattgcactccagcctgggcgacagggagagactccatctaagtaaataaataaaaataagaaatccatttaaggttaactttttcggttttgacagtcttacaatagagctaataggctgaatgggggcaggtaaggccatttaagaactgctaataagtgctagcatcttggctttgctggggattctatctactggggatgaaaggtgatgtcttggagtattgtgattaagtgatttccaccaaacctcaggcagcaagtagtgcrcatagagttatccggactgagtataaaagcctggt

SEQ ID NO: 530374 - DNA, 557 bp, Homo sapiens
gcaggtcccccagcgctcgcgtctgggcccgccccccgctgcggggcggattgacaggagcccggcggccaatcggacgccgtggggcggggcgaggcggggcggtgcaggccggctcccggcgcggggcgctatttacggcgcggagccggagagacctgggctggcgcgggcgggagctgcggcggatacccttgcgtgctgkggagaccctactctcttcgctgagaacggccgctagcggggactgaaggccgggagcccactcccgacccggggctagcgtgcgtccctagagtcgagcggggcaagggagccagtggccgccgacgggggaccgggaaacttttctgggctcctgggcgcgccctgtagccgcgctccatgctccggcagcggcccgaaacccagccccgccgctgacggcgcccgccgctccgggcagggcccatgccctgcgcgctccgggggtcgtaggctgccgccgagccggggctccggaagccggcgggggcgccgcggccgtgcggggcgtcaatggatcgccactccagcta

SEQ ID NO: 530375 - DNA, 477 bp, Homo sapiens
gttcaagtccaggcgggccgttgtcgctttcccgtctgtgaaatggcagcagcaaaagcatcttcctggtggggtgaaaaaagttgaacctcggggtgcaggcccaccgtaagcacagggcagggacttggtaaaaacttatctttctctttccttctctttcctgcataccaccccctcccgtgaggcctcgcttaagtccctccctagcaacttcagaaacagaagtttttggcctctgggactggcaataggtcttagggctcagatgagggcatttcrtttgggatgaatgggggacatgcggccatgtgaccttggtatgccacgccatgctctctctgggcctccactggcacaatccgtgggggtcccgttctctctgatgtgcagcccacaacgtaagccttaggtttgggagtctggtgggaacaatgccaccaccactgacagtagcgacacccttcatggattgca

SEQ ID NO: 530376 - DNA, 517 bp, Homo sapiens
cccttgatagtcagaggcaatctgggatgaactggatcctggggtcaggacctggggacagggaggccgagagagggcacagaggtggagagaagagagatgrgagccagggacagggaacgagggaaggctgcctagcatccctgtttcctgaagtcatgacttgggtgtcactgaccccactgctggtgccaggcatgatcatgagaccgaggtctggtcaagcagagtaagagtgataagcatagggatggacacaagaccaatcctggctgcagaaaatcattcctttactggaatcatggagacgagggagctccccgggtcagggatgctgagctgggaggacatgagcctggggctgccagagccttcttgtgaggaaagatcctggctgagaatgaagtcaacggggcagatggaggggctgagaggtggagctgacatcatttgagcctctggatctaacctcacttgcctttacccttagactttccagttatgtgagtcaatttat

SEQ ID NO: 530377 - DNA, 517 bp, Homo sapiens
cccttgatagtcagaggcaatctgggatgaactggatcctggggtcaggacctggggacagggaggccgagagagggcacagaggtggagagaagagagatgagagccagggacagggaacgagggaaggctgcctagcatccctgyttcctgaagtcatgacttgggtgtcactgaccccactgctggtgccaggcatgatcatgagaccgaggtctggtcaagcagagtaagagtgataagcatagggatggacacaagaccaatcctggctgcagaaaatcattcctttactggaatcatggagacgagggagctccccgggtcagggatgctgagctgggaggacatgagcctggggctgccagagccttcttgtgaggaaagatcctggctgagaatgaagtcaacggggcagatggaggggctgagaggtggagctgacatcatttgagcctctggatctaacctcacttgcctttacccttagactttccagttatgtgagtcaatttat

SEQ ID NO: 530378 - DNA, 535 bp, Homo sapiens
gaagtgtgaaggggaaataatgattaacccacccactaaggggtggatgcagccccttcagacttgaaaagaaagttcaaggacatctcaagactagaaaatcttggaacaggagcttagaatgggagatggccttcttgccaatccaagggagagaacctgggccatctgggcagcttccgatgtgcaaatacattcccacctgcctgcaaccccaccattggtcatgggaatcaagtttggtctgttctcagcccattcaaggtactgtgaccctcaggcagggagcccctgaagggggagggagagaagaggggcgaggactacatcagagggatgggccccgaacaccctccatgtcacagacggaggggagtkggggggcagatgacccttctggacttctgggtcaaggagggctggctcaggaagcccagggtgtcagggaaggcggtggcacagtgtcttgcatctgggtccaggttgtccaggagtgccaagtccgagcttctcctgtgtggtccagcctctggca

SEQ ID NO: 530379 - DNA, 617 bp, Homo sapiens
aagttatctacacagtgcagtttttgtgtatagcaaagtgaggattcaaaatattaagtattttttgagtaacttcacttcactttgaggtctctgtgtagctgttctccagaaaggaatgtagtcaagaacagtgaattataagagcttagtgttttccaccttttgaaggcctagttgcatccacataaacttttggttagttcagggtagcawtggtatttataaccctagattttcctaaaattcagcccattctccatgtttggtgactttattcaaggtttcactctcacatagttgaattctactggttttaactttaaacacacgcagtcatttgcatccctagagtaaagatgtccagaccttcctcatttttgccttacaaaaatgcaaaacagtggcacatgggccccctaccaccaaaattataacagccacaatgcaacttacattttggtggaggtaatagggtaatgtaatgttttactggttcctactatcttaggggatttcattagctacaattcaggccgtgagatgcaaccatttgagcccagctcataaaaagaatacaagtatttctgaagcctttccattacattactctaaca

SEQ ID NO: 530380 - DNA, 617 bp, Homo sapiens
aagttatctacacagtgcagtttttgtgtatagcaaagtgaggattcaaaatattaagtattttttgagtaacttcacttcactttgaggtctctgtgtagctgttctccagaaaggaatgtagtcaagaacagtgaattataagagcttagtgttttccaccttttgaaggcctagttgcatccacataaacttttggttagttcagggtagcaatggtatttataaccctagattttcctaaaattcagcccattctccatgtttggtgactttattcaaggtttcactctcacatagttgaattctactggttttaactttaaacacacgcagtcatttgcatccctagagtaaagatgtccagaccttcctcatttttgccttacaaaaatgcaaaacagtggcacatgggccccctaccaccaaaattataacagccacaatgcaacttacattttggtggaggtaataggrtaatgtaatgttttactggttcctactatcttaggggatttcattagctacaattcaggccgtgagatgcaaccatttgagcccagctcataaaaagaatacaagtatttctgaagcctttccattacattactctaaca

SEQ ID NO: 530381 - DNA, 619 bp, Homo sapiens
caacaaaataggtgataattcaggacctcttggagttttcatgattccagttattgaaaactccaattgctgctccttggtgaatccctgggatttattgcagggtcagtaaataatgattgacacatgcatacatacatataccttacatatatattatgtatatgtatcagttagtcaaatattatttgaatggataaatgaataaatactaagatagggactttgagatagacgtttggattttattagcttatgtgcaatcttttytggtcttcttcaaccactaagagtttcagaacacaagcatgtggcatctatagaccttgactactgtctatcaccacacatgcaatgcatggtcaaaccataaagaaataatttttttactgcaggtctcaaccctggctgcacactgggatcacctaggaagcttttgggaaggatgaagatgtaattatgatgctggttgcacaattctataagtatgctaaaaaccgttgaattgtatacttaaagcaggggaaattgatgatatgtaaattatatctcagtaaagcagttaaaacaaagtgaatccctcacccagagattcaaattcaacttgtcccgaatgcag

SEQ ID NO: 530382 - DNA, 600 bp, Homo sapiens
ctgaggtcagggggtctgtatgtgcctctccggcagggaacagcctcggccgtcagaagccaggtttcagcatttaggatgcagccaacagccaaattgctttcttggttttatatataagggctttttttggtaccataagggcgggtggacagggctgcctttgcttcctggagggtctggttcctttcggggaaggtctcagttggccactggagtaacagcactgcgtcggcccatgtggccagccagcatccctgtgctcatggctaaggacaggctgttactctgttctgcgggtcttgaagtcatttggtcaagtggacttcagaaggagagagagagaaggacagacagcatccatggagactgccacagagaatggaaagagaatgggatctgcagtctgatgggctggcatatctcagcagcagcaacaacaacacaataatatggaattcagtccaggcacggtggttcccgcctgtaatcctagcactttcggagactgaggtgggagtttgagcccaggagtttgaaaccagcctgggcaacatggtgaaactccrtctctacacgaaatacaacaattagctaggc

SEQ ID NO: 530383 - DNA, 557 bp, Homo sapiens
acagctgaaaaataaaattttaggtgacttaatacaagctgtcctccagcaagtgggagtggagcaaggaggggaaagtaaaagaatactgtctattcatggtatactatgcaaagagcttctrtgcacaggaatggatggatattttatacttcttgatgtttatgacatattacaggctgaaatacgtgttgaaaatttgaggagacttttaaaagaaggccaacaatcaactcacccaaacttcctcaaacctgtttgacagaactaaaaatatatttaataaaaaaaaaaaaaaacaaaaaaacaaaaaagcctataacagcattaggtattaagaagggtgacattggtgcagcaaacttgggggaattccctgatgatagaaagtagatggactgagaggggcagaagaacaagaacagagaaaaccgcaactgaaagtgaaaagctcctgaggttcagtggacctcaaggaactctatttgtgttaccagtttgaaagaactggagtggaggggaggtggtgatgtgataatcagagtaattaattaaaa

SEQ ID NO: 530384 - DNA, 415 bp, Homo sapiens
ctcttccaccctcttctccccaacattgctgagagtagggatcagtactgtttttttttttttaaacctgtcccttctcctcttatataacatctcaatttgttgtaattacctgtttacttgtttgtgttctataacttctagaggtcaggtatcatgtttggcttgtacatatttgtatctggtatttagcagaggccagtacacacagggtcctcattggatatrtatttgttgaatgagtaaatgaattaatggatgccagtttttaataagaaccccagactgtgttaccgacatttctgttgattgattgattatgcagattgtaaatgggtaatatatgatataattagattttacccatgacctttcatagaggtatttatttcatgactttttcagtttattctat

SEQ ID NO: 530385 - DNA, 643 bp, Homo sapiens
tcctgaaaataaaaaagaagaaagtagctcttaaccctatttcattaaaaaatttaaaaagaggtgaggtcgggtgtggtggctcatgcctatagtcccaacactttgggaggccgtggtgggaggattgcttgagcccaggagttcaaaaccaccctgggcaatatggtgagaccccgtctctacaaaaaatacaaaagttagccgggcgtggtggcatacccctgtagtcacagctacttaggaggctggggcgggacgatcatttgagtcyaggagttcaaggctgcagtgagctacgatcatgccacactgaattccagcccagtgacagagtgagaccctgtctcaataaaaataagtgaagcagaagtgcctatgtcttaaaaagaagaaaaagtaagagcctctctcccccagacctttccctagggtgggctggccgctgcctacacgttctccattatgtaaaacatatggacacaccatccttgacccttggcctgctttccccatagcgaggatctggatgagctgcactaccaggacacagattcagatgtgccggagcagagggatagcaagtgcaaggtcaaatggacccatgaggaggtgagtgccatggggaagagagggttgatgg

SEQ ID NO: 530386 - DNA, 643 bp, Homo sapiens
tcctgaaaataaaaaagaagaaagtagctcttaaccctatttcattaaaaaatttaaaaagaggtgaggtcgggtgtggtggctcatgcctatagtcccaacactttgggaggccgtggtgggaggattgcttgagcccaggagttcaaaaccaccctgggcaatatggtgagaccccgtctctacaaaaaatacaaaagttagccgggcgtggtggcatacccctgtagtcacagctacttaggaggctggggcgggacgatcatttgagtccaggagttcaaggctgcagtgagctacgatcatgccacactgaattccagcccagtgacagagtgagaccctgtctcaataaaaataagtgaagcagaagtgcctatgtcttaaaaagaagaaaaagtaagagcctctctcccccagacctttccctagggtgggctggcygctgcctacacgttctccattatgtaaaacatatggacacaccatccttgacccttggcctgctttccccatagcgaggatctggatgagctgcactaccaggacacagattcagatgtgccggagcagagggatagcaagtgcaaggtcaaatggacccatgaggaggtgagtgccatggggaagagagggttgatgg

SEQ ID NO: 530387 - DNA, 528 bp, Homo sapiens
cttccttactttatggcacaagatatctcaatgtcaacttatcccttttttgtcccggccctggtatcagccatttctctaagaaaccctggttgtttttgggaaagattgtatttagaaactaagatctgggcacttgtttgtgatcattactgttgaggcattactgcttttaggccatctcaggaggtagtatgtgtgtatagacatacacaaacacacatatatgtatatgtaagtatacacacaaatatatatgagtataaaatatacacattcattttaccctccctatgtacatttacatacataaacatgcatctgcaaccatttatttgtctacctgtgttaccaaaaatattgggtttatattgatacttccaatttcattcctaaatctcarggttctttctagcctcctacctttccatatttggaagttcctccaacagcaagaaacttgctctcatcctctatatattatttccttaatttactgttattaatcagtgtgatcagtttcccagc

SEQ ID NO: 530388 - DNA, 642 bp, Homo sapiens
taatttttaacatggtatttataaaagtgcattataacaagtaagggtatagctcgggtaaggaagactctgggttctagatcatttccctgggataactctaactccttgcctttttctaccactgaagaaagtatatcagtttaattgtattatatgtaaatttgcctcaataaagctgaagaaaagaaaaagacagagctaaagataaaggaagagtgacagtaccatagacataacctttaaactcctcacatctcgaaaacttgaaaaccatatacacatttatttagttctttagttgcattaacacatgatttgcaacaaatctcataactgattgtgatgtggtagaatgtctcagaaaaacaaagaaccataaataaagaaagaaaataaagaactgckttccatgtggtaaggtcttgaggcctgaggtggatttttattacttttccatccccccggcctggtagggtccctagtacaacataactacttaataaatgtttattgaactgatatgaattcaactgaagtgttcaacgctattcacagactattatgtgaaacatggtgtagttcatagttgcaagaatgatgagtactgctctcatcctgaaaataaggaaacagaggtgt

SEQ ID NO: 530389 - DNA, 614 bp, Homo sapiens
acttgtagcatatttccccttggcatctcaagtacttagttcaatatcattccattttccttaagatgtgaaacacatttgagaaggcagacatactgcaacatcattggggaatattttagttgcaagtaacagaatatttgacctagagtagcttaaaagacagttgtttatgtttttgttttaaatcatcatccttaacaaaaactctgcagatatgtgttgttgggttggtttagagaagggttcagcaaaccatggccagtggatcaaatctacactgcagcctgtgtctctctttttttttctacagcccccaaattaagaaagattgctaaagcaacagcagcaatagagaccatgggcggcccacaaagcctaaaatgtttaatacstggctgctcacaacacaagctttttggcctctagtttggagattcaaccctgtcttccaggactcagcctccatcttgctgctgtcctggggctactggcgtcatcttccctcatagatagctgccccagctccaagaatcccatctacatgcccctgtcttaaaaggaagtggaacttccacactcatctcccaggagggatggtctttcccagaagg

SEQ ID NO: 530390 - DNA, 590 bp, Homo sapiens
gaaaccaagacaggatgatttctaggaaatgtcacgtctgcagatcttaatttcctccaagcactgttgccctgttcttcctttcctgttgctaatatcctyccaggaacaatactgaatagaacctgcttacagggcaattggtggcttcacagccactcaacaaaataactggagactcttctgctgtcactgtaaccacaagaagagattggaagcctggagaaactgctgaaggctaaatagaaagggacttttaaatgatgttataaaatttttaaaaatgttttatatgtgatggtaaaagtcatagttattgtataagttccagaaaatactacaaagcaaaaggataaaaatgaaaattacctgttattctatcacccaagataaaccactgcttatcattttggtatatctactttgaattctctctctctctctctctttgtgtgtgtattttgcagaaatgagatattatattattacttaatgatatagaacagagattggcaagccttttctgtaaagtactagatagagcagattttcagctttgctggccataaggtctctgttgtaaccactca

SEQ ID NO: 530391 - DNA, 527 bp, Homo sapiens
ctgttcttcctttcctgttgctaatatccttccaggaacaatactgaatagaacctgcttacagggcaattggtggcttcacagccactcaacaaaataactggagactcttctgctgtcactgtaaccacaagaagagattggaagcctggagaaactgctgaaggctaaatagaaagggacttttaaatgatrttataaaatttttaaaaatgttttatatgtgatggtaaaagtcatagttattgtataagttccagaaaatactacaaagcaaaaggataaaaatgaaaattacctgttattctatcacccaagataaaccactgcttatcattttggtatatctactttgaattctctctctctctctctctttgtgtgtgtattttgcagaaatgagatattatattattacttaatgatatagaacagagattggcaagccttttctgtaaagtactagatagagcagattttcagctttgctggccataaggtctctgttgtaaccactcaactctgca

SEQ ID NO: 530392 - DNA, 480 bp, Homo sapiens
tgatctctttctcacttctcctgcagccccattaatcyatttaccacaggacagtccacagggtgaccgactcatcctggtttgccttaggctttctcagctttagcactgaaagtcccatgttcagggaactcctcatttttgagcaatcaagagcagttggtcacccccgactatggtgaactttttataagatagataagatcaggtcattgcagaaatcactagccccaattcctcatctctccctggatccatgccattttccaagtgactatgcagttcttcccactagaggccctgaccccttgtctttggattccaacaatgggatattagcagatgtgatgcaacaaggagcttgaaacatacttgcagttgggcttgctctcttgcattccagccacttccttgtgaaaactatacccacacctagcccacaagtccgaggaggatgagaggcacgtggtacaggcctgg

SEQ ID NO: 530393 - DNA, 640 bp, Homo sapiens
catatacctaagtgtatgtgtcccttggtgtagcaacagtaaattttacacatcagtcaacattaagcaatccattcatgccccagaacatcactgcttatatcacagtggtatttcttattgtcctgaaagtggagtgatatatgtgactcactccaaaaacaaaacaaacaaacgagaaacaaaggaaggccaggcaagtttggggatgcagtttaggttygaaagcctttgcatgagctggttcttgttgactcctctgattcaattcttatctttcctgtagtttaacgccattttttcacaccagactgcttcctgcccaagcttgttcttgtcacacagtctttatacctgccatccccatcgcttgaaatgtgcttccatgactgtaacatgactggcactccagcatacattctcagctcaggtgtcacttcctctgggacactctctgtgactataccatccctaacttgcactcaatcacagcaccttggttcatttcttcatttcaccatgtgaaattttcttgtttttttatttcttctttctgtcattcctactagaatctaagttagatgactgctggaactgtgtctgacctattattattcacctcaagcacttacatgagcac

SEQ ID NO: 530394 - DNA, 448 bp, Homo sapiens
aatgagttctggtgtgaacatgtgactcacttctggccaatgagatgtggcatgaggggcctctccctggtgcttctgggaaaagtcgtcccagatgataagaagaggctcatgggaagcaagagttgctgctgccaccattttgctaccagcccaagggtgaagctcacacatcaagcaggacccagagaatcacaaaaaatcagaaccaagcacccacccaacccctgatattcagcacctgaaactcacatacctctggacttctctttacatatgagggccattatgtatgcctcactgggccagattttctgttcaatgtcaccaaaaacaacccaacagagccaggatgaaacatcagggaagacggcacgtttcatccccctcgtgagcgyaggggaaacttcctaaagaaagtggccttgtgtgtccttgttcacagcag

SEQ ID NO: 530395 - DNA, 558 bp, Homo sapiens
gcagcaaggcgccacatgcacttcgtctgggagggcaaggagaggcatgaattgatcttcacctcgaagcagtgaccgtgactgtggttacatataaggatacacagtcggctccagggtgtacgccacagaatgaggcttcggcaagcgtgttcctcagatgctgctaggctgatgccccatagtcagtcaagggaggtaaaccctggagtcaacaaagtgaaacacatttcttggctgcaggacttctcagagcctttactatgtgaatttccactgtgactctccaagaggggatacaaaatacaaggtttcccagacttacttggtcatagaattttctctccagatattcatgttccactttgggaaatgccatgggtcaatgatgtggaggcctgagacccaacattggacagcacagtgcctaggcagggagcccacaaagacttctcaggtgtagccaggacacctctactctggggatctcgagccaacataggtggtggtcrggagaaagaatggatggaaggtcccattgttgtgcctgatgcaggt

SEQ ID NO: 530396 - DNA, 543 bp, Homo sapiens
tggcctctaagatggtgcactcagatggtgaaagtcaatgctgactgttaacgggactgtctatgcatggcttccccatgtggcttggatttctcgcaatatggtggctggatttggagggaaagcaaaccaagaagtcagaagcaaaactgccaggccatgaagagccatgcctggacctggcactgtgtcacttcagccatagtctattggtcaaagcagccacagcatcatcccagattcaaggaggtggagaaatagatccacctcttgatggaagggtggcaaggtcacattgcagaggagttcatggaatgggagacatggctgcctccatcactggaaaatgcaatcggccgaaattgttgatggggcaggaccttctcaatcccayctcaactccatgacagtgggtaggtcacttcacctgtcagagtctcagttttctcagcagtggaacaagggaattgactaaatatgtcaaaagaccttccacctttacagcactgcattcagagtaaagtttgggaatacatatccacc

SEQ ID NO: 530397 - DNA, 622 bp, Homo sapiens
tggctttccatttctccaactaaaaagaaattgtggggactgttttacagggcatgaagcagatgactaattgtcttataggatcgttttaattttgaaataactataatctgggataagtaaytcatcacatatactttaatatgtgtaagtgtcatgtggttgaggactttctcatccttgtttgaaactgtctaggggctctgtgtggtggttcatgtccgtagtcccaacattttgaatccaagcactaggattgcctgagcccaggagttagagaacagcctgggcaacatggtgaaactcccatctctgtaaaaaatagaaaaatttgtcaggcatagtggtatgcacctgtagtcccagctactcaggaggctgaggtgggaggatcacctaagcttaggaaggttgacgctacagtgagcagtaatcatgccactgcactcgagcctgggcaacaaagggagaccctatctaaaaaaaaaaaaaaaaacacacacaaccatgtgggattaaggttttatttcactggtttatgcttctctaccaaattatggttaaatgcattgtatctcaatgagataatattgacattgaccttatacaactgacatttttt

SEQ ID NO: 530398 - DNA, 622 bp, Homo sapiens
tggctttccatttctccaactaaaaagaaattgtggggactgttttacagggcatgaagcagatgactaattgtcttataggatcgttttaattttgaaataactataatctgggataagtaattcatcacatatactttaatatgtgtaagtgtcatgtggttgaggactttctcatccttgtttgaaacygtctaggggctctgtgtggtggttcatgtccgtagtcccaacattttgaatccaagcactaggattgcctgagcccaggagttagagaacagcctgggcaacatggtgaaactcccatctctgtaaaaaatagaaaaatttgtcaggcatagtggtatgcacctgtagtcccagctactcaggaggctgaggtgggaggatcacctaagcttaggaaggttgacgctacagtgagcagtaatcatgccactgcactcgagcctgggcaacaaagggagaccctatctaaaaaaaaaaaaaaaaacacacacaaccatgtgggattaaggttttatttcactggtttatgcttctctaccaaattatggttaaatgcattgtatctcaatgagataatattgacattgaccttatacaactgacatttttt

SEQ ID NO: 530399 - DNA, 622 bp, Homo sapiens
tggctttccatttctccaactaaaaagaaattgtggggactgttttacagggcatgaagcagatgactaattgtcttataggatcgttttaattttgaaataactataatctgggataagtaattcatcacatatactttaatatgtgtaagtgtcatgtggttgaggactttctcatccttgtttgaaactgtctaggggctctgtgtggtggttcatgtccgtagtcccaacattttgaatccaagcactaggattgcctgagcccaggagttmgagaacagcctgggcaacatggtgaaactcccatctctgtaaaaaatagaaaaatttgtcaggcatagtggtatgcacctgtagtcccagctactcaggaggctgaggtgggaggatcacctaagcttaggaaggttgacgctacagtgagcagtaatcatgccactgcactcgagcctgggcaacaaagggagaccctatctaaaaaaaaaaaaaaaaacacacacaaccatgtgggattaaggttttatttcactggtttatgcttctctaccaaattatggttaaatgcattgtatctcaatgagataatattgacattgaccttatacaactgacatttttt

SEQ ID NO: 530400 - DNA, 622 bp, Homo sapiens
tggctttccatttctccaactaaaaagaaattgtggggactgttttacagggcatgaagcagatgactaattgtcttataggatcgttttaattttgaaataactataatctgggataagtaattcatcacatatactttaatatgtgtaagtgtcatgtggttgaggactttctcatccttgtttgaaactgtctaggggctctgtgtggtggttcatgtccgtagtcccaacattttgaatccaagcactaggattgcctgagcccaggagttagagaacagcctgggcaacatggtgaaactcccatctctgtaaaaaatagaaaaatttgtcaggcatagtggtrtgcacctgtagtcccagctactcaggaggctgaggtgggaggatcacctaagcttaggaaggttgacgctacagtgagcagtaatcatgccactgcactcgagcctgggcaacaaagggagaccctatctaaaaaaaaaaaaaaaaacacacacaaccatgtgggattaaggttttatttcactggtttatgcttctctaccaaattatggttaaatgcattgtatctcaatgagataatattgacattgaccttatacaactgacatttttt

SEQ ID NO: 530401 - DNA, 655 bp, Homo sapiens
cagaattatacatataatatatttattgaatttttcagataagaaaacttaaggcaaagactaagcaagttgccaagctggaattagaaaccaacaaatcctagttcagccctgcatgctatctttccaccacacacattgtcaattctaaatacatattattgaatgaatttatttctggggccttctttactggatccctttcaagccacacaatttggtcataattgcaaaccaatctgaatattaataataattggaaacataaattaaaatttgataactcagttttccaagtaagttgagttggctagataagagttaatgcctaatatgatagagttttctgccaatgttcattttattaatgcaaaacaattttaaagcattgtaaaaatagcggcactattagtagtagtaagagttgtatgaaagatttgcttaattaaattgagtatcagatttttattagaatacatgtttaaagttratcatcaaataatacctaaatttgaagtcgtttttacattatatttatttaatgacatattactgaaaagttgtattttttaaagttatgcacacccagaataaaaatgcttaatagaataattctgtcacagaaactatggtttaacctcctttaacagaagca

SEQ ID NO: 530402 - DNA, 565 bp, Homo sapiens
tgagactcttcaaaccatttaaggcccataaagtctcctcactgaaacttttttctgatacttttctattaggttggtgcaaaggtaattgtggtttttgccattaaaagtaatgacaggccaggcgcggtggctcacacctgtaatcccagcagtttgggaggtcgaggtgggcggatcacctgaggtcaggagttcaagaccagcctagccaacatggcaaaaccccaactctactaaaaaatacaaaaattagccaggcgtggtggcatgtgcctgtaatcccagctactgaggaggctgaggtgagagaattgcttgaayctgggaggcagaggttgcagtgagctgatatcgtgccattgcactccagcctgggtgacacagtgagactccatctcaagaaataaaaagtaatgacaaaaattgcagttacttttgcaccaacttaatagttataacttgcataacttaatagttatgccccattccttcaggcagagcctgagctgtgtggtcctccagcagcagggcggtgagacagggagatcatcctcaggatcca

SEQ ID NO: 530403 - DNA, 565 bp, Homo sapiens
tgagactcttcaaaccatttaaggcccataaagtctcctcactgaaacttttttctgatacttttctattaggttggtgcaaaggtaattgtggtttttgccattaaaagtaatgacaggccaggcgcggtggctcacacctgtaatcccagcagtttgggaggtcgaggtgggcggatcacctgaggtcaggagttcaagaccagcctagccaacatggcaaaaccccaactctactaaaaaatacaaaaattagccaggcgtggtggcatgtgcctgtaatcccagctactgaggaggctgaggtgagagaattgcttgaatctgggaggcagaggttgcagtgagctgatatcgtgccattgcactccagcctgggtgacacagtgagactccatctcaagaaataaaaagtaatgacaaaaattgcagttacttttgcaccaacttaatagwtataacttgcataacttaatagttatgccccattccttcaggcagagcctgagctgtgtggtcctccagcagcagggcggtgagacagggagatcatcctcaggatcca

SEQ ID NO: 530404 - DNA, 450 bp, Homo sapiens
tatgattttacctacaattcttgtctccctaaaatgtataaaaccaaactgtaacccaaccacctagggcacactttcttaggacctcttgagactgttccctgggccacagtcactcatattggctcagaataaacctcttaaatatttttgcagagtttggtttttccattaacaaacttttagtctccttttcctgtgagttaatatttcctagatctcaataaggcagatgggggtaggggggcctcagagaaagcctgtttactgtttrcctcactaatgtaaatttcctctacagacgtaaatctcccccacaaaaggacagcttttcagaactattcctgtgttgtagcccctctgaatagccatatcaaaatataccaaagaagtatactttggggtagcatatttaggtttctttccacagctaggaagaccggaatggta

SEQ ID NO: 530405 - DNA, 586 bp, Homo sapiens
ggggttcatatgccattagtcagttgctagatttctccattttaattgaataactacttggtaaccacaagtgcagttatctttgcatggatatattttaatgatatggttactatttctgaatctcaccaacctgtaattatcaagargtcatatttccttaaatactcaagagtattggttggctacaaataatagaagatcccatgaaaagtggcttaaatagtaagattttaccttctcattgcccatgaagttccacatctgcgtattcagcagctctatgacactatcaagggctaaggtcatttccacattctgttctgtcaccctcagcacactggaaactccttctcatggttgcaagatggattatatcagctttttggcttcatagcatctcacagccacacccaaaagcagaaagagaacaactttctcgttggcttctcatatttaagaacaaagaaacctttcccataaatgatggagaaaatttccatttgtttctcactgactagaatcgtattgcatgcccattttttctttttattaggaaggggaatggaattgccatgatgggctt

SEQ ID NO: 530406 - DNA, 637 bp, Homo sapiens
ggtatgtactggaaccaaggattccagtagctttggaaatctctctccacattctactttggctttttctgtacatctacttcatcttctactctttgcaggccagacttttctactttgctattcatatggcagaagacagagtcctatcagcccccagggtttatgttctgaggctcctgcgcccccccagcacacactcattttttggtcagttttaatggaatgtcatttatatgcaataaaatggactctttgtcaagtgtataatccatgagttttggcaaatgtatacagtcatgcaaccaccaccrcaattaaaatgtaagagttctatcatcccaaaaatcctttgtgctcttatcagttaatctctttccccaactttcagctctggaatctgttttccattagtagcactttgacttttctagaatttcatataaataaaaccataacagcatgtagtatgacttttcttaatcaacataatgttttagagatatatccattttcctgctttgagtactggtggttagttcctttttgttgctcagtaatgttacattgtataaatacaccacaattggtttatccattgttgatggacatttggattgtttccagtttggggcta

SEQ ID NO: 530407 - DNA, 637 bp, Homo sapiens
ggtatgtactggaaccaaggattccagtagctttggaaatctctctccacattctactttggctttttctgtacatctacttcatcttctactctttgcaggccagacttttctactttgctattcatatggcagaagacagagtcctatcagcccccagggtttatgttctgaggctcctgcgcccccccagcacacactcattttttggtcagttttaatggaatgtcatttatatgcaataaaatggactctttgtcaagtgtataatccatgagttttggcaaatgtatacagtcatgcaaccaccaccgcaattaaaatgtaagagttctatcatcccaaaaatcctttgtgctcttatcagttaatctctttccccaactttcagctctggaatctgttttccattagtagcactttgacttttctagaatttcatataaataaaaccataacagcatgtagtatgacttttcttaatcaacataatgttttagagatatatccattttcctgctwtgagtactggtggttagttcctttttgttgctcagtaatgttacattgtataaatacaccacaattggtttatccattgttgatggacatttggattgtttccagtttggggcta

SEQ ID NO: 530408 - DNA, 637 bp, Homo sapiens
ggtatgtactggaaccaaggattccagtagctttggaaatctctctccacattctactttggctttttctgtacatctacttcatcttctactctttgcaggccagacttttctactttgctattcatatggcagaagacagagtcctatcagcccccagggtttatgttctgaggctcctgcgcccccccagcacacactcattttttggtcagttttaatggaatgtcatttatatgcaataaaatggactctttgtcaagtgtataatccatgagttttggcaaatgtatacagtcatgcaaccaccaccgcaattaaaatgtaagagttctatcatcccaaaaatcctttgtgctcttatcagttaatctctttccccaactttcagctctggaatctgttttccattagtagcactttgacttttctagaatttcatataaataaaaccataacagcatgtagtatgacttttcttaatcaacataatgttttagagatatatccattttcctgctttgagtactggtggttagttcctttttgttgctcagtaatgttacattgtataaatayaccacaattggtttatccattgttgatggacatttggattgtttccagtttggggcta

SEQ ID NO: 530409 - DNA, 467 bp, Homo sapiens
tgagtcttgttttttactttatttaattaattaatttattttgagacggagctttgctcttgttgcccaggctggagtgcaatggcacgatcttggctcaccgcaacccctgcctcctrggttcaagcgattctcttgcctcagcctctcgagtagctgggattacaggcatgtgccaacatgtcaggctaattttgtctttttagtagagatgaagtttctctatgttggtcaggctggtctcaaactcccagcctcaggtgatctgctcgcgttggcctcccaaagtgctgggattacaagagtgagccactgcacctggcgagtcttgttttttgatccactcccacaatatctgtcttttaattggtatatttagaaaaatttgtatttaaagtgagtattgatatagttgaattaatatgcatcatatttgtttctgttctctctggcttgataaatttcag

SEQ ID NO: 530410 - DNA, 532 bp, Homo sapiens
cttgttttttactttatttaattaattaatttattttgagacggagctttgctcttgttgcccaggctggagtgcaatggcacgatcttggctcaccgcaacccctgcctcctgggttsaagcgattctcttgcctcagcctctcgagtagctgggattacaggcatgtgccaacatgtcaggctaattttgtctttttagtagagatgaagtttctctatgttggtcaggctggtctcaaactcccagcctcaggtgatctgctcgcgttggcctcccaaagtgctgggattacaagagtgagccactgcacctggcgagtcttgttttttgatccactcccacaatatctgtcttttaattggtatatttagaaaaatttgtatttaaagtgagtattgatatagttgaattaatatgcatcatatttgtttctgttctctctggcttgataaatttcagggaaagttcatttatatgggatggacaatcaattttgctgacttagagattttaggaaaagcctctctat

SEQ ID NO: 530411 - DNA, 640 bp, Homo sapiens
gctgattttcatgtttttagtagaaacggggtttcaccatcttggccaggatggccttgaactcttgacctcgaaatccacccacctcggccttccaaagtgctgggatcacaggcgtaagccaccgcgcctggccagttgtcattctttctgtgaagactaagtgtctttcccctaagtttctatgtgggcaatttaggctgggaagggtaaacatgttttaacaggaagacattcagcaaaatgtgagtctgtccactgttatttctgttattccyctacgtttcattaaaagaacagttgaaaataaaaagacaaacttttcaatagaaagtaattacagaaaaatagtattagcgaagatggtttagaacatgtgttggaaaattatagaattgatttgttctgctcccatggattcttctcaaaatgctttcttgagaaagaaataatgagcctatgttgttatatcttcaatgagtcatatactaataccaatttaatttctgtattcacacaatgatgaatgagaaggaatttcttagactgttagatatttgaacccaagagaagatcttcttcatatttgtaagtcgaagtgcagaaatctcatatatctgcagagaccagaaaaatgtag

SEQ ID NO: 530412 - DNA, 617 bp, Homo sapiens
taagcacttttaatcactgacgttaaggaagagagaaaatttctactggattttgtttttgttttagggtcatttaaagcacagctaatttcactttaaaggaggaagaaataagaaatcattcagattggctagcaaaaaaacaaaaamcaaaaaacaaaaaacctctacctaatatgcttatttatacctagctgttaaaactataagtgcttaaaaagataccttcactgattgtataatattaaatcttctaacctataagtgttttaaaaatcacacctactcgtgacttgaaactacttttgctgaatatatgtatattatcaacctcaattacacatgcctgttgatttgtgtacgtcattcactagttcttctttcctttttctttacttttgctgtattttgtttgcacatcatttagctttggttctagactaacaattactctagtttgtaattgagtttaaaggaatatgttattaaatcagggaattccataaatattggttaaaagttataaataggttgtctttggtatttgtcaacatagagttctttcaattaaaatatttcctggctaccacagcgtggaagctgcggaaattggctcc

SEQ ID NO: 530413 - DNA, 605 bp, Homo sapiens
tgctatgaggctctacagagatcatattagcagaattgacatcctgacaaaaaacttaccacagcaaagatattaacactgagaaatgtgaccaatgtatttcaggccctggtcatctgtgcttttgcctataaatagatttcatacatttccttaattcattttttctaacaaccactggttctttagcatgatctgggtccaaggtcaaaagctactgctcgctaccagtgcagctaagtcactgagagttattttacctttcgggctttccttgtgatttttcacaagtttgtaatactagtccatgaagctatcaaatcttcatctataaaaatgtattctgaagcagttgaaaaaaacccgagactgctctttaaaatatcaggttctgtgtattgacttaaaataaaaattacacggaaaaacaaaaagtgtgatgttggtgatattgtttaggtcatattgtaggtttctgcttatcatttctggctgaaatagaaaacctatatgaaagaattgacttgtaaatgtaaatgttaacccagtttatacaaaaagcatatttgygtgccctctcttcagaggtgaattttaaaatccgt

SEQ ID NO: 530414 - DNA, 310 bp, Homo sapiens
ggagcccccctatttcactcctctccttccattggcgcctgggcggagccacccccgctgcgggggcccagggcgggagggagtagaggccggggcagagggcgagggcgagggcagagggcgctggcggcagcggccgcggaaggtgaggcctggtgtagacgccaaagtcttgtcaggagtgggcggggcagggtgatgtatgatctgaaaggccgggagtgactaacgactgtcagtgtgtrtgtgcctgtgaggctgtgtctgtgtgacagtatcattgtgtgcgattctgagtgtcacttggtgc

SEQ ID NO: 530415 - DNA, 668 bp, Homo sapiens
agcagcttagggtgttcagtgacagtacctggtaargcctgttgctgctgatcaagggccgttggcatccagggcataactttgtgatgcaggtccgggtcacttgctgtctgcagttccaggaactggctttctggaatgcagggaaaaaggagccactgccaggaccccagaaattctgcagtcccaggacctgtgtacacaggcggggatcttgccctggtggatttgtccacatttggagtcgatgtggctctgcagtattgccttgacctgagttaacaagtgtggcctggggatggacactggggccgcaatgggtgacagcacatcgcaagccccgttggcctctagggctacaggctgggggatgctcacgttggctagggctgtgctgctgctggacacagtctgctgatcagtggaggtaaggagcaactggatggactgctggatcttctgaggcaggccccagcgatggcgaatcaactgtttctggatgtggaattccagcagcttccgggcatgctccgggaagaagagtagttccctggtgagcactgagatggacttccctgtctgggaagctgtcgtggtctcaggagactgagctttgccacagggctcatgctgcatgaggcactgggtgtgctgagacctctggaggg

SEQ ID NO: 530416 - DNA, 642 bp, Homo sapiens
ctggtaaagcctgttgctgctgatcaagggccgttggcatccagggcataactttgtgatgcaggtccgggtcacttgctgtctgcagtwccaggaactggctttctggaatgcagggaaaaaggagccactgccaggaccccagaaattctgcagtcccaggacctgtgtacacaggcggggatcttgccctggtggatttgtccacatttggagtcgatgtggctctgcagtattgccttgacctgagttaacaagtgtggcctggggatggacactggggccgcaatgggtgacagcacatcgcaagccccgttggcctctagggctacaggctgggggatgctcacgttggctagggctgtgctgctgctggacacagtctgctgatcagtggaggtaaggagcaactggatggactgctggatcttctgaggcaggccccagcgatggcgaatcaactgtttctggatgtggaattccagcagcttccgggcatgctccgggaagaagagtagttccctggtgagcactgagatggacttccctgtctgggaagctgtcgtggtctcaggagactgagctttgccacagggctcatgctgcatgaggcactgggtgtgctgagacctctggagggca

SEQ ID NO: 530417 - DNA, 642 bp, Homo sapiens
ctggtaaagcctgttgctgctgatcaagggccgttggcatccagggcataactttgtgatgcaggtccgggtcacttgctgtctgcagttccaggaactggctttctggaatgcagggaaaaaggagccactgccaggaccccagaaattctgcagtcccaggacctgtgtacacaggcggggatcttgccctggtggatttgtccacatttggagtcgatgtggctctgcagtattgccttgacctgagttaacaagtgtggcctggggatggacactggggccgcaatgggtgacagcacatcgcaagccccgttggcctctagggctacaggctgggggatgctcacgttggctagggctgtgctgctgctggacacagtctgctgrtcagtggaggtaaggagcaactggatggactgctggatcttctgaggcaggccccagcgatggcgaatcaactgtttctggatgtggaattccagcagcttccgggcatgctccgggaagaagagtagttccctggtgagcactgagatggacttccctgtctgggaagctgtcgtggtctcaggagactgagctttgccacagggctcatgctgcatgaggcactgggtgtgctgagacctctggagggca

SEQ ID NO: 530418 - DNA, 670 bp, Homo sapiens
agaccgccttaaatagaatctcagaatagagccaacaaatgtgtatttttaccaagttctgcaggtaattctaagcatttggtggggtggggctgggagagccacttgggcctattctgctccccatcccacactctagattgacacagagccggtgaaagggaacaaagttggtctggggaaaggaaagctggagtgatgccccctctacctcccctggaggaggagactttctcgcctggcacagattgtagaaaaaaaggrgagatggcagggaagaggagggggctgtacctttttctttcctaaaagcttaggcttgctttctctccaagatacctgcctgtctcccttacccttattcatgccatgaaagaagcttcttgttgtgtcagatggtgtgcacaaccccctaggtcccatctctgcctggtcttcctagatgcaggaatctaggttgattaggcatcaaccctaagcccctgcctgtgaacttgagcctgcagtggtagagcagtctcagggagatgttacatcctggagatattgaggtctgtctgcttggtgctggagcttagaatcaaggttaggagccctaagggaaatgaaggaagcagtaggggcttttctggaggtggaaacctggctggacaaaatccagcgcagaaaa

SEQ ID NO: 530419 - DNA, 495 bp, Homo sapiens
ccactggctcttgggcaaaagataaattgaccaagttttagtcaagktttcctatcttaacaaaataaatgtactagggcagtataatcattttatataaaatagcttcctaggaaatctaatgtgctgttctcagatctgggcagtgatggttgaggatgggaagggacttcctgtgaacgtgtaaaaccataggactacctctccaggtcatgtgatttgtccattatggacttattacatggaatttctttcctctttctcctatcaattttcctagtgtctatggggtttttaaaacacggccacaaatgctctgaactgctctcacaaagtggtagattatgtgttggaatcaggacgtgcttgtgactactttgacaatgaccagtagagttcagtggaagtgacaatatgtgacttctgagtccaggtcataaaagacttggactgaagtcctgctctctgctgcattcttgcaaacctgagaatcat

SEQ ID NO: 530420 - DNA, 517 bp, Homo sapiens
atgactttctcaactttcacttatttataaacatataggcctaaaaatgcataaaatgaaccaattctataatgttacacataattagtattctttattaagtccttgaaaatattcacattaactgtttcaaagttcttttctatattctgtttttatttattgttttccttcttgattcggcattgcttttctctgctttttctcacatgcggtaactrttatataatggccattgccaaagctatgttgtaagtagtctgaattatgtcatcttcttttaaaagtttttgaactttgttctgaaaaagaaattaacatcccaggagctttttattttttttcattctggcaaacttggttttactttttataagagcaagtatatttttcttttgtctttgttactaatgtgtcctgtgacctaggaaatgacccttacttctaaattctaaccttttcatgtcccaactaaatgcacaaggtgctcattagggtctctttacccttgcagagc

SEQ ID NO: 530421 - DNA, 511 bp, Homo sapiens
cataacaaacgtaaacgaagtaaatatattaatcagaagatcaactattagattggatattttaaaatctaatcataggctacttgtaagatagcaacctaaaayaacatgagaagctaaatgtgaaatgaaagaatacctagcaaaacttacccaaaataaagcaggtgtttattgatattagccagaagagaatttaagccaaagaacattaacaagaataatgtgataatataatatgaaatcatatgagcctaacaatatagtcttctgattttaaaaaaggaaaaagattttcacattcatgatgggaaagtgtagtcctctcatttagaatctgataaatcgaaagaaaaaatgttaataagactataattcatagaacacaatgaacaactttaaatgacatgatgcattaaaccccacaatcaactagtaaatagatttttcttctttctagtgaagaaggaacatatataaaaattaacaacatgtatggcttgaaagacac

SEQ ID NO: 530422 - DNA, 435 bp, Homo sapiens
aacatacatgataatgaaccatatagggacacagtgacagaaatgggaaggctgatccatgatcatatatgcatacatagatacactatggattccaaagtcccctttgacctgaaagtgtgagaagagcccataacccatttgaaacagatacgcagcaaccacaacccaaattgtatatgcataagtaaagttgtccttatttcagagatgatattatggattgaattgttttccctcaaattcatatgaactccagaatgtgaccttgtttggagataagatctttgcagaggtaatcaagttaaaatgaggtcattaaggtgagctccaatccaatatgaccagtgtccttatgaaaaatggaaatggaggtgcagagacacacagagarggaagacgctgggacaacatgcaggaacaacgcctcaggaa

SEQ ID NO: 530423 - DNA, 268 bp, Homo sapiens
ctctctccctcctaatcttccccttcatcagaatctggatttggtcgccttgatcagaactcccctaatttcttgcctgtcttcaggcctcttttccctttcttctatttcctttcatatttctagctcctgctgtgtctgtcgttcctctctytggcacttcactactttctcataatcataagggaacataggatcatattcgtcagctaagggaatcagaacgtcccctgcaaaaacccactgggagcaggatccttcagcccac

SEQ ID NO: 530424 - DNA, 558 bp, Homo sapiens
agaagaattgcttgaacctgggtggcagaggctgcagtgagccaagattgtgcyactgcactctagtctgggtgataacagcgaaactctgtctctaaaaaaaaaaaaaaaaaaaaaacaagaaaaactaaatctggctgcttaataaaggacacacaattcttcaagttcaaagtctgtgttcctgtacttgtcatacacacagaaactgctcatttattacattttgaaatttcagtgtctttcaaaaatatcagatcaaatcagagaaaataaatgaattcaatctaccactctaaaatactgcagaggcaatgttaaattactttattaagcaaaccaagaaaaaataaattatatatgatttgtattattttttaacttccacactatttaatggtataagattctctttcaatgctttcaatgaaataggtatcttactttcacttagaacatttttttcaaagtaattcttaaaattctgtttttctaataggtttgcagcaataggtagcaattattattattagaaacatacccagatgctttcttctc

SEQ ID NO: 530425 - DNA, 629 bp, Homo sapiens
ggttttccagaagcacattggccacccacgaaggcagcctgttgatgatggcatgaaatggctcttcatgggaagagctctctaggccgggcacagtggctcatgtctgtaatcccagcactttgggaggccgaggtgggtggatcacctgaggtcaggagttcgagaccagcttggccaccatggtgaaaccctgtctctactaaaaatacaaaaattagccgggcgtggtggcaggcatctgtaattccagctactcgggaggctgaggyaggagaatcgcttgaacctgggaggtggaggttgcagtgagctgagatcccaccatagcactccagcctgggcaacaagagcaaaacgcaaaactccgtctcaaaaaaaaaaaagctctctaaacatttggcattttggggattatgtgcagtttatctgaatgttatttgacccgacaaatacatgggaaagctttgttaggaagattctgcatgaagggaaatattttcgtaacttcagtgcccatagacttgcactgagtgaaaggtcacttactgctctcattgagtccctgaaaacaacaggaagcatcaagagaaagattgaactctgggcactgatcccagggatacaca

SEQ ID NO: 530426 - DNA, 629 bp, Homo sapiens
ggttttccagaagcacattggccacccacgaaggcagcctgttgatgatggcatgaaatggctcttcatgggaagagctctctaggccgggcacagtggctcatgtctgtaatcccagcactttgggaggccgaggtgggtggatcacctgaggtcaggagttcgagaccagcttggccaccatggtgaaaccctgtctctactaaaaatacaaaaattagccgggcgtggtggcaggcatctgtaattccagctactcgggaggctgaggcaggagaatcgcttgaacctgggaggtggaggttgcagtgagctgagatcccaccatagcactccagcctgggcaacaagagcaaaacgcaaaactccgtctcaaaaaaaaaaaagctctctaaacatttggcattktggggattatgtgcagtttatctgaatgttatttgacccgacaaatacatgggaaagctttgttaggaagattctgcatgaagggaaatattttcgtaacttcagtgcccatagacttgcactgagtgaaaggtcacttactgctctcattgagtccctgaaaacaacaggaagcatcaagagaaagattgaactctgggcactgatcccagggatacaca

SEQ ID NO: 530427 - DNA, 603 bp, Homo sapiens
tgcataaacaaccatgaaaaaagggtccataaaagagcttttaggcctttgtagtcttagcagacccaacaaaacatgtaggagtgcaagctgcttaaagtggactgtctctccatacattattgtgtatggataacatgttcctatatggagatcttctaagaaatctagaaatctaaaagacaccaactaataagtgaattttartaagttaacaggatacaaggttaatatacaaaaatcaattcttttttatgtagtagtaacaatctgattatcaaattaagaaaagaatttcattcacaatagcattaaaaataaaatacttaaatgtagatcttacgaaaggtgtgcaggacctgttcatggaacactataaaacatagctattagaaaataaagaagactcaaataaattgagagacacactatgtttatagattggaagaaactggaattgtcctaattgtaataatcctaattgtcatactttgttggtgggaatgtaaatggtgccaccaccttggagaatagtttggcagtttcttaaaaagtaaaagcatgtacttaccatataacctagcaattccactccaaaaaatg

SEQ ID NO: 530428 - DNA, 603 bp, Homo sapiens
tgcataaacaaccatgaaaaaagggtccataaaagagcttttaggcctttgtagtcttagcagacccaacaaaacatgtaggagtgcaagctgcttaaagtggactgtctctccatacattattgtgtatggataacatgttcctatatggagatcttctaagaaatctagaaatctaaaagacaccaactaataagtgaattttagyaagttaacaggatacaaggttaatatacaaaaatcaattcttttttatgtagtagtaacaatctgattatcaaattaagaaaagaatttcattcacaatagcattaaaaataaaatacttaaatgtagatcttacgaaaggtgtgcaggacctgttcatggaacactataaaacatagctattagaaaataaagaagactcaaataaattgagagacacactatgtttatagattggaagaaactggaattgtcctaattgtaataatcctaattgtcatactttgttggtgggaatgtaaatggtgccaccaccttggagaatagtttggcagtttcttaaaaagtaaaagcatgtacttaccatataacctagcaattccactccaaaaaatg

SEQ ID NO: 530429 - DNA, 603 bp, Homo sapiens
tgcataaacaaccatgaaaaaagggtccataaaagagcttttaggcctttgtagtcttagcagacccaacaaaacatgtaggagtgcaagctgcttaaagtggactgtctctccatacattattgtgtatggataacatgttcctatatggagatcttctaagaaatctagaaatctaaaagacaccaactaataagtgaattttagtaagttaacaggatacaaggttaatatacaaaaatcaattcttttttatgtagtagtaacaatctgattatcaaattaagaaaagaatttcattcacaatagcattaaaaataaaatacttaaatgtagatcttacgaaaggtgtgcaggacctgttcatggaacactataaaacatagctattagaaaataaagaagactcaaataaattgagagacacactatgtttatagattggaagaaactggaattgtcctaattgtaataatcctaattgtcatactttgttggtgggaatgtaaatrgtgccaccaccttggagaatagtttggcagtttcttaaaaagtaaaagcatgtacttaccatataacctagcaattccactccaaaaaatg

SEQ ID NO: 530430 - DNA, 463 bp, Homo sapiens
tttgatgctgtgaagttaccttctcctctcattactctgaaacaacttcaggtttactgacttcaaagtggaacatgctctttgatggcgatttgccattagcttgatgttccttcatgaagagatattactccagttccttgggctggaggttggtaccaggaagatcaaagccccgtgcctgattccaggaagggccggtgggcggtgcagctgccatgcaatctgctggcaccgttaacttctgtaaacacatgctgttggctgtaagggactactagtaaaaaaacccaaacatgcagacagataatatgtgaccactgctaactagctaaaagtaattcwttagaacaagtggacatctacattgtctttttttccttagaagaataattgttcaagtatggtgattttatttttgttgttgacagtaatacaatcctttatgacttatgttaataat

SEQ ID NO: 530431 - DNA, 650 bp, Homo sapiens
tctatactactaatcagatcttctgctgtgaccaatctgttgttgaatatgccagtgagctattaattttagttattgcgattttcagtttgggaatttctgttcatgtatcctagtgaaactccttatcttgctctctattttcctggaaatattaattacagttattttaaagatttttygttaacttcaatatctggattatctcttgatcttttccattgtctggtttttgtttccgttttgatgtctgataattttggctgaattctggacatgttggacagaaatttgtagaggctagagaagacaaagtgatcccccagtgaatccccaccacagcctctgataggcttctagattaggcacagttgttaattcaaatcagcatttaactgactcagtgcagcgtctcagtccccatgaggcctagttgatatcttatatctggagtacaatgcttcactagtcccaactgagatttgaaggcctttgccaaaacatttttttgaaaatctctgaattctgccatctgactcctaattgtgatgagtctacagagacccctgcttcgtgacccagcctcatagctgtcctgtcactttctgcttggccaccttgtctcttgcccattgctccttgggagttga

SEQ ID NO: 530432 - DNA, 618 bp, Homo sapiens
ttggacagaaatttgtagaggctagagaagacaaagtgatcccccagtgaatccccaccacagcctctgataggcttctagrttaggcacagttgttaattcaaatcagcatttaactgactcagtgcagcgtctcagtccccatgaggcctagttgatatcttatatctggagtacaatgcttcactagtcccaactgagatttgaaggcctttgccaaaacatttttttgaaaatctctgaattctgccatctgactcctaattgtgatgagtctacagagacccctgcttcgtgacccagcctcatagctgtcctgtcactttctgcttggccaccttgtctcttgcccattgctccttgggagttgaccagtgcttcaagggtaaaagcagaaagagtgttctgagcttgtcttctaagatctttacattcttgagtcctggcagtcatagtagatctttaaaactttcaagaagattatttaaactttacttggtacacattttctacttgtccttggtaggaagtgtagtcttctgaatgtttgcttgtcataactgaaaatataactaactgcatttcttttaatgccatgggaaatgtattgaagaaaac

SEQ ID NO: 530433 - DNA, 618 bp, Homo sapiens
ttggacagaaatttgtagaggctagagaagacaaagtgatcccccagtgaatccccaccacagcctctgataggcttctagattaggcacagttgttaattcaaatcagcatttaactgactcagtgcagcgtctcagtccccatgagrcctagttgatatcttatatctggagtacaatgcttcactagtcccaactgagatttgaaggcctttgccaaaacatttttttgaaaatctctgaattctgccatctgactcctaattgtgatgagtctacagagacccctgcttcgtgacccagcctcatagctgtcctgtcactttctgcttggccaccttgtctcttgcccattgctccttgggagttgaccagtgcttcaagggtaaaagcagaaagagtgttctgagcttgtcttctaagatctttacattcttgagtcctggcagtcatagtagatctttaaaactttcaagaagattatttaaactttacttggtacacattttctacttgtccttggtaggaagtgtagtcttctgaatgtttgcttgtcataactgaaaatataactaactgcatttcttttaatgccatgggaaatgtattgaagaaaac

SEQ ID NO: 530434 - DNA, 618 bp, Homo sapiens
ttggacagaaatttgtagaggctagagaagacaaagtgatcccccagtgaatccccaccacagcctctgataggcttctagattaggcacagttgttaattcaaatcagcatttaactgactcagtgcagcgtctcagtccccatgaggcctagttgatatcttatatctggagtacartgcttcactagtcccaactgagatttgaaggcctttgccaaaacatttttttgaaaatctctgaattctgccatctgactcctaattgtgatgagtctacagagacccctgcttcgtgacccagcctcatagctgtcctgtcactttctgcttggccaccttgtctcttgcccattgctccttgggagttgaccagtgcttcaagggtaaaagcagaaagagtgttctgagcttgtcttctaagatctttacattcttgagtcctggcagtcatagtagatctttaaaactttcaagaagattatttaaactttacttggtacacattttctacttgtccttggtaggaagtgtagtcttctgaatgtttgcttgtcataactgaaaatataactaactgcatttcttttaatgccatgggaaatgtattgaagaaaac

SEQ ID NO: 530435 - DNA, 591 bp, Homo sapiens
atttttttgtatttttagtagaaattttaccatgttgcccaggctggtcttgaactcctgacctcaaatgatmcacctgcctttgcctcctaaagtgctaggattacagtgtgagccactgtgcctcaccccatattggaattaatattcaatttatttagagagtaaacctctgtaatttgcccattatccctgataaatcatcctgaagcctttgtgtcatcacagctacctagttagcttattaaatatgcaaacccctgggtctcaaccacagaaatcctgattcctggtctggttgaggctcacgttctaaagtctccaagtggtcactcctagtcaatctgagtgaaggtgattgatagaacactttaagaaaatttctgtggaatcgtgttttttttttttttcttttgtaagacatcagtgtttgcaccctatggaatcttgctgttttcaagcaatgttttcctctcaatgttgatgtttcccctgaaaaggcagtacaaggtaggatggggatgagacatgcctgtgcttagaatgacagtgagaagtagaaaagtagtaatgagaagccagatttaagag

SEQ ID NO: 530436 - DNA, 591 bp, Homo sapiens
atttttttgtatttttagtagaaattttaccatgttgcccaggctggtcttgaactcctgacctcaaatgatacacctgcctttgcctcctaaagtgctaggattacagtgtgagccactgtgcctcaccccatattggaattaatattcaatttatttagagagtaaacctctgtaatttgcccattatccctgataaatcatcctgaagcctttgtgtcatcacarctacctagttagcttattaaatatgcaaacccctgggtctcaaccacagaaatcctgattcctggtctggttgaggctcacgttctaaagtctccaagtggtcactcctagtcaatctgagtgaaggtgattgatagaacactttaagaaaatttctgtggaatcgtgttttttttttttttcttttgtaagacatcagtgtttgcaccctatggaatcttgctgttttcaagcaatgttttcctctcaatgttgatgtttcccctgaaaaggcagtacaaggtaggatggggatgagacatgcctgtgcttagaatgacagtgagaagtagaaaagtagtaatgagaagccagatttaagag

SEQ ID NO: 530437 - DNA, 573 bp, Homo sapiens
tatttaagtctctctttgtcctggttgctttcttcaaatgtgctacatgtctcttttgaggcttgtggctgagactggccaccacctgtggtctgacccaggacacctacataatttcaagtggtctatgttttaatgatgaaaaccatccaaaccctggagtgcaagtgtgcatgtatacacacacacacacacacacacacatgctgtgtgaggcttagtcaaggatacagaaacttakcagaagcgatatgacaacacacagcaaaagcagctgcagaatatcttcctgccgcttcacctgggccccagagtctgtaatgggtgaggtgggggcatgtagctgctggtaacattatccatgtaaggtaaggtcttgcaggatccaagaagcttaagtttgtgctgggtcagagtcactttatattgtgcctttgctcaccattcataacgaatctacacactcaataaaatctctgtacttaattcttcaaggagatatttgcaaactttaggctctgctggttgttgagccaaactcaggtcagagcattccatcctcacctgggggaa

SEQ ID NO: 530438 - DNA, 605 bp, Homo sapiens
ttctgggtttgcttcaaaagttctaggcacttcagcgtatttaacaaaaagtttcaaggaaagtagacctccttctttgggctatgaatcctttccagagacaggatatctatttagataaatgtaagtttcaattcttccctttctcacagtcctcctctctaaaacagaattagtgagtaacacccatcttagagtgatacagcctggtagacagtgttttggaagactattactctttaactcttggaaaaggaagaaaatatacaaccctgcaatctgcgaagttcttgcacagatataaactcattgattctcagagaattggaggtacaagtatcgtcattcccattttacaaaagctcaagtggctcagtgacttgcttaagataaaatggttaacaggacccttgcttttactaagcaatttgacctcaaaaggcaygtctttctcattaaatacaccctttctataatcatgttaaataacaaattgttcccagggtaagagaaggggagtgatataaaattaagccattatcttattccttgctatggtttgaatgtttgtggcccttccaaaattcatgttgaaatttaatccc

SEQ ID NO: 530439 - DNA, 662 bp, Homo sapiens
ggtgtgctttgtgtatgacacataccagggaagttcaagtaaggtgatttaaaattggatttgtgtattaaaaccaaacccaaacccaaacccgtatttcttccatgccaaagaaggaaaaaaagccttaaaaattacattgaggaccatgtgagatcttgcctgatataaacaatatgtaacattacagaaagataaccctattaaattccatgggaaatgtgggcccattataattcccggcaatagttgagaagagaaaatccatgtcatttgggtattaatgctgtcataccttaaatcaagaccctgtaagtattgagttgagtatctgacaaatatttccagattttagaggctttctgaatcaaagtcttttcyaatattgtcctaaagttttctgcctgtgggaatagtaatttaatataattactactgtaatatagtattatttttatttgccaacataaattctgtatgtagtttgaaatgtaaaaaggaaacttgaaaggatttctaaatattttgaatatgtttgacttaaatgctcaaagacggcaaactaaaagttaaatttgtgcctagaatttggctgaacagcatttagatgttatttgattaatgtcatttgtcatgtaatatgacttactgttgcacttttt

SEQ ID NO: 530440 - DNA, 569 bp, Homo sapiens
tttatagaaaaaacatgacactaaatagttcaggccattattttaggaacaaactgtgttgcaatagaatgattatcttgtgccattaaaagaagactgaattaggtctggcatatttgttttataatataatgccattragggattaagatttgagcaaataaatagttttatctgggaaaatgtcatcttttggaatatcacattgacagattaaagacatattactgtatttttttttacttctcagtgacggataatgccttcctacaggtgactgtttttaaaaaaataattcccctctcaaataattataataagtcaacagtgtctttcaataattttggtgggctcaagaattagcatgagtgtattattggtgtatttttattttatgaatttttcttgttatgggatagggtttctttctacggaacaaacatttttcacaaggagcttttcttctcacaatgcattgagcaaattaactgagttagtttccaagcctattactggtggaaatttagaaaatttagactgggaaaagtcaagttaatgctgtggagaca

SEQ ID NO: 530441 - DNA, 594 bp, Homo sapiens
aaccttttttttcccaaaaaaggggaaaaaactccaggatactcctctgttcccaccaggggcagattccctgcctaaagttttccctcatgtccagcaaatgctgcatggagccctggatttctacgtggaaagctagaagaagggagagctgaatcaggatgtaatcaccctttccaaagaggtcagtccagtactaccatgtgctcctgggcaagctctccaggttgagggaacaggagcaggggttatgtcaggtgaaggttggagtgagagacctcccaggaggtgtagaatattccactagggacatctcatacccttccaggattagaccttgaggcctggagatccccaggcaattagtattgaaggtcgaaaggccaatgacaggaataggaaggcccactgtgtcattcacaaagcacttccaaacccatcaccacaggtgaccctcacaacaaccctgtgagacctgcaggacaggggctctcacaaaggaggtgtcgggaatgtcaagattttaacaccttctccaagtcaggatcaggaaaygctgtcccagcactgacctatattccctatgcttcctcc

SEQ ID NO: 530442 - DNA, 479 bp, Homo sapiens
tttatcttccagtactttaaagatgttgcttcattatcttctaattttctttgtttccaataaaatgtttgctggcattttttgttcctctgtgcaaaccgtgtttttgtcattggctgctttgagaatttttctttatcactagttttaagcaattttattttagtgtattttgtgcacaagacaaggatgccctctctcaccactcctgttcaacatagtattggaagtccttgccaaaacagttaggcaagagaaagaaataaaggtacccaaataggaagaaaggacgtcaaactatccytgtctgtagattacatgatcctatatgtagaaaactttataggcccaaaagcttaaggcccgaaagctccttaagatgaaaaacacctttggcagagtctcaggatacaaaaagaacatacaaaaatttactcgcattcccatacaccaacaagagtcaagcggagagccaaatc

SEQ ID NO: 530443 - DNA, 680 bp, Homo sapiens
taaaatgcaagacaaaacccaaatgagatgccactttgcatccactagtaaggctttcataacaacgacacagaaaatcagtgttgctaaggaggtggagaaattggagcccttatgaactggctgctaggaatagaaaatgatgcacttgccgtggaaaacaatttggtggttcctcacagaatcacacagagaaacaggcgctgcgggcttccgggttctcctgggctggcgcggtatgtcccggaatcgcaggcrcgcatcccttcccgcctgagggcctgcctgtccttgactcccgcccctcttctcctccgaagagaggtcggggcctctccaggggccgtccgcagccaccggggatggggctgagggtcggttcctgccccggtgcagccgccgccgggcagaccgcctggcttggccgcagccacggcgacatccacgcccaggtctgcgaggctgggcgcgccagccagcttgggagttgcctggcgcctgtagctgggcgcccaggtggtggagcatggcctgggcggcctctggatcgcgagtgcccctggcctgagagcccgccagaccctgcccccgcccggctcctcctctgccagagctcgacacctctagccaagggccctctgcagccacgggggatagggctgagggccggttcccgcccc

SEQ ID NO: 530444 - DNA, 407 bp, Homo sapiens
cctgcctgtccttgactcccgcccctcttctcctccgaagagaggtcggggcctctccaggggccgtccgcagccaccggggatggggctgagggtcggttcctgccccggtgcagccgccgccgrgcagaccgcctggcttggccgcagccacggcgacatccacgcccaggtctgcgaggctgggcgcgccagccagcttgggagttgcctggcgcctgtagctgggcgcccaggtggtggagcatggcctgggcggcctctggatcgcgagtgcccctggcctgagagcccgccagaccctgcccccgcccggctcctcctctgccagagctcgacacctctagccaagggccctctgcagccacgggggatagggctgagggccggttcccgccccccgtgca

SEQ ID NO: 530445 - DNA, 407 bp, Homo sapiens
cctgcctgtccttgactcccgcccctcttctcctccgaagagaggtcggggcctctccaggggccgtccgcagccaccggggatggggctgagggtcggttcctgccccggtgcagccgccgccgggcagaccgcctggcttggccgcagccacggcgacatccasgcccaggtctgcgaggctgggcgcgccagccagcttgggagttgcctggcgcctgtagctgggcgcccaggtggtggagcatggcctgggcggcctctggatcgcgagtgcccctggcctgagagcccgccagaccctgcccccgcccggctcctcctctgccagagctcgacacctctagccaagggccctctgcagccacgggggatagggctgagggccggttcccgccccccgtgca

SEQ ID NO: 530446 - DNA, 407 bp, Homo sapiens
cctgcctgtccttgactcccgcccctcttctcctccgaagagaggtcggggcctctccaggggccgtccgcagccaccggggatggggctgagggtcggttcctgccccggtgcagccgccgccgggcagaccgcctggcttggccgcagccacggcgacatccacgcccrggtctgcgaggctgggcgcgccagccagcttgggagttgcctggcgcctgtagctgggcgcccaggtggtggagcatggcctgggcggcctctggatcgcgagtgcccctggcctgagagcccgccagaccctgcccccgcccggctcctcctctgccagagctcgacacctctagccaagggccctctgcagccacgggggatagggctgagggccggttcccgccccccgtgca

SEQ ID NO: 530447 - DNA, 407 bp, Homo sapiens
cctgcctgtccttgactcccgcccctcttctcctccgaagagaggtcggggcctctccaggggccgtccgcagccaccggggatggggctgagggtcggttcctgccccggtgcagccgccgccgggcagaccgcctggcttggccgcagccacggcgacatccacgcccaggtctgcgaggctgggcgcgccagccagcttgggagttgcctggcgcctgtagctgggcgcccaggtggtggagcatggcctgggcggcctctggatcgcragtgcccctggcctgagagcccgccagaccctgcccccgcccggctcctcctctgccagagctcgacacctctagccaagggccctctgcagccacgggggatagggctgagggccggttcccgccccccgtgca

SEQ ID NO: 530448 - DNA, 439 bp, Homo sapiens
ctgtgtttataatacatatatatctctgcctcttaaaccaagaataatttttactgggacaagaataaacacaaggaaatgaattagaaaactattaaagtgaaaggacaagaaggtggagaccttgttcaaaataatgaaatacatatttaagatatgtgcaagtttgaagaaaacagctactgatagggttttggtgtattagataagataaaatcaatgggaacaccagctgaagtaaacaaacaarcatacacacacaaactgggaagcagagaaaataacaaaactctacttaaaacattatgaatttcagttgtctataaaacaatccacatttgatattaagtaagtagatgactatgcaaagctctacctcagagaagataccaaaattggaaatattctgagatgctatcatgtaactggcctttaaacc

SEQ ID NO: 530449 - DNA, 603 bp, Homo sapiens
ctgtgtgagtacagcatcttcagcctgttcttcttcagtcagtccggcctcagcatcgtctgtgccgtgatacctatacaggtaatttgtgttagacattcttagaagagtttcaaaagttttatgtttttatctgggttataaacagagtcctcaaatgcacacaaaggaaatcatgccatgattgaatttcagcaggaataagtttattttacctatwcaaaattaaaatacttttgttgtgtttgaaaatgtgttttaaagatatgtttttgaaaaaagtttaagtaaatatttaatcatgtccccttttctatcccaagaaataatttcatatatagtttatttaaattttttaacaaaaatgtagcataatttttttaaattgtatattttatttaacccaatatatatacaaaatattgggtcaatatgtaatcaatataaaaattattagagatagtttgcgttcttttttcatatgaaatctttgaaatccattgtgtattttaaattttaggatgtctcaactcaaatgtgaaattttcatggagaatatttgaactgtatttagattaatacaaattgcagttaaaaagttta

SEQ ID NO: 530450 - DNA, 603 bp, Homo sapiens
ctgtgtgagtacagcatcttcagcctgttcttcttcagtcagtccggcctcagcatcgtctgtgccgtgatacctatacaggtaatttgtgttagacattcttagaagagtttcaaaagttttatgtttttatctgggttataaacagagtcctcaaatgcacacaaaggaaatcatgccatgattgaatttcagcaggaataagtttattttacctatacaaaattaaaatacttttgttgtgtttgaaaatgtgttttaaagatatgtttttgaaaaaagtttaagtaaatatttaatcatgtccccttttctatcccaagaaataatttcatatatagtttatttaaattttttaacaaaaatgtagcataatttttttaaattgtatattttatttaacccaatatatatmcaaaatattgggtcaatatgtaatcaatataaaaattattagagatagtttgcgttcttttttcatatgaaatctttgaaatccattgtgtattttaaattttaggatgtctcaactcaaatgtgaaattttcatggagaatatttgaactgtatttagattaatacaaattgcagttaaaaagttta

SEQ ID NO: 530451 - DNA, 594 bp, Homo sapiens
gggttgaagcgaatggccaggatgatgagcaggttccctgttatggtgaccaggtacacgatgaggaagagaacaaagagtgtcttttggtcctcaggccgggaggagagtcccaggaggataaactcggagacactgctggtrtggttgattctttccattgacttgggctcagttataaacaagaagttttgtcatttaacatgctctgatttcataacaccaatcatgagaacctagcaagtctttgtttcttctgtttggtcacaattagctactgtgctaattgtgggatggcttgttcacctcatggtccttgatggggtcctcccttcccaaatctatgggctccataagggcattatattgaaatctggagggacagagggagagttttcctttagaaactttcagaagtggactcctctaattcagactcagtatttcctattctgtgaaaagcactattcacctgccggggacatagcaatagagcagacagatttctgcttatgtggagcttaccttctagttggggaggtagatcattatactacaaaatatgtagtatagcatcagttagggatacatttt

SEQ ID NO: 530452 - DNA, 594 bp, Homo sapiens
gggttgaagcgaatggccaggatgatgagcaggttccctgttatggtgaccaggtacacgatgaggaagagaacaaagagtgtcttttggtcctcaggccgggaggagagtcccaggaggataaactcggagacactgctggtgtggttgattctttccattgacttgggctcagttataaacaagaagttttgtcatttaacatgctctgatttcataacaccaatcatgagaacctagcaagtctttgtttcttctgtttgrtcacaattagctactgtgctaattgtgggatggcttgttcacctcatggtccttgatggggtcctcccttcccaaatctatgggctccataagggcattatattgaaatctggagggacagagggagagttttcctttagaaactttcagaagtggactcctctaattcagactcagtatttcctattctgtgaaaagcactattcacctgccggggacatagcaatagagcagacagatttctgcttatgtggagcttaccttctagttggggaggtagatcattatactacaaaatatgtagtatagcatcagttagggatacatttt

SEQ ID NO: 530453 - DNA, 556 bp, Homo sapiens
tagaagcttgatataaaatatcagaagagactacagacatgaaggccctttaaatgtcccatgaaacagtgagaagttgtttattttaaatttctgtgggaacctgggtttcctatcctttgctatcccagaatagctttctataactgccagcaatcggatccgtaaactgccctttgtaaatagaggagacactgggataacatgacttaataaagtytctgagtttctctgattcttaatccccagaaatgggaagaaaatctgggtcagttgttaagagaagacacacagtgaaaaaccattccagcggatgatttctgggccacctaactctgattattcttaatacctccctgacggattgaaaatctctggaatctattagctattttctctgattcagggaaaattttactcttcactatgtattagtgaataattttcaattatttccattgaaaataatggcaaaaactgcaattacttttgcaccaacctataaatcattcatactcttttgtggataggttttgataaggggaaatgggagagt

SEQ ID NO: 530454 - DNA, 551 bp, Homo sapiens
tggctttttgagttatccaatgtaagctataatttgtctctttaatttccctaattttcaagctggagataacattgaacattacaggagacagctatagttttgattgcccagagccatccaactttattagagcatggcggggttatcagtcacagtactctgccatctactccccacatcatggtgacaaataaataaactagacctggctaatcaaagaaatccagctcctcatgtcaagtgattggctcaggggtggacacacaaccccaartaagccaatcaaagcccttcactggtacttttcagctggagctagggtggaagcctgtcctcattttgagatttatgggctgaaaggatgtgtatctggggtgctatcttctcatctgtagaaatagatgaggtcaacacaccaacagaagatctgaaagatggaaagagggggcttaattatattgcttgggtccctagatttagttcatgtctgacattgtgtccttacatcccaatacacatgtgtgttttacagatagtttgaatcggtt

SEQ ID NO: 530455 - DNA, 587 bp, Homo sapiens
atgtcaaccttttcttgtatctgtttcaaaactgggaagagaaaaggtagaatgagagaatcaagaaacataggagataacttttttctgtggatgggaagaacattcctataggttgtgcctatgaggaaagaatccaatctaagccaccaatagtaaagccaccatttattcgttttcatcacctacttgagccctgcaaagcattcttatttttttttcttttttgagayggcgtctcacccttgttgcccaggctggagtgcagtggcgcgatctcggctcattgcaacctccgctttcccaggttcaagtgattctcctgcctcagcctcctgagtagctgagattacaggcacctgccaccacacctggctaacttttttgtatttttagtagagatggggtttcaccatgttggccaggctggtctcaaactcctgacctcgtgatcagcccgcctcggcctcccaaagtgctgggattacaggcgtgagccaccatgcccggcctcattctcacttttcactctggccttgtgcctgcctgtcccagaatatcttctctgacactacttaaatgttgtt

SEQ ID NO: 530456 - DNA, 587 bp, Homo sapiens
atgtcaaccttttcttgtatctgtttcaaaactgggaagagaaaaggtagaatgagagaatcaagaaacataggagataacttttttctgtggatgggaagaacattcctataggttgtgcctatgaggaaagaatccaatctaagccaccaatagtaaagccaccatttattcgttttcatcacctacttgagccctgcaaagcattcttatttttttttcttttttgagatggcgtctcacccttgttgcccaggctggagtgcagtggcgcgatctcggctcattgcaacctccgctttcccaggttcaagtgattctcctgcctcagcctcctgagtagctgagattacaggcacctgccaccacacctggctaacttttttgtatttttagtagagatggggtttcaccatgttggccaggctggtctcaaactcctgacctcgtgatcagcccgcctcggcctcccaaagtgctgggattacaggcgtgarccaccatgcccggcctcattctcacttttcactctggccttgtgcctgcctgtcccagaatatcttctctgacactacttaaatgttgtt

SEQ ID NO: 530457 - DNA, 587 bp, Homo sapiens
tgtgctgataaattgagctaatcaatgtaaaagtactttaagaagtacactgcaacacaaacctaagtcccaaaaccacaatctaattaacatattaatttaatcaatgaatcagtcaaaatatcaatcacaaattaatrctaggttctgtgggagataaggcatgtcttcatatacagcatggccccatccctaaaggaatttatggatgagttggtggtaaaaagttaaagaagaaagaaagtaggcatttattgagtgcctatcatgtagtatgcactgtgctatctgcttttccttatattatctcacaataatcctcacaacattctaggaggtagtcattattttcttcaatgtttggatagaatgtttcgatagaatgccctcccccaatgcctctctgttcgagcacaacatggcataatagctaaaaagccttggatcagggctcaaactgaatttgtatccaggcactgccaattactttctgtatactctgaggaaattgctcaaattttctgcacctcagttataaaatcaggaagataagaatagtaccaattgtatgctttgttgtaaggata

SEQ ID NO: 530458 - DNA, 484 bp, Homo sapiens
cggttggttagatgcgtaagcggtagtatgcgagctcagttcgttgttgctggttggctgtctagtcggccgatccgtctgctcacccggcctgccctttcctgcctttcgtctgcagcggccgccagctcctgctcggtgtccaaaacaaaatggccgccacgtccagtgcttgtctgaccggctaaaatggcgtctacgcaattacgtcaggcgtcagatccgcgcacgactagagggcgggaaagatttgagctacgcctgcgcagaggtcagaggcggagccttagggcgaaggcggggctttccatgcagtgycccgcccctaggggcgtggccaatggtcctgttgttggggcgtgccggggacttcacgttccagtagtggttgcgctgcaacctcttgggggtagttattaatgtgggccttagaggggatttgggtcccgaattccctcgcccctccgttccctagccaaggtac

SEQ ID NO: 530459 - DNA, 351 bp, Homo sapiens
cccacggcgggcccctgccagaggctcaagaaaaccaacccgactgtccccgcagcgccctgctctctgyccacaggagggcgctcgctccgaaccccaagttgtcagccactggaaggcaggcggagagggactggaagaaagggggaggaaaggggtgtagggcgggaacctagaggggcgcgggaggggttagggagcgcgtacttttccagagggagctgaatagagccaaggcttgggcacggctgtgcagagagggaattcggcccccggtctcttgcaaccaacagcgcgacttctccctgcagggcaggggaggcaatagagaaggagggcctccaagaaggt

SEQ ID NO: 530460 - DNA, 590 bp, Homo sapiens
tggaagagccggggcttgggccgtgagtcatggagtagagtcctggagaggggacagtacgrcaccgtgagtggtgctcatatatgagccatgcagtggtcacagatctccagggggtggggagccttagagatcccccttttacaattggcaagacagatcctcaaggccatgaagggaccttgtgcagttgacccctctctctgctatcagtttcaggcttttgaaagcctggtaagtaagctttcgtaaaaccaggcctggctttgagcaggttcatcttcagtttctcgctgcctcccaacggatggggcagaagagcgacgagaagattggtaccttccctccctggattggacaccggtttctagaattccctgaggggctaacctctaatttcaatatgttaatgtgtggaatctaatggcacatttattgcttatggagatgctagttatttacatgggaaactgatttatctattagataattagtaaacttcaataattgcaaaaaccttttagcaatcagttgacatttaattaacatacaataactgtcttattaaatctacattaaatgcctattgg

SEQ ID NO: 530461 - DNA, 507 bp, Homo sapiens
aaagaggaatgagtgtggttcctctcaggtagcttccacttaatgagggggatggacaaggaaaccactgattttatccagtgttgtaggagtttartaaaggtagcagagggagactggtttgtggggagccacaggaagtaagagaaccgtgcccagcctagggagtaggggcattttgagaagcatcttaggtcaggtttcctggagacagactctgagatggagatttgtatgggggaagtttacaggaaatggttctgggaagtcatgcccatagggagatgagggaagcgccctggccccggagaggtttaattgctaagcagttgcaccggaggcctcagccagtctcacagggagtcctggagctgggaaggacagagttgtccagaactgaggcaaagggctgggcctatactctataccaaccagtcactggatgtgggtgccccagggatggggcataaccatgagggaggcagccagtgctcctgctcccagcag

SEQ ID NO: 530462 - DNA, 509 bp, Homo sapiens
tgtgctgtttagcaaacatgctgtgtgtgttcacatccaggacaaaggttgggggtcctggaggccagggcccaaattgtctcatctctgagcacctcctccaactcctacatctcctcttctactcctgctccttcccctatcctaatttgtaatgaatgtttgtgcaataaaaagctaaccatagaaataacaatagcagtgggaataccaggaaaagttaaacagggcagatcacaagccccgactgagggccagctatgtgtctgactttgtgcttggccctayggggcaacagcaaactaaggcatcagtctctattcttaaggagatgactgtctacatgacacgcaggacacaaggagatgctgacaagcgcagccttgatgctagctgggggttgtagccaaacaagaaagcaaggagaaatcagggcagacttcctgggggagatggcattggcactgagacttagagggctgggataggagagggcattctgagacggg

SEQ ID NO: 530463 - DNA, 597 bp, Homo sapiens
ccacacccagctaatttttgtatatttagtagagatggggtttcmtcatgttgaccaggctggtctcgaaccctgacttcaggtgatccacccgcctcagcttctcaaagtgcaggcatgagccaccacacccggcctgtcaacttttttattttattttattttatttttagatggagtcttgctctgtcaccaggctggagtgcagtggcgcggtcttggcttactgcaacctccgcctcctgggttcaagcgattctcctgcctcagcctcccgagtagctgggactacaggcgtgtgctaccacacctggctaatttttttttttttttttgtagttttagtagatacggggtttcaccatgttggccaggatggtcttgatctactgacctcgtgatctgcccgcctcggcctcccaaagtgctgggattacaggcatgagccaccgcgcctggcctgagccactgcacccagccaactatttttttaatgtactgtgaagagtaactgagattacacctttaaggcactcggcagggtacctgcctaagtcagaatccaatgaatagtgtttgctgtcctatgaccactag

SEQ ID NO: 530464 - DNA, 493 bp, Homo sapiens
gctgggattctcacttccgatccgcggtcctgaacccgctcccaggacaggggaactccttcgtggcgaagcagcaagtggcgaagcagcagcctctgcgctgcctcatctacatagaagtcgccctgtcygtgatgtcaccgacagtgccttgcccagtccccgtctgcctttctgccactcaaccgaccaatctgctgccagagccgccaaggggaagtgacgtctgcctctccctttttccctcccgcccctgcgtctgttctctcccaaagaagctggtccttagcctgtgttaaggagcaacctttcggtggccagatggagccggggcatccttcttcaaataatggcttttaattcgcagactagaatgtttcggattacaaaagaaaccggttctcttcacatccttatccttgtgatgcagcattccgcttgcaattggaagccgagagaaaccatatttatgaaagtaaagaggctgctcaat

SEQ ID NO: 530465 - DNA, 501 bp, Homo sapiens
tgtggctcccaggccccaacctggagagtctaactcaggaatctgggacagcctccaagaggtgttgacaggagccagttggaaccctctactcaagggtccctgggtccctcctagtctaaatcccactgactttgacatgatccaaaccctagtttgtttggaagcagtgaattcataccaaagcagccaccaagaaggcctggcagggctggttgtgaagcaccccttcctccgggtgctgcctgttgggtctcccactaaccaaaccagggagccccttcttagcaaggatggaaycaggcccagctcccttgtcctgggccgaggggaccactggagcccggcctggtgggtcctagggccaccctacatccacgccagtgtgcctgggcccaagaggctgcagctgtggctaccttgccacatggccatatggccagaactggcctccagcttgctccctggtggccaggggccctgcaggcacacccagaaact

SEQ ID NO: 530466 - DNA, 445 bp, Homo sapiens
ggtgtggaaaacagtatggagtttcctcaaaaaactaaaaatagaatctaccctatgatccaggaaccctatttctgggtacatatccaagagaagcttcagagaatgctttgttgggttttctggaacccggcagggctcaggtgtgtggggatgcgctctgtgagcctgtgtttcctccgccgtgagggctcctcccgctcctgtaggaaaaggcagtgccccttttgtcttgtccatgtgggactccaaagggtccagacgcgacagaaaggcggcgaatcctctcagagtgggcaggggaggagacagaatatggggaggagatagaatatgggaatggggcagtagaggggtgggatttcatgaaatttcctgattcaaggctatcatgaagtaggyctctttgggagctcggccctccagtctctggtgagggtaacat

SEQ ID NO: 530467 - DNA, 193 bp, Homo sapiens
tggagagactcgcgtgtagctcaatgcccacgcacttagccaatgggaaattacgaattgatgaccagttggctcttggatctgaggaaaaawctccagagtcagagggaactctcgaagttttgcccggagcaaacggaagggtggcgttgccatcgcctaagatgggaaaatggcaggtgtcacaggttgc

SEQ ID NO: 530468 - DNA, 193 bp, Homo sapiens
tggagagactcgcgtgtagctcaatgcccacgcacttagccaatgggaaattacgaattgatgaccagttggctcttggatctgaggaaaaaactccagmgtcagagggaactctcgaagttttgcccggagcaaacggaagggtggcgttgccatcgcctaagatgggaaaatggcaggtgtcacaggttgc

SEQ ID NO: 530469 - DNA, 519 bp, Homo sapiens
gtcttcaaataacatagaaagccaatcgcgacattagcaaaactctttcagtttgggggcttgcctgccctgcgtcactatcattgtttccttgggtttcccaggaatgtacatgtgtcagactgccgccctgcttatagatctgtttccctgcaaggaaacaggaatatgttgcctgtggcttccagagttggagatacatgtagttgcacccctgagggctaacatttaattttggaatcaagtgatgcawtcagactggttgttatcattctgtggtatatatttagtgaacacattctgattgagtttcctgcttttagctggagcaagaaagtttaataattgtgatttgtatgaaaaaatcataggcaagggaatgggtgtaaaataaactttattgtcagaggtttctaaaggctcatccttcaaggaaaacggacatatgctgaagagctgataaactgtctacagcagtgttattctaagctaatcttgattccaagttcttgccatttt

SEQ ID NO: 530470 - DNA, 519 bp, Homo sapiens
gtcttcaaataacatagaaagccaatcgcgacattagcaaaactctttcagtttgggggcttgcctgccctgcgtcactatcattgtttccttgggtttcccaggaatgtacatgtgtcagactgccgccctgcttatagatctgtttccctgcaaggaaacaggaatatgttgcctgtggcttccagagttggagatacatgtagttgcacccctgagggctaacatttaattttggaatcaagtgatgcattcagactggttgttatcattctgtggtatatatttagtgaacacattctgattgagtttcctgcttttagctggagcaagaaagtttaataattgtgatttgtatgaaaaaatcataggcaagggaatgggtgtaaaataaactttattgtcagaggtttctamaggctcatccttcaaggaaaacggacatatgctgaagagctgataaactgtctacagcagtgttattctaagctaatcttgattccaagttcttgccatttt

SEQ ID NO: 530471 - DNA, 519 bp, Homo sapiens
gtcttcaaataacatagaaagccaatcgcgacattagcaaaactctttcagtttgggggcttgcctgccctgcgtcactatcattgtttccttgggtttcccaggaatgtacatgtgtcagactgccgccctgcttatagatctgtttccctgcaaggaaacaggaatatgttgcctgtggcttccagagttggagatacatgtagttgcacccctgagggctaacatttaattttggaatcaagtgatgcattcagactggttgttatcattctgtggtatatatttagtgaacacattctgattgagtttcctgcttttagctggagcaagaaagtttaataattgtgatttgtatgaaaaaatcataggcaagggaatgggtgtaaaataaactttattgtcagaggtttctaaaggctcatccttcaaggaaaacggacrtatgctgaagagctgataaactgtctacagcagtgttattctaagctaatcttgattccaagttcttgccatttt

SEQ ID NO: 530472 - DNA, 503 bp, Homo sapiens
tgagcccccgcggctccaccgcgcagaaggtgcgccggaggccctgccagtttcccgccctgcagggtactgagaaatcaacgatttgtaaaaagaacttccccatggaaaaaaatctgttgatttccgctctcagggctcttcaaaggactaaaagctaaaggcgacaatgaattcattcgacaagtcctagtcgtgmgccctggtgagtgccagaccctgctccccccgaggggacccacgagcgaccctcaccaccatccctgccctggtggagcccccgtgcggaacacaggatccgaagatggcagcggaagctcctccgcggccccgagagcgactgggcagggtgggcacaggctcttcaatgggtgaaggcggcgcaaagaacgggaagaaccatcccaggagcccacagggcgttcagcttcccttggggccccaggcggctcgggctgggtcgccgacccgggagttcctggaagcttctgaagcaggcgagg

SEQ ID NO: 530473 - DNA, 284 bp, Homo sapiens
ggatgcgctcccacgggtggctgtccagccggtggaacatctcgtagcacagtaggtggcggaacttgcgatcctcgcggctcaggcccatctccggtagctggaagtagccgagcatgaagaggtcgagcgtgaggctttcrtagcgcgggggtgcgccgccgtctaggggcgacaggaagtgctggggccagtacacgccgtgtgccaggcccaggcttggcggcacgtgccgccgcaggctccgccagtggtgcagcagcttgcccactgcctgccgctgc

SEQ ID NO: 530474 - DNA, 284 bp, Homo sapiens
ggatgcgctcccacgggtggctgtccagccggtggaacatctcgtagcacagtaggtggcggaacttgcgatcctcgcggctcaggcccatctccggtagctggaagtagccgagcatgaagaggtcgagcgtgaggctttcatagcgcgggggtgcgccgccgtctaggggcgacaggaagtgctggggccagtacacgccgtgygccaggcccaggcttggcggcacgtgccgccgcaggctccgccagtggtgcagcagcttgcccactgcctgccgctgc

SEQ ID NO: 530475 - DNA, 284 bp, Homo sapiens
ggatgcgctcccacgggtggctgtccagccggtggaacatctcgtagcacagtaggtggcggaacttgcgatcctcgcggctcaggcccatctccggtagctggaagtagccgagcatgaagaggtcgagcgtgaggctttcatagcgcgggggtgcgccgccgtctaggggcgacaggaagtgctggggccagtacacgccgtgtgccaggcccrggcttggcggcacgtgccgccgcaggctccgccagtggtgcagcagcttgcccactgcctgccgctgc

SEQ ID NO: 530476 - DNA, 645 bp, Homo sapiens
tttgtgactttttaaaattaagaacttttttttacagacagggtcacagtctgtcatcatccaggctggagagcagtggcgcgatcacggctcactgcagcttcaacctcctgagctcgagcaatcctcccrcctcagcttccagagcagcgggcactacaggtgcgcaccaccatgcctggctaatttttgtattttttttgtagagatggggtctcaccatattgctcaggctggtcttgaactcctggcctcaagtgatcctcccaccttggcctcccaaagtgttgggattacaggtgtgagcctctgcacctggccacttcaagactatttatgatttacatatttacacattacaatgggtatactgtaatatagtatataaaaatctaattgttatgctattttactgaattagataaagaacataaacattacctatgattctgcagacggaggtggccactcggtactgcaggccatgacctttccaccaagtgctttatacaacgggatattttgcacaatgcttggtcatctcccctgtcccaaagctgcatcctgtcagtaaccaagcatcagggggccattctaagggcctctgggttccgcctgcagatatgtcataatggagccaccagt

SEQ ID NO: 530477 - DNA, 645 bp, Homo sapiens
tttgtgactttttaaaattaagaacttttttttacagacagggtcacagtctgtcatcatccaggctggagagcagtggcgcgatcacggctcactgcagcttcaacctcctgagctcgagcaatcctcccacctcagcttccagagcagcgggcactacaggtgcgcaccaccatgcctggctaatttttgtattttttttgtagagatggggtctcaccatattgctcaggctggtcttgaactcctggcctcaagtgatcytcccaccttggcctcccaaagtgttgggattacaggtgtgagcctctgcacctggccacttcaagactatttatgatttacatatttacacattacaatgggtatactgtaatatagtatataaaaatctaattgttatgctattttactgaattagataaagaacataaacattacctatgattctgcagacggaggtggccactcggtactgcaggccatgacctttccaccaagtgctttatacaacgggatattttgcacaatgcttggtcatctcccctgtcccaaagctgcatcctgtcagtaaccaagcatcagggggccattctaagggcctctgggttccgcctgcagatatgtcataatggagccaccagt

SEQ ID NO: 530478 - DNA, 535 bp, Homo sapiens
tgtcttctatgcaaacctgtgtccatcgcagctctgcctcttgctgtacaaatttggaaggaaattcaaccttgctcagcctcagtttcctcattcataaattggagatgttattacctgacttacagtatggctgtgaggtttatcaaggcaattatrcaatgtggcagaagcgggattcaaacttcagcaatttgaatccagaatccacacttttagtgaggttaagctaaactcatccttattctgctcctgtgtgattctgatgcacaaaatgtggcttcagcacatagtgagtgctcaactaattgtagttatcagcatacaaaataaatatctatttgcattttttaatatttggtcaaagtcagttgagatggtaaatgacagactttggcctaacaaagcttacatgggggccatgggggctaaagtcagcctgggggccaggtggggagcaggtgaagttgtaggggaggcaggcatggattccaggtggggtaacatacctgggctgtgggcttttgtctgttag

SEQ ID NO: 530479 - DNA, 617 bp, Homo sapiens
tactatcttcccttgttacttgatgatttcctttaatggtatgtgtcttagtccatttgtgttgctatcaaggaattccygaggctgggtaatttataaagaaaataaatttactttgttcctggttctataggctatacaagaagcatggtgtcaacatctgcttctggtgaaggattcaggctgcttcccctcatggtgggaggtgaacgggagctggcatgtgagatcacataatgaaagaggaagcaagagttgggggaagtggcagattctttttaacaatcagctcactttctctcatctgctgtgatccgctgaaaatgtgctggggtttgttctgctgtcactgtttatgctgctggaacttagcactgtcttgatttgaagcatatgattgagagccatttgaagcaatcttcattaacgcagataaaacaagtttacatgtgcagagttagaaaatgacatgttcaattctgtaagtggtgactttttgagcacctttcagtattatgtatttgtaaaaaccattgtttttggatataaagctaataagcactttaaaaaggaaaaggcagcctttactattttttctggttgagtcattgctcttc

SEQ ID NO: 530480 - DNA, 617 bp, Homo sapiens
tactatcttcccttgttacttgatgatttcctttaatggtatgtgtcttagtccatttgtgttgctatcaaggaattcccgaggctgggtaatttataaagaaaataaatttactttgttcctggttctataggctatacaagaagcatggtgtcaacatctgcttctggtgaaggattcaggctgcttcccctcatggtgggaggtgaacgggagctggcatgtgagatcacataatgaaagaggaagcaagagttgggggaagtggcagattctttttaacaatcagctcactttctctcatctgctgtgatccgctgaaaatgtgctggggtttgttctgctgtcactgtttatgctgctggaacttagcactgtcttgatttgaagcatatgattgagagccatttgaagcaatcttcattaacgcagataaaacaagtttacatgtgcagagttagaaaatgacatgttcaattctgtaagtggtgactttttgagcacctttcagtattatgtatttgtaaaaaccattgtttttgratataaagctaataagcactttaaaaaggaaaaggcagcctttactattttttctggttgagtcattgctcttc

SEQ ID NO: 530481 - DNA, 432 bp, Homo sapiens
ggcaggtacccactcaccagaacggctggaattaacaagaccaaccgtgccaggaaagacaggcaggtacccactcaccagaacggctggaattaacaagaccaaccatgccagatgttagcaaggatgcagaacaactttcatccaaaatggtgcatgtggtgttttgtttttcttatcagtcaaaatgcacacctaccttacaacccagtggttctacccctagaaggttctccacaaaaaatgaaaaaatgtgccttgtatgggaatgatcagggtggaagctaatgtaggctgttaccataatcaacmccccccaaatctccttcctaaattatgtaaaataattttacaacctcaagaaatccttcaccaaactacacccttggcatgacttgaagatgaagctggagagtgccaaaaactgctaag

SEQ ID NO: 530482 - DNA, 589 bp, Homo sapiens
tgtggctgggtgcagtggctcatggctataaccccagcactttaggaggattgctggaggccaggagttcaagactagcctgggcaacatagtgagamcctgtctccacacacaaaaaaatgtttttaaatagctgggtgtggtggcacctgcagtcccagtgactcaggagagctggggcaggacaattgcttgagcccaggagtacaaggttgcaatgagctctgattatgcccctgcactccagtctggacaacagagcaagacctcaactaaaaaaaaatccagttgtaactgctgctaatcacagtgtatattaagggcaactttaatcagtgttcccaagcggcaagttcctcaagcttggcccagatagctctctacttgggttaattttgcctcagcttcttcctcttaggttgagaaaaccttaggagaacctgggtgaagggtatacagaattctcttctgtttttgcaacttttgtggtaaatctaaaattattttaaaacttaaaagttcatgacagcttgatttaaaagagcctaaactaggagaatggataaataagccgtggcggatgcgcaca

SEQ ID NO: 530483 - DNA, 589 bp, Homo sapiens
tgtggctgggtgcagtggctcatggctataaccccagcactttaggaggattgctggaggccaggagttcaagactagcctgggcaacatagtgagaacctgtctccacacacaaaaaaatgtttttaaatagctgggtgtggtggcacctgcagtcccagtgactcaggagagctggggcaggacaattgcttgagcccaggagtacaaggttgcaatgagctctgattatgcccctgcactccagtctggacaacagagcaagacctcaactaaaaaaaaatccagttgtaactgctgctaatcacagtgtatattaagggcaactttaatcagtgttcccaagcggcaagttcctcaagcttggcccaratagctctctacttgggttaattttgcctcagcttcttcctcttaggttgagaaaaccttaggagaacctgggtgaagggtatacagaattctcttctgtttttgcaacttttgtggtaaatctaaaattattttaaaacttaaaagttcatgacagcttgatttaaaagagcctaaactaggagaatggataaataagccgtggcggatgcgcaca

SEQ ID NO: 530484 - DNA, 589 bp, Homo sapiens
tgtggctgggtgcagtggctcatggctataaccccagcactttaggaggattgctggaggccaggagttcaagactagcctgggcaacatagtgagaacctgtctccacacacaaaaaaatgtttttaaatagctgggtgtggtggcacctgcagtcccagtgactcaggagagctggggcaggacaattgcttgagcccaggagtacaaggttgcaatgagctctgattatgcccctgcactccagtctggacaacagagcaagacctcaactaaaaaaaaatccagttgtaactgctgctaatcacagtgtatattaagggcaactttaatcagtgttcccaagcggcaagttcctcaagcttggcccagatagctctctacttgggttaattttgcctcagcttcttcctcttaggttgaraaaaccttaggagaacctgggtgaagggtatacagaattctcttctgtttttgcaacttttgtggtaaatctaaaattattttaaaacttaaaagttcatgacagcttgatttaaaagagcctaaactaggagaatggataaataagccgtggcggatgcgcaca

SEQ ID NO: 530485 - DNA, 392 bp, Homo sapiens
gtgagaactcactcagtatcacaagaacagcatgggggaaagtgccccmgtgatccaatcacctcccaccaggtccttccctcaacacctggggattacaatgcaaggtgagatttgggtggggacacaaagcctaaccacatcagcctccaatattcaaagaggttttaatagtgacacgtacagcttatggcagactgcctctccctcactttggaggactttctgacatgttcccatcctctgaaccccagaaacgatgctgagggggcactcgaactttcatggctatcttctcccctcacctggcacccgtgtgcctttagccaggtgtccagggtacttgctacttcctgttcatcaggtcctgtggctgtgatgcttgcaacaca

SEQ ID NO: 530486 - DNA, 621 bp, Homo sapiens
cagctcctgcagcccctctgatgtgtgagcttctctgcccaggtttgactttgtcattggtccctgcagcaggctagtctctaaccacccttctggcccagaaccacagagaaggtaggagagggaactgcagcctcctggcctgtgacgaccacaggtgaggttgccgtgagtcttcaagcaaagcaggaccagtctcctcggggtgttcacaattacccagaccccggcaagggccaccattccagcccaagaccctcacactctttgcatttagctctgtattatcctgtgcttcacaggggccacctggccrgccaaagccaggccttcagccaacgtgtctttccaggccaccatgcccaggggatgcagatgcccaaacgctaaccacacgctatggtaaccgatgctgaccatacactacggtgacccaacgctggccataacgagacaatgataatctcctgtcttcaaactcagccaggcagatacgtctcaggctcccatccctgaggatgtattgcttacaaccacttgaggaaataatactgtcataggtcaaatgcatatgaagaaacaacacaatttttagcagaaataattttcaaacaagaaatt

SEQ ID NO: 530487 - DNA, 597 bp, Homo sapiens
tgactcagcccaaagttctttcacgcagagatcagtgtaagacttgtgtatcctcattcgatgtatatatatatatttttttttctgggaattcatattaaaagtgcacatccattacattaacccagcaatcccattygtacaaatccatcttaaaaggatgaaagcgtggcacttaatccaagttcctccgttgaggactaggattctcttacagcttgctggttctgcctcccagatgttgaaggccagcctccgtctgatggttagacctgggccaagtacagttgttaaatatctggactcacatctgcacacacagatggcgattgcagcgttgtctgtggtcaaaacaacaaaacgagaaacaacgtaagtgtgattgataaggaacatgttggtccacctgtattgaggaatatttgttgctacgaaaaatcataagttagagccacacgaatagatctggagagatgccactgtgggtttttggtggaaagcagcaagttttgagtagtgcttaccgtatgattacactttgtgaggtctgcaggtctgttcgtaggagcagaaaacaggcatgaataggggtgtgcg

SEQ ID NO: 530488 - DNA, 597 bp, Homo sapiens
tgactcagcccaaagttctttcacgcagagatcagtgtaagacttgtgtatcctcattcgatgtatatatatatatttttttttctgggaattcatattaaaagtgcacatccattacattaacccagcaatcccatttgtacaaatccatcttaaaaggatgaaagcgtggcacttaatccaagttcctccgttgaggactaggattctcttacagcttgctggttctgcctcccagatgttgaaggccagcctccgtctgatggttagacctgggccaagtacagttgtyaaatatctggactcacatctgcacacacagatggcgattgcagcgttgtctgtggtcaaaacaacaaaacgagaaacaacgtaagtgtgattgataaggaacatgttggtccacctgtattgaggaatatttgttgctacgaaaaatcataagttagagccacacgaatagatctggagagatgccactgtgggtttttggtggaaagcagcaagttttgagtagtgcttaccgtatgattacactttgtgaggtctgcaggtctgttcgtaggagcagaaaacaggcatgaataggggtgtgcg

SEQ ID NO: 530489 - DNA, 602 bp, Homo sapiens
gacttggggctgagtcttggccttggccttataagcattcggagcttgagcaagtttttaaccttgtcggctttggcctccttgtctggacagtggggatgttaatgtcaactcccagagctggggtgcaatgacatgggattggtgtgaaaatgacggtgagaacgggtgacatgtcrgttccctctcagttgcccacggttcaacagagtcgccaagtgcccgccacccaccagggacagtgctgggggctgaggcccctctatagcccctgtttgggctgggtagtgggcagggttatgttactcagattcatggctacgtcctgagaaacccccaacccaaaggaaactgacagtgctcctgtagggcagcacaggggccgctggacagccccaggcatgggaactgcctgaaagatgaaggcgcagcatccaggcaggacctctgctccgtcagttcagcaggagagaactgagatccagagaagagaaggggtgggtgcagctctgggcttccggaggaggcagtccttgcaggttcctggtgaaagtggtcctgaggggcagggcagggcagggcagggcagggcaggtccgcag

SEQ ID NO: 530490 - DNA, 602 bp, Homo sapiens
gacttggggctgagtcttggccttggccttataagcattcggagcttgagcaagtttttaaccttgtcggctttggcctccttgtctggacagtggggatgttaatgtcaactcccagagctggggtgcaatgacatgggattggtgtgaaaatgacggtgagaacgggtgacatgtcagttccctctcagttgcccacggttcaacagagtcgccaagtgcccgccacccaccagggacagtgctgggggctgaggcccctctatagcccctgtttgggctgggtagtgggcagggttatgttactcagattcatggctacgtcctgagaaacccccaacccaaaggaaactgacagtgctcctgtagggcagcacaggggccgctggacagccccaggcrtgggaactgcctgaaagatgaaggcgcagcatccaggcaggacctctgctccgtcagttcagcaggagagaactgagatccagagaagagaaggggtgggtgcagctctgggcttccggaggaggcagtccttgcaggttcctggtgaaagtggtcctgaggggcagggcagggcagggcagggcagggcaggtccgcag

SEQ ID NO: 530491 - DNA, 602 bp, Homo sapiens
gacttggggctgagtcttggccttggccttataagcattcggagcttgagcaagtttttaaccttgtcggctttggcctccttgtctggacagtggggatgttaatgtcaactcccagagctggggtgcaatgacatgggattggtgtgaaaatgacggtgagaacgggtgacatgtcagttccctctcagttgcccacggttcaacagagtcgccaagtgcccgccacccaccagggacagtgctgggggctgaggcccctctatagcccctgtttgggctgggtagtgggcagggttatgttactcagattcatggctacgtcctgagaaacccccaacccaaaggaaactgacagtgctcctgtagggcagcacaggggccgctggacagccccaggcatgggaactgcctgaaagatgaaggcgcagcatccaggcaggacctctgctccrtcagttcagcaggagagaactgagatccagagaagagaaggggtgggtgcagctctgggcttccggaggaggcagtccttgcaggttcctggtgaaagtggtcctgaggggcagggcagggcagggcagggcagggcaggtccgcag

SEQ ID NO: 530492 - DNA, 472 bp, Homo sapiens
caggttgggggtccctgaggagggcgctgggccccagctgttgagggagaagctagggtgtctcccctctcccaccagcctacagagaggagggagcctgtcaggaaggagccctcgctgggagaaggggccctcgctgggaaaaggggtcctcacggggagaaggagccctcgtggggggaagaagccctcggtgggagaatggaccctcactgggagaaggagccctcgctgggagaaggagtcctcgctgggagaaggggccctcgctgggagaaggrgcccttgctgggaaaaggggccctcatggggagaaggagccctcgtggggagaaggagccctcacgggtagaaggagccctcggtgggagaatggaccctcactgggagaaggggccctcgctgggagaaggagccctcgtggggagaaggagccctcacgggtagaaggagccctcggtgggagaaggag

SEQ ID NO: 530493 - DNA, 472 bp, Homo sapiens
caggttgggggtccctgaggagggcgctgggccccagctgttgagggagaagctagggtgtctcccctctcccaccagcctacagagaggagggagcctgtcaggaaggagccctcgctgggagaaggggccctcgctgggaaaaggggtcctcacggggagaaggagccctcgtggggggaagaagccctcggtgggagaatggaccctcactgggagaaggagccctcgctgggagaaggagtcctcgctgggagaaggggccctcgctgggagaaggagccctygctgggaaaaggggccctcatggggagaaggagccctcgtggggagaaggagccctcacgggtagaaggagccctcggtgggagaatggaccctcactgggagaaggggccctcgctgggagaaggagccctcgtggggagaaggagccctcacgggtagaaggagccctcggtgggagaaggag

SEQ ID NO: 530494 - DNA, 472 bp, Homo sapiens
caggttgggggtccctgaggagggcgctgggccccagctgttgagggagaagctagggtgtctcccctctcccaccagcctacagagaggagggagcctgtcaggaaggagccctcgctgggagaaggggccctcgctgggaaaaggggtcctcacggggagaaggagccctcgtggggggaagaagccctcggtgggagaatggaccctcactgggagaaggagccctcgctgggagaaggagtcctcgctgggagaaggggccctcgctgggagaaggagcccttgctgggaraaggggccctcatggggagaaggagccctcgtggggagaaggagccctcacgggtagaaggagccctcggtgggagaatggaccctcactgggagaaggggccctcgctgggagaaggagccctcgtggggagaaggagccctcacgggtagaaggagccctcggtgggagaaggag

SEQ ID NO: 530495 - DNA, 591 bp, Homo sapiens
gattttcccttgagtacaaatctttgttgaggaaaacagaatgttctggatatatttcaaaatgctcgcttttccttcccccctgctgaaagcatgaggggatttttctgagaacttggtggggctcctggagagaaaactcatgaacatgtgggggccccttgtgagactggccaccgaggagtttttcatctccagctaagtccacacagcctccagctgtgcagtgactaatcagttaccgttggcgttcctacctgccatgggccccagcagcttctgatccctgtgtgctgtgattttagccacctgtctgtctcccagattttggrgtaatggtctacaccatgatcacaattctctaatggatctaagaattgttgattttcagtttgttcggcttttttcttgttgtgaggatgagaacgaccacttctaaggtctttatattttggagcagtaactggaagcctccctgaatacatttgtaagtcaagttgtaatgtattttattggcagttacttgcaggctcttgaaaaactcagatcaaaggcagaaatgatctcctaggtaagctagccacgtaattg

SEQ ID NO: 530496 - DNA, 555 bp, Homo sapiens
tgtgagcttggagacctcaccctgcacacttgatgtgggctcgctcctgaacacattcctgagacctgtcccagccctgggggtcagcgtctccacccagagaatcttccttcaactccctgggctgtcccctcctgccaacacatccctcccaccccaggggatctgggttttccagggaacgtgtgcaagtgtgtacaccactggcaagtggcagggatgggatttgaaatcagttccatctgaccttgaagtcctgtcccttggtgtgctcctctccctccattcctgccttactcctcccacccgctgcactttagctccccaggaccacctctcaaatgagccacccaggcctttcygctgctgctcctggggactgagctaagacgccgctttcgcctcaccttggtccctgctggtccctctgatctccatgataagctagcatccatgtgcccagaggctggcgcaagtggttgcctgctatgtgctgtccacacactggcttaacccctgcacccctcagagacggccttgcatctccattttata

SEQ ID NO: 530497 - DNA, 555 bp, Homo sapiens
tgtgagcttggagacctcaccctgcacacttgatgtgggctcgctcctgaacacattcctgagacctgtcccagccctgggggtcagcgtctccacccagagaatcttccttcaactccctgggctgtcccctcctgccaacacatccctcccaccccaggggatctgggttttccagggaacgtgtgcaagtgtgtacaccactggcaagtggcagggatgggatttgaaatcagttccatctgaccttgaagtcctgtcccttggtgtgctcctctccctccattcctgccttactcctcccacccgctgcactttagctccccaggaccacctctcaaatgagccacccaggcctttccgctgctgctcctggggactgagctaagacgcygctttcgcctcaccttggtccctgctggtccctctgatctccatgataagctagcatccatgtgcccagaggctggcgcaagtggttgcctgctatgtgctgtccacacactggcttaacccctgcacccctcagagacggccttgcatctccattttata

SEQ ID NO: 530498 - DNA, 505 bp, Homo sapiens
acaactgtttccacttaaatcagttccaggggttcactcataacctatggataacctgacaccacctgcttaggtaagcagggaatttaacgcctcaagtacctcaaaagcccataaagactccagaccaggcttggtcccacagccagtcaatgtccccaaattcccatctcttcgctctgtcttctgcattgttggtttcactctgaggctccaagatggctcccaggaaagagaatgggtctctgtcccagaattctcagcccgagtcccgaccttygctttgattggactgcactgggtcacatggccacctgggatccaattgcttctgccaaagagatggactttagtgattggcttacctgaggccacatgctcctaacaagagcgggaggtaaagttgacttcttgagaagtcaacctgcatcccccactgggaaaggcgagagatggaatgatgcaggaaactgtagggaaaaggcagcagccaaaaaggaggcag

SEQ ID NO: 530499 - DNA, 641 bp, Homo sapiens
ggtcagaagtttgcaatgggtctcactgggttaaagtcaaggtgccagtaagactgtattcctttctggaggctctaaggaagaatttgttttctttctttctccaccttctagaggcttctcacatttcttggctcatggccaccttctatcttcaaagccagcaacagatagttgaatttgtcttacatgtgacaatctgatgccactgtcacatctccttctctgactctcacactccagcctccctctttcacttataaagaccctcgtgattatattgggccagcccagataatcacagacgatctcccaacgtcaaggtgcaaaacttaatcacctctgcaaaatccctttttctatgtaaggcaagctcttcacatgttccaggaattagaatgtggatattttgggggagccatgattctgcctcatcctgggatcagctcttaatcagtgaccagaaagaattagtgtacaaataatccagctcccttgcccctcagaatatctttgaggtacatgttttgcactggccctcaagttctccagcagggttaaacttcagtttgaggtagcgagraactccttggtacgtatcatttgtttaatggttgcctccctttctttttctgcatcct

SEQ ID NO: 530500 - DNA, 640 bp, Homo sapiens
ttcctgacccccaggaactgtctattactgttatctggggggttgggggtaggaatagtgctctggacccagtgtgtttggctcacatcccagcttcccattcatgaactgtatgacctggaacaggttacttcacctcccaaggactcagtttactcatccatagtacggtgatggcaattagaatacctctcatgggattgttmcaaggatcaaatgagctaacacattcatgatgctgagtgaatgtttgtgaaattattgctattactgttttaggtggttgtattagtcagtgttgcatcaggcagctcagtggagagcatgaatctagcaaaatcgtgacagtggtttggaagagttgaaagtgcagtggctggagattatcaatagcagaaaagatgctacagaccatattcaccatttgacgaaggcatcctctttggactagtgggtgctgcacaagtaaatgggatgctgtgagagaaagaaccccaagactggaggaacaaagacaggagtgattttttttcaagacaggtctccttatgtcacccaggctggagtgcagtggcgtgatcacagttcactgctgcctccacctccaggttcaagcgatcctctcacctcagcctcctga

SEQ ID NO: 530501 - DNA, 645 bp, Homo sapiens
tggctgttggtgaggtattgaagtcatcttctaaaaacacaaatcagatcgtgtcgtgtcttgattaagagccttccaatgtcttctcagtaagcttcaagtagaatcccaagcactctccctgcccgctaaactatgcatgtcctacccacaccatggaccagctgcgctggagtcctctccagccacacagagcttccttcagttctttgagcgctcccagctctttccagctgtggggtcytcacgtttgctgattcttctacatgcaatgaacttctgtgggccagatttctccctgtcctttgggtttctgctgaatggccttccccagactctaccccaatgggttcctgacttccactccttggttatttgccatctctgcacctgttggttcctctgtaaccctcatcatggttcacaattgctcctttgtttgtgggtcgattgtctttctccccgcttaggttgagagttagacaaggctaggtctaacctgtctgcatgatctaggtgcccagtccagtgctaggcacatgcacgtgcttaacacgtgttggctgaatcaatatatgaaccatccaattcagaatgtgacttctcatgcatcttctcatttgtttctcacaatatcagcaaggg

SEQ ID NO: 530502 - DNA, 645 bp, Homo sapiens
tggctgttggtgaggtattgaagtcatcttctaaaaacacaaatcagatcgtgtcgtgtcttgattaagagccttccaatgtcttctcagtaagcttcaagtagaatcccaagcactctccctgcccgctaaactatgcatgtcctacccacaccatggaccagctgcgctggagtcctctccagccacacagagcttccttcagttctttgagcgctcccagctctttccagctgtggggtcttcacstttgctgattcttctacatgcaatgaacttctgtgggccagatttctccctgtcctttgggtttctgctgaatggccttccccagactctaccccaatgggttcctgacttccactccttggttatttgccatctctgcacctgttggttcctctgtaaccctcatcatggttcacaattgctcctttgtttgtgggtcgattgtctttctccccgcttaggttgagagttagacaaggctaggtctaacctgtctgcatgatctaggtgcccagtccagtgctaggcacatgcacgtgcttaacacgtgttggctgaatcaatatatgaaccatccaattcagaatgtgacttctcatgcatcttctcatttgtttctcacaatatcagcaaggg

SEQ ID NO: 530503 - DNA, 514 bp, Homo sapiens
gccagggcccagagctcagggttggatttctggytgctgaattcatgctgtactccctggcattggctcagccaactgtggctaagagttgactttgcttccctgctctgtgtacctgtcttccaccccctctcctgaacagtatttccctggggctcccattaccaatttgcagagcaaaggcatgcacaggcagttcaggggtggcgcaagctcagcgactctggtattgtttttaattcaatattttgtccctgtgcgccagcctcctttattggatgagaacactgttattggatcctgccctgcaggagaaaatgcaggcttccccagatgatggcagctacgttgttctagagtctgatgagtcaaggcagggcgagaagacagaagagagttccagaaaatctggtggttacaagctgttctgtgacacgcacaaaaaaattaacatatgtattattgacccttcttcttcccctctcttctagggaggacaaaagcccaggaggca

SEQ ID NO: 530504 - DNA, 576 bp, Homo sapiens
ctgcaaaacttctaaaattatctcagtttttttctatggtcctttctttgtgtcctatctccaatacagcttccaatgcaactctattcttttttttttttaatcacacacaaatgatgagctaaagtactatttaatattgttttacttagtttacttttttaactactacactcagaaaaggcttgaagagatgaaattagcttaaaagttatgcaaaatgacagtacctcacaatgctggcgagaagcttgaatttcacattcatatttgttctttacagattctaagcagagctctctatagattcctgcaaccaaacacaattactctgattatgttagcaatgagaagttccattatcacttccctacaggaattctgtcctcactgtatttaataagatggatcaagaaaaaattgaaaagtgagtctaactttgtctttaaagactaaaaataaaaggctcacttaaaatatatatccaaaaagattagaaattataagagctagaaagaaactgtactgctagtttttsttcttaatctattcttctaaagattactcctaaatgtt

SEQ ID NO: 530505 - DNA, 580 bp, Homo sapiens
aataaataattacttggcttctctctaccgttcctgaaaaggagtcagtattactgtattcagcctacttaatttttttttttttttgagacggagtctcgctccgtcacccaggctggagtgcagtggcgcaatctcgctcacttcaagctccgcctcctgggttcacgccattctcctgcctcagcctcccgagtagctgggactacaggcgcccggctaattttttttttttttttttttgtattttttagtagagacggggtttcaccgtgttagccaggatggtckcgatctcctgaccacgtgatccacccgcctcagcctcccaaaatgctgggattacaggcgtaagccaccgtgcccggcccagcctacttaattttttaaaagagcaaagaggaagtagactaatgaaggtaaaaccaatgtttttatgacctgacatactaagtttgtctcaactacaaatgaagaagccataacaaaattagttgctcaatgaacaaggaactcaaaaatggggcaggaggtccctgttactcctatttataaggccacttacaaatactctaatttg

SEQ ID NO: 530506 - DNA, 623 bp, Homo sapiens
tcattggaaaaatactagactcattttgctcaacaagtgttctattggcattagactcatgkgtcactcatccactaaattccaggaggaaatttccccagttattatggaaacaaaatatacctcatgcattcccaaatgccccccaacaccatggatttaaagtaaaaatcaagacaaacatgcactatcatcacactatctttaacatattattagaaatgctgggcaacataattagaaaagagaaagaaaataaatgtatgaaaattagaactaaggtaaacctatcactttttgcagattacatttacatacctggaaaacctaagagaattaactaaaatggctacaaaaaaataaaaataaaatagttgagtaaagtaacaggactcagtaacagaaagcaatagcctatatgtataaacatatgaacaaatacaatgaccaattaaaagacatgatggaaaaaaagaatttattcacataagcacaacacagataaaatactcggatgaaattaattacaaatattggacaccaaacaagaaaactttaaaacagaactaaaggtacaaaataatgctagaataaattaaaactgtatttataatactagtgaa

SEQ ID NO: 530507 - DNA, 623 bp, Homo sapiens
tcattggaaaaatactagactcattttgctcaacaagtgttctattggcattagactcatgtgtcactcatccactaaattccaggaggaaatttccccagttattatggaaacaaaatatacctcatgcattcccaaatgccccccaacaccatggatttaaagtaaaaatcaagacaaacatgcactatcatcacactatctttaacatattattagaaatgctgggcaacataattagaaaagagaaagaaaataaatgtatgaaaattagaactaaggtaaacctatcactttttgcagattacatttacatacctggaaaacctaagagaattaactaaaatggctacaaaaaaataaaaataaaatagttgagtaaagtaacaggactcagtaacagaaagcaatagcctatatgtataaacatatgaacaaatacaatgaccaattaaaagacatgatggaaaaaaagaatttattcacataagcacaacacagataaaatactcgratgaaattaattacaaatattggacaccaaacaagaaaactttaaaacagaactaaaggtacaaaataatgctagaataaattaaaactgtatttataatactagtgaa

SEQ ID NO: 530508 - DNA, 524 bp, Homo sapiens
gtttgaaagagctgcgtgggttctggggagatacaggaagccctgctctgggagatgaggtagaaggactgagcacacttcaggcagagagrtgacagtagcaaaggccctgtgctacgacgcagaatggcacattccagaatctgaaacaaagtcagtgaaactggaaatgagagaatgggaagagtgtcacttaaaaaggctgaagaactaactaatcaggggacagatgaagtgcttcagggaacatgttgctaattttgcaccttttcttagggataaacaaaagccactgaattgtttttaaagaaagaacagactctggagccagactgcccagattcatgtgtctgtcactacatattaacagtaggacatggagcaaagcgcttcccttgtcttttcttcagtgtccttatatgtaaaatggggataataacagtacttgcagcaaaaggttccaagaattgaatcagtgagaacagacaaaaaactgagtacctgagtatcatgagcactatata

SEQ ID NO: 530509 - DNA, 347 bp, Homo sapiens
gttggagcacagtggcacaatgtcagctcactgcaacctctgcctcccaggttcaatcgattctcctgcctcagcctcccgagtagctgggactacaggcatgagccaccatgcccagctaatttttgtatttttagtagagacggtgcttcaccatgttgaccaggatggtctcgagctcttgaccttgtgatccacccgcctcggcctcccaaagtgctgggattacrggcatgagacactgcacccagccaagattttcaagttgctaagtcatattgtcaaaaccgtatatttttcttgataactaatcacagacaaagtttgatcttaacggcaatgtggtc

SEQ ID NO: 530510 - DNA, 527 bp, Homo sapiens
cccagcaatgggattgctgggtcaaatgataggtctgtttttagcaatttggggaatggccatactgctttccacaatagttgaactaatttacattcccaccaacagtgtataagtgttccttttctcygcaacctcaccagcatctgttattttttgactttaataatagctattctgactggtgtgagatggtatcttattgtcattttgattttcctttctttcatatgcttgttgtccgcagatatgttttctttagaaaactgtctgttcatgtcctttgaccactttttaatgggattgtttgtttgttttttcttgtacatttgtttaagttccttatagatgttagatattagacctttgttaaatgcatagtttgcaaatattttctcccattcttgtactaccttgtattttaaaaaagaaagccttttttaaaaagagtaagataaagaaataaacataattcagagaacaggaaaaaaagtgttttaattactatgctcaaagaaatttgagag

SEQ ID NO: 530511 - DNA, 527 bp, Homo sapiens
cccagcaatgggattgctgggtcaaatgataggtctgtttttagcaatttggggaatggccatactgctttccacaatagttgaactaatttacattcccaccaacagtgtataagtgttccttttctctgcaacctcaccagcatctgttattttttgactttaataatagctattctgactggtgtgagatggtatcttattgtcattttgattttcctttctttcatatgcttgttgtccgcagatatgttttctttagaaaactgtctgttsatgtcctttgaccactttttaatgggattgtttgtttgttttttcttgtacatttgtttaagttccttatagatgttagatattagacctttgttaaatgcatagtttgcaaatattttctcccattcttgtactaccttgtattttaaaaaagaaagccttttttaaaaagagtaagataaagaaataaacataattcagagaacaggaaaaaaagtgttttaattactatgctcaaagaaatttgagag

SEQ ID NO: 530512 - DNA, 493 bp, Homo sapiens
tgatatggctaggtttgctgtatagcctccattaaaaaaatgaagagacccaactgatgctttacagttttagaaaaatgaatgacattaactagaaatggccctaattattgcaaatcacataagaaaattatgctacgacaacctgttatgaccttcatgttagatcttgaacayttggtcttcaaactatttttctaatatttgctggcttttctctatttgtttttagacagtttgataggccctcaggatatttaaagtgcttaaatataaaaaatattttttactttcctttcttcagacctactgtgcattatttttatattattctaattaagtaaaatgtgttatctgactttaaaaaacaaattggtctttattgtagatcatttatttatgaagatagaagagattattatatcaacttgatgcttaattttgctttatttaacaaaatttattttctattttgcaactgaaagactaatga

SEQ ID NO: 530513 - DNA, 471 bp, Homo sapiens
cttccccgggccgcgctcccccgtggcccgcccaccgccggcagcctcgcggagcgcctcgcccgaacacctcgcgccacgcctccggcacgccctccgttaacaagctctgcgcgcgtgcagacccccgcgcgccgcacaccctcctggaagcgcacgcttcccggggcttcctgggagccctgctctccctgggactcgacgtgtacgctgtgcgatcacagtttattactttaccggcccttggtgggtttccgaggtawttaggggcctgctccaggccaaccggaaccagagaagtaaaatccagtgactttaacatcgaaacagaattactcgctgcaaagatcgtttgagacccagaaataaatacattacacccgacactcttgtgaatgcacacttcgtggcaatgtgtttccttaacctggccgcgtgtaaaccaaaacgcatgcccgagcagaggtttca

SEQ ID NO: 530514 - DNA, 480 bp, Homo sapiens
cctttccctttgcagctccccattcatcccgctgagagccagctccaccacccaataaaacccccacattcaccatccttcaagtccatgtgtgacctgattcttctgggatgctacacaagaattcaggacacagaaacctgtcacactggccctctgctcgagcaaaaaggtagagggtccactgagctgcttaacacttaggcatccaaggacagcaaggctaaaagagcgcactgtaacacacgcccacttgggatcctgcacctgtccgtctacatactccccctcctatatggggttttagcagcggcagcaaccgaacagatgagccacacccttgtcacacatcctgagaggtgggtcagggaacaatcgcatttcacaaggaaactttgatccttggaacaatgaacaaaattgtgttggagtctaagyaaggtaactgatggatatataaaagtttcaattttctgaatt

SEQ ID NO: 530515 - DNA, 527 bp, Homo sapiens
ggtgtctccattctgactgggcagggcccttgtctagtttttacattctttaaaaatatcccagaagacattattaaaataaagaagtggatagcattcaccgttttgtaaataataaccaatttattaggcaaagaaataaaacaagtataaatattataaggaaatcatcattacttaataggtgatttggcttaacacctaataaagagggggagagagaaacaacgtaaaattgtagttgataatagcagtagaatgccagttctccccaaatttgtgtataaacttaatgcaatctcaaacaaaattacagaagggtttttctttccccaggggaacatttcaagtagctgggactacaggcacacacccctacrcccagctaattttttattttgttttttagtctcaatacattgcctgagctggtctcgaactcctggtgtcaagcaatcctcctgtcttggccttctaaagtgctcggtcacgggcatgagccactgtgtccatcctgtttctgaaag

SEQ ID NO: 530516 - DNA, 450 bp, Homo sapiens
agtctttctataccaacagcaaactatcagaaaataaatcaagaaaacaatcccatttcagcagctataaaaataaaatacttaggaataaatttaaccaaggaggtaaaagacctttgcactcaaaaccataaaacacggatgaaaatcagtgcagaatgcacaaataaatggaaatatatccctgtccattgactggaataattaatattgttaaaatgtctataccacccaaaacaatctaccaatttaatgaaatcactatcacaattccaatgacatttttcccaaaaatagaaaaaaaacmgcttaatattcctatagaatcacaaaagactctgaatagccaaagcaatctttagcaaaaataataaaactagaggtatgatactccctgacttcaaagtaaaatgcatctaatattgaaacctaaattcagtacaaaagctt

SEQ ID NO: 530517 - DNA, 591 bp, Homo sapiens
cacagttgctatcctcctctgaatgcggctcaaaccaaatcagcacaaatccrctaaataaaaccactggaaaacaaggtcaaagtgacagaggccaagagcaccaacaaaagtgccttcttatccatcttggagccaagctgaagagcggccccaagtgaccaacggtgggactcacggctgggccttgtccccccaccccagcacagccttggatgaatcacacaccagagaacaacagggctatttctcaccagtcatttgtcaagctgacatccctgcctagagttatttagggctttctaaagacacttctttccctccctgccgcaggaagcacctgcacggctgttgagttgtggttttgctcaatagcgctttgatatcccttaaggccttcatcaattactcttctgtccctgatgggttggactttggctgaggcaaagacagggaagcttagagaggatgatggagaggaagaggatggtgagttcctctgagatctgaggccagccactgtctggaggtgggctcttattgatttctgtgggggaaccttcaggagaggacagtctgagttcttggcca

SEQ ID NO: 530518 - DNA, 525 bp, Homo sapiens
tgtgggcatctgggcaggagtgtccctttccaaaaggaaaagcaacaccagacatggaggccagagaccaagaggagctggcacggcagagggacagagagcatgccagtgtgtctgccgtgaagtaaaagaggctggaaggagatgggcttcatagattatagtgaggatgatagatttgtacaaattagcctatctgtttagccaaattaactctctgctttcacaatgcattccacatacccagaaaggtacgcagaaagtgaccatggtgaatgtaaagaccaccaaaacagttccagaagcaggtctagggacttataagcatgatggagggagtctgccatccctaaagaaagaatggatgaagtgaatgggtctcacataatcttattcgggcatgtgccaagccacccaagacagtgggctggcrccaactatgaagaaataatcttctttacagttataaagacttccctggttcctgtggatgaatagacaagtaggataagagaggtagcagtg

SEQ ID NO: 530519 - DNA, 415 bp, Homo sapiens
aaagacgtgtggtcagaagcaaagaaaagacccaccaaagatgatgtcaattaagtctagcagaagcatttctttccatgaaagcacacagcccctagcatctggggggagaagctaacatggttgagtccctactgtatggcaagcatcttcaattaatcgagacaacaacttgcaatgcagtggttatacttkgtaagtgaggaagctgatgtttggaaaggtgaagcaacttttagcccggtgacaagcaaagactcaacccttgccagtagaattcccaaatctgatatactgcttgtatattggcagtgaaacatattccctactctccctacacatctccactattcacaaccctcaatcccttcctgaggtgctgagcacagtgagtgcaccatccaaccagaagcaa

SEQ ID NO: 530520 - DNA, 626 bp, Homo sapiens
ttgatacaatgaaatcaacttaaatgtaattatttctttccaggatattcttttttttttttttttttgcctttttaaatcattgcagttcttttctgctaatctctaacatccctattccatgaccccccaccaataaatcctagttttgcttcctccttggcctgacttttgcttgttacccggaagcataaaagcatctcaagtttaaaagacgtgtggtcagaagcaaagaaaagacccaccaaagatgatgtcaattaagtctagcagaagcatttctttccatgaaagcacacagcccctagcatctggggggagaagctaacatggttgagtccctactgtatggcaagcatcttcaattaatcgagacaacaacttgcaatgcagtggttatacttggtaagtgaggaagctgatgtttggaaaggtgaagcaacttttagcccggtgacaagcaaagactcaacccttgccagtagaattcccaaatctgayatactgcttgtatattggcagtgaaacatattccctactctccctacacatctccactattcacaaccctcaatcccttcctgaggtgctgagcacagtgagtgcaccatccaaccagaagcaac

SEQ ID NO: 530521 - DNA, 560 bp, Homo sapiens
tgtgccacttatagctgtgtgaccttgcatgatgcctctgtactcgctctgtaaagtagaaaagagagaatacgtttccctagaatcattgtgaggggcaaatgaaatattatatgtgaacttagaacggcactgacttgagtcaggggtctataaatgagggctgtgtctaatataattattaatattgctcctgataatgtttgggaaaggcagcctccttttccaatactttcttaaacccacccagctctcacaaggacaaaagagactaaggaggcaggacccagggtggttctggaggtcaaagctgtgcattagaaggcaaggagccctggattagatgctatcagacctaggaacaagtccccctctgcttagatgagccacaggatctcygtagatctcagcttccacatctgctgtgcactgaattatgttcccccaaaattcatatgttgaagccccaacccccaatgggatggtatttggagacagggcctttggaagttcctttggtttagataaggtccttgtgatgaagttcgtgcccttataag

SEQ ID NO: 530522 - DNA, 695 bp, Homo sapiens
aggtgacggatatcccaattaccctgatttgagcattacacattgtatgattgtatgaaaatatccatgtaccccacaaatatgtgcaactattatgtaccaataaaaagggggaaaacaggtcttaaacaatacaaaagaagccagatacaaaaggcttcatactgtctgaatccatttatattttgaaaaaggcaaaattacaggggtacaaattagctcggtggttgccaggggctgggagtagaggaaggaaattgactgcaaaggagcataaggaaatttgggaatgataaaaaataccctttaccttcattgtgatggtggttacatgattgaatgtatttgtaaaaattcaaccaactatacaataaaaattttacttatgtaaattatatcttaaacctaactttaaggaaagtcaggttactccaggctccctttccaggcaaattcactgctgcatccattttttctgatctgcttttaagaatacctagaaggaagagtttgagaattattcatttratagctctttaaaagaggggtcttggagtatgattctgcatgagttaaaccccaagatcttgaacaatttaaacttgaacaataattttaggtgtagaaggtatagggcactttcaaattgtataaaataccaacatgcctacccacaatattttatagatacataa

SEQ ID NO: 530523 - DNA, 495 bp, Homo sapiens
acatcattgcctggagaggctaaaagaaaataatcattccgtagctacatctcacttttgcacatcttcattgcggagatgacttaaaaaaaataactcgatttgagattgtaagtagawttgggccagaagctgaagaatggaccttacacatacgtcctttaatagtcattctattctgggttgaaatttttcttagagagtatctgtaaaacaggaggtaccatttaggcatcaaaacgtaaaaatttctttagtattcatttatcaaaagttatcgactacctgtagttctttatggaagatcatgtgttaccttctattaaaattagggttgttaatgaccacttaatgctttgtgaagaggaatttctctaatcataataaacagtgtaacaacaatttactgtccttaagcttaaatatctaaatgatgtataaagtaaaattagaatagtagtagtaacttacgatattatttagaaattgttcagt

SEQ ID NO: 530524 - DNA, 495 bp, Homo sapiens
acatcattgcctggagaggctaaaagaaaataatcattccgtagctacatctcacttttgcacatcttcattgcggagatgacttaaaaaaaataactcgatttgagattgtaagtagatttgggccagaagctgaagaatggaccttacacatacgtcctttaatagtcattctattctgggttgaaatttttcttagagagtatctgtaaaacaggaggtaccatttaggcatcaaaacgtaaaaatttctttagtattcatttatcaaaagttatcgactacctgtagttctttatggaagatcatgtgttaccttctattaaaattagggttgttaatgaccacttaatgctttgtgaagaggaatttctctaatcataataaacagtgtaacaacaatttactgtccttaagyttaaatatctaaatgatgtataaagtaaaattagaatagtagtagtaacttacgatattatttagaaattgttcagt

SEQ ID NO: 530525 - DNA, 607 bp, Homo sapiens
tgcgcctgggaagtcaggaytgccttgcagtacagattctcacccgtactctcctatccatctttccccgtcaccacccctccctgaagaagagctgggtgtttctgtttctgtttctgggtttagcacaaaacagattataggagatctggatttcggttgcataaaacaaatctgagacagggcattattctaatgacatctagagcatgaggcagctcagcaaggagcctccgcaggtcacccatccagactcgaagtccttcaagatgcacgggcagccccggccattccacacgtgcaccattgctttgctttttatttctttgcccctctatcctggcttctgcccccaccttattctttctgctaccagtggattggctgccactgtgttctggaatgctgtgatgagttcagtatagcaaatgcacaggcacactcttgcacacatacataccatgggttcctgccccagccactccaaagacctggaccattagcaggcacctgtggtcccagcacctctcctaggacccaggggctctccacctgaagcacagtgccttgctggaaggagccgcctcttggccactctgcagaaaaa

SEQ ID NO: 530526 - DNA, 607 bp, Homo sapiens
tgcgcctgggaagtcaggattgccttgcagtacagattctcacccgtactctcctatccatctttccccgtcaccacccctccctgaagaagagctgggtgtttctgtttctgtttctgggtttagcacaaaacagattataggagatctggatttcggttgcataaaacaaatctgagacagggcattattctaatgacatctagagcatgaggcagctcagcaaggagcctccgcaggtcacccatccagactcgaagtccttcaagaygcacgggcagccccggccattccacacgtgcaccattgctttgctttttatttctttgcccctctatcctggcttctgcccccaccttattctttctgctaccagtggattggctgccactgtgttctggaatgctgtgatgagttcagtatagcaaatgcacaggcacactcttgcacacatacataccatgggttcctgccccagccactccaaagacctggaccattagcaggcacctgtggtcccagcacctctcctaggacccaggggctctccacctgaagcacagtgccttgctggaaggagccgcctcttggccactctgcagaaaaa

SEQ ID NO: 530527 - DNA, 608 bp, Homo sapiens
aatagatttaaaagagctttgcagacatttggttagactgtggccaatacacaaccttcattctgcattgtgatgagcatctacaacaaatgttatcgggggaaattcagccagatatcgggtgaaattcacccccgatatttcacttgggttcttttctattttccctaagtgtcggccggtctgagaaataaagggacagagttcaaaaagagagaaattttaaagctgggtgtcctgggaagacatcacatgtcggcaggttccatgatgccccctgagccrcaaaaccagcaagtttttgttagtgattttcaaaaggggagggagtgtatgaatagggtgtggaccacagagatcacgtgcttcacaaggtaatagaatatcacaaggcaaatggaggcagggcgagatcacaggaccacaggactggggtgaaattaaaattgctaatggagttgcgagcatgcattgtcattgataatgtcttatcaggacacagggtttgagagcaacaatggtctcaccaaaatttattaggcgggaatttcctcgtcctaataagcctgggagcactacaggagactggggcttatttcatccctaaa

SEQ ID NO: 530528 - DNA, 608 bp, Homo sapiens
aatagatttaaaagagctttgcagacatttggttagactgtggccaatacacaaccttcattctgcattgtgatgagcatctacaacaaatgttatcgggggaaattcagccagatatcgggtgaaattcacccccgatatttcacttgggttcttttctattttccctaagtgtcggccggtctgagaaataaagggacagagttcaaaaagagagaaattttaaagctgggtgtcctgggaagacatcacatgtcggcaggttccatgatgccccctgagccacaaaaccagcaagtttttgttagtgattttcaaaaggggagggagtgtatgaatagggtgtggaccacagagatcacgtgcttcacaaggtaatagaatatcacaaggcaaatggaggcagggcgagatcacaggaccacaggactggggygaaattaaaattgctaatggagttgcgagcatgcattgtcattgataatgtcttatcaggacacagggtttgagagcaacaatggtctcaccaaaatttattaggcgggaatttcctcgtcctaataagcctgggagcactacaggagactggggcttatttcatccctaaa

SEQ ID NO: 530529 - DNA, 588 bp, Homo sapiens
gctcaccccacttcccggattctgtttttcagcactcgccctctggcctgtcagtctggctgcttcggccggctccctccaggctctgctcattctattaaggaattctattcacttccattaaagaaagcattcttccttctgtcttcttgatcaaacactacccattctgcaggcccagcgcagggcccaggcaggtatctgtgaaccgcctcctattcagtcttctgttgcagttcagccagctctgtgacagtgaattcttgtcacttcttgagtgtctccttaattagattgtagcttccttgagaacaaggactgtgtctctttccctctgttttcctatatgcctggaataatgccttagtcgatattataatgtgattgattgatggcgtgtgaatttcaggsttaggggagctagttgggaaatgtttagagatatctggaaagaaattcagtggctactcctttctccacgtataccctagaccccagtgctcactggagactgagagcctccctgacacagaggactgtttatatcctttctggtgctatgaaatagtgtgattgcaacagcactga

SEQ ID NO: 530530 - DNA, 392 bp, Homo sapiens
acaccttgcatcctttcacttcagctcctgctggtaactacctcagttactaaytcagaagtagcaggaacttggagccagatgtcccatctcttctataattacatctgacagctcaggttactctgtgcagcacagaaataatactctccatgcatctgacaggcttaatttagctagatgtcattcaaacttttctcatgggcagaaacctgttctcaaaataaaatcatacataaaatgtctgtatatgaacatatgaaagttgagccactttcatggacactgctcagccctctccagacctgtgcctctgcctcagtactcaagggttctgcaaaagagaatgtgaaaaccacacatctgtgtgctagttcatgtccaagaaagtg

SEQ ID NO: 530531 - DNA, 392 bp, Homo sapiens
acaccttgcatcctttcacttcagctcctgctggtaactacctcagttactaactcagaagtagcaggaacttggagccagatgtcccatctcttctataattacatctgacagctcaggttactctgtgcagcacagaaataatactctccatgcatctgacaggcttaatttagctagatgtcattcaaacttttctcatgggcagaaacctgttctcaaaataaaatcatacataaaatgtctgtatatgaacatatgaaagttgagccactttcayggacactgctcagccctctccagacctgtgcctctgcctcagtactcaagggttctgcaaaagagaatgtgaaaaccacacatctgtgtgctagttcatgtccaagaaagtg

SEQ ID NO: 530532 - DNA, 574 bp, Homo sapiens
agggaaaagattgccagactgtatttaagaacacctgtttatcaaaatacgttaataaggtgaaaaggcaaaagagtggaatataactgaggatacacacaccattgaatctattcaatacacaggactatccagaagaaaaatggacaataaatctgaacaattcacaaaacaaatccaactggccaataaatatgaagtgatactcaacmcattaggatatagggaaatgcaagtttgaacctcaatgagataccattactcacatatcagaatttctaaagtgtttcaatttttgtaacttcaagtgttgttgaagatgggaaactgcactgtacaatggtactataactttggaagagttcaggcttatctctgccgaagttgaggttaggctttctctatcacccagcacttccaacagcaggctgtgcgcgtggacaggaggattctggcaaggaatgttcgcagcagcactatttgtaatagctaaaacctggaaacaacctaaatgcccattaatagtcaaatggatttttttttaaactgtggcatattcatacagtgaaaaact

SEQ ID NO: 530533 - DNA, 489 bp, Homo sapiens
aattaattaaagtatcactcagctctcctgctgccttcacatctctttcttacacttttactacctccccgacagagatgtatggagaggaacagaaaatatttacttcatgacaatcactgggccaaccagatttagaaaaaaagagttcacatttataaaaggataaacaaagttttgggactcaagtagacttcctaccagaatatctatttggaggcatggtgtagactcaagtcacttagaatcatatagcatatgagatcaagctgaactgggaggctggaggctggggggtgagtgggtcatagagtctaggtacttatttcttgygataaacataggtgtaacaaggcatgtgtcagtggaagggtccaccccatgcactccttcattgcctgcctgcagtgagtgcaccaatagaggcaagagtttggagaagggctgattggcatgggaaggattgttgttgactattgtggattaagc

SEQ ID NO: 530534 - DNA, 494 bp, Homo sapiens
tattagatctcataggtcaactggggacaactcatacccaaaaatgtagagatgaatgtatcaaacctcttttatttactccacaggaaactcaatttcctccctaatgtttctataattaatcagtggttaatacttcctgtctgtgatttcttgagtgtagtaaaccttggtttttcacactatagcttgtggttgttccactgttggaatagcataaaattaaatattaaacatccctgatcttaaaatctccttggccattttagcctaacggtctccagctcccacactacacctcattcttgtcttacatctaacagagtagctctctctccttccaaccattgtcaactcaagscttcaacctcaatcccaaacagattttcaagacattttcctagaagacttaatttttcccttagaaacacccttgatattagctaatcaaagtcatttgattaccacgactgttatctgctaaagtatctata

SEQ ID NO: 530535 - DNA, 649 bp, Homo sapiens
gaaagaccctgtctcaaaaaaataataataaaaattaaaaagagttctcttcataggaggatagaaatgttctttcttcaaactctactagaaaaattcagccaagtatacacgttaaaactttaatgtaccactaaaaaaacagaaatagagtctatataatatatacaccaagatgaaaaaaagatgaacaaaaaatactctagcaatctaaaagaggttaggaatgagaaaaaaaggaaaaaggagaagccatagtaaacaaaaaacacaaaacaagggcaacaaaataaattcagatatccatattcacaataaacacaagtgggttagactcattttttaaagaacagaytcagagtccaaatctcaataatgaaatggagatttacagaataagtagtttatttatattttttaaatataaaaaatagtatatgggccacataaaaatatgtatatacatactttcatcgtattcaacaatggattaaaaggacacattctaaaatgacagcagttaggagtggacaaatggaaggagtagccgcatacggggggactcaatgggggaatttagctttctcttttttttgtgtaaggaaactgtatttttataatggttttaaattatgcatgtaaaaagcag

SEQ ID NO: 530536 - DNA, 482 bp, Homo sapiens
ataaatagtgctggagcagagtctgagtgacttctctgccttcctacacagaacgtacagtcatctgaagttaaagtaccagtttatcaaaatacatgataggaaaggacagcactggatgggtgcggtggctcatgcctgtaattccagcactttgagaggcaggaagattgcttgagcttaggagtttaagaccagccagggcaatgtggtgaaaccccatctctacaaaaaatacaaaaattagccaggcatggtggctcatgtctgtagtcctagctacttgggaggctgagttgggaggatcacttgagcccaggaggcagagattgaattgaattwtcagtcttttgctattataaagactggagcaagaaacattgtacatagataatgtgtttgtagattaaattcttagaaatggacttactgtgtgcatgtatatatatatatatacacacacacacacacgtatatacctg

SEQ ID NO: 530537 - DNA, 482 bp, Homo sapiens
ataaatagtgctggagcagagtctgagtgacttctctgccttcctacacagaacgtacagtcatctgaagttaaagtaccagtttatcaaaatacatgataggaaaggacagcactggatgggtgcggtggctcatgcctgtaattccagcactttgagaggcaggaagattgcttgagcttaggagtttaagaccagccagggcaatgtggtgaaaccccatctctacaaaaaatacaaaaattagccaggcatggtggctcatgtctgtagtcctagctacttgggaggctgagttgggaggatcacttgagcccaggaggcagagattgaattgaattttcagtcttttgctattataaagactggagcaagaaacattgtacatagataatgtgtttgtagattaaattcttagaaatggacytactgtgtgcatgtatatatatatatatacacacacacacacacgtatatacctg

SEQ ID NO: 530538 - DNA, 493 bp, Homo sapiens
aaaaaaattcagactatgaatgtgttggcttaatatgtgggtgcaagccaaaaatggattttagctgcactgtaacctcacttagagatggccttgaaagactgccatgaatccttcctatgggcatagcttcataactttgggcagtgtccctggtcctatactttgtgttgagaaagaagcttcctgagattagaatatataagcacttatgagtagcagtgaatggcctagaaagctgatcagggcccyggaagggaaaaaaatgcaaggtcaagtataagcacacatcttgaatagcatgtgattaaacatgtgagagttggcatgaagtgcagatttttatgttacatattagtggccactagaaagcattaaccataaaagagcactaaataaacacctgatattgtctgtgatttttggcaacagccacctcaaagtggatataataggtatataaatggggtgactgtggtggtagatatagaaa

SEQ ID NO: 530539 - DNA, 595 bp, Homo sapiens
ctgacgtctgtctccccgtgggagttatgtcactccttgatttaattccttctgacattttccccatcatactttctgctcttcatcaaaatacatccctctcgaaaaacaaatgtgcttattgactacccatgacaatcttggaaatggttgcaactgttcatgtgtaggattaaaaaaaaaattaaaacaaaacaaaacaaaaaaaccacaggcaaacaaaatctagagacctgtgccataaggtcagatgagcacraaagggttggttagtccatccaaagtctcaggggtttaggcaagctagagggatttattttccatttttaggccataggcaattttgtttgcttaagcttaattgttcccggatactgaaagggtacagaaggtaactgcatgtttgattttaatgactcttttggcgttgatttaacatcctcactgaaaaaaaattaccaaaacacatacgtgcaaaacaggcagagttttgggtttggttttgttttctgaaaaaattcccatggaggtgaaatgcaagtaaatccagccatggagacatgctccttatgtgtgttgactggaatcacaaaga

SEQ ID NO: 530540 - DNA, 643 bp, Homo sapiens
ataattcttacttcttccacaagagggccttcttagaaaagctttttcttgtttaatgtcgaggtatttctgtacaatttccatgasaagtgaactttccataaaaagaattttagaaaaaaagataatacttacaaattttttctagggtatataactacaaagtaatcttttttgagatgttagtgggggatattttgtacatttcactcatttcttatcttacatcttaaacagatggagtattttctattctctattaactattaaaggctagactctaagcagaaatgtagataaagccttttcactagtctgactttacagcattatctgatataattatatatgccttcccacttctacccttaaaaagctcagcaagaattgtggttttaaaaacaaaaagcaaaacaagtgccatgtgaagatctctatcacaaacacatatgtatagaatattttctcagataaatattttattacacatatgccaccaaacaaactattaaatgaggttttgtctttctaagtccagagcttcaaattatcaactcattgatacttcttttccataatgttctaatactttattttagcaaagtccagaggaacaagaatcaggaatagaagaaattaggag

SEQ ID NO: 530541 - DNA, 488 bp, Homo sapiens
ttggtgagtaacaccctccagttaatatacccctacttcacccccagagccacactaaaggtcacatcccccaacacaggcacatgcctttcagcaaccttacagatacaagccttaaaaygtgctgttttatggcaacctaaatgatgaccccaaacagaacctgattttgcattaaccatggaggaaattcagtctgattccggtgccagcagccacctccacaagaacaagtttccaaaggaaatggaatgagaagcagttacgtggcctttcttttaaaaaggaaagcaaaacaaaacaaaaaaccccaatcaagtatcatttttttccatgtatcatttttaaaccacaggcccaagacctcatcttaaaagtatcgaggtattacaccaaaaaatgacaacacttttccaactaactccaacaataccctctcaaacacggtgtcacaagacagaggcaaaaggcttatctgagaggaccaa

SEQ ID NO: 530542 - DNA, 665 bp, Homo sapiens
ctctgcatttgaaatcagacctgattttttataattagtttccattttttagctatgtataaaggttacttggcctcttttgagccctaccagtcagtaatatttgtcctgattatcctgtagggttgtttttaggatcagatgaaataagacaggaagataaatgtaaagagaaaaaacatgcatgcgtattactgcaactgtttattaatatcattaggaataaccttttatagacttgcaaataactgttggtattttgttgataattatggattttgcttgatgtaaattgttgtgggttaactcgatatttgaatgggcagggccatataatttgcttgcatgagtttttaactagctgtccccccctcyccccggtttaattttacaggcaacagatattaaggaggcatctcaaaaatgcaaacagaagcaagatgttatagaaaggaaagataaacatgtaaggtttcatactaaaatttttattacattaaagtttgctctaacttttgttttcaaatacagattatgagacagattcttgttggggaatggccaagatcctctgcattctctatttcttaatccgagggaaagtaagatttggaagtatagtagttgctcagaggacaattgtggaaaatttctcaaaactacta

SEQ ID NO: 530543 - DNA, 580 bp, Homo sapiens
tgctaatgaatcggattacattagtttccagcatcacaaaaagatagccagatatttacatgtaccctaatgaaaggacacaccaccactgtggaatagggtatctcttctcacactgctaaaaagaactacctgagactgggtagtttatgaagaggtttaattgactccattccacaggctgtataggaagcgtggctgggagacctcaggaaacttaacaattatggtgtaaggtgaaggggaagcaagcatgtcttaccatggcagagtaggagagaggatgagggggaaatgctacacgcttttaaacaacyggatcttgtgagaactcactatcacaagaactacaaggggaatccgcccccattatccaatcacctcccaccaagatcctccctcaacattgggaattacaattcaacatttgatttggccggggacacagaactaaccatatcattctgcccctggcccttccgaaatcttgtgtccttttcatatttcagaacacaatcatgccctcccagcagtcccccaaagtcttaactcattctagcattaactcaaaagtccaagt

SEQ ID NO: 530544 - DNA, 485 bp, Homo sapiens
gcggagttaagaatgacgtgctcttgggtttgagtcaagctcacctcctgagagtagagacaagctctcatcttagctcagtgttcaaagctaacctgagaagagtgggaaacagaggtgatttgaattcttgacctggggaaagggtcacatagggtcaggactcattcaaccagtacaggtatgtgaaactcagggtatttgccccaagattctggttctgtttgagactttatattattcacataaatgctatgtttgaattttgtgttttctttttcctttgctgaaccaggaccagtccaccatgcctgaagtcaaagacctctcagaagccttgccagaaacrtcaatggatcccatcacgggagtcggggtggtggcttctcggaaccgagccccgacaggctatgacgtagtaagtcaagatactagtttgtacattttgctcactgattctacaagtatttatctcctgtgtccaa

SEQ ID NO: 530545 - DNA, 553 bp, Homo sapiens
tctcgctcttggccagcagttggaagggatcccagggacgggctcagctactcagggcagcagccaggcatcggtgcagagggtgagtgaaactaggcccaggcccgaggggcttcccgcagggcgctctgggctccgggaaggaagccctcctggcttctctatctctttctgaaaaccgcctgagtctgagagggaaagaatgggccacagaagattcaggagcagcagcrctggtgtgtgataagttagtcactagaactgctttaggtaggcaggaggcccgggattgggggagcctctctgaggggcgatttttaagctgacacatgtctggtaagtcactgtgagccaggtgacaagcaggtgaaaggaggggagcatgttccaggaggggaggcagcacacacaaaggcacagaggcaggacgacgctggcatgcttgagaactggagaggaagctgatgctgctcacacaaagaaaaccatggagaaatgtcaggaatgtgagataagatggctggttgaagatgtgtttttcctattcactcct

SEQ ID NO: 530546 - DNA, 669 bp, Homo sapiens
gtcagatttatttttctaaaacaaaattttgtttccagttgcaacgtttggggctgactttccagaattacccaggattgacctgtgggagatatctgggccccctgtgccttgcaaagcttcacatgggtgatgatgttgaagaccaggtgcggatcaatgggggctccatggcaaatgagaaacmgaggaagaagaactaaccttcctacccaccagtgctcactggcactcaacatagccttgctcttgtttctggaggaagggccattgggatcaacttaagaacatggcagaacagagatgcttgctgaattagttggttggaagcacaaaattattttagtagttgttgcaaattgcttcacttctctgggtttaagtgtagaactcaatggtaatgtgaatagacttgatctccataggatcattgtggggactcaatgagatagattctgtagagctttgggcttgattggtgcacagtgttcaatgagtgtgctgggagaaactcttctcctcacttctggtgtttccttccaggaggagagaggtccctctgggtagcacccctggcctctctgtctgctccctgggttctgcctttggaagtgggaggtgatgtgcttggtagggaagcttgagggcaggagctgggtctgggtagct

SEQ ID NO: 530547 - DNA, 468 bp, Homo sapiens
ctcctgctcttaggaactgagcacattttgctgtgttctgtctgagggttgtgtggaattcatcgctgcgtattcactcattcaggcgtgccatcattcatcacatattcactgagtgccaggccctgcacaaggcagtagggataattcagatagagtccctgttttcacggagtttattgtccagtggggaagacagatattaaacagataatgacaccaayaattatttaattacaattgttataaatgttatgaagaagtccggggggctatgagcatttctaagaggagacctgactctgaagggtggtgaccgtgcctttgagaaagcaccatttaggccgggttctggaagggtaggtaggaattggccaagaaaaggctaggggattgggagaaagaaagagcgctttcaaggcagtagaaacagctggagcaaggccgtgaggctaagagaacttggtg

SEQ ID NO: 530548 - DNA, 613 bp, Homo sapiens
acatgatactgggtatcgtttctattttctcttaccactagaccaaccactggtgtttctgttcctagaaccacttggttccacaccctccatttccactccacagaactttggaggttctaggttgccttcagcaggcatctgatgctagcctggccacatgctcacgccctccttgggctcaccacaaaatgttggcagaccccgccccttccctctgatcctcaagagtcccagctatgggaggcagggctggagaaggcctatccctcctttacggaaccctttcttcccatctgctaggcactgaccttgcctccctgtctctggcaggcagtccagggtcagctccaggggagtagcgtgacaggggagctggggtccgatggctggccatggggagccatggttctgctgataaagggtctttatcgagctccctctgcagatgtgggctgcatcattcacgggactcgggatgggagcccattcatctggggcacggaasgtgaaggggctgggatttctcattcgagggcgacacggagttcacatcaggaaatattagtctgatgagttccctgcaagtggagggactgtcaggcattaatca

SEQ ID NO: 530549 - DNA, 534 bp, Homo sapiens
agctggtcatggtggttcacgcctgtaattctagcctcttgggagactgaaccaggagagtagcttgagcccatgagtttaaggatgcagtgagctaggatcatgtcaagctgcaccgcagccagagggtgacatagcaagaccctgcctctttttttktttttttgaaatagagtctcgctctgtcacccaggctggagtgctgtggcacaatctcggctcactgcaacctctgcctcctgggttcaagtgattctcctgcgtcggcctcatgagtagctggaattacaggtacctgccaccatgtccagctaatttttgtatttttagtagagatggggtttccccatgttggccaggctggtcttgaactcctgacctcaggtgatctgcccacctcagcctcccaaagtgttgggattacaggcatgagccaccatgcctggccgaccctatctcaaaaaaaaaaaaaaaggcagccacacagaaaaatgccgattacctacataacaatgacagacaggtgacttttca

SEQ ID NO: 530550 - DNA, 413 bp, Homo sapiens
ctcaccaagcatggtggaagagaaatgaagaagctctaatcccagagtagctgtatcatcttgaactgcccgcccttggctagcttgtttcacgagagaaatgacaccaacagccaggtttctgttacatgtaaccaaatgcaacttacatgttaatggaaattacgygttaatgaaacatcttatttgtgagtcctcgcaaccaaagtctgtttccaggctatttatcatgttccattgagttgtctgtgaaatacagtaaaagtgatattctttttaaattactacattactgtgcaatatgttttattattggatgggtctagtgtcccctcattacctctcttttttcaatagctcaacactttattcctcctgatgaacttcagaatactttatcagattggtccaac

SEQ ID NO: 530551 - DNA, 569 bp, Homo sapiens
actctgctgcccagagccccggggttcttggagagtgctgggggctgccccagggctgagggggtgactcctctcccttccaactctgtgatctgttccaggtagaaaaaaaccgtgaaccctgctagtctgtaggctgtggaggctgctgcccagatgggaggcagcctagaacagcggcacatcctgggttggtgctctggccctgctgctcatcgaccaggtgaccatgcacaggtgctgcaacctgcgggagccccactttcgtcctgtgtcacagagcctgcaaggaaagtgcttagcagcagaggaaaagcccctttagtggcccctccctctccccccaccatggccccttttcccacacaccctgggtagcctgagactctctcctttccgtgtctaggactcaaatatgagagcccctatgggtcctggacacattgccttgacackaccgggctcctctctccttgcctgggctctggacccagcggagctctcttgctcacactctgtgggacctgcgaaggtgccacctctaccttcgtgcacaaggaagtgaaata

SEQ ID NO: 530552 - DNA, 518 bp, Homo sapiens
acatgtaaagtgcttggaatagaacccggcaataataccagaacctggtattattttcttggtcattgttttactttctgttttttgaagatgcttttaaatacctcttcattccaacattatttttaaaaatstgctctatttattatttttttagcattttttcttgtttagctatttaatccatgtgggatttctttttgtgtgttttttccaagtgtctcactcttatctatttgttgataaactctttgtttttttactatatctgattttctttataaaacttgatggagggagttgaaacttccttccccaacctcattcccctcgctcaccagaggtaacaacaatctaatctaatttggtgtttataattctcagatctgttttataataatgctatatatggatgaaaccataactatcccaagagatcttagaatttacattttccttttgaaaaacttatttcgacataatttcaggaagttttaagaataagaatacccacctgc

SEQ ID NO: 530553 - DNA, 518 bp, Homo sapiens
acatgtaaagtgcttggaatagaacccggcaataataccagaacctggtattattttcttggtcattgttttactttctgttttttgaagatgcttttaaatacctcttcattccaacattatttttaaaaatgtgctctatttattatttttttagcattttttcttgtttagctatttaatccatgtgggatttctttttgtgtgttttttccaagtgtctcactcttatctatttgttgataaactctttgtttttttactatatctgattttctttataaaacttgatggagggagttgaaacttccttccccaacctcattcccctygctcaccagaggtaacaacaatctaatctaatttggtgtttataattctcagatctgttttataataatgctatatatggatgaaaccataactatcccaagagatcttagaatttacattttccttttgaaaaacttatttcgacataatttcaggaagttttaagaataagaatacccacctgc

SEQ ID NO: 530554 - DNA, 563 bp, Homo sapiens
ttacattgagcatgtaggatgggatatatcttgatgtggccatctttggaaaacaagggccaccataccatcagtgtgcccatcaatctgtctgactagctatctacctttccatgcatctctctctctacccactcacccattccatctttccacccttcagacgtctgtccttctgtgtgactgtctgttcttctgtctatcccaatcacctaacacattttgaggacctgtgtgccaggcacagctatgtgcattcaataatgagctcggagggagaatgagactaatgttgattgagaacctagtgaatgttagtcccttgatcttcaaaacaactccatgacttagaattatcatctttattttcctgggaagaaaccaagacacaagctaaataacttgcccagggtcattcagccaactaatgtcagggycaggacttgaactccaggacttcctgactaccctgtctctgcataggatacaggctctcttttggtttctgagtgttaaatgtctactaagagttagttctccacttccatttttttcccaagcga

SEQ ID NO: 530555 - DNA, 439 bp, Homo sapiens
ttagagctcaatctgatactttagaagaatatactttctttgtcactaaatgaggagctcagtggtccctatctatgttgagttccacatgaattcacctgcatgagacagaggttgggactggaaattggctgtaggctcagcaaggaaggacagtgtgatgtggctgcttagtaagtctgcagcatctggttggtcttggtaaaagggaagagctctaatgtgtgggagggcctgggacccccttccaccctgtgccggtcagcccatcagttggatcatcacacccacaattacaagtctctgctttatggaagacagatagcctgagtccacaatgggaagagaaacagggcagatgaagggtcagacatgtaaccaatgtgaagaaactgggaayttgtggcttgtaggagaaaagccatttgaggttccataa

SEQ ID NO: 530556 - DNA, 562 bp, Homo sapiens
ctccctcctttttttaacaaaaaaagtggtaattcttcattctgtaattcatcttatttaccaaaccaaactctgaactgcttttgaccattttctcaaactaatcctagtgtctcagtatgaagacttgtcacctttcaagaaatccaaaggactgtggaggaagcccccagaatacttaaataattaacttcccagtgtggattataccctgattgggcctgcatgtctttgaggtgatagattctgctctgcyctttacaaaagcagcattactctgtagtctcacatatacagattgaagatctcattttgccattctaatatcttgaaattataagatatgaaatatatctaattgcctctgtgaaaacagaggcaaatttctaggcagtgtgaggtgttcttctgagctcttcatcccattaactttcatttatgatattaaaaaaacatgttaattaagatataacttgcaaaatgctctgcagtttgtgtgtgtgtgtgagaaagagagggactttcaggaattgaagattttctctgcatgatacacttctga

SEQ ID NO: 530557 - DNA, 394 bp, Homo sapiens
tgctcaagcaatgatttcctcccttgtttttcataaggagttgttggttggtggctaataactacaaaaacgcaacagctataaactagatccttttttgattgtttttaaatcaatcatcccatgctaaaagatgcacttctattccattttttaaaaaaagtaaaactttaacatcaattagaggatgtatgcctccagttatgtaataatggacttaatttcatttgctctagaaagtgtctcataaatgagtgtcccttgcatagggtcatgtttcaagctctgctccatcatcctaaagcgtggaggacttgctcagggtgggtgtgggagacagattgtctgacaggagtacyccgagaagttaaggaagcagggattctaagaaaca

SEQ ID NO: 530558 - DNA, 624 bp, Homo sapiens
aacagcagatcttccttttacccataatactattgctttgagaatgactgaaagcatggtacataacggacacataagaattaatttcagagttttatttattttaatggtcacaccaatgatacatactcctaatcctataacgctatatatatcctcatagctgttataatttaggtgattataattttgtatttgcawaagatgccttccaacatggaagatgcagctaaccatcctacagtacacagaattgtaacctataacggttttatgattgcaaaacattaaactctgccttagttccctcctatggcagaggagataataccagaaatttagaaattgaaataggttcaaaaattagtggtcaaaaggctcctagtcttcaatgcacatagcacagtgctattggagatgtcctactgacacacagaggaaaataccacttcactttcacagtctcctaatgcataggttattgtccaaactcttcaatgtggttatcagagcacgccacaatttgttcccaatctacttaccttaaactgttgcttataaccgacttttgtaatcctcaggaagaataacatgactcactttggtaccctgtattctagacat

SEQ ID NO: 530559 - DNA, 582 bp, Homo sapiens
aatgactgaaagcatggtacataacggacacataagaattaatttcagagttttatttattttaatggtcacaccaatgatacatactcctaatcctataacgctatatatatcctcatagctgttataatttaggtgattataattttgtatttgcataagatgccttccaacatggaagatgcagctaaccatcctacagtacacagaattgtaacctataacggttttatgattgcaaaacattaaactctgccttagttccctcctatggcagaggagataataccagaaatttagaaattgaaataggttcaaaaattagtggtcaaaaggctcctagtcttcaatgcacatagcacagtgctattggagatgtccyactgacacacagaggaaaataccacttcactttcacagtctcctaatgcataggttattgtccaaactcttcaatgtggttatcagagcacgccacaatttgttcccaatctacttaccttaaactgttgcttataaccgacttttgtaatcctcaggaagaataacatgactcactttggtaccctgtattctagacat

SEQ ID NO: 530560 - DNA, 578 bp, Homo sapiens
ctgtggtgtaagagtagagaattaactttgagttaaattataaatatcaaacagtaygtccacttccagtaggatgcaacagaacaaatcactggtaaatgtgaattcttcaaattatttcagtatgccctaagccatttactaaactttattatacctgttaccccaaagagccatttttttcctaaaatatagatcagattctctttcactcccatatttaaaaacacttaaaaactctctgttgcatgatgaataaaataagaggctcttattgaggaattcaaggcctttcaaaatctagtttcaattagcttctcttgccttctccatcccacaaagctcttggtttggatatgatgcataccctttgtcctaatatgtcatgcctttgctcatgcttctctttcaactggagtgcccttttctgcttctccataagctaaacttttattaatccctcaaatgtcaactcaatatcatcttagcttttctttaagaagagaataatagagtggttctcaaatatggttgaacatgggatcactaggtaacttaaaaaagagaaataccaattc

SEQ ID NO: 530561 - DNA, 578 bp, Homo sapiens
ctgtggtgtaagagtagagaattaactttgagttaaattataaatatcaaacagtatgtccacttccagtaggatgcaacagaacaaatcactggtaaatgtgaattcttcaaattatttcagtatgccctaagccatttactaaactttattatacctgttaccccaaagagccattwttttcctaaaatatagatcagattctctttcactcccatatttaaaaacacttaaaaactctctgttgcatgatgaataaaataagaggctcttattgaggaattcaaggcctttcaaaatctagtttcaattagcttctcttgccttctccatcccacaaagctcttggtttggatatgatgcataccctttgtcctaatatgtcatgcctttgctcatgcttctctttcaactggagtgcccttttctgcttctccataagctaaacttttattaatccctcaaatgtcaactcaatatcatcttagcttttctttaagaagagaataatagagtggttctcaaatatggttgaacatgggatcactaggtaacttaaaaaagagaaataccaattc

SEQ ID NO: 530562 - DNA, 562 bp, Homo sapiens
tcacataattcaagaccatctcaagatgccatgtggacctggtatccatctgttgtttgagtaaataataatttaatttctattttcagttaaacaaaatagacaagagcatctaccattgcttgttcattgacagtttgtctgctccctgaataattattgcatctcagttgattgtttctatatctaaatttggagtgtctcaaaatgaatttctttaaccttgggtaaatattgaagcaatcagtagaaaatgcggatccacttttacctgtataatcaattaaccttgaacaatgtctgactgacttcccctttcctaaaaatattcttcacccacagaacaaaatccaaacscttcaaacgtgtacacaaaggtctttacaagttaatctctgctttttctgcctatcttccttccatgctttctagtcacaaaaacctcgagtggcttcccagagtcctccactgcttgcatctttgtctttctttgtcgtcacaccacctgcctcaggtcattccttcattttcagacttggatgaacatcactccctagtgtat

SEQ ID NO: 530563 - DNA, 631 bp, Homo sapiens
tcccagtagcttgtccatagctaccaagttacaaagtatcagagtcaggtctcaaagcccattttcataattgtacaagcaatttcctttcatcaaatgtataaattaccaggatgattttaagtgaggggagtttgaaaaggttgaaagtagggaactgaaaaaggacaatgaaaaagagttttctggtgaccattaggaaagcaattttagtatagcagtgtgctcagaaaccatttcagagagttcagtggggaatgggaggaaaaaaaaaacgtgcaatgcgtaactatcagtcacttatgaagtctagcaggggaaagagttatggggctgtaggtacagtgagaaggtacagtgagtctcaagtgcattttttatcaaaagggagcagatggaaccagctagtgtctaagaacaaagggtttgggaaatgagaacaggagaggagagagagaggagaaaggrtgcctttctccaagagcatgcaaagatatatttgaggacagatacagcagatgctcttcttccccacaactacatgactgaaatgagtcctctaaaactcagagaattcagatccttgaatgtcctggaaacttaaggagcctctgagtgccatacctcaatg

SEQ ID NO: 530564 - DNA, 670 bp, Homo sapiens
atgccaatgaaggacatcagtccaaatctcgtgtagacctgtgtgtttctctgatcagggataacaggcttcctcctgaactttactgctcagaaaggagccggtgttggggataggtatgggaagggataaatcagcatcagtattatgacagtgaacacaagcatagttaagaatttcaagctatattcctgatcaatatcatttggatatatctcaaaccagtttttttttcctactcagttgattggagaattctgtcgagagtcagtttgtagttccaagcctatcctgttgaaccactcagtcagcaattcaattcaaagaacatttactgagtgttctctgtttgtaagccatcggagagcaaaggaccagaatgtcttatatttctatttattctcaacccttagaataatgctaggcacacagktactccataaatgtgtgatgaacataactgaactactacatggagaaggaggactaatatataataaacacccactgggtaccaggcatgctaggcactgagggatcagtgacgaatggaactgcctctgccctggggagcctatactcaatcaagtctttccttgtggatcttacatgcagatgatctggaaaattaaccactgaactcagacactctcagggcagattcagaatt

SEQ ID NO: 530565 - DNA, 647 bp, Homo sapiens
atatttggattctgtatgagcttcaattcctaccactacttatccctaaaccttaacatttattagaagaatgaaatatctccaaaaggctgactgtcttcttgctgtgtgggtagctgaagaattattgctctaagttgcccattactgaactctgcctatctgttgggacacaaatgtcactacttctcagacttgctgttgccaaatgtttttcttctcacaggattctcagtcctggatattgattctggtgttttgtttttctttctgtggttacattattaaataatgacaaaaaccctttcagtggctttatttataaataggagatcacctaaaattcatggaaaaattggcctgcatttgcaagaaaaattcttctgcaasgcaactgtcaataatgaaaatgcacagtagcaggaaatttataaatgagtaactcaagcatgccattgccccaggagaccttctttgagcagactgtattagaaacagaataagtcagaataagttagaataaaagaatacctgggaaagggaagaatgaatgaatagcagctccttgcagggttagagatagatgggcaaagacaaatataagaagacacataaactttagtgtagcatcacttcctggaaggatc

SEQ ID NO: 530566 - DNA, 566 bp, Homo sapiens
agacttcctctttgattgcagttttattatacacagacaacccattcctgatcaaacacttggcttcataaatacgaaagcatgggaaaatcccaaagcatcagtcccaayagtttcatcctctattttccctcttctcattttaaaaatctgaaataatgtaagatttcaatgccaatactacaacagagagctcattcatttctcaagttctggaataacatcctgagttacagatcttggtggtccttcttaatgactgattagagttcttgtctttacctcctactgatgattacttgttttgataagatgctgagtgcattgacttagtacctgtgttaattgctttatcctgttagaatctgattttcagtgtgttgaaaagttagcttaagccagtggttctcagccctggctacacattaatatcgcctgggatcctttgtaaaagagcaatgcccaggctccacccccagggattctaatgtaattggaccaaggtggatcccaggtatcagtatggtttgaaagctctgcagttgattctcatgtacagccaagtt

SEQ ID NO: 530567 - DNA, 530 bp, Homo sapiens
agaaaaacctctgacccagaaatacttttgacatctgtgaaaagagggggagatggaaagaggatttggtaggaagagcctcagatcatagggcagccctaaaaaagtcttgactgggccaatagggcggaccatagcaaagaggagtcttactttgggcrggaatggcctgtttttagtactctcccatgctcagtctggctgggagtagcccaggaagaatgtggccttggggtgagcacagtggtggattttgctaaggtgaggcagtgggaggctgtcagctaaacacaatgttctgttttgcaaggatgtcaatgcagagcactcctatgctaccacaccatgagcatccatcacttcaataccaactatggcacactattcctaagaaggacactgctgtattgacagaaccaactttccactttcccctgggagaccatcagacctaatcttaaccatgccttacattcctgtttacctcattcaacatcaaaaggtcaagactccctggtcatctcttattt

SEQ ID NO: 530568 - DNA, 618 bp, Homo sapiens
ctgtcaacatctttttcagacctagaagtctttagctcatgcctccagtacaggtgactactttgtatttttccccttttttacttataaaatctttatcttgatttttgtgatgttcataatgttttatttttttaattttgtttgggacagcgtggctccatcagaatgagaactaatggagttctttttactggaaatcttcatcatcactatttttatggggtgattagtatacttgtatcccaattaagtcactccaaaaatggcataaagcagaagagaggcaaatgaaaagctagtactataatgctgtattgtgattccctttctatccaccatcatcaatatcttactctgtgctaggtctttcctgtcagtacacaaaccctgatgtgatctggttcctacytagctctccaacatcatctgtatcactttcttgttggcctctattgttaagccccaatgggcttctttttgctcttcaacaagtcaagcttattatactttagaacatcgtagcttcctcccacattgttatagtgtttggttttaaatctcagcttaaatatcaccttcaacagaggccttccttgacaactcacgcaaaaatat

SEQ ID NO: 530569 - DNA, 618 bp, Homo sapiens
ctgtcaacatctttttcagacctagaagtctttagctcatgcctccagtacaggtgactactttgtatttttccccttttttacttataaaatctttatcttgatttttgtgatgttcataatgttttatttttttaattttgtttgggacagcgtggctccatcagaatgagaactaatggagttctttttactggaaatcttcatcatcactatttttatggggtgattagtatacttgtatcccaattaagtcactccaaaaatggcataaagcagaagagaggcaaatgaaaagctagtactataatgctgtattgtgattccctttctatccaccatcatcaatatcttactctgtgctaggtctttcctgtcagtacacaaaccctgatgtgatctggttcctacttagctctccaacatcatctgtatcactttcttgttggcctctattgttaagccccaatgggcttctttttgctcttcaacaagtcaagcttattataytttagaacatcgtagcttcctcccacattgttatagtgtttggttttaaatctcagcttaaatatcaccttcaacagaggccttccttgacaactcacgcaaaaatat

SEQ ID NO: 530570 - DNA, 622 bp, Homo sapiens
atgagaaacagttttattttccaacccagtaagtcttagccctctctattttctttaaattctgcttgcaaactgaaacatttttgtctgtttttgtagtatctctctcatggtaccttacgatatgcatctagaagcactcaaatgatcactattccgtctagaaatctcctttgccagaaattcattaggcacattttctattttctgagttatcatgggcgttattttttgccagttgttccaccattggataatatgggctgcccactttccatctttctgcaagcggtttccccrcagcttttgcagcctctatctgctacctggtcccaaagccaaagacatatgttttagatttttgttacaacagcatctcagttctaggtaccaattcttccccaaaactcaacggcttacataaaactatacacctaaaaagcatgacttcactctataaaaaccatgtctcagcatgactttgaggaaaaagagttgcttaaaacaacaaccattttattttctcaccattctgtgcgtcagcgaattgggctaggatcaaatgggcagttcttctgttctatccccacgatcagaagcaaataaaatggttgttgtttaa

SEQ ID NO: 530571 - DNA, 641 bp, Homo sapiens
accttatgcatttcaaatcagcctaacttacccaggtccagagaattttgtatttgtactgttggattccatctcacgtctgcctggcctggaaacagagcttcagggcccaaaagttgaagagcttgcagaggcaccaacctagtctgggatctcagtttagatgtcttattcagggccaatagtctggtgagtatgcaggttctcaaattctcagagtgagacacaaaaaaacctaccaggcatgaatttttcctgcaaaggaatgaggggttggcattggtttatcttacagctctgtgtgctgctgcttgcctagagccattcccatttttaagcatctaagttacatgcatatgcccaaccttaaaggatttttctaaaataggaagatagcaagaattaagcttcctattatcctgtgaagcccagaagaatctgagcataaggtaaagagtggaggaagggaactaacatttgytgagtattgattatgataaggcatttttcctttattctctttcttaatcctctcaatagccatttgtggtacatctgaatcagcctggtgaataagatttgggttcctcaagacagagaaggtatggcacctgcatactcatatttcctctgaaagcatc

SEQ ID NO: 530572 - DNA, 509 bp, Homo sapiens
gaatccttaaaaaaagatatattttatgtatctgtaaatatacatatatttatatatgcatatatatacatatacaaatatctatacacatayatagatatataaatatatacatatataaatatatatacatatatagatatataaatatatacatataaagatatataaatatgtatatataaatatgtagaaatatatctctgtataaatatatagatatacaaatatgtatatctatatatacatatataaatagatctagatctatatataaatcactgtgttcttttgtattattaaaaggcctttatataacataatttttaatactgcatattccacctccccatcatcatcatctttatctttgttagtatcatctccaagatcagtatcatcatcatttgttaaacactatgagccaaatcttatgtaagtggtttacacatattacgctattttactttattctcaagaattattcacatttgtaaatggagacaaat

SEQ ID NO: 530573 - DNA, 603 bp, Homo sapiens
tgttattattagcagggtctagattgtgtctgcaaaacctcactggtgaagacctcctctttttgacagtgaaagtttccacagtttgttgtcactgttttcgaggcaggctgcctgggagactggccaccccacccagcttctccgttattrcatcttcttgcctccctagcacagttggctgcttgagccagtggcgggcaagaccataatcttccacatttgtcatcagacctgatggatagtattcccaagttaatgccataaatgctgtttggaaattacaagtccatgctgctggtggtctagccaaaaaaaaaaaaaaaaaaaaagaattaatttataatcatgcatataaatttcctagatagtgttattatcattcaggggttgagtaatggtgcatatggggagtggctactggaacagaaaaccatgtagctataacttagtgtaattccgatgacaatagttacatctatcactttgttataaatcaattgataccctgtgttaagtgaggaggcctcgcctccccaaatgcataggaggagtggcagagaggctttggagctttgtttaaggtgttgctggccatgctga

SEQ ID NO: 530574 - DNA, 603 bp, Homo sapiens
tgttattattagcagggtctagattgtgtctgcaaaacctcactggtgaagacctcctctttttgacagtgaaagtttccacagtttgttgtcactgttttcgaggcaggctgcctgggagactggccaccccacccagcttctccgttattgcatcttcttgcctccctagcacagttggctgcttgagccagtggcgggcaagaccataatcttccacatttgtcatcagacctgatggatagtattcccaagttaatgccataaatgctgtttggaaattacaagtccatgctgctggtggtctagccaaaaaaaaaaaaaaaaaaaaagaattaatttataatcatgcatataaatttcctagatagtgttattatcattcaggggttgagtaatggtgcatatggggagtggctactggaacagaaaaccatgtmgctataacttagtgtaattccgatgacaatagttacatctatcactttgttataaatcaattgataccctgtgttaagtgaggaggcctcgcctccccaaatgcataggaggagtggcagagaggctttggagctttgtttaaggtgttgctggccatgctga

SEQ ID NO: 530575 - DNA, 487 bp, Homo sapiens
agagcatcgaggcaaatttttaatgtgttttgtcccagtgccagtccagttcttccccatgcacagagtggtggctatttggagctaacaatactcctctctagggctgtcagaccctgtacaatttttttttccgtacaactttgcagaggagtctcctcctctgcttcctgatttttatcagacctgttgaatctcttctgtgctcttccacatctttctgtcccaacctccttccccaagcagatctaacataaatagcttctaacacactgagcaactactctgtgcctaattctgatctaagcagcttatctcattcaaactcacaaccatcttatgataagcaatattcttagcccttctcagttggggaaactgagacttcagggagcttcagmggctggcatgaagtcacactattaagaattgttggtgttggacttttgaagccaggcaattcaattctaggactagcaccctttac

SEQ ID NO: 530576 - DNA, 453 bp, Homo sapiens
aaacaacccaaatgaatgaatcaacaaaatgtgatatgttcatacaataaaatattatccagccacataaagggatgaggtactgatgcatgctacaacatggattaacattgaaacattatccagactccaaaggccacatggcatatgactccatctacacgaaatgtccagaatgggcaagttcatagggatagtattccttttgaggggtggtgaaaatgttctggaattcaataatggtgatggtcacacaactttgtgaataaactaaaagccgctgaattctacacttcaaaatggtggatttaatggtatgtaaattatatctttctcaaaaaaaaaaaattagagtgaatctggggcaaggtaccaatccaataactcaattaggatcatcttgttgggcagttggctgggaagctgctgtcmcaagccagccagagcctagag

SEQ ID NO: 530577 - DNA, 538 bp, Homo sapiens
ctggtatgtggccgggttggaattcacatcctgttttcttactccagatctggtctcctcccatgacaacctggctgcttctaaaaggcacattaacttggtatttaaaataggcaacctgggtttaaatccaagcagtactctggcagtggtattaaatccaactgatcctcagatttcccattcataaaaatatggataacagattgatgtgaagattagatgaacaaaaggaaaacacagttcaatattactttagtcacatctactagatcctgagctttccgcagataattattaatgcaaaaggatttgttaagcacccactatgtgccaggcaccagaagcacaaagataacagtgtyttattcatctttgaatttgtagtgctgagcacaaggtcaggcaattgcaggaactcagtaaatttgatataaatgaaatggataaaagtaaatggataaataaattaaacatagatgagaaaaagaaatttttagccttgtatataaaaattcattcactcaacaaaaattga

SEQ ID NO: 530578 - DNA, 550 bp, Homo sapiens
aacatcccataatgcacaggacaggtcccctgacaaacaattgttaggccccaaatgtcagtagtgtcaagacagaaaacctgcttcagtgtcttmgtttgtaaaatagggatgataataaaacctgcttctttctatcatctcacaaggttgacaaccaaatcaggtaacaaatcaaaggcgccttgaaacttaaaagtactttaaaatgggggaataatatcttcattattaacccacttttgctactccgtgagccacttcattggtgtctattctcttattcctctcttggacatagagtccaattgcttctccagcctgtggcaatgacttctgtacttgacctctaggagatatgactcatagccttcaaactcaaacatgcatgatagatcctttatgttttcattaataaggtatatttctgttacaatcctccatctgtcaggggtcaaactcttaatcttggacagtacagaattcctcttcgtgtttccttgaggttgcattcttgttccaggggtttatgtaggagtaaggccctgca

SEQ ID NO: 530579 - DNA, 550 bp, Homo sapiens
aacatcccataatgcacaggacaggtcccctgacaaacaattgttaggccccaaatgtcagtagtgtcaagacagaaaacctgcttcagtgtcttcgtttgtaaaatagggatgataataaaacctgcytctttctatcatctcacaaggttgacaaccaaatcaggtaacaaatcaaaggcgccttgaaacttaaaagtactttaaaatgggggaataatatcttcattattaacccacttttgctactccgtgagccacttcattggtgtctattctcttattcctctcttggacatagagtccaattgcttctccagcctgtggcaatgacttctgtacttgacctctaggagatatgactcatagccttcaaactcaaacatgcatgatagatcctttatgttttcattaataaggtatatttctgttacaatcctccatctgtcaggggtcaaactcttaatcttggacagtacagaattcctcttcgtgtttccttgaggttgcattcttgttccaggggtttatgtaggagtaaggccctgca

SEQ ID NO: 530580 - DNA, 550 bp, Homo sapiens
aacatcccataatgcacaggacaggtcccctgacaaacaattgttaggccccaaatgtcagtagtgtcaagacagaaaacctgcttcagtgtcttcgtttgtaaaatagggatgataataaaacctgcttctttctatcatctcacaaggttgacaaccaaatcaggtaacaaatcaaaggcgccttgaaacttaaaagtactttaaaatgggggaataatatcttcattattaacccacttttgctactccgtgagccacttcattggtgtctattctcttattcctctcttggacatagagtccaattgcttctccagcctgtggcaatgacttctgtacttgacctctaggagrtatgactcatagccttcaaactcaaacatgcatgatagatcctttatgttttcattaataaggtatatttctgttacaatcctccatctgtcaggggtcaaactcttaatcttggacagtacagaattcctcttcgtgtttccttgaggttgcattcttgttccaggggtttatgtaggagtaaggccctgca

SEQ ID NO: 530581 - DNA, 278 bp, Homo sapiens
tggtgactgtgcattttaatagaagagctctccctgcccatgttgagcagcaaggttataaatggaacactgcttgctaaattgccccattttgcacagactcacttcatgagttgccggctctgatgtgtggctgaatttgatgattaagcaagaacaaaagaactatgaayctactggggaatacatccaattaagtggtatcaacgcaggatgactgagaagagaatggtgtgttaatgttttcaccggccttgccaacaaatatttatggagtg

SEQ ID NO: 530582 - DNA, 664 bp, Homo sapiens
aggaaggatttttaaaaggggcacatggccgggtgtgttggctcatgcctctaatcccagcactttgggaggccaaggtgggcagatcacttgaggtcaggagttcaggcccagcctaaacaacatggtgaaaccctgtctctactaaaaatacaaaaattagcctggggtgatggcacatgcctgtaataccagctacttggaaggctgaggcaggagaatcacttgaacctgggaggcagaggttgctgtgagctgagatcatgccattgcactccagcctggcaaacgagtaaaactccgtctcaaaaaaaaagagggccacatgtattttagtctttggaattaaaagtttgtgttttgttttgttttttttgacagtggactcaaaaatattttgactgacttacacatatgttacactacaaatatgagttaccaccatcaaatcactcctcacttataagtaatttctccctgctcaatcttaactgagaatgctactatattctatatatgtccaattatgtatatttttggagaacgaggaaactgtagtatcgggggaaccccctctcccatatttcagtgtaggttcttactattttccctacgtgttggctggmttagaaataaagagaaagagtaccaagagaggaatttt

SEQ ID NO: 530583 - DNA, 539 bp, Homo sapiens
ctgatgtaaaccaataagatttcaattccgaagtaagcagtttcgaaaatgattctatgtgacacttccatttttgctttcatgtgtgatggcaagcatattagtgtttggtggttggaatcatagcgccagcagcactttgtcagtggtcagaaaacaaaattcctggtgtaaaagctggaaagtgaagagagcggtgatttatttgtggttatttatttatttctttatggtttatttatggctctcaagtaacagatttattattaagtcacatctctggtctggtttaggggctttggtcttgaacaatttgctttaaagttggtttgagagcctttggtatgtatcattttataagctacatctatgtaaaagcaattgagattrtcttctcttgcttgtaaatctgagaacattgactcatagattatattagtgttctattgctgccataacaaacaatcacaaacttagtggcttaaagagacacaaatttattatcttacagctctgtaggttagaagtctaaaccaagg

SEQ ID NO: 530584 - DNA, 563 bp, Homo sapiens
gcctgtcctggggtggctcccccgacttcacacaccactccctgccttgctgggccctttctctcctgcctccctcaccagcctttggtccctccttgtggcttccctctgcatggctggtgcctttaggcatttagtcctctcttagccacctcctccgggaggccttccctgaccgcctgatccagaaaagcctccagccagcctccatcacattaccagcatctgctgtctttgtggcatcgtctgaagattccttatttattgcctgtttccctctaggattgaaactctgctgcctggtacccagaacgtgccytgaaacatagtagggggaatattctgctttcgatctcttttttctcaacttcacctgtgcctcagctcctggcttcagacttgcatgcctcagtttcccccagcactccagttaacagggattttatgtcaacagcgtcgttttctgacgttgctaacacttgggtgtttgctagttaacaggcactaagtacttcccttatattaactcaagtgaatccttaccacagccccgtgaggtgggt

SEQ ID NO: 530585 - DNA, 567 bp, Homo sapiens
ggctccactagagcaagagttctaagaggcctggggggaagctgcaaggtgtgtcatgatctagtctcagagtcactgttgaaatgtcactaaaaatgactcagattcaagaggaggaggttagactctacctttgaatgggaggagtagcaaaaattggtggccttctttcatttaccacaacgtctcaaaatcctgtggatcttaaatacccayatatgttagtgtctccaggtgtagcctcttctccagtgagctccaggcctgagttccttgattcctctctttaaatgtttaataggatctcacaaattcttgtcccctacttatttctacactgatctccccaactcagtaaccagtaccaccatctgccagtcactcattctaagcttggatcctcctttcttatttatttattttgacttttttccttttttttttttttgagatgcagtctcactgtgtctcccaggctggagtgcaatggcgcgatctaggctcactgcaacctctgcctcccaggttcaagcgattctcctgcctcagcctccggagtagctggga

SEQ ID NO: 530586 - DNA, 567 bp, Homo sapiens
ggctccactagagcaagagttctaagaggcctggggggaagctgcaaggtgtgtcatgatctagtctcagagtcactgttgaaatgtcactaaaaatgactcagattcaagaggaggaggttagactctacctttgaatgggaggagtagcaaaaattggtggccttctttcatttaccacaacgtctcaaaatcctgtggatcttaaatacccatatatgttagtgtctccaggtgtagcctcttctccagtgagctccaggcctgagttccttgattcctctctttaaatgtttaataggatctcacaaattcttgtcccctacttatttctacactgatctccccaactcagtaaycagtaccaccatctgccagtcactcattctaagcttggatcctcctttcttatttatttattttgacttttttccttttttttttttttgagatgcagtctcactgtgtctcccaggctggagtgcaatggcgcgatctaggctcactgcaacctctgcctcccaggttcaagcgattctcctgcctcagcctccggagtagctggga

SEQ ID NO: 530587 - DNA, 567 bp, Homo sapiens
ggctccactagagcaagagttctaagaggcctggggggaagctgcaaggtgtgtcatgatctagtctcagagtcactgttgaaatgtcactaaaaatgactcagattcaagaggaggaggttagactctacctttgaatgggaggagtagcaaaaattggtggccttctttcatttaccacaacgtctcaaaatcctgtggatcttaaatacccatatatgttagtgtctccaggtgtagcctcttctccagtgagctccaggcctgagttccttgattcctctctttaaatgtttaataggatctcacaaattcttgtcccctacttatttctacactgatctccccaactcagtaaccagtaccaccatctgccagtcactcattctaagcttggatcctcctttcttatttatttattttgacttttttccttttttttttttttgagatgcagtctcactstgtctcccaggctggagtgcaatggcgcgatctaggctcactgcaacctctgcctcccaggttcaagcgattctcctgcctcagcctccggagtagctggga

SEQ ID NO: 530588 - DNA, 615 bp, Homo sapiens
tgatctcagctggcttatcactttaggkcataccttctccagaagtcttccatcgtttctggggacttcttggcctggcccccaagcccctcttcctctgtctccacccatccaggtatgtagagcattttcccacctgctctcatttgccccagtgttcacatcacctgaaccctttgccctgacattcctgtcacctgaaccacagccgttctgtttctcctttttgctgttccttatggcctctctgtacctcagaccttcctcccactgtgagtctcagctctcagaccattagtcttttcctttctctcttccatgggcatttatttagccccaaatctgtgccaggcacgtgtccctgtcccgtggaagcatctgtctgatgggggtggcaactgtgaggacagtgactacccagcttggtcagtgccatgatggagatggtgaggctgcaggggcattctaactctccctggggaagagagatgcaggatgaggaagagctcacctagcagacaggcgcagataaacggattctaggtggaagtggcaccttcatgttgggggaagacagcgggagtgagagtggtgctctaaggaaacgtatatggt

SEQ ID NO: 530589 - DNA, 476 bp, Homo sapiens
ctaatttcttcctgccccccaaacagctcctttgtacaccccttggtgcaggtttgcacacgcctatagcacagtccactgggaggacagaccctagtcctgggaacaggctcagggcccttggggcagggaattccagatctcagatacctgaagtgtgatctagaatggtgagcttgggccccaggtgggcatatcccctcacctcgargggggcacacctcaccttgtagggagcggtggggctggaggaaggcataggggatctctatataatagagttcagagcaggagcccagtttcctgggaatatgggctcccttgcctctgttcctatcagcctttcccaccaaggacctctggccagcccatggctccccagcagccatatcacagaggctgtagccaagtgtcctgcctgaccagctgaggtcacttcagtctttgcctccagccacagccagcttctgctggcc

SEQ ID NO: 530590 - DNA, 484 bp, Homo sapiens
ctggtaagtggcagaggaagsggtgatttctttgcctccatgaccacaggctgcaggagcaggcggagggaaaggggattttcatctgctttggagaaaataatctttttgtgggggaccaactgcttcagaagtgaaaatgggctgttcacaggcttcattccacagggctgagaagaaaaattgaatactgatgagaaagaagatggatagaagagagagacatgcaactgggactctaacagaaatgccattctccctgggaagggactagcccagtcagcagccacctcactccatgagttggttctgaggcaccctctgtgccaggcagctcgggacacaaggtgaattagatccaacctcacagccatgtgaggcagacagagtgacacagactctgtcaccagaagagcaagcatttgaacgggctgtcagatggagagcccaagcactttctgctctaggttccctccctctgctg

SEQ ID NO: 530591 - DNA, 484 bp, Homo sapiens
ctggtaagtggcagaggaaggggtgatttctttgcctccatgaccacaggctgcaggagcaggsggagggaaaggggattttcatctgctttggagaaaataatctttttgtgggggaccaactgcttcagaagtgaaaatgggctgttcacaggcttcattccacagggctgagaagaaaaattgaatactgatgagaaagaagatggatagaagagagagacatgcaactgggactctaacagaaatgccattctccctgggaagggactagcccagtcagcagccacctcactccatgagttggttctgaggcaccctctgtgccaggcagctcgggacacaaggtgaattagatccaacctcacagccatgtgaggcagacagagtgacacagactctgtcaccagaagagcaagcatttgaacgggctgtcagatggagagcccaagcactttctgctctaggttccctccctctgctg

SEQ ID NO: 530592 - DNA, 481 bp, Homo sapiens
ttataaattaaactttaccaaaggtatgcaagcataagaaaaacatagtacatacagagttcggtactagccgaggtttcaggcatccactggaggtcttggaacgtctcctccgtggttaaggcggggactaacgcacccataatttgcgccatattgcacaaaatgcttccctccatggcagctagagttctggatgggaattaggtaccaccaattaggtgcactcatggacaatttggaaagtggaaatraggcagaggactgctgttcttgctgcttttgattgctgcaaatatcagcagatgggcaggcaggatattggaaacactgaggtttcctattgtaatgtccagtctccagcttcatgggggtcaagagccaatcttcacagaagtagaagccaagcccacattccaatgtcctgtcgttgcttttccaggtgtcacacaacacttgcagtgggggcagcagcaacttc

SEQ ID NO: 530593 - DNA, 633 bp, Homo sapiens
tctaattttggtttttccattatagtcagaagcagaagtccttggtaaacatttttttttccttttcacatcaggaggttcttcttgtttctatgccatcagtggtatggaggggcactaagttgagtaaaataatcatactaagtgattagtartttatgttcccctcttcataagatttttatttttaaaagaagagtttgttaaccccaaagagttgaacttgaatgtatatgcctttagcaaatatgggttgaacaaggagaatctgttccatgaataatcagggttaggaaaatgcaatgggaaatattctggcttatttggctttctcaattcaactactgaataaatttaatcaatagtgtaagatcagatttaatttctgcaactcctaaaaatccagaccacatttattcattgtctttgttgagaacaatcaacagttaaatacttagaaaacatttacgacatctaagtttacactattatagtgagaaatattttcctgttttgcggaggggcaaatgaaagcctgaaaattcttagtccaaataattgataatacaaacagaaaatcaggacccttattcctggactgcttttgttggcctcagagcccctccttgttga

SEQ ID NO: 530594 - DNA, 581 bp, Homo sapiens
tagaaataaaaaacattgtagcagaaacaagaatgccttcaaaaagctcatcaataggacagagtggaggaaagaatcagctggcttgaggaagtttcaatagaaacatccaaaactgaaatgcaaaaaaaaaaaaaaagggaataaaaaaaatcacaaagcatccaagaactgtggaacaattacaaaaagtataaatacgtatagtgtgtgagttccagaaagaaaagaaasagaataaatattttagataataatgaataagaatatcccaaaattgataatagacaacaaaccactgatccaggaagtttagagcacaccaaacatgatatacctaggcatatcatattcattatacctaggcatatcatattcaaactatagaaagtcaaggacagataaaaatcttgaaagaatccataagggaaggatgagggaaaaaacaaccttatctatagaagaggcttgttggaaaccatgcaagcaaaaagaaaatggagagaaatttagaataaagcattgaaagaaaaaaaaccaacatcaacatagaatcctgaatagagcaaatattttcttca

SEQ ID NO: 530595 - DNA, 536 bp, Homo sapiens
gcatcttctcaagactagcatgaaacacttcaaatgcataggaaaaagccatagagtggtacagttggaaagaatcttataaaagattcctgtgaattttttctctttgaggaaaaaaaaagactcacagaggacagatttctcccaaggtcacacagtggtttactggtagaacgaccacttcccagtctatcactctgccctctaggccgagtgaatgacaccattattgttttctattatagagttcatgaaagcaacactggacttatatatacatgcatcagaataaagggattttagggtttgaaaaaagccttataaatcaccaagcctggtctgctgggtgggtgatcaattgtccaggtttgcctggaackgaggggctgttcaacacacggaacaggagagccctgggccaacagattagttggtcaccaagcctacccccaaatgacacttaaatttattctccaaccttcagcatcctaacatgaatctctttagcactagagcatttatgacattctcattta

SEQ ID NO: 530596 - DNA, 612 bp, Homo sapiens
tgcctgaacggactaagacagyagcagaactgagtttagaacccaggtgtagagaaagcccagtccagggctcttccttcgtggtgaacaccagtatagtcttatttattgtaacataggggcctctgagactgctcagaaactcacactgcaattttctcaccctacacatcagaaaaaatggcatcctttcatctactgtttactttgtctgaagattgataaaatgtttccatacccgtaacaaaatgagcttgcttctcatgagattaaatctgttatttacccatagtttaaacctgggcacagcaggaggtgcccttgccctctggtgtcctcctaggaagggtgctacaacgcatagagacttttcagattcaggtgtttgcctgatgaatcagggattttcccagaaatctcagggtaagagctcttgttctttacattacgttcccaggcctgttgtaagtggcaatgtgcattaggtcatcttatcttcacaacatcaccaggaagtgaggactgtcattattcccatttaccattgaggaaacggaacccaggagagggtaaacggcacacccaaagtcacccagccagtgctgccaagcc

SEQ ID NO: 530597 - DNA, 599 bp, Homo sapiens
tcttggaccacttgaccatgctgtgtgatcctaaggacataacccaaaaggcaatctccaaactcacggtgtcgtcaccaattcaacatttctattttaatgtgggatcaacttgtcatggtcacaatgctgattatgacttccatccagttttccttctatacatgtccaaacatgtcaccaacatgaccccattgactcgggacttgtcaggggtgagatatgaaaggattcagatctgttttgttcctgcgtggggtcccaggtaagaagaactgagattataataagtgggttggtgaagcagcagaaacaaaatcctgtacttgtttccaaagcctctgggaaataacactggttttattattttcatttctcagaactacttccagcagcaagacagttaagagacacaytggatgaggcaacagcggggaagaaagggagctgatcttgaattggctgtgtactgacagattgtatgaatgaaagcaataaaaataagccccaaaatctgggttttgagtggaaaaatctcttgtgaaaggcagtttatttcaactgcgatgttatctttgtgtcgaagataagtcaggaaa

SEQ ID NO: 530598 - DNA, 593 bp, Homo sapiens
caagccactgagactaggtaacgcacaggaagaatgcttcgtgaagaaatccatcctccgaacaaatgtttcctaagtgtctaccacataccacacgttgttctaaagtggggataaaatggagaarctccctgttttcatggaacttaggttcacatggaggaaacagataacaaacaagttaataagtaaataacttagtttcagagggtgatatagaaaggtaacattgaaagcacctgagtattatatgagagctatgcgatgagcatggaagcacacatttgtagtcctacctacttgggaggctgaggtgggaggaacacttgagcccaggagttcaaggctgcaatgagctatgattgtgtcactgcactccagcctgggcaacagagcaagacaccatctctgaaaaagtataaaaaattaaaaagagttgtggatgtgttatgatagtttcaaactcatctttcctacaccatctgggtctctcttgcatttccgtcacgtgatcatatgaattgccatattggtctcaccttccaggaaggaaggctgatccactccactgtggtctttattaagcttgtgca

SEQ ID NO: 530599 - DNA, 653 bp, Homo sapiens
attcataaaactattgattgcttctctaattgttcctggatatgggattctttttctgaactaacagtgacttttgttgggtaggaaagacaaggcagtggtgtggagaggattaaaattcgtggcaattgacttggctgacattggaaagagagtgtccaaggagggacaggacgtgggaggttttaatgttgtagcccattcagaattaaaatgaagtgtcctagagccgaagcacctttctgattaaatggcatcaattcacagagatcrgactaagatggaagttgtgtgtgtgtgtgtgcgtgtgtgtgagtgtgtgtgtgtgcgtgcgcgcgtcggaacctccgttcaactcagagatgttgctggttaaccctgattttcgatgaggtacactttgttcccaaacacaccattctgcttcatggaacgttgtcagcaattatcaggtacaggtgtgtttatctccccccacagctttcttctgagtgtgtgactgatccggcacattttcttgtatgtcaagaccatcaaagttaacaggaaatggcatctgtggagagagggtgacaccagccctgagtgacatgtattacgagggcagattgaactcctgctacttcagcccattccaggttgacccgcccatg

SEQ ID NO: 530600 - DNA, 494 bp, Homo sapiens
ggagaaaggagaaaaaggaaagggcaagttagagagggaagtgatgagatggttgggctctgggtgtgagagatccacagtgctaacatttcattcccttggattggaagctgcagaccacgctagtggggtccctcctttgcgagtgagaaggtatgtatccaaggaactgtcttcagcttgaaggcctcttcacaagggagataaattcatcatgatgtattctggctctatgaaaaacagcttcagaaaaacacaagattgcaaaaaataaaaataaatagaaaccagtggaagctattctcaagcaayggtgactacttactattccctgaaaaaatgtaaaatgagcttaataacgatttcatctttattggcatttacttttacttaaatcgccttagaaatgtgataatgtcactgttccagaagttatcaagatggagggaaaataagtgatcattttaaacttataattggcgatataaatattt

SEQ ID NO: 530601 - DNA, 596 bp, Homo sapiens
ttctaattattgtgttaaatactaggaaatggcagattcatgattatcgtttgtgtagaaaacgtgatttatgactttattttcagccgcttatacttcttagtgtttgcaagatgacagaaaaggcagtgccatcgtgcagagacaggtttgtcttccttagggcactgcgataagtccctaaatgtcacttgggtcatagatctgatctttattttgcctaaacctcctatatcctttcggtgatcgcccttagttcctgcccgggcaagcacaccacaccgaggagcatcgaagcgaaccctcgggctgctcgcctcccgcggctgggctctgggagcgcggctcgggtmtggaagtggagcgggctttggcgcctgggtggccctaaacctactccgagcggccacggcggcctcttgccagggacccccgggcgggggagcagagccaggcggggagcgggtttgccttcgggggcccaggggaccctgagaagtctggccgtgcccgggcggtgagcgcggaggcggcccgccctgtgtccccgcggggcggagccgggttcggggccgcgctctgggccggcgggcccg

SEQ ID NO: 530602 - DNA, 600 bp, Homo sapiens
agcagttcatagaaattaaccacacagataaaggacaaagtggccgcagtttacagaaaagtaaggccagacattctactgtatccagggcctttgttatttctacagagaaaacagtgtgctcatgacacatttatacttatcatgcattatttgtctaaaatggaaaaaaaatgagcgtgctcactgtgcctttctaaaggaatatgtgatgatttcagtgtctgttatctctttttgggccctcttcctcatccattttttccctcatttcttccctaactgccctttcctctgtgattcctttttcaaggctgaagaactgttatccctctgcagtacatgggggtttgagctcacgtcaatgtgcctgacctaagggcaaatggagctaagcaggagggagaattagacacttgccacggcttggagacagggtctactgctctctgctgaaccagaggaaagaacacactggctcctgaaccttcgcaggaagacaaggcgagggctgctrggtgcccgtcgctgctcacagcacagaacgtcccactcctcagactctttgtccccgtcctaagactgtccttcacttggtcc

SEQ ID NO: 530603 - DNA, 584 bp, Homo sapiens
catccctggtagtaatgttgacactgtatatatcaagtatatctgcactgatgtgagaggtagttgtacagctaattcaaactgcaggaagctgtctgatctgcatgcgtaaatactctgaaagccaggctgtacttaagcatcagccaggattcaggtcagacctttgccaagattaaaacaggtccataaactgactcttgaatagagaatttcttaggaaggataattttaggatcatttctcttcagcttatagacaaaccttgttcctaatttgcatttattattcaaatctgtgtttccttttgtatttgtacgatgtaactttgtttagaggctatagcttctactgaatttaattactttgcttccaggctttaaattgagggcagcttctattaatcgttaattactttcttcagccatttacgcagtaaaggtacagttactaatygagggtatgttctatacaatggcaacaggctccttcagtctcaatatttacctttctgtggggactgattatttccctaatcttatcttttgctaaacataaaagtagacatttcattgacatattgg

SEQ ID NO: 530604 - DNA, 402 bp, Homo sapiens
tgggaattgaatgagtcgggaatggccaaaggaaagccttgtcacagactgcggggcctacaggcaggacctggcaatgggcatcatctggctaaagacaagtcgtggcctcggcctggggaacagctgccacggcctagttgcccctggggtcagttcaggagagtgcgcaacccaactagggtgacaaagccaacacctgcagctgcattacacaatgctccctccctccrctcactgccctccattaaccatttagtagaaatcactctggaacattcagctggcacaagtccatcattctgacaactcatctcctcagttctagttgaataatgtgaacattggagggtttagtttctcctctctcttccacaagcaatgtgcaattttgtgtaaact

SEQ ID NO: 530605 - DNA, 488 bp, Homo sapiens
tataagctaagtgattttactccttagttctttattcataaggattttccctgcttcatggaaataaacagtgttgccaccatggtttgaggtctcaatgtagcaaatttagctttcatgttgaccactctgctactaattgaactaccaaatgaagacaagcagccataccagttagatatattcaaaatcaaagatgctatttattataagtctcataagagatggttatcaaaagcacttgcatgccaatgttttcttgtgccatttctttctrcaataaatctatttggcttctgtttcaccttagctgtcatagacatgtcgtttaggtatcatattgtcattactaactttttgtttattaaggcataagacctaagaaactagacattaatctgatgtgattgttctgttatagttagcctgtactccctttttttgttgtttgtacttcccctttattttgagtacatatatgtgtcatt

SEQ ID NO: 530606 - DNA, 636 bp, Homo sapiens
aaggtagatggctggcaaagtaacggaggcagaagaggctttatgaaaaagtgaaaaagttcatgtacttgtatcagccatctagaccatttcagtcagaagaatttctgyaaatcttataagaacagattctttcattttcatttcagttccaaaatgaaatcttgaaatgtacaaacttctcaaaaatgattcacagaaacgtaattatccagatacagaggttttattcagggacattcagttttctctttgccaatctcacttcatcttcataaatgtattttgatggtagaatgatggctttcttcatagcaaacctaaagaagagaggtattttaccaaaaataatatatatataaatgaacgtgctgttgttttatcaatagaaatggttatacaagtgaatatccatttacaatactcagcatagcaaacacaagaaaagtaatttactctttattctataaaatatttttatcttataattatttgccttgataagttatatcatttacttttggtgttcaaggacacatttacaaactggtaagaagagtggcttatttggttataaatattataatagtatttttactttcagcaagtcttattgttaaatattatagaattcta

SEQ ID NO: 530607 - DNA, 483 bp, Homo sapiens
tttcttgttagcacctcttaatatgtattatttatttacccaaatagaacacaactccatgagggaaattagtttcttatgttttgttcactgttttataccagtgtttagtacagtatatgaaacatagaaagtagatgctcagtaaatattcatttaacatttttcctagatatgggaagcattttttttaaaatcatgggattttagagatatggaaatcttagatttcctgcttccarcaatcttattttacagagtgaatactgaagaccaaagatgtcgtgtcctttccagagtcaagtagttaattaaagtcagaatttggagtagaagttgggatttttaaaattattattgaaatgattatatcctttacatctcattattaccactatgtgaattataaatttgagagagaaaataaatttaagatatataagcatataaaagtagtagtcctgagaaattataaaatctgag

SEQ ID NO: 530608 - DNA, 682 bp, Homo sapiens
ctggtggcactatctcctcttcctaatctaatattcattttcacaggactcttcagcacatgcaattcttttgctaccatggcactttagccacaaccaccaggccagcccaatcgatctcagatgaatgcaacaatgagctgtcttcattcttttttttgtgtgtgtgtgttgctaagtcttgctagaaaaattggtgtagttctgcagatttgtgttactgtaaattcatagatgttaaactgartataattcatagtgccatgcagcaattctttactgctttctagtcaactgcttttacagacacgattcactaggcttgtgtgaccttggcaaaccctttaaactctctgaacctcagtttcttaatctctaaaatgagaacaatagtacttacattaaaagattgttttatgaattaaaaaggcaatttatgtggagcaatttttctactccctggcacatagtactcaattaatgctcgcctttattttaattgcaaatcctaaactttgttctttttcttaagcctttcctttaacttgagtctgcttttcttcgccactgccttctactctgaacactgtcttgacttcatgaaaaagagaggccaacatttatggatcccctagtttcctttcatctccaaatataccatgaactacatgcatttttgcac

SEQ ID NO: 530609 - DNA, 682 bp, Homo sapiens
ctggtggcactatctcctcttcctaatctaatattcattttcacaggactcttcagcacatgcaattcttttgctaccatggcactttagccacaaccaccaggccagcccaatcgatctcagatgaatgcaacaatgagctgtcttcattcttttttttgtgtgtgtgtgttgctaagtcttgctagaaaaattggtgtagttctgcagatttgtgttactgtaaattcatagatgttaaactgagtataattcatagtgccatgcagyaattctttactgctttctagtcaactgcttttacagacacgattcactaggcttgtgtgaccttggcaaaccctttaaactctctgaacctcagtttcttaatctctaaaatgagaacaatagtacttacattaaaagattgttttatgaattaaaaaggcaatttatgtggagcaatttttctactccctggcacatagtactcaattaatgctcgcctttattttaattgcaaatcctaaactttgttctttttcttaagcctttcctttaacttgagtctgcttttcttcgccactgccttctactctgaacactgtcttgacttcatgaaaaagagaggccaacatttatggatcccctagtttcctttcatctccaaatataccatgaactacatgcatttttgcac

SEQ ID NO: 530610 - DNA, 541 bp, Homo sapiens
tggctgcctctgtccccactttctcacccatgtcaccagcatttagcaaatgcctagtgcacagaaagtgctcaaaaaatgtttattgtattttttaaaacataataaaaactaagttactcattacttggtgcaccacgttttctgttaggtgatagaccaccatagaaataaatccaactcaaattgaaaggctaaaatggaaaaagaggaggtaaaaagaatagacaaggaagaattcacaacaattgtcaccctgagaaggaatgagaaattctgagayccttccttgtcagggggttaaagaactgtcagagatggggtagaagcaactgcaaatagttggcctccttattaatccttcaggggaagaaaacctgttctaagtacaaggactaacagctgcagttctaccagcacattccacagaagttacaaggaaactgatgagaattcaaatactctgtgataacagtgggacgaagcttccaaaggaaaacactaggaaaaaagatttgcagacttttctcccttagaaaag

SEQ ID NO: 530611 - DNA, 589 bp, Homo sapiens
aggctagagctgcctgtagggaggtggggagccctgggggatgggtgtctaggccatgctctgccacagctccacatgcacaaaagctcctaggctccatgccggtgaagccctgtctctgccaactctctttgaagatccccctgccagctcaaatgtccatggagaatgtgaagttctatrtacctaggatcccagaggtccacagtgagagtggcctgtccctccatcccttcacttatcccttccccaggaggcatccaggtctgggaactagccctgtcatgcaagtatcctgtgcagggtttccagcttcctccctcttcagccttgttgtctgcatcacctctgtaatgactctcagcattttctctctgaagatgggctcaaaatacgttggtgtactcaatattttggtgtctctcagtgggagcagtgcttcctggctgtgtctagttggccatcttgttatggtaacaatttcttttggagattttttggagtccacttgtggcagtcaaaagataactagacagtggtggcagatgacaactgggtccacagattgcacaacgaagagtagcctgtg

SEQ ID NO: 530612 - DNA, 589 bp, Homo sapiens
aggctagagctgcctgtagggaggtggggagccctgggggatgggtgtctaggccatgctctgccacagctccacatgcacaaaagctcctaggctccatgccggtgaagccctgtctctgccaactctctttgaagatccccctgccagctcaaatgtccatggagaatgtgaagttctatgtacctaggatcccagaggtccacagtgagagtggcctgtccctccatcccttcacttatcccttccccaggaggcatycaggtctgggaactagccctgtcatgcaagtatcctgtgcagggtttccagcttcctccctcttcagccttgttgtctgcatcacctctgtaatgactctcagcattttctctctgaagatgggctcaaaatacgttggtgtactcaatattttggtgtctctcagtgggagcagtgcttcctggctgtgtctagttggccatcttgttatggtaacaatttcttttggagattttttggagtccacttgtggcagtcaaaagataactagacagtggtggcagatgacaactgggtccacagattgcacaacgaagagtagcctgtg

SEQ ID NO: 530613 - DNA, 523 bp, Homo sapiens
tgcctgtagggaggtggggagccctgggggatgggtgtctaggccatgctctgccacagctccacatgcacaaaagctcctaggctccatgccggtgaagccctgtctctgccaactctctttgaagatccccctgccagctcaaatgtccatggagaatgtgaagttctatgtacctaggatcccagaggtccacagtgagagtggcctgtccctccatcccttcacttatcccttccccaggaggcatccaggtctgggaactagccctgtcatgcaagtatcctgtgcagggtttccagcttcctccctcttcagccttgttgtctgcatcacctctgtaatgactctcagcattttctctctgaagatgggctcaaaatacrttggtgtactcaatattttggtgtctctcagtgggagcagtgcttcctggctgtgtctagttggccatcttgttatggtaacaatttcttttggagattttttggagtccacttgtggcagtcaaaagataactaga

SEQ ID NO: 530614 - DNA, 618 bp, Homo sapiens
ccctcatcatacagatgaggaaaatgagtcctggaaaaattatgatgacagaactggtgaactctgacacttcgggttttgaccttggctaaattcttagattttgcccaagaacacactctaaggtttctcgctgtagtttgactgttttgttctgaggattttggaaatagtatctcctgacaggatttctgtgttttttgctgctcaactggctctgaaatttctgaacatgccttatgcagtttcaacattcttctgtaatctctgctgaaacatttttgtacctatattttatatcgatactttcagtgtgtgtgtgwgtgtgtgtatgtatgttctaggacccacttgagaaagattacccagtcaaagttcatataaatgctgcatattgttaggtattgaataagtatttggtatctctttatgttatgaggaagtaaacagtgtatctgcgtttaaatatgaagacagggttacagtggaagcatgatgctatcatctagtgacactcatcttgcagtatcatatttttactagttaagtgttctttattttaagtaggaggtacaggattctgaagcatagtgtaaaagattggaaaaggtttcacag

SEQ ID NO: 530615 - DNA, 618 bp, Homo sapiens
ccctcatcatacagatgaggaaaatgagtcctggaaaaattatgatgacagaactggtgaactctgacacttcgggttttgaccttggctaaattcttagattttgcccaagaacacactctaaggtttctcgctgtagtttgactgttttgttctgaggattttggaaatagtatctcctgacaggatttctgtgttttttgctgctcaactggctctgaaatttctgaacatgccttatgcagtttcaacattcttctgtaatctctgctgaaacatttttgtacctatattttatatcgatactttcagtgtgtgtgtgtgtgtgtgtatgtatgttctaggacccacttgagaaagattacccagtcaaagttcatataaatgctgcatattgttaggtattgaataagtatttggtatctctttatgttatgargaagtaaacagtgtatctgcgtttaaatatgaagacagggttacagtggaagcatgatgctatcatctagtgacactcatcttgcagtatcatatttttactagttaagtgttctttattttaagtaggaggtacaggattctgaagcatagtgtaaaagattggaaaaggtttcacag

SEQ ID NO: 530616 - DNA, 618 bp, Homo sapiens
ccctcatcatacagatgaggaaaatgagtcctggaaaaattatgatgacagaactggtgaactctgacacttcgggttttgaccttggctaaattcttagattttgcccaagaacacactctaaggtttctcgctgtagtttgactgttttgttctgaggattttggaaatagtatctcctgacaggatttctgtgttttttgctgctcaactggctctgaaatttctgaacatgccttatgcagtttcaacattcttctgtaatctctgctgaaacatttttgtacctatattttatatcgatactttcagtgtgtgtgtgtgtgtgtgtatgtatgttctaggacccacttgagaaagattacccagtcaaagttcatataaatgctgcatattgttaggtattgaataagtatttggtatctctttatgttatgaggaagtaaacagtgtatctgcgtttaaatatgaagacagggttacagtggargcatgatgctatcatctagtgacactcatcttgcagtatcatatttttactagttaagtgttctttattttaagtaggaggtacaggattctgaagcatagtgtaaaagattggaaaaggtttcacag

SEQ ID NO: 530617 - DNA, 614 bp, Homo sapiens
ctggggctacagagtgagactctgtctcaaataaataaataaataaataaataaataaataaataaatgagtctggcatctctcttgttccctctcttaccatgtcatacaccagctcccactttgccttctgcaatgattgtaagcttcctgtggcctcagcaaaagctgatactgtcattacactttttgtacagcctgcagaactgtgaaccaaataaacctcttttcyttataaattatccagcctcacatatttctttatagcaacacaaaatcgactaacacaccagcagacatggtgttcttgttctcaaagccaaggcgggcagatcacctgaggtcaggagttcaagaccagcttggccaacatggcaaaaccccatctctagtaaaaattaaaaaattagccgggtgtggtggtgtgcacctgtaatcgcagctactctggaggctgaggcaggagaattgcttgaacccagcaggtggaggttgctgtgagctgagattgcaccactgcactccagcctgggtgacagagcaagactctatctcaaaaaaaaaattattataatcacaaagtttaatttacagatatgacctgtttgtgcagg

SEQ ID NO: 530618 - DNA, 600 bp, Homo sapiens
atttatttcttgcttgctagagaaagggaggcagtcrctatcatttatgtttgacagagactcaggctgggagaatgggaaagctttatagtgaaaaggggcaaggctttggggtaggtggctatgggcatggagaggtgcaggtaggctaaagagaagcaaggcatctgatgggataggtttggagagagtatttggctttctttaattagtactaaactagaagcaggggcaatcttagagaagttggcagtcattgaccaacctctgattgttttcggcaaattgctactgaatttgtggcttgcattcctgaactggctgctgcagagattgtggtttgccttcccaagctggttgctgcagtggttgtgggtcagagttccattgtcgtacgtggtttggccactgtctgttttaatattcagtctctattactaaaaggtatacaaatggctaggcttctcacttcagttcttcatgtacaagctccttttagaggtttctgcactaaactattgtaaaaaaaaaaaagaaaaaaagaaggccaactccatttatccaatgtcaaccttgacgttaagaatgatgaatgtggca

SEQ ID NO: 530619 - DNA, 578 bp, Homo sapiens
aaggagcacagtgactagaggaaactagaaacaaaatagacattgttcactttggttgctaaatttaatatgtccctattgcactttttgttttgggaaatttttccaacattaagaaaagcccttttaaagaagagtgttaaaacattggttacatgagaaccaaggaggattcaccttacaaggtgaaattatgtgttttattcaattttcacactactataaagaaatacctgagactgtgtaatttataaatgaaagaggagttttttgttttgttttgttttcactcaaaattcttcagtttttacaaaactaacagggtggagtggggaggctggggggcaggcagcctcaggagtagggctggtgagaggcgctatgcttctgtctccacctgagactggctccctgccgtgttgctcttscactccgccttcatctctgtgtcagtgggatggtctcctgagcaagcctctgccttggccttgttctcctcctcagccagcctctcaaacattttggcatagaacttcttccgggcaagctgcctgtggatccgctgctgacacacagcc

SEQ ID NO: 530620 - DNA, 483 bp, Homo sapiens
tggtgtaagccactgagcctggccagaaaaatgttatttatattctaatggtaccaacttcaatacgctttatcactctgaaccacagttttttaatttaataaggaaaattgggtagaaaaatatattaaaatatatattaatctatcaaatactacacaaagacaagtctttaaatgggttgggcaatatgctgaagttgawcaccagtaaaacgttgagtaacccctccatagaattcccatagaaatctcttcgttaccataaacctaagatcattgctctctctcactaccacagggatgtgattttagcatttgtatccaatttaccggtagcctaagccatcagtgagatatttggcattctgtatctaagcctgttccctcaccaccacacttcttcatttctcttggttctattctatctgtagaagacactgaaaagtgacgagatgtgctgttgaaaatctgtttcaaaatc

SEQ ID NO: 530621 - DNA, 483 bp, Homo sapiens
tggtgtaagccactgagcctggccagaaaaatgttatttatattctaatggtaccaacttcaatacgctttatcactctgaaccacagttttttaatttaataaggaaaattgggtagaaaaatatattaaaatatatattaatctatcaaatactacacaaagacaagtctttaaatgggttgggcaatatgctgaagttgatcaccagtaaaacgttgagtaacccctccatagaattcccatagaaatctcttcsttaccataaacctaagatcattgctctctctcactaccacagggatgtgattttagcatttgtatccaatttaccggtagcctaagccatcagtgagatatttggcattctgtatctaagcctgttccctcaccaccacacttcttcatttctcttggttctattctatctgtagaagacactgaaaagtgacgagatgtgctgttgaaaatctgtttcaaaatc

SEQ ID NO: 530622 - DNA, 483 bp, Homo sapiens
tggtgtaagccactgagcctggccagaaaaatgttatttatattctaatggtaccaacttcaatacgctttatcactctgaaccacagttttttaatttaataaggaaaattgggtagaaaaatatattaaaatatatattaatctatcaaatactacacaaagacaagtctttaaatgggttgggcaatatgctgaagttgatcaccagtaaaacgttgagtaacccctccatagaattcccatagaaatctcttcgttaccataaacctaagatcattgctctctctcactaccacagggatgtgattttagcatttgtatccaatttacsggtagcctaagccatcagtgagatatttggcattctgtatctaagcctgttccctcaccaccacacttcttcatttctcttggttctattctatctgtagaagacactgaaaagtgacgagatgtgctgttgaaaatctgtttcaaaatc

SEQ ID NO: 530623 - DNA, 418 bp, Homo sapiens
tagatagtgtcagaattgaattcaataataggccaccctagtggtgtctgctggagaattactttgcatgcggggaaaaatccatacatattttggtgaccagaggtgaagtaatgtattgagtggtgagtgtgtgagactaagaaaaacagtttggtttttttatatctcaaatatattatatataaatttaaagacaaattgaaaaattgaatcattttaaaatgtctaaaatttaaagtacattgagtaacmcatgatagtaatttataatgttcatatttgatgaaaatagtttccagtccattatttttttctgtttacattatagaattatatttaggttaaattttatacatataaaaattatttccttgagacatgttccatggtttatattctgaaatttttttctatt

SEQ ID NO: 530624 - DNA, 601 bp, Homo sapiens
tggtttatattctgaaatttttttctattccttcttagagctgataagcatctttgttgattatctgcttgtgttactccatcaggcttccatagcccatctgattccaccagattattcaaatgagctccttatcacaccgtagctcaagccctcagatatgttcttctctcctatacagacttgccacattttttcaggtgtgtaggcatttgctcatgtcttaaatgttcatctttatccatctgcctattcaaatccatctacacaatgtrttctaggaagcatatcttgattatactatgcatcattgacttcctcatttagatgagcctctataacatttgtaggctgtattacaaaattcaatgacaaatatatgtatattatcttgcatttgtttcttgtgtttcaagtgtattagtcttgtcttctcagatagatggttaaggccatgatttatattttgatggttttcacagcaccatctttggtaaaatgactaccgaaaacatatccttcatcaccatagatgctcagtgccactggattaatctagagctaaggatacttgtttttatttgaatctcaaaggttgggt

SEQ ID NO: 530625 - DNA, 362 bp, Homo sapiens
gaatgctttaggagtaggaagtatagatctgcctaacatacacttagaaaaaattaggcagatcttttaaatgcttacattttagtaaggaaaacaattgatcattagggtgaaygctgcatcattattttacaatctacaaagtaacaggaagtgtacagatttggcaaaccacagaattaaccattgtatctgacttacattactcatttgctcatggatgagattctaatagagatgcgtttggcattttcacaaatgccctgcgtttcaaagagtagatcagctgattttgcgctgaaacccttaaacttaatggggacaatgtatctcacctcaaatcttcaatcagatgtgctgat

SEQ ID NO: 530626 - DNA, 559 bp, Homo sapiens
gcttacaggcttaaaagggaatcagaggtgtcggttcaatcaatctgcccccctgtaagcttcatgaggactataactctgtctccctgatgcacgtgaacctagcaccggcaccctggagcagagcaagtgctcaatactgatcatgtttgcttaattgataagccattagtgtgcgctctaataaactgctttagaagaatgctttaggagtaggaagtatagatctgcctaacatacacttagaaaaaattaggcagatcttttaaatgcttacattttagtaaggaaaacaattgatcattagggtgaatgctgcatcattattttacaatctacaaagtaacaggaagtgtacagatttggcaaaccacagaattaaccattgtatctgacttacattactcatttgctcatggatgasattctaatagagatgcgtttggcattttcacaaatgccctgcgtttcaaagagtagatcagctgattttgcgctgaaacccttaaacttaatggggacaatgtatctcacctcaaatcttcaatcagatgtgctg

SEQ ID NO: 530627 - DNA, 362 bp, Homo sapiens
gaatgctttaggagtaggaagtatagatctgcctaacatacacttagaaaaaattaggcagatcttttaaatgcttacattttagtaaggaaaacaattgatcattagggtgaatgctgcatcattattttacaatctacaaagtaacaggaagtgtacagatttggcaaaccacagaattaaccattgtatctgacttacattactcatttgctcatggatgagattctaayagagatgcgtttggcattttcacaaatgccctgcgtttcaaagagtagatcagctgattttgcgctgaaacccttaaacttaatggggacaatgtatctcacctcaaatcttcaatcagatgtgctgat

SEQ ID NO: 530628 - DNA, 362 bp, Homo sapiens
gaatgctttaggagtaggaagtatagatctgcctaacatacacttagaaaaaattaggcagatcttttaaatgcttacattttagtaaggaaaacaattgatcattagggtgaatgctgcatcattattttacaatctacaaagtaacaggaagtgtacagatttggcaaaccacagaattaaccattgtatctgacttacattactcatttgctcatggatgagattctaatagagatgcgtttggcattttcacaaatgcyctgcgtttcaaagagtagatcagctgattttgcgctgaaacccttaaacttaatggggacaatgtatctcacctcaaatcttcaatcagatgtgctgat

SEQ ID NO: 530629 - DNA, 559 bp, Homo sapiens
gcttacaggcttaaaagggaatcagaggtgtcggttcaatcaatctgcccccctgtaagcttcatgaggactataactctgtctccctgatgcacgtgaacctagcaccggcaccctggagcagagcaagtgctcaatactgatcatgtttgcttaattgataagccattagtgtgcgctctaataaactgctttagaagaatgctttaggagtaggaagtatagatctgcctaacatacacttagaaaaaattaggcagatcttttaaatgcttacattttagtaaggaaaacaattgatcattagggtgaatgctgcatcattattttacaatctacaaagtaacaggaagtgtacagatttggcaaaccacagaattaaccattgtatctgacttacattactcatttgctcatggatgagattctaatagagatgcgtttggcattttcacaaatgccctgcgtttcaaagagtagatcagctgattttgcgctgaaacccttaarcttaatggggacaatgtatctcacctcaaatcttcaatcagatgtgctg

SEQ ID NO: 530630 - DNA, 590 bp, Homo sapiens
acgatgagctcctcctgtccctaaaatatgaggccccttagccatccagcccccatccagttattgagaaacaagtattacctgtttgaaatcataaacgggtggtttatgatgcagcaaaaactaacttacatacaacatgacctcatgtgggtttcttaatttctcwcagtctcagctttctcatctataggatggagataaggcaatcaacctcgctatttagaggattaaatgagaaaatatatgcaaagtgcttggcatagcataaatactcaacacatatggtaattttttaaaaaccctctatattagtcccttttaattaaaattttaattaaaacaaaagaaaaacaaaacaaaacaaaaacctctgctgggtggacgaggggcagccctcaggctagatgcactgatttagtacttttaatagtggcaggagtcagacaagcccctaggcagatagtggcatgtccccaacgaaatccaactttcaaaccgaaggcagtttaaagcccgaaagctaagctacaagtcttggataaatccatggactgagctgagaacatctcttcctgttggtgcacttt

SEQ ID NO: 530631 - DNA, 590 bp, Homo sapiens
acgatgagctcctcctgtccctaaaatatgaggccccttagccatccagcccccatccagttattgagaaacaagtattacctgtttgaaatcataaacgggtggtttatgatgcagcaaaaactaacttacatacaacatgacctcatgtgggtttcttaatttctctcagtctcagctttctcatctataggatggagataaggcaatcaacctcgctatttagaggattaaatgagaaaatatatgcaaagtgcttggcatagcataaatactcaacacatatggtaattttttaaaaaccctctatattagtcccttttaattaaaattttaattaaaacaaaagaaaaacaaaacaaaacaaaaacctctgctgggtggaygaggggcagccctcaggctagatgcactgatttagtacttttaatagtggcaggagtcagacaagcccctaggcagatagtggcatgtccccaacgaaatccaactttcaaaccgaaggcagtttaaagcccgaaagctaagctacaagtcttggataaatccatggactgagctgagaacatctcttcctgttggtgcacttt

SEQ ID NO: 530632 - DNA, 590 bp, Homo sapiens
acgatgagctcctcctgtccctaaaatatgaggccccttagccatccagcccccatccagttattgagaaacaagtattacctgtttgaaatcataaacgggtggtttatgatgcagcaaaaactaacttacatacaacatgacctcatgtgggtttcttaatttctctcagtctcagctttctcatctataggatggagataaggcaatcaacctcgctatttagaggattaaatgagaaaatatatgcaaagtgcttggcatagcataaatactcaacacatatggtaattttttaaaaaccctctatattagtcccttttaattaaaattttaattaaaacaaaagaaaaacaaaacaaaacaaaaacctctgctgggtggacgaggggcagccctcaggctagatgcactgatttagtacttttaatagtggcaggagtcagacaagcccctaggcagatagtggcatgtccccaaygaaatccaactttcaaaccgaaggcagtttaaagcccgaaagctaagctacaagtcttggataaatccatggactgagctgagaacatctcttcctgttggtgcacttt

SEQ ID NO: 530633 - DNA, 611 bp, Homo sapiens
gctcctcctgtccctaaaatatgaggccccttagccatccagcccccatccagttattgagaaacaagtattacctgtttgaaatcataaacgggtggtttatgatgcagcaaaaactaacttacatacaacatgacctcatgtgggtttcttaatttctctcagtctcagctttctcatctataggatggagataaggcaatcaacctcgctatttagaggattaaatgagaaaatatatgcaaagtgcttggcatagcataaatactcaacacatatggtaattttttaaaaaccctctatattagtcccttttaattaaaattttaattaaaacaaaagaaaaacaaaacaaaacaaaaacctctgctgggtggacgaggggcagccctcaggctagatgcactgatttagtacttttaatagtggcaggagtcagacaagcccctaggcagatagtggcatgtccccaacgaaatccaactttcaaaccgaaggcagtttaaagcccgaaagctaagctacaagtcttggataaatccatggacygagctgagaacatctcttcctgttggtgcactttcctctgactgatccccacccttcactta

SEQ ID NO: 530634 - DNA, 406 bp, Homo sapiens
acagactaagaattttgcaaaaatcaaagcatagatataagttcacttctatccatctaaagaagcacaaaaaaagagctgttttaaaaggtcatgtcataggtgggtacagtcccattgtttagctgcctctctcaactctgacctgggacattgtggggatttgcctcattgcaatagttgcaattcctggtcccagttctcttgattctatccttgaagtcagaagtattagacagaaaaaaaatggagacttgaatttttttagagaaaacatgtgtggrtagatatttaactgattaatgtcctcttaattacttgaacattactagccaatacatgtgagcttttgcagacaaagggttgcagccatatcgtccagttcttgttggttacatgtcaacaa

SEQ ID NO: 530635 - DNA, 406 bp, Homo sapiens
acagactaagaattttgcaaaaatcaaagcatagatataagttcacttctatccatctaaagaagcacaaaaaaagagctgttttaaaaggtcatgtcataggtgggtacagtcccattgtttagctgcctctctcaactctgacctgggacattgtggggatttgcctcattgcaatagttgcaattcctggtcccagttctcttgattctatccttgaagtcagaagtattagacagaaaaaaaatggagacttgaatttttttagagaaaacatgtgtggatagatatttaactgattaatgtcctcttaattacttgaacattactagccaatacatgtgagcttttgcagacaaagggttgcagccatatcgtccarttcttgttggttacatgtcaacaa

SEQ ID NO: 530636 - DNA, 643 bp, Homo sapiens
gagggaggagaattagtcaggatcttttggtgtgtgtgagggtcagagacacagatgcaaactttattggctcactgaatcatgccttaggatggactctatgctggaatgaattctgtgtccaaacctaggaaaaacattgagtaagaaggatgggcaattgttcttctccaagcaagagactggagttcacctttgtgtccagagagttgtatactatsattacaggccccactggaagaagttcccccaaatcatacccttcttaatttttatttttctttcttctgcaatcatctgatgggttcttcctgtgtactgcacagacaaaatcaattcactgagaattgaattggttcaatttcagtggtattgcagtaaagaaagagtgtaatagatatgaggccggccttataggagatggagttattactcaaatcaatctccccaaaggctcagaagctaggacttttcaaggatagtttgatggacagggggatagggaatggggaatgattattggttggggatgcaaccttaggggtgtggaaaatgttcactgagtcagcctctgggccacaggactggttaagtcatgagttgtgggtttgggtggagttagccagtcctcagaaatgaaaaa

SEQ ID NO: 530637 - DNA, 580 bp, Homo sapiens
taagttctttgtagattctggatattaacccttacaagcactgatttttaactatgaaccaggctacctagagaaagcttacaatctttatttacccttatagctaggtatggacatgagactaagctaaggtcartgagctccaagcttcagggaaacctcctcaaaatgtagatggaccctagagctttgtcactttcctctgagtcctggaatttaaatgtaatggttggagttctagcagtcttctcttatcaggaggcaaagagccataccttagggatgttagagcagtgagctggaagcagcctctgtctttccattctgacaccatggctgccatggacaacctgcttacaatctgtttatgtgagagaagaatccatttccatcttgaatatttattttgggttttgcatgagaggcagccaaatttaatcctaactgatctaaagacaaagagaaagcacaagtacatcagtaattacaatagatataaataaaggagtaaatatatatacacattaaatacatattaaacataaacgttaaataaagacaggttggataaaaagcagtc

SEQ ID NO: 530638 - DNA, 580 bp, Homo sapiens
taagttctttgtagattctggatattaacccttacaagcactgatttttaactatgaaccaggctacctagagaaagcttacaatctttatttacccttatagctaggtatggacatgagactaagctaaggtcaatgagctccaagcttcagggaaacctcctcaaaatgtagatggaccctagagctttgtcactttcctctgagtcctggaatttaaatgtratggttggagttctagcagtcttctcttatcaggaggcaaagagccataccttagggatgttagagcagtgagctggaagcagcctctgtctttccattctgacaccatggctgccatggacaacctgcttacaatctgtttatgtgagagaagaatccatttccatcttgaatatttattttgggttttgcatgagaggcagccaaatttaatcctaactgatctaaagacaaagagaaagcacaagtacatcagtaattacaatagatataaataaaggagtaaatatatatacacattaaatacatattaaacataaacgttaaataaagacaggttggataaaaagcagtc

SEQ ID NO: 530639 - DNA, 580 bp, Homo sapiens
taagttctttgtagattctggatattaacccttacaagcactgatttttaactatgaaccaggctacctagagaaagcttacaatctttatttacccttatagctaggtatggacatgagactaagctaaggtcaatgagctccaagcttcagggaaacctcctcaaaatgtagatggaccctagagctttgtcactttcctctgagtcctggaatttaaatgtaatggttggagttctagcagtcttctcttatcaggaggcaaagagccataccttagggatgttagagcagtgagctggaagcagcctctgtctttccattctgacaccatggctgccatggacaacctgcttacaatctgtttaygtgagagaagaatccatttccatcttgaatatttattttgggttttgcatgagaggcagccaaatttaatcctaactgatctaaagacaaagagaaagcacaagtacatcagtaattacaatagatataaataaaggagtaaatatatatacacattaaatacatattaaacataaacgttaaataaagacaggttggataaaaagcagtc

SEQ ID NO: 530640 - DNA, 580 bp, Homo sapiens
taagttctttgtagattctggatattaacccttacaagcactgatttttaactatgaaccaggctacctagagaaagcttacaatctttatttacccttatagctaggtatggacatgagactaagctaaggtcaatgagctccaagcttcagggaaacctcctcaaaatgtagatggaccctagagctttgtcactttcctctgagtcctggaatttaaatgtaatggttggagttctagcagtcttctcttatcaggaggcaaagagccataccttagggatgttagagcagtgagctggaagcagcctctgtctttccattctgacaccatggctgccatggacaacctgcttacaatctgtttatgtgagagaagaatccatttccatcttgaatatttattttgggttttgcatsagaggcagccaaatttaatcctaactgatctaaagacaaagagaaagcacaagtacatcagtaattacaatagatataaataaaggagtaaatatatatacacattaaatacatattaaacataaacgttaaataaagacaggttggataaaaagcagtc

SEQ ID NO: 530641 - DNA, 571 bp, Homo sapiens
ttcggaaaaattctatacaatatattttcctctcttggaatttcagattgcacatcggcagcatattataggtttcgagaagtcctgcaaccttcttagttttaatagagccccccctttttttttccaaattagcagagactttgtctcctctccctcacctcctcagttaccaccaattaacattaagaaacccatgctgggctgaatacagtggctcactcctgtaatcctagcactttgggaggccacagcaggtggatctgttgagcccaggagtttgagaccagcctgggcaatgggcaaaatcccayctttatttaaaaaaaaaaattagccaggcataggggcacaaacctgtggtcccatctacatgagaggctgaggcaggaggatggcttgaacctgggaggtcgaggctgcagtgagccatgatcatactactgcactctagcctgggtgacagagtgggaccctgtttcaaaaataaaaataaaaataaaaacccttgctgtcctatgcaatgagggaacccttagagttctaaggagagatctgggaatcaaaagag

SEQ ID NO: 530642 - DNA, 595 bp, Homo sapiens
ctggtcagactccagtaatgttttctcagctacgccatgcatttttgatgggctaactttttgttctacttcagcaacatcctaaatatatccatggcttttcactactccactaataaaatctaagtcaaatttsttaaatgcaggacttcttaatctgtatcatatgttactctgaaatcatatttttcatccccataaatccacaccaatcaacaaaattcactagcccctcaacataccacatgtaatgttccatgcaagaaagccctcttctctactaactgatatcctacacttgctttctgccctagaggaagtttcatctcttctgttaggagaagttttcttctctataaactgccattaagttttcaaccactggatttccagtggggtcagaactatagaatcttaagcatggaatagaggttaaaagatctattttcttcttccactcttatccacactcacaatccttggccttgtctgacagatgaaaatagtgatggttagagagatgccatcctgactcttatactctggtagtgtctaggttttcttcaatactttgctcggtactttaattgcttct

SEQ ID NO: 530643 - DNA, 564 bp, Homo sapiens
acagaatgcaacagtttgagaggcacagacttcatgtttatatcctcttgattaaagtataaaaataagagatataaactaggtcaaaaatgggagagggagggtatcttcaaaattcaatctttcaaaaataacttcaattatctctaataatcctagagtaagaaggcygatataagaatatttgcatacacaagggtaccaagtaaatattgttcttactcttttacctccctgtatacagcatagtaccacgtgctcagaaattacttggcaattcttatattgtattaatcaaacatcaatacaatatttttggtaagcaatttcaagaagctagataaagttaaagaaaatatcctccctaaagttcttccaatacagcttttttttttttttttttttttgagacggagttttgctcttgttgctgaggctagagtgcaatggcatgatctcggctcactgcaacctccgcctcccaggctcaagcaattctcctgcctcatcctccatgtagctgggattacaggcatcacacccatctaatttttgtatttttag

SEQ ID NO: 530644 - DNA, 631 bp, Homo sapiens
tggggcggtatccgtttcctgtggctgctgtgacaaatgaccacaaacttagtggcttaaaacaacacacatttattctcttaaattctagaggccagaaactcaaaatgagtctcatggggctaacatcaaggtgttagcaggactgcattcctgcagcaggctcccaggagagtctgttttcctgtctctcaccttcccaaggccgtctgtgcctctgatcttggccccttcctctgccttcaaagcacataacttggatctctgcttctgcctccatctctgtcttctgctttcaaccttcttgcctctctcttataaagacccttctgattacactgagctcaggtataaatcatcccatctcaagatcctgaacgtaatcaccgtgattggctgaataatggccccaaagatgatatccacatcctaaccctggaacctatgagtgtgacgctatagggtaaaagggactttgcaggtgtgatgaagctgagcctggtgccacacctstctagctgtgtgacttcaggtgagttcctgaacctctctggggctcagcttcctcctctgtaaaatggtaaacacagcagtcccttccaccgattcgctgagaccattcttacaaagt

SEQ ID NO: 530645 - DNA, 582 bp, Homo sapiens
tcagtcaataatctgggtaaattactggcaatacggctggagaaaaaaaaaaggacaagatacagaagatactgtgaagataaaatcaaggggaccagaatgactgtaacaaatgagaagtgtcaacaatgacactaaagttctaatagtctgagcacaggaaaatggtagcattatcaacagaaagggggatgaactagtttgtgagaatatatagcaagtttagtatggggggaacagcagatcatgcagataaccaggcaactggaaatgttagaaaacagactgatactgaagttatcacatccagcagccatctacacagacctgaaacaagagataaaacaagtggccaaggttagtatctcaggggatatccatggttattaggggaaaagacagaaggaacagcgttaacaggagcatcgtgattgtccaacgttccacctgataagggaaaacagytgacagaagataggatgcttgagagttttaaatgatctagaacaacaagacttatatttagggtatggttaaaaccaagtgaaatagtaagtagaagcaaatacagtaagagcaaac

SEQ ID NO: 530646 - DNA, 332 bp, Homo sapiens
gtgagatcctgtctcaaaacaaaaacaaaaaacaaagaaattaacattacctttataattcttgcaactttcatgttcatgttaatttcccrttgtgtgcgcccccagcctgtttttttttttttttttttttaaattcatttaagtaaagccatcactggttctttccttctagattttctcataaaacattgaatataggtttggtataaagaagccactgttactgtttggacttgagagaagattaataaagtcacttttctttttttaaaccaaaacaaggtaggtaaaatgtttgaccttttgtaggcacaagattcatgctgacc

SEQ ID NO: 530647 - DNA, 332 bp, Homo sapiens
gtgagatcctgtctcaaaacaaaaacaaaaaacaaagaaattaacattacctttataattcttgcaactttcatgttcatgttaatttcccgttgtgtgcgcccccagcctgtttttttttktttttttttttaaattcatttaagtaaagccatcactggttctttccttctagattttctcataaaacattgaatataggtttggtataaagaagccactgttactgtttggacttgagagaagattaataaagtcacttttctttttttaaaccaaaacaaggtaggtaaaatgtttgaccttttgtaggcacaagattcatgctgacc

SEQ ID NO: 530648 - DNA, 628 bp, Homo sapiens
tgtctgactgtgtggatattttgtgtgtacctgtgtgtgcatatatgtgtaatggtgagcatcagtgattatatggagagaatagaaatatagggaactaatttatgcttaatggatgctattaaaactgtataatattatgctatttatgaaatagagtagtacaacaaaaggagagaaatcacagttttaaatatgttttcttttttttttggttttgatgtagttagcaatcactcctatccccccaacccacctttttctgtcatggtcactgaatgtttacctcttgtgcatttttggaaagcatgtaaaagaggatatgagcttgcattttttttctcttcaagatgacattttagtttgtataaatattacataacttaagttcaaactatgtgagtgaaagtatgtgtgctgttcatatttaatatgtttgtttttcttacctgtagttcatcagcaatgctgattcagcacgtgtgtgtgtgtgtgtgtgtgtgtgtgtgwgtgagagagagagacttattgaaattatatctctgatatctcttgaagccagccatttaaacgagtattactttcaatatatacagttacgctagtttttgttacaggtaaaagtttg

SEQ ID NO: 530649 - DNA, 308 bp, Homo sapiens
atcagtatgcaagagacataaaatattctaattagagtgtctatcaagcatttttcatgaagaaggaggagaagataaagctggaaaggcaggttagagctagattgtagagggcctggaaagaactgtaattggtaattggtggggagctataaacatgatctaggagaatgtgttygacaattggaggggtggtgtatagcactagttggcaagtatggaatgataaagtcaggattattgctaaagggttattgcagaggtctgagcatgtacttgttagaattattctggaaagtgtgtggggg

SEQ ID NO: 530650 - DNA, 308 bp, Homo sapiens
atcagtatgcaagagacataaaatattctaattagagtgtctatcaagcatttttcatgaagaaggaggagaagataaagctggaaaggcaggttagagctagattgtagagggcctggaaagaactgtaattggtaattggtggggagctataaacatgatctaggagaatgtgttcgacaattggaggggtggtgtatagcactagttggcaagtatggaatgataaagtcaggattattgctaaagggttattgcagaggtctgagcatgtacttgttagaawtattctggaaagtgtgtggggg

SEQ ID NO: 530651 - DNA, 545 bp, Homo sapiens
aacaatggcaaaaaatgctaaagtgagtataaaacattttagattacgtattgcttamgattattcatccttttatatgatacctattttcattagtcatagattctaaatgtatcttttttaaaaatcagcaggttgatcacaaaggtggtctacagaaaaaattaagagaaagaaaatgagcaggcattattcaagttcctactatgtgaaacattcatgaagctcagaatttatttactgttcattttgtctgggacctaaagaattcaaaccattgagagtgaatgaagtagcacatgtaaaagagtactctgtaaactttaagctgccaagcagatggaagttattatcaataaccttcttcagccttactcaagccaagggaattgttccttgtatgattgatgataaataatattaaaaaagcacatctacatggtaaaatctctgtgaagatagacttagaaagaacatgtgtataatgtcagaaaagcaactagaaaaattatagaaactgaggaatgtcaaagtaagttatttca

SEQ ID NO: 530652 - DNA, 545 bp, Homo sapiens
aacaatggcaaaaaatgctaaagtgagtataaaacattttagattacgtattgcttacgattattcatccttttatatgatacctattttcattagtcatagattctaaatgtatcttttttaaaaatcagcaggttgatcacaaaggtggtctacagaaaaaattaagagaaagaaaatgagcaggcattattcaagttcctactatgtgaaacattcatgaagctcagaatttatttaytgttcattttgtctgggacctaaagaattcaaaccattgagagtgaatgaagtagcacatgtaaaagagtactctgtaaactttaagctgccaagcagatggaagttattatcaataaccttcttcagccttactcaagccaagggaattgttccttgtatgattgatgataaataatattaaaaaagcacatctacatggtaaaatctctgtgaagatagacttagaaagaacatgtgtataatgtcagaaaagcaactagaaaaattatagaaactgaggaatgtcaaagtaagttatttca

SEQ ID NO: 530653 - DNA, 545 bp, Homo sapiens
aacaatggcaaaaaatgctaaagtgagtataaaacattttagattacgtattgcttacgattattcatccttttatatgatacctattttcattagtcatagattctaaatgtatcttttttaaaaatcagcaggttgatcacaaaggtggtctacagaaaaaattaagagaaagaaaatgagcaggcattattcaagttcctactatgtgaaacattcatgaagctcagaatttatttactgttcattttgtctgggacctaaagaattcaaaccattgagagtgaatgaagyagcacatgtaaaagagtactctgtaaactttaagctgccaagcagatggaagttattatcaataaccttcttcagccttactcaagccaagggaattgttccttgtatgattgatgataaataatattaaaaaagcacatctacatggtaaaatctctgtgaagatagacttagaaagaacatgtgtataatgtcagaaaagcaactagaaaaattatagaaactgaggaatgtcaaagtaagttatttca

SEQ ID NO: 530654 - DNA, 530 bp, Homo sapiens
ctttggggttgggaaaatccttgaaatttttagctgcagagggaatccacgaagaaacggaatgtgggaaatcgaagggaatgcagaaacagtcctgcaggcacactgcaacccatgagatcctaggtgctaagagttcactgtgtacagtaaactgttctgaggagtgttagatttttccttttttaagaaattcaaaacacacttcaaaatatattgctccactattgttttacaagcaacttctaaaaggctgaggcatctgcccttggtttctgcgcctctgttgggcaacattatgaagcttgtatagctgaatgctgacaggtgagttgaaaatcgttacaatgacagttaggacccaatgttgtgcaacagtgtctggctccaggttcccagtttggatctcaaggaaaggaaagtcttctatctgatatgttttggatgtgtacacgggrctggaggttgagtgggtgggagtgggagacatgggagcgtaggaagaggaagacacgtgactctggatatta

SEQ ID NO: 530655 - DNA, 530 bp, Homo sapiens
ctttggggttgggaaaatccttgaaatttttagctgcagagggaatccacgaagaaacggaatgtgggaaatcgaagggaatgcagaaacagtcctgcaggcacactgcaacccatgagatcctaggtgctaagagttcactgtgtacagtaaactgttctgaggagtgttagatttttccttttttaagaaattcaaaacacacttcaaaatatattgctccactattgttttacaagcaacttctaaaaggctgaggcatctgcccttggtttctgcgcctctgttgggcaacattatgaagcttgtatagctgaatgctgacaggtgagttgaaaatcgttacaatgacagttaggacccaatgttgtgcaacagtgtctggctccaggttcccagtttggatctcaaggaaaggaaagtcttctatctgatatgttttggatgtgtacacggggctggaggttgagtgggtgggagtgggagacatgggarcgtaggaagaggaagacacgtgactctggatatta

SEQ ID NO: 530656 - DNA, 530 bp, Homo sapiens
tcattttcctgttttgtgtcctgagaacccaacttggcttgctgcctgtcaggacacacyttggtgtgtgaagggggctaaacaaatgttggaggctcccattaaaagcttacatattgcctattgccagctctcaaggcatctaaatctttctttcttttggctatttgtgggggtagctctgaattttgagagggctgcatctttacatttctttaatgatgtctcatgtatccttggttaagtcacaaaagacttggttttggttctgagtcgcttggtaggtatcgttgttttaaaagaagagaaaaaaaagaaagtttcaaacattagaaatattggttgttttttcttgctgaaatctgataagggatttaaaagtatttttttaaaagagctctgtggtcaaataatagcttaatttaaagctgatatccaggctaccatttttttaagagtctttctgattttctccttaggttcttgtttatcccatgggaatttttttcagtaaacttaaacttttttta

SEQ ID NO: 530657 - DNA, 631 bp, Homo sapiens
tttcccatctgcacacacagattgctcagtgccagtgctgtgaggcctccagagctgagctggtccagcctcattattttggctgatgaacaaatagacccagggagggtaaggagcttaccctgcagcacataaggagccggcccaaagccaggactagaaccaaagtctcccatgtccacaggatactgtttcctcgcctaacacaatgccactctgttcaccattcaattcaacagctatttatttgaacctcgctggatctgccaggaactgggctaagccctggggtttctaaaataggtaaagcatgttcccaccccaagaggaactcatagtctaggagggagggagaaacattgatagtacatcttgttatttttaaaaaaygaagagaggaatgagcacagggatagaaactcagaggaagagcatgtggaccatcccaggagtgctgaagcaggtgtcattggagctgaggcttaaaggactggcaagggtgagttttgggaaggagggtgaaaagagcagctcagaggaggagcggcatgagccccacctgctgtgcttccactaccaaaccaagtcctcatgctcctccatagagaagcaggaggggcttcacctttaa

SEQ ID NO: 530658 - DNA, 622 bp, Homo sapiens
ggaagcagcattgggaattaaggaagacaccaactgttcctcctagtccaggaaaacaagggctgtgtaaagaaaccaccaccatttgagacctttacaagggaagcagtgtcctcatgagagcaccaaactgtggctagagaaagaaaatgaagaatgttccacaaagaggttggctttaaaaatcccctgcccaaaagccaggttatcatgatttcagctcaggtatgggctgaatcaaggaaaacctcagaggtcagtcaactggaggccagccgttgttgagttatggtcactcaacaaatatatgtgttgagaccgtgatgtgctagccctcaggttcagcatcaaatacatatcaaaaaaatagaaactctgataataagagatgtayaaacaatcacagcataatatagggagatctgattctgagctgcttgtatacagtaaggggcaaggagatgccaatagtcaatctggacacaacattcagcacgtagagttagttgctgtaaaggccaagccctagaagcatactgatctgtttttatagtggttattatgtatggatgggtgttgagtgatggctctagctgcttgccccagcagaaatcctgttgag

SEQ ID NO: 530659 - DNA, 622 bp, Homo sapiens
ggaagcagcattgggaattaaggaagacaccaactgttcctcctagtccaggaaaacaagggctgtgtaaagaaaccaccaccatttgagacctttacaagggaagcagtgtcctcatgagagcaccaaactgtggctagagaaagaaaatgaagaatgttccacaaagaggttggctttaaaaatcccctgcccaaaagccaggttatcatgatttcagctcaggtatgggctgaatcaaggaaaacctcagaggtcagtcaactggaggccagccgttgttgagttatggtcactcaacaaatatatgtgttgagaccgtgatgtgctagccctcaggttcagcatcaaatacatatcaaaaaaatagaaactctgataataagagatgtataaacaatcacagcataatatagggagatctgattctgagctgcttgtatacagtaaggggcaaggagatgccaatagtcaatctggacacaacattcagcaygtagagttagttgctgtaaaggccaagccctagaagcatactgatctgtttttatagtggttattatgtatggatgggtgttgagtgatggctctagctgcttgccccagcagaaatcctgttgag

SEQ ID NO: 530660 - DNA, 670 bp, Homo sapiens
ccagcctggttatccattccttctattccctcgccacacagtctaaggaatgttttaaatctgggtgaaacagcccaatgctatagcttgtttcctcccatgcattgaaaaatgattgcacaaatgttattaaaacttatctctgtggttaaataatctactactctttggaagaaacctggaccgtctccaagcaaaatgactttctgatgttgcaatgctcttgtctgccatgcctcacttagttttgaatgcctgaattatgggaatgtcgtyttcttagaacacgtgcgggacgtaggaatcatcagttgtgctccagctctcttagcttagtctgtctccatgctatcatctgttatgtctgcgatgaatgcttaagaaatggtcttgtgaagagagctgatctttctgcaggtgttcttactactgaatcaaaataaatagaaaaagctctcataaaaagacttatctttggaatctgaggacatcaccatgtgtgttttttttttaccctaaaaatatctgctgttctttgctatttttaaagtgtgtgcttatttgagaggcagtagcaaaatctctcattcaaaataatcttatttttaaggtagaaaaaaattagaactgatgaaatgttttgactggtgtatcatggaggcactgagga

SEQ ID NO: 530661 - DNA, 496 bp, Homo sapiens
tagaaattcagagcttatagcttccattctaaaattttggttcactcattcataaaaaagagctcttgttcttgccccacctttatatttttggcaggattatgtttctgttaaatggagcaagttgagattacctgcttagaatgactgctgaaccatctacaccaatacttgtgaaggagactttttttctgtgccaaagcatattactatggagactgractgcattgcagacgaaggacagaggaggaatcaggcagccgtctaggtgtctccaaagactatctgaattaaaaaaaaaaattcagcctgtttccaattagttttttcagcctcaggtgctagcaattgttatctcttaaatttaagtgagtttctgactctaaaggagattgaaaaggggaagaatacttggaaagcagctatgttaacacatttgtcagccaaggagtttcattagctttgagggataattactaattccctgagtaaaga

SEQ ID NO: 530662 - DNA, 543 bp, Homo sapiens
attatctgaacaacttgatagtacataagcattatacaatatttgatgtcttccatcctacttttgccacctatttatgaaaaacaaaatgaaaaaaaaaagcttatgtacttatgacctgtttttattaccgtaaacttcaaattgtaattgtgtcattaccagctaataccaaaatctagttakggtcagaaaaaataattttcagaccgattatttcaaaatttagttgtttttggaagatatattcaaaatatacagctagatacatacaaattctccaggctatgataatcagcataatatatgtaatatttggtctcattttgttttcctttttattttaaaatagtacattctcataagagatttaaaaaacacatacagagagttcatttgtacttctcattcagcttcccctaatgacaagtatcttaccttactagagcatattataaaaaccaggaaatttacattagtatactgctattaactcaactggatttcactagttttataagaactcgttttttaagtagaatt

SEQ ID NO: 530663 - DNA, 543 bp, Homo sapiens
attatctgaacaacttgatagtacataagcattatacaatatttgatgtcttccatcctacttttgccacctatttatgaaaaacaaaatgaaaaaaaaaagcttatgtacttatgacctgtttttattaccgtaaacttcaaattgtaattgtgtcattaccagctaataccaaaatctagttatrgtcagaaaaaataattttcagaccgattatttcaaaatttagttgtttttggaagatatattcaaaatatacagctagatacatacaaattctccaggctatgataatcagcataatatatgtaatatttggtctcattttgttttcctttttattttaaaatagtacattctcataagagatttaaaaaacacatacagagagttcatttgtacttctcattcagcttcccctaatgacaagtatcttaccttactagagcatattataaaaaccaggaaatttacattagtatactgctattaactcaactggatttcactagttttataagaactcgttttttaagtagaatt

SEQ ID NO: 530664 - DNA, 543 bp, Homo sapiens
attatctgaacaacttgatagtacataagcattatacaatatttgatgtcttccatcctacttttgccacctatttatgaaaaacaaaatgaaaaaaaaaagcttatgtacttatgacctgtttttattaccgtaaacttcaaattgtaattgtgtcattaccagctaataccaaaatctagttatggtcagaaaaaataattttcagaccgattatttcaaaattyagttgtttttggaagatatattcaaaatatacagctagatacatacaaattctccaggctatgataatcagcataatatatgtaatatttggtctcattttgttttcctttttattttaaaatagtacattctcataagagatttaaaaaacacatacagagagttcatttgtacttctcattcagcttcccctaatgacaagtatcttaccttactagagcatattataaaaaccaggaaatttacattagtatactgctattaactcaactggatttcactagttttataagaactcgttttttaagtagaatt

SEQ ID NO: 530665 - DNA, 478 bp, Homo sapiens
acatgcttttgggatagtacatgattttagtattgtatggaaaaccagaggatttttaacaactttgaggacaccaactaaaaatggacacaagtgtctgtccccttagcagctttgtgatggtcaaaggagttgcacatacttaaagtagaagctcacatggataacaaaaccccaaagcaaaaaaaaaaaaaaaaaaaaagaaaaaagtcactgcctgacaataygcttacctggcagcttacaaatctattccagtttcaacacaaccagaaaaaatcttaaatgactacacttaccaactgagcccctaactaaagagcttagaatctccccatttaaagccctctaacgtgaaagaacaattggaaacaagttggatgctttaccttcccagacctactttggagacacccacatggccactcggctctctcacttgaaatttagtcgctggcctttacaagatcattcaacc

SEQ ID NO: 530666 - DNA, 589 bp, Homo sapiens
ctgccttattccactatggttagagagtgaccttttgtgagttttgtttayactccacgttttatacatttagttttaaacacaatagactgagagcttcaagctgccaatttgtgaagttgtcttttactctcttacaaggcaagcttgttctttcaatgtcagatatcctcttagtcctgttatttaggaaaaccctataaatggagaaagttatgtggatatccttttcctatggcataaccaaaagcagaatttcagtagcaaaagtctaggatgagaaatagaaatcaactatttatcttgggaaactttctttcaggtggaatttcataaagattcatcagtctcatcagtctagaatacaatcaaccttgatagttactcatttcatattatactctgtaattattcttggtataaaaaacttctaattttacataaaagtagcctgaggcagttgttcttattttctgaaacccaaccagatcaggagaagagaaaaagtgctcatatcaaagctaagtcaatgagaacaagagtgtagattcagcagccaatgctgactacccgtgaaccagtatcagat

SEQ ID NO: 530667 - DNA, 589 bp, Homo sapiens
ctgccttattccactatggttagagagtgaccttttgtgagttttgtttacactccacgttttatacatttagttttaaacacaatagactgagagcttcaagctgccaatttgtgaagttgtcttttactctcttacaaggcaagcttgttctttcaatgtcagatatcctcttagtcctgttatttaggaaaaccctataaatggagaaagttakgtggatatccttttcctatggcataaccaaaagcagaatttcagtagcaaaagtctaggatgagaaatagaaatcaactatttatcttgggaaactttctttcaggtggaatttcataaagattcatcagtctcatcagtctagaatacaatcaaccttgatagttactcatttcatattatactctgtaattattcttggtataaaaaacttctaattttacataaaagtagcctgaggcagttgttcttattttctgaaacccaaccagatcaggagaagagaaaaagtgctcatatcaaagctaagtcaatgagaacaagagtgtagattcagcagccaatgctgactacccgtgaaccagtatcagat

SEQ ID NO: 530668 - DNA, 589 bp, Homo sapiens
ctgccttattccactatggttagagagtgaccttttgtgagttttgtttacactccacgttttatacatttagttttaaacacaatagactgagagcttcaagctgccaatttgtgaagttgtcttttactctcttacaaggcaagcttgttctttcaatgtcagatatcctcttagtcctgttatttaggaaaaccctataaatggagaaagttatgtggatatccttttcctatggcataaycaaaagcagaatttcagtagcaaaagtctaggatgagaaatagaaatcaactatttatcttgggaaactttctttcaggtggaatttcataaagattcatcagtctcatcagtctagaatacaatcaaccttgatagttactcatttcatattatactctgtaattattcttggtataaaaaacttctaattttacataaaagtagcctgaggcagttgttcttattttctgaaacccaaccagatcaggagaagagaaaaagtgctcatatcaaagctaagtcaatgagaacaagagtgtagattcagcagccaatgctgactacccgtgaaccagtatcagat

SEQ ID NO: 530669 - DNA, 531 bp, Homo sapiens
tgaggggaggcgtgcacatggtgtgtggctcatgtgactggctgagtgtggcaggatgtgagtccctaaagtctcagtgtgtgtcatcacgtgcagagagcagaggcacttccaacccacagagacagcccagggcttatgccgaatgccagggtggcagtgagcacagggctggaccaggacctggaggaaggaagcttctgtcataggggctgtcgtcttttgggggggtctaggcccatcctcagaggactccaggctgggatggggggtgcactgcaaagcaggctccccagcttgtgggcacctatgggtcccattcaccgccctgccacaccctctgtgcaaatgcagcctacgtgagctggtggggcagggccatggcagtgccacagtgagggcagcaatgcccaggcatccccatcaccactcctgacaagaaagaggctttgaactttgctggcagtggtggccagaggccaaggccacagcattgtcaataytgactgaggagtcattgcctaggcaaag

SEQ ID NO: 530670 - DNA, 615 bp, Homo sapiens
cacattgtgtggctctattgcaacttatttactgttcactactaatgaacagaagctttttctctctctttctctctctctcttcactttttacaagcaatgccaaatgaacatccttgtacacagcttaacgtacttgaatcagtgcttctgtggtatgaatgtttacaggtcaggaatggtacacacattatattttgatagatgtaccaaattaccttccaaacataatgtatcaatacaacaatttatactcctccctgtagcataggagagtatgcaytttcccacttctgggtcaatactcaatattatcaactttttacacatttgctgaactaattaaatggcatcttttatggttttactttgcattattctaattgctgttgaggttaaacatctttcacatgtttattggccattctgatgctctgttctgcaaactgtcagttcatagcgttcgtagatttttttttttttctgagacggagtctcgctctgtcacccaggctggagcgcagtggtgcaatctcggctcattgcaacctttgcctcccgggttcaagtgattctcctgccttagcctcctgagtagctgggattacaggcgcc

SEQ ID NO: 530671 - DNA, 615 bp, Homo sapiens
cacattgtgtggctctattgcaacttatttactgttcactactaatgaacagaagctttttctctctctttctctctctctcttcactttttacaagcaatgccaaatgaacatccttgtacacagcttaacgtacttgaatcagtgcttctgtggtatgaatgtttacaggtcaggaatggtacacacattatattttgatagatgtaccaaattaccttccaaacataatgtatcaatacaacaatttatactcctccctgtagcataggagagtatgcactttcccacttctgggtcaatactcaatattatcaactttttacacatttgctgaactaattaaatggcatcttttatggttttactttgcattattctaattgctgttgaggttaaacatctttcacatgtttattggccattctgatgctctgttctgcaaactgtcagttcatagcgttcgtagatttttttttttttctgagacggagtctcgctctgtcacccaggctggagcrcagtggtgcaatctcggctcattgcaacctttgcctcccgggttcaagtgattctcctgccttagcctcctgagtagctgggattacaggcgcc

SEQ ID NO: 530672 - DNA, 392 bp, Homo sapiens
gggggacggatgctgtggaggagagatcctcacgcaagaagagcctcaccctctggcaccccatcctccctgtctggtgcccaccttgttccattcactcttctctttgcttctcccccactccccccactttttttttttttttttagtctcactctgtcaccaggctggagtgcagtggcacaatctcggctcactgcaacctccgcctcctgggttcaagcragtctcctgcctcagcctcccgagtagctgggactacgggcgtgcaccaccatgcccagctaatttttgtatttttagtagagattgggtttcaccatgtttgccaggatggtctcagtctcttgaccttgtgatccacccgccttggcctcccaaagtgctgggat

SEQ ID NO: 530673 - DNA, 607 bp, Homo sapiens
agtcagttgccttaaactttggccaagggacagtgaattgtgaaagccactaattcatttgtttattgaggatcccttataggactcagtgtaaggcacacagatgaatcagacatggctcctgcctacagggaactgctattctagtaggcaagagacatgcacaaataattatgacagagcttgataaatattataaaatggggagaaagcttaattacctgcttagtttcaaagttaacaaaacagtagcctcgaggctgtccctccaaagcacctgacttgtggaagaggaagtcaaactgctttaccttgccaaacttctggaggagcttgaggaggtggtatctgtggagaaagaagagtccatgagtatgctctgggaattctgttggccactcagcctgaagtgtgagataaaagcaggagataatttaccccagggatgaaatctctcgccccagccccctgccttcctctaaactgctatgttagtttatttggcaaacagagttgtttgcctctatttggtatgggaactagaattgtcatggctatgcatctgtccaayacaaaaataccaaacaaaaaaaccacaccttacaaa

SEQ ID NO: 530674 - DNA, 646 bp, Homo sapiens
gctgattttggtgaatatggccagcttcccagaggtaagatggccttgctaaaatctctctccgtggtctcttttggaatggaggagactgggtcatatcaggaggaagtgttccttcagcttaggatgaaacaagagagaagacataataaagagaacttaaggataaggcaaagctcttttcctgttgccagattccttttctgttaaactcagatgctacagaggctaggtaagttgtttgaatacccaaacgggtcccatctaagaaaaacaatactggagatgcagtgattggtgcttggccagcgtgaaaaggctctggtgagctggagagcctgtaccttgtgtgagtggaatgcctctgcccagctcctgctgatcattgccaggcacaatgtaggcctggtaatcagtgttacctgatactacgatttttatttccagaagaagctagtaacacaaatttttatgtgacatctttattctgtaaatgttgatgactaattgagttttttttttaaagactatgaagcaaataaaacaatactttaatgggccaaatgtggcctgagggccaccartttgtgacctctgcattagtatttggagcagaccctccaggaagtccttttatactagactg

SEQ ID NO: 530675 - DNA, 576 bp, Homo sapiens
acttatctgtcaaatagtagggttccttggaagatttcatttgcaaaaggagttgtactgctaaaaacaaaagtttgcggactacagaggaagatatgagcatcttgcacacagrccacacctgtctcaaaggccctttttgctcttgtttgatctgaagatattccaggcaacacaggaataaaacctggcccccttatttttggaattttatgtagtttctagcaaccaccaagtttatctgttatataagagcaaggaaaacaattgttttgaattgagtgatttggattgcattatcaaaaggcagcatatgtagagtggggcatgggcttagggctcagcacagaaaccctatcaccaaaaagttggccctttttcccatagccctttttgaagctatttctagaaatctcatgtacagcacagttttttataacagatggagcagctcatttttggtggaaaattgagaggaattgtttttccttcccaaattgaatgaaaagcattgaagtcaaaggtggctgtcctttcttggaaatgtccctgctttttgtatctgttgaggagaga

SEQ ID NO: 530676 - DNA, 576 bp, Homo sapiens
acttatctgtcaaatagtagggttccttggaagatttcatttgcaaaaggagttgtactgctaaaaacaaaagtttgcggactacagaggaagatatgagcatcttgcacacagaccacacctgtctcaaaggccctttttgctcttgtttgatctgaagatattccaggcaacacaggaataaaacctggcccccttatttttggaattttatgtagtttctagcaaccaccaagtttayctgttatataagagcaaggaaaacaattgttttgaattgagtgatttggattgcattatcaaaaggcagcatatgtagagtggggcatgggcttagggctcagcacagaaaccctatcaccaaaaagttggccctttttcccatagccctttttgaagctatttctagaaatctcatgtacagcacagttttttataacagatggagcagctcatttttggtggaaaattgagaggaattgtttttccttcccaaattgaatgaaaagcattgaagtcaaaggtggctgtcctttcttggaaatgtccctgctttttgtatctgttgaggagaga

SEQ ID NO: 530677 - DNA, 576 bp, Homo sapiens
acttatctgtcaaatagtagggttccttggaagatttcatttgcaaaaggagttgtactgctaaaaacaaaagtttgcggactacagaggaagatatgagcatcttgcacacagaccacacctgtctcaaaggccctttttgctcttgtttgatctgaagatattccaggcaacacaggaataaaacctggcccccttatttttggaattttatgtagtttctagcaaccaccaagtttatctgttatataagagcaaggaaaacaattgttttgaattgagtgatttggattgcattatcaaaaggcagcatatgtagagtggggcatgggcttagggctcagcacagaaaccctatcaccaaaaagttggccctttttcccatagccctttttgaagctatttctagaaayctcatgtacagcacagttttttataacagatggagcagctcatttttggtggaaaattgagaggaattgtttttccttcccaaattgaatgaaaagcattgaagtcaaaggtggctgtcctttcttggaaatgtccctgctttttgtatctgttgaggagaga

SEQ ID NO: 530678 - DNA, 625 bp, Homo sapiens
gttggtggcagagcctgggcttaaattcagagaacaagttccctgcttcacatgtacttttgggcctggagagaagggttgctcaaatctgagatgtacctttattttgagggagagactgtttcttctcttctttgcctctgagtagagatttctaaggtgatgatggacaattggaaccttgaggtgacaacttctatttgtctagggtgtcagccstaagtgctacacttacttattaaaatcagggaaaaaccaacatcccttaaaatatagatgcaaacacaaatgatgctaatgagagccttgtcctccaccaaaaactaaggaaaattagttgatacagaagtcttcagaaccctttggtcatctttcaaatccttgagatcaaatggatctgctcttttgtactccttaccatattccggaagatgatctcccaggtttcaaaagcaatgtctagaggatcccactccacttccacagatgtctccttgatggacttgaatttcaggccttcaggtgcaggtaagtctgtaagtaacaacataaatagaacgtaaggatagggcaggtgtgtgattgggcaacgcggccacgattccactaaaccagactggatgtc

SEQ ID NO: 530679 - DNA, 611 bp, Homo sapiens
ttgcgccacattgaacacaaagccatttatttatgtttagataccaataactttagtaaaggaaaaaattctccattatgacaatgataatatgggtagatgagaggagtacaaagaagacactcattaaatatgagcattaattttctctcctgtgttttcacttaaccagggtttactaagcacttaatatgtaccaggtcccatactaactgctagaaatagtgcccttttaaggataggagcttgcagtctttaggattaaaaaaacaaaacaatcaaaaaaacaaaaccagttacaaaagacaatgaaaagacaggtcaatcttgtagataataggcatttsgtctttagccaagtatgcatttgaaacagttgtttttatgtaatctcactgcgtattcaatttagctgaatttttacatccatccaaatacagagattttgtttactgttggtttgatgtcagtggagagtaggaaataaagttgatatttagcaaaagagagagtatccctttatctacctcatcttgaacactagatgtgttctggcctctccaactttattttaaactctatgtagatgagttaggcagacttgaatacca

SEQ ID NO: 530680 - DNA, 628 bp, Homo sapiens
ttgcgccacattgaacacaaagccatttatttatgtttagataccaataactttagtaaaggaaaaaattctccattatgacaatgataatatgggtagatgagaggagtacaaagaagacactcattaaatatgagcattaattttctctcctgtgttttcacttaaccagggtttactaagcacttaatatgtaccaggtcccatactaactgctagaaatagtgcccttttaaggataggagcttgcagtctttaggattaaaaaaacaaaacaatcaaaaaaacaaaaccagttacaaaagacaatgaaaagacaggtcaatcttgtagataataggcatttcgtctttagccaagtatgcatttgaaacagttgtttttatgtaatctcactgcgtattcaatttagctgaatttttacatccatccaaatacagagattttgtttactgttggtttgatgtcagtggagagtaggaaataaagttgatatttagcaaaagagagagtatccctttatctacctcatcttgaacactagatgtgttctggcctctccaactttattttaaactctatgtagatgagttaggcagactygaataccagctctgtgatgtgtcag

SEQ ID NO: 530681 - DNA, 428 bp, Homo sapiens
ctttgttgagaagtgtggggggaactgccctgtgcattgtaggaggtacagcagcatccctgacctccattcactagttgtcaatagcatctccacccagcctagttgtgacagcccaaaatgtctccagtcatttccaaacaatgggggacaaaattgccccccgtcgagaacgagaaccactggcaccgaaaaagtggaacaaatcagactccctttctattaaaagcaagggaaaaaawtccagaaaaaaatagaatacagtaagtttccaactccttatgtagttttagaaatgaattaaaagttgagcagctagctttgatggttcaggtgagagccttccaataaagaggaaaacctagaagtgataataagtaccatctacttagtgctttctgtgtcctaggcatggtgctaagcgcttt

SEQ ID NO: 530682 - DNA, 693 bp, Homo sapiens
ctggctacacagcccagtccttccccattctcagcttgccccacccaagctggtcttcccaccatgccttgcctaagcccggaaaatccgagagctccttgtgggctgtcctcgtcggtctccttctaagattctcacttctcttttcatttaaaaatcagtgttgagcacctccccgcttatgctcagcactatgtgagtgaaacaaccacattccctgcctccatgcagcctctgtgccccagagaggtcagtgacaaacacatgatcagacaagcaaatgtgtgattacaaactgagggctgtgctttggaagcaaatataaaaagctatgaagacgtctaaaggggatctgagggggaaggctctctgaggaacagacatttgaacccagatccaaagagcaagtaggagttaaccaggtgaaggaagcaggagaggcagaaggcaaaaggcaggtatctctatagtcctatggctgtcacgctgtgcacagagaaagccagaggcataggtgcaaaagatgcatygtggaagatgaggtttcaggagtcagtaggaacccagccacgcagatcttcctggtccagaataaaaattttgctttttttcttcagttcaatggaaagcaactgagaagttttcagcaggagagcattgtgatcacatctgtttttttaagccatctttttt

SEQ ID NO: 530683 - DNA, 400 bp, Homo sapiens
acgttctcaagagttgtataaagcttttagggttttttgtgcccagttttattggctgttttatccctagtttagagattctgcctaaaaagtgactcctaagttagtaaaggcctaagatcgaaatcctgttcataaatcatgctaggtaacgcagttcatatatgtgmcaaaagtataaccatctttttctttaaaaaataattattcttaaaactgacaacacagatgcagctagatgcagctaatttgaaattcctgtctcctttttttcttttgattaaaaaaaaaatgcatttaccagtactgtcagaaaaaaaaaaaaaagaaaaaaaagaaaaaagaaaaatcacctagaaaagagacgctgaaccttctccactaatcctccttatccctc

SEQ ID NO: 530684 - DNA, 400 bp, Homo sapiens
acgttctcaagagttgtataaagcttttagggttttttgtgcccagttttattggctgttttatccctagtttagagattctgcctaaaaagtgactcctaagttagtaaaggcctaagatcgaaatcctgttcataaatcatgctaggtaacgcagttcatatatgtgacaaaagtataaccatctttttctttaaaaaataattattcttaaaactgacaacacagatgcagctagatgcagctaatttgaaattcctgtctcctttttttcttytgattaaaaaaaaaatgcatttaccagtactgtcagaaaaaaaaaaaaaagaaaaaaaagaaaaaagaaaaatcacctagaaaagagacgctgaaccttctccactaatcctccttatccctc

SEQ ID NO: 530685 - DNA, 636 bp, Homo sapiens
tcagcgagaccatcctcatcatcctacataaacacacacacatcacacctatatgtgcaagatcacacatgcacacacaaamaaccctccccattcccagtactcatagtgcattttccacctgacacagtactggcttacctatgtatgtgcatgctttctaggagtcaagctccatgacagcaggcactttgtatgtttccccctgccgtggccctagcacccagaacagagcctgttctattatttctcaatcattacgtgttgactgaatatatgacctaagaggagaatgcagccatctgtagcctcacttattgtctattcaatttgttgagtgccaactatattcccagatcatcattttaaagctgacacaaactcagaaaggaagtgattttcctgaagccaccaggtaatcattgtagatttgaattcagttctcactcaccccacaccatgacctcaacagataggaacctaagaatgtaatttaaagaaacagcaaaggaattgttctactaagaactaacagaggcagcctctcctaaggaaggacgagttaatgggcagagattgtttgacaattgagagatccagcaggatatttagagaaaaaaaaaaaccataaatatc

SEQ ID NO: 530686 - DNA, 493 bp, Homo sapiens
agatagccatcacatatccccttgtcagaaacctgcatcagtccaattctcctctaccactacccacacacacattgcagactcgtatagttcaggctgacctgccaccaacaaccacccctcctccaacaccacagggcatcagaagccaagctgactcccctgaaacaractcatagaccctaataagttgatccaggtggaagctgcttacggattgagtcacagcaacccattatatagatgagaaactgaggctacagaggggcagagacttgatgggatctcacagtgagttaaagccaattccgtaactaggactaggttgtttttcttccacacatacattcatccctcccactccacgcaaggtttgtggacctaccaataaaaaaaccagtagcaaagccattgaaatagaattcctatcctcaatggagcagatattcatatctagggtgctgcccaccagctacagagggaatgggacata

SEQ ID NO: 530687 - DNA, 549 bp, Homo sapiens
ggcgggccgcgtttccatggccacggtaactaggggaccatcgtagtggctcagaaagaataaataaaggatcacgaccacaaagggcgacgtaacaattacagcaaaaacttgtgcggaaccttacaccttgcaaagcgccttttccatgctccttttttcttctatatgacaaaagtgccctcactaacagcttttggtgagcacttactctgtgccattagtgctaagtgcctatataccttataatatggtaatagtatctgctatccagagaaatggtggtgttccaatgagataaaggcacacaaattgtctggctcagaaagtggtcaatacatgatcatcaacattccgttgtgtatkaaacaggactgtccctcacctagcagcaactgtggccaaatgcttggtatcagtcctgggagatgggttctgttgttgtccccatcttaataaggaggaatttgggaccgaagaggttaagcctcttacccaatgtcacgcagctggtaaacaatagaactaaacccaagtctggctgcaacc

SEQ ID NO: 530688 - DNA, 558 bp, Homo sapiens
cataaataaactacactagaatggaacactaaattattagtttaaaatcatggttcccaaattgtaaagtctctccaattacctggagagcttgtaataatacagattcctgggtctccctcggccctagcaagtctgcttcagttcatgtggagaaggttcaggaatctgcatttgtaatagacatcccaggtgattctgctgcaagtggcactgggcccgcttcaaaagacactgctttacttaaaattcagtaaataaaaatgcatgaccttatttgccttttgagaaaggttggatgggcagtagaaagaagcctctggctttggaggcctacagaccckacttgaaattctggctgccactcactagatgtgggtctgggaacactatttgactgctttgagatttagcatcccccagggtaaagggagatactgttgtgaggtctaaatgagctattgcacattaaggaatctgtcataaatgttaattcccttcagtctttacagacttacttgttgtttaaaatgcttacatgttatttactccaatgtc

SEQ ID NO: 530689 - DNA, 638 bp, Homo sapiens
gctcacctaggaagctgtttctagcatgtacctgggtgtcaaacttattttttttctttgagattgtggttattttctccaacttgatagttacarttacatacacagaatacaattatgttaccattgtgttgtattctagagttagtttgttttaacttctagctttttagatggagtacttttaatgtttactcaggaaacagtctcttaggcttggggacctagacttggctgagacctagtgccttaggtttttgaagcagtgagggacagagtatttctctgtattgtagtaaataggatatattattgacagatgcaagtagagaaagggacttggcaccttaaacttgcctcataagattcaagtctcactgatagggtatatatatccctgtgcaagtgagagcctgtgcacttacagaatagaatctcatttgctgcacaatagggttctaggggaaaatgtcaatctggtcatcacagctcatagtttactgtcatttcaaataggctttattgatctcatggcaatacttagtttcaaggtgtgggtggaatatcaactcagggaagtggcttgtggatacagatgtggatgagatagagaaagctgtaatctctgttccacatac

SEQ ID NO: 530690 - DNA, 638 bp, Homo sapiens
gctcacctaggaagctgtttctagcatgtacctgggtgtcaaacttattttttttctttgagattgtggttattttctccaacttgatagttacagttacatacacagaatacaattatgttaccattgtgttgtattctagagttagtttgttttaacttctagctttttagatggagtacttttaatgtttactcaggaaacagtctcttaggcttggggacctagacttggctgagacctagtgccttargtttttgaagcagtgagggacagagtatttctctgtattgtagtaaataggatatattattgacagatgcaagtagagaaagggacttggcaccttaaacttgcctcataagattcaagtctcactgatagggtatatatatccctgtgcaagtgagagcctgtgcacttacagaatagaatctcatttgctgcacaatagggttctaggggaaaatgtcaatctggtcatcacagctcatagtttactgtcatttcaaataggctttattgatctcatggcaatacttagtttcaaggtgtgggtggaatatcaactcagggaagtggcttgtggatacagatgtggatgagatagagaaagctgtaatctctgttccacatac

SEQ ID NO: 530691 - DNA, 638 bp, Homo sapiens
gctcacctaggaagctgtttctagcatgtacctgggtgtcaaacttattttttttctttgagattgtggttattttctccaacttgatagttacagttacatacacagaatacaattatgttaccattgtgttgtattctagagttagtttgttttaacttctagctttttagatggagtacttttaatgtttactcaggaaacagtctcttaggcttggggacctagacttggctgagacctagtgccttaggtttttgaagcagtgagggacagagtatttctctgtattgtagtaaataggatatattattgacagatgcaagtagagaaagggacttggcaccttaaacttgcctcataagattcaagtctcactgatagggtatatatatccctgtgcaagtgagagcctgtgcacttacagaatagaatctcatttgctgcacaatagggttctaggggaraatgtcaatctggtcatcacagctcatagtttactgtcatttcaaataggctttattgatctcatggcaatacttagtttcaaggtgtgggtggaatatcaactcagggaagtggcttgtggatacagatgtggatgagatagagaaagctgtaatctctgttccacatac

SEQ ID NO: 530692 - DNA, 595 bp, Homo sapiens
ttactctcttccatttttaataaaattatctttaacatttcctttatgtacatttagaactatatcagtgttatcattttgctttaatcataaaacaatttagaaaacttaagagaaggaaggtctatcaccaaaatttaaaacttccctttgaaagacaccattaagaaatgaaatggtaagtcacagactgaaagtatttgccataaatctatatgacaaaataattgtattcatgatataaagagaactattacaagtcaacaaaaaatctaaatgacctaactaaaaatgagcaattaatttacaaaaatgtcataaaaggagatacatctctagctaataagcacatagtgactcaactttattagttatcatggaactggaaatttaaccacagtgaaatacactattatacacctatattagttttctattgctgcagtaacaaatggtaacaaacttagtggcctaaaacttaaatttattgtcttacagttctgtagatcagaagtctgcaatgaatcycactgagttaaaaatcaagataccaagagggctttacttttttctggatgctttagaatagaatcag

SEQ ID NO: 530693 - DNA, 622 bp, Homo sapiens
ctcaaaacctatagtttaaatgatataattcaaaatacatttgtggtcaatttcatataatcaacatattttcctagttctaagtaaagtatattattggaggcataattgtaataatagcttactatatgtaacttccattatgctaagcagctaacctccacagcaatgctgggaggaattactatgaccccccgctctacaaataatgaagccaggagcccgaaggtgtgaaaccagccacattcacacagctgctaaggggcagaactgaaaytggaacacaggaactgtagctatcaaagcccatttttattttaatcaatatgttacaccatttccctggagaagcaagtcagaatcacttgatttttggaaaatgcaagacatgcagtagacatatggagaagtagtgagtaggagaaaaaataaatctgttctctgataattatgctgattgacaggactaaaagttcagataaacacttgtgatgattgggcaagcttctttcccttgatttgttttagaatataactttgaatgtccaaacatccagtcatttcaattaataaaaatcagccaaattgttttcattattattatatagtttttaaagaaggg

SEQ ID NO: 530694 - DNA, 622 bp, Homo sapiens
ctcaaaacctatagtttaaatgatataattcaaaatacatttgtggtcaatttcatataatcaacatattttcctagttctaagtaaagtatattattggaggcataattgtaataatagcttactatatgtaacttccattatgctaagcagctaacctccacagcaatgctgggaggaattactatgaccccccgctctacaaataatgaagccaggagcccgaaggtgtgaaaccagccacattcacacagctgctaaggggcagaactgaaattggaacacaggaactgtagctatcaaagcccatttttattttaatcmatatgttacaccatttccctggagaagcaagtcagaatcacttgatttttggaaaatgcaagacatgcagtagacatatggagaagtagtgagtaggagaaaaaataaatctgttctctgataattatgctgattgacaggactaaaagttcagataaacacttgtgatgattgggcaagcttctttcccttgatttgttttagaatataactttgaatgtccaaacatccagtcatttcaattaataaaaatcagccaaattgttttcattattattatatagtttttaaagaaggg

SEQ ID NO: 530695 - DNA, 622 bp, Homo sapiens
ctcaaaacctatagtttaaatgatataattcaaaatacatttgtggtcaatttcatataatcaacatattttcctagttctaagtaaagtatattattggaggcataattgtaataatagcttactatatgtaacttccattatgctaagcagctaacctccacagcaatgctgggaggaattactatgaccccccgctctacaaataatgaagccaggagcccgaaggtgtgaaaccagccacattcacacagctgctaaggggcagaactgaaattggaacacaggaactgtagctatcaaagcccatttttattttaatcaatatgttayaccatttccctggagaagcaagtcagaatcacttgatttttggaaaatgcaagacatgcagtagacatatggagaagtagtgagtaggagaaaaaataaatctgttctctgataattatgctgattgacaggactaaaagttcagataaacacttgtgatgattgggcaagcttctttcccttgatttgttttagaatataactttgaatgtccaaacatccagtcatttcaattaataaaaatcagccaaattgttttcattattattatatagtttttaaagaaggg

SEQ ID NO: 530696 - DNA, 622 bp, Homo sapiens
ctcaaaacctatagtttaaatgatataattcaaaatacatttgtggtcaatttcatataatcaacatattttcctagttctaagtaaagtatattattggaggcataattgtaataatagcttactatatgtaacttccattatgctaagcagctaacctccacagcaatgctgggaggaattactatgaccccccgctctacaaataatgaagccaggagcccgaaggtgtgaaaccagccacattcacacagctgctaaggggcagaactgaaattggaacacaggaactgtagctatcaaagcccatttttattttaatcaatatgttacaccatttccctggagaagcaagtcagaatcacttgatttttggaaaatgcaagacatgcagtagacatatggagaagtagtgagtaggagaaaaaataaatctgttctctgataattatgctgattgacaggactaaaagttcagataaacrcttgtgatgattgggcaagcttctttcccttgatttgttttagaatataactttgaatgtccaaacatccagtcatttcaattaataaaaatcagccaaattgttttcattattattatatagtttttaaagaaggg

SEQ ID NO: 530697 - DNA, 546 bp, Homo sapiens
ttttatgttcagttacactttattggtttaagcctttcatttgttttttaaacgcagaaatttacaaaagttatttctgggataaaagtattttcaagtaattcaattttgttatctgacagatttttagaagatagagtttgatttttacttgaagcaatagtcttttacaggctatgcaattcaacgtgtaaagaaaattgccagattgtactcacattttattcatatctctcaaattccttgtttgcttttttgctctccctggggtagtttattcatttattaagtcctgggttattgcatttactaagagataaagaataaaagattggtgttaagaaagttgtatgtgattcctgaacccaccattacttgaccacaggtttcttaactaaccttgctgggtctcagtttttttttaatctataaaaatgagaaactcactactttaaaatgtattatgaagatttaatgcagtgtctattataatttacttattaagtatctkacaaattactcttaataaattagcacacaaacaat

SEQ ID NO: 530698 - DNA, 542 bp, Homo sapiens
cttcagttcataatcgttatctgcaggagaatttattcagtataagcaattatgtcattaccagaactttctactttttttcggtagtttttcaattatttctcaagcatattattgagggcaactgtcatatgtaatcagtctactatctttttttttttttttttttgagatggagttttgctcttgttgcccaggctggagtgcagtggcacgatctcagctcaccacaaccttctcctcctgggttcaaatgattctcctgcctcagccacccaagtagctgggattacaggcatgggccaccacgcctgatcagcctactatcttgaaagcagtgttccagttttayagtctctaaaggcctccaaccattgatcaaaccaatatctaaaaattttacccttctaggtcctagcaagcaagaaggggtggtaaatttatctaatggctgaatttcaggcaaaagaaaatccatgatgccctgttcttatttcaatattgattggcctcacagcagatgtggaaactaagaaagagaa

SEQ ID NO: 530699 - DNA, 589 bp, Homo sapiens
catttactgatttgaaatttgtcctctaggacagtgacctattatggtggcatggacaggccttcccttcctgtgagtttcatttttgcctcaggtcttgccttttaacattttgggacctttgsaatgatggcaaatgagttttgctgcacagcaaagccgtgagtagaatcgagtcactgtccacctgtggaactggacccctcagccttgcaaactgtgtccctctgccaaagcgacacagtccatgtttctccctcgggtaggggagatgatctacttttattagaggatacatataaccctaactctccaagcactcgtttctctggcgaggctggtcagtatgtttatttgccatcaccttttctccgtagctattacgtctgggagaaatcaagctaaggacttagcaagctctgatatggcacattccgtgctaggcatgagggtcacagtaagcagctctgcctctcaccacctgtgtgacctttggaaaatgacttttctgtgtcccaatttccttacctgcagatttgaggtaatagatgaggaaacttctcatttttagaattctatgtgttagtac

SEQ ID NO: 530700 - DNA, 305 bp, Homo sapiens
ccaatgagctcacttttggcccaaataagtaaaaaaggcccagcggtctcataaagtttcaggaatgttccaactggctgcgtcttctgtgacagagacccaaaccrctcagggctcgtgaccttgggagccccatggtcccccacccatgtgggcagacagcccactggcctgcgggtgcaaccacagctcactggacaggagcagagcgtgagggatggtctgcaagcagaggctggctcctctctaccagtggggcggggaggccccagcaccacgttcccccagtgcctggacatctgcct

SEQ ID NO: 530701 - DNA, 527 bp, Homo sapiens
aaaccatttaagagctctactaccttagagttagaaattagagaaaactaaggatagaggcacaaacacacgctgagaggtgagaatatcacctgcatgaaggcaaggtggggctttctgccctctgctcctcactgctagaaagaggaagcaggttcaatagcatttccatttcctgttaatttttctaatggctaagaatgaaaggaattattttttaaaaagactgtatttgatacatcacattggtactactttaaacttaataggtcattctttagaaaaaaaatcttcaaaaattcacaattttgcttcgttccctgtgtaaatccttagggaataagactatagatcgaaaattaatttctaagtacccctgggaagagacagcgatgctaacagattcatwtgagacagttagaagcacaatttcacccagtgttgttttcaatatcacaatctaaacaagtttacaatcactttgaactcttttcaaacgtaatgccccaggaatagtcttccaaaca

SEQ ID NO: 530702 - DNA, 577 bp, Homo sapiens
ataaagtaatatatacacatatgtatatagatgtgtatgcatatagatgtgtatgtttatacacacacacacacatgcccgcacacacattccccttcccccaagaaaatttatgttttcaaagggacacttcacaactggcattttctgctaacatttaactaatattttcttgcagattggtacatagatgacttagggtaaacacagagatggctaaattccattttatcttctgaataaaatgacttgtcatgtcagaaagctaccaagtattatgacataatatggaagtaaatgatattgcaacattgaatgatattgtttctctacaatccaaatataacactcactgacgcccaatgytttggttcttatgtatagtggtgagtgatatcatgtatattacattaggtattttactgttgtttgtgtctgtgtatcattgttgtctgatcttttttcttcctttaatattgttaagtttatcatcgattctcaaaatttaatgcaaatgaacatcaagagggaatctgataaaaatccagagccctgggcacagagattctgcatagtt

SEQ ID NO: 530703 - DNA, 617 bp, Homo sapiens
gtacacaaaatcctgttgactgtgcgatttgatatactagattcacctgcatattgatttaacaaactgtagagtaaatacaaacataatgctgtttttcaacatcattatacaattaaattttaaacataattcttccaagctagcaaaagtgccttcaaatcttyccgagatatatttaaaggttacagtcagtggaaactttagcataaaagaagactttcataaaagtacttatttccctctactgcagtgagccaaatcttgattcctgaacactcctagctgacttcatttgtgatcacttttcagcctatattcttccctgactgttagatggcactgtgccctctaacaaagtgctatgccaatttttttaggatacacatgccaatcaaatgtgagattcaatagagaacactgcaaacaccatttccttaggaggacatccattatctctggcagtaacgtgtatttaacaccaaatagatcatgagtgccaaaattaaaattatgaatcatatacaaaaacatagtatagtagatttagatgtctggctctgccagcaaaacaggttgaattctagaggcccatggaaatccattaggcatacagg

SEQ ID NO: 530704 - DNA, 543 bp, Homo sapiens
agtaaatacaaacataatgctgtttttcaacatcattatacaattaaattttaaacataattcttccaagctagcaaaagtgccttcaaatcttcccgagatatatttaaaggttacagtcagtggaaactttwgcataaaagaagactttcataaaagtacttatttccctctactgcagtgagccaaatcttgattcctgaacactcctagctgacttcatttgtgatcacttttcagcctatattcttccctgactgttagatggcactgtgccctctaacaaagtgctatgccaatttttttaggatacacatgccaatcaaatgtgagattcaatagagaacactgcaaacaccatttccttaggaggacatccattatctctggcagtaacgtgtatttaacaccaaatagatcatgagtgccaaaattaaaattatgaatcatatacaaaaacatagtatagtagatttagatgtctggctctgccagcaaaacaggttgaattctagaggcccatggaaatccattaggcataca

SEQ ID NO: 530705 - DNA, 617 bp, Homo sapiens
gtacacaaaatcctgttgactgtgcgatttgatatactagattcacctgcatattgatttaacaaactgtagagtaaatacaaacataatgctgtttttcaacatcattatacaattaaattttaaacataattcttccaagctagcaaaagtgccttcaaatcttcccgagatatatttaaaggttacagtcagtggaaactttagcataaaagaagactttcataaaagtacttatttccctctactgcagtgagccaaatcttgattcctgaacactcctagctgacttcatttgtgatcacttttcagcctatattcttccctgactgttagatggcactgtgccctctaacaaagtgctatgccaatttttytaggatacacatgccaatcaaatgtgagattcaatagagaacactgcaaacaccatttccttaggaggacatccattatctctggcagtaacgtgtatttaacaccaaatagatcatgagtgccaaaattaaaattatgaatcatatacaaaaacatagtatagtagatttagatgtctggctctgccagcaaaacaggttgaattctagaggcccatggaaatccattaggcatacagg

SEQ ID NO: 530706 - DNA, 617 bp, Homo sapiens
gtacacaaaatcctgttgactgtgcgatttgatatactagattcacctgcatattgatttaacaaactgtagagtaaatacaaacataatgctgtttttcaacatcattatacaattaaattttaaacataattcttccaagctagcaaaagtgccttcaaatcttcccgagatatatttaaaggttacagtcagtggaaactttagcataaaagaagactttcataaaagtacttatttccctctactgcagtgagccaaatcttgattcctgaacactcctagctgacttcatttgtgatcacttttcagcctatattcttccctgactgttagatggcactgtgccctctaacaaagtgctatgccaatttttttaggatacacatgccaatcaaatgtgagattcaatagagaacactgcaaacaccatttccttaggaggacatccattatctctggcagtaacgtgtatttaacaccaaatagatcatgagtgccaaaattaaaattatgaatyatatacaaaaacatagtatagtagatttagatgtctggctctgccagcaaaacaggttgaattctagaggcccatggaaatccattaggcatacagg

SEQ ID NO: 530707 - DNA, 620 bp, Homo sapiens
aataagtaagtcaacaagcctctggaaagatgagctgaattctaaggcaagaagggaaaatctgagggaaagaagagttrctccattaactatggaaacagtatagatatctttatctatgtataggtggacagtatagatataggtgttttggaagtctgagtacaaagattcaccactcttcagcagatcttgagctgcaactgcatctaggtgagagctagagggagatgggccttctcagcttatattcagtcattcatctttcattcatctacaatgtctttcgagctggatattccaaaaaacctaaaaagaagctaccactctgttgggtaacaacatgccatgagtatttaattttatctcttttgtgagaaagtagggttttagaaagaactatagtacatccttttccaaaaccatcaggtattcaggcagggcactatttacaataaagtgggagatgttataacgcatatgaatattactctccttcatcccaaccatggtaagactgaaagaaagaaaaaaagtaatataatagaagtaataatatttattcaacgtctaccatatccaaattgcaatagttcttgctctgaggaatgataaggatg

SEQ ID NO: 530708 - DNA, 548 bp, Homo sapiens
tacctttttgttgttgttaagaacacttaagatctgctctcttagcaaatttgaggtatacagtacagtattattaactataatccacagttatttagtcatttaactttcatgagtaaatatagtttgctataaccaggaaggcacagacaagggcttttggctcttcttctgcaactctgttccaactgcaagagttygtggagaaaagaaccattccctcaacagtaccaagcagtaataaaaatattaaatagtattaccgtgtctgagtgcctttcctgtatttcgtaacttaacctaataataacccttttaagtgttgttatcgttcctgaagagataaaacttggttaaaatgtaagatttgtcacttactagctgcatgatttgaaaagagttgtttaaattacctaagcttttgttttctcatcagtaaaatggagataatagtaggtgcctcatgggggattattagatcacacttaaaattggatcatagttaatactttaactggggctttaaccatcatcatttacatcatccc

SEQ ID NO: 530709 - DNA, 549 bp, Homo sapiens
tgcctgtgggccccacctccacagctcagcaacccctctcattctgtgacagtcccacagcccccagcatacaaatgcagatcggaggcaaggagaagccgagcccctggccagggttgagaggagctcaggtgcaggcccaggatgcagactccagacatcctgctctgagctctggcaccacagcccagggggtgcgttcacgctaacgaagcctgcacctcctccatgtgctcttaggctgtctgtgattcatcagaatgtgcagaggagaaggcatgagagctcggcccacagtggacacagtggcgcagcctgccctgcagtgggaacgtgagcatggggggcacgggctgggcgtggtgaacaccccaagtgagcctggggtgatgcagttgggtggccgcatccaaccctgtgaagtgctgggtcctttgctgctgaccatacacagaactctttttcagactgagtttggtatcagtgtgagtgtgcaacacctgygcatgtgtttcatgtagccgcacgtgtgtactgtgtggaatgtgc

SEQ ID NO: 530710 - DNA, 639 bp, Homo sapiens
ctgcaggtgcctatgcatgtgcgtgtgtactgtgcagtgtgcactgtctatgaccagctcggggaggtgtgtgcggggcaaggcccttcctacgctgcggtgtgtgcaggtggacggtgccacagatgtccctgaagcaggaggaatgggtggaggaaatgtgtacatgagtgtcatcaacacactgactccacagaggctcctcttcactcctccacctttttaaatttactttttattttttagagacagggtctcactctgtcgcccaggctggagtgcaatggcacaatcatagctcagtaccatcttgaactcctgcatccaagtgactctcctgcctcagcctcctrtgtagccgggaccacggatacctgccaccatgccctgctcatttttaattatttttgttgagatggggccatgctatgttgcccaggctggtcttgaacttctgggctcaagcgatcctcctgcctcagcttcccaaggtgttgggattgcatgcatgagccactatgcctggccctctctcttttttaaattaaaaacaaatacacaaacagaaaatattttaccctctgcccttgactgcaggtgtacaaatcaggaggaaaatttagaggcaaggactacaag

SEQ ID NO: 530711 - DNA, 567 bp, Homo sapiens
ccccactgagctctcagcatccttccaagtgctttccagccattctcttgtatccttacgaggtttaagtattatgatgcccattttacaaatgagaagctcagagaggtgagataacttcctcaaggtcactcagctctcagataggcggcagaggtgggttgatgagttaaaatatggtagaaataaaaacagtaatgttatgcagcagctaccattgtgtgattgcctcccaaggggcayggactgtgctaggtactctatgatgttaatggtagatggctggtggctattggattgcaaaagagaagaaccaggggagggatccgtataaagacatctgttgggaatagtgactgatggagagaaaccaggttgctgggcagtgcttgaagtcaggactggtgacttaggtctccatccttcatccccttcctgtagggcatgggtgctgaagaggtgtccctggtggataggaagtagagctgacatgtcccaagcccctactctgtgcaggccccaaggcttgaagtatatcattttattttatcgtcatgactctctcat

SEQ ID NO: 530712 - DNA, 567 bp, Homo sapiens
ccccactgagctctcagcatccttccaagtgctttccagccattctcttgtatccttacgaggtttaagtattatgatgcccattttacaaatgagaagctcagagaggtgagataacttcctcaaggtcactcagctctcagataggcggcagaggtgggttgatgagttaaaatatggtagaaataaaaacagtaatgttatgcagcagctaccattgtgtgattgcctcccaaggggcatggactgtgctaggtactctatgatgttaatggtagatggctggtggctattggattgcaaaagagaagaaccaggggagggatccgtataaagacatctgttgggaataktgactgatggagagaaaccaggttgctgggcagtgcttgaagtcaggactggtgacttaggtctccatccttcatccccttcctgtagggcatgggtgctgaagaggtgtccctggtggataggaagtagagctgacatgtcccaagcccctactctgtgcaggccccaaggcttgaagtatatcattttattttatcgtcatgactctctcat

SEQ ID NO: 530713 - DNA, 516 bp, Homo sapiens
tgctttccccctctagggatcatttgaacttcatggcactggggtgccgatctcagggtgggcaagatgcagcgaaagcctgttatccatttgcattctcctggaggaagagaaatgcatcctctcccttcctcctctttggtgataggattcctgcctctactccactggttcccgaggctaggggagagggctgagaaatccttgaggtctcagtcccatgatgattgctctttccccaggtctttggccatggcaaggccaatggagagccgacctgggccctgctcctgactgcctgcatctgcgagattggcatcctcattgcatccctcgacgaggtggcccccatcctctctatgtgcgtgcctgacttcttgccctcccccctggttcagggtgtttctctatctgaatcctgcagccgttacctgtgacaacccacccagacactttagcaaccccaggmagttccccattggtcatagaagcccatcgtttgttatagagagattc

SEQ ID NO: 530714 - DNA, 593 bp, Homo sapiens
aataagatttagccaggcaaagagggagggcagagaggggaagygtgggaagggtttgaggcaggagggatggatagtgcaaaggctcagaagccagagttcttgatgtatttcaagaaccgaagctcaggatggagcgtggatcccggagcgtgggtgggtgggtgcccttggcatatacaccagttattcactgtgtctctttgtgatctgtcttccttcctagtgtgtgagctcctgcaggacaaagctcacatctccttgaattccctgcgcccagcacccagctcagcactcagcagggattcaataaatgtttgctgaatggaaatgagaaatttgagaacccatcagggagccatcttgggcaaccttttcatttgcttaacctgtgaatttggaattcttgttagccttgggctattcttaatagccaagtttatttgtttgttcagaattgtcatctgctgtgcgtctcagactcctctgaatgaggtggttctgtccgggcaaagtcaagtttctggcccaacaaggtgaaacctgatcctttgagtccctctctggatgccattctgtaaactttctttctt

SEQ ID NO: 530715 - DNA, 593 bp, Homo sapiens
aataagatttagccaggcaaagagggagggcagagaggggaagcgtgggaagggtttgaggcaggagggatggatagtgcaaaggctcagaagccagagttcttgatgtatttcaagaaccgaagctcaggatggagcgtggatcccggagcgtgggtgggtgggtgcccttggcatatacaccagttattcactgtgtctctttgtgatctgtcttccttcctagtgtgtgagctcctgcaggacaaagctcacatctccttgaattccctgcgcccagcacccagctcagcactcagcagggattcaataaatgtttgctgaatggaaatgagaaatttgagaacccatcagggagccatcttgggcaaccttttcatttgcttaacctgtgaatttggaattcttgttagccttgggctattcttaatagccaagtttatttgtttgttcagaattgtcatctgctgtgcrtctcagactcctctgaatgaggtggttctgtccgggcaaagtcaagtttctggcccaacaaggtgaaacctgatcctttgagtccctctctggatgccattctgtaaactttctttctt

SEQ ID NO: 530716 - DNA, 489 bp, Homo sapiens
gaaaaaaaaaatgcttcaattagtgcaaacattttttgtctttaaaaaatatgcttgtacatttgtttgggaacattgaaaagcccttccttaccctgttggctaccacagtaactcactcagtattgtggctggtgaatgacagggcctgtttcctcccatttgttaagtgtgtgcagtcctttggctatgagaacagcggcagatagrtatctggctcctttgcaatgcagcctagggtttgagccacattcctttctgttgtgtgtgattctgatcggatgttaagcaccaaatatgtcccaagtgttacttcattgtccactctgtcagtgtggcagcaagtttccatcctaataaaagaagttactcagatggatattccagatgtatttaagctgcttttattaggacaatggagaagtccaaccctgtcttctaaatgcaatcaagagtggtgtggctttgcctttgtaattttacaagggg

SEQ ID NO: 530717 - DNA, 538 bp, Homo sapiens
ggcagtccagataggtaggaacctgtactcaggatataccttgaaactagaggcttagacctgcatgtattgccatctgtatggaggggcgagaaggtgaagagagtaaataatatgcaagtgagagaagggaaagttcaasggctttgatcctttgtttcaagatgtttcaagatcctttgaaacatacacgttgagggtagcagaggaaaaggatacacagaggaatgccaagacagtacagtgtggaaccttcttcctgtctttaacttttcatcttttctagtataatctgagttttcccaggccacagcatactggaagcacaacagtaagccatgatatacaatgttggcttctctctctggcaaccatcttctaaatcattggtacttgtacttttccttcaggcctctgtttccagtcatcctctgctgtgtagcaaactaccccaaaacactggggcttaaaacaaccatgttattttgtttacccttttgagggttaggaatttgggaagggcttggctgggtgcttc

SEQ ID NO: 530718 - DNA, 275 bp, Homo sapiens
tgtacccgcatatatccttaccttgtcaaatcccttatcaaatttgcattccagattttggtgttctcatggctgacctattgtaacattctttttactattgcttcctgttggtkggacataacctgtccctgtactaggagaggaaattaaattggtctggcacaattttctcctcacagagccaagttcagtagaagccagtgccctttcctaagtagatacacatcaactatttgataatttactcttattttggcctgttatttaggtac

SEQ ID NO: 530719 - DNA, 609 bp, Homo sapiens
caggtactggcacctggaaagcttggtgccagcgcctgacacttgtaacctccttcccttatggtgacctccttcccttatggtccctgacttctgggcctcaggttctgacctcccaaataaccatctggggagatatcagaaaaatcttgctagcacttaggggccagtgctactaaccrtcctttgactggttaaaaactttaaaatgtggaactatttatactttaaaagaccagatgctaaatgtgtgatgggagaaaaggagtttattcccgaagttgtttctatcaaagaaaaggacagtagatggcaccattgattcccatgccaatgccttgccatcgaagcccccagggatcattacttaatttggataaatggctgaacgtacagactcaaaaagcagttgacataatcaagaacattggaatgaccagcaagttacttgaagcattcaagagcaaatgttcttgtcaaaaaagcttggcttcatgactcctttgccatcacatcctacccaagggactagcagtgtgattaatccatttgactggttatgagaaccatccaaaaatcacagtggtactgttggttcaggaaagggct

SEQ ID NO: 530720 - DNA, 497 bp, Homo sapiens
caaatattattgaatgatattaaaggacaaaattattggattatagcaccaattactatactcagattagaagtcaggcatctgaaattatccagaaatattggcatctataatagttattaacttattggatatagagttgaataaggcagaaaataaggttgataattctgtagaatttttcaggaattttttctgatttttataaatcaaacatataatatgtgcgtaattttagcatttaccagttgtaaataaatgaatccactaaaaggtatctcacagaaggctcccctgaatggtaaatcaattcttaattttttatttcttargcctactctgcctcaagagtaagtgcaggccttgaaatcagcattgacttacttctgaaagcagaagtaaatccaagataataggtcaaagtgcatgtactgtgctttcagttttgtacctgtatatgagtaaggttgcttcaaatttgctatctaaaagcaatg

SEQ ID NO: 530721 - DNA, 601 bp, Homo sapiens
gtcctgagttgatagttgttatctccaggarattgttctgttgtgaattacttcaccattatcaaaagcagaaattccctttgttgctgttaaaatatattacttggtatcatgcagtctgttcctaaagtgggcaatctttttgtgataccacaattgagtagtagccatcatatttcattgcagtagggaagcattaaattgtaattgctaaatgaataaagtaatctaaatttggaagcttgagagggccaattaggtcattcgtgtgaggtttgctggacttctgtcgtccttttgctgagcgtgagtcaaaagacttctctaaacaatacaattacaagaacgtgtttgtccatttccaagtctaattttaggaataatgtgaaagtttcatggatgaaaatcattacaatatgtgtattgatctggcctgtaattattttgctggaaaatattgaaaaatttctaaccagtgcttttggggaaatactttgtcattagaacaacaatgatgccttgaaattaaagttgacgtaatcattaattttctgaaactttttacaaagttttgtacttagccattatatatcagagaaca

SEQ ID NO: 530722 - DNA, 601 bp, Homo sapiens
gtcctgagttgatagttgttatctccaggagattgttctgttgtgaattacttcaccattatcaaaagcagaaattccctttgttgctgttaaaatatattacttggtatcatgcagtctgttcctaargtgggcaatctttttgtgataccacaattgagtagtagccatcatatttcattgcagtagggaagcattaaattgtaattgctaaatgaataaagtaatctaaatttggaagcttgagagggccaattaggtcattcgtgtgaggtttgctggacttctgtcgtccttttgctgagcgtgagtcaaaagacttctctaaacaatacaattacaagaacgtgtttgtccatttccaagtctaattttaggaataatgtgaaagtttcatggatgaaaatcattacaatatgtgtattgatctggcctgtaattattttgctggaaaatattgaaaaatttctaaccagtgcttttggggaaatactttgtcattagaacaacaatgatgccttgaaattaaagttgacgtaatcattaattttctgaaactttttacaaagttttgtacttagccattatatatcagagaaca

SEQ ID NO: 530723 - DNA, 601 bp, Homo sapiens
gtcctgagttgatagttgttatctccaggagattgttctgttgtgaattacttcaccattatcaaaagcagaaattccctttgttgctgttaaaatatattacttggtatcatgcagtctgttcctaaagtgggcaatctttytgtgataccacaattgagtagtagccatcatatttcattgcagtagggaagcattaaattgtaattgctaaatgaataaagtaatctaaatttggaagcttgagagggccaattaggtcattcgtgtgaggtttgctggacttctgtcgtccttttgctgagcgtgagtcaaaagacttctctaaacaatacaattacaagaacgtgtttgtccatttccaagtctaattttaggaataatgtgaaagtttcatggatgaaaatcattacaatatgtgtattgatctggcctgtaattattttgctggaaaatattgaaaaatttctaaccagtgcttttggggaaatactttgtcattagaacaacaatgatgccttgaaattaaagttgacgtaatcattaattttctgaaactttttacaaagttttgtacttagccattatatatcagagaaca

SEQ ID NO: 530724 - DNA, 601 bp, Homo sapiens
gtcctgagttgatagttgttatctccaggagattgttctgttgtgaattacttcaccattatcaaaagcagaaattccctttgttgctgttaaaatatattacttggtatcatgcagtctgttcctaaagtgggcaatctttttgtgataccacaattgagtagtagccatcatatttcattgcagtagggaagcattaaattgtaattgctaaatgaataaagtaatctaaatttggaagcttgagagggccaattaggtcattcgtgtgaggtttgctggacttctgtcgtccttttgctgagcgtgagtcaaaagacttctctaaacaatacaattacaagaacgtgtttgtccatttccaagtctaattttaggaataatgtgaaagtttcatggatgaaaatcattacaatatgtgtattgatctggcctgtaattattttgctggaaaatattgaaaaatttctaaccagtgcttttggggaaatactttgtcattagaacaacaatgatgccttgaaattaaagttgaygtaatcattaattttctgaaactttttacaaagttttgtacttagccattatatatcagagaaca

SEQ ID NO: 530725 - DNA, 497 bp, Homo sapiens
tctgtcctttcttctgaatttttgttatttgtacatttggtttaattggtattccacattaataaataggtcagtaagaacagctccacacttctgttgatwgttaaataatattcatgtattctaagaataaacagatgaatttttaaataaaatagaaagttgattctccaaaagtaggtgaacagggaattgaaaagcaatgctatttaatcattaagaacaagtttatcgtggtagccacaataattccaatcatttatgtgacattttatagtatccaaatattactttctcatatattctcctaatttcatccttaaaacaatcatgtgaaaatgccctgaccattatcattatttttattttgcacaaaataataaatgtagccagagagcttgagatgacatcactagtgaatggtaggtggaggattggaagccagatacttagatattaattggtgtgtatcaactcttctggaaaatagtataaag

SEQ ID NO: 530726 - DNA, 509 bp, Homo sapiens
ctctaaatagattgaatcatactctggactccacataaagtgtggtcagcaggttggcagcatcagtatcacctgggatcttgttagaaagtcccattcacaggcgcaccacagactttatgaagttacagtctgaggctgggctctaggaatctgtgttttaacaagcattccaggagactctgatatgcactaaaacataagcaactctacatggcttgatcatactcaacgtattgtatgagtattcctttgaaagcaattttaaaaaaccaattatatagatttaactaactaaagttccaaaacagcacaaatatgtaggaccatttagttctatcagaatkctgtatgttgaaaggtatcttagactaatttatgtttggtaattcccacttggtaaacattggggagccaaatgttgaattgataatgtatactttatgctataagcacctaaatttaaaaaaaaattaagtgaactaaacaaaattactacttgaaattac

SEQ ID NO: 530727 - DNA, 639 bp, Homo sapiens
agatgtatattaaaatagctttatgattatgtaaattattcttttaatttttatgaatctgaacttcgctactcagtactctctatcaayaagcattgacagtaactcaaggtaaaaattaaaaataaaaactcacattttaagaaaccaatattaagctagctatgctatagaggtgaaaaataatattgatattaatatttgaaaagatctgatactgtgccataatgcatatgcagtctgttgtacaagaaaaacattggactaagagtttaaaaacccagttcaagtccaactttttgaactaccttgtctcctgactttagatatatttattgacttccatgtgcttcagttttgtaagaaaggtggaggtgagaaaatggaattcatttgcatcatgttggaaatttatcctgcttctgagtattgtatcattgtgacgttataggagttagttaccaacacatctattaaaaatatgctgacgtctgctaatatggtggctgcacaaagaaagaaaattctacgggaatacccattactgttccttttgccatgttgtgatcatttattagaaaacaacaaagccaaggcaatgagaaaataaagatctgtgggtgctgtcggattgcagaa

SEQ ID NO: 530728 - DNA, 563 bp, Homo sapiens
atattggaaaaacgagattacctctctactctcaccaaggagccaggaggaactccagtagccacagcgtctgtttatttgttgaatgcctacaatgtgccaagctataggagayaatttctcatccccacctctaatgtcaaaacattcttaccaagaattattataattttcatcttacagaagaggaaaatgagatggaaaaacctaaggaagctgtccaacttttatatggttaatgtgggccagaggccagactcaattctggtctatcctgttacacctcattagcagtcagtgtatataatagaagttggtctgggaagaggtaagatattaacttgtagtaagcgtcatttccctctctttcccaggacatgcaaggcatgggtgacttgaagagagaaatgattccattccatagcttgacaaaagaaatagccttccatagtcataatttgtctctgagttattagccaggctgaagtctacaaaattgaccataacttcataaaaaggttctctgtaatagtgtttcccaaacatcaatgaagaattgaacc

SEQ ID NO: 530729 - DNA, 563 bp, Homo sapiens
atattggaaaaacgagattacctctctactctcaccaaggagccaggaggaactccagtagccacagcgtctgtttatttgttgaatgcctacaatgtgccaagctataggagataatttctcatccccacctctaatgtcaaaacattcttaccaagaattattataattttcatcttacagaagaggaaaatgagatggaaaaacctaaggaagctgtccaacttttatatggttaatgtgggccagaggccagactcaattctggtctatcctgttacacctcattagcagtcagtgtatataatagaagttggtctgggaagaggtaagatattaacttgtagtaagcrtcatttccctctctttcccaggacatgcaaggcatgggtgacttgaagagagaaatgattccattccatagcttgacaaaagaaatagccttccatagtcataatttgtctctgagttattagccaggctgaagtctacaaaattgaccataacttcataaaaaggttctctgtaatagtgtttcccaaacatcaatgaagaattgaacc

SEQ ID NO: 530730 - DNA, 485 bp, Homo sapiens
aattcttttaaacttgtaagcatgactgtttcttttcctttcaagggtcaaagaatcagtcattttactacttacacactttttcaaattggtcttttctttgacatccatttaaacttatcttgaagttaaggaccattgtaaaagacaataaaaataataatgtgaaaggaaaaaaaaataagtgacaaaaacaccaaagcacatagcataggtagaaatcaatagtttgctgttgtggaactagattcaataatgagtaatgctttgctctkagacaaataatttttcccttctctgtttcagtgtctctgtcttaaatagaaaataaatgtaataaatatagcaagtatcctcttcttgcaacccaatcaagcaagcctagtagagaagggtgtccagatgctaagaccacgcagcaccccagagacagaaacaactggaaaaacttgtgctaacctagtatagtattgaagatacattta

SEQ ID NO: 530731 - DNA, 531 bp, Homo sapiens
taggcataacaaagccatattttttaggaaaaataaggtaagagccacactgactgttgtgagatggtatcttattgtggttttgattcacttttctgtaataatcagtgatgttgagcttttcttcatgtgattgttggccatatgcatgtcttcttctgaaaagtgtctgttcatgtcctttgctcactgtttttattgggttgttatttttcttgtaaatttgtgtaagttccttaaagatgctggatattagaaaagccagattggctattaataaaaagtcaaaaaataacagatgctgatgaagttgtggagaaaagggaacactgtttcttttttttttcaaggcagagtcttcctctgtcgtccaggctggagtgcagtggtgtgatctcggctcactgcagccttaacctcctgggttcaagaaattctccttcctcagcctcctgagtwgctgggattacaggagcctgccaccatgcctggctaatttttgtatttttagtagagatggggttagttgag

SEQ ID NO: 530732 - DNA, 619 bp, Homo sapiens
tgaatttcagtagggagtaaaagtaaatccctgtatccrtgatgtttaaccaggtatctgccaagcatttttcacataagaaaaattctatgattttttttttgttttattggcttgctgtctaagtcattgttgatgttgacaacaaagagcggttaagcccagtggggtagtccaggtctcctaaaaagcagatgtcaagttgggattagatattaaaaatattaggagaaaggctggcctggcatggtagctcacgcctgtaatcccagcactttgggaggccgaggcgggtggatcacgaggtcaggagatcgagaccatcctggccaacaggctgaaaccccatctctactaaaaaaaaaatacaaaaaaattaaatgggggtggaggcacatgcctgtagtctcagctactcaggcggctgaggcaggagaattgcttgaatccaggaggcagaggatgcagtgagccaagatcgcccctggcgacagagcgagactttgtttaaaaaaaaatatatatatatatatatattttttttttttttgtttaaaaaaatatatatatatatatgagagagaaaaaggcttctgaagtgaagtgcatgatgccagga

SEQ ID NO: 530733 - DNA, 619 bp, Homo sapiens
tgaatttcagtagggagtaaaagtaaatccctgtatccgtgatgtttaaccaggtatctgccaagcatttttcacataagaaaaattctatgattttttttttgttttattggcttgctgtctaagtcattgttgatgttgacaacaaagagcggttaagcccartggggtagtccaggtctcctaaaaagcagatgtcaagttgggattagatattaaaaatattaggagaaaggctggcctggcatggtagctcacgcctgtaatcccagcactttgggaggccgaggcgggtggatcacgaggtcaggagatcgagaccatcctggccaacaggctgaaaccccatctctactaaaaaaaaaatacaaaaaaattaaatgggggtggaggcacatgcctgtagtctcagctactcaggcggctgaggcaggagaattgcttgaatccaggaggcagaggatgcagtgagccaagatcgcccctggcgacagagcgagactttgtttaaaaaaaaatatatatatatatatatattttttttttttttgtttaaaaaaatatatatatatatatgagagagaaaaaggcttctgaagtgaagtgcatgatgccagga

SEQ ID NO: 530734 - DNA, 474 bp, Homo sapiens
aagaggcaggtgttttgttcatttacttcagttgtctttttttctgggtcttttttaaaacaattgcatgactttgtgtgaaggatttgaactttctgagtctctattttcccatttaaaataaaacgatgaattgaatgatcttttgtccttctgccttataattcctcgtctttgatttaaatacatatatacatatagcttctaaaagaattgacttctaattaagggaactgatttacaaagtagtcaacactcctttcctttaactgtgtcaatagaagatgacctctgtaatagagttccattgacacaaaagcttccaagctgatagaaarcagatgtgttgtatttgaaatctacagttatttcttctttaaaaggtagccaacttctttaaaattaaggattttaaagttaaaaaaattctgatatctcctcaaaatagctgcacattctatcaagttgaatggc

SEQ ID NO: 530735 - DNA, 629 bp, Homo sapiens
ggctgcagtgcagtcgtgcaatctcagctcactgcaacctccgcctcccaggttcaagtgattctcctgtctcagcctcccgaatagctgggactacacgtgtacaccaccatgcctagctaattttaataattgtggtagagaaggagtttcaccatattggtcaggctggtctcgaactcctggcctcaggtgatccacccgcctcggcctcccaaattgctggaattacaggcgttagccatcatgcccaacctcaaacttttttttttccaaaaatagtgtacccttcaggtatctcacaaaagagaataagctagacacatcaaaaccccctgccccaaaatggtggcaccagctttagtcttcttcggcaaacacaattaatcctcactttgtgtgagaggaggtaaaatcaaataattccyaatagaatagaattgtagtctagcacactgttcaataaatatagctaagtgtcctagtttactatttttctctttttccttttgtctttctgtggggaaacatctttgtatcttataaagtgaaaaaaaattgtagaaattattcttttataccatctgactctagatttaagtacacaggcaataccaacatattctgcc

SEQ ID NO: 530736 - DNA, 574 bp, Homo sapiens
tgtgtggcatttagaattttcagaagtttctgtttccaagtagagatcccaataggttgggaagaaggtttgggtctgctcacagtctcagttctctagtagaaaaccaaggctagaagaaacaacaaacaatgaaaacaaacaaacacagttgcatgcataatgctatattagagattagggttgaatggccaaggcaatggatttgcacagaaaataacacagggtcaatgtaaagaaccaacgggaccagcagaacctgtacagatatcaatgcagcaggaattagactcaaccagacatttaatgtctgagataagcacaaycttaagaataggacaaagtttcctaacatgttaacaaccccttttccacttcttatagcaacagaaggacaccatcttagaaggtagataacagagaattcctaacagcctgaccattgagatcaacttctgtccaagatggagtgatggcaaatatgtctataatgctgctgcaacaaacaaacaatcaaacagaaaaaaaaagaaaccattattttcaaggcattggaaatcagaaaaaggatagt

SEQ ID NO: 530737 - DNA, 593 bp, Homo sapiens
ctacctggcctctcattgtaaaactcacacaatgctcatagtatgtaaaactcatacaatgctcatagagtgctcatagacgttgtttctcatacatggttttcccactttatcttgggatacccattttctccaacttttgacttctaggaataccatggcaaggaaaagaagaaaagaaagagtaagaaggaggtagtaagaacaataatcagaattgtcagtatattttaaaggcagaaaggaatttggaataatttatttcaacgctttcatgtataagatggggaaatcaagaaacagggataaaaggcacagacacaaggttttacaggtggtaatagtttcaagttttgatagttaaaaaattctggactcctgtgttcctttggccaagaagcaaccctctccttgccaattccagcccatagaatattaccagggagtcttcctttctgcatttctaaataatggtgactttctcattaaataataatatacacttctttctatgagatgcatttccttaggctattattggaaataaagtttttggraaacgaattcaccatccacccaaatcccgccatttt

SEQ ID NO: 530738 - DNA, 596 bp, Homo sapiens
ctgtcccgacagctatggcctttccctcatgttcttttaataactctagtaactgacacatattcttctggtacatttttattcacacttttcccacccaagggagtgttttgagttttaattttggtttgtttacttgctcgttttcccctctgaattctttttaatcaaattagtagggtaagtgaccatcactctgttgtgatamgaacagcagcactgcagaggtggctgcctctcccccagcccagaatacacacagagacagaacctctacttgttcttccacagagcccgatttcatcatcactgctacagtagcttcctattgctgctagaacaagttaccacaaacttaatgccttaaaatgacacaaatttactattttaccattccggaggtaagaagtctaaaatgcatcagcaggactgctttctggagccactaggggacaattcattttcttgcctttcccagtttccagacacgatctacaatccttggctcacggatccctctgagttctgctcccaaagtcacatctcctcccctgatgtggctctcctgcctccctctcacaaggaactttgtggta

SEQ ID NO: 530739 - DNA, 156 bp, Homo sapiens
ctggcctacaggaccttaacaggcagggccaagaagtgaaatgattaccgcatcctgcttgcctctgtatacacaatacccaccatcctccctgtgcttaggacrgtttgaaaatgcctttgaaaattaaaactgcaatttagtgtgaaaaaatga

SEQ ID NO: 530740 - DNA, 610 bp, Homo sapiens
atacactttcagtgaataataggcagtttttgtaatttttttctaatcctatgttacttctaawttgtgtttattgaaaagtaattttatgtctgtaaaattttagaaaatcggacttgtaaaaatattcagtatagacaagaacaaaataaaatactttcaaaaaaaataaagtgaatgtggaactgtgagacaatagttcaatatccagcatatatgatgatttacaatagttgttgaatttaccagctcttgaatatgaaaattaattgatcagtaaagaattgggacctaagaactagaatgtagcaaatttgtggagctagggaatacctttcactgacaacccccctttgctcttggcctttttggatttgaaggtgggataatattcatttaagttttcttctcctattcactcaccaaatgatccaaaagtctactatccttgctagtgagtaagaaccttaaccgacatagatgctgaaatgaacaggtcatctagaaaactggggaattaggaattgatcttctagttatcattagatttaaagaagtaaaaaaataaatctagccaatattataggctgagactattgctaacatcaaa

SEQ ID NO: 530741 - DNA, 535 bp, Homo sapiens
ccactgacattttcattgttttttttaggatgctgtatcgctgtaatattcaactcttatcattacatctttgcgagctccaattaagttgaacatgtaattttattttttggaagtagaatacagttatcaaaacgttaatttctaagcattagcattatgcaagaaaagagctgataaatggcaaggaagtaattcatccatgcatttattcatgcaatgacctttcaacaattttctttttttaattctactctggtgcaaggcctcactgataacttgggggaagatggctgacaaaaaaaaaaaaaaaaagaaggaaaggggaaarggaagggcaagcggaagaggaagaggaaggggaagaggaaggggaaggaaagaaaaaaaaagaaggagggaggaaggggaaagggaaggagaagggaggaaggaagggttattacaggaagatgaacctgttaatggcacactcaaaggacacaagagagctgaggtgagggagaccagaaacaggatgaccacccgctcagag

SEQ ID NO: 530742 - DNA, 623 bp, Homo sapiens
tgattttaaaatatcatttaaaaataaaaaatctgtctctctgtgtgtatctgtatcaaactaactgaaatcagtctccaaactaactcacaccaactcaattctgattttggtaatgtctcgccaatgttcagggaaaataattacatgtggatctggtatctgtccctgatgaatgctgctgcagataaacatatcagctttccccagcaagctcgtgtgatttctcgtaactgctttacaataacaacagccacgtctccgaaacatcatgtccttgtctcaggagatcaatctacaaagcatatctagtgtttacctgttcagtaagggcatattaaaaagagtcagrttccagagaaaatggagaaaaatataataaatggaaatcgttgttttttttattttttaaggtaatcagtccatttagatatcaaaccacaaccttactggttctgaaatgggcatggtaatcttgagcctactgactattctcttattgtacacagtatatttgaggagtggaaggagcagttgctctaaatttcatgcaatacaggtaagtaattaaggtttttttggtacaaatataggaaatatatgcaaatgtagagtgtattcca

SEQ ID NO: 530743 - DNA, 682 bp, Homo sapiens
cttagagtatttatgctttatcttcaaatgtcagcttacactgatcaatttagggcagaagcctgttatagtcctttcttggaaccacaccacatagaagaaataatttttttttaacttttttttgttttatgcttttctgatactttttcctacggacttcctggaggcaacaaagctaaacaagctcttcaaagtttaatcgacctcttcggatctatgactgtatgggtaggccctaatggacttaaayattatcaaaagttgctgagcacaggctttgtaagtgcacatttcgttaatattgcctccacttctccatttatgatcatggggaacacacgcagcacagacagaaggtatctccccactccatttttttcattgatttgtatcttcttttgccatgaaacttttcactatcaccaataacaaagagccagacagagatgaatttacattcattaccttaccttatttttaaccttaggcaaccataatcgtgagcaagtgaagggtcaaagctattagtattcctaaatgaatagtagatttattttgaaagtgatcattaagaggaaatgtgcttattccttagtgctttaatttggcaaacacatttgagtttctcttgtgccccaggtaccgtgctaggctctgggtgtcaaaggataaggacaaa

SEQ ID NO: 530744 - DNA, 605 bp, Homo sapiens
aaaactgccttccttgtaggtgcagccagtggaagtgccttgcagaaatttggagtccaggaagaccaagaagcctgaacatttctgtctctagttctctctgtggtgatacgtccagcagagactctttctttgtgrtgctaaattaaaaaagatagtttctttctctgtgatcataatttctataggaagcctccttaatcccactttcacaaggttctagctactcctggaaggctttggtttccatgcacaaataaaactatcttctttcataatcttatcagcataataaagtggcaaaggattttgaaggtggcagaggtttttagatgttgctaaagcctggttgcttcacttttccctggttgttcttcagcttttccatcacttttgaatccaatccctggtattaatgtcactctcagtgaaataattgcagtgatttctgtttccctgacttgaccctagtgatacagatatgatccaataaggagaaaagggaattcttaggacaatgattaacaactatgcaacaggctgaaggggaattaaggaaagacaatcaattgatcaaatcctaaaactgaagactcaataatgtg

SEQ ID NO: 530745 - DNA, 640 bp, Homo sapiens
cctacatcctacaatcgtgtttgcatctctgcattttaggcatatgagggttaatctaaaatttactaaaatccttcagggattctacaaccactttttatacacagtgttaacatttaacattrtttgatattttagaaactaatcattgaattagtattttttaaaataccttcagagataaacataatttattatgtttttaccaggttgttgcagtctagtcaagctgctgtaacaaaatacatcacctgggtgactgggtggcttataaacaacagaaatgtatttctcacagtcctgggagctgggaaatccaaaatcaaggcgcaggcacgtgcactgtctgctgagggcccattatctcacagatagtgtcttctgcctgtgtcctgatgaggtagaaggaacaaaggagctttcttgggcctattttataagtgcactaattacataagaggttctttcacctcgcaaaagacctcacctcctaataccatacctatatgagttttggttcctagtttatacttaatatgaaatttgagggaacacaaacattcaggacatagtatatatcactatctttttggtatcttttctaattaatatttataagcagtattgaacattgtaatgc

SEQ ID NO: 530746 - DNA, 441 bp, Homo sapiens
cttaaatatgtcagaaggctctaggtagcaacaatggctcagaggctgttccatgaataggacatagactgagactaagcatacaatttgtgtgtgtatgtgtgctctgggttctgatggagacgtctggaagttcaagatttcagcagcatagttactgagggaatagatgagctatggaggctgcctctctgagatgtgttaggccacatatatccaaaagcatagagatctcaataaaaattaaagcaatttgtctaaatcggggagaaaagtaagtttaggtaattgcctcataactgtatatttcaagagcaaagctttggaatcagttgtatatatatatrtgtgtgtgtgtgtgtgtgtgtgtgtgtgtgtatacataatatatatgtatatatacatgtatatatatacacgcacatacatatacatatagtg

SEQ ID NO: 530747 - DNA, 593 bp, Homo sapiens
aacggcttcacctccaaaaattttcctaytgaaattagggtttcaatgtataaattgtggggggagccaggaacatttggtccatagcatgccgagtacctggaaaatatggaaacgcatgtaaaaagaaagttttctgcctggtgcaggtggaatgattgtatccacaaaagctacaagagtttacatttgagctgtatctagaagaatgggaggattttctaaagataagtcatcaagtgttgaacaaagttatcttggatgggaaaaaaaaaacatgtgtatcgatacagagctttacaaatatattgaggacaactgggacgatgatagtgcccagtgtttcccaatcttcttttcattatcactcttctccctaccaggatcccttttagatgcttttacaaaatcaccaccattctctcatgaaattcaattttgacgatgaagagcttgtcctacagtgttaaactgtggagacccaaactgttgcaattctaaagaatatttcccccctcaagagccaattgtagccacattgtggacaatatcatccttgtgagaatgcatgactcagtctagtaagattttaa

SEQ ID NO: 530748 - DNA, 593 bp, Homo sapiens
aacggcttcacctccaaaaattttcctactgaaattagggtttcaatgtataaattgtggggggagccaggaacatttggtccatagcatgccgagtacctggaaaatatggaaacgcatgtaaaaagaaagttttctgcctggtgcaggtggaatgmttgtatccacaaaagctacaagagtttacatttgagctgtatctagaagaatgggaggattttctaaagataagtcatcaagtgttgaacaaagttatcttggatgggaaaaaaaaaacatgtgtatcgatacagagctttacaaatatattgaggacaactgggacgatgatagtgcccagtgtttcccaatcttcttttcattatcactcttctccctaccaggatcccttttagatgcttttacaaaatcaccaccattctctcatgaaattcaattttgacgatgaagagcttgtcctacagtgttaaactgtggagacccaaactgttgcaattctaaagaatatttcccccctcaagagccaattgtagccacattgtggacaatatcatccttgtgagaatgcatgactcagtctagtaagattttaa

SEQ ID NO: 530749 - DNA, 593 bp, Homo sapiens
aacggcttcacctccaaaaattttcctactgaaattagggtttcaatgtataaattgtggggggagccaggaacatttggtccatagcatgccgagtacctggaaaatatggaaacgcatgtaaaaagaaagttttctgcctggtgcaggtggaatgattgtatccacaaaagctacaagagtttacatttgagctgtatctagaagaatgggaggattttctaaagataagtcatcaagtgttgaacaaagttatcttggatgggaaaaaaaaaacatgtgtatcgatacagagctttacaaatatattgaggacaactgggacgatgatagtgcccagtgtttcccaatcttcttttcattatcactcttctccctaccaggatcccttttagatgcttttacaaaatcaccaccattctctcatgaaattcaattttgacgatgaagagcttgtcctacagtgttaaactgtggagacccaaactgttgcaattctaaagaatatttyccccctcaagagccaattgtagccacattgtggacaatatcatccttgtgagaatgcatgactcagtctagtaagattttaa

SEQ ID NO: 530750 - DNA, 624 bp, Homo sapiens
ttatgtaaaaatgaatgacctttcatagcattttactacaaaaagctttcatttttgaaaattgtaagatttgaaaataacccacaacagtggaaggaacttgatcctaagttttgaagattgttagaaaatgaaaattatgtatacagcgccaactgtgtgtgatacaatgttacttttgtcctagaaatgtaatacattacttaatctaacaattagagtgtgtatgttatcttatttacagaagtcagaattaatrcttacatttaaaacaaatgcttataccttctactgtgcataggggcacaaaaaaagagtgaatttatcctggaataatagccacaagttcaaaacccattacaacattgacggtgtgcttcttaaaactgctcctgccagaaatccttccaaaaatggcatatttgggaggaattaaacaaaaatcattcttggctgtctttattaaaagtgtgttttcttcctctaagtctgtaggatttggagcaagccaaaatatccttggataaaacttttaaaattcctacttaataatgccagaaggtttgtgaatttaaattggaatacagataatattttactggcattttagtcaagaatgaagat

SEQ ID NO: 530751 - DNA, 624 bp, Homo sapiens
ttatgtaaaaatgaatgacctttcatagcattttactacaaaaagctttcatttttgaaaattgtaagatttgaaaataacccacaacagtggaaggaacttgatcctaagttttgaagattgttagaaaatgaaaattatgtatacagcgccaactgtgtgtgatacaatgttacttttgtcctagaaatgtaatacattacttaatctaacaattagagtgtgtatgttatcttatttacagaagtcagaattaatgcttacatttaaaacaaatgcttataccttctactgtgcataggggcacaaaaaaagagtgaatttatcctggaataatagccacaagttcaaaacccattacaacattgacrgtgtgcttcttaaaactgctcctgccagaaatccttccaaaaatggcatatttgggaggaattaaacaaaaatcattcttggctgtctttattaaaagtgtgttttcttcctctaagtctgtaggatttggagcaagccaaaatatccttggataaaacttttaaaattcctacttaataatgccagaaggtttgtgaatttaaattggaatacagataatattttactggcattttagtcaagaatgaagat

SEQ ID NO: 530752 - DNA, 494 bp, Homo sapiens
cactattttcaagtgggcttagacgtgcagatacgaaggagatgaagtaagagctgctccggccctcggatgatgcagactccacgagctcgtgcttcccgtggctcctaggggagcccagaccaccctgtgcaccagcagtgagggctcagtgctgggagctgcgctctggagcctttgctcctctgcagtgtcacgagtccctgtggcgggtggtggccgcctcttcctgcagcaattctctcccacctcctttcctccacctcagagagatagcgggtgtgaaatggcccagaaccgaggtccctgcactgctgcaggcacagaggacgggtaggattgtgtgggagagccctgggggtaagcctttcgcctacgtccctcctgccgccagccagtgccgggagcttagttttcttatctgtaaaattaggtctcattaggttgtgaaaattagagaygatgtatataaggttccagtgcagtgtccagca

SEQ ID NO: 530753 - DNA, 601 bp, Homo sapiens
ctgcagatcgaacatactaacaacaataaaaataatacagataaaaaattaacacaaagcaacaactattgacacatcatgtacactgtattaggtactgtaagtawtccagagctgatttaaagcacacaggaggaggcgcacaggttatatggaaaaccatgccattctatacaagggccttgggcatccatgggtttacacctgaggggttccttggaccagtctccttcgagtgccagggaagaactgtgaagcctcattctgagctgcctgggctcggacttcaactgtggattttagagggacgcagtccagcctgggaaaggaagttacagatggagacgccaccgggaggtggtcggcgaagctgggatgggaattaagctgcagagtgtaacatttctttgggtgagggcgccagacaagaacctctgaattggcacgcagggctgtcggtgtcggtgagacttacacgtttatagtgagaattcttcccagaaagggtgaccaataacactgaaaaaaataacataaccatggctttccttggagtatttaaaaatattctttgtccatttacgatgacccggaatttcac

SEQ ID NO: 530754 - DNA, 540 bp, Homo sapiens
ggaatagcagggaagcagatgcaactcctattttcctctagtccaatccatgcatctctatgagtgcatgcttgcaggacatgtgtccatggtgggttaggctctgggaggcagtgtgcactaggctaagtgctcagcatggtcayaccagctcgatttaattcctggtcagtggcttactagctgatgacctcagacaaatcaaatacccctctgagcctctgagctgatagctcctacaggcctaagccatttgttttcaccataatgctgcatggcaaaccaccccaaaactcagtctgtggccagcagcgttggctaggctgagctgggcagttcttcaggtctgggctgggctcactcagctattctcattcactcacggcaattggctctcagctggtattgtggagatgcagaccgtgtgcctctcccctcaggctggcttgggcatgttctcatgaccgtggtggaaaaggagcaggggccatcaggacttgggtgtaagtacttcccagcttttgatggtgtgttgtttgc

SEQ ID NO: 530755 - DNA, 298 bp, Homo sapiens
ccaccattaagggaccaaaaaagtggygaaccaagctcttcttggttatttatgaagtcaaccttgaatactaaccattttctttttccttcatgaattattgcccgtgacttacaaaggaatagaagcccaatctcagtttaacagaaacatgaaccagacaaaagccatgtttgagtgttatctaatgaaaatactaaaacactagcatggagtggaatgtaagcccttaaaatctgcactagcggactgggaattaaagagatggaaaggatactaaccacttgagaaaacaaca

SEQ ID NO: 530756 - DNA, 298 bp, Homo sapiens
ccaccattaagggaccaaaaaagtggcgaaccaagctcttcttggttatttatgaagtcaaccttgaatactaaccattttctttttycttcatgaattattgcccgtgacttacaaaggaatagaagcccaatctcagtttaacagaaacatgaaccagacaaaagccatgtttgagtgttatctaatgaaaatactaaaacactagcatggagtggaatgtaagcccttaaaatctgcactagcggactgggaattaaagagatggaaaggatactaaccacttgagaaaacaaca

SEQ ID NO: 530757 - DNA, 298 bp, Homo sapiens
ccaccattaagggaccaaaaaagtggcgaaccaagctcttcttggttatttatgaagtcaaccttgaatactaaccattttctttttccttcatgaattattgcccgtgacttacaaaggaatagaagcccaatctcagtttaacagaaacatgaaycagacaaaagccatgtttgagtgttatctaatgaaaatactaaaacactagcatggagtggaatgtaagcccttaaaatctgcactagcggactgggaattaaagagatggaaaggatactaaccacttgagaaaacaaca

SEQ ID NO: 530758 - DNA, 298 bp, Homo sapiens
ccaccattaagggaccaaaaaagtggcgaaccaagctcttcttggttatttatgaagtcaaccttgaatactaaccattttctttttccttcatgaattattgcccgtgacttacaaaggaatagaagcccaatctcagtttaacagaaacatgaaccagacaaaagccatgtttgagtgttatctaatgaaaatactraaacactagcatggagtggaatgtaagcccttaaaatctgcactagcggactgggaattaaagagatggaaaggatactaaccacttgagaaaacaaca

SEQ ID NO: 530759 - DNA, 530 bp, Homo sapiens
aatacaccactaagtctctcaytcctttgctattgtagaaatggagttaggaaacaaggtgaaaaagagccctttcacagccagagactgtttctttaccttcttggaaactgtaacccttacaggaattgtgcaagaattaaatgtgggagtgctggaaacccagagcacacagccttatgcacaaagagctcttcataaatggtagatggcattaccttcaagtttagaaacaatgttttctttttgcttcctagccaggaaaagcccttttgcttcaagcgactaaagaatgttctctaacttcctgagtgttgtgtgtgtgtacttgcctctgctaatgtttagtttgccttacaaggacaatctgcctgacttcctgttggataaagggaagctgtacatgaagatggagagatacagaaggaaacaagccatgatttcagtaacccagtggccatgacagccagaggcagaatgaaggccgactgaaactagatatccgctgaccacctctggacccacaggtg

SEQ ID NO: 530760 - DNA, 597 bp, Homo sapiens
cgtggtgtggccgggcttgtgtccattaaactcttyattgcaatgctgtggtctcagtgaattgttttctttttttctgtgtagtgagcaggaagaacccatcggacggctccacagatggacagtttttgccacggggagagcagatggttgcgtgtgaaagacagtataaaatttttgacaagaggggaagagagacagggtggatagatataagctaaagacgaactaaatgaaaatattcacctggaccttgcattctcctccactgagggacgctgctggccttcttccagtcctgggctctctgaggcccctcccagtagcccagtctaaaggggatgctcgcatttgccacatctctcccaagaagaaaatacctagttaagagacctgactgcatttacctatcccataaagccttcctcacttacccttaacgaaacatactgtgcttgaaacattaagtctgtgtaatcctgtcactcctggcatctgtattgcctagaattgttctccagcagtttgccatctgtaaatctggtctttccatttttctttgagggcagagacatgccttccagtcacagacttaga

SEQ ID NO: 530761 - DNA, 563 bp, Homo sapiens
tctttcttcttgtgagccctcatgtctgtacttccaagtgcatgttagcaaaccacttattcacttattcagcaggctttatgctgggcagtggggacacagatacgtgaagcaaaatccttatcctcaaatttctcagagtattacagaaaaaacaggacagacaaacacatccctcttgtaaaatgtgttaactctgctataaaaataggcaaagggtacactgggggcaaggaggagggaaccctgccttggttggtagtggttagggaaagggaaaaatatctacattttgcccaagtggtgaaacttgaatttatcaaactgagtacatggtcatccagagagataaagatcattccagccccaaccctagtccccttgtttttaacatcaartctggccatagaaagggtgaaggaatgaaatagaagaagaggtggcttcctagcttccttctttccccacacacccacatctaacgttctcttcacccaccgctattctctcctgccaatagtggtctcacagatgatctcatagatgacttctctgccacctct

SEQ ID NO: 530762 - DNA, 679 bp, Homo sapiens
tactatcagaggtacacagaggagaggaattgtgaagagtcaaaagcagcatatctagaaaggaaggccatatcagaaaggccaagctacccagtgccttggttagctgaaaatgagacttcctttaaaaaaactttggaacctacacttagccaaaggtcaatttatcaaaatgcaaacagcatggaaaaagaaaagaagacatctgtagttacccagmgtgcaccgatatgcagccaggaggaaggcagaggccgtctgaggcatgagacagtcaaagagaggcaagttgaaccagtgacacaggcccaggaggaagaagataaagcagcggtattcattcagagcaaataccggggttacaagagaaggcagcagttgaggaaggacaagatgtcttcttttaagcatcagaggattgtcacaacaccaacagaagtagcaagaaacactcataatttgtattcctatcccacaaaacatgaggaaatcaataacatcaagaagaaggataacaaagactcgaaagcaacttcagaaagagaagcatgtggtttggcaattttttcaaaacaggtatgtgaataaataaatttatttactaataaaagtccctgggaactatacaataactgaattaaacacataattaataactggtagattgttttatctgcgt

SEQ ID NO: 530763 - DNA, 635 bp, Homo sapiens
gctcagcatcatagcatacagggtacttcatcgggcagaaatggaaaagggcattcaggctgaagagacacacaagtgtgaaagtgcacagtgtgttggagaaagttcaaacccgtttggttggaggatgccatggtttaacagctgtggccaggtcatgggtggaaagtgcagaagtcttggccagcccagggcccgcccgcagagccaggtcagaatctgcgggggttctttccacgaaacatagatccctgagctgggagtcactgctgtgtggctgccattatgcgtggagagcattagattccttggggcgacaaaacccatggaaaacctttgctgcaggagccgtagtgggctttgagcagargtgcaatgtgatctcacctgtgttctggcattaactctgcattagagaggagacgggagccagggacagactagaagctattaagctcttaggaacgtccaggtgcaggacaggaaagaagctgagtgtgacctaagctgtagtagcagagaaggaagtaagtggatggacctaggagagggggagagagaactgtaaggggcggtatagagacggggaagaaaagagtgaaactaaggacaacagtgaggtttggaggctggag

SEQ ID NO: 530764 - DNA, 641 bp, Homo sapiens
cattatcctaagtgaattaatgcaggaacagaacactgagtaccacatgttctcacttataagtaggagctaaacattgggtattctcagacataaatacggcaacaatagacactggggactgctagagaagggagggagaaagacaggaaagggggcactggttgaaaaactaactgatggctactatgctcagtacttgggtgatgtgrtccttcataccccaaacttacgcctcatgcaatatatctgggtaaaaacaaaccctaaatatgtatcccctaaatgtaaaataaaggggaaaaagaaaaaaaaagaaagtaggtcatcagtaggtacaaaggatagattgtgaccaacaactttgtgtagataaagtggttctcccagcagttgatgttgagatttcattaaggaaagtgcatcatttaaacaaaaatagtctgaggtctgtctggttcaagataatggacaacgtggaaatattctcatctccttctctgaacctattaaaatggcagtgaaatattaaactaataaatttataaagctgaaagtggatggggagcgaggttggaagacacaagcaaaacaaagattccgttaatttctggaagacagaagactacctagtgtctgta

SEQ ID NO: 530765 - DNA, 651 bp, Homo sapiens
tgaatggatagacaaaatgccataaatatacaatggcatactattaaatgaaaaggaataaattgtcatatattacgttaaggatgaacctcaaaagcattatatgaaatgaaagcaaccagacaacatcatgatattgtatgatttcatatttatgaaatgttcagaaaaggcaaacagaatggtggctgcttgaggctgcattgggagaaggtattaactgtaaatggtaatgaggcatcctgttggggatataaaatattctaaaactgatttctggtgatggttgcatcatttggtaaatttagtaaaagtcattgaattgtgcatttaaaatggatgaattataaaaatatgtaaaatgtatctcaacagttgtttaaaaataaatgaatgcaaaaagtaactgcaaataatacccttatagtaccattaatcctaatagtgcagataaatataaaataccaagtgctctgaraagagagaatttgagtgatagtgtgatttatggcattgtttaaaacagacctttaaaatgtactatttatttttcttagttacacataaaatacatgttaattatgaaaattttagaaagtttagatgtgtacaatgaagaacatacaaattaccagtatttgtcatgcccag

SEQ ID NO: 530766 - DNA, 651 bp, Homo sapiens
tgaatggatagacaaaatgccataaatatacaatggcatactattaaatgaaaaggaataaattgtcatatattacgttaaggatgaacctcaaaagcattatatgaaatgaaagcaaccagacaacatcatgatattgtatgatttcatatttatgaaatgttcagaaaaggcaaacagaatggtggctgcttgaggctgcattgggagaaggtattaactgtaaatggtaatgaggcatcctgttggggatataaaatattctaaaactgatttctggtgatggttgcatcatttggtaaatttagtaaaagtcattgaattgtgcatttaaaatggatgaattataaaaatatgtaaaatgtatctcaacagttgtttaaaaataaatgaatgcaaaaagtaactgcaaataatacccttatagtaccattaatcctaatagtgcagataaatataaaataccaagtgctctgaaaagagagaatttgagtgatrgtgtgatttatggcattgtttaaaacagacctttaaaatgtactatttatttttcttagttacacataaaatacatgttaattatgaaaattttagaaagtttagatgtgtacaatgaagaacatacaaattaccagtatttgtcatgcccag

SEQ ID NO: 530767 - DNA, 630 bp, Homo sapiens
cctgaggggtagcctcattgagaaactcaagggagcagtggcttaccccaaggagattaagtcacattataattmataaatttaacaaaacaacagtattaatattggcacctcccaccataggagagacatcaagtgcagtctcttgtttctgcccctgaagttagttattgggaaattgtttctagatctttaatggaaagttgtgttttctttcaaagttctccattgtgacactatggttccttggacacaggggtgaacttatataattagggagggccttgagatttatttagctagagttgcctccaggaatactgaagatgagtctaacagaaaagccagtcatttttaaagaagctattttctttgaggattcggcacttactatttattgaactatccagctccctcatacttaattccaatcttgtgccatataatattccaaactttcaggcaggctagatataaatcagaagtgaaattgtagttaaatggtacagccagcttgtttccatttggagatagtccctgactgaaaaatgggcttcacagtgtcatttcaaagattttgtttcattttttgctttgacaagtaagtgcagagatcagaaattgcatatg

SEQ ID NO: 530768 - DNA, 476 bp, Homo sapiens
attgggaaattgtttctagatctttaatggaaagttgtgttttctttcaaagttctccattgtgacactatggttccttggacacaggggtgaacttatataattagggagggccttgagatttatttagctagagttgcctccaggaatactgaagatgagtctaacagaaaagccagtcatttttaaagaagctattttctttgaggattcggcacttactatttattgaactatccagctccctcatacttaattccaatcttgtgccatataatattccaaactttcaggcaggctagatataaatcagaagtgaaattgtagttaaatggtacagccagcttgtttccatttggagatagtccctgactgaaaaatgggcttcacagtgtcatttcaaagattttgtttcattttttgctttgacaagtaagtgcagmgatcagaaattgcatatgccatccagtatttca

SEQ ID NO: 530769 - DNA, 657 bp, Homo sapiens
gagcacggtcatttaaggatgttgggtatgtggccaggtagacctttattaaaatccttgttcttatttatcatgctatcatattgataacaactctgagtcccagtttcctcctctgtaaaggatgtaataatgctacctgcgtatgtaataaaatgcatttggcacagttcctggcatatggaaagtactcaacaatagtagctgctattttatgattgataatgtaataataattattattatttaattcatgcccctcctttcatggtgagaaaatttagrcccatggaagcttgatggggccacataactcatagttagagctggaattagatatcccaactccgcatcctgctttcattcaatgagtttgtaaaatttctcacagctcttgccaagctgtggttcagttttgtcttgcacgatgtctgtatgacttaccagggagaaaagatgatgcagagatatgaccaaatgggtctgtggagcagtggatgactggggacacgccatgttggtgagctcactgtgcaggcttcctgcctttcctagtctgcccttcccttcgaaaccagatactctcacctggaaactatgcatcctttttgaccgtgatgccccaccagtgttccaacccgatctatggctcgagca

SEQ ID NO: 530770 - DNA, 387 bp, Homo sapiens
tgtaggtccagatctgataaactactcaccaagccctcaactaccttcagccagtagacttcacccttccttctcctgggaaaagcctcccttctcctttaaagcctggtttaatgtcacccctttagctggaccttacctggaatctcaaggaataattagttatgtctcccctgccttcccaaaagccttacgcttaaagcacttaaaacactttatcattacctgttgacttgtgcacggcccctcctagactgagaccctaagtcagatggtataccctcagccactaacaaccaccagaacagaatgtgtcaagcacggttttaagtactttacatatattaacatayattaaccatcataataaacctgcaaatggggtag

SEQ ID NO: 530771 - DNA, 581 bp, Homo sapiens
ccgcagaagagaggggaggtgccagtcctcagatggcaaaagataaacgtggaaaacggaaacagcctgaatcatgcgtgctaaaccgtatcctcaagtagtggcaagactgtgttgtgtagggaggttggaaagcaaaacgtggtgtgggatgagtcacggccagcacattgaaactataagagggtgtgagggacagtgtgggtggaagaggcagaactcatgatttgtgggtaataagttgggtaatgaaataataggaggaactcatgggycttgagcctttgtgaattctctcctgctatctaagacactccattattatgaaataacatttttcagggtctaattgccttgtgttttggcacttatgtttcttctgacttttggtttacccagattctccttcccgtctggctccccagacagtgatttacttaatgctttgcattttaagtgacatcatctgttttccagacaaataccgtggcagcctacacagcttgaagcaccaccaccatcttgtgtttatcaccatatcctcttataactaaacatttacaaaagacattctcatgcct

SEQ ID NO: 530772 - DNA, 581 bp, Homo sapiens
ccgcagaagagaggggaggtgccagtcctcagatggcaaaagataaacgtggaaaacggaaacagcctgaatcatgcgtgctaaaccgtatcctcaagtagtggcaagactgtgttgtgtagggaggttggaaagcaaaacgtggtgtgggatgagtcacggccagcacattgaaactataagagggtgtgagggacagtgtgggtggaagaggcagaactcatgatttgtgggtaataagttgggtaatgaaataataggaggaactcatgggccttgagcctttgtgaattctctcctgctatctaagacactccattrttatgaaataacatttttcagggtctaattgccttgtgttttggcacttatgtttcttctgacttttggtttacccagattctccttcccgtctggctccccagacagtgatttacttaatgctttgcattttaagtgacatcatctgttttccagacaaataccgtggcagcctacacagcttgaagcaccaccaccatcttgtgtttatcaccatatcctcttataactaaacatttacaaaagacattctcatgcct

SEQ ID NO: 530773 - DNA, 581 bp, Homo sapiens
ccgcagaagagaggggaggtgccagtcctcagatggcaaaagataaacgtggaaaacggaaacagcctgaatcatgcgtgctaaaccgtatcctcaagtagtggcaagactgtgttgtgtagggaggttggaaagcaaaacgtggtgtgggatgagtcacggccagcacattgaaactataagagggtgtgagggacagtgtgggtggaagaggcagaactcatgatttgtgggtaataagttgggtaatgaaataataggaggaactcatgggccttgagcctttgtgaattctctcctgctatctaagacactccattattatgaaataacatttttcagggtctaattgccttgtgttttggcacttatgtttcttctgacttttggtttacccagattctccttcccgtctggctccccagacagtgatttacttaatgctttgcattttaagtgacatcatctgttttccagacaaataccgtggcagcctacacascttgaagcaccaccaccatcttgtgtttatcaccatatcctcttataactaaacatttacaaaagacattctcatgcct

SEQ ID NO: 530774 - DNA, 452 bp, Homo sapiens
tttttggataattgactggatttatttytcaccttccaaaaatctgctttagtgtgaagacgccaggatacagattatgaagtcaatcatgctgagagtttgaaacaaatacattcaatatcttcagaattgttccactcagttaaatctttattcaatttctatatgatgtcacttgggtatttgaaggctgttttcaggtccccataaggtcttccctcttctagttcattcggctttatttcatatttcccactactgtaaaacatgaagaccataagaggcaaatttatagtgaagctaaattttaaggtacctcactcacatagggccctagagatgtgctcacatgggcatatatctttgtaaaagtgctttccctttccacttggagttcccattggtcacacttcccctcaggtagagtattgtcatgatggccttgaacattt

SEQ ID NO: 530775 - DNA, 637 bp, Homo sapiens
ctgggcaacataatgagatcccatcaaaaaaaggcatcaaaatagtgaaaataaaaccacagagtaggtaaagatattcacaatacaaataagaacttaatattcagtattttaaaacatctatgtcaaagggcttgtattcagaatatgagaactacgacaacaacaacaaaacgaggcgcagtggctcacacctgtaatctcagcactttgggaggtcgaggcaggcagatcacctgaagttcaggagtttgagaccagcmtggccaacaaggtgaaaccctttctctactaaaaataaaaaaaatagctaggcatggtggcgggcacctgtaatcccagctacttgggaggctgaggcaggagaattgcttgaacccaggaggtggaggttgcagtgagctgagatggtgccactgcactccagcctgggcaacagagcgagactccatctcgaaaggaaaaaaaaaaagaaagaaagaaagaaaaagaaaaaagacaacccaagtttttagcaggcacttccaaaagaggacagctgtttcagtcagcttggactactatagcagaataccatagactagttggtcaaacaacacacatttacttctcacagctctgtaggctggaagtctga

SEQ ID NO: 530776 - DNA, 590 bp, Homo sapiens
atagggaaaaatggacctcatttcaaccttgcattctccctactctctggtttamaaaagactgccatggtctgaatcctctgagctagaatttaataatttaaagcttaagtctgggagttcccctaaaaaacctttttctctcaaatatctgctctgacacattttttcttcccttggcttttgccctctccctgaagggatgctcgacttcaataaatgtgaaaccatagagcagcaggaattacagggaatcagaaataaattgaatataagatattttcaatttatggctgcattgcccaaccctctataaataagttagtaaggtggtaggaccaggacctgtctatttggggtggcctaggaaggcaaaacatctttttgtaaggtcaggaggagatccacaggaatgcagggctggagtaggaggatttcagaggaatcaatgaaaagaagtaccttgaagaagggggaaaaaaacctgtagcaaggaaattgattattaggagtttggagaggccagtatcccagtgtatctcatcaaactggaagagtaaagaaaataagaccagccaaataaacctatg

SEQ ID NO: 530777 - DNA, 365 bp, Homo sapiens
aactggaagagtaaagaaaataagaccagccaaataaacctatgcagctgagtcacctgatgtaggccaacargcaagaacatgacaagatagatacggaaagaagaaatgtggcaaagggagctgtactagagggtgtagtttccccccaaaattcacatccttctcagaatctcagaatgtgagctgatttggaaaatggtcgcaacagatgaaattagttaagatgaggtcatattggagtagcatgggcccttaatccgataggactgatgtcttttttaattttcattttcaagttttattgcttagcagagcaaggaaacagatggggatcaacatgctctagtaaggcacagcaaaag

SEQ ID NO: 530778 - DNA, 493 bp, Homo sapiens
aaacctcataaagatcaaaagatamgagtatttagccacacaaaagccttttttttttttttaagattaagggtatgactcacagagcttctcaattaaaccataggacctctagaaaacttaagggcaatgttcctcagcaacatcaataaaagcaaaaatcacgaagggattatttaggtaagatctctcactaagtatcttgtataatggagcaaattcctgtgatatacacggtaggcacagaaagttcttcaaatttttatgtctagagtaaaactatctggttggactaaaagtgacagagagtaaaaaatgaaagagtgtttcaccccaaaaactctagtggtaaaaaccaggctgattaaagtagtcatctgtagagtttggagcaagatggcagaataagaggctctctcccccttttctccccatggacacactgattcaacaataatacgtgaaccagtttccttggtgagaaattaagaaa

SEQ ID NO: 530779 - DNA, 530 bp, Homo sapiens
acccccttctcagcataaagcagccagaaaaatcaacaaccagattccccttagtcatctaaggaatcaatcaatacaaagaggggactgaaaccgacccagtagtcccatagacagctttgttttgttttgtttttgataaacatagaaattgacccttctggttttaagcctgaaacttagcagatcctgacaatgaaaaaccagacctctcaaaagttatcaaagaattgaaacatcccagctagacaatgagaaccaggcccctcattcattatgattgccttcttaytcctcctgagttcctgtttttccatacatagttaatttcttccttgtcatacgaacccctaattttagttggtcagggagttggatttgagactgatctcccatctccttcactgtgcacctaattaaattctccttccttggcaataatcattgtctctgattggctttctgtgcgggagcagcaggacctagaccaaacctctcatggttcagtaacatagtctctatgagaaaca

SEQ ID NO: 530780 - DNA, 641 bp, Homo sapiens
actttcatactgcatccgttagtgtcatacatgtattgtaaagtttatcaatttttattttacaatcagttgtattcattcattcattttccaactggtttattccagctctgggtcttggttcgctggagcccatcccagcatctcaggatcccaagcaggaaccaaccctggccagcttgccatcccattgcagggccactcttacctacaatcactcacaatgcgaccatttagacatgtcagctcacctaattcacatccttgagatctgggaggaaactcaaacacagactaagggagaatgggcagactccacacaggcagtggccctggcagggaatctactttttttctcatgaacrttgtaataaaacaacactttgaggatctgctgtgccaccccctatctttcatatattgctttacacaacctagtcaacttctactgcagctttcagactcagatcaagcatcccatcctcagaccacatttgatacccactccaatgccacccagtcccccatccaggctgagtgaaatgagtcttgtttttactactttgcatatctgtttttccactataatgtataaactctcttgttttcttttttattattttttatttcaataggttttt

SEQ ID NO: 530781 - DNA, 258 bp, Homo sapiens
gcacataccaccagttcccatggaaaaccataaggattcgaatctgcygtcatactctcaggtagtgctgccacaactctgcgtagctcctccaggaccagccccaggtagggctgaggggtagcaccgggctcctccatagcgcgaaggctgctctggcggtcaccacagtaacactggccacaacaaacggtggagaacacgcagccttgggtctggaacccgaatccgcacgcggcaaccaaccggagcggacca

SEQ ID NO: 530782 - DNA, 258 bp, Homo sapiens
gcacataccaccagttcccatggaaaaccataaggattcgaatctgccgtcatactctcaggtagtgctgccacaactctgcgtagctcctccaggaccagccccaggtagggctgaggggtagcaccgggctcctccatagcgcgaaggctgctctggcggtcaccrcagtaacactggccacaacaaacggtggagaacacgcagccttgggtctggaacccgaatccgcacgcggcaaccaaccggagcggacca

SEQ ID NO: 530783 - DNA, 566 bp, Homo sapiens
ttctaattaacctaatccttctttagctgtgcaaacatattcaattagatcacagtcaaagctttcagatccaggaagtattctgtctaaagcgaccttgtagatgagagcaaaattattgatttcacttcaaagaatatcacatttcccttatttatgaggttttagagaatacctcattgtagtgcccaggtattaatatttatagacctcatgcacctgatagtaaataaaatatttagttcaatcccaatgttttctacattgtattattgtaggaatagtaactaggagagtcaacactgcctgtatccctaggcaccaattacagtaggaaatgatgggaattactgggagatctgagatagatataactttgggaaaagaggactggagaaagaaaatagaaattaagtataagataagcaaagtaagaaggtaagaaaacaaaagagaaaayaatagcatgtaccccttataatagtttccctcataagcagtttttctttccaggacttcagttatctgaggtcaactgaggtctgaaaatattaaatgaaaaattc

SEQ ID NO: 530784 - DNA, 576 bp, Homo sapiens
acagagacaaacaggtaatggttcctgctgtcaaagggctggctcacttataatgtaacagaaagagagcaataagtgtagattaatgggttcaattaaatattatagtgcaatgggacaaaatgagaatgcactactctacgtcagtgggccaaaaaaaaaaaattaaaagacaggaaaagggccttgaaaaaaaatgagtacatatttagctcttgaagggaatcagaacatacaatagaagggaaatcaargtagaaagagaagcaaaaacaaagtcaatgatacgaaagagctttggatgtttgaaagccttcaagccattatacatggcataaagatgggaggtaagggttagagatggggggacgtcaaagagataaagctaaaggggtaagcatagattagagatgaaagcatcttctgtattacgttgagtttagaatatattataaagaaaataagaaatgacttagtaatgaaaatcctgggtaaatgtttcaataggtttgctatataacaaaccactccaatacttagtgacttaagaaatgcttatgtcagttggactgttct

SEQ ID NO: 530785 - DNA, 576 bp, Homo sapiens
acagagacaaacaggtaatggttcctgctgtcaaagggctggctcacttataatgtaacagaaagagagcaataagtgtagattaatgggttcaattaaatattatagtgcaatgggacaaaatgagaatgcactactctacgtcagtgggccaaaaaaaaaaaattaaaagacaggaaaagggccttgaaaaaaaatgagtacatatttagctcttgaagggaatcagaacatacaatagaagggaaatcaaagtagaaagagaagcaaaaacaaagtcaatgatacgaaagagctttggatgtttgaaagccttcaagccattatacatggcataaagatgggaggtaagggttagagatggggggacgtcaaagagataaagctaaaggggtaagcatagattagagatgaaagcatcttctgtattacgttgagtttagaatatattataaagaaaataagaaatgacttagtaatgaaaatcctgggtaaatgtttcaataggtttgctatataacaaaccactccaayacttagtgacttaagaaatgcttatgtcagttggactgttct

SEQ ID NO: 530786 - DNA, 544 bp, Homo sapiens
tgtttggcttttcagagtctcttgcaagcatcactgattcatgcacacaacattttattggttgtcatttgtatttcaatttctttttatttcaggtattcagtcacaggaaaattgtactatggataaaagaattattattaaactctttctatatgaaatattccttttgttcagttttactgattacaagcaatgtaattgtcagatcatccataaatgaaatatagacatatcrtaaaatttgggccacccccatcagcatagacttaatctcaagaataaagtcatacaaattgtcaataagtgggataaaacaaaagaataaatttggttgtttaaattgtttcagcatatattaaacctgtcgtgaaaaatgttgtgctccccgatcagtgtcctgaaagaagtccctaattatgaggtcttctgctacctctgtcagcacctttatttaatacttgttggattttctaactgctttcatttcaggatactctattggaccaaggcatatacaagcattgaggatctgacatttcat

SEQ ID NO: 530787 - DNA, 574 bp, Homo sapiens
ttcacagccttactttagttgtcaggtatgtttggcttttcagagtctcttgcaagcatcactgattcatgcacacaacattttattggttgtcatttgtatttcaatttctttttatttcaggtattcagtcacaggaaaattgtactatggataaaagaattattattaaactctttctatatgaaatattccttttgttcagttttactgattacaagcaatgtaattgtcagatcatccataaatgaaatatagacatatcgtaaaatttgggccacccccatcagcatagacttaatctcaagaataaagtcatacaaattgtcaataagtgggataaaacaaaagaataaatttggttgtttaaattgtttcagcatatattaaacctgtcgtgaaaaatgttgtgctccccgatcagtgtcctgaaagaagtccctaattatgaggtcttctgctacctctgtcagcacctttatttaatacttgttggattttctaactgctttcatttcaggatactctattggaccaaggcwtatacaagcattgaggatctgacatttcattg

SEQ ID NO: 530788 - DNA, 439 bp, Homo sapiens
cagattcaggaaacagagacgttgacccaaccatttcagtttatggaacatcacacattttctggttacctttaattcaccacataactagaaatggactggtgcatatggtcattaaaaatcttaatatgttagagctggaaggatcctgagtgcacattgaattctcttcaattwaaaaaaagtggtgccagtaagccccagtgacaataaaggtattactcaagataaaagagttaatcagattcagagcagacactagacactgaccttctgacagagtccagtatcctttgaacactaaaaaacatgtggatagtaattactattttctgtgaaatcttttctggtataattattattatccatagtgccataaaacacagtttagcacatagcaggtactgagtggactgcataaaaaaatttttaaaaaagt

SEQ ID NO: 530789 - DNA, 649 bp, Homo sapiens
aattaagatataaactatcgggaaacatactgaaaaaagtaattgaaaaataaatggtttcctataaaatatgttcatgttgaaaatcaaaatcacctctgttacaggaaaagaggtggggaagagcccactggagcccactggaattctagtttctgcctacgacaagacatgtcagatggacacaactttaaaacctaatcttccatttaggggtatcctcacactgataaaatgtttgtatcagatctaatgtttatttatttttttaaatttggctagttctagtaatatattaatcagtcacgagtcaaagctttaattgcatgccaaatcaatgatgaatttaaatcattgctctagcagaaaagtttctcaacaactaattattcaaaaacaaaacaaaacaaacctcagtaatctacattgacatcttattgcttgactagtcagagttttgtttgtaaacaataaaagtcaactttggctaatgtacaagaagagagaattaataaaaatggtgtcaraaatgtaatatactcattgggaggctgaaaaaccaagctggggtataaaattggccacaggaatagcctctgaggtctatagatacatcgctccatgcccccaaatcttaactccacagcag

SEQ ID NO: 530790 - DNA, 593 bp, Homo sapiens
ctgcatttgtagctttagccacggaatgggaatgatgggattctgaatgagattcactgaacagcatcagtgcagcaaaatgaytactcaattgtctgttaatgaatacccattatttaaatatatatttatgttagagtatgtgtagaaatactcattcaaataggtcatattcaggtttataaagttaatttctgtatgtgccttcaaagattgttagtgtatagcatcataatatttgataatttttataacaatcatccttttatacatttcatataggtatgctctcttaggtaatgtaaataacttttatttcctggtaaatggtgactcttatgtccaatgtcaacaccataaagcaatatagatgatacttaaggaatggtcattgcaaatgtactgttttatttacttgatgggtaaattcttcagtttggtttgtgatgttattactcttaaaattacccagagcatataaccaaatgtcttcataagactatatattgttgtatttattagaagaaatgtggtaggaatgggaaaggtgaatgcctttttcaaacttccagtttattcatggagagaatatg

SEQ ID NO: 530791 - DNA, 558 bp, Homo sapiens
cacttctggtaaacttgtttctctcaacatcggccatgagcaatgttttcaatctccccagccaacgagtgtcactttgctcttgctggagtataacatctatggggctgggtgcrgtggctcatgcctgtaatcccagcactttgggaggccaaggcgagtgcatcacctgaggtcaggagtttgagaccagcctgattaacacggtgaaacccagtctctactaaaaatacaaaattagccaggggtggtggcgcatgcctgtaatcccaactacttgggagactgaggcaggagaatcatttgaaccagggaggcagaggttgcagtgcaacaagagcaaaactatgtttcagaaacaaaaaaacaagacaacaacaatagcaacatctatggggctccgtggacccctgtacctggcccctggcttgagtattctaccctttggcttctagggggcaatgtcacccctcataaaggaatcttcttacagcccttctgggtcacttgttacttttcacatcccccattaagaatgctcagtaacttctagatccc

SEQ ID NO: 530792 - DNA, 589 bp, Homo sapiens
tttttatttttatttttgagatcaggtctcgctctgtcatccagactggagcacagtgggragatcttggctcactgcagtctcagaccttctgggctcaaataatcatcccacttcagcctcccagatagctgaaactacaggcatgtgacaccacgacaagctattttttttttttttttttttttttttagagatggggtttcaccatgttgcccaggctggtctcgaactcctgagctcatgggatccacatacttcaggctcccaaagtgctggaattacaggcatgagccattacacctggacacagttcttgtttatagtttttaaaatgagaatatattacttacaaaatcaacaaaattctttaagatatttccattttggaagaaaaaataacttttttttttttaaagtaataaagcactatcctgagaaatactggtcagtatcaaaataatgtcattaatatttcttctctgaatgagttacctctcactctcagaatgatattttatttgtagacttttttatcctaaaattgaatcaaattaaagaagttggtggcagttgtcttttcatatag

SEQ ID NO: 530793 - DNA, 507 bp, Homo sapiens
tgataaaccacttcagggaacataattttttggtastgccataatgcttagcataacagtgcaacaactacataccattcgttcacatttcagattttgtggaaaaagttaaaagaactgtagtgcttacctaaaccttactacttggatatcttgtattattaaaaaaacaaaaaatgttactactcaatttgatgttcaactgaagcattatgaatgaacattaaccatgttacatctatctcaatgtttacttctatctcttatttgttctggtgaactatattgtgcattttattgttgagatgcacttttctatttgttttgtatatttctgctaatctagcaaaatgagacactgactgctctttgctctacattatctttttcagggtgtttatacagcaaagagcattagaatatagaaatacaatctctctcttgaggagaagacaggtttgcttcaagccttggaagataaagataatgactccttttctctggaac

SEQ ID NO: 530794 - DNA, 570 bp, Homo sapiens
ttatttggcatctggcttaacattatatttgtgagattattccacagattttaagtttctgcatttaggagagtgcttagtagtatttcaggattctaactagcatctccctgaattattttcatttgaataatatttatatcaatcagtttattctgagatcctgggaaagaatcttagcattttgggaggcctgggttggaggatcacttgagctcaagagctgagaccagcctgtgtaacattgcaagactccgtctctacaaaaaagtaattagccaggcattytgctgcacgcctgtggtccagctactcatgaagctgaggtgaaaggattgcttgagcccaggaggtccaggctgcagcagtgagccatgaccaaagcgagaccctgtctcaaaaaaaaaaaaaaaaaaaaaaagaaacaacaaaaaaggaagtcaaaaaggggtacagagaggggagggaagaaagcaagaaaaattaagtaaatgaaaaagaaaaggaaatagggcaaagaaaataaaatagttaaaaagaaagaatactgtgaaaaagtttttttttcat

SEQ ID NO: 530795 - DNA, 623 bp, Homo sapiens
attatcacatctaacaaaattaacaataattcatctatagtatcaaattacttaatccataatctgattttcctgattatttcaaggattatcttcacaggttgtttgtrccaaacaggacatacagtccacacgttgcagttaattatgatccttaaatctcttttactcttttgtagtctgacccctgttttttcatgtcattgattccatatggaaatcaggtcactttgcttattgaatgtttgacattctggatttgattgattgctttcttcagatgatttctaacttgatcctctgtcccctgtatttcctgttaggtctagaggcttgattagattcagattccgttgcttaggccataaaacctctcagtggttctgggtacttctgattttgtcatatcatgaagtacatggtatctgcttatcagacttgtagtttatagtgtttttccccctttatcttcgttgttatgtctctttgggggaatttaaatttatgctacctttattatctttctccagccaaagttcagaaaagtctggatttacatagacaaaacaatcagtcaaaatacagtggtctagatactgaatttcttggacaagttgtatttg

SEQ ID NO: 530796 - DNA, 569 bp, Homo sapiens
tctttacttgccccctccctttttacttgcctcctccctctttctcttctctcactcacctcccggtctaaaaccggggccggcgcctttaagagggagcgttggttaccctgggggcgggaacccctcggcggctcgcgaggcggcggcgctcgtccgcgatgctcctcactttcagctccagctcccgccaccgccgcctstatcgccgccgccgccaccacctcctcttcgttgtcctccttcctcctccgcctggcagcgttgttctctgcagcggaggagagaagtgctatgtcaggaaagttccgggagggactacatggagccatgctccctgggctcttccgcgggcgcccgcgcgctgcccttcgcttgaggtgaggtgaggctcgggatccccggcccgcgatccccggcccgcgggacaggtagccgctcggggcggggagcgcttgcatccgctgcgctgggcagggcgagcagtttggcggagtgcggggaggaatgaggctggagagaccgaagttgtgccggagaagcttgggttttcgggagggtttttgcag

SEQ ID NO: 530797 - DNA, 594 bp, Homo sapiens
tagcttaaaaggtagattttctcctctcatgtagaaaacttgataaagataaaattatgtcaatagcaaattatgtataactttcaattattacagagcctttatatgtgttacatcattggaagtcatatataatccacaataagtcattctggaagacagcactataacatatacagaaaggactatagcgttgttctggatccccacctagcctcagataaagtctctaggacaggattgtggttaatatgtaatgtatggcctggaacatacagtagctctaggtttatcayacctggttgaatggcaataaccagaatgtcagaaagctctggatttagcctatttaactttctgtattaagagctatcatgagatacaaattcagaggggacacaaaggtaggaattacactaaatacaacagatgccagattcaggatcctaacacacgttagcaagcttgaacaacagccccgacccagtccaacagcagccaggaagggtcgatgagcacttgagctcaggtgcaggatggatgagacgtatccttcagagcagctcccatcacagtggcaagagtgggctgcag

SEQ ID NO: 530798 - DNA, 636 bp, Homo sapiens
ctgctaaatccaatggacactgtacaattcatcttacataatctatcttaagcttctgaaactattgtggttaaaagcaccactacagaaacaaaatacccagattcaaatcttggctccaccatttaccatcttatgagcttgggcaagttattcagtctgtgaataaataggctgtatctgtaaaatagggatgataataatacccacctcataagactgctgtatgaattacatacatgggttaatatatgtaatgcacttagaacaaaatctggtacawagcaaacatactattaatataaatatctgctgttattccctattatcattattaatatcatgatcattattattgaaactctagccctccttggcttctatgacactactatcctgttcatctcctacttctgagaaagctcctttccattctccttcccaaattcctccaattccactttaccttcaatattggtattcctcatgtcttaacttccaccgtcatctcttctcactcaaatatttttctagggtgctcttacctactcctgatgattccaaccttctgctaaatctactcccaccacatgtcttcctgtatattcagacctgtatatccaattgtccactaga

SEQ ID NO: 530799 - DNA, 636 bp, Homo sapiens
ctgctaaatccaatggacactgtacaattcatcttacataatctatcttaagcttctgaaactattgtggttaaaagcaccactacagaaacaaaatacccagattcaaatcttggctccaccatttaccatcttatgagcttgggcaagttattcagtctgtgaataaataggctgtatctgtaaaatagggatgataataatacccacctcataagactgctgtatgaattacatacatgggttaatatatgtaatgcacttagaacaaaatctggtacaaagcaaacatactattaatataaatatctgctgttattccctattatcattattaatatcatgatcattattattgaaactctagccctccttggcttctatgacactactatcctgttcatctcctacttctgagaaagctcctttccattctccttcccaaattcctccaattccactttaccttcaatattggtattcctcatgtcttaacttccacygtcatctcttctcactcaaatatttttctagggtgctcttacctactcctgatgattccaaccttctgctaaatctactcccaccacatgtcttcctgtatattcagacctgtatatccaattgtccactaga

SEQ ID NO: 530800 - DNA, 643 bp, Homo sapiens
cagccctgccccacctccccttggcgggtaggagggggtttggcctgaggctctgggcatgctcagtggagcgcgtctgggaattcaaggtgttccrtccaccttggcagctttaaagtgtttggatgtcagtgttttggggattttttttccaaattttaagatgcatttcctgtatgtggagtcggtagctttaacggttgaaactggggtgctgaatgctagtggcgaaaactcccacacgccgaaaattgaaccaatgtaacttcgtctggggacactaacaaatattccctatattgaggaaaatatggcgctttaaccctcagggctggcactcatcactttcaatctggggaggaatgaggaaaaaaggcattaggatcttttttgcacctagctcactattaggggctcttttttttccgctcgtttaatctttcagcgacctataaggtcctataagatcgtattacccccatttggcagatgagaaaacaagttacaagatcctcgttagtttgcccgtctacatacaatacatattttgaatttcgtattgggcggcaagcccctactggcaggttccacgttcaattcgctccccgctctccggcaatgcctcgcacagaggaagcgcgca

SEQ ID NO: 530801 - DNA, 588 bp, Homo sapiens
gcatgctcagtggagcgcgtctgggaattcaaggtgttccgtccaccttggcagctttaaagtgtttggatgtcagtgttttggggattttttttccaaattttaagatgcatttcctgtatgtggagtcggtagctttaacggttraaactggggtgctgaatgctagtggcgaaaactcccacacgccgaaaattgaaccaatgtaacttcgtctggggacactaacaaatattccctatattgaggaaaatatggcgctttaaccctcagggctggcactcatcactttcaatctggggaggaatgaggaaaaaaggcattaggatcttttttgcacctagctcactattaggggctcttttttttccgctcgtttaatctttcagcgacctataaggtcctataagatcgtattacccccatttggcagatgagaaaacaagttacaagatcctcgttagtttgcccgtctacatacaatacatattttgaatttcgtattgggcggcaagcccctactggcaggttccacgttcaattcgctccccgctctccggcaatgcctcgcacagaggaagcgcgcag

SEQ ID NO: 530802 - DNA, 588 bp, Homo sapiens
gcatgctcagtggagcgcgtctgggaattcaaggtgttccgtccaccttggcagctttaaagtgtttggatgtcagtgttttggggattttttttccaaattttaagatgcatttcctgtatgtggagtcggtagctttaacggttgaaactggggtgctgaatgctagtggcgaaaactcccacacgccgaaaattgaaccaatgtaacttcgtctggggacactaacaaatattccctatattgaggaaaatatggcgctttaaccckcagggctggcactcatcactttcaatctggggaggaatgaggaaaaaaggcattaggatcttttttgcacctagctcactattaggggctcttttttttccgctcgtttaatctttcagcgacctataaggtcctataagatcgtattacccccatttggcagatgagaaaacaagttacaagatcctcgttagtttgcccgtctacatacaatacatattttgaatttcgtattgggcggcaagcccctactggcaggttccacgttcaattcgctccccgctctccggcaatgcctcgcacagaggaagcgcgcag

SEQ ID NO: 530803 - DNA, 588 bp, Homo sapiens
gcatgctcagtggagcgcgtctgggaattcaaggtgttccgtccaccttggcagctttaaagtgtttggatgtcagtgttttggggattttttttccaaattttaagatgcatttcctgtatgtggagtcggtagctttaacggttgaaactggggtgctgaatgctagtggcgaaaactcccacacgccgaaaattgaaccaatgtaacttcgtctggggacactaacaaatattccctatattgaggaaaatatggcgctttaaccctcagggctggcactcatcactttcaatctggggaggaatgaggaaaaaaggcattaggatcttttttgcacctagctcactattaggggctcttttttttccgctcgtttaatctttcagcgacctataaggtcctataagatcgtattacccccatttggcagatgagaaaacaagttacaagatcctcgttagtttgcccgtctacatacaatacatatkttgaatttcgtattgggcggcaagcccctactggcaggttccacgttcaattcgctccccgctctccggcaatgcctcgcacagaggaagcgcgcag

SEQ ID NO: 530804 - DNA, 603 bp, Homo sapiens
gtgaaagcttccaacatgttatattttgacttcgtagtttccaagtacatagaactctgcattttttttttttttttgcccttgcttagtgagaaactcatggtttctctggtgttttggtacattcccttgttgtagtgcatcaacaaccccaattttgtcagtgtcaggagctctgttgagctgagtgaaaactgagctgccaagtgatggagtagccaactgaagcaaagttgagccagaatgaaagtagcagcaaagcctataatcatttatcaccatagtataagcagacagctaaaaccaaagacaccagttccctctgtttcatgctcccctataaaacaatgtgctggtagagggtcaggtggatcagcaaagacgtgtcgattttctcactgttgaaggagctccaagcaaaagtctctgccacttttttggacctgtrggctgggtgaaggcccactgaataggtctaggagtgaaaaattactagatactgagtcagagtggggaaaagtatctttaatttttctcctttcctctagtaagaaggcctcaccagagatgtctaaagatgatctctgtccaaggccttagaca

SEQ ID NO: 530805 - DNA, 646 bp, Homo sapiens
tgggtcagcgagaggcaagaaagtagattgttaaacacattagtgttcctaaccaatcccagttccaattcctacacaattggagtcacatgcctgagaaatgatgtggggtaaagagaagcggatagagwtatgaagagatgttaaagatgagcattagagaggcacggcagtagattggctaagaagagaaaggacaaagcgggtaaaaactaaaactcaggttcctggattaaaaacttgagggatggatgtcctctcatgcacatgcatacatgtgtgcatacacatacaactacacacacacacacacacacacacatctgtctgtttcttactgctagagatttccattttattaccttgagttcaactctctattttttacattttatgaattactcttatattcttctgaatttatagtgtcacacgagcccacaggttgaaatcagttattttccaccgtatattttttcctcaattttaaacattttaatgaatatctatacacatcaaatatcctaaagatacagcttgataaattttcacaaagaaaacacatccatgtagccagtaccttgattaagaaatagaacataaactgaaagccagatacccctggagcctgttttcattcataacc

SEQ ID NO: 530806 - DNA, 476 bp, Homo sapiens
attgagaaaggagttttataattaagaaaggagtcacaggaaggaatcaaggaagagaaaagacttgctccatcctgtttgtttgctttcctcaaatgtttgccacataaattgcccttcgtgcaggtagaagttattaattaccacctccaactttyctctgatactcccagaaatggcatcttcaatcaccttgtgtctattattcgcatttcttttttccattaatgtatattatatcctcacattaacttctatgttttgacatatctaacttcttttctacttttggataggacctggctggggctcagcctatggtccaggagtagccacagaaatagatccttagacatgatatttagtaatttatttgcatgtatctttagacttcatgttagttacagccagtgagaagtaagataactgcaactatggacatgtagtggcattatgaataattacttctgaagcaa

SEQ ID NO: 530807 - DNA, 476 bp, Homo sapiens
attgagaaaggagttttataattaagaaaggagtcacaggaaggaatcaaggaagagaaaagacttgctccatcctgtttgtttgctttcctcaaatgtttgccacataaattgcccttcgtgcaggtagaagttattaattaccacctccaactttcctctgatactcccagaaatggcatcttcaatcaccttgtgtctattattcgcatttcttttttccattaatgtatattatatcctcacattaacytctatgttttgacatatctaacttcttttctacttttggataggacctggctggggctcagcctatggtccaggagtagccacagaaatagatccttagacatgatatttagtaatttatttgcatgtatctttagacttcatgttagttacagccagtgagaagtaagataactgcaactatggacatgtagtggcattatgaataattacttctgaagcaa

SEQ ID NO: 530808 - DNA, 620 bp, Homo sapiens
gttctcatttctcaactcaacatcatcgccaatgcatgatattgttatttgaaatgtaacttttccagtgattatgtagaggtattagactgttaattttcatttctttaatgacaaatgatgttgacacatttttcatggttgcgtttaccataaaattgcacacacacacatattatttggtgaattgtctttgtctatttaatcaagtggtttgtcytttatttgttgaatgctaatagtttttacttatgtatttgatttgaaagtactttctcccagtttgttaggttgcctttttaacttactgtcagtgtctttggatgaaaaaaagttttaattttaatgaaggctaatgtttttgtatgttattatttgtgcttttatgccctatgtaagatctttgccaaattcaagttggattaccccccaggattgctgcaaaaggctttctgattttagcacttacatgtaatcctatgatgcatttcaaattaagtttttataaggtgtgaagaaaaggtaaagattgttttaaagtataagtatctaattcttcaagaaaaaatgtcgaaaacactgcccttttcgataaaaacacttgacatctttgacaaaaa

SEQ ID NO: 530809 - DNA, 620 bp, Homo sapiens
gttctcatttctcaactcaacatcatcgccaatgcatgatattgttatttgaaatgtaacttttccagtgattatgtagaggtattagactgttaattttcatttctttaatgacaaatgatgttgacacatttttcatggttgcgtttaccataaaattgcacacacacacatattatttggtgaattgtctttgtctatttaatcaagtggtttgtcttttatttgttgaatgctaatagtttttacttatgtatttgatttgaaagtactttctcccagtttgttaggttgyctttttaacttactgtcagtgtctttggatgaaaaaaagttttaattttaatgaaggctaatgtttttgtatgttattatttgtgcttttatgccctatgtaagatctttgccaaattcaagttggattaccccccaggattgctgcaaaaggctttctgattttagcacttacatgtaatcctatgatgcatttcaaattaagtttttataaggtgtgaagaaaaggtaaagattgttttaaagtataagtatctaattcttcaagaaaaaatgtcgaaaacactgcccttttcgataaaaacacttgacatctttgacaaaaa

SEQ ID NO: 530810 - DNA, 620 bp, Homo sapiens
gttctcatttctcaactcaacatcatcgccaatgcatgatattgttatttgaaatgtaacttttccagtgattatgtagaggtattagactgttaattttcatttctttaatgacaaatgatgttgacacatttttcatggttgcgtttaccataaaattgcacacacacacatattatttggtgaattgtctttgtctatttaatcaagtggtttgtcttttatttgttgaatgctaatagtttttacttatgtatttgatttgaaagtactttctcccagtttgttaggttgcctttttaacttactgtcagtgtctttggatgaaaaaaagttttaattttaatgaaggctaaygtttttgtatgttattatttgtgcttttatgccctatgtaagatctttgccaaattcaagttggattaccccccaggattgctgcaaaaggctttctgattttagcacttacatgtaatcctatgatgcatttcaaattaagtttttataaggtgtgaagaaaaggtaaagattgttttaaagtataagtatctaattcttcaagaaaaaatgtcgaaaacactgcccttttcgataaaaacacttgacatctttgacaaaaa

SEQ ID NO: 530811 - DNA, 552 bp, Homo sapiens
tgggaaagctgcactgaagaaagaagtttgraaggtaatgtaagaaaaggaaagaggtagaaactcaaggggagaagggcttgggacttttttgggttagagagaatggtgggcacatttatagactaaaaagaatgagcaggtggaaaaaaaaagagtttaatgatatgggaaggagggggaaattgttgcagcaagaacctacagatataaaaaattaagatggttaaaaaaaaccaaaacagcaaaggaacacggtaggcagaatataggcagcctatggtttcaagatggtgtctagaacagcatagtgccatgtaagactatgcttctaagaaaaatagcaccaggtgccattccccgcatgacatcatgggagcagggattcccctccctgccatggccgtgaggtgcagaatatccctgaagtccacagggtcttcatgggcagacatgcaaatgtacaggcaggcagcaatgaggagaaaggaagaaggaacagtggcgtggtgagtacccaggatttcccttcagttccctttgctgctggaa

SEQ ID NO: 530812 - DNA, 636 bp, Homo sapiens
ggcctttactacaaatcaagcaatgtgtttgaccttatggttacagaggtaactgagatgtgttcctgtcctggatgccttaaatctagtaaatgaaacagccaacctcagtacaaatgttgtgataaaagtaagcacaagtgttatgggaacacaaaaatgttgaaaaatgcttctgactaagatgaaccctgagctgaatcttgaagaatgagtagaaatagctaagtgaggaagaaggcattccagatagagcaagcagcgtatgcaagccaactggacagagcaggggaagctcttgaagtcagtttagaatgactgctaggaaagagttagaaaactaaattacaaaggataccccacagaactcaggtcccctcgcattacctgtacttagagtttgcaataataaagcagactcttgagaagagaragaaatacacttctcagtgggatttatacgctcagtctttcattacatattttcctactaatggtgttcttagtaggaaaagctcccaacttaaagaaactaaaaaataatgtatttgacaatacattaatccttaaattttccatttttctagaaattcatctgagttcttgatctcatttatttcttcacagatgtgtgct

SEQ ID NO: 530813 - DNA, 480 bp, Homo sapiens
  misc_feature (1)...(480): n = A,T,C or G
nnnnnattattatctaggttagacttaaagtgaatctcaaataaaagaatcaggaatacaacttaagtratcatgaggtccttccatatttagattgggtaagcatgaatgtgtattttctacaaaagaccttgagaagagttcaataaaaaatgttagcattataaaaccattgatgatcattttttagtctggtaaaaatgtcttaacatttgtggattttaaaatacatgttaatattttataaaagtaatattatgaatacatttttaaaagctaaatatcataagacttataatgaaaacaaaatttccttgccctatttcacctctactaatttctcagagaaaattttcaactattttaggtgaattttccccctgagattcatctccatatatataaataacttctttatattgacatttcttgatttttcagcttaaatattatctatttactttttaatataacagataa

SEQ ID NO: 530814 - DNA, 480 bp, Homo sapiens
  misc_feature (1)...(480): n = A,T,C or G
nnnnnattattatctaggttagacttaaagtgaatctcaaataaaagaatcaggaatacaacttaagtgatcatgaggtccttccatatttagattgggtaagcatgaatgtgtattttctacaaaagaccttgagaagagttcaataaaaaatgttagcattataaaaccattgatgatcattttttagtctggtaaaaatgtcttaacatttgtggattttaaaatacatgttaatattttataaaagtaatattatgaatacatttttaaaagctaaatatcataagacttataatgaaaacaaaatttccttgccctatttcacctctactaatttctcagagaaaattttcaactattttaggtgaattttccccctgagattcatctccayatatataaataacttctttatattgacatttcttgatttttcagcttaaatattatctatttactttttaatataacagataa

SEQ ID NO: 530815 - DNA, 604 bp, Homo sapiens
ctgcggggtttgcttttgctggtcgtagcgtaagcrggtgagggtgttgagcctcctgatggcgtcagcagcgtgcctgagttatccccaggagctgcaggtcattgcaacacagggctagaagaagcacctgctgcggccgttggaaggatttgtcccgtcagacactcggcagccctgagggagaatcaagttgtgaatttcgtcactggcatactgacataaattgagcttagcttgaatgtcactgatcactcgctggctcgggtggtctttcccaaccacaagccgctggtctcagtgacaacagctctgcaaagtgtcagaatccaacacaggcctgccaaatgaccctgggcaacctggaggtgagggagcctcttgccaaccagagagggctgcgcccgcaacggtacgctccccgaagaagaacattctggagcctggtctcattcaccctctgttttcccttacacttgtttgtcaacatgatgaatgagaggcaaatggcaggaccacagtgtttcaaaaatgtgaattgatttttttccctaggcctttgggttcactgaccagaagaaaaaacctcaaataaaaccgggtg

SEQ ID NO: 530816 - DNA, 502 bp, Homo sapiens
ggggtttgcttttgctggtcgtagcgtaagcgggtgagggtgttgagcctcctgatggcgtcagcagcgtgcctgagttatccccaggagctgcaggtcattgcaacacagggctagaagaagcacctgctgcggccgttggaaggatttgtcccgtcagacactcggcagccctgagggagaatcaagttgtgaatttcgtcactggcatactgacataaattgagcttagcttgaatgtcactgatcactcgctggctcgggtggtctttcccaaccacaagccgctggtctcagtgacaacagctctgcaaagtgtcagaatccaacacaggcctgccaaatgaccctgggcaacctggaggtgagggagcctcttgccaaccagagagggctgcgcccgcaacggtacgctccccgargaagaacattctggagcctggtctcattcaccctctgttttcccttacacttgtttgtcaacatgatgaatgagaggcaa

SEQ ID NO: 530817 - DNA, 593 bp, Homo sapiens
ttgaatccccttatcagctatggtgggagggtggtatgctctgttttccttaatgctctggataaacagtctaaggaaaaaatcacctggtcaaggaggaaattggttgctaacccaaacttttaaaaaacgaaagcagaaaattatggcaatgaaagttttaatgattgttctcttatcgttctccgtgaggccgctgtgggatacgtaaaggacatcctttctatctctaccggattcactctctctttgaagaaagcaatgcaaccaagaagttracacactcctgggtttctggagaggataaagcccaagaaaactcaaactgtatttggatattaataaggactttgctttggcaaacaaaaccatgtgaaggtccagggttgccagaccaaagagctctgagcagtggtcctgtggcatgtttttatttttttaattttttaaatttttttaggaacagggtctcactgtgttgcccaggctggtcttgaactactgggctcaagggatcctcccaccttggcctcccaaagcactggcgtgataggcatgagccccacacctggccctggtcctgcagcacatcc

SEQ ID NO: 530818 - DNA, 607 bp, Homo sapiens
tccccaggtatccactgggctggcctggtggtgaccagttactggccagctcatatcatttggcttagtcattttgtttcctcagttgttcaattcctcttccaaggtggaaacatacaacacatgacatggaatactcatccttctcctgtgtccacatacacaccactgcctcaggcctccaactccccagccttccaatctttctctttttagaccagtggcccatcagtcaagtgattctccactgcccatgtgtctgtttgaccctgtgcaacacagtgggtgacatggggtcctgggttacctgttcatgagctggtaaaccttctggctcagctcgtactcaataccaaatgcamccattccatgatacagtgggcccacctgatcttgtgacttggtggttctgacagagcccattcatatgggcaattgttgccacattgtcattggttctcacagtcaggtgccccatcttcagggctcagtagcacaatagaaattgttttccagaaggcatagagttctccactgcagatggcatgactaagccccagaaacataggagtcctcattatgattctcccacaaggcatgtgtttta

SEQ ID NO: 530819 - DNA, 615 bp, Homo sapiens
actcgttaaaagggttattcagctgcagagggcactgttctaggcgtacagataatatcgactgcttcccagaaattggaggcttctctttgagagattttttttcaaacagtgactttaactcctgggctgtgatacaagaggaagaaaaacatctttgtgattacacagagacaacttgtccaccttccctaaaaagtcttccttagaaccttaaggaaggagcatccagagacatgttcaggtcggatacatgcagaaagccccacaatataccgtgcactgaaaaggcagagcacggaagaacgtgcaggccaggatagtcaatttggaaagagaaggggttaagggagggggaagaatcagacaaagtaacaaaggagccattttataggaagagcactcacagccaggagacccgagctttggcccggctttgctactaacggcaagctatgtgacagtagacacttctctaaacctttctgggcttgtcaaactagaaaatctcaaagatccctcctgcctgtaatattatgtgattttggaattctagttcttcaaggtcaagatctrcatattaattctctaacactctccagttgcaccttgtac

SEQ ID NO: 530820 - DNA, 669 bp, Homo sapiens
tggggaatgaaataaaacaaagataagaaaaacaaatgaaaggattttagcaaagcataaataatagaaaaagaatgagggaatgaagttgggtatggtrtcatgtgcctgtagtcctagctcctcaggaggttgacacacttgaatccagagtttgaggccagcctgggcaacacagtgagacccccaattcttaaaagcagagaatgaataaataattacccatccaaaactctcaataaagatcaaaaagatttagatgtggcatttcttgctgagagagtacgtttgtgggagatgtataaaaaaaggatggctgctcagtttgccaggtagatgtttagtggactgctgattccacttttctagcatgcttcaatacacccagagtgccaagctatggtttaatgataggacccagcctaagggagaatccaaagacattcttttgtgcattgataagtttcactctaaccatcaggaatgactaccaggcaggctgctggtctggccagaatcagggaataacagttcaagcatgaacatacacattgaagagcttctccagaagtaagaccacaggctcaattatcaaaatccgtgagacacagaaaagagagagaaggaaactgaaggagagaagtataagaagtacatgtctacaatgga

SEQ ID NO: 530821 - DNA, 540 bp, Homo sapiens
tattcctaataggcaatcccttaaaagaataaaagcacaaaggaaatagaaacatcccaaatttcagacataatcatcattaccgttaggtgacccttacaaaattatctctttctatatgtacacatggcaatagatataaaaatgggcatcattttaaatataatacatttattatacattktatccatgttaaatatgatatttaattctacttaaatttaacagaataaaaaattctgaaatgggatctaaagaattgctgattttatagaaatgattctttgccacaaatgtatcatttctgaaatgaccccactttgattaaaggaaaagaaaagtgacaataataagcagttttcgtcatttcttctaaaccatgagctttaatttcagacagtatcagtaactctgctatgatacatgaaccaattacctctctcactccacttcacttcagctcacctctcacgtttccctagttatatgagttttacatagttaagtttaaaatttttgatttctgtaaccataaaccct

SEQ ID NO: 530822 - DNA, 637 bp, Homo sapiens
ctgctgcagaaaaccaggacctctccactgtgcttcacaatggaaatggcagacacggcaaagcgcagcccccactcccttctgtcctgtaaatggcaagtaagtgcacctagtcaaaatgaaataaaatcaggcccagaatctagctgcaagggagtttggagaatgtcatttttagtattacaacttctgcacacaggctggagagtagaaagcrtgcagagctctggtccgccaggatccagtgcaactcagagtgcagatgcattgatttccaaacaagaattgctgtcaattgactgcagggtagaccataagcattccgggtctcatgggaccgcacttgtctctcttctttgcctgcgagatctcccccagctcctgtactcagcagtagtcacccctgcagtaggtactgtgaaggaggatgctgaggtcaaggaagaatcttcagcctcagaaatgtctttgattgtgaagtcacagaagctgcctgggtggcagactgcttgtgcactcctgtgcagatcaggggctgcaacccaattcttgccccacagcaggtcagtgagaaggcagacctacaaatcagcatgtgcttgcttcatatgatttgtctcatttaactggccagaca

SEQ ID NO: 530823 - DNA, 537 bp, Homo sapiens
agtaagtgcacctagtcaaaatgaaataaaatcaggcccagaatctagctgcaagggagtttggagaatgtcatttttagtattacaacttctgcacacaggctggagagtagaaagcgtgcagagctctggtccgccaggatccagtgmaactcagagtgcagatgcattgatttccaaacaagaattgctgtcaattgactgcagggtagaccataagcattccgggtctcatgggaccgcacttgtctctcttctttgcctgcgagatctcccccagctcctgtactcagcagtagtcacccctgcagtaggtactgtgaaggaggatgctgaggtcaaggaagaatcttcagcctcagaaatgtctttgattgtgaagtcacagaagctgcctgggtggcagactgcttgtgcactcctgtgcagatcaggggctgcaacccaattcttgccccacagcaggtcagtgagaaggcagacctacaaatcagcatgtgcttgcttcatatgatttgtctcatttaactggccaga

SEQ ID NO: 530824 - DNA, 547 bp, Homo sapiens
tgccgaatcctgcccagaactggctccacccgcctttcctttgcttatgacttaacacttggttgccctaattccctattctcctgtctcaccaagatcatccagattgatgtgagcccttgtataaatcaagcctgagaggggcccctggtccctctctggccttttcagacacaagcatacatcagggacagcagcaaccccaacagcatgggcatgtctggaaccagggaaccgtttgtgcctgaacttaggttgtgaccactttgggtgtagccttsggggcaaactgagtttccaaagggtcgacctgcctgattctttcaccctctagcagttcaggtcctccccgagcataacagagtctcatctggggcagttcgtgactcaaggagtaattctggttcagaggtgccctagcaaaaacaggagcatcaaactgcaccattgctttaatttgggcttgcaggcagactgtcggggcttgagttgaactggttctctgagattctagctaattggattgagaaggggcacattctgcatg

SEQ ID NO: 530825 - DNA, 150 bp, Homo sapiens
aacccagcgagcctgcactgcgatgcccatcacatcccaacagatgtcacatgtccrgcatttgcctgaacccctacctcacagcctgttgctgccaccactcccttatggcgcatcacacagctaagagatgctcacagcccccacgca

SEQ ID NO: 530826 - DNA, 485 bp, Homo sapiens
catgagaaataaatttctattatctataaattacccagtgtaaggtagtttgttgtagctgtccaagtggactaagacagcaggaaaatatccaaatttttttttttttttttttttttgagatggagtcttgctctctcacccaggcttgagtgcagtggcatgattttagttcactgcaacctccacctcctgggttcaagtgattctcctgcctcagcctcctaagtagttgggattacaggcacacaccaccatgcccggctaatttttttttttttttttaagtaaagaaggggtttcaccaagttggccasactggtctcaaactcctgaactcgggtgacctgcctcggcctcccaaggggctgggattacaggcatgagccactgcgcctggtcccaaattctttctcatgatgtgaaagtgctttcattgtgtgacctctgcttccttctttagctcacttcctacctctccttga

SEQ ID NO: 530827 - DNA, 548 bp, Homo sapiens
cttgacccctagtaattctaagtgttccctattctatctccctggccaaaaagagaccacaaaaagaaaagtccctaaaggatttcatttgagctcctattttgttctcttagtcgttgagttcatcttgcctcacacatcatgaagaatatgaatccrcaaaatgaaggacactgtgtccttatttctgcagggcaattattctctccatcaatacctcattctgctgactaagtagttcaccttcactttgtaacaagcccaggccaccggacttaaccacttcttccttaaaagggccaggtacctcccccatacacccacaggtttttaagcacccctaaaataagttgtctcatgatgtcttcccagccctgatgtctaatcagcccttctctttcctgtgactctcctactcagttgaggttctattgccctaattttcagacttcttcaaaggctttgtcagagtctccccaccgccagcctctacctactcccaaaccatcctgcacaagatcatcagattaatactttgctttctggct

SEQ ID NO: 530828 - DNA, 590 bp, Homo sapiens
tttgaagtcactgaaatggtaatcagataaatgagagagcagagggagcaataaataaaggctcaaagacatgagcgcagggcagaactgacacagtgggcatggttggggttggggctggggctagggtgggtcagagagcttgcatgccaccctatgttaggggaccactgaaggggctttaagctggagagtgactccgccagatttgcatcctggaaagatagctctgacttagtttgcagaatgaaytggcagagacaagattgtatgcagaaagagttttaggaagttgataaagtagccttggtgagaaatgcagcggacctgatccaagacagtgtcagaggccatcactcgctttgcattacattacattactttacattacagtgtaaaggccatcactcacttgtcttctgaatgggcaggcaggattcaagcagccggggctcctgtatcccttttctcgctgactctctctctcctcttctctttctctctctctctcccccaacccccacccccactatactccctcttgctctggttttcccatgttgcctctccagcatggcagcttcaaggca

SEQ ID NO: 530829 - DNA, 629 bp, Homo sapiens
ggaggaggttgggaaggctttccaaatacacttgggctgagttttgaagtcactgaaatggtaatcagataaatgagagagcagagggagcaataaataaaggctcaaagacatgagcgcagggcagaactgacacagtgggcatggttggggttggggctggggctagggtgggtcagagagcttgcatgccaccctatgttaggggaccactgaaggggctttaagctggagagtgactccgccagatttgcatcctggaaagatagctctgacttagtttgcagaatgaactggcagagacaagattgtatgcagaaagagttttaggaagttgataaagtagccttggtgagaaatgcagcggacctgatccaagacagtgtcagaggccatcactcgctttgcattacattacattactttacattacagtgtaaaggccatcactcacttgtcttctgaatgggcaggcaggattcaagcagccggggctcctgtatcccttttctcgctgactctctctctcctcttctctttctctctctctctyccccaacccccacccccactatactccctcttgctctggttttcccatgttgcctctccagcatggcagcttcaag

SEQ ID NO: 530830 - DNA, 574 bp, Homo sapiens
acatgagaagcaaggctaggtgattaaagagaccaacagggaagattcaaagtagcgacttagagtaaaaacaaggttaggcatttcactttcccagagaacgcgcaaacattcaatgggagagaggtcccgagtcgtcaaagtcccagatgtggygagcccccgggaggaaaaaccgtgtcttccttaggatgcccggaacaagagctaggcttccggagctaggcagccatctatgtccgtgagccggcgggagggagaccgccgggaggcgaagtggggcggggccatccttctttctgctctgctgctgccggggagctcctggctggcgtccaagcggcaggaggccgccgtcctgcagggcgccgtagagtttgcggtgcagagtcgggatcgcctctggggcagagggttcgagcttttccaaggcgagggtgctggctcccgtgcgcacctaagggcccccaggagcgggcgcaaagggcggcgggcccgcgggccagggccccgcagccagcaggctgtcgagcgtggccagcgcccagtgcagggcggccccggcgtgcgccag

SEQ ID NO: 530831 - DNA, 574 bp, Homo sapiens
acatgagaagcaaggctaggtgattaaagagaccaacagggaagattcaaagtagcgacttagagtaaaaacaaggttaggcatttcactttcccagagaacgcgcaaacattcaatgggagagaggtcccgagtcgtcaaagtcccagatgtggcgagcccccgggaggaaaaaccgtgtcttccttaggatgcccggaacaagagctaggcttccggagctaggcagccatctatgtccgtgagccggcgggagggagaccgccgggaggcgaagtggggcggggccatccttctttctgctctgctgctgccggggagctcctggctggcgtccaagcggcaggaggccgccgtcctgcagggcgccgtagagtttgcggtgcagagtcgggatcgcctctggggcagagggttcgagcttttccaaggcgagggtgctggctcccgtgcgcacctaaggscccccaggagcgggcgcaaagggcggcgggcccgcgggccagggccccgcagccagcaggctgtcgagcgtggccagcgcccagtgcagggcggccccggcgtgcgccag

SEQ ID NO: 530832 - DNA, 534 bp, Homo sapiens
aaacagctgcagacagaggctcccactgagaagaatgaaaacagtgagtgaatcctgcactggtgactgaggtatccaggttctcctattgggacttactaggcaattggcatgacccatggagagtgaggaaaagcatggagagtgaggaaaagcacggagagtgaggaaaagcagggtggtgtgacggcccacctggaagccacacaaggcaaagggagctaccacctgcagccaagggaggcagtgagtgattgtgctaccctgcccaggaaaccacactttttccatggatctgtgcaacccacagatcaggagatccccttcgtgagcccacacaccagggccttggtgtgtagccacaaggctrgagagagcctaccacagagctgtgcagattctcagcagccactaggctggagactgcctaaggctgctgagttcctgcgggaaggactggccaccatcactgtggcttcctgctgcctaagatgacttgagttcccggtaggaggagtggcagccatcactgca

SEQ ID NO: 530833 - DNA, 554 bp, Homo sapiens
gcagacagaggctcccactgagaagaatgaaaacagtgagtgaatcctgcactggtgactgaggtatccaggttctcctattgggacttactaggcaattggcatgacccatggagagtgaggaaaagcatggagagtgaggaaaagcacggagagtgaggaaaagcagggtggtgtgacggcccacctggaagccacacaaggcaaagggagctaccacctgcagccaagggaggcagtgagtgattgtgctaccctgcccaggaaaccacactttttccatggatctgtgcaacccacagatcaggagatccccttcgtgagcccacacaccagggccttggtgtgtagccacaaggctagagagagcctaccacagagctgtgcagattctcagcagccactaggctggagactgcctaaggctgctgagttcctgcgggaaggactggccaccatcactgtggcttcctgctgcctaagatgacttgagttccyggtaggaggagtggcagccatcactgcagctccagtctgccatttttcccctgcca

SEQ ID NO: 530834 - DNA, 528 bp, Homo sapiens
ggagccacccagcacacaaaaagtctgcctttctttgaccttaggtttccccaccacctgccggatcagggcccgtggggcggggrccgctgcctttgtcaccccagctctaactctcctgcctccctggcccctgccaccccctccacacaccaatccgcacagacgagacactcgaccctcactcacctcgtcctctctcagagccctcccggttcttgcgggtctccatcttcccctgctttccacagggaggtctgtcttctcccgtctcctcaaaggacagcttccccatccaggaaagagctctgtgttcccggcgaggaggctctaccctctggcagcctgagcagcgcaagcggggcaatggccggttgggcgcagccggcgggctttgatagggagccaggaccccctgctgggagttcccaggaggattggctgcggacacgcccacaggggcaggctaccttgattaggttaggcgggttggaggggttccgctttctccctgggtccctgccgctc

SEQ ID NO: 530835 - DNA, 430 bp, Homo sapiens
cacaaaaagtctgcctttctttgaccttaggtttccccaccacctgccggatcagggcccgtggggcgggggccgctgcctttgtcaccccagctctaactctcctgcctccctggcccctgccaccccctccacacaccaatccgcacagacgagacactcgaccctcactcacctcgtcctctctcagagccctcccggktcttgcgggtctccatcttcccctgctttccacagggaggtctgtcttctcccgtctcctcaaaggacagcttccccatccaggaaagagctctgtgttcccggcgaggaggctctaccctctggcagcctgagcagcgcaagcggggcaatggccggttgggcgcagccggcgggctttgatagggagccaggaccccctgctgggagttcccaggaggattggctg

SEQ ID NO: 530836 - DNA, 430 bp, Homo sapiens
cacaaaaagtctgcctttctttgaccttaggtttccccaccacctgccggatcagggcccgtggggcgggggccgctgcctttgtcaccccagctctaactctcctgcctccctggcccctgccaccccctccacacaccaatccgcacagacgagacactcgaccctcactcacctcgtcctctctcagagccctcccggttcttgcgkgtctccatcttcccctgctttccacagggaggtctgtcttctcccgtctcctcaaaggacagcttccccatccaggaaagagctctgtgttcccggcgaggaggctctaccctctggcagcctgagcagcgcaagcggggcaatggccggttgggcgcagccggcgggctttgatagggagccaggaccccctgctgggagttcccaggaggattggctg

SEQ ID NO: 530837 - DNA, 430 bp, Homo sapiens
cacaaaaagtctgcctttctttgaccttaggtttccccaccacctgccggatcagggcccgtggggcgggggccgctgcctttgtcaccccagctctaactctcctgcctccctggcccctgccaccccctccacacaccaatccgcacagacgagacactcgaccctcactcacctcgtcctctctcagagccctcccggttcttgcgggtctccatcttcccctgctttccacagggaggtctgtcttctcccgtctcctcaaaggacagcttccccatccaggaaagagctctgtgttcccggcgaggaggctctamcctctggcagcctgagcagcgcaagcggggcaatggccggttgggcgcagccggcgggctttgatagggagccaggaccccctgctgggagttcccaggaggattggctg

SEQ ID NO: 530838 - DNA, 430 bp, Homo sapiens
cacaaaaagtctgcctttctttgaccttaggtttccccaccacctgccggatcagggcccgtggggcgggggccgctgcctttgtcaccccagctctaactctcctgcctccctggcccctgccaccccctccacacaccaatccgcacagacgagacactcgaccctcactcacctcgtcctctctcagagccctcccggttcttgcgggtctccatcttcccctgctttccacagggaggtctgtcttctcccgtctcctcaaaggacagcttccccatccaggaaagagctctgtgttcccggcgaggaggctctaccctctggcagcctgagcagcgcaagcsgggcaatggccggttgggcgcagccggcgggctttgatagggagccaggaccccctgctgggagttcccaggaggattggctg

SEQ ID NO: 530839 - DNA, 528 bp, Homo sapiens
ggagccacccagcacacaaaaagtctgcctttctttgaccttaggtttccccaccacctgccggatcagggcccgtggggcgggggccgctgcctttgtcaccccagctctaactctcctgcctccctggcccctgccaccccctccacacaccaatccgcacagacgagacactcgaccctcactcacctcgtcctctctcagagccctcccggttcttgcgggtctccatcttcccctgctttccacagggaggtctgtcttctcccgtctcctcaaaggacagcttccccatccaggaaagagctctgtgttcccggcgaggaggctctaccctctggcagcctgagcagcgcaagcggggmaatggccggttgggcgcagccggcgggctttgatagggagccaggaccccctgctgggagttcccaggaggattggctgcggacacgcccacaggggcaggctaccttgattaggttaggcgggttggaggggttccgctttctccctgggtccctgccgctc

SEQ ID NO: 530840 - DNA, 473 bp, Homo sapiens
acacaaaaagtctgcctttctttgaccttaggtttccccaccacctgccggatcagggcccgtggggcgggggccgctgcctttgtcaccccagctctaactctcctgcctccctggcccctgccaccccctccacacaccaatccgcacagacgagacactcgaccctcactcacctcgtcctctctcagagccctcccggttcttgcgggtctccatcttcccctgctttccacagggaggtctgtcttctcccgtctcctcaaaggacagcttccccatccaggaaagagctctgtgttcccggcgaggaggctctaccctctggcagcctgagcagcgcaagcggggcaatggccggttgggcgcagccggcgggctttgatagggagccaggaccccctgctgkgagttcccaggaggattggctgcggacacgcccacaggggcaggctaccttgattaggttaggc

SEQ ID NO: 530841 - DNA, 473 bp, Homo sapiens
acacaaaaagtctgcctttctttgaccttaggtttccccaccacctgccggatcagggcccgtggggcgggggccgctgcctttgtcaccccagctctaactctcctgcctccctggcccctgccaccccctccacacaccaatccgcacagacgagacactcgaccctcactcacctcgtcctctctcagagccctcccggttcttgcgggtctccatcttcccctgctttccacagggaggtctgtcttctcccgtctcctcaaaggacagcttccccatccaggaaagagctctgtgttcccggcgaggaggctctaccctctggcagcctgagcagcgcaagcggggcaatggccggttgggcgcagccggcgggctttgatagggagccaggaccccctgctgggwgttcccaggaggattggctgcggacacgcccacaggggcaggctaccttgattaggttaggc

SEQ ID NO: 530842 - DNA, 540 bp, Homo sapiens
gttttctatggagaaacaggcagcagaggagagtgggccagagggccacattttgcccacgaccagccaggtttgagttggttcctcctaggcctcacggtctgattttctcctccyctttgtgtacccgacgggtgttgctgtgagctcaggaccatcccggcgggctgcggatgggatcatcgtgtgtgtatggccacagccctccgcctcgctcgctcggtgagcacgtgaatcaaggaaggggcacacgactctaggcaggacccggcggggtgtggggaggagaaactcggtaagagaagagagggagagggagacgtgcgaggcgcaggctgtcccaggcgagtctgagaaacggcgtgcgcggagacgtccgccagaaagcaagcaggcgaaaggaaatggaacatccgcagggccggtgccgtgggatccggtcacgccctgacggctttcggggacatctcaggctcgctgtctccgccttggacctggcgcagagaggagtgaggcctgaggacagggctgcgtggccag

SEQ ID NO: 530843 - DNA, 671 bp, Homo sapiens
tgtgggaggtgccaacacagtaagggctggtcaaggggtggccgggagcgatacgggggcgttgctcaagaaatcaccgctggaactgggattccagtccagtgggatacgtccagtcatcccacttctggacgtatcgcctaaggacacgaaatcgggatgtggtgcaaatatgtgtcctgctgcgttggttgtcggcacgctacctgtaaccaagacgtggaatcgacctaagtgcccatcagyagatgactagagaaggacaaaggagtggggttcgcagaagaaacacatcagggaaaggaaaggagagccggtcatctgggacgtcatgcacggacccaaaagtcatggtgcccagtgaaatcagccaggcccatccgacccgtattgcgtgatctccttgggatgtgggatggaaagcggtgaggatcgcgaaagtagagaggagaaaggtggttggccgggcctggggccggggtaggggcagggaaaagatgccaatgcgagatgtgggtcaaagggcacaaagtttccgagaggcaggtggagtgcttcctggatatccgtggcagggcaacgtgagtacggtggagcagaatgtaaggttctcgtgaatatacccacgggagtagagctgaaaattctcccgacagggacaggggacgcat

SEQ ID NO: 530844 - DNA, 671 bp, Homo sapiens
tgtgggaggtgccaacacagtaagggctggtcaaggggtggccgggagcgatacgggggcgttgctcaagaaatcaccgctggaactgggattccagtccagtgggatacgtccagtcatcccacttctggacgtatcgcctaaggacacgaaatcgggatgtggtgcaaatatgtgtcctgctgcgttggttgtcggcacgctacctgtaaccaagacgtggaatcgacctaagtgcccatcagtagatgactagagaaggacaaaggagtggggttcgcagaagaaacacatcagggaaaggaaaggagagccggtcatctgggacgtcatgcacggacccaaaagtcatggtgcccagtgaaatcagccaggcccatccgacccgtattgcgtgatctccttgggatgtgggatggaaagcggtgaggatcgcgaaagtagagaggagaaaggtggttggccgggcctggggccggggtaggggcagggaaaagatgccmatgcgagatgtgggtcaaagggcacaaagtttccgagaggcaggtggagtgcttcctggatatccgtggcagggcaacgtgagtacggtggagcagaatgtaaggttctcgtgaatatacccacgggagtagagctgaaaattctcccgacagggacaggggacgcat

SEQ ID NO: 530845 - DNA, 622 bp, Homo sapiens
atgatgactcaattgagcccgtggggagagagagagagacagacagacagacggacaaacatcttccctcagctcctggcactaaacaatatgtgtgttatggtctgaatgtgtgagtctcccaaaattcataggttgaaatcataacccccaagatgatggtattattaagaggtggtgcctttgtggggtgattaggtcatgaaggtggaaccctcatgagtgagattaatgcccttataaaagagaacaccgagagctagctagctgcttccaccatatgaggttacagtgagaagatatgccctcattagacactgaatccacctggatcttgggctgtgcagtctccaaaactatgagaaataaatttctgtggtttataagccatacagcttgtggtatttttatagtccattgtcaaatggactcagacagtacattttcatggttgctctatcttgctccttacaccatggattttgatgtaactgctctatacatctatcctcaaaaggaagcacatgcaggtgcctataggatacaagatgcaaaaagtgtrtcctggaggagaatggggatagtcttgactggcaggcttagtgatgtcccattttcccat

SEQ ID NO: 530846 - DNA, 440 bp, Homo sapiens
atcctcctgggaacacccagcagggggtcctggctccctatcaaagcccgccggctgcgcccaaccggccattkccccgcttgcgctgctcaggctgccagagggtagagcctcctcgccgggaacacagagctctttcctggatggggaagctgtcccttgaggagacgggagaagacagacctccctgtggaaagcaggggaagatggagacccgcaagaaccgggagggttctgagagaggacgaggtgagtgagggtcgagtgtctcgtctgtgcggattggtgtgtggagggggtggcaggggccagggaggcaggagagttagagctggggtgacaaaggcagcggtccccgccccacgggccctgatccggcaggtggtggggaaacctaaggtcaaagaaaggcagactttttgtgtgctgggtggctccgc

SEQ ID NO: 530847 - DNA, 440 bp, Homo sapiens
atcctcctgggaacacccagcagggggtcctggctccctatcaaagcccgccggctgcgcccaaccggccatttccccgcttgcgctgctcaggctgccagagggtagagcctcctcgccgggaacacagagctctttcctggatggggaagctgtcccttgaggagacgggagaagacagacctccctgtggaaagcaggggaagatggagacccgcaagaaccgggagggttctgagagaggacgaggtgagtgagggtcgagtgtctcgtctgtgcggattggtgtgtggagggggtggcaggggccagggaggcaggagagttagagctggggtgacaaaggcagcggyccccgccccacgggccctgatccggcaggtggtggggaaacctaaggtcaaagaaaggcagactttttgtgtgctgggtggctccgc

SEQ ID NO: 530848 - DNA, 595 bp, Homo sapiens
tggagaaagaggagggggtgggggacacctgggagcagagccattcctgccttgaagtcactctgggagcttggcccttgcaaccctcccgcagccgtctacggacgggtcatggcccactcactgtcgacctcctcttcccccgcagcttccagcgggcacagccgggaggcctctgcgtccaggcacaaacggtggagaagccccgacggctcccctcgcagtcccggcagagaaaccggaaaccgagggcggaaggtcaagccacgaccagccccagccggagagcgaggccacgacaagcccgagtccggcagagcacgacgcccccacgagcgcagaggaggcaggyttaggggctgggagcttggaggggtggggaggagggcgcagggccccgggaaggggagcggggagtggggggccccgagggggccgaggaagccctcagtgcgccaggaacccgggcccccggtggccccagatgagatgtgcttcaagtttgaatgggcggaggggagggcaccccggacggggcaccggagtccccaggatgcagggaggggccgagaggatggggcgcggaggcgagccg

SEQ ID NO: 530849 - DNA, 512 bp, Homo sapiens
ctggagaaagaggagggggtgggggacacctgggagcagagccattcctgccttgaagtcactctgggagcttggcccttgcaaccctcccgcagccgtctacggacgggtcatggcccactcactgtcgacctcctcttcccccgcagcttccagcgggcacagccgggaggcctctgcgtccaggcacaaacggtggagaagccccgacggctcccctcgcagtcccggcagagaaaccggaaaccgagggcggaaggtcaagccacgaccagccccagccggagagcgaggccacgacaagcccgagtccggcagagcacgacgcccccacgagcgcagaggaggcaggcttaggggctgggagcttggaggggtggggaggagggcgcagggccccgggaaggggagcggggagtggggggccccgagggggccgaggaagccctcagtgcgccaggaaccygggcccccggtggccccagatgagatgtgcttcaagtttgaatggg

SEQ ID NO: 530850 - DNA, 621 bp, Homo sapiens
ctggcgcacgccggggccgccctgcactgggcgctggccacgctcgacagcctgctggctgcggggccctggcccgcgggcmcgccgccctttgcgcccgctcctggggggccttaggtgtgcacgggagccagcaccctcgccttggaaaagctcgaaccctctgccccagaggcgatcccgactctgcaccgcaaactctacggcgccctgcaggacggcggcctcctgccgcttggacgccagccaggagctccccggcagcagcagagcagaaagaaggatggccccgccccacttcgcctcccggcggtctccctcccgccggctcacggacatagatggctgcctagctccggaagcctagctcttgttccgggcatcctaaggaagacacggtttttcctcccggggcctcaccacatctgggactttgacgactcgggacctctctcccattgaatgtttgcgcgttctctgggaaagtgaaatgcctaaccttgtttttactctaagtcgctactttgaatcttccctgttggtctctttaatcacctagccttgcttctcatgtaaataaggctctctgtagctgggaatgctggacaaactccaatcgac

SEQ ID NO: 530851 - DNA, 593 bp, Homo sapiens
ctggcgcacgccggggccgccctgcactgggcgctggccacgctcgacagcctgctggctgcggggccctggcccgcgggcccgccgccctttgcgcccgctcctggggggccttaggtgtgcacgggagccagcaccctcgccttggaaaagctcgaaccctctgccccagaggcgatcccgactctgcaccgcaaactctacggcgccctgcaggacggcggcctcctgccgcttggacgccagccaggagctccccggcagcagcagagcagaaagaaggatggccccgccccacttcgcctcccggcggtctccctcccgccggctcacggacatagatggctgcctagctccggaagcctagctcttgttccgggcatcctaaggaagacacggtttttcctcccggggsctcaccacatctgggactttgacgactcgggacctctctcccattgaatgtttgcgcgttctctgggaaagtgaaatgcctaaccttgtttttactctaagtcgctactttgaatcttccctgttggtctctttaatcacctagccttgcttctcatgtaaataaggctctctgtagc

SEQ ID NO: 530852 - DNA, 593 bp, Homo sapiens
ctggcgcacgccggggccgccctgcactgggcgctggccacgctcgacagcctgctggctgcggggccctggcccgcgggcccgccgccctttgcgcccgctcctggggggccttaggtgtgcacgggagccagcaccctcgccttggaaaagctcgaaccctctgccccagaggcgatcccgactctgcaccgcaaactctacggcgccctgcaggacggcggcctcctgccgcttggacgccagccaggagctccccggcagcagcagagcagaaagaaggatggccccgccccacttcgcctcccggcggtctccctcccgccggctcacggacatagatggctgcctagctccggaagcctagctcttgttccgggcatcctaaggaagacacggtttttcctcccggggcctcrccacatctgggactttgacgactcgggacctctctcccattgaatgtttgcgcgttctctgggaaagtgaaatgcctaaccttgtttttactctaagtcgctactttgaatcttccctgttggtctctttaatcacctagccttgcttctcatgtaaataaggctctctgtagc

SEQ ID NO: 530853 - DNA, 381 bp, Homo sapiens
tgttatttaatataggggagtaagagaaggcttcactggtagatgacattatagaaaatgagaatatgggccgggcgtgatggctcatgcctgtaatcccagcactttgggaggctgaggcaggcagatcacgaggtcaagagattgagaccatcctgtccaacatggtgaaaccctgtctctactaaaaatacaaaaattagctgggygtggcggcatacgcctgtagtcccagctactcgggaggctgaggcaggagaatcgcttgaacctgggaggtggagattgcactgggccgagatcacgccactgcattccagcctgggctacagaacaagactctgtctcaaaaaaaaaaaaaggaatatgagccttgtagat

SEQ ID NO: 530854 - DNA, 381 bp, Homo sapiens
tgttatttaatataggggagtaagagaaggcttcactggtagatgacattatagaaaatgagaatatgggccgggcgtgatggctcatgcctgtaatcccagcactttgggaggctgaggcaggcagatcacgaggtcaagagattgagaccatcctgtccaacatggtgaaaccctgtctctactaaaaatacaaaaattagctgggcgtggcggcatacgcctgtagtcccagctactcgggaggctgaggcaggagaatcgcttgaacctgggaggtggagattgcaytgggccgagatcacgccactgcattccagcctgggctacagaacaagactctgtctcaaaaaaaaaaaaaggaatatgagccttgtagat

SEQ ID NO: 530855 - DNA, 566 bp, Homo sapiens
tcaaaaacaaacaaacaaacaaaagaaagaacctctggagaaggcttactatcacttttagagcaagagtgataaaaatatgaataatatcataatatatagtttcatatcaaatgagaatatttattgagcatctacacygtttcaataaaaccatcagaagatccaccagaaaacaatatgttgtcactgcctgtatgtacactgctgtatctggcatgcctacacaaagtagtcatgaatgaatacatttgatttttggttttttttcttgagacaaggtctcattgtgtcactcaggctggagtgcagtggtatgagcaatgggtcactgcagccttgaccctcccaggatcaagcgatcctcccacctcagcctcccaatctgttgagattgtagccatgagccacccaccatgccaggtctaatgaatacatttattttagattgagggtcagacactttatataagttactgctgatcttatgatatatgaaaaatatatattatcaatacgaaattttacctgaatgaatcgatcagatttatcctttaagatgtaaa

SEQ ID NO: 530856 - DNA, 600 bp, Homo sapiens
tcaggaggctgactttgatggatggactcgatgggctyttgtagttggcttctcactgggttcagccaatggcagcaccagcaggaggtttggtgagaagtggttgggtgcagttgggacatttattttcctggctcttttgcggcagagtcaccatgaactgtgtgtatcccttgactaaaggcctcagctccatggaattccctctccatgtttttgtaacttcaccctcaccttgacccagacactagccacagggcactgcagatctcttgttgcttttctggaactttccctcaattttgtgcatagtccccttttaaatctccccaagcttgagcatgccacctgtttcttgctgggatcctctttgatattagtcttcttgtttggtgagaggcaaaggagttgaacctaaggtacagatcaattaattattcattgacatatccaactcatctttctgactagactgccctggggtgtgtgtgtgtgtgtgtgtgtgtgtgtgtgtgtgtgtgtgcgcgcgcgcgcgtgtgtgttgactactgggtggttgatgcctattgggcagagtaagatacgctaagggaaacatgg

SEQ ID NO: 530857 - DNA, 617 bp, Homo sapiens
ccagaacctgtgaagtccagtgtgtgaatccagccagatccatgtcatgaatctccycaggctgccccatttcaatacagttaactcagtccggtcacacctaggaggagactgcagggctgaaagatgctgtaagaggaggagagaagaggtgtattgtggagccatactgtctgttccagggactctgcaactagagtgcctttaaggtgtgtggcataatttgctagaactggcagggatggccatgcacccttccaccaaaccattcttttttctcttatttcttccccccacccagccccccaccatttttattttggtaaaatacacacaacataaaatttactatcttaatcacttttaagagtataatttagtggtattagtgtattcatattggtgtgccatcatcaccaccatctatctccagaagtcttctcatcttgcaaaatgaaattctatacccatcaaacaataactctccattctcccctcccccaactctccgcaaccactattctactttctgtttctatgattttggctactctaagtacctcatataagtggaatcatacagtgtttgtccttttgtgcctggcttatttccctta

SEQ ID NO: 530858 - DNA, 617 bp, Homo sapiens
ccagaacctgtgaagtccagtgtgtgaatccagccagatccatgtcatgaatctccccaggctgccccatttcaatacagttaactcagtccggycacacctaggaggagactgcagggctgaaagatgctgtaagaggaggagagaagaggtgtattgtggagccatactgtctgttccagggactctgcaactagagtgcctttaaggtgtgtggcataatttgctagaactggcagggatggccatgcacccttccaccaaaccattcttttttctcttatttcttccccccacccagccccccaccatttttattttggtaaaatacacacaacataaaatttactatcttaatcacttttaagagtataatttagtggtattagtgtattcatattggtgtgccatcatcaccaccatctatctccagaagtcttctcatcttgcaaaatgaaattctatacccatcaaacaataactctccattctcccctcccccaactctccgcaaccactattctactttctgtttctatgattttggctactctaagtacctcatataagtggaatcatacagtgtttgtccttttgtgcctggcttatttccctta

SEQ ID NO: 530859 - DNA, 617 bp, Homo sapiens
ccagaacctgtgaagtccagtgtgtgaatccagccagatccatgtcatgaatctccccaggctgccccatttcaatacagttaactcagtccggtcacacctaggaggagactgcagggctgaaagatgctgtaagaggaggagagaagaggtgtattgtggagccatactgtctgttccagggactctgcawctagagtgcctttaaggtgtgtggcataatttgctagaactggcagggatggccatgcacccttccaccaaaccattcttttttctcttatttcttccccccacccagccccccaccatttttattttggtaaaatacacacaacataaaatttactatcttaatcacttttaagagtataatttagtggtattagtgtattcatattggtgtgccatcatcaccaccatctatctccagaagtcttctcatcttgcaaaatgaaattctatacccatcaaacaataactctccattctcccctcccccaactctccgcaaccactattctactttctgtttctatgattttggctactctaagtacctcatataagtggaatcatacagtgtttgtccttttgtgcctggcttatttccctta

SEQ ID NO: 530860 - DNA, 561 bp, Homo sapiens
agctgactcagcccccagaacctgtgaagtccagtgtgtgaatccagccagatccatgtcatgaatctccccaggctgccccatttcaatacagttaactcagtccggtcacacctaggaggagactgcagggctgaaagatgctgtaagaggaggagagaagaggtgtattgtggagccatactgtctgttccagggactctgcaactagagtgcctttaaggtgtgtggcataatttgctagaactggcagggatggccatgcacccttccaccaaaccattcttttttctcttatttcttccccccacccagccccccaccatttttattttggtaaaatacacacaacrtaaaatttactatcttaatcacttttaagagtataatttagtggtattagtgtattcatattggtgtgccatcatcaccaccatctatctccagaagtcttctcatcttgcaaaatgaaattctatacccatcaaacaataactctccattctcccctcccccaactctccgcaaccactattctactttctgtttctatgattttgg

SEQ ID NO: 530861 - DNA, 511 bp, Homo sapiens
ctggttccaattttcctacaccaaagcttccatactaatataacacaactattatctggattcttcccgtttgccctagaggcggtgacagttgtaaccaaaagaagcactgatatgttcagtctaccggtcattacactatcactgtctttggcaaatctgataaactccatatactctccagaaaaagacgtctgggcacacagyggtgggggggagtggtttatagaacaggttactggctccacacagcaagccctccaccgcccacggcttacagcttctccagccgaatccctctcgcccctcaggctggcagagtttacctgccaggtttccccttgcacttggcgctgaccgatttccttcctttctccctcccaccctggacccaagtggcggtggggaaagcccagccctcaacaaacaaagggaggggaaacagagaaagcgaaaccaaaagccgcagtctccgcccggctccccccgcagcccctcgcccctgcctccc

SEQ ID NO: 530862 - DNA, 606 bp, Homo sapiens
tcacggtgaaacctagtggggtcctgccgggagagcacagatggctcagggccatcggtcccacccctggaaaaccacagttggaatctgtgtcctgtgggcaggggtctcccatgcagtgtgctctgtggccaaccccctgcccagggaagcattgctttttcactcgaagggaactgcattattgggtaatgcttcgggcataggaagaacagtatttaagaatgcgcaggatgacaaactttatcttctccctcaaacttttttcttgttctttgggttttatatattttttttcttttttgagacagggtctcactctgtcacccaggctggagtgcagtggcacgatctcagctcactgcaacctccacctcccaggttcaagcaattttcctgcctcagcctctcgagtggctgggactacaggtgcccaccaccatgctcggctaatttttgtatttttagtagagacggggtttcaccacgttggccaggctggtcttgaactcctggcctcaagtgacctgcccacctcggcctcccaaagtgctgggattacaggwgtgagccaccaagcatggccctccctcaaactttgaatgt

SEQ ID NO: 530863 - DNA, 543 bp, Homo sapiens
ccagtagttctggtactgcgggaaaaatctactgtagaaaattacccaattcaactgaagagtgccaaggagacctatttttctcctgtgtgtttctgcatttcagccagttcctgggctctcatctattccttatcatccatctgtttggggmtgccattgtttttgtctggtttcctttgtcctgttgttctttcccaaacaggacaccacatctcttccttttttcctccaaagcattggtaaacaccaagctgttgcatgcattctaacttttattgagtatttgatggtggaaacatggcttagagtaattacaacaaaggggagaaaactgtaaaattttgcattggccattttcattcctaaaatttttttggattggaggaagcgttcatgtgtgttttttagtaccacctggagtcaatttctttcattcaactaatgcatattgaaggcccactgtgtgccaggcattgtgcataggcctggacatctggtggacaaccacagacatagattctgtctctataaagaaggaga

SEQ ID NO: 530864 - DNA, 543 bp, Homo sapiens
cttcatgtacagtttatctgaaataattttttttccttcgagttcatcctgcaaattatggcttggcatttgaggtcttgtacattctcactccaactttcttagctttgccatctgccatttcacctcaagctctgtatctaaatcagttgggtaagttgtctcccagacacctcattcacactttactacttccattcggcaccygtagaaaatctgttccccccacttcccacagtaatcaaggaatggatacacttgtctgccttttctatgaagatttttttcttttttagattcatattctgcttatgtaaaagattacttttctaatataagtgagttctttcctctgagctcctgtattagtctgttatcacactgtaaagaactctctgaggccgggtgcggtgggttatgcctgtaatcccagcacttcgagaggtcgaggcaggcctgaagtcaggagtttgagaccagcctagccaatatagctaccaaaaaatacaaaaagccgggcatggtggcgtgtgcctgtaatcc

SEQ ID NO: 530865 - DNA, 543 bp, Homo sapiens
cttcatgtacagtttatctgaaataattttttttccttcgagttcatcctgcaaattatggcttggcatttgaggtcttgtacattctcactccaactttcttagctttgccatctgccatttcacctcaagctctgtatctaaatcagttgggtaagttgtctcccagacacctcattcacactttactacttccattcggcacccgtagaaaatctgttccccccacttcccacartaatcaaggaatggatacacttgtctgccttttctatgaagatttttttcttttttagattcatattctgcttatgtaaaagattacttttctaatataagtgagttctttcctctgagctcctgtattagtctgttatcacactgtaaagaactctctgaggccgggtgcggtgggttatgcctgtaatcccagcacttcgagaggtcgaggcaggcctgaagtcaggagtttgagaccagcctagccaatatagctaccaaaaaatacaaaaagccgggcatggtggcgtgtgcctgtaatcc

SEQ ID NO: 530866 - DNA, 543 bp, Homo sapiens
cttcatgtacagtttatctgaaataattttttttccttcgagttcatcctgcaaattatggcttggcatttgaggtcttgtacattctcactccaactttcttagctttgccatctgccatttcacctcaagctctgtatctaaatcagttgggtaagttgtctcccagacacctcattcacactttactacttccattcggcacccgtagaaaatctgttccccccacttcccacagtaatcaaggaatggatacacttgtctgccttttctatgaagatttttttcttttttagattcatattctgcttatgtaaaagattacttttctaatataagtgagttctttcctctgagctcctgtattagtctgttatcacactgtaaagaactctctgaggccgggtgcggtgggttatgcctgtaatcccagcacttcgagaggtcgaggcaggcctgaagtcaggagtttgagaccagcctagccaatatrgctaccaaaaaatacaaaaagccgggcatggtggcgtgtgcctgtaatcc

SEQ ID NO: 530867 - DNA, 592 bp, Homo sapiens
aacaggggtggaaaatgttgaaagtccctgagattaagaacacggcwgaggatttgtgactctacttgtgttccaggccctgctacagattcttgcaataataatggtgaggatgagagtgattctttattgcacaggtgccaaatctgcattttgggtgtttcatgagtattaacacatttaatgctcacaacagtcctctgtggtagattctggtactgctatatcataataattttacagagaagaggccacagacaagttaaataacttatgtaaaaaaatgagtgagcctcaatatggtggtctgggcctgtgcccttaataactggaaacactgtggcctaaagaccacatgtgtctctctgtggacaagtttgaggcctctgatggctggaggaccagttcttgatggcagcatgaaggagaagaaacaaactgctatgtttagaatccccatggactaagggccttggtcccttcatggttttctggaataatgtaaacctgtgattgctagtattccaatgactgagattggattactggccagccagccaggggggagcctgagccgaatatgtcccaaccg

SEQ ID NO: 530868 - DNA, 632 bp, Homo sapiens
gagcagaaggaaaggcaccgtgagaaaggggacttggaggttgctctgtgctcaccaaagtgatgtgaatgctgcctgtgttgctccttgagtttgtgcaggagagtcggattcggccctggcaggtggcaccaggcaggtcccttgttcccacccccaccctggtgcttgacttgaagtaccaaagcctgaaacatttgcattgttttctcacagccacagaaccctgagctcaaggctagtggaggggaggtacacatccgaggagtctagctctttgttaattgcaaatcttaagcctcaagggacactcacctccccagcccagattgttccagagggaagtctgggcagcacagcagctaayatgccccactggctggagagccagagcaaaccgggcctgcagggcagtcggaggcctcgtgcattgcatggaattaagaaactcaggcctaggatggaaattttgggagttcactgcacccattccagccctgggaagcactgccctgctgtttcccccatctctccttctgcctggcttgcccaagggcccctgatagtctcctgggcattcccagaggtttgccactgtctctccaaccagagcttcaattggctaagatcac

SEQ ID NO: 530869 - DNA, 632 bp, Homo sapiens
gagcagaaggaaaggcaccgtgagaaaggggacttggaggttgctctgtgctcaccaaagtgatgtgaatgctgcctgtgttgctccttgagtttgtgcaggagagtcggattcggccctggcaggtggcaccaggcaggtcccttgttcccacccccaccctggtgcttgacttgaagtaccaaagcctgaaacatttgcattgttttctcacagccacagaaccctgagctcaaggctagtggaggggaggtacacatccgaggagtctagctctttgttaattgcaaatcttaagcctcaagggacactcacctccccagcccagattgttccagagggaagtctgggcagcacagcagctaacatgccccactggctggagagccagagcaaaccgggcctgcagggcagtcggaggcctcgygcattgcatggaattaagaaactcaggcctaggatggaaattttgggagttcactgcacccattccagccctgggaagcactgccctgctgtttcccccatctctccttctgcctggcttgcccaagggcccctgatagtctcctgggcattcccagaggtttgccactgtctctccaaccagagcttcaattggctaagatcac

SEQ ID NO: 530870 - DNA, 455 bp, Homo sapiens
atctccaaacactgtagtgtgtctttgattctgttcttttatgacatccaagaaaacatcttccatccctgtacataattaacactaaatcattagwaaagtcttgttcatgattgcacactgtataagggtaaatgtccaaattccttcagtgaaataagactctgtgttctccctttagtttaagcctttgtcatctactctcagaaatgttctgaaactgaactggattatattctgtactttgattatgcttctccctgcagtgcatgccgtggcctctacccttccaggacagtgtggctcaatcccacttttttatttatccttcatgtggcatatcactctaatgagataacagtaaatgctttgatggcctgccttgggtgtttcatacttcttacctccgtttttcaacacagagctatgtgcacaatggatatttaatgactttt

SEQ ID NO: 530871 - DNA, 527 bp, Homo sapiens
cctctcatcattccagtgcctgcatcagaaaacccctttcgcgagaagaagttcttttgtaccattctctaactccgtgtgtgatgaaaacgcctccttttctgaccttcaaagtcccctgtagagaccatgcatgctctaagccttagggagtgagaccaacacccatccctgcccagccaacagtggccggggcttgtcttatgtttccatctgttttcttcgtggcattcaatttcatttttttccttttcattttcatgttattttcattattggcaaagaaaatcaaaatgtttatagccaaataacaaatgtgccatgtaaaagtaagtctggacttaagagtttaaaatttttaaacatcagtttccaagtttatatcatattaatacatttcagtggataatttatttaaaaaaaaaaactatgcctaaatatcccttatttgyaatattcagtatcaaattagagcattttgaccaactgaaacatataacgttttcatctcctttcctggagaaagc

SEQ ID NO: 530872 - DNA, 515 bp, Homo sapiens
tggggttcctttcaactctattacagtcagcgagcgtcatgctcacggactygttcagagccacatgctttgcctggccttctgctcacctctgagtggcatctggagaagaggtggcttcatcttgctgcagtcctcccagcgtggagagacctgcactcatcagtgaaatgaatacaacgggaggtgtctggaacctttcttcattttcaccaaaggaatatttgacacacccaggcatggttcagagctccaccctcaacaataatcctgtcaaaatatccgatgttgttgaacctcaaaggcactgtatcacagcagaaaagtgattgatctcattgctaaactctctttcttgcttattggcatgacaacggagctaaatagagccgagatgaattatgagtctatttttggagactccttatggaattcatgcacactgtgtattttgcatcctttgaatccttgggcacacttagaactgtgaagcaaacactcatttgtaaatgtta

SEQ ID NO: 530873 - DNA, 490 bp, Homo sapiens
ctacagtgtatttagtcaataggggaagaaaggtgaaagtctctcaaccagagagaattatatagtcttccaatctacttactgtatgtcacaaggaaaagttgatgtttttgaaaaagaaaaaagagaaaaaacctgtacagagcagkgcatacctcttgttctgcctgataaagtttgacagtgatgttcctctggaaacccacatcattggcatcgtagaacactccaagactggtaataacgatggggtagagaactcggaaactcacgctgacaactcgatcctcaggcagccccgatgaagtgtcttcggacagactgaacgcttcaatttcctgattcaaaactaagtaatgagaacaggtttatataactgaacaaatgtaatcctttgttttactagtaagaagtagtgaagtgggcttaatgccaaaacctaggtaatcatttgctatataattcacaaatggcaggaatttttaaaaaa

SEQ ID NO: 530874 - DNA, 132 bp, Homo sapiens
tgcgttttaacgaagatatgcacacagtgccacatcayaaagataaccaggtttgaaaggaatcggtttcctttgtaatcctaaacgttctagtctgctcattgaaagccattatttgaagaagggtgcacg

SEQ ID NO: 530875 - DNA, 550 bp, Homo sapiens
gaaatccaaaactcccaataattgaaaacaagaaaaccccagtcttcacttgtrgtgaagcctcaatttctgggttgaaatcttggttcattcatgacgtgaatttaaaacgttactggattttctgtacctcaatttcttcgtctataaaaaagagcagccgggcacggtggctcacgcctgtaatcccagcactttgagaggcccaggcaggtggatcacctgaggtcaggagttcgagaccagcctggccagcgtggtgaaactccgtctttaataaaaatataaaaattagtcaggcatggtggcgggcgcctgtactcccagctacttgggaagctgaggcaggagaatcacttgaacccgggaggcagaggttgcagtgagccgagatcacgccattgcactccagcctgggcaaaagaacgagactccttctcaaaaaataaaaataaataaaaaataaaaaagaaagaaagaaagaaatttttcctggcacatttctatatgttccattctggatgacttgctcttcaggcttatcccacag

SEQ ID NO: 530876 - DNA, 650 bp, Homo sapiens
acaatgatagaacttggggaaatatgtattccttgatgtttctatgcatttgcaataataaacaatgaaaatatggttaaattttagaaagagataggcctgtggtattgtcacaagggtatacaaatactsagaatgactgctgaggcagtgctctccattggtggtgaccttcagaagagacctgtgtttccacatggcctagacacctggaaggcagagatcctaacattccatgacaccccaccttctaattctgttattgtgactccagaccattacctggcaccgggtctgatttctggcattcctatcagagcctgagtcacagacagtaccttagactctaagcttaggcaccttgtgccttgtttttgtggctaaggattctcagagttgtaggatgctgacaaagtttatcccaaaggtaatttatgaatcagatctgctttcttttgacttgtttaaacccttcatttaatgtaaagaaactttattgaggtataatttacatactataaaatttacccattataattgtacagttcaataatttttagtaatttacccaagtagtgcaaccattaccataatccatgcatttgtttttaatttattaattgtctgggtttattctccctaggctctga

SEQ ID NO: 530877 - DNA, 650 bp, Homo sapiens
acaatgatagaacttggggaaatatgtattccttgatgtttctatgcatttgcaataataaacaatgaaaatatggttaaattttagaaagagataggcctgtggtattgtcacaagggtatacaaatactgagaatgactgctgaggcagtgctctccattggtggtgaccttcagaagagacctgtgtttccacatggcctagacacctggaaggcagagatcctaacattccatgacaccccaccttctaattctgttattgtgactccagaccattacctggcaccgggtctgatttctggcattcctatcagagcctgagtcacagacagtaccttagactctaagcttaggcaccttgtgccttgtttttgtggctaaggattctcagagttgtaggatgctgacaaagtttatcccaaaggtaatttatgaatcagatctgctttcttttgacttgtttaaacccttcatttaatgtaaagaaactttattgaggtataatttacatactataaaatttacccattataattgtacagttcaataatttttagtaatttacccaagtagtgcaaccattaccayaatccatgcatttgtttttaatttattaattgtctgggtttattctccctaggctctga

SEQ ID NO: 530878 - DNA, 605 bp, Homo sapiens
ctcccaccagcttcccagcagcaatgccttcctctttgatgcacaggaaggcccctyggctgtggaaatagccagtaagtgctcctttgataagaaaaataaagctccatcaatctctcagtagctcctacattctacatgctcaccacctctgtctaaactgagagatgttattctctgcaggcaggccctaaacattcactttaaaaaactgattaggctgaacacagctctgggatcaactctcaagtacaggtccctggtgggtcaggtaatttgctctgttcctgtcctcacctcagtccctctggtccagaccggcatctgcaagccggtatactcaaagcaggccagaatggagagagtgaagagattatggcagactctctgccactactgccgcgcatgtacaaatctgtttaacagatcttcttctttaaaatgggacatctcatctttcctgaaatatatatattttttgagacagggtctcttgttctgtcacccaggctagagtgcagtggcatgatcttggctcaccacaacctaaaacccagggtcaaatgaccctcccacctcagcctcctgagtagctgagaacacag

SEQ ID NO: 530879 - DNA, 605 bp, Homo sapiens
ctcccaccagcttcccagcagcaatgccttcctctttgatgcacaggaaggccccttggctgtggaaayagccagtaagtgctcctttgataagaaaaataaagctccatcaatctctcagtagctcctacattctacatgctcaccacctctgtctaaactgagagatgttattctctgcaggcaggccctaaacattcactttaaaaaactgattaggctgaacacagctctgggatcaactctcaagtacaggtccctggtgggtcaggtaatttgctctgttcctgtcctcacctcagtccctctggtccagaccggcatctgcaagccggtatactcaaagcaggccagaatggagagagtgaagagattatggcagactctctgccactactgccgcgcatgtacaaatctgtttaacagatcttcttctttaaaatgggacatctcatctttcctgaaatatatatattttttgagacagggtctcttgttctgtcacccaggctagagtgcagtggcatgatcttggctcaccacaacctaaaacccagggtcaaatgaccctcccacctcagcctcctgagtagctgagaacacag

SEQ ID NO: 530880 - DNA, 605 bp, Homo sapiens
ctcccaccagcttcccagcagcaatgccttcctctttgatgcacaggaaggccccttggctgtggaaatagccagtaagtgctcctttgataagaaaaataaagctccatcaatctctcagtagctcctacattctacatgctcaccacctctgtctaaactgagagatgttattctctgcaggcaggccctaaacattcactttaaaaaastgattaggctgaacacagctctgggatcaactctcaagtacaggtccctggtgggtcaggtaatttgctctgttcctgtcctcacctcagtccctctggtccagaccggcatctgcaagccggtatactcaaagcaggccagaatggagagagtgaagagattatggcagactctctgccactactgccgcgcatgtacaaatctgtttaacagatcttcttctttaaaatgggacatctcatctttcctgaaatatatatattttttgagacagggtctcttgttctgtcacccaggctagagtgcagtggcatgatcttggctcaccacaacctaaaacccagggtcaaatgaccctcccacctcagcctcctgagtagctgagaacacag

SEQ ID NO: 530881 - DNA, 605 bp, Homo sapiens
ctcccaccagcttcccagcagcaatgccttcctctttgatgcacaggaaggccccttggctgtggaaatagccagtaagtgctcctttgataagaaaaataaagctccatcaatctctcagtagctcctacattctacatgctcaccacctctgtctaaactgagagatgttattctctgcaggcaggccctaaacattcactttaaaaaactgattaggctgaacacagctctgggatcaactctcaagtacaggtccctggtgggtcaggtaatttgctctgttcctgtcctcacctcagtccctctggtccagaccggcatctgcaagccggtatactcaaagcaggccagaatggagagagtgaagagattatggcagactctctgccactactgccgcgcatgtacaaatctgtttaacagatcttcttctttaaaatgggacatctcatctttcctgaaatatatatattttttgasacagggtctcttgttctgtcacccaggctagagtgcagtggcatgatcttggctcaccacaacctaaaacccagggtcaaatgaccctcccacctcagcctcctgagtagctgagaacacag

SEQ ID NO: 530882 - DNA, 407 bp, Homo sapiens
tcctctgctgccatcctcatcagyttcccttatgtcttggtgactcttcattctaccaccccaaggtggttctctccaacccccctcctcttagattgttctcacacagaggccatcatttcataacattgtgctgggccagaataaccataagcaggtcccttcccataccaaagcagtaactattttggaaaagcctccttcatattgcagccattggacatgataatacatgtgatgtgctggcatttgttgagaatcatgtgaaaattaagcttccaccccatcacactaacgttccagccctccacggttttctccctaggctaagatagagaggaagaacatgaaatgtgcagaaagcattctcttaagcaaacgtgtataacttgcataaattgtaatta

SEQ ID NO: 530883 - DNA, 407 bp, Homo sapiens
tcctctgctgccatcctcatcagcttcccttatgtcttggtgactcttcattctaccaccccaaggtggttctctccaacccccctcctcttagattgttctcacacagaggccrtcatttcataacattgtgctgggccagaataaccataagcaggtcccttcccataccaaagcagtaactattttggaaaagcctccttcatattgcagccattggacatgataatacatgtgatgtgctggcatttgttgagaatcatgtgaaaattaagcttccaccccatcacactaacgttccagccctccacggttttctccctaggctaagatagagaggaagaacatgaaatgtgcagaaagcattctcttaagcaaacgtgtataacttgcataaattgtaatta

SEQ ID NO: 530884 - DNA, 407 bp, Homo sapiens
tcctctgctgccatcctcatcagcttcccttatgtcttggtgactcttcattctaccaccccaaggtggttctctccaacccccctcctcttagattgttctcacacagaggccatcatttcataacattgtgctgggccagaakaaccataagcaggtcccttcccataccaaagcagtaactattttggaaaagcctccttcatattgcagccattggacatgataatacatgtgatgtgctggcatttgttgagaatcatgtgaaaattaagcttccaccccatcacactaacgttccagccctccacggttttctccctaggctaagatagagaggaagaacatgaaatgtgcagaaagcattctcttaagcaaacgtgtataacttgcataaattgtaatta

SEQ ID NO: 530885 - DNA, 407 bp, Homo sapiens
tcctctgctgccatcctcatcagcttcccttatgtcttggtgactcttcattctaccaccccaaggtggttctctccaacccccctcctcttagattgttctcacacagaggccatcatttcataacattgtgctgggccagaataaycataagcaggtcccttcccataccaaagcagtaactattttggaaaagcctccttcatattgcagccattggacatgataatacatgtgatgtgctggcatttgttgagaatcatgtgaaaattaagcttccaccccatcacactaacgttccagccctccacggttttctccctaggctaagatagagaggaagaacatgaaatgtgcagaaagcattctcttaagcaaacgtgtataacttgcataaattgtaatta

SEQ ID NO: 530886 - DNA, 661 bp, Homo sapiens
ctgcctgcaaagtatttacccatgattgacaggtgcaggtgtatgaaagcccagctccttgacttgaggggtgcgtttgtggtgaattagctttgggaaaagggaatccagaggccaactttgtaaaaatccagataggtaaatggagagaaatctttgccttggaagtccaattgagaaagatagtgatttacttcggactgtgaaaagagagactaaaatctttactttctcatgggaaagaagcctatggtgaaagagaaacaaagaaaatggtgggaaataggataggtctactcagtagctttaaaccattctgtcatattataaagcctggtaagggttttaactaacacaagtgcctggactctacacatagagattctgatttaaatgcttccaggtgggtggaagacactagtagtcttaaaaagctcccaagtaattttaacatgtagctaaagatgaaaaggacaatctatctactagaatgtmaagtcgccagcataggagtgtcccaaatgtgcagctacctcatagaaaaggcttaaccccatccattgatggaatttgccttcctctctccatggtcttgtttgcatagcatggaaaaaaagagaagagaaaaagaggtagatggatagattgaacctataatttg

SEQ ID NO: 530887 - DNA, 443 bp, Homo sapiens
ccagtgtaagaagcctgagtctgtctgcaggacacacgaagcacatcgcattcctgtttgactccactcttactgccttcttaawgatgggaaatctttcaccagttcagagcactggtgaaagagaagcacagagatattttgagcatgcgcttactctgagaaacacaacactgtttctgcgtcataacaaagatctagttgtgcaaactgcacagccagaccaacccaattatggttttcctctggatctcttacgctgtgaaagccttcttggtctggaccctgcaactggcagcagagttctaaacaaaaatacacactgcttgtttccatggcttccctcaccatgaaatccggcctgtcagcagctgcacccctcagcatattggaccagctatcccagaagtcagctctgtctggtttaaacagtacatttacgt

SEQ ID NO: 530888 - DNA, 278 bp, Homo sapiens
cagccagtgtaagaagcctgagtctgtctgcaggacacacgaagcacatcgcattcctgtttgactccactcttactgccttcttaatgatgggaaatctttcaccagttcagagcactggtgaaagagaagcacagagatattttgakcatgcgcttactctgagaaacacaacactgtttctgcgtcataacaaagatctagttgtgcaaactgcacagccagaccaacccaattatggttttcctctggatctcttacgctgtgaaagccttctt

SEQ ID NO: 530889 - DNA, 278 bp, Homo sapiens
cagccagtgtaagaagcctgagtctgtctgcaggacacacgaagcacatcgcattcctgtttgactccactcttactgccttcttaatgatgggaaatctttcaccagttcagagcactggtgaaagagaagcacagagatattttgagcatgcgcttactctgagaaacacaayactgtttctgcgtcataacaaagatctagttgtgcaaactgcacagccagaccaacccaattatggttttcctctggatctcttacgctgtgaaagccttctt

SEQ ID NO: 530890 - DNA, 443 bp, Homo sapiens
ccagtgtaagaagcctgagtctgtctgcaggacacacgaagcacatcgcattcctgtttgactccactcttactgccttcttaatgatgggaaatctttcaccagttcagagcactggtgaaagagaagcacagagatattttgagcatgcgcttactctgagaaacacaacactgtttctgcgtcataacaaagatctagttgtgcaaactgcacagccagaccaacccaattatggttttcctctggatctcttacgctgtgaaagccttcttggtctggaccctgcaactggcagcagagttctaaacaaaaatacacactgcttgtttccatggcttccctcaccatgaaatccggcctgtcagcagckgcacccctcagcatattggaccagctatcccagaagtcagctctgtctggtttaaacagtacatttacgt

SEQ ID NO: 530891 - DNA, 532 bp, Homo sapiens
atgtatgtgtatatataacacacatgcacattacatatgcataaatgttttaatttaataatatttatatgcatcaatatcttaaagatatatacatatcattagctggaagctgcctctatccatatattaaaggtttctccatatgtagtgaactgtaacctaactggatgtgtaaacaacctgtaacctactcttgagccaatgactgagttttagccaatcaaaggtggccaactgttcaaactggrttcaaataagacaaactcagagctgtagccaatccgattatttttgtacctcacttctgttttctgtaagtcactttcccttttccatccataaatcttcttctaccacatggtagcactggaacctctctgaacctattctggttctggaaatttctgattcaggaattcttctttgcttaattaaactctgtgtgtgtgtgtgtgtgtgtgtattatatattatatacacatgtaatatatatatgtatgtgtatatataatatttatttaagagagag

SEQ ID NO: 530892 - DNA, 628 bp, Homo sapiens
ctgctcacttacttggcttatgaaatcatttgtactccaaaccccaatgccgtacaatttacctatgtaacagacctgcacatgtaccccctgaacctaacataaaaggggtggggaaacattatgttgtatactttaaataaatataattttattttttaaactgaaaaaaaaaacccctcagttttcttatctataaagttggggatactggtcgccttttcatagagttgtgaaggatttttcttggaggctggagagacagagtctcactctgtcacccatgctggagtgcagtggtgcaatcttggcttattgcaacctccacctcctgggttcaagcaattctcttgccccagcctctgagtagctaggattacagacacatgccaccatgcccagctaatttttacatttttagtagagatggggtttcaccatatttgccaggctggtctccaactcctgacctcaagtaatccrcccaccttggcctcccaaagtgctggtattaccagcgtgagccaccacacctggccagagttgtaaaggatattaaatgagaaaatctgtatagagcatagtacctggaattctgtgattgctttaaaatgtttcattaaattac

SEQ ID NO: 530893 - DNA, 570 bp, Homo sapiens
acatatacactgtccaaagaattcattgaggatttcctactccaggattaaactcctgaagtgaacgttttgaaaggcaaaaggattttttcttttttgtcaaagtttagatgttgtaggtgtgaattcattagtataaagtacttacagcccttgctttatataaagtatatgctcctaaaaagttggctagtggctggtcatggtggcttattcctgtaatcccagcactttgggaggctgagggagctggatcrcttgagcgcaggagtttgagatcagcctgggcaacgtggtgagacctcgtctctgcaaaaaatagaaaaattagctgggcgtggtcatgtgagcctgtggtcccagctacttgggaggctgagctgggaggattatttgagcccggggaggttgtggctgcagtgagccatgatcatgccgctgcacccagcctgggcaatagagtgggaccctgtcttaaaaaaaaaaaattgcctgtatctcagtataacatggttaaatgcaggtgcgattactatttaagacaacctggcaaggaatctttaaataatt

SEQ ID NO: 530894 - DNA, 570 bp, Homo sapiens
acatatacactgtccaaagaattcattgaggatttcctactccaggattaaactcctgaagtgaacgttttgaaaggcaaaaggattttttcttttttgtcaaagtttagatgttgtaggtgtgaattcattagtataaagtacttacagcccttgctttatataaagtatatgctcctaaaaagttggctagtggctggtcatggtggcttattcctgtaatcccagcactttgggaggctgagggagctggatcacttgagcgcaggagtttgagatcagcctgggcaacrtggtgagacctcgtctctgcaaaaaatagaaaaattagctgggcgtggtcatgtgagcctgtggtcccagctacttgggaggctgagctgggaggattatttgagcccggggaggttgtggctgcagtgagccatgatcatgccgctgcacccagcctgggcaatagagtgggaccctgtcttaaaaaaaaaaaattgcctgtatctcagtataacatggttaaatgcaggtgcgattactatttaagacaacctggcaaggaatctttaaataatt

SEQ ID NO: 530895 - DNA, 570 bp, Homo sapiens
acatatacactgtccaaagaattcattgaggatttcctactccaggattaaactcctgaagtgaacgttttgaaaggcaaaaggattttttcttttttgtcaaagtttagatgttgtaggtgtgaattcattagtataaagtacttacagcccttgctttatataaagtatatgctcctaaaaagttggctagtggctggtcatggtggcttattcctgtaatcccagcactttgggaggctgagggagctggatcacttgagcgcaggagtttgagatcagcctgggcaacgtggtgagacctcgtctctgcaaaaaatagaaaaattagctgggcgtggtcatgtgagcctgtggtcccagctacttrggaggctgagctgggaggattatttgagcccggggaggttgtggctgcagtgagccatgatcatgccgctgcacccagcctgggcaatagagtgggaccctgtcttaaaaaaaaaaaattgcctgtatctcagtataacatggttaaatgcaggtgcgattactatttaagacaacctggcaaggaatctttaaataatt

SEQ ID NO: 530896 - DNA, 634 bp, Homo sapiens
taaaaaagaatataaatggcttttgagtttcttttcttagcatgcaagtcagattagagtgaaagcaaaagcacatgacacaaaactgtggttcgctaatagattgtaggcttcctgtagcttaaattatacacaccacagtaaactgttacccagtggcaattttgatttcccttttgtattagttgtaatctgtgatacttttatttaaagtaaagccatgtattaaaagtttattaaaacatatattgtctttttttaatctttttcctcttcaccccatacatatatactcattccttttagaccaagctccagggtaacttgccctgtaacctttcaaataggctcctttctctgaatatatctgtagtatatctgtagtatatctattataataacagagtgtgctacaattgtctctccctctcccctgccccaacccactaaattgctagtattttagggtcagagacaatgtctcgttcatttcttacattttttaccatgatacctgttcamttgtagcatgtaatagtaggggaatgaatagttagtagaataaatgtatttaagaaaaaagtagaaaagaaatatatggtgaattgatttaccaactcagaatttaaatata

SEQ ID NO: 530897 - DNA, 667 bp, Homo sapiens
ggttaaattgaatacacatttaaactcttttctatactacacagctattaaaaattatattgtaaaataaaatttaatgatttataaaatgttctaatatatgaaatttaaaagcagttaaaattgctacattgtacttgcatgtgtgtaaaaaaacacgtaagtattagtaaaaaagaaagaaagaagattcaacaaatattaaatactggttatctattatttaatatctattatttatctattattatctattatttattattatytattatctattaaatatctattatttaatatctattatttaataaatggtagacctttagaactctgagggatttttatcttagtcttgcaactttctgtatgttccatttatttcacaatgagaggatattaccatttaaattagattttaagtacctactttccttagcttttaaatgttttccaaatgtcctaaaataaataataaaaacagtctgatcacagttcaccttgataacttatgttgtttgggtactaaaaactgaacttaataaatcacatttcaggttttccatgaatatgagtctcaaggactttacctttaatggtttctaatatgcactctcttttaatattacaatatcatgacctgttcttgttattttacatgcaaccc

SEQ ID NO: 530898 - DNA, 589 bp, Homo sapiens
ctgatagcctaataataaaattttaaaaaaatccattacaattccatttcaacaacttatcaattctgcctgtagttatgagccaccactctactggcaaagcccagcacaagccagcattttccacacagtcaggtttttcccctatgctctattccgtcaatcacagacaagccaagagtcacaattctggttttatcaaatattctgtcttaaagtgaacaatattttattaaatcaaatcaaagtttatttactagtttgcaagactcgattcaatcacattcttagaaaaacacacactttctccatattacctaaactcagaaatagaatttttagactaatagagtcatttatttcaagttttaagatttcacacaacagataagtcacatattattatttttcctaggtgatagagattatcagcatcataaaagaatcactggaaaatctgtcaatgttctaattaagatttcaatatcataatacaccgtcctagccaatgataaccatatttgtattctgttctacatctcacttaartcttgtataagcaactagttaagtcagatatttactttat

SEQ ID NO: 530899 - DNA, 555 bp, Homo sapiens
cccgtggacttgtggtttcgctgctggctggggaaccccctccggctcctcacttccccaccaagcgctggtcacagaaacgcccttctctggtcactgctctctggcctggcttggtggtggctttggtggcagccccgtcacccctgggatccgtgtcctcctgtttctttcgtttctcctgaaggttttccaagtgcctrtttgcttctgggaatttcctctctgccttcctccgacttcctcatagccgttcttttattccggcctcccaagattgcgtggagcccggccactgccagggcggccctgtgatgagctacatgggacacaagaggcagccccaggcgcccgcctccacctctaccagcagcgtcttcgctttcacttctgccttctgcggcgtcttcctctgtggagttggcgtcggccactggctgtggggcaacctcagcctctccagcggacgctgcaccatccctatggtggagtctcagctttggggatccagggtgcctgccggatttcagacagcgcattcgcagactgtcgcca

SEQ ID NO: 530900 - DNA, 523 bp, Homo sapiens
ttggtcccacaccgggcccacagacaatccaccccaagggagaagaaaatgacgtggggaccaggtccaaggccacagcccagcccacacaggggaccacaggcatggccgcaggggtggctggagcagaggaaggcagatcacctttggaaacagaaacacttgggtcagaccctggctccgtggtggaatgaggaacacacctggcctctgttccggtgcccagcatgcttcaggacccttggaatttcccacatggcaggagtgtttctgttgctcaccaagagcccctgtggaccacacctgagtttatgctaatgaggagactcaagatgggccccaaacagcttcctgggggggggccggcctcaccccaggacagggctgcagcttccatccccagcctgacctctgacctgtggggagaagggagacactggagactgaactcaatctcttggccaatagtgtgatgagacccccragcagtgatgagactctgatgaaactctggatgcacgaa

SEQ ID NO: 530901 - DNA, 545 bp, Homo sapiens
tttcaaaatgttaaaatacatattatatacatttctttggaatgatattctaagattgcattgagtcatgaacccatgtttartttaaaaaaataattaaactttatgcttattttctacatagaattaaaagcctgtaaagggactactgtgaattatagatttcttatgtttaaatcagataatttgtcacacatttgaatgttttttcagaaaacacaagaatttggtgataatttcagaaccttgttatctgattatttctccagttgtctttggaaatgaacaacttggtaggaaatacaattactaaatcacaaacagtttcctcagtactcagtaaatgatatgacattattttcttctccttattattgtgaagtctgggccaatagagatttttttttattttgctttaatctcaaaaagaaaataaaaactacctttatatcttcatcctcctccattatttgttagtatttcccagtgtatttccctgaagtactttccacttatatttcagatacctcttaagtatctctttt

SEQ ID NO: 530902 - DNA, 545 bp, Homo sapiens
tttcaaaatgttaaaatacatattatatacatttctttggaatgatattctaagattgcattgagtcatgaacccatgtttagtttaaaaaaataattaaactttatgcttattttctacatagaattaaaagcctgtaaagggactactgtgaattatagatttcttatgtttaaatcagataatytgtcacacatttgaatgttttttcagaaaacacaagaatttggtgataatttcagaaccttgttatctgattatttctccagttgtctttggaaatgaacaacttggtaggaaatacaattactaaatcacaaacagtttcctcagtactcagtaaatgatatgacattattttcttctccttattattgtgaagtctgggccaatagagatttttttttattttgctttaatctcaaaaagaaaataaaaactacctttatatcttcatcctcctccattatttgttagtatttcccagtgtatttccctgaagtactttccacttatatttcagatacctcttaagtatctctttt

SEQ ID NO: 530903 - DNA, 545 bp, Homo sapiens
tttcaaaatgttaaaatacatattatatacatttctttggaatgatattctaagattgcattgagtcatgaacccatgtttagtttaaaaaaataattaaactttatgcttattttctacatagaattaaaagcctgtaaagggactactgtgaattatagatttcttatgtttaaatcagataatttgtcacacatttgaatgttttttcagaaaacacaagaatttggtgataatttcagaaccktgttatctgattatttctccagttgtctttggaaatgaacaacttggtaggaaatacaattactaaatcacaaacagtttcctcagtactcagtaaatgatatgacattattttcttctccttattattgtgaagtctgggccaatagagatttttttttattttgctttaatctcaaaaagaaaataaaaactacctttatatcttcatcctcctccattatttgttagtatttcccagtgtatttccctgaagtactttccacttatatttcagatacctcttaagtatctctttt

SEQ ID NO: 530904 - DNA, 545 bp, Homo sapiens
tttcaaaatgttaaaatacatattatatacatttctttggaatgatattctaagattgcattgagtcatgaacccatgtttagtttaaaaaaataattaaactttatgcttattttctacatagaattaaaagcctgtaaagggactactgtgaattatagatttcttatgtttaaatcagataatttgtcacacatttgaatgttttttcagaaaacacaagaatttggtgataatttcagaaccttgttatctgattatttctccagttgtctttggaaatgaacaacttggtaggaaatacaattactaaatcacaaacagtttcctcagtactcagtaaatgatatgacattattttcttctccttattattgtgaagtctgggccaatagagatttttttttattttgctttaatctcaaaaagaaaataaaaactacctttatatcttcatcctcctccattatttgttagtatttcccagtgtatttccctgaagtactttccacttatatttcagrtacctcttaagtatctctttt

SEQ ID NO: 530905 - DNA, 623 bp, Homo sapiens
  misc_feature (1)...(623): n = A,T,C or G
ggatcctgcacccgcttgctcacatgctccctcccacaagaggttgatgacagtgggccaagtaaacagggtaccccccacccattgcatgtctgatgaaggagtcaagcaaactcntgcatcactgggctataaaastggcaagaggtttttaaaaagataaacacatattttaaatcgttggataaaaatatgtgattataagtaaatgctctaagaaaagggagatcaagaacctctagtcaggaagaaatctgtctaaaatttggtccatataaggggaatattaatgccatcttggtcccttataaactaaagcaacacttctgttgtgtttagtgaatgatagacttgcttcccactctcttctgttaaagtcacgtgattgcatctagataaaagtggaaccactttttctgcaatcattcagcttaagaaaatctacccaagcacattttcacatgaattttgtaattgagtagtatggaatctatgtgagtattactttaagaactacatgattatatgttcaataaatatgtccagtagtaagtgttataaagatgaaagtaatgatggaagattgaacactcttaagtaattgaataaaatagagtctggtt

SEQ ID NO: 530906 - DNA, 631 bp, Homo sapiens
tcttttgcagtgctagagacggggaattgagaagaacgacatcaaagaaggaacttatgggaaggagtttgtgtggaagttgaggatctaaacagccatgcacgtgtaccctttgggaaatcttaacctcccaggtataggtgtatgccaaggtcaagaccaatgggraaaaagaacaggttttagctgtatctcccaaattgcaactgcaaggattgtcaagatgcaagaggtggtgagaatgagaagaggcattaatttcaggtagaatagggaagttaaaaatactagagaaccaaacgaagggaccccaggttgtgatgtgagaaatgaagagagcgttcttgaggggacatattgctggctggggtcatgatctgttttgatatcctcaaattctagataataaggcccatattcatacagagtccattggaatgaggtagcgcatcttcatgctccaactatgaattctcttacactttctagaagcagaatccttattaatagtaaagcaatgctgtagtcctttgtacctttatggtttccatttcccactgaaatagtcaataaatcctagtacttactgaaataatattaatcatgccatgacaaaaatatcaccaataaa

SEQ ID NO: 530907 - DNA, 662 bp, Homo sapiens
caaaatctcagaaataccaggattgtacagctygttctctcatcttttaatgttatcaaatattaacatctacatgagattttttttcatagcacacagcaaacaattcctaccagtgccttagctttacaactgtacaagcagatccatcctgtagatattcttaaagaggctgttatggtatttgccaagaacaaattatcctgtgagtgagggtgttgtctgagatgagatagcgactttgtgaactgacccataagaattcacagaccatctctgtttcaccttctcccaattatattcacatgcaacccaagaagtttgataattcttacctcttcaacaaagacaattttcccttttctagtcttcacctcattctgccaggaaaaagaaaaggatgtacagaggggcaagttgtctgatgagaatccaaatagccaatatatctttcttgtggaccccttcctctctatttattgctccatggaatatttatacctcatcaccatgaggaaaggggccaaaccttttctggtaagttagacatatttttagtcagagtttacactgtgttttactagctctggtttaatcagtagttgttgataaatttagtgtataaaagtaagagatgtaacaatcctcattgcatctcccct

SEQ ID NO: 530908 - DNA, 662 bp, Homo sapiens
caaaatctcagaaataccaggattgtacagcttgttctctcatcttttaatgttatcaaatattaacatctacatgagattttttttcatagcacacagcaaacaattcctaccagtgccttagctttacaactgtacaagcagatccatcctgtagatattcttaaagaggctgttatggtatttgccaagaacaaattatcctgtgagtgagggtgttgtctgagatgagatagcgactttgtgaactgacccataagaattcacagaccatctctgtttcaccttctcccaattatattcacatgcaacccaagaagtttgataattcttacctcttcaacaaagacaattttcccttttctagtcttcacctcattctgccaggaaaaagaaaaggatgtacagaggggcaagttgtctgatgagaatccaaatagccaatatatctttcttgtggaccccttcctctctatttattgctccatggaatatttatacctcatcaccatgaggaaaggggccaaaccttttctggtaagttagasatatttttagtcagagtttacactgtgttttactagctctggtttaatcagtagttgttgataaatttagtgtataaaagtaagagatgtaacaatcctcattgcatctcccct

SEQ ID NO: 530909 - DNA, 672 bp, Homo sapiens
attattttattaaataaaaatattatttcatgaatacatctaacattgaatatctacgtgtttttaatttgggacatttatagtcatgtgtggcaacataggaaaaagtagaacatgtataacttatacctcctttcacctatgtgttttgtcatctcagttactaacttccataataaatcaataaatatttgcagttgtcatatcaattagaattactttcagttgaatgaatcagtaatttggttacatcagatagggattttttttctgttccatacgtagtattggagaatattcagaggaagtatgacagttccattatgtcctcagttaccttaactgttcttaactttccattccactttccttagcatgtagcactcattctcattcttgcaaaatggcttttacatctctargcattatacgtgtgctccaatgtggaagatgaaggaaagaagaaaggcaatagtcaaaagaaacaaattcatttaatagctctgtcaattctaacaagctagaagtaagagacaaagcaaattttattatatgaaaagcacctacaaatacatattttaaagttttctctctatatataggaagatattccttatactatatataccttctagtttccttttgtggttagaaactggagattaaatgtgg

SEQ ID NO: 530910 - DNA, 614 bp, Homo sapiens
taatcatgcatagtcatatagaaacaataaaacaaagttaaattgcccaaagtcatcttaaatatttattacatttatgactaatttataatactgtattcagagaactgttatgatttccatttttaataagaattttcctttctcttcccagacagtcccacttggttagctatattttcatgaagcttattacagcgttttcttttaaagatggaacactttacataatttttcaacatatcaaactcttttaaagcatggttcaaagtatttataatgaaaggacacaaaagcatatttcttgtggtttgttaagcacatttactttcattagagctacctaaaagtatcattacattttccagaaaagcattttcaaaaaaagctttgatatttataaatgttcatacattttggtgtaaaattatacaagtagattttggaaatagtccakgaaaaactaattttcatgttcttttataaatcataagtgaattatcttttatttggtatcatcttatgtcaatcaaatgctagactgtccataatgaagcccaagactcaaaagcttaaaatgattttaacctattctaaacaaaaggcttacataa

SEQ ID NO: 530911 - DNA, 500 bp, Homo sapiens
ctgccaatactaaatttaatacagaaaggtgaacacatggctgaaatgtttagcacagcatctatttttcccatctttgtttaagattatgaaaattacatgttgtctacaaatgctggtatttctagttagtgatagtttcccaacatcagggcactaaatacatcaaagttctaaggtattctacaatgcattaaagtttgattatctgtcagctttcaatttaattaaaattcagaagccaagcaggaaaagattaacaaaatgaactgaaatatcaagaagaaagaaaaatatcaagtggtaaagagaaaagaggaaaaaaacccaccctaacagcaacttgaattttctatatttatccatgtgtatttgcttcacttggttgtcaattttaattggtctgcaacatgctgtggttctaatgtattcagaatttcaattgttatttctgacatctattatagtatcccycaattcagtctattcctagtgaataa

SEQ ID NO: 530912 - DNA, 612 bp, Homo sapiens
gaactaaagataggaagttagctgtaatagaacaatatgygtgtttaagaaagactgtgtgggtgaaaaaggattggtggtctcttgagttgattatgattctgagaaataagatatactaagttcaaccaccagcttccttgatgaaccattttgaaaagttacttagctaaaatgctaccgaaagaccaaaatgcatctgctaacttacagtatatatagaaaggatgttaaggaggctgatatggtctctaagctagtgtatatatcatatatgtgcattgtcatttgatttggcacaatcaagagttgtagggcattcctagcaactaacatctgagcatttccttcagcccaaatctagcatggctaatgttactgactgtcttcagccgcatttaaagaaaatagccactaagaaatgcacagccattctcttacctttcttttattttctatgattcttcaactctcttattataaaattcagattgtgtgctcaacattcttcaaagctcaacataacacacaaatgtcttggaactcttatatgccattcacacaaacagaggacatgaatagcagactctcaattgtaagtcacatgcgtcc

SEQ ID NO: 530913 - DNA, 612 bp, Homo sapiens
gaactaaagataggaagttagctgtaatagaacaatatgcgtgtttaagaaagactgtgtgggtgaaaaaggattggtggtctcttgagttgattatgattctgagaaataagatatactaagttcaaccaccagcttccttgatgaaccattttgaaaagttacttagctaaaatgctaccgaaagaccaaaatgcatctgctaacttacagtatatatagaaaggatgttaaggaggctgatatggtctctaagctagtgtatatatcatatatgtgcattgtcatttgatttggcacaatcaagagttgtagggcattcctagcaactaacatctgagcatttccttcagcccaaatctagcatggctaatgttactgactgtctycagccgcatttaaagaaaatagccactaagaaatgcacagccattctcttacctttcttttattttctatgattcttcaactctcttattataaaattcagattgtgtgctcaacattcttcaaagctcaacataacacacaaatgtcttggaactcttatatgccattcacacaaacagaggacatgaatagcagactctcaattgtaagtcacatgcgtcc

SEQ ID NO: 530914 - DNA, 592 bp, Homo sapiens
tgacaactttgggcagcactggacacccagatgctgactctagccaataccctgcagaggctggcaggtacacctgtccctgagcgcagggcaggcacatcactgtacctcatgtatggagaatgtgactgtcaggaggggagctggttctggggcaattggtgagactaagcctgaaacagaggagatagcaaacacagctcaaaacttctcctgaaacatctcacaggacacatggtctgacaactctttaggtctgtgaatttattaatgtgccaagttgaatgatatttttagtcaccattaaatgcatatgtaaaggattccttgtagaaaatgttaaatgtacaatttggatagctgtaaagggttaagagccaatgaataagcaatggagtagatggatggataggtgacaaaagggatggatggatagatgacagagcagatgaatggcgatggagggatgggtaggcaacggartggttgggtaagcaatggagcgaatgatgtggaatgatagatgatggactggatggatggataggcgatggagggatggatatgtgatggagtggatggataggtgatg

SEQ ID NO: 530915 - DNA, 525 bp, Homo sapiens
tgctaagtgttttgagaaagtgtgcagttgcttcttctttgcagactttgggagaacgaagcagagtgaggaggaaggggatgtgtgacaagttcctttcatattagactattttgtttatactgttttgaaaataatttagactttgactcatagtagaagcattataacctccaggatgaataaatgaatatgacaatttcttcttacatataacctgattttaaactattctgatctttataaatttgactatttgatgataaaacacacaacagcatattcaatatgctaatattctatataattcagtttcttatcatagcaaaactttaaaaactaaacaacaaatatattttccttgagcccagattaatttaaataagttctgttttcatattccattttcaaaattacacaggaaaagttttttcctgcattttttatttctaatgactgaatggttaaaaatttakttatgttattagattcaaagatcataccttctcttgaaggtaatgtgct

SEQ ID NO: 530916 - DNA, 586 bp, Homo sapiens
ctccctatcattattagaaatcacctggagggcaaggaaagagaaaatgccatgtattcccataattttggtgaccctggctctaacccaaactgtaccaggaacagatgatccaacagaggatgctcacaccgtttctgaatacaagaaccagtcttggaggtgtaacrtgaatgtacaatattgattaagggaacattccaaaggtttaggagcaggagcatcctctttatggaagtattccagacacaaaaaggaaacagtatagacagactcagaacatcaccatttcgtaacccctaatgaatctaggcattgggaagaaatgaatgcaatacacagagacagtcagatagtatgcacccagcgccagaaaaatacctcaccacttacaaacccgtcctgccaaaagttatgacctaactgatcaggctttcagggtttctcaaccttggcaccactgacattttgggttaataattctttgtggggggagggggggcagttccaagatggccaaataggaacagctccagtctacagctcccagcgtgagcaatgcagaagatgggtgatttctgcattt

SEQ ID NO: 530917 - DNA, 586 bp, Homo sapiens
ctccctatcattattagaaatcacctggagggcaaggaaagagaaaatgccatgtattcccataattttggtgaccctggctctaacccaaactgtaccaggaacagatgatccaacagaggatgctcacaccgtttctgaatacaagaaccagtcttggaggtgtaacatgaatgtacaatattgattaagggaacattccaaaggtttaggagcaggagcatcctctttatggaagtattccagacacaaaarggaaacagtatagacagactcagaacatcaccatttcgtaacccctaatgaatctaggcattgggaagaaatgaatgcaatacacagagacagtcagatagtatgcacccagcgccagaaaaatacctcaccacttacaaacccgtcctgccaaaagttatgacctaactgatcaggctttcagggtttctcaaccttggcaccactgacattttgggttaataattctttgtggggggagggggggcagttccaagatggccaaataggaacagctccagtctacagctcccagcgtgagcaatgcagaagatgggtgatttctgcattt

SEQ ID NO: 530918 - DNA, 586 bp, Homo sapiens
ctccctatcattattagaaatcacctggagggcaaggaaagagaaaatgccatgtattcccataattttggtgaccctggctctaacccaaactgtaccaggaacagatgatccaacagaggatgctcacaccgtttctgaatacaagaaccagtcttggaggtgtaacatgaatgtacaatattgattaagggaacattccaaaggtttaggagcaggagcatcctctttatggaagtattccagacacaaaaaggaaacagtatagacagactcagaacatcaccatttcgtaacccctaatgaatctaggcattgggaagaaatgaatgcaatacacaragacagtcagatagtatgcacccagcgccagaaaaatacctcaccacttacaaacccgtcctgccaaaagttatgacctaactgatcaggctttcagggtttctcaaccttggcaccactgacattttgggttaataattctttgtggggggagggggggcagttccaagatggccaaataggaacagctccagtctacagctcccagcgtgagcaatgcagaagatgggtgatttctgcattt

SEQ ID NO: 530919 - DNA, 263 bp, Homo sapiens
tggcattttgccacacactgtctcatttaaccagcgccgctgactgggaaggaaccactgcggccacctccaccttgtgaaagagtggctgaggcagatcccgcaacctgcccaccgtcccctcatcaggaagtcatggtgtcaggtccaggtcttgggcccagagggctttctccctgaagggaggtgagcrtcctgagcagccctcatgcttccccaggtacagtaagacgctcgggcttctggcacacacctctcccgtg

SEQ ID NO: 530920 - DNA, 488 bp, Homo sapiens
tgcaggggccatggctgcagccctgggggaggagggtgcaggcgccagtcttcactcaggctccagcagcctggctgtctcttactgttcacatgctggtggatggatgagcttgcagaccatcccaacacattcctttcttcctggaaacctctctagaggttctctgttgaccccagaaaaagctagaggtggctcaacacggcttgcatatctctgtgtgatctgatcatgtgcattctctccttttcccctccctcctctcacctcgtctttccttccctcccctcacctcctctttccgtccctcctctcacctcctgtttccttccctcccctcccctcctctttccttccctcccctcacctcctttttccgtccctcctctcacctcctctttccttccctcccctcccctcctctttcyctccctcccctcacctactctttccctccctcccctcacctcctgtttccttccctcccc

SEQ ID NO: 530921 - DNA, 488 bp, Homo sapiens
tgcaggggccatggctgcagccctgggggaggagggtgcaggcgccagtcttcactcaggctccagcagcctggctgtctcttactgttcacatgctggtggatggatgagcttgcagaccatcccaacacattcctttcttcctggaaacctctctagaggttctctgttgaccccagaaaaagctagaggtggctcaacacggcttgcatatctctgtgtgatctgatcatgtgcattctctccttttcccctccctcctctcacctcgtctttccttccctcccctcacctcctctttccgtccctcctctcacctcctgtttccttccctcccctcccctcctctttccttccctcccctcacctcctttttccgtccctcctctcacctcctctttccttccctcccctcccctcctctttctctccctccyctcacctactctttccctccctcccctcacctcctgtttccttccctcccc

SEQ ID NO: 530922 - DNA, 488 bp, Homo sapiens
tgcaggggccatggctgcagccctgggggaggagggtgcaggcgccagtcttcactcaggctccagcagcctggctgtctcttactgttcacatgctggtggatggatgagcttgcagaccatcccaacacattcctttcttcctggaaacctctctagaggttctctgttgaccccagaaaaagctagaggtggctcaacacggcttgcatatctctgtgtgatctgatcatgtgcattctctccttttcccctccctcctctcacctcgtctttccttccctcccctcacctcctctttccgtccctcctctcacctcctgtttccttccctcccctcccctcctctttccttccctcccctcacctcctttttccgtccctcctctcacctcctctttccttccctcccctcccctcctctttctctccctcccctcacctactctttccytccctcccctcacctcctgtttccttccctcccc

SEQ ID NO: 530923 - DNA, 333 bp, Homo sapiens
gccccgagtgcaaatcttgggatagtccttgtgtcttgttagatgctggtgagtgttacgaatgcaaatcttgggatagtccttgtgtcttgttagatgctggtgagtgttacgagtgcaaatcttgggatagtccttgtgtcttgttagatgctgrtgagtgttacgagtgcaaatcttgggatagtccttgtgtcttgttagatgctggtgagtgttacgagtgcaaatcttgggatagtccttgtgtcttgttagatgctggtgagtgttacgagtgcaaatcttgggatagtccttgtgtcttgttagatgctggtgagtgctacgtag

SEQ ID NO: 530924 - DNA, 612 bp, Homo sapiens
tattttgaaatattactcataataactgcattttgtttatgcaactatgacttatatcatgactgccccacctaacaattattcttaactttgtgtttccygtatttggccctaaattttcaaaagtaaaatcacccaaatgtcttttatgcttataatatcattggatttgctgaaatgaccactgggtggcacaaaattttgctcttttgccttataaatagaatgaataagaaaataattagatgtgttttggcattttccaaatttaataagtttaaaattatcatagacactcttctttttacttttaaaaatttaagatgtatcctaaaaaggaacatcaagcttaatccattttattcctgagttctaccagagttcaagaaagaaatcatacgttactttaattttaagaatacagaaaaagatgaagcatttttaaactcatgcgaaaagactaacatgaccatgactgcagataaagcaagtattcaaaatatcaatagctttccttactttgccataacaaatcacaaaagaagattacaatcacaataggaaaaagtagttattaaatttatagaaatggactaaaaataaataagatgc

SEQ ID NO: 530925 - DNA, 612 bp, Homo sapiens
tattttgaaatattactcataataactgcattttgtttatgcaactatgacttatatcatgactgccccacctaacaattattcttaactttgtgtttcccgtatttggccctaaattttcaaaagtaaaatcacccaaatgtcttttatgcttataatatcattggatttgctgaaatgaccactgggtggcacaaaattttgctcttttgccttataaatagaatgaataagaaaataattagatgtgttttggcattttccaaatttaataagtttaaaattatcataracactcttctttttacttttaaaaatttaagatgtatcctaaaaaggaacatcaagcttaatccattttattcctgagttctaccagagttcaagaaagaaatcatacgttactttaattttaagaatacagaaaaagatgaagcatttttaaactcatgcgaaaagactaacatgaccatgactgcagataaagcaagtattcaaaatatcaatagctttccttactttgccataacaaatcacaaaagaagattacaatcacaataggaaaaagtagttattaaatttatagaaatggactaaaaataaataagatgc

SEQ ID NO: 530926 - DNA, 466 bp, Homo sapiens
ggctaatgtttaaatttttcggccgggcgctgtggctcacgcctgtaatcccagcactttgggaggccaaggcgggcatatcaaaaggtcaggagatcgagaccatcctggctaacayggtgaaaccccatctctactaaaaatacaaaaaattagttgggcatagtggcctgtagtcccagctacgtgggagactgaggcaggagaattgcttgaacccgggaggcagaggctgcagtgagctgagattgtgccactgcattccagcctgggtgacagagcaagactctgtttaaaaaaaaaaaaatttttttcatagttgcccaggctggtctcaaactggtcccaagcgatctcagctcagcctcccaaagtgctggaattacaggcatgagccaccacatccggcttgtcagggcttaaagaaaccaccaaaggacagtgcagtgtcccagcactgatgaca

SEQ ID NO: 530927 - DNA, 648 bp, Homo sapiens
acagaaatccctgcccatccctgctaacccttatttccagatgcaggaagtgaggctcctggggtcattctcctcaccctggttgtgtccagggtgtgtgcttastccccggtggtcccgtgggcagtaaggatggccacagtgctgcaggccactgtgttcctgcaagcaaggagacaccacactggggaactgtatgtcagattcctgcccaagccccaggtctggcacagaggaagactgtggagagcaacacctccctgccctgctccttcccaccctgctctgcgtgtcttgatgtctagcaggtgtgttctgatctctcctgatgtggaccccagtggaggcactgcttcgacaggaagcatggtgctgtcagggcaggatgtgcgccaggatgcctctggctgcgctaggctgaaggggtgctttggaaggccacggtgctgcagggcatgtaggttgaagggtcctggctgggagccagctaagcctcaggttcctgctgcctctgggtttgtgtggttctggccagatcctcgagggctcctgcccttggaagcccaccattatctggagagtgagagttcctggtgctgtaggagaggatgccttctagcgtcagaactgatgtgcacaccacctcag

SEQ ID NO: 530928 - DNA, 588 bp, Homo sapiens
ctgggcacccggaagtcatgagttgagtcttcccgggctaatcyatcccgggttggaggctgctgatgcaggtcggcgcccaggtgctgggtcaagtcggggatggcctgggtgctgccctgggcccggggaacagaacacacatctggctttttgttagaagtcttcatggaaagagtggtacgtggtgggatgagcatctttctgaagaaaatgtcccattcattaagcagttggtctctgatgaagataaaacccaattagcaagtaaactgtgtcctctgaaagatgaaccatggcctatgcatccttgggaaccaggttcctttagagttggccttgaagctgggcatgatgcctttatggaccaaggatggtcaaaagcacgtggtcacattacttcaggtacaagactgtcatgtcctaaaatatacttcaaaggaaagccgtaatggaaaaacggcagccctgtctgtaggaggcaaactgtatcacgttttcataaagctacacctgtattggaattttaccgagaacttggattgccgtcaaaacagacagttataatctttaatgtaacagataatg

SEQ ID NO: 530929 - DNA, 588 bp, Homo sapiens
ctgggcacccggaagtcatgagttgagtcttcccgggctaatccatcccgggttggaggctgctgatgcaggtyggcgcccaggtgctgggtcaagtcggggatggcctgggtgctgccctgggcccggggaacagaacacacatctggctttttgttagaagtcttcatggaaagagtggtacgtggtgggatgagcatctttctgaagaaaatgtcccattcattaagcagttggtctctgatgaagataaaacccaattagcaagtaaactgtgtcctctgaaagatgaaccatggcctatgcatccttgggaaccaggttcctttagagttggccttgaagctgggcatgatgcctttatggaccaaggatggtcaaaagcacgtggtcacattacttcaggtacaagactgtcatgtcctaaaatatacttcaaaggaaagccgtaatggaaaaacggcagccctgtctgtaggaggcaaactgtatcacgttttcataaagctacacctgtattggaattttaccgagaacttggattgccgtcaaaacagacagttataatctttaatgtaacagataatg

SEQ ID NO: 530930 - DNA, 565 bp, Homo sapiens
tcacaaacattaatctataaatcaaagtatttattacagcaagtataaggatatactttacaagagtatgaagcatttcagagtcagtagtgcttttgcagtctttaacggtgaggtaccaatctgcttttcagcttttcacaaggggtggaatataaggatgagctttacagctaatttctaaaggtaaatttgcagatgggacctgaccatgtttcagcacatatggagaaatgcatatagaactatggcctgtttttctagtgtaatgagtattagaacacagtcacacacacagaagctgaattcgtacgtagggttcctcatatgcagaatgaatcccattagtctgtaagattacttgctttacattagtagcttattttgttttactaatcaaargaacccctctttgagaaagaatgtgtcggcgtgaagtctctcctgattccagcaaaattgaacctacgccctaaatcattgcccagagagagactgttggctgtgtcacagtgaaaacccattatgggaggaaagagcagcattcggattgctgactctgaac

SEQ ID NO: 530931 - DNA, 639 bp, Homo sapiens
ctgcactactgtctccagcaccctccacagccccgcccaacttagcctccaggctcttcacagcctaccaagtactggctgtggtccttagttcctttcccccacccagagtgcatgtccacatctggcaaagcaaggggtcagccgcaggtgactgaagagtttagttccaggcagaatgaaacccctgttgttggtgaggtgggggtcagcctccagcctggcctggcccctggcgttgcagagtagcctggtgactatgaggcagaatgaggtgtatggcccgggctggccaggctcccatccagtggaagtgtcacaagctctctggtgttgggggccccgtgcctggccctggtttgaagagctggagttgtcaggcctctgcagtgaccaggttcacccccactctgcagggtttggcacttgggaagatacagaggcctgggacttccgggtggtgtrgtttctgtcttcttcagaagtgtcttgtcacgcagcctggaggtgctgtgacccagagcctgtgaggcagggggataggaagaacctggggcttgaccttatagcccacagaagctgtcagtccttgacagcccagccatggcccggccttcacctggggagctctggccactc

SEQ ID NO: 530932 - DNA, 639 bp, Homo sapiens
ctgcactactgtctccagcaccctccacagccccgcccaacttagcctccaggctcttcacagcctaccaagtactggctgtggtccttagttcctttcccccacccagagtgcatgtccacatctggcaaagcaaggggtcagccgcaggtgactgaagagtttagttccaggcagaatgaaacccctgttgttggtgaggtgggggtcagcctccagcctggcctggcccctggcgttgcagagtagcctggtgactatgaggcagaatgaggtgtatggcccgggctggccaggctcccatccagtggaagtgtcacaagctctctggtgttgggggccccgtgcctggccctggtttgaagagctggagttgtcaggcctctgcagtgaccaggttcacccccactctgcagggtttggcacttgggaagatacagaggcctgggacttccgggtggtgtagtttctgtcttcttcagaagtgtcttgtcacgcagcctggaggtgctgtgacccagagcctgtgaggcagggggataggaagaacctggggcttgaccytatagcccacagaagctgtcagtccttgacagcccagccatggcccggccttcacctggggagctctggccactc

SEQ ID NO: 530933 - DNA, 509 bp, Homo sapiens
gacttttaaaaatctttcatggagacggggtctccctgtgttgcccaggctaatctcaaactcccrgccttagcgatcttcctgcctcagcctcccaaagtgctggaattccaggtctgagacaccacacctgggttccatgtgctttctacacacacttgggaggccagtgggagaccctagatccagagtttgagggtgacaccggccttctcctgccctgaggatcaagcagtgcccaagggcacagtctggtaagccctatcctgcgccacccactgtgggtgcgcagcagtaggcaggggaggggtcagggctgggagtccccctgcagatgtgtctgtcctagagagccctgcccaaggtgggctgtgtgggtgttggccaagtgcttccctaccacgagctggttgcagtttagaccaagcagtgcaaggtagatgtgctgggtgccaggcacagtggtgttccaggacccagtggccccactccaggcctggctcgtgctt

SEQ ID NO: 530934 - DNA, 509 bp, Homo sapiens
gacttttaaaaatctttcatggagacggggtctccctgtgttgcccaggctaatctcaaactcccagccttagcgatcttcctgcctcagcctcccaaagtgctggaattccaggtctgagacaccacacctgggttccatgtgctttctrcacacacttgggaggccagtgggagaccctagatccagagtttgagggtgacaccggccttctcctgccctgaggatcaagcagtgcccaagggcacagtctggtaagccctatcctgcgccacccactgtgggtgcgcagcagtaggcaggggaggggtcagggctgggagtccccctgcagatgtgtctgtcctagagagccctgcccaaggtgggctgtgtgggtgttggccaagtgcttccctaccacgagctggttgcagtttagaccaagcagtgcaaggtagatgtgctgggtgccaggcacagtggtgttccaggacccagtggccccactccaggcctggctcgtgctt

SEQ ID NO: 530935 - DNA, 422 bp, Homo sapiens
gagcctgtctccagactggccagagaggccccaccgtgctgccatctcttgcttccccccacccctgtctggagaagggctgggatgaccctgactcccaggcccaccagggccagcagagtgggctatttgcgtgggactgaggtgaggtgtgtgcaggagatgcactggctcgccggcctgcgtgctgtktgttcttgggatgttccctgacctctctgaaccttggtttcttcctctgaggaatggggctaaggccagctcttacctctcggaggtgcatggtgctctcccccagcagatccaacccttgttgatgagctctggactcatctatgagcagggcctccttaccgggtaagcagcaggtgacccatcctattccctgcagggccactgtcccaagattcgtccagcagaaa

SEQ ID NO: 530936 - DNA, 446 bp, Homo sapiens
acttagtcatacagaagccctgtatgatgttaaaaatttaagtccagaaataaagaaaattttcccttaaatcctttagaagcaagtaggagaaggagaaattctgacttaagcttaatttttctgactaactttattaaagtgaactgagtttttaaattattatttagaacaaagaatggtacagtccatgtctttcagcttttaaactgttaatctttgtaaataaagatgattatatatttctcaaaaacacaccttacmttttaatataatcatgcttgcccttttaaattgaggcattaataacaattcaacttctctttctcctttctcttagcattagtttacatcatgagtgggatggttaggacatagtccacactgcagctcgaaaatgttatttttctttttgaaactcacctatcatgtgttttaattagcat

SEQ ID NO: 530937 - DNA, 446 bp, Homo sapiens
acttagtcatacagaagccctgtatgatgttaaaaatttaagtccagaaataaagaaaattttcccttaaatcctttagaagcaagtaggagaaggagaaattctgacttaagcttaatttttctgactaactttattaaagtgaactgagtttttaaattattatttagaacaaagaatggtacagtccatgtctttcagcttttaaactgttaatctttgtaaataaagatgattatatatttctcaaaaacacaccttaccttttaatataatcatgcttgcccttttaaattgaggcattaataacaattcaacttctctttctcctttctcttagcattagttyacatcatgagtgggatggttaggacatagtccacactgcagctcgaaaatgttatttttctttttgaaactcacctatcatgtgttttaattagcat

SEQ ID NO: 530938 - DNA, 517 bp, Homo sapiens
gtatttttcattttagaaaaaaagattcaaaatcttaaatttactttccatctgggtgtttttcataagaaatggaattaacaaagaccaacaaaatatcaacataatctattgctttattgttaagtactcyatttataatctctaatgctaccaagcattagtaaatactaatttacttgacctttcctctcaacaaacttcttgtattactctgtaaacatttggaagttgtcagttattttacaccatcacaacatactacctctgtttttatatccttatctaattacattattcaattctcacgaaaacactccactacaatatgctacagacagtgtgtctattgtcctttgtggccatctattactataagatgaccataactttattctgtattcctttattacattgattctactcttttttttttttttaagagttagtgtcttactatgttgcgcaggctggccccaaactcctgggctcaagtgatcctcccacctcagcctcc

SEQ ID NO: 530939 - DNA, 612 bp, Homo sapiens
aatagttgagactccaggtctttgctgactccaatttctctgccttttccttacatatttgttattctctccaggatttttatcttcggccttattctttctctagtccataaactctctaagtaacctcaaccattttcatatcttccattcytgcatttacattagatgtttggtttccaattttgcatgttaagtccaatcccatgttaaagctcataaactagggagtgagaaagtgattaacttttcagttgtgtctaccattccagccaccataacacaaacaaatcagttctcagtttcgctcaattttacctccttcacatttcttgtatctggtctctcctgtctaattgccactcctattactctagtgaaaaccctagccacagtctgatttttaataataagctcctaaatagtttttttcccctccagttttgcacaatccatctggcttttcctgccagattgatttttctaaaatgcaaatctaatcacgtttactcctgtctaaaacgctttaatggctccctgtttaccacaggataaataaagactccttagcatgatacatgaggctctccttgacctggtctcttcccttta

SEQ ID NO: 530940 - DNA, 612 bp, Homo sapiens
aatagttgagactccaggtctttgctgactccaatttctctgccttttccttacatatttgttattctctccaggatttttatcttcggccttattctttctctagtccataaactctctaagtaacctcaaccattttcatatcttccattcctgcatttacattagatgtttggtttccaattttgcatgttaagtccaatcccatgttaaagctcataaactagggagtgagaaagtgattaacttttcagttgtgtctaccattccagccaccataacacaaacaaatcagttctcagtttcgctcaattttacctccttcacatttcttgtatctggtctctcctgtctaattgccactcctattactctagtgaaaaccctagccacagtctgatttttaataatamgctcctaaatagtttttttcccctccagttttgcacaatccatctggcttttcctgccagattgatttttctaaaatgcaaatctaatcacgtttactcctgtctaaaacgctttaatggctccctgtttaccacaggataaataaagactccttagcatgatacatgaggctctccttgacctggtctcttcccttta

SEQ ID NO: 530941 - DNA, 612 bp, Homo sapiens
aatagttgagactccaggtctttgctgactccaatttctctgccttttccttacatatttgttattctctccaggatttttatcttcggccttattctttctctagtccataaactctctaagtaacctcaaccattttcatatcttccattcctgcatttacattagatgtttggtttccaattttgcatgttaagtccaatcccatgttaaagctcataaactagggagtgagaaagtgattaacttttcagttgtgtctaccattccagccaccataacacaaacaaatcagttctcagtttcgctcaattttacctccttcacatttcttgtatctggtctctcctgtctaattgccactcctattactctagtgaaaaccctagccacagtctgatttttaataataagctcctaaatagtttttttcccctccagttttgcacaatccatctggcttttcctgccagattgatttttctaaaatgcaaatctaatcacgtttrctcctgtctaaaacgctttaatggctccctgtttaccacaggataaataaagactccttagcatgatacatgaggctctccttgacctggtctcttcccttta

SEQ ID NO: 530942 - DNA, 350 bp, Homo sapiens
tgaataacacacttagtcacacaattggtcaatgagagagttataattcaatcccaggccaatgtggctctaaatttgttatttagagcagagcgctgtaaatatattgccccacttgcttttataaataaagttttattggaattcatccatggctacgtgtttatgtattgyctgtggctgcttttgtactacgagagcagagttgagtagctgcaacagagaccataggatgcacaaaaccaaaaagatttaataactggtcctttacagaaaacaacaataacaaaaaacttgccaactctgctccagagcctatgccattaagctaggactcgattcatctctag

SEQ ID NO: 530943 - DNA, 627 bp, Homo sapiens
attactgtaaaattatagaaagttgaggaaaagattctaatgtacaaatgtacctggagtcaattttatgtacttgagtgtaaataagttattttttataatctgactactgtttttgatgctatttagttaaatctgtcactgttgatgttttaactttgctggaaagaaaatggaattatttgaaaccacaattctattgtgctactattgtttacttttccatcaacggaagtttatatcatcctttatcctgtttatatatttaattactaatttcttacattttgacacataacacatcttcacggataattctgacaccaagttaacacatacttagcgttgattatttatcaactctccctttcttaatttgttttctggccattctcctatgcatagaaaatgtcatgtagtgaaccactcattgaaaatgtgagaatgtcgttttatatattatatgaataataacaggtaaagtgatrgtcattgttagaaactttatcacacctaataaaaaccaacatttccaatgtcagtagaaaaatcgtcaggcatgtttttcaggtttttaagactatcatatcaatagacttttttttttaactgtggaataaagaactc

SEQ ID NO: 530944 - DNA, 649 bp, Homo sapiens
cattggcactcgtggttcttgggccttcagactcaaactgggrcttatgccactggcttccctggttctcagttcttttcatttggactgaaactatgccccagacttcctgggtcccaagcttgtaggtggcagattatgggacatctcagcctccaaaattgcttgagccaatctcacattataaatatctttctctgttttctctgtatctcccattgttcctatatctctggagaatcctcactattccatccctcctccttttttcttctgaagaactcaggtttcagcattatttttcctccttttaagataatgcctgtttttgttgttcttggtgctcctaatatttctctgtctttgaattttaaaggttatttcttcatatttattcttcttgaggcttgctgcatttcttgaatttgtgggttgatgtcttcattagttttagaaaatgttcatttattacctcttcaaatattgattctgcctcatatctgtctcttttctccttctaaggctctaattatgtagacattttagcatgctccatttgtttctaagcttctttcctgaattttatattcttttatgtctttgatcatcagcttttgatctacaattcagattatcagttcacctttca

SEQ ID NO: 530945 - DNA, 649 bp, Homo sapiens
cattggcactcgtggttcttgggccttcagactcaaactgggacttatgccactggcttccctggttctcagttcttttcatttggactgaaactatgccccagacttcctgggtcccaagcttgtaggtggcagattatgggacatctcagcctccaaaattgcttgagccaatctcacattataaatatctttctctgttttctstgtatctcccattgttcctatatctctggagaatcctcactattccatccctcctccttttttcttctgaagaactcaggtttcagcattatttttcctccttttaagataatgcctgtttttgttgttcttggtgctcctaatatttctctgtctttgaattttaaaggttatttcttcatatttattcttcttgaggcttgctgcatttcttgaatttgtgggttgatgtcttcattagttttagaaaatgttcatttattacctcttcaaatattgattctgcctcatatctgtctcttttctccttctaaggctctaattatgtagacattttagcatgctccatttgtttctaagcttctttcctgaattttatattcttttatgtctttgatcatcagcttttgatctacaattcagattatcagttcacctttca

SEQ ID NO: 530946 - DNA, 649 bp, Homo sapiens
cattggcactcgtggttcttgggccttcagactcaaactgggacttatgccactggcttccctggttctcagttcttttcatttggactgaaactatgccccagacttcctgggtcccaagcttgtaggtggcagattatgggacatctcagcctccaaaattgcttgagccaatctcacattataaatatctttctctgttttctctgtatctcccattgttcctatatctctggagaatcctcactattccatccctcctccttttttcttctgaagaactcaggtttcagcattatttttcctccttttaagataatgcctgtttttgttgttcttggtgctcctaatatttctctgtctttgaattttaaaggtkatttcttcatatttattcttcttgaggcttgctgcatttcttgaatttgtgggttgatgtcttcattagttttagaaaatgttcatttattacctcttcaaatattgattctgcctcatatctgtctcttttctccttctaaggctctaattatgtagacattttagcatgctccatttgtttctaagcttctttcctgaattttatattcttttatgtctttgatcatcagcttttgatctacaattcagattatcagttcacctttca

SEQ ID NO: 530947 - DNA, 649 bp, Homo sapiens
cattggcactcgtggttcttgggccttcagactcaaactgggacttatgccactggcttccctggttctcagttcttttcatttggactgaaactatgccccagacttcctgggtcccaagcttgtaggtggcagattatgggacatctcagcctccaaaattgcttgagccaatctcacattataaatatctttctctgttttctctgtatctcccattgttcctatatctctggagaatcctcactattccatccctcctccttttttcttctgaagaactcaggtttcagcattatttttcctccttttaagataatgcctgtttttgttgttcttggtgctcctaatatttctctgtctttgaattttaaaggttatttcttcatatttattcttcttgaggcttgctgcatttcttgaatttgtgggttgatgtcttcattagttttagaaaatgttcatttattacctcttcaaatattgattctgcctcatatctgtctcttttctccttctaaggctctaattatgtagacattttagcatgctccatttgtttctaagcttctttcctgaattttatattcttttatgtctttgatcatcagcttttgatcwacaattcagattatcagttcacctttca

SEQ ID NO: 530948 - DNA, 578 bp, Homo sapiens
cacacagcccttataatttcaggaatttataattagtgtaataattcttcttagccttagttattaagaggtagtgtaagctaacgtttaagaacatgaattttagaatcagacagatctaggcaaataacccttcctccagtgtgattttctatgtctcacttaggcataaaactaaacaaattataaagctgtagttttgtttttgaatttactttctactgatatgggcttggaggtagctctaagacaaaaaaaatactaatgcttaagaaacattgaattaatggtgttgcttgaaagttaagaaacaatagaaaaggaaaataaaagaaaaatgtgttaggaaagtaaggagaagggaaggaaatgtacatttagtgcctactacacaccaggcactgcagaagcttcttctgcaaggacagtctatggtgaggtggtaatcctctccataatacacggttagcttcattttacggaagagcatcagaggggtgttgtaacttacttgacagcacrcggcaagtaactaacggaataagaaccagcacagaagtcactctgactccagaaca

SEQ ID NO: 530949 - DNA, 521 bp, Homo sapiens
aaagtctacataatttaaaaagattatcttctaaactttctttgctgttaaacttgctcaagaaaataccatctgaccctatttattagcatgtattttcattctctaaaatgggaaataagggaccctagtatgatgtcctctgaacaatgtatctttaattaagaaaatatrtcttcctctgattctagactttctacttgattctttctgtactgttgttaagttattgatttggagataaggaaatatggagagagggaataaaaacaaaacaatgaaataatttaagtacctgctaagttaaacgagaaaatgtcattttctctcattttatcctcatgttaattctgatacagggacttgtactccaaatggtctctatctttcctagcctgtgggtagactagtcatcaatgacatcattgctaagatctggctgtttcatagtccccactccataaccacagcactcaatgcccttctgcccctctgctccacccactcgggcctcccagttt

SEQ ID NO: 530950 - DNA, 491 bp, Homo sapiens
catatctctaaaacatagaattaggaaaaataatacatctaaaccaatacatactatgtattatacttactatatataaaacatatgcatgtgcatttgtgtggagtacatacctttatgtacacatacatatatgtagatgtaaatgtatataaaactgattaggagagccaccctaaataatacaaagtggttacctctgcataagggagagagattccagagagggatgagagacaaagtggagagaggattaaggaggattgtttatgtactgctggagtgattcattgtaagatttcttttcaatgaaaagtaaaagccttcaaaaccgggctgttgacaaagggtctgttcctgctcatcctcactgggtctaagaaattgtgcttttgatcttctcagttttcacagctaacagttaccttgcccactcacctcgcttgggattcaatcaatcargagtgtttgtgcatagttcccatgtccca

SEQ ID NO: 530951 - DNA, 622 bp, Homo sapiens
gaaactctgggtcttcaataacaaaaaagaaggaaagttagattcacaaacttactgcaaagagacatatcaggatcccaagaggacatgagacagacaaggagagagcacatagggtgaaaaacactgaatttgaggaaggtagaacttttaaggggctcttggtaaccccttggtacttaatgtgtttattttctgaatgcctaagtgccatttaacaggcacaaggggtagaaaaaatgtcttggtttgggaattaggggtagagggatctcaaatagaaaacaagtctttctcatagataagacagagtggtaaagacccacataaagtaggaaggggagagagaytgcactcaggagtctacaagagtgaccctgatctaccaagtgggtagcgaggtctttggctgaaagaaggggataggacaaagtttaaggtgttaaagaagtaagaacaggaacagttgtggtaggcggtttgtaggaaattgggaatgaaatgaaagattgttcctctgaaatgccaacattgcagaacggtgttggagggtcaatcaatttccacctcttaactttctccagaagggctcagcaatttgggattcagaggaaaaagaaag

SEQ ID NO: 530952 - DNA, 530 bp, Homo sapiens
gcctcctccagccagccggccctctccctccctgctcttcccaagtcccaggctcaaagtgcggctcacatccctcctttccctgagccttcccagacagccagccccacagtggcctccttccattctcraagcctttggtggcacttcatggcagagccagggtagaaaacagggacgatgagacttacaaatctgagctcaaattccagatccttctctgacttgcagtgtgatcttgtgcaagacacaaaacctcctggcccttagatttcttcttctgctacaaatgatcagaggttcatgagggaaatggaacttagtgtctgagtgctgggcacaaggtaaggactcaatcagtgctggccccgcctcttttgctctcaccgcctcttacttttttatgacttctttagcatccattatatccatgtatgtttatatttaaagttattttattatgtgtgtgtatactgattccctaattgaattgattgtgtgttttcattcattttttgaaagaatttttg

SEQ ID NO: 530953 - DNA, 501 bp, Homo sapiens
tcctggccagctgcctcctccagccagccggccctctccctccctgctcttcccaagtcccaggctcaaagtgcggctcacatccctcctttccctgagccttcccagacagccagccccacagtggcctccttccattctcaaagcctttggtggcacttcatggcrgagccagggtagaaaacagggacgatgagacttacaaatctgagctcaaattccagatccttctctgacttgcagtgtgatcttgtgcaagacacaaaacctcctggcccttagatttcttcttctgctacaaatgatcagaggttcatgagggaaatggaacttagtgtctgagtgctgggcacaaggtaaggactcaatcagtgctggccccgcctcttttgctctcaccgcctcttacttttttatgacttctttagcatccattatatccatgtatgtttatatttaaagttattttattatgtgtgtgtatactgattccctaattga

SEQ ID NO: 530954 - DNA, 501 bp, Homo sapiens
tcctggccagctgcctcctccagccagccggccctctccctccctgctcttcccaagtcccaggctcaaagtgcggctcacatccctcctttccctgagccttcccagacagccagccccacagtggcctccttccattctcaaagcctttggtggcacttcatggcagagccagggtagaaaacaggracgatgagacttacaaatctgagctcaaattccagatccttctctgacttgcagtgtgatcttgtgcaagacacaaaacctcctggcccttagatttcttcttctgctacaaatgatcagaggttcatgagggaaatggaacttagtgtctgagtgctgggcacaaggtaaggactcaatcagtgctggccccgcctcttttgctctcaccgcctcttacttttttatgacttctttagcatccattatatccatgtatgtttatatttaaagttattttattatgtgtgtgtatactgattccctaattga

SEQ ID NO: 530955 - DNA, 639 bp, Homo sapiens
ctgctggtgcattttcatcagtacacagcaccactttggtacctcccaacctataagaccctcccccaattccgcatcccccttcagccactgcttcatctccttgttcctttttatagcctgacttgttgaaataattttctacacactttgcctccactttttccagcttccatgcatccttgatcacactctgttctggcttctggccctactyacacctaaagaggccaacaaccttcatcaacctcttaaccctttctcctcacctctgactctacacttcacacttctctcccaggcttgcctccatcactgagatcacacactgctttccctctgtgatgcactctgcctcctgccctctctttctcagtctcttatgcaggcaaatcctccactaccagccctcagggctccatccctgccaccttcttccctctaaattttcttttccatgtgattgcttctattccttaggctttaaataccaatccaaatattgatgccccccaaatgtctatctgtagctcagccctcacttctgagtaatctttagtacctcctgcttctctgacactcatgaccaaagtgcctttaaagctgctatttctgcctttaaaatgtatctcacatatc

SEQ ID NO: 530956 - DNA, 639 bp, Homo sapiens
ctgctggtgcattttcatcagtacacagcaccactttggtacctcccaacctataagaccctcccccaattccgcatcccccttcagccactgcttcatctccttgttcctttttatagcctgacttgttgaaataattttctacacactttgcctccactttttccagcttccatgcatccttgatcacactctgttctggcttctggccctactcacacctaaagaggccaacaaccttcatcaacctcttaaccctttctcctcacctctgactctacacttcacacttctctcccaggcttgcctccatcactgagatcacacactgctttccctctgtgatgcmctctgcctcctgccctctctttctcagtctcttatgcaggcaaatcctccactaccagccctcagggctccatccctgccaccttcttccctctaaattttcttttccatgtgattgcttctattccttaggctttaaataccaatccaaatattgatgccccccaaatgtctatctgtagctcagccctcacttctgagtaatctttagtacctcctgcttctctgacactcatgaccaaagtgcctttaaagctgctatttctgcctttaaaatgtatctcacatatc

SEQ ID NO: 530957 - DNA, 582 bp, Homo sapiens
ctgcaggaagtaggacatggaatggattgaatagtgatcgacagaagggagataggaaaagatgtgagctttgtcttaggcctgtaatatagagagataaaggcagatataaggaaatttgattayataataaaaataaggagacataaaataaaacagacttttatagctgtctccccacgttgagttcaggagtgctcagagacttggatcccctcccatcagggagggaatgcacattgccattttacagatgaccataaaggacagggaagaagggaaggcactcttcctcttggagtcaggcccctgtcttaagggagatagcccatgccggagagagccctgcatgcagtcagtgcaaggagaggtgctcctttgcacacaccgagtttgccttaagtgaagcttttcccagcccatgtgttttctccagccctgccctctgttcgctcaggtcagtgcctcaccgccacactgtctctgcttcacttagagtcctgggaattcatggatccagaacatgctgagaaacgcctggaatttgcatgaaatttattcaagtacctctttatctgcggc

SEQ ID NO: 530958 - DNA, 606 bp, Homo sapiens
gctgtgagattctaatgtatgtcaatgaagagataagattcaatctacaaatatttgaattacatgcaaaatgtaagtcacaaatctcgcacctaaagtcagggttaccttccaatactccagccttgttgtacaagtcggggcttacaccatcgcagggcagaactgctcccataatgagtataggaaatattcarcccaccatttctgaataaatatcagtgcatagcacatttctagtctttaaaatgtctaactgctttctgcatgagttcccatagtcaaaacaacacccttcttccctccttcctcctcaggtctcacatttgtgactgctccctcaacagagtcccaggctttcttttctgtgtagattcttgcagagctttcttgaaatggagccgcctcatcaataggccaccctgcactgccagctctgttaagtaaccaagtctctgttgggcggaatttgtgggtctggatttgtgactatattccaggtgtctcctagtggctctcaacaatctttggtccatatttatggccccttgtttcttacctgcatctgcaggacaggccgtcttctgaggagctgtccaagcttcc

SEQ ID NO: 530959 - DNA, 589 bp, Homo sapiens
ctgctggggtcccaggaccgtgctgaaaagctcacttgaaatagctacgacttgagagtgagaaagcacgaaggaaggaaggaaggaaggaaggaaggaaggaaggaaggaaggaaggarggagggagggagggaggaaggtccggtttctcccgcagatcactttccctgaacatctgcacccttgccctagaggtcttcccctggctggtttaggggtgaaaggaacagaagggagggagcctctgagtgagtcacagtgacgggaacaactggctcctcccatcccccaccgtccttgtccacccctccccactgtagcatgtgatcttctctctctcctccccatcccaccccctccccaccacacagacacacacagacacacacagacacacacacacacacacacacacacacacacacacgtgatgtcctgtcataattcagaaggcggatgactccccaggccgctaattggatgggcatttgggcagtggctccccgtctattctgagctttgtgctgtgcactaattaaaaccatcagcgttgagtctttgctttataagcattggcttctctgcgac

SEQ ID NO: 530960 - DNA, 606 bp, Homo sapiens
gctgtgagattctaatgtatgtcaatgaagagataagattcaatctacaaatatttgaattacatgcaaaatgtaagtcacaaatctcgcacctaaagtcagggttaccttccaatactccagccttgttgtacaagtcggggcttacaccatcgcagggcagaactgctcccataatgagtataggaaatattcagcccaccatttctgaataaatatcagtgcatagcacatttctagtctttaaaatgtctaactgctttctgcatgagttcccatagtcaaaacaacacccttcttccctccttcctcctcaggtctcacatttgtgactgctccctcaacagagtcccaggctttcttttctgtgtagattcttgcagagctttcttgaaatggagcmgcctcatcaataggccaccctgcactgccagctctgttaagtaaccaagtctctgttgggcggaatttgtgggtctggatttgtgactatattccaggtgtctcctagtggctctcaacaatctttggtccatatttatggccccttgtttcttacctgcatctgcaggacaggccgtcttctgaggagctgtccaagcttcc

SEQ ID NO: 530961 - DNA, 331 bp, Homo sapiens
gaagtgacaaatccactgcttttccctataayttttttgaagcatttcttccgcatcttcttaaaaggatggctaagaagtcaaaatagttgcctattcttaggcgcaaatggtgctttcaaagaggcttacatagctttccttatctggtagctgcacagcactcctgtgatgcgggtttccttattaatgtattctgcatgccccttgtatttattatcaattgctatgtaacaaattaccacaaatttagcagctttgaacaacacacatgtattgtctcccagtttctgggaatcaaaaatctggatatggactgagtcttctgccg

SEQ ID NO: 530962 - DNA, 626 bp, Homo sapiens
accttgttggtcaggctggtctcaaactcctgatctcaggtgatccactcgccttggcctcccaaagtgctgggattacaggcatgagctacctcacccaatctctcctccttatcattttcttaagaacattttccttttttttctggcttactttattgtaagaatacactctataatacctatacaaaatatgtgttaagcaactgttgatgttatctgaaagcttctgttcaggagtaggctattagtagttaagtttggggagaatcaaaacttattttttcaactgtgcagggggttggcaccctgaacacctgcagtgcttaagggtccgccgtggtcattctatgtatatatatgccaataaaagcacaaagaaaagaaaaggtggtggatttaaattgaagcgaagtttctacatttgactagaattaagtcaacattagtctgaaataggatactaacaagttgatatgcatattttaatcactagagtaactactayggaaattattataaaatgcagttaaaaagtcagcagaggtgaattaaatgcaaatggaggagtaaggacctcgaaaaaccctcttcttcacaaaaactatgagaacactgtgcaaaaa

SEQ ID NO: 530963 - DNA, 598 bp, Homo sapiens
attcaatgttcccatgtgatgagtccattgagaggagaaagttaatttaactcgaccggactgtacgtcaatgccattaggaaaaccacactgcaagagtgaatgaggcatcacgycaaccccggggagttgtccagacaaggagataaagcttatgcatggggaagatacaagatatacaatagtaggtgccataagtaaggctcagagggctgtgggggcttagagcaaaggcagaggacaaggggaaggatttaaggaggaggcggtttttgccttgagaactccatagcattcaatggccagagagacaggttatgaataaccttgaacaccagactatggaatttgactctatctaacagtgtaagagaagggatgccaaatgcactgttgatgcgccacaactatcctatccctgtacctaaccacctcctacacaaagccaagaaacaccagtgatccattgtggcccttcttcgtggcctgactatggcctcagaatccagatgttcctcagtatataaaagcaaaaggaccaagtatcttgcagtagccacagaggtgcctgcctgcaagcaaaccttttgcagagatc

SEQ ID NO: 530964 - DNA, 462 bp, Homo sapiens
tgggatgctgaaccgagccccattctatgagctctgaccaggctcctgtactcgttagaccacctgaggagctgccctagcaagagcctgccagtgtcactgtgtgtttgtcctcgggctgcctggctgccgtgaacatggccagccrggccctgtggcctcaggtgctcacacaattacagggacaagcagagggctccactgatgcctccgaagccttctaactcaccaggttcttccctgcattctgccgggttccgtccttgctcttctcgtctcattcttcatcctcattcttggcgacctcattcacctccttatctttaagtactacacagcctggccattcctaagtctatatctgcaaccccctctcctggctctacctgtgggtgtcctctctgaccacttgcatcaagcagtttcacaaaccttatcatcattatagcagtgccagccata

SEQ ID NO: 530965 - DNA, 605 bp, Homo sapiens
gcccactggcccctgccctctggttgtggcaagggcttgggagctgtgggatcccttctcagccacctctgcagaacatccgtgcagacattgytttgtatatgatctcagtctttttagtgtattgtttgaaacgttaatttaattaatgtccaattaatttaatttaattttcacaaaggaacaaaggtagggcccacattggagttatcctctgaatcattgagtgcaaaaagaatatggctggctgggctcagtggctcatgcctgtaatcccagcactttgggaggatcacctgaggtcaggagttcgagaccagcctggccaacatggtgaaaccccgtctctactaaaaataaaaatacaaaattagctggtgtatgcctgtaatcctagctacttgcgaggctgaggcaggagaattgcttgaacctgaaaggcacaggttgctgtgagctgagatggcgccattgcactccagcctgggcaacaagagcaaaactctgtctccgggggggaaaaaaaaagaatatggaaccacatctacagaattttgaggataaagtgtttgtgaaccaaacatttttgttctatgtcaaattat

SEQ ID NO: 530966 - DNA, 605 bp, Homo sapiens
gcccactggcccctgccctctggttgtggcaagggcttgggagctgtgggatcccttctcagccacctctgcagaacatccgtgcagacattgctttgtatatgatctcagtctttttagtgtattgtttgaaacgttaatttaattaatgtccaattaatttaatttaattttcacaaaggaacaaaggtagggcccacattggagttatcctctgaatcatygagtgcaaaaagaatatggctggctgggctcagtggctcatgcctgtaatcccagcactttgggaggatcacctgaggtcaggagttcgagaccagcctggccaacatggtgaaaccccgtctctactaaaaataaaaatacaaaattagctggtgtatgcctgtaatcctagctacttgcgaggctgaggcaggagaattgcttgaacctgaaaggcacaggttgctgtgagctgagatggcgccattgcactccagcctgggcaacaagagcaaaactctgtctccgggggggaaaaaaaaagaatatggaaccacatctacagaattttgaggataaagtgtttgtgaaccaaacatttttgttctatgtcaaattat

SEQ ID NO: 530967 - DNA, 576 bp, Homo sapiens
tatttaagcacaacatataaatgtgaaaagcccacctgagatgttactgattacacagattgaagaagtgagaacaatgttcatcagtcccagtgttttgggcttggagtgagatgtcatggacactggcataagccttttgcatktagcaagaattacctgttctgctgggtatggtgtttcatgcctgtaatcccagcactttgggaggtcaaggccgaaggataacttgaggtcaggagtttgagaccagcctagccaacatggtgaaaccctgtctctactaaaataacaaaaattagctggaggtggtggtggacacctgtaatcccagctactcaggaggctgaggtgggagaattgcttgaacccaggaggcggacgttgcagtgagctgatatagcaccactgcactccagcctgggcaaaagagtgagactccatcttaaaaaaaaaatagaaaagaattacctgttctttttctctcattaggtcttgatctcaaacttctatgggtctttctggagggggaacaatcagccacaaaagccactggatagaaggttggctattttc

SEQ ID NO: 530968 - DNA, 529 bp, Homo sapiens
caccatttcccagtgttgcggcgtggaggaaagtggactctctgttcatctctctctctgtctccctctcaccactccatgccatgctgacttgggttcactgggttggagttctttacccacacagttcttttaacacacacagacacaaacatacacacttttctcccaaaacctgtcagcctgtcccccaacctccatgtcccagatttctgagagctgagcttgcttctcttgatatctagtcctaaccacttcttgccccaggataaatcacatttctcataggaataaattttatgctgtgataggtttcattccactttaaaaggcagggcggggcatggtggttcatacttgtgatcccagagcttcaggaggctgaggcgggcagattgcttgagcccaggagtyggaaagcagcctgggcaacatggtgaaaccgtatctctataaaaaatataaaaatgacccgggtgtggtagtacacatctatagtcccaactaactcaggaggctgaggtgggag

SEQ ID NO: 530969 - DNA, 529 bp, Homo sapiens
caccatttcccagtgttgcggcgtggaggaaagtggactctctgttcatctctctctctgtctccctctcaccactccatgccatgctgacttgggttcactgggttggagttctttacccacacagttcttttaacacacacagacacaaacatacacacttttctcccaaaacctgtcagcctgtcccccaacctccatgtcccagatttctgagagctgagcttgcttctcttgatatctagtcctaaccacttcttgccccaggataaatcacatttctcataggaataaattttatgctgtgataggtttcattccactttaaaaggcagggcggggcatggtggttcatacttgtgatcccagagcttcaggaggctgaggcgggcagattgcttgagcccaggagtcggaaagcagcctgggcaacatggtgaaaccgtatctctataaaaaatataaaaatgaccygggtgtggtagtacacatctatagtcccaactaactcaggaggctgaggtgggag

SEQ ID NO: 530970 - DNA, 651 bp, Homo sapiens
acttcacaaacattcttttctggttcctcttctttccacacgccacactgaggatgtgaggaatgagacagagtcaagaacagcttataagtttgcaggatggaagctaacgttgagtggaactcgaagaggtctaccagagagcaggctggggagcaagaggaggaatggcttgttttaaagggaatcttttggaggcaacagtttctatttgaacagctggagtactgcctctttctccttgttctcttagcctgacaagtattttgagccctgggactttgaaagaatcactccccagctgtccctgacattttaaaatctgttcccagtttgaatcaagtggagtctttagtcttagatatgaaggctattgcaaaaagtttgtagaaagcagttaatttcctctctttttccttgctgcagctgacytggaaaaaaaaatattcaatacaaacaggctttcctcatctctaaggagagaaagtctagcagatatgattcacagccatcagaaatttgatgacctcatatctgcactcctagaaagggttcggctctgccattcactccaaagggctaagccaccggcacacctgaggttaagccaataaaacacagtaattccttcatgtatatgccctccatttt

SEQ ID NO: 530971 - DNA, 578 bp, Homo sapiens
ggaaaaatatctagatgctgtgggttcattctatatgtaaccacataaaactgctaaaatagatcagaatttttagatatgagagagataggctttccatatctagattccattcggtctgaaaattttttatgtaataaaatactctcacagttttaaaatgaaactcaaagtttaattacttaaaatacacaaacacacaaacacatatacaaatctaatattgtgggacaaaaatatttcatctcaatgagaaataaatatacttacttctaatgtatgtattagtttgaaattttatatgaatatagttatttattcaatggatttacaataatttcatattcaaataacaagaatttaaagaaggttctagaaatatgactacttttaaaattataactacatctagactcttttaaaaattatttttatacaaatatgaaatgatttttaatgaactggagttaggtgttttcggtttgaataacccagatacatccttcaaattcctgctccctttgtgatgatmtgatccgatcatattatttgtttttaggatcagtactgaaagctgc

SEQ ID NO: 530972 - DNA, 599 bp, Homo sapiens
attgtcttgtcaccctaggtttcttttggctgtggcagttttcaaacactgtctttgatgacctggacatttttgaggagtcatgtcgcatgcccctctgttggaatttatctgatgtttttctcatgattaaactgggattataaattttgcagaggaagataaggtaaagtgccattctcatcacctcatagcaagggtgcatgctatcagaatgacttatcactgttaatgttaacattggctatattgttgcggaaatgtttggtgtatytctccgttgtgaagttacttttcctcccatttttatacgttactttttggaaggaagtcactgtgtgcagttcacacttaaaaagtgaggagttatgtgccacctccttgaacataaattatttggaatttagatgtgcttactgctacttgggtgacgtggcatctagaccccctcagttcacagagcaaggacacatatatgtgtatatgaattcatacatatacatatttagaagcatctcaatatctagaggatagaaaaggcacgaaatgaattttcccctagattatccagaaagaagacagttctgctgactccttca

SEQ ID NO: 530973 - DNA, 457 bp, Homo sapiens
tacgcttgacctctgttccccaggaaaaatgctatgctttccaggtgatggattgggctgckgactccccagaagcttggatcatacactctgtttcacagagataggtgaagctttgtggggctggactgggcaagcgaacaatcaggtacccctatagaagatgtgaactccagccttgacaagagtggcagaagatttttcaagcccctggcaaaatatttgtgtgaggctttattgctactgcactgaagtctcagcgccacaggcttggtaggcagtataacctgcttacctctcatgcctttgtcctggcagggctcgctttcctgtcctgactgtggccacatttaagataatccattaactgctgaagtttacttctagtctgaaaggtaacccagtgtcatagaagtcactagcttgttgctcagtactaaacttctgcagtagctgg

SEQ ID NO: 530974 - DNA, 457 bp, Homo sapiens
tacgcttgacctctgttccccaggaaaaatgctatgctttccaggtgatggattgggctgcggactccccagaagcttggatcatacactctgtttcacagagataggtgaagctttgtggggctggactgggcaagcraacaatcaggtacccctatagaagatgtgaactccagccttgacaagagtggcagaagatttttcaagcccctggcaaaatatttgtgtgaggctttattgctactgcactgaagtctcagcgccacaggcttggtaggcagtataacctgcttacctctcatgcctttgtcctggcagggctcgctttcctgtcctgactgtggccacatttaagataatccattaactgctgaagtttacttctagtctgaaaggtaacccagtgtcatagaagtcactagcttgttgctcagtactaaacttctgcagtagctgg

SEQ ID NO: 530975 - DNA, 457 bp, Homo sapiens
tacgcttgacctctgttccccaggaaaaatgctatgctttccaggtgatggattgggctgcggactccccagaagcttggatcatacactctgtttcacagagataggtgaagctttgtggggctggactgggcaagcgaacaatcaggtacycctatagaagatgtgaactccagccttgacaagagtggcagaagatttttcaagcccctggcaaaatatttgtgtgaggctttattgctactgcactgaagtctcagcgccacaggcttggtaggcagtataacctgcttacctctcatgcctttgtcctggcagggctcgctttcctgtcctgactgtggccacatttaagataatccattaactgctgaagtttacttctagtctgaaaggtaacccagtgtcatagaagtcactagcttgttgctcagtactaaacttctgcagtagctgg

SEQ ID NO: 530976 - DNA, 457 bp, Homo sapiens
tacgcttgacctctgttccccaggaaaaatgctatgctttccaggtgatggattgggctgcggactccccagaagcttggatcatacactctgtttcacagagataggtgaagctttgtggggctggactgggcaagcgaacaatcaggtacccctatagaagatgtgaactccagccttgacaagagtggcagaagatttttcaagcccctggcaaaatatttgtgtgaggctttattgctactgcactgaagtctcagcgccacaggcttggtaggcagtataacctgcttacctctcatgcctttgtcctggcagggctcrctttcctgtcctgactgtggccacatttaagataatccattaactgctgaagtttacttctagtctgaaaggtaacccagtgtcatagaagtcactagcttgttgctcagtactaaacttctgcagtagctgg

SEQ ID NO: 530977 - DNA, 533 bp, Homo sapiens
atattttggttaaatgaagttaacagtaaagtggtcatctctctacttctgctctcaacccccatctcagctttccccaagtattctggaaccctttctgaagaagagggcagttctaactttcagggatgttctggtgccagctcaatatgcatctcattaatcttatcaatagtaacaaagtatttgaagggcaaagaaagatacgattactacctatttgaagtttataaagaaagccagaagaaaaagaaaaaaaagagaacaaaagataaagtaggtcttgtttcttcatccacgctccaaattactgatttcaaactgctccaaggacccaaactgttcagcaatgtgggctacacttcctctgatatccagccaacgcataaagaagctgacataaaaactcaaaggaaatcatgmctcctgcaaaacaaaagacaaagggtgtacaaaggatcatcattcaagttggaaacctgcttgatagtcccagatcagcacaaggctttccacatctccttgacattagt

SEQ ID NO: 530978 - DNA, 607 bp, Homo sapiens
gcaattataaaacagcaagttagggaacaatgattggttactgtataactatgcctatatcttagcagaattcagacccctattatagttctaatattatgaccttacattagttccacaaatgcagtttcagtccctaacaagggaaaggttagttttgggaagagactataatcattcttgctccaaggttaaagcataaactaaattattcctatagttatcctggcctacgtacaagaataagcaaaggtggttagcttgtgaggttagaagcaaaacggagccagctaattaggtttctctcattcttrtaattttgcaaggatggtttcagtattaccctcattattctgatgagaaagttgaggcatggagaagccaagtaacttgcctaaggtttcctacttgataggggtaatagggagatggaaacctgggaagtctgatacaggacacttaattttgaccattatgcacactgcttctcattagtcatgcataagacatataatgctggaaagactttcacacacttagctcaaaatgtaaattacatttatgtttaaatgtaatttacattttttgggatttagttatttgtaac

SEQ ID NO: 530979 - DNA, 605 bp, Homo sapiens
tggttttctctgtatatcttttttaaacatttaaactcttgcccttgcctattcggtagtttctaatcacccaatcaacagcatgaacctagggtgcagaaattccatttcttcatatattttagcccaaaggaatgattatgaatccatactaaatgacacaatgttttattttttcataaatacattaaacatgcatcaatgaaaacagcattttaatcatgtgagcaggactttattgatttatccaagatggaattaagcaatattttttgacaacacaaggagtataaatagctcctcatagtatgatttaaatttgattattacatagttttaatcataacttgtgcacatttttcaaaagtagaaataaaacattgtcaagttctctggaacaraacaaaattgttttttggtttgtattagatgtagttacattgagagttgtgcttgagtgtatgtatggtgtaataagggataaagtagccttgtgatacttttttcatttacataaatacagttcagggaatattactaatgaagtggatgtgggggtcacctagccaccttaggaaaaggttactactttattttaagtagcc

SEQ ID NO: 530980 - DNA, 580 bp, Homo sapiens
ggtttgtcttgagtcagaacttggactaggacctgatctcctgtctcccagcctagtgcgtattcccctacaacctactgtctccttcatatgaatgcccagagatatcatgctgatcggaatttctggagtatgaacatcatcccttccccattcgtaggaaccttaattgtcttcaccctaaagcacatatagcttcagatatgtttgcatatttacgtcgatctaattgctcatgagtcgatctagtcaattagcctttggttactggaaaaaaagtgatttaagactatttttaaatgaaacctgtgaatccttttgccatataggcacaaagtaggacgtcaaggggcactgtgataaaggagacagcagcaggtccagggaaaaatcttacagagtgaaatcatcaaccctcaatggaatgtgaatcgaaagccaagaactattagtaaaaagaaaaatgtataaagtagaggaaagaagaacagaggggcgtgagcatgagatgggagtgcagagggcttgaattggcmtggacagcccatttctcagcaggtcagcactcacaggttggcac

SEQ ID NO: 530981 - DNA, 447 bp, Homo sapiens
tattttataaggccttcaatcttcttttttcatattggtgggtttctgcatatttaaaaaattgttatctcttattcttggttccttgagtaagcacttggctgaagaaacgctgaaccagggtgaagaatgtccattggtacttttgctttttgatgcagtggctggaaaaaaaaaaacacttgattatagtgattcagtaacagaagagctccaggctactaaagggcagtatttctcaaagactggtggcatatgctcactatcttcttcactgtgcctcctcctctgcagggatgctttgcactgacagtgcttggaaattatgaacattkgttgaatcagtgcaccatgagcctgggacagagtttagttcctctggttgggggatgtttagtaaaaaggccatggacttggaagccagaaaaacctagttttaaattgtgg

SEQ ID NO: 530982 - DNA, 156 bp, Homo sapiens
ctggtgctctggcctgtgtgcctcatgatcatggatacagcatctattcttaatttttcctgtagtcctggggtacttagcaccgtggcatatctgtaataagcacatgcacacctygaaggaggtcttcacttcaacatacaagttgaccatggc

SEQ ID NO: 530983 - DNA, 599 bp, Homo sapiens
tgtcctctgcccagcagccttgctgggctccatgctggagacaccccccccccccacacttatcccaagggccttgcaatgctgagttaacttggataacagcaattccaatgctggccaccaaaaaacttgacattcagggtcagacatgatgcttcttaggaatttgtcaaccatctttcctcacagagaatctctcacaagctgggagtcrggaaacctaacctctcagagtgttctggaaactccttctcccttctcaggtcccctcacccttctcatttctaatgccaaagctattcagaacttccgctccttggggatcccaggaggggcctcacctgacaggatttactatctgccaatatgcaaaagtgactactgtcagtcattttaaatcgccattgctatggaatgaaaggtgtctcccacatttccaatgttgaagtcctaactcccagtcctggagaatgtcactgtatttacagaggtcattaagttagtgtgaggtcaatagagtgggaatgactgtcttcctaagccaatgtgactgatgtccttataagaagaggagatgaggacacagaagggtgcaaggg

SEQ ID NO: 530984 - DNA, 614 bp, Homo sapiens
tgatttctcttgactattttccttatcagaatgcagacatgaaaagcacatatatctttctgagaaaaaaaaatcttgcttttatgaagaaaatataaaactaatagtggaagaagaatgtggatgggttgaggtgcctcaggcctggactcatctgtctcactaagtgtgtctccccacaacttacctccagcttctgcctttcctgaacacacacatttttatgttttctgcattcaagttgaatcattagattctaataaagtcctctgggaaagacattatatctttcagacactcatataaatcagaacaccacctaggcagaataagtattagctgacacccaaagttagaaatggctttggtaattaaggtagtaytgtgttcctgctgtcacttcctatatttttttaatcaacacatttcttagttccaatgtcttttatgccggagatttctagaaaaagagaaaacaagatagcgtcattgtagagactgacctgggagtgtgcacgtgactttatctttttctttgctattactatatttaaacacggtttattacttaatatggagaaaaataaaatgaaattaaagaaacggtaatagaa

SEQ ID NO: 530985 - DNA, 612 bp, Homo sapiens
ctctctctctcttttttttaaataaagctctatattttattatattcatatctatcctctattgggaattacttcacaaggcacaatcatttggggatgtagtgcagtgggggatttctcgttgtattggattccagtagtagcagggacccaaaagctcaccattttgttaggcatggaaacaaatacacgtgctagtgctgcagaatcaggacatagcagtgtgaacagaagaaaatcacagtgctatggaactgcattgccgaaaggaaacttaggcacgctcagrtccaaatttcctacctttgtacttaaaaaatatatttggacgcagcattagaggtgacgttactctcttccaaggaccagggactacaaggcttcaaccgagaagccttgaggcagaaggcaggactttcgccatccttgaaggatgtgtacaattgggatgaagacagctattttgttccagatctggtagactgttggttgaattctggggtgttggcagcacatggagtgccaggcctcctgccggcctccagatgcctcattaaagcatcccacactaagcagcaggtagatgagccataaggtgagagcagacccaag

SEQ ID NO: 530986 - DNA, 612 bp, Homo sapiens
ctctctctctcttttttttaaataaagctctatattttattatattcatatctatcctctattgggaattacttcacaaggcacaatcatttggggatgtagtgcagtgggggatttctcgttgtattggattccagtagtagcagggacccaaaagctcaccattttgttaggcatggaaacaaatacacgtgctagtgctgcagaatcaggacatagcagtgtgaacagaagaaaatcacagtgctatggaactgcattgccgaaaggaaacttaggcacgctcagatccaaatttcctacctttgtacttaaaaaatatatttggackcagcattagaggtgacgttactctcttccaaggaccagggactacaaggcttcaaccgagaagccttgaggcagaaggcaggactttcgccatccttgaaggatgtgtacaattgggatgaagacagctattttgttccagatctggtagactgttggttgaattctggggtgttggcagcacatggagtgccaggcctcctgccggcctccagatgcctcattaaagcatcccacactaagcagcaggtagatgagccataaggtgagagcagacccaag

SEQ ID NO: 530987 - DNA, 612 bp, Homo sapiens
ctctctctctcttttttttaaataaagctctatattttattatattcatatctatcctctattgggaattacttcacaaggcacaatcatttggggatgtagtgcagtgggggatttctcgttgtattggattccagtagtagcagggacccaaaagctcaccattttgttaggcatggaaacaaatacacgtgctagtgctgcagaatcaggacatagcagtgtgaacagaagaaaatcacagtgctatggaactgcattgccgaaaggaaacttaggcacgctcagatccaaatttcctacctttgtacttaaaaaatatatttggacgcagcattagaggtgamgttactctcttccaaggaccagggactacaaggcttcaaccgagaagccttgaggcagaaggcaggactttcgccatccttgaaggatgtgtacaattgggatgaagacagctattttgttccagatctggtagactgttggttgaattctggggtgttggcagcacatggagtgccaggcctcctgccggcctccagatgcctcattaaagcatcccacactaagcagcaggtagatgagccataaggtgagagcagacccaag

SEQ ID NO: 530988 - DNA, 612 bp, Homo sapiens
ctctctctctcttttttttaaataaagctctatattttattatattcatatctatcctctattgggaattacttcacaaggcacaatcatttggggatgtagtgcagtgggggatttctcgttgtattggattccagtagtagcagggacccaaaagctcaccattttgttaggcatggaaacaaatacacgtgctagtgctgcagaatcaggacatagcagtgtgaacagaagaaaatcacagtgctatggaactgcattgccgaaaggaaacttaggcacgctcagatccaaatttcctacctttgtacttaaaaaatatatttggacgcagcattagaggtgacgttactctcttccaaggaccagggactacaaggcttcaaccgagaagccttgaggcagaaggcaggactttcgccatccttgaaggatgtgtacaattgggatgaagacagctattttgttccwgatctggtagactgttggttgaattctggggtgttggcagcacatggagtgccaggcctcctgccggcctccagatgcctcattaaagcatcccacactaagcagcaggtagatgagccataaggtgagagcagacccaag

SEQ ID NO: 530989 - DNA, 378 bp, Homo sapiens
cagctgggactataggtatatgccactgctcccagcttgacttaatggaatgtgtttttattcacccattggaaaagcctttgctacatattaatacaaacttctcattaataaaccctccttttttttttttttgagacggagtctcgctctgtygctcaggtacgatctcgactcactgtaacctcctccgcctggggtcaagcaattctcccgtctcagcctcctgagtacctgggattacaggtgcacgccaccatgcccagccactaataaatccttctttaagtaagaaaataatataacatgagcataactttgcatgaattttaatgtcctggaggcttgttgctttgtataaagtgcaggtcagtaaaa

SEQ ID NO: 530990 - DNA, 558 bp, Homo sapiens
tgcatccttgacactgtcattccctcctcccatctcccaccaagggctacagccragaataccacagacggtttgccatggatcaagatttctctcaagaaagagctcacagaaaggctgctgtgagaaaggaagtcacttgctactccccttattcctccatcaggaggagctagatgaggtcactgcacatttgagtgggtgctatcaaagcacagcctctggccagcgtggagacaaacgtgggctgtgtggcccgtgactcagtggcttaaaggaaacctgaggtggtaggtgatggaactgattgaaataaaacttctgtaggaatgctgcatgccattcattcaacagtgctccctgaccaggtcccagggctgtgcatatgagctgcaaatgggtttgttcattcatttacgtatctatttgcttatttattcaataaattctgattatgcccctaagaggcactgtgctagatatcaaggaagaacaagacaaaatcccttccccacaagggctcccggtctagagaggggaggaggaagggagatccac

SEQ ID NO: 530991 - DNA, 558 bp, Homo sapiens
tgcatccttgacactgtcattccctcctcccatctcccaccaagggctacagccgagaataccacagacggtttgccatggatcaagatttctctcaagaaagagctcacagaaaggctgctgtgagaaaggaagtcacttgctactcccctyattcctccatcaggaggagctagatgaggtcactgcacatttgagtgggtgctatcaaagcacagcctctggccagcgtggagacaaacgtgggctgtgtggcccgtgactcagtggcttaaaggaaacctgaggtggtaggtgatggaactgattgaaataaaacttctgtaggaatgctgcatgccattcattcaacagtgctccctgaccaggtcccagggctgtgcatatgagctgcaaatgggtttgttcattcatttacgtatctatttgcttatttattcaataaattctgattatgcccctaagaggcactgtgctagatatcaaggaagaacaagacaaaatcccttccccacaagggctcccggtctagagaggggaggaggaagggagatccac

SEQ ID NO: 530992 - DNA, 558 bp, Homo sapiens
tgcatccttgacactgtcattccctcctcccatctcccaccaagggctacagccgagaataccacagacggtttgccatggatcaagatttctctcaagaaagagctcacagaaaggctgctgtgagaaaggaagtcacttgctactccccttattcctccatcaggaggagctagatgaggtcactgcacatttgagtgggtgctatcaaagcacagcctctggccagcgtggagacaaacgtgggctgtgtggcccgtgactcagtggctkaaaggaaacctgaggtggtaggtgatggaactgattgaaataaaacttctgtaggaatgctgcatgccattcattcaacagtgctccctgaccaggtcccagggctgtgcatatgagctgcaaatgggtttgttcattcatttacgtatctatttgcttatttattcaataaattctgattatgcccctaagaggcactgtgctagatatcaaggaagaacaagacaaaatcccttccccacaagggctcccggtctagagaggggaggaggaagggagatccac

SEQ ID NO: 530993 - DNA, 558 bp, Homo sapiens
tgcatccttgacactgtcattccctcctcccatctcccaccaagggctacagccgagaataccacagacggtttgccatggatcaagatttctctcaagaaagagctcacagaaaggctgctgtgagaaaggaagtcacttgctactccccttattcctccatcaggaggagctagatgaggtcactgcacatttgagtgggtgctatcaaagcacagcctctggccagcgtggagacaaacgtgggctgtgtggcccgtgactcagtggcttaaaggaaacctgaggtggtaggtgatggaactgattgaaataaaacttctgtaggaatgctgcatgccattcattcaacagtgctccctgaccaggtcccagggctgtgcatatgagctgcaaatgggtttgttcattcatttacgtatctatttgcttatttattcaataaattctgattatgcccctaagaggcactgtgctagatatcaaggaagaacaagacaaaatcccttccccacaagggctccyggtctagagaggggaggaggaagggagatccac

SEQ ID NO: 530994 - DNA, 282 bp, Homo sapiens
gggtgccctcgcatttgaaaacaacaccgggtggaggacgctgcgatacctaattggacaaaacagcaataaaataagaccagtggaagtgctgagcacagggcgcagggctagggcccaggttttgtgttccaggccgagggcgaggcagcggccccgggagagggggcgccgggcagtcaggcaccggctggcgactctgctcrgcctccgcagcccggcctgcagccccttacccccagcctctgggcctcgtgggctctctacgctccgacgcctgtt

SEQ ID NO: 530995 - DNA, 612 bp, Homo sapiens
tgccctagacagctttcttgagtcttcaggaacgagctcatcatagatcctagcattcttttgtcccttgctgcctacctgtaagtcacaaatctgctttgtgtaacttgttgcatatgagtgtattctgtctcctgcactcagacaagctggtaagcagcacacagtaaacctaatccacaaaatgcgtccagcaagcagggccccatctaatgtaatcatagcttatttgagaagcaggaggggtgatacttcctagtacccagcccaggggaaagacagcagcctgggggcatggggattgaatattttcagaggaaggaagggtgataagtcggatttaggtctgccacttcccacagatgtgaatgagatggctgcatggatcaaggcaaacaaaaggcaatgargaaatagaggagcataggtcccttggttggggatatttatttaattaccctgtcattcatgggggcagagagtgagggaagtgtgtactcaaccagacactaaggcacctgagagggaaagaagaaaggggtcctcagatcttccttgaggcatctgagaaggaatcaatacatgtgataaaggccttcacagaaagggaga

SEQ ID NO: 530996 - DNA, 577 bp, Homo sapiens
ctgtgtggccttaggcaggtggttgtgagaatttaaatggcataagcatataaaagcatttggcgtagagtctggcacatagtagtgctcactaaatggtagtcattaaagatacaacctgggacagtggcagctagtttaacaaaccaccacaccccrtagcacctctcacctgggtgcaagtgccccaggccacactgcagtagctgctcgctgagggtgtccccggatatataagaagcctctctgagggccacagaggttttttgatggcagatggtttaaaacaccatttttatattaagttgtataaaatatactacattataaaatgcaaagtttgcatcattttagagctaaaacttaaggccacaaaagaatctgctattttcttattaataaaaaatcctatttttatataatgcaaataatgaagatgaagtaacctattatttaattaaacatgtcttttaaaaaaaaaaaaaaagaaataattggtccttgctaatggcccttcagggcaatcccccagactgctggggtccaagtttaccctcctgcctctaataactaggga

SEQ ID NO: 530997 - DNA, 577 bp, Homo sapiens
ctgtgtggccttaggcaggtggttgtgagaatttaaatggcataagcatataaaagcatttggcgtagagtctggcacatagtagtgctcactaaatggtagtcattaaagatacaacctgggacagtggcagctagtttaacaaaccaccacaccccgtagcacctctcacctgggtgcaagtgccccaggccacactgcagtagctgctcgctgagggtgtccccggatatataagaagcctctctgagggccacagaggttttttgatggcagatggtttaaaacaycatttttatattaagttgtataaaatatactacattataaaatgcaaagtttgcatcattttagagctaaaacttaaggccacaaaagaatctgctattttcttattaataaaaaatcctatttttatataatgcaaataatgaagatgaagtaacctattatttaattaaacatgtcttttaaaaaaaaaaaaaaagaaataattggtccttgctaatggcccttcagggcaatcccccagactgctggggtccaagtttaccctcctgcctctaataactaggga

SEQ ID NO: 530998 - DNA, 577 bp, Homo sapiens
ctgtgtggccttaggcaggtggttgtgagaatttaaatggcataagcatataaaagcatttggcgtagagtctggcacatagtagtgctcactaaatggtagtcattaaagatacaacctgggacagtggcagctagtttaacaaaccaccacaccccgtagcacctctcacctgggtgcaagtgccccaggccacactgcagtagctgctcgctgagggtgtccccggatatataagaagcctctctgagggccacagaggttttttgatggcagatggtttaaaacaccatttttatattaagttgtataaaatatactacrttataaaatgcaaagtttgcatcattttagagctaaaacttaaggccacaaaagaatctgctattttcttattaataaaaaatcctatttttatataatgcaaataatgaagatgaagtaacctattatttaattaaacatgtcttttaaaaaaaaaaaaaaagaaataattggtccttgctaatggcccttcagggcaatcccccagactgctggggtccaagtttaccctcctgcctctaataactaggga

SEQ ID NO: 530999 - DNA, 674 bp, Homo sapiens
ctgctcttattgccaggtgtagacacaggggaatgtgaggtgagcatgtcctcaaagcctgacrgattgggtaaattctcctttgtgttctctctttcatgagctgggcagatgtgcctgacacaggtttgaccaggcaactgaaaagacatccctaagagaagacaaagcaaaggtatgaaaggaacacacgtccctgactgactaggaggaacagagctgcctgctatctggaacaacttcctcccagactaagtgagaaataaacttctgttttctatatgctactgtgtttgggggcctttgtgttatagaagttttgctgtcatcctttccaattcaccttctcacaccagatatttcaaattaaaaagattatatcaggccaggtgcgatggctcatgcctgtaatcccagcactgtgtggggctgaggcaggtggatcacttgaggccaggagttcgagaccagtctggccaacatggtaaaaccccatctctactaaaaaatacaaaaattagctggacacagtggcacactcctgtaatcccagctacttgggaggctgagacaggagaattgcttgaacccaggaggcggaggttgcagtgacccgagatcatgccactgtgcaccagtctgggctacaaaatgagattctgtctcaaaataaa

SEQ ID NO: 531000 - DNA, 674 bp, Homo sapiens
ctgctcttattgccaggtgtagacacaggggaatgtgaggtgagcatgtcctcaaagcctgacagattgggtaaattctcctttgtgttctctctttcatgagctgggcagatgtgcctgasacaggtttgaccaggcaactgaaaagacatccctaagagaagacaaagcaaaggtatgaaaggaacacacgtccctgactgactaggaggaacagagctgcctgctatctggaacaacttcctcccagactaagtgagaaataaacttctgttttctatatgctactgtgtttgggggcctttgtgttatagaagttttgctgtcatcctttccaattcaccttctcacaccagatatttcaaattaaaaagattatatcaggccaggtgcgatggctcatgcctgtaatcccagcactgtgtggggctgaggcaggtggatcacttgaggccaggagttcgagaccagtctggccaacatggtaaaaccccatctctactaaaaaatacaaaaattagctggacacagtggcacactcctgtaatcccagctacttgggaggctgagacaggagaattgcttgaacccaggaggcggaggttgcagtgacccgagatcatgccactgtgcaccagtctgggctacaaaatgagattctgtctcaaaataaa

SEQ ID NO: 531001 - DNA, 674 bp, Homo sapiens
ctgctcttattgccaggtgtagacacaggggaatgtgaggtgagcatgtcctcaaagcctgacagattgggtaaattctcctttgtgttctctctttcatgagctgggcagatgtgcctgacacaggtttgaccaggcaactgaaaagacatccctaagagaagacaaagcaaaggtatgaaaggaacacacgtccctgactgactaggaggaacagagctgcctgctatctggaacaacttcctcccagactaagtgagaaataaacttctgttttctatatgctactgtgtttgggggcctttgtgttatagaagttttgctgtcatcctttccaattcaccttctcacaccagatatttcaaattaaraagattatatcaggccaggtgcgatggctcatgcctgtaatcccagcactgtgtggggctgaggcaggtggatcacttgaggccaggagttcgagaccagtctggccaacatggtaaaaccccatctctactaaaaaatacaaaaattagctggacacagtggcacactcctgtaatcccagctacttgggaggctgagacaggagaattgcttgaacccaggaggcggaggttgcagtgacccgagatcatgccactgtgcaccagtctgggctacaaaatgagattctgtctcaaaataaa

SEQ ID NO: 531002 - DNA, 674 bp, Homo sapiens
ctgctcttattgccaggtgtagacacaggggaatgtgaggtgagcatgtcctcaaagcctgacagattgggtaaattctcctttgtgttctctctttcatgagctgggcagatgtgcctgacacaggtttgaccaggcaactgaaaagacatccctaagagaagacaaagcaaaggtatgaaaggaacacacgtccctgactgactaggaggaacagagctgcctgctatctggaacaacttcctcccagactaagtgagaaataaacttctgttttctatatgctactgtgtttgggggcctttgtgttatagaagttttgctgtcatcctttccaattcaccttctcacaccagatatttcaaattaaaaagattatatcaggccaggtgcsatggctcatgcctgtaatcccagcactgtgtggggctgaggcaggtggatcacttgaggccaggagttcgagaccagtctggccaacatggtaaaaccccatctctactaaaaaatacaaaaattagctggacacagtggcacactcctgtaatcccagctacttgggaggctgagacaggagaattgcttgaacccaggaggcggaggttgcagtgacccgagatcatgccactgtgcaccagtctgggctacaaaatgagattctgtctcaaaataaa

SEQ ID NO: 531003 - DNA, 392 bp, Homo sapiens
aaaagaggaaaatactttggggcctaatgtaaaatttccactgagatgatgcgtcagaaattaaggtagaataagatggccctagggcatcaaaacaayggaaactaaatcttgggctgggtgcggtggctcacgcctgtaatcccagcaattttgggaaccaaggtgggggactcacttgaggtcagaagtttgagaccagtctagccaccatggtgaaacgctgtctctactaaaaatacaaaaattatcctggaggttgcactgagccaagattgtgccaatgcactccagtctggacaacagagggagattctgtctcaaaaaaaaaaaaaaaatagaagaagaagaaacaaaatcttaatttcttcatcaaatgtaaaaactatgga

SEQ ID NO: 531004 - DNA, 392 bp, Homo sapiens
aaaagaggaaaatactttggggcctaatgtaaaatttccactgagatgatgcgtcagaaattaaggtagaataagatggccctagggcatcaaaacaacggaaactaaatcttgggctgggtgcggtggctcacgcctgtaatcccagcaattttggraaccaaggtgggggactcacttgaggtcagaagtttgagaccagtctagccaccatggtgaaacgctgtctctactaaaaatacaaaaattatcctggaggttgcactgagccaagattgtgccaatgcactccagtctggacaacagagggagattctgtctcaaaaaaaaaaaaaaaatagaagaagaagaaacaaaatcttaatttcttcatcaaatgtaaaaactatgga

SEQ ID NO: 531005 - DNA, 392 bp, Homo sapiens
aaaagaggaaaatactttggggcctaatgtaaaatttccactgagatgatgcgtcagaaattaaggtagaataagatggccctagggcatcaaaacaacggaaactaaatcttgggctgggtgcggtggctcacgcctgtaatcccagcaattttgggaaccaaggtgggggactcacttgaggtcagaagtttgagaccagtctagccaccatggtgaaacgctgtctctactaaaaatacaaaaattatcctggaggttgcactgagccaagattgtgccaatgcactccagtctggrcaacagagggagattctgtctcaaaaaaaaaaaaaaaatagaagaagaagaaacaaaatcttaatttcttcatcaaatgtaaaaactatgga

SEQ ID NO: 531006 - DNA, 627 bp, Homo sapiens
ataatccaggtgataaattatgcagtttatctcttggcaaatgtctttmagggataaactaaagtttttgctgcaatctccttggcacctcatatgtagatgatatatcttgactaatatacaaatcacctgaagtagttacccacaaggaagggaggggttccagcagttatttatgtgacagactcagttctctctggtgtaactgctaaaacgaaacacatgacctgcctttggaaacatgaaggaagcctgtgtcattgctgcccttgctttagcagcctctgcttggtcaacttctggtgagtttcacatctcagcactgtgttcagcttttatgttggctatataaaaaatcaaattgctaaacatagaaggaaatgtggaggaaatatttattactcagtggataaaattgcaggctctggagtcagactgcctggatttaatcttgaattgcatttgtttttattaaacaaattgaaatgctttctggaacaagccaagttaaaaataaaaaggggaaaattaacttttgtatgttctgtatctggtcaccatcatgagttttttgttgttgtttttaaagacatctaatagtttttgagagagcgtgagtactcattg

SEQ ID NO: 531007 - DNA, 627 bp, Homo sapiens
ataatccaggtgataaattatgcagtttatctcttggcaaatgtctttcagggataaactaaagtttttgctgcaatctccttggcacctcatatgtagatgatatatcttgactaatatacaaatcacctgaagtagttacccacaaggaagggaggggttccagcagttatttatgtgacagactcagttctctctggtgtaactgctaaaacgaaacacatgacctgcctttggaaacatgaaggaagcctgtgtcattgctgcccttgctttagcagcctctgcttggtcaacttctggtgagtttcacatctcagcactgtgttcagcttttatgttggctatataaaaaatcarattgctaaacatagaaggaaatgtggaggaaatatttattactcagtggataaaattgcaggctctggagtcagactgcctggatttaatcttgaattgcatttgtttttattaaacaaattgaaatgctttctggaacaagccaagttaaaaataaaaaggggaaaattaacttttgtatgttctgtatctggtcaccatcatgagttttttgttgttgtttttaaagacatctaatagtttttgagagagcgtgagtactcattg

SEQ ID NO: 531008 - DNA, 627 bp, Homo sapiens
ataatccaggtgataaattatgcagtttatctcttggcaaatgtctttcagggataaactaaagtttttgctgcaatctccttggcacctcatatgtagatgatatatcttgactaatatacaaatcacctgaagtagttacccacaaggaagggaggggttccagcagttatttatgtgacagactcagttctctctggtgtaactgctaaaacgaaacacatgacctgcctttggaaacatgaaggaagcctgtgtcattgctgcccttgctttagcagcctctgcttggtcaacttctggtgagtttcacatctcagcactgtgttcagcttttatgttggctatataaaaaatcaaattgctaaacatagaaggaaatgtggaggaaatatttattactcagtggataaaattgcaggctctggagtcagactgcctggatttaatcttgaattgcatttgtttttattaaacaaattgaaatgctttctggaacaagscaagttaaaaataaaaaggggaaaattaacttttgtatgttctgtatctggtcaccatcatgagttttttgttgttgtttttaaagacatctaatagtttttgagagagcgtgagtactcattg

SEQ ID NO: 531009 - DNA, 655 bp, Homo sapiens
ctgaggtttaagcaacacttcagaattctgtgtttttgtggtcagcttactgctgcattttccatagtgactatcttaaactttctcagtgttcctgaaatctcccatctctcccttcacctcttccctgccagtgtcagcagataattccacttgctctttgacagaggtaatagaaacctacagacaaaaatgccttcagcttcctgccatcagatatcaaatcaatcatgataggcatcatccttgcctccttccctcttagtagaatggarctcagctctccatcagtgcatctcaagctctaatgtctataccaagtacctgggatcttcctaaaatgcaaaataatgattcagcaggtctggagtggagtctgagattctgcatgtctgacaggtaatgacagtattgcagtccatggatcatacttggaagcaaagttctagatcccattttccctggccttctcaggaattttgtgctgttaattgaaccttgtcctcaatctgttcatcttgcagcctccttcccaatggtattttaatgttctcaattcttttctaactttaaaacagaacccagtgacaataacaaaccacacagcccatcttttttctccttttcagagccagacttattttcatctacaact

SEQ ID NO: 531010 - DNA, 655 bp, Homo sapiens
ctgaggtttaagcaacacttcagaattctgtgtttttgtggtcagcttactgctgcattttccatagtgactatcttaaactttctcagtgttcctgaaatctcccatctctcccttcacctcttccctgccagtgtcagcagataattccacttgctctttgacagaggtaatagaaacctacagacaaaaatgccttcagcttcctgccatcagatatcaaatcaatcatgataggcatcatccttgcctccttccctcttagtagaatggagctcagctctccatcagtgcatctcaagctctaatgtctataccaagtacctgggatcttcctaaaatgcaaaataatgattcagcaggtctggagtggagtctgagattctgcatgtctgacaggtaatgacagtattgcagtccatggatcatacttggaagcaaagttctagatcccattttccctggccttctcaggaattttgtgcygttaattgaaccttgtcctcaatctgttcatcttgcagcctccttcccaatggtattttaatgttctcaattcttttctaactttaaaacagaacccagtgacaataacaaaccacacagcccatcttttttctccttttcagagccagacttattttcatctacaact

SEQ ID NO: 531011 - DNA, 542 bp, Homo sapiens
tatgaaaatcaaacaacatgcaacaagctgcttacttgatctttagctagtgggggtgtctagcaggtttggaagagtttgaatattatatgtaaatataatatttgatgtaaatggctaattaagatattaatgagaaatctcttttgagggccagttctgaatttttgttgctccagctgggtgtyccacatgtacttcaagcttaacaagccccaagctaacagatcaactccatcctacaagcctgctccttatccatgactatccacccagttgtctggactccaagccgcatgtcccaagatctccctctctcttgccaaacaaagaaatgacgtgttctctccattcggcaccccccagtatttctcacatccttcccaagccccactttctatttcaggaccttcttgtctctcactggggctcttgcaaatagcctcccaattgatctgcagactcctctcatttttccccccaaatactgataacattttaatgttattaaggcatggatttgaataagctattcctctgct

SEQ ID NO: 531012 - DNA, 467 bp, Homo sapiens
ctcgctcttgtcttccgggctggagtgcaatggcgtcatcttggctcactgcaacctcggcctcccgggttcaagcgattctcctgcctcagcctcccgagtagctgggattacaggcgcaagctaccacgcccaggtwtttttttttttttttttttttgtatttttttgtatttttagtagagacggggtttcaccatgttagtcaggctggtctcgaactcctgacctcaggcgattcgcccgcctcggcctcccaaagtgctaggattacaggcgtgagccaccacgcccggccacactaactttttaagagccaagagttcgatcggtagcgggagcggagagcggaccccagagagccctgagcagccccaccaccaccgctggcctagctaccatcacaccccgggaggagccgcagctgccgcagccggccccagtcaccatcaccacaaccttgagca

SEQ ID NO: 531013 - DNA, 467 bp, Homo sapiens
ctcgctcttgtcttccgggctggagtgcaatggcgtcatcttggctcactgcaacctcggcctcccgggttcaagcgattctcctgcctcagcctcccgagtagctgggattacaggcgcaagctaccacgcccaggtatttttttttttttttttttttgtatttttttgtatttttagtagagacggggtttcaccatgytagtcaggctggtctcgaactcctgacctcaggcgattcgcccgcctcggcctcccaaagtgctaggattacaggcgtgagccaccacgcccggccacactaactttttaagagccaagagttcgatcggtagcgggagcggagagcggaccccagagagccctgagcagccccaccaccaccgctggcctagctaccatcacaccccgggaggagccgcagctgccgcagccggccccagtcaccatcaccacaaccttgagca

SEQ ID NO: 531014 - DNA, 568 bp, Homo sapiens
ctctttttggtaataacaaatgagtttagtttagttctttttttttttaaagcctgtttttttcacaatacgcctttaaagatttttaaattgtttcctatctggtcaagtggagatgtgtaagaacttcatttttaatttgtaatraaagtttacaacttgattttttcaaaaagtcaacaaactgcaagcacctgttaataaggtcttaaataataatagtaataaaaagagccaatgggattactttgtacagagaataaaaatctgaatgaaaccagaatgaaaatctaatctgttccatacttcctgaagtagcaaattcaatggaactgaccagaaccattaagaatctatcaaatcaaactttaaaggggattcaaaatatctccatcttgtagttagtgtatctgccagccagcttccatttgtcttttgagagtggccagctgtactgacagaaagcccaggactgaggggttttctggactttcagtgctaagatcggaacatttggtcacccagtttcactcccaccaaaatcccttctaaaattcttacacataag

SEQ ID NO: 531015 - DNA, 497 bp, Homo sapiens
gtgaataaaggaatgtttaactgtggactttttcagcacttttaatccaggaatggagatagtaaaamctctcccatacttgaaatctcagttttcttcacctcctacatacctgctcccttgggggaaccatccagaaccatacccggtggactgcagcttgagaagaggtgggggtaaggaggagccaccctgcagggagtcagcagcagatgggaagaactgtgggggcagagaacagccattaagtgcgtaagaagtcaagggagggttgcggttggcaagaagggcaggagcaaccgttacactgacctcatgactccaggctgctgctgttgtaaatactgagccaagatttcttccccagtggtacatgcatgaagggcagagggtggaggtgtccctggggtgagctggctgccataacaaagccaaaaccaccattagtctgtggcagcatgaataacaaactaagaattctttttctttttgagaca

SEQ ID NO: 531016 - DNA, 497 bp, Homo sapiens
gtgaataaaggaatgtttaactgtggactttttcagcacttttaatccaggaatggagatagtaaaacctctcccatacttgaaatctcagttttcttcacctcctacatacctgctcccttgggggaaccatccagaaccatacccggtggactgcagcttgagaagaggtgggggtaaggaggagccaccctgcagggagtcagcagcagatgggaagaactgtgggggcagagaacagccattaagtgcgtaagaagtcaagggagggttgcggttggcaagaagggcaggagcaaccgttacactgacctcatgactccaggctgctgctgttgtaaatactgagccaagatttcttccccagtggtacatgcatgaagggcagagggtggaggtgtccctggggtgagctggctgccakaacaaagccaaaaccaccattagtctgtggcagcatgaataacaaactaagaattctttttctttttgagaca

SEQ ID NO: 531017 - DNA, 497 bp, Homo sapiens
gtgaataaaggaatgtttaactgtggactttttcagcacttttaatccaggaatggagatagtaaaacctctcccatacttgaaatctcagttttcttcacctcctacatacctgctcccttgggggaaccatccagaaccatacccggtggactgcagcttgagaagaggtgggggtaaggaggagccaccctgcagggagtcagcagcagatgggaagaactgtgggggcagagaacagccattaagtgcgtaagaagtcaagggagggttgcggttggcaagaagggcaggagcaaccgttacactgacctcatgactccaggctgctgctgttgtaaatactgagccaagatttcttccccagtggtacatgcatgaagggcagagggtggaggtgtccctggggtgagctggctgccataacaaagccaaaaccaccattagtctgtggcwgcatgaataacaaactaagaattctttttctttttgagaca

SEQ ID NO: 531018 - DNA, 497 bp, Homo sapiens
gtgaataaaggaatgtttaactgtggactttttcagcacttttaatccaggaatggagatagtaaaacctctcccatacttgaaatctcagttttcttcacctcctacatacctgctcccttgggggaaccatccagaaccatacccggtggactgcagcttgagaagaggtgggggtaaggaggagccaccctgcagggagtcagcagcagatgggaagaactgtgggggcagagaacagccattaagtgcgtaagaagtcaagggagggttgcggttggcaagaagggcaggagcaaccgttacactgacctcatgactccaggctgctgctgttgtaaatactgagccaagatttcttccccagtggtacatgcatgaagggcagagggtggaggtgtccctggggtgagctggctgccataacaaagccaaaaccaccattagtctgtggcagcatgaataasaaactaagaattctttttctttttgagaca

SEQ ID NO: 531019 - DNA, 670 bp, Homo sapiens
tgtggctttgccagcattttatttactcagtctctttggacttacctgatgcaatgactctgtcaaggctgctccagtgaaggaagacatctcataaagcttcatctcaaaccagtttaccaattatgtaaacagtttttgagggttgtctatgtgccaggcaattatgctgggtacttatggatagaattaagcatggtattaaaagagcgcctctcagcttttagctgtgtgtcacaactacctgtgaagttttttgagaatactaaagtataggccttaccacacacccactgaactagaaccttcaggagcagcatccaggcaactgaatttataaaaatctctccaggtgaccttaatgcagraccaaaattaaaaaccactgtgttaaatcctacaaagagccttccccttctgagaagtttcagtctatgggagatatactgatgtaaatccatccacaataggacatgtagtaagaacacattttaaagaaaacacatcagtgatagataacatcaaatatgacatagaaacaaatgtatagacagaagaataaataaaattgacagaggttagggaaagcaaggagacatttctgggcagattctattgtatctggttggcaggagaaataacagattctgctattcatttttcgtaatac

SEQ ID NO: 531020 - DNA, 616 bp, Homo sapiens
tggcccaccagcctgtgtgccaacgcctggtaaagtggatgggttccgaagtcagtctgcctaagttaaatcctaactctctctcttacaatgttacataacttcacccctctgtaactcagtttcctcatttataaactggggataattacgtactttgagaactgttgtgaagattaaatgaacttagaacagagcctgttacatagaagatgttcaaaaatgttagctattattatcatataacacaaaacactgtcaacaataacctatcagtcaaaattagatgtcttttttcttctaagtcttcaagctactaaacctttttgcaagtttcaacaacactaccacttaatatgtatgttggacaagcttctctctatgcctcagtttccatatctgcaaaatgagaggtgatataacagtaatatatactgataaaaggctttrgagtttcagccctgagttcaaatctggtctctactactttgtgtgttagtctggacacattacctaacttcaatttcctcataagcaaaacagcatattattgagaggaatgactgagaaaacaaatgtgaagcacccagagtacagtgcttgaattcagtaaaca

SEQ ID NO: 531021 - DNA, 452 bp, Homo sapiens
ctttcataaatgaactatgataatgagaagctggaacaatacacactttccaagatcatatacactactttctcatgygcgaaaatgaatattctcttgttggaagtaacataaaacttagttactaacagactgcaactggcaacttaattaggtaatgacgcatgcaaagtacttagcagagtgcctggttcatcataaagatgaaccataaagaaaagtcattattactagcagtgctttattgtgggaaattgtttttgaacaagatgtggcttcactacaatacataagtggattgtgagcaagaaatacaggactggaaacaattgtagaaacttaactgactctgtggaaacctactaaaaagcttccaagtgaaatttgaactgtgcaaatagacttgtgcaaaatatttttgacacactaattctggtgcatctctttcaact

SEQ ID NO: 531022 - DNA, 452 bp, Homo sapiens
ctttcataaatgaactatgataatgagaagctggaacaatacacactttccaagatcatatacactactttctcatgcgcgaaaatgaatattctcttgttggaagtaacataaaacttagttactaacagactgcaactggcaacttaattaggtaatgacgcatgcaaagtacttagcagagtgcctggttcatcataaagatgaaccataaagaaaagtcattattactagcagtgctttattgtgggaaattgtttttgaacaagatgtggcttcactacaatacataagtggattgtgagcaagaaatacaggactggaaacaattgtagaaacttaactgactctgtggaaacctactaaaaagcttccaagtgaaatttgaactgtgcaaatagacttgtgyaaaatatttttgacacactaattctggtgcatctctttcaact

SEQ ID NO: 531023 - DNA, 512 bp, Homo sapiens
catgtgggagcaagtaaaaaatggatagcagcttccttactgctaccatcagagacgaacttgaaagacaacaaagaaagtaaattttcccaatgggcagagctgccaagcagtgtacttgaatacccactttgtgaagacagagaatggccccaaatgggaatatatattagtcatctattgctgcattacaaattactttaaaatgtagggggttgaaataacacatgactcactgttcctgtgggttagaaatccaggtgtggcttggctggaccccccagctcaggggytttcacaaggctgcaaccaagatgttggctgagctggagccatctccaggctcaactgagggagacgatctgaaaccaagctctctcatgtgattgttaatgggattcagtgtctcacatgatgttagactgagcgacttggttccttgctgtctgttggccagaggcctccttcaattgcttaccacatgggtctctataggagagcttgctatatgg

SEQ ID NO: 531024 - DNA, 667 bp, Homo sapiens
tgcttatagtatgaagcaatactttacttgctgtgcaattccatgcccctttgtctgtgctagaccctctgcctggaatgccctgcctctcttctctgacttccctgacaagtttctacttccaagagcatatttaaatgtcatctcctctatgaggtttcttcctgactcccaagaggtggcactaatttctccttccagtatgttccattgcatttaacacacaatttctgttacagtacttttcagatcatatcaaaatcactaatttaacttgctacctttccaagtagaatggagctccatgaagaagtgactgcatcttttcttctatggctaaaagtggcctgagtaggcctttagcccatgttggttgaatgcatacttatgcttcattgttctgtgactcactgaataagtatattcatagaatctcttttctggcctaaatttctgtgtttatccttgggccgcacctctacacccattcccactccagtgccctgagtaacycctttaggggtttgacttgggctttcactataccttgagtctttccctcaaagtctttctattcattctgttgggactttgatgagcattgctcttttgggccaaaggtttccctaatctggttccaacttttttttacagcatattcctgaaa

SEQ ID NO: 531025 - DNA, 608 bp, Homo sapiens
ctggggcagcactacctccaaactgcagttccatgagccaataaagctccttctgagaaagctatcgattttctctgagatgccattttcaaaatggtaatgataaaaagaattttgcttgcttatttttagagttaaatgaaataatattcagcggcaaatattgatactctaaatacttgtcgttcttgtagattgtgacagtgtaccatcctgratacactttcatgggattgattagtatgtagctctttctaacttatgtacgtatactttagaaagttttatactgcagaagtataaagaggcaaaattattttaagtaacgtgcatttaatttttttctattacaatattgtacccattatagaaaatataaatggtctacataatttatagctgtactaagtgtttacggtctttctatagagattgagcattgggtctttgttcagcatctaaattcttcattatttattgttccatgggaaattgccttggctttgactattttcaacttttaacgattgcaagagcattagacattagagacgtgaggattacctgtattcaagtggtctctcaatttctctcttttggtttctcag

SEQ ID NO: 531026 - DNA, 561 bp, Homo sapiens
cctaacctcctggccaaggtcatccataataactctggcatcatgaagcgactcagcatcacagtccatgccatcactgctacccagaagactctcatggcccctctgggaaactgtggtgtgatggccatggggctctccattacatcatccctgcatgtgtctactggtgctgccaaggctgtgggcaaggtcatccccaagccgaacaggaagctcagtggtgtggccttccatgtacccactgccaatgtgtcagtcatggacctgacctgctctctggagaaaccagccaaatatgatgacatcaaggaggtggtgaagcggcatcggagggggccatcgggggcatcgtgggccacactgagcaccaggctgtctcctccaactttaacagtgacacccactmttccaccttcaacactggggctggcattgccctcaacggcctctttgtcaggctcgtttccgggtatgacaatgaatttggctacagcaacaaagtgataacctttatgatccacatggcttccaagaagtaagagcccccagaccaccagc

SEQ ID NO: 531027 - DNA, 632 bp, Homo sapiens
gaacatggtggcgcatgcctgtaaccctactcgggaggctgaggcatgagaatcgcttgaacccrggaggcggaggttgcagtgagctgagatcacaccactgtactccagcctgggtgacagagtgaggctttgtctcaaaataataataataataataataataataataatagtaataataataagtgaagaagaaagaatgtcaaagtaaaaagtaacttacaacaaagagatatagttcaggtgctaccttctcctacttgctgtatggcaagtctttgaagccattaaaagagagttcaaaacacctaccctgcctttctgaggatcatgagacagactatatcaaagtgccccaaagcacatttgtaaaatacttaacaagaataaataagactgggttaaatgtatacatcaacttgggagagaactgccatctttataatactgaacctttcaatctacacaaatgatatattattctatttggttatttaatttttgccaaaaatattttgtgtatttcagatgtacatctctacgttatctctccttagatttcctaagtatttgatgttttgatgttattttaaataatatcatttcataaattccatttcctgtttggt

SEQ ID NO: 531028 - DNA, 592 bp, Homo sapiens
tattagttgagactatatcatatattagggatgcattcaaatggaccatttggtggggaaagtcaactgaactttaaaaaatacgaatccacctatcttattcacaactttaaaaatacagaatttaaagataattccagtgaggcacaaatgtgaccctatcaaaacattctaccattcagtattaccaacagaggataaatacaacaacaaaaggcaaaacccatgatttggcagtcctatacaaaagrggccctgtcaaaacattctttcacaaaacaagcacaataccacaaaataacacaacaacaacaaaaaaaccctgaaatttgacatccctacacaaattgtggaatttcaccttcgaggtcttcaaactgttgcattcgttttagccttggtctctgacacattggattcacatcaggcaagccaagctcctcagagtcttctttaggttgaccagttgcttgcccaggacaagctgatgctttgtctgggtctggcattgacttcaccacgagaccgtggggatcgtgatctgtgccaggaggcactgctgctgagggtgaagctggcttctcctcattcc

SEQ ID NO: 531029 - DNA, 592 bp, Homo sapiens
tattagttgagactatatcatatattagggatgcattcaaatggaccatttggtggggaaagtcaactgaactttaaaaaatacgaatccacctatcttattcacaactttaaaaatacagaatttaaagataattccagtgaggcacaaatgtgaccctatcaaaacattctaccattcagtattaccaacagaggataaatacaacaacaaaaggcaaaacccatgatttggcagtcctatacaaaagaggccctgtcaaaacattctttcacaaaacaagcacaataccacaaaataacacaacaacaacaaaaaaaccctgaaatttgacatccctacacaaattgtggaatttcaycttcgaggtcttcaaactgttgcattcgttttagccttggtctctgacacattggattcacatcaggcaagccaagctcctcagagtcttctttaggttgaccagttgcttgcccaggacaagctgatgctttgtctgggtctggcattgacttcaccacgagaccgtggggatcgtgatctgtgccaggaggcactgctgctgagggtgaagctggcttctcctcattcc

SEQ ID NO: 531030 - DNA, 598 bp, Homo sapiens
ctgctccccactgtagaggatgttgtcagattacttaatattaatctctcttgattagattgcaaattatacttgaagttgttttagtgaagtctgtattctattttcattcagattaaagggtaagatttgtgaaaacattcccaacagctttggtaaaacagtttaattaattggatttgaaaacattggctccaagactgaatttcagccagcaataaatgtctccaaggggcatataagattctttagggttcaagtacatttgttaaaaaaactcttttaaataaaatagtctaagacacgcctagtgcaagtaaactcccattatggcctagrttgttaagcccttgcatcagtttccttcagctactggaagtaagaaaaaacaaagtgcaccccagagcaatctttctgctggtgtcacatctcctgcatcaacctggagtggccattaaacatacagactcccacgctccatggctgaactactcaatgggaacatctgggagtgaggcccaggaatctgaatgtttagcaaggtttccaggtggctctgatgcacgcacctagcatttgagaagcactccagaggaga

SEQ ID NO: 531031 - DNA, 636 bp, Homo sapiens
gcaatatgtagcaataatttaaaaacatgtttttatttttatttttaaataaatttcattaatttaagtgaaacagrtaagataattgtcctcctagttaataataatagccaaaagctatgtatacttaccagggaccaggaactatgtgtttaatgtatattaacccctttagtccccaacacaaccctataagataggtctattattactcctattttacagatgcagaagctgtcagtaatttttaacatctccgtttttgaaaaatattttttaaaagtttccatattataaatatgatgcatattttattagagaaaagcactaaatatagttaatgaaaaagaaggatcatcattaacaccttggtctataagctttctaagcttttttatatatacagtttgaatatcccttatctgaaacgcttggaacaaaaagtgtttcagatttccaatttttttggattttggaatattttcattatatatacctattagttcagcatcccaaatttgaaaatccaaagtccaaaatactctcatgggcatttcctttgagcatcatgctggcactcaaaaagttttggattttggagcatttcagatttcggattttcaaatttaaaatgct

SEQ ID NO: 531032 - DNA, 636 bp, Homo sapiens
gcaatatgtagcaataatttaaaaacatgtttttatttttatttttaaataaatttcattaatttaagtgaaacaggtaagataattgtcctcctagttaataataatagccaaaagctatgtatacttaccagggaccaggaactatgtgtttaatgtatattaacccctttagtccccaacacaaccctataagataggtctattattactcctattttacagatgcagaagctgtcagtaatttttaacatctccgtttttgaaaaatattttttaaaagtttccatattataaatatratgcatattttattagagaaaagcactaaatatagttaatgaaaaagaaggatcatcattaacaccttggtctataagctttctaagcttttttatatatacagtttgaatatcccttatctgaaacgcttggaacaaaaagtgtttcagatttccaatttttttggattttggaatattttcattatatatacctattagttcagcatcccaaatttgaaaatccaaagtccaaaatactctcatgggcatttcctttgagcatcatgctggcactcaaaaagttttggattttggagcatttcagatttcggattttcaaatttaaaatgct

SEQ ID NO: 531033 - DNA, 636 bp, Homo sapiens
gcaatatgtagcaataatttaaaaacatgtttttatttttatttttaaataaatttcattaatttaagtgaaacaggtaagataattgtcctcctagttaataataatagccaaaagctatgtatacttaccagggaccaggaactatgtgtttaatgtatattaacccctttagtccccaacacaaccctataagataggtctattattactcctattttacagatgcagaagctgtcagtaatttttaacatctccgtttttgaaaaatattttttaaaagtttccatattataaatatgatgcatattttattagagaaaagcactaaatatagttaatgaaaaagaaggatcatcattaacaccttggtctataagctttctaagcttttttatatatacagtttgaatatcccttatctgaaacgcttggaacaaaaagtgtttcagatttccaatttttttggattttggaatrttttcattatatatacctattagttcagcatcccaaatttgaaaatccaaagtccaaaatactctcatgggcatttcctttgagcatcatgctggcactcaaaaagttttggattttggagcatttcagatttcggattttcaaatttaaaatgct

SEQ ID NO: 531034 - DNA, 636 bp, Homo sapiens
gcaatatgtagcaataatttaaaaacatgtttttatttttatttttaaataaatttcattaatttaagtgaaacaggtaagataattgtcctcctagttaataataatagccaaaagctatgtatacttaccagggaccaggaactatgtgtttaatgtatattaacccctttagtccccaacacaaccctataagataggtctattattactcctattttacagatgcagaagctgtcagtaatttttaacatctccgtttttgaaaaatattttttaaaagtttccatattataaatatgatgcatattttattagagaaaagcactaaatatagttaatgaaaaagaaggatcatcattaacaccttggtctataagctttctaagcttttttatatatacagtttgaatatcccttatctgaaacgcttggaacaaaaagtgtttcagatttccaatttttttggattttggaatattttcattatatatacctattagttcagcatcccaaatttgaaaatccaaagtccaaaatactctcatgggcatttcctttgagcaycatgctggcactcaaaaagttttggattttggagcatttcagatttcggattttcaaatttaaaatgct

SEQ ID NO: 531035 - DNA, 593 bp, Homo sapiens
tgtctgtttattcctgtaaagtaaatcccattttcctattaatttctattgaaaaatcggcgatatggacccccagattcttcccatacatagagctgaatgtttttgacatgggagaaccgaatgtggttgcccaggctctggttgttttttgacctctccacttcccaccttactcccatcccggtagtgttttgagaagttggggaaaaaacatgatgcagagtggagagggcatgggcagtgctttctcacttttggtgctcactctggacaatatttcttaaggtcaggaggggttctgtccagtyggaggcccccagagcagattcttaatacccccgggatttggctttgcatcttccttgggtgattctaagctctattctcacagattgcaaataagtgacaccattttacacatggtttaatttcttgaaatattttgtttattaatataactgcccactaatgtcttcgttgcatgttaggtagagacatggggactgagaaggtggaaggaggtaagtagggagataaacagggagtcctgccctcaaggagatagaagttttatgggggagacagaagga

SEQ ID NO: 531036 - DNA, 593 bp, Homo sapiens
tgtctgtttattcctgtaaagtaaatcccattttcctattaatttctattgaaaaatcggcgatatggacccccagattcttcccatacatagagctgaatgtttttgacatgggagaaccgaatgtggttgcccaggctctggttgttttttgacctctccacttcccaccttactcccatcccggtagtgttttgagaagttggggaaaaaacatgatgcagagtggagagggcatgggcagtgctttctcacttttggtgctcactctggacaatatttcttaaggtcaggaggggttctgtccagttggaggcccccagagcagattcttaatacccccggratttggctttgcatcttccttgggtgattctaagctctattctcacagattgcaaataagtgacaccattttacacatggtttaatttcttgaaatattttgtttattaatataactgcccactaatgtcttcgttgcatgttaggtagagacatggggactgagaaggtggaaggaggtaagtagggagataaacagggagtcctgccctcaaggagatagaagttttatgggggagacagaagga

SEQ ID NO: 531037 - DNA, 640 bp, Homo sapiens
ctgggcagcaagacgcaagctctttctatgggacctttaggctttctgttcttcatcttgagagataagtcaaatggccttgaaagtcctctctagcatgaacatctcttggatttgtaggtgcaaagagaaagatatggcttctaggtggggtgggacaactaattaattgctagttgccctccaattttgaatctccctttatttttaaaaataaacttagtcttgggatggttttagatttacagaattattgaaaggatagtacaaaaggttcccatatatcccatgccaagcttcccatatgaataccttatattggtacagcacatttgtcrctattaataaaccagtatccagggccgggtgcagtggctcacgcctgtaatcccagcactttgggaggccgaggcaggtggatcacctgaggtcaggagttcgagaccaggctgaccaacatgggaaaaccctgtctctactaaaaatacaaaattagctgggcttggtggtgcatgcctgtaatcccagctacttgggaggctgaggcaggagaatcgcttgaactcgggaggcagaatttgcagtgatccgagatggcaccattgccctccagtctgggcaacaacagcgaaactctgtc

SEQ ID NO: 531038 - DNA, 640 bp, Homo sapiens
ctgggcagcaagacgcaagctctttctatgggacctttaggctttctgttcttcatcttgagagataagtcaaatggccttgaaagtcctctctagcatgaacatctcttggatttgtaggtgcaaagagaaagatatggcttctaggtggggtgggacaactaattaattgctagttgccctccaattttgaatctccctttatttttaaaaataaacttagtcttgggatggttttagatttacagaattattgaaaggatagtacaaaaggttcccatatatcccatgccaagcttcccatatgaataccttatattggtacagcacatttgtcgctattaataaaccagtatccagggccrggtgcagtggctcacgcctgtaatcccagcactttgggaggccgaggcaggtggatcacctgaggtcaggagttcgagaccaggctgaccaacatgggaaaaccctgtctctactaaaaatacaaaattagctgggcttggtggtgcatgcctgtaatcccagctacttgggaggctgaggcaggagaatcgcttgaactcgggaggcagaatttgcagtgatccgagatggcaccattgccctccagtctgggcaacaacagcgaaactctgtc

SEQ ID NO: 531039 - DNA, 640 bp, Homo sapiens
ctgggcagcaagacgcaagctctttctatgggacctttaggctttctgttcttcatcttgagagataagtcaaatggccttgaaagtcctctctagcatgaacatctcttggatttgtaggtgcaaagagaaagatatggcttctaggtggggtgggacaactaattaattgctagttgccctccaattttgaatctccctttatttttaaaaataaacttagtcttgggatggttttagatttacagaattattgaaaggatagtacaaaaggttcccatatatcccatgccaagcttcccatatgaataccttatattggtacagcacatttgtcgctattaataaaccagtatccagggccgggtgcagtggctcacgcctgtaatcccagcactttgggaggccgaggcaggtggatcacctgaggtcaggagttcgagaccagsctgaccaacatgggaaaaccctgtctctactaaaaatacaaaattagctgggcttggtggtgcatgcctgtaatcccagctacttgggaggctgaggcaggagaatcgcttgaactcgggaggcagaatttgcagtgatccgagatggcaccattgccctccagtctgggcaacaacagcgaaactctgtc

SEQ ID NO: 531040 - DNA, 611 bp, Homo sapiens
gaggggttcacattgggttttgaattttaagaactaagttagaagaaactttgtttttctaaccagattatagtaacacttrccctttctagttcttcagatataggtttataaacttcagactgagaattttctgtaagctccagtcaatgccagattatgaagaaatgcctttccaaattcctaaacctgaactaaatatgtcaaaggtaggaagcctggaagcaactggtacctgcatctctgtatgagcaagcttgaatgcgtttaggcaaccaggtattgctgagatgactcagctagtctgagtcatctgctggtgtgccactcaagttaaggggaacactagtaataattatcaatttttgatcatttatttatttgttaattcacaaaaatataaacacctgtgatacagtaagcattaaactgagagttgggattacaccgagacagacatagtttctgctctgattgagttttcagtgtggctgggattatgaacatgtacagtaattctaatacagtgtcctgcatgttatgacaacacctactatgtgccaggcatgtgctagctgtgccatattcttatctcatttaacgtatgcaac

SEQ ID NO: 531041 - DNA, 636 bp, Homo sapiens
ccaaacctgagtcttgcagcaagttcctaagggctctagtaatagatgtttttagtagaaaataatgctatcaggaaatgtagtaactatttttaaatgttgattaaggacccctgtttctaataggaaggaataggaagcacagaacactactcccactgtaacagctaaaagagatggataatttggaawatatatatatatatatatatatatatagacagatataaaatatataattaatttaatttctattttaaaacatatgtatactttaaaatatttaacagtatactacttatgctaatatattataaaaattataaatacatttatatacatataagctgacccttataattctcagattccttatttgagaattctactcactaaaatttattaataatgccaaaaccaaagttcccaggcttttgaagtgttttgggacatgtggatgcacagagggcaaaaaatttgagtcacccaacatgcatgttcccagctgaggtcaaacaaggcaatgtctgctttcttgtttcagttgtcatgatgcgaacactatgtatatgtataacactactaaatagactgtccttttcactactgagtgccaagttttttatatttttgtgc

SEQ ID NO: 531042 - DNA, 636 bp, Homo sapiens
ccaaacctgagtcttgcagcaagttcctaagggctctagtaatagatgtttttagtagaaaataatgctatcaggaaatgtagtaactatttttaaatgttgattaaggacccctgtttctaataggaaggaataggaagcacagaacactactcccactgtaacagctaaaagagatggataatttggaaaatatatatatatatatatatatatatagacagatataaaatatataattaatttratttctattttaaaacatatgtatactttaaaatatttaacagtatactacttatgctaatatattataaaaattataaatacatttatatacatataagctgacccttataattctcagattccttatttgagaattctactcactaaaatttattaataatgccaaaaccaaagttcccaggcttttgaagtgttttgggacatgtggatgcacagagggcaaaaaatttgagtcacccaacatgcatgttcccagctgaggtcaaacaaggcaatgtctgctttcttgtttcagttgtcatgatgcgaacactatgtatatgtataacactactaaatagactgtccttttcactactgagtgccaagttttttatatttttgtgc

SEQ ID NO: 531043 - DNA, 578 bp, Homo sapiens
atgccaaatataaggcacagccctgcatccccgggagctctggtcaggagtggttctgagtgctgaatgatgaaatagtatcatccagctccactcgtctctagcccaccagcaccagctccttccctcgataatcgttgctctaggaggctttttttggtcaaaacagtaattctcayagtctgtgcattcttacttacctgactcagtctcagcttgcaaccacaaaaggcccaattgctttcttgccagcagaacagctatatcgggttgatggagtaaaatggaaatgatatttgttggctattggtaccaaaatgttccttggtaggtcctgggaataggtgtagaggttaaggtgttcattcacttcaaaaccttggcacatttctactatcatccagggtttgagcacagaaaagaaagtggaacacagtaagaatgtatgcagtaaaagctacatctgattcacaaatcacttccgcagaaaatgtatttattggggtgcttttggctgtaacagaacctgtttaagctaactaaagctaataataataatagattatgtggacagcgag

SEQ ID NO: 531044 - DNA, 602 bp, Homo sapiens
ctttgctcaaatttcttatctttatcttttcttctctcttaggaaatgttaaatatgaccttagaaactccatacactttctttttacatggcaactactctgccccatatgctagaaagaacaaaattgatgttgctgttatctttgcatggaaatgcaattctaagtccttcacaatatggaatgcactgaayaatggattatcaggctttgcagatgatattttaccagtccttcaatggtaatttactaagcccacttcacatagagagaaaacaaaggtccacccagaaatagtttaaggtgagaaatttgtggtagaagtgttggccgaacaaaatctttcaggtaatattttattaccaacatatctttatatcttttcagaaagccagatctagataacatatagtacagctaaaaaatccagatactacatattatctagctaaaaagaaagacatacaactgagagagacaaggtaatttgattttttaatttttaattaaaggacatcctaaaattaaatatgataattttttaaaaaagaaaaagctaagcatgagctgaacctgaaatcagaaagctctttagatgaga

SEQ ID NO: 531045 - DNA, 572 bp, Homo sapiens
tagcacagaatggaggtgtaacttaatcatttaagtctgaaaaaatggtatgctgaactaggtatcttagatttttctataggttcttggttaaaaatatacatataatgtatgtgtgtatatatactttatacatatgtgtgtatatatataatgtatgtgtgtatatatatattttatacatatgtgtatatatataatgtgtgtgtatatattttatacatatgtgtatatgtatacacatatcatatattttttacctagatatacacayatatatatatatattagaaaggtcaaggcttatatttaactaggataagtcttttaaaattctacttcccactttccattttaagtttaggaaaataatatatgccacatctttcctcacctaaggaaatagctaaatatttaaactttcttttgaggcagaaaccttaaaaatataatgtactttaattatcatcacatagtaattgtacagttaaaaatagaaggaaaggaagggagagcttagtattcaacaagttactataatgctaagggttaatacattgctgggttaatac

SEQ ID NO: 531046 - DNA, 572 bp, Homo sapiens
tagcacagaatggaggtgtaacttaatcatttaagtctgaaaaaatggtatgctgaactaggtatcttagatttttctataggttcttggttaaaaatatacatataatgtatgtgtgtatatatactttatacatatgtgtgtatatatataatgtatgtgtgtatatatatattttatacatatgtgtatatatataatgtgtgtgtatatattttatacatatgtgtatatgtatacacatatcatatattttttacctagatatacacatatatatatatatattagaaaggtcaaggcttatatttaactaggataagtcttttaaaattctacttcccactttccattttaagtttaggaaaataatatatgccacatctttcctcacctaaggaaatagctaaatatttaaactttcttttgaggcagaaaccttaaaaatataatgtactttaattatcatcacatagtaattgtacagttaaaaatagaaggaaaggaagggagagcttrgtattcaacaagttactataatgctaagggttaatacattgctgggttaatac

SEQ ID NO: 531047 - DNA, 510 bp, Homo sapiens
acaaaaaaatttacctattagayatttttctacactcaatgctggaatatcatgaagtggcaacaattttataaaaggctcttacccacaattttacattaagcagcacaaagagattctcagatatatacaaatttacaattataatgattaacctatttttcttcaaagttataccctcaaaatgaaataaaataaaagatcagaaaatatagaaatagtgatagcaaatgacatgtggtaactggaagacatttacacataaaactaatttaaggggtggaataatttaagacggcgaatagaagcctacattgtctgtaacgcccacaggaacatcaaattttaacaactatctgtgcacagaaaagccccatcacaagaaccaaaaatcaggtgagcaatcacagtacctagttttaacttcatatcattgaaagaggcattgaggaaggtcagagacacagtcgtgaatcaccaaagccactcttaccctacaccctggcagca

SEQ ID NO: 531048 - DNA, 517 bp, Homo sapiens
tcaggaagcaaggatagacatgtggaagtaatgactgtgattggggaaagaaacacagtggaattcaactgctctgtgatcctactttatttctgaaactgagtattaaatatattgttttgttttagaattctttatacattttataagtctgaaatattgcatgtggatttttttaaagagatgtgtaaatcacaccctgccaatttcccaaaccatattcaagcagggcaactcttcatccctttgcaagccatatggcaaaactggagggattacaaaatctctgcagagatggagcttgcaatggctccatggtgataatgtcatttagaaccaaaggtctggagctgaggaatcaatcaggatgagggcaggcaaaaaagaacaggacatttttcccacccttggcaatatgaactgaggccaagtaggggagcagtagtgttgttgctccaccaaacaactrtgactgtcctcagctgtccagtgaacagcaggcttgtcctgtctcatt

SEQ ID NO: 531049 - DNA, 553 bp, Homo sapiens
ggctgtgccctccacttcttagttcctagtctatgagcctggcagcggctgaagccaatatacaaaccagtgaaaggatgaagtctctttccatgatgtcaggtctagaatggaaatattattaatttcatgtctccaggttgaatatttgtattgggggtagaggggaagcaggaaaggacttccaaagaagagaaggttagggatgggcagtgcaaacagcttcactatttattttaaagttaccagaagcacttatattctccacaacctctgcagtacacccagatggccacattcatatgkggaagccatcaggcacagaaaggaagcatgtcatagagtctgaagccaaaccaacctaaactcaaagccttagtttcctcatctgtaaaatggggataactatgcctaactcacaacgtgattggatcgtgtatataaaattcaacatctggcacacaaaaagcactcaggagatggaaaccatttatctgctgtgtcttatgacagatgaatccacgagtatcagatgggctctctttgttgacta

SEQ ID NO: 531050 - DNA, 614 bp, Homo sapiens
attaacaaccttagtttcacctgcaaccttaattttcttttgccrtgtaatatagtgtatttgcaggttctggagaataggatgttgacatcttttggggggccgtaattctgcctgccacataacctcaggtaagtgatgctctgttacactctgtttcaccatcatgaaataacatcagctcagaataatggtaggtaatagtaaaatgctcatttatgtagttattacacaaaataactctggaaatcagaaagcacagaatcaaaagcaatctcaaccagcaccatctattaactatttggaattcaaggtttactgaatttgaggttcatagcacttaactaggttcagtgaagatttgaaacaaccttttttttttgaacccacaatctatttggagatgtagccaaccaaaatcaaaataatattcatagagcaatatgtaattcacattgatcagtgtagacgagacttactaaaataccatgcaagcccttttttttctgagttttcatgcagttgatgtccaattgccaaaatcaagtgggtgaagaaatcagtggttgctgttgatttcccaggctcctgctaacctgagatgatttggagag

SEQ ID NO: 531051 - DNA, 614 bp, Homo sapiens
attaacaaccttagtttcacctgcaaccttaattttcttttgccatgtaatatagtgtatttgcaggttctggagaataggatgttgacatcttttggggggccgtaattctgcctgccacataacctcaggtaagtgatgctctgttacactctgtttcaccatcatgaaataayatcagctcagaataatggtaggtaatagtaaaatgctcatttatgtagttattacacaaaataactctggaaatcagaaagcacagaatcaaaagcaatctcaaccagcaccatctattaactatttggaattcaaggtttactgaatttgaggttcatagcacttaactaggttcagtgaagatttgaaacaaccttttttttttgaacccacaatctatttggagatgtagccaaccaaaatcaaaataatattcatagagcaatatgtaattcacattgatcagtgtagacgagacttactaaaataccatgcaagcccttttttttctgagttttcatgcagttgatgtccaattgccaaaatcaagtgggtgaagaaatcagtggttgctgttgatttcccaggctcctgctaacctgagatgatttggagag

SEQ ID NO: 531052 - DNA, 603 bp, Homo sapiens
ccacaaaataaaatgaacacacatctttggaaagtaactaagtgaaagaccctgtgttccataggataaaacgcagactttctgttaaaaagtattcatttcaaaaatgtgaagacaatagtgctataaaaataatttcaactgattaaacttagtcaaaataaaagagttttctgtgcatctattgccttttcattttattttgatttgatataattttcattaactttaagcctttgcctcttattatctctatataaggtggtcaaacaaaygtcaataggaatatagggattagtaatgactcgcaccctgtttaaatcatcagttttgcttgaatccctgattatagatatacttactgacagattttcatgattaaaaaccataaactgacacagtctgaccatttttgtccagactaatgatcccagagaatctatacttagagacattgtatagtctatttgaatctaaattgactttatagttaaggatgcacagtgttgtccccagggaaaccactaaataatgacataaaaagtaccagtaagcatccaagagagaaaataaaattgaagaatgaattaaacaaatttaact

SEQ ID NO: 531053 - DNA, 603 bp, Homo sapiens
ccacaaaataaaatgaacacacatctttggaaagtaactaagtgaaagaccctgtgttccataggataaaacgcagactttctgttaaaaagtattcatttcaaaaatgtgaagacaatagtgctataaaaataatttcaactgattaaacttagtcaaaataaaagagttttctgtgcatctattgccttttcattttattttgatttgatataattttcattaactttaagcctttgcctcttattatctctatataaggtggtcaaacaaacgtcaataggaatatagggattagtaatgactcgcaccctgtttaaatcatcagttttgcttgaatccctgattatagatatacttactgacagattttcatgattaaaaaccataaactgacacagyctgaccatttttgtccagactaatgatcccagagaatctatacttagagacattgtatagtctatttgaatctaaattgactttatagttaaggatgcacagtgttgtccccagggaaaccactaaataatgacataaaaagtaccagtaagcatccaagagagaaaataaaattgaagaatgaattaaacaaatttaact

SEQ ID NO: 531054 - DNA, 603 bp, Homo sapiens
ccacaaaataaaatgaacacacatctttggaaagtaactaagtgaaagaccctgtgttccataggataaaacgcagactttctgttaaaaagtattcatttcaaaaatgtgaagacaatagtgctataaaaataatttcaactgattaaacttagtcaaaataaaagagttttctgtgcatctattgccttttcattttattttgatttgatataattttcattaactttaagcctttgcctcttattatctctatataaggtggtcaaacaaacgtcaataggaatatagggattagtaatgactcgcaccctgtttaaatcatcagttttgcttgaatccctgattatagatatacttactgacagattttcatgattaaaaaccataaactgacacagtctgaccatttttgtccagactaatgatcccagagaatctatacttagagacattgtatagtctatttgaatctaaattgactttatagttaaggatgcacagtgttgtccccagggaaaccactaaataatgacataaaaagtacmagtaagcatccaagagagaaaataaaattgaagaatgaattaaacaaatttaact

SEQ ID NO: 531055 - DNA, 541 bp, Homo sapiens
acagtcccaaattagaagcaaacaaaatgtccccaaacaagtgaatacataaaccaaatgtgatatatccatacaatataattctacacagtaataacaactacagcaaaagcataatcaaacaagcaacctcataaaacatttccaaaaaattaccttgagcaaagaagccaggtacaaaagtgtacatattgcatgcttcaacttatataaattattagaatttcaaaagtaatcaatagtgataaaaattagatcgttaggtgccaaataktaaagatggtaagtgggataacttcaaggtacacaagaaaactttcttggtctatctttattaatgtgtcaattataggagtacatacatttatcaaaacacaaactatacattttaaaaatgtaaattatattctttgttaattacacttcaacagaattgatgaaaaaataaattagaatggtcaaactatcttgaggacatattgggactgatgttgccaaattaccctcttactgatgctagtatttcagagcaaagatagaa

SEQ ID NO: 531056 - DNA, 556 bp, Homo sapiens
aatgaaatgagataatgtatgtcaaatgatgagtacatggtaagtaccaaattaatgggaggcaatattgtgcagtgactcactacacaaactttggagttagacctacctggtatagcttcagccatgtattcattatatgacactgaacaagttatttatcttttctagggctccacttcttcctctgtaaaactgataataaatgtgcctggtatcgttgttgaatatattaaatttgatgayctatgtgcttactgcagtcttgttacctagcagacatttagtaatgggatctattgcaatccgtcactcatctgaccattcatttgttcattcagcagatttttattgactacatacgatgtatcagatactgagctttgtgctgggaatataatggggaacaaatcggagtggaccacagggtacacctcatggaatctaaagccaagactatcaaataaataaacatgccaataaatatgtaataactaattgtgaataactgctaagaaagaaaagaacagggtgccatgagaggagggatttattg

SEQ ID NO: 531057 - DNA, 634 bp, Homo sapiens
gcaggtaggtttaaatctaatattgttcaatcttcccagggaatgggtgatgayacccaaatcctgggaattctctctctctctctctctctctctctctctctctgtctgtctcttttgagatagggtcttgctctgttgcccaggctggagtgcaatggcacaatcatagctcactgcagccttgatctcctggtctcaagtgatcctcccatcttagcctcccaagtagctgggtcaacagaaatgtaccagcactcatgttttgttgctgttgttatttgtttgttttttagtagagatgaagtctcactatcttgcccaggctggtctccaaatcctgagctcaagcaatcctcccaccttggcctccctaagggctgggattacaggtatgagccacggtgcccagtctttttttttttttttttaaagagctgggggtctcaccatgttgcccaggctggtctccaactcctgggctcaactaatcctcctgcctcagcctcccaagtagctgggattacaagaatgagccatcgtgcccggccccaaatcctggggttgttgatcatattctcaacctcagcctcaacctgaatctgctactgggtgatataagacaatataaggt

SEQ ID NO: 531058 - DNA, 378 bp, Homo sapiens
ctgcctgcagttccatttttcttaccaggtaagagacatagcttcatgaaaacaaaggsagaaggcttgtgaccagagaactcccagtcctctccctgcataggaaaactggacttctccggagggctccagctcctgggcaaatctctagggccacttaattgggctgtcccccacctttgtttctggttttggaggggccaaggttgggaatcctttctaagtctctacacatggagcccttctttggtgggatagtcttgacatataccaggattctcattgacctttcagagccttcaagaatcctgagctgctttggcttctgttcctggaagagatgcaactgaactgctctggagctggagttcaggttca

SEQ ID NO: 531059 - DNA, 378 bp, Homo sapiens
ctgcctgcagttccatttttcttaccaggtaagagacatagcttcatgaaaacaaagggagaasgcttgtgaccagagaactcccagtcctctccctgcataggaaaactggacttctccggagggctccagctcctgggcaaatctctagggccacttaattgggctgtcccccacctttgtttctggttttggaggggccaaggttgggaatcctttctaagtctctacacatggagcccttctttggtgggatagtcttgacatataccaggattctcattgacctttcagagccttcaagaatcctgagctgctttggcttctgttcctggaagagatgcaactgaactgctctggagctggagttcaggttca

SEQ ID NO: 531060 - DNA, 378 bp, Homo sapiens
ctgcctgcagttccatttttcttaccaggtaagagacatagcttcatgaaaacaaagggagaaggcttgtgaccagagaactcccagtcctctccctgcataggaaaactggacttctccggagggctccagctcctgggcaaatctctagggccacttaattgggctgtcccccacctttgtttctggttttgraggggccaaggttgggaatcctttctaagtctctacacatggagcccttctttggtgggatagtcttgacatataccaggattctcattgacctttcagagccttcaagaatcctgagctgctttggcttctgttcctggaagagatgcaactgaactgctctggagctggagttcaggttca

SEQ ID NO: 531061 - DNA, 558 bp, Homo sapiens
tatacatatatatacacatatttttttccttttttttttttttttttttgagacaaaatcttgctctatcacccaggccaggcagtgatatgatctcggctcactgcaacctccgcctcctaggttcaagcgattctcctgcctcagtcgctcaagtagctgggattacaggcacccaccaccatgcccagctaaattttgtatttttagtagagatggggtttcactatggtttccagaccagttccaggctggtctggaactcctgacctcaggtgatccacctgccttggcctcccaaagtgctgggattacaggcrtgagccaccgcgcctggcctaagtctgatttctcttatactttcacagtccttacatagtgtaggcattcaataaaggttgtttgaattttaaaaagtctaatattgaatgacgaaataaacgaatgatgaggctgacccttaatatagctaagccaaatagatctttataataaagtttacttttaagttaaaagcttgcattttcactagtaattgaaaatacagccttcaaatac

SEQ ID NO: 531062 - DNA, 669 bp, Homo sapiens
ctgagaacaaaacttagcctgcttaattatatctgcccagtgtgctgcataaaaaagtcattgaccaaaaataacatgtttaagtaatgttcaagttgagatacagaccagcagcagtcaggaaattcaaaattaaatctgatctccacccttcacttgcctcattgtgcccaggcagcaccaaggtcagaaattaattggagaaactggaaaacayacagcctgcaatatttcagcacagtaaggtcaaggggaaaatttagttaaaaccttattacagtagtttacagaaacatattactgtgaatgtgaaattagagtcttggcttgatggatgtgtcacctaccagggtaatttgttgggaataatttgaaaatgtaagtgaacataattaagcttctgttttatggtagtctggtcatttgtctccaggtgcacttgtctctgtagatttgacactgcagatgcctagaatataatgagacatgtttcattcactcagttttaagttagtatttgggcatctgtggattaaaagaggaccttagagttgaccataaagttgcagttaacattttcacgcataattttttttctgtagaatcctaagtataagataaaatctcaagggtaatattaccttgaaaaccagtggaatactacaatac

SEQ ID NO: 531063 - DNA, 669 bp, Homo sapiens
ctgagaacaaaacttagcctgcttaattatatctgcccagtgtgctgcataaaaaagtcattgaccaaaaataacatgtttaagtaatgttcaagttgagatacagaccagcagcagtcaggaaattcaaaattaaatctgatctccacccttcacttgcctcattgtgcccaggcagcaccaaggtcagaaattaattggagaaactggaaaacacacagcctgcaatatttcagcacagtaaggtcaaggggaaaatttagttaaaaccttattacagtagtttacagaaacatattactgtgaatgtgaaattagagtcttggcttgatggatgtgtcacctaccagggtaatttgttgggaataatttgaaaatgtaagtgaacataattaagcttctgttttatggtagtctggtcatttgtctccaggtgcacttgtctctgtagatttgacactgcagatgcctagaatataatgagacatgtttcattcactcagttttaagttagtatttgggcatctgtggattaaaagaggaccttagagttgaccataaagttgcagttaayattttcacgcataattttttttctgtagaatcctaagtataagataaaatctcaagggtaatattaccttgaaaaccagtggaatactacaatac

SEQ ID NO: 531064 - DNA, 525 bp, Homo sapiens
aaaataattatctggttatgttttttaatgataaaagaatacatacaagcaatggtctacacactgcaactaaagatctgcttcattttttcaaaataaaaagcaaarctgaatatgactttcattacactttctgtttataacacgggtttaatatactagtgacatcttgatgcctgataagaggattttaatcagatgtatgaaatgtccagattataaagattataagcaattgttcagaatgattacattttatactttacacacacacacacacacacacacacgcacattttttagtttaacacaatcaaatttacttgaccctttgttattgtccaatgtatgtgttcctggtcagcctaccatcttccatggggttattttggaactcaggctagagcctaagaatcctctgcctatggctagcagatgaagaaaagaaactagagaacatacactgcctataagtgagaacaaggtacacagccacacttgactgtaagggttgttgggaaatgc

SEQ ID NO: 531065 - DNA, 600 bp, Homo sapiens
tcactcctctttccttgaccaattttcctgaatctttcctatctcagaagctattagttctgggtatccttccctgaagctctagactggctggatatcactttcccgggctccagcctgcttagtggtctattgcttcttctggactaacatttcctgagggcaaaaacaatatcttgttctctcatgtattcctaggatctagcatggtgtctggcacatagttggcaatcacggggtatttgttgaataacttggtagttgctttgcaggaaataagcacatctggggtaatcayatttatattttgtttaaaaatctctatatttcaactcaaaaccagtcaagttccacatattctcagttatgcatgggaactaagtcatgtgtatgcatgcatacacagtgtgtaaaaatagacaatggagacttggaattgtgtgtgtgttgggggggtgaaggatgagaaagggggatgaaggatgagaaattacaacatacactctttggatgacggttacactaaaagtcaagacttcattactgtgcaatatacccatgaatcaaaatggcatttgtaccctttaaatttatacaaaa

SEQ ID NO: 531066 - DNA, 555 bp, Homo sapiens
tggagtctaaaatatttggattggcttgacagtcatccactataagacttgctgcagtgtcagcagtgtctattctgccttcttaccaccttcttccctgccaagtcttgctccttagccccaacacacattcrcaaataaacttttactcaactctttatacatcattctttgacattctctctttctaatatatttgaattaaagatgagaagaagaaaggaggaggagaagaaggtagagaggaggaggacaaggagggaggagagtacaggagaaggaagagggagagaaggaggagaagaggaagaagaatggtagtaatagtgatggaagaggagggagagtagggaaaggagagagagaaaggaagaggcagagggtagaaagcagagagggcggaaaaggagaagggtgacaagaggaggaagaaatatatattttttttcaccaagcaagaagcaatgctgaaggaatcttcagttataaccacccacatcagtggtgtagcagcatctctggtattctctgatttggtctggttccattgatgct

SEQ ID NO: 531067 - DNA, 555 bp, Homo sapiens
tggagtctaaaatatttggattggcttgacagtcatccactataagacttgctgcagtgtcagcagtgtctattctgccttcttaccaccttcttccctgccaagtcttgctccttagccccaacacacattcgcaaataaacttttactcaactctttayacatcattctttgacattctctctttctaatatatttgaattaaagatgagaagaagaaaggaggaggagaagaaggtagagaggaggaggacaaggagggaggagagtacaggagaaggaagagggagagaaggaggagaagaggaagaagaatggtagtaatagtgatggaagaggagggagagtagggaaaggagagagagaaaggaagaggcagagggtagaaagcagagagggcggaaaaggagaagggtgacaagaggaggaagaaatatatattttttttcaccaagcaagaagcaatgctgaaggaatcttcagttataaccacccacatcagtggtgtagcagcatctctggtattctctgatttggtctggttccattgatgct

SEQ ID NO: 531068 - DNA, 636 bp, Homo sapiens
ctgctttctccagttcttccatctgctgaagctagcaacagaaccacaatgtttagaaggaaatagcattgtctatctgctatggccaaactacccrcattcttattcttctttattctctgcattcattctaacttgtttctaaaagatcttttataacttgtattaagccctcacttggcaccctcaccaaaccttatttctttcattccatggcctataattttattaaaaccaaaaattaattggggaagaatgtgcacctgtaacatagtttattactccctcaaaagatcacagcacatttccttatttgttaaaattcacttttaagtttcctagtatgttttcttcatatatgcctaatgcaattttctctaggaagattcctagcagcagcgttttgaattttatttatttttctttttatttctagtttttagttggtatcataattcaaatattttctcatccctatatcatcaagcattatggataatatatgagaacattttatttgtatgttaacattcatttactttattgaatactcatttatttctaatttcttttctgattctcttacatttattgtttatgcaaatttcagtaatgcaaagttgtccactgagcaat

SEQ ID NO: 531069 - DNA, 641 bp, Homo sapiens
caccaaacatatttgaacatgtaaatgcttaagaaataagcataatacggatatagtttgggttaataggatccttacagttttttcccctatgaaacataagtaatgattttagtgtgtttcttatggaatacacgtatttaaaaaggactttaagaaattgtggatgtgaataatacctttwtctaataaaaatttaaattgtataatagttttataataaagtatttaattgatattttaatatggatggacattgcatagattcaaataaattaaaataaatgataaattctaaatattttacctaaatagtttttcaagaaacagttatgaaaatgtgtatattaaatggctctaatgtggagcttgtggtatttcaactcagtattcattattctttgttttgtgtgtctggaaagattgtacttacttttcctctttacactacaatttgttcttatggggctctaaactgttcaactgaataagaacctttgtatttcgattgagcataatttagtattttatgatttccaagatgatgttcttatgtctatcaagtttatgtatcaaatttataacatcatttaagagaaaggaatttccatagatacttcagttgcatttttttgtttcac

SEQ ID NO: 531070 - DNA, 641 bp, Homo sapiens
caccaaacatatttgaacatgtaaatgcttaagaaataagcataatacggatatagtttgggttaataggatccttacagttttttcccctatgaaacataagtaatgattttagtgtgtttcttatggaatacacgtatttaaaaaggactttaagaaattgtggatgtgaataatacctttttctaataaaaatttaaattgtataatagttttataataaagtatttaattgatattttaatatggatggacattgcatagattcaaataaattaaaataaatgataaattctaaatattttacctaaatagtttttcaagaaacagttatgaaaatgtgtatattaaatggctctaatgtggagcttgtggtatttcaactcagtattcattattctttgttttgtgtgtctggaaagattgtacttacttttcctctttacactacaatttgttcttatggggctctaaactgttcaactgaataagaamctttgtatttcgattgagcataatttagtattttatgatttccaagatgatgttcttatgtctatcaagtttatgtatcaaatttataacatcatttaagagaaaggaatttccatagatacttcagttgcatttttttgtttcac

SEQ ID NO: 531071 - DNA, 521 bp, Homo sapiens
ataaactgtgagttaagggtcttaaaataaagagttgtaaacagaagataagaatccatttttgtttatccccactacagatctggacagggaaataaaataaagttatgtcrttagacatggtcacagactatatttaaggcaacaccctgcctgcaatctggagagacctgagttcatgacttgggcttgctttgtgcctttggataaatttgtgaaactctatgagtcacagtttctatgtcactgtgtggttatgaggattaaattatataaagtctctacctagtacaagagtggcatgtggtaggtgttcaataaataattcctttatacactttattttatctatattattatatatgaaattttaatcagttaattgatttaataatatttaactcacattactctcccaactaaacacacccacccttaaacaaacatatgtattatatatagaattattttttcacttactcttagcacaaacttaatgctcattgtacagtatggaaaga

SEQ ID NO: 531072 - DNA, 573 bp, Homo sapiens
taggttaatctcaggatctcaagattctgaattcaatcacatcctcaaaatctctttacccacataagataacatattacaggcaccgaggattagggtgtgttatttttggaaggcggcattcttcagattaccaggatctaccatgaacttgatacttaatcttgtcttaaaggtaagattttaagtacttttaaactacttaaaactacttattttagctatgcttcatggatttcacaagtattggtgcttaaatcttgttcatttttctgctgtaacctcagttggcccttccaactacaacattaactgtgagtgagtgagtgagtgagwgagtgatagtgagaggtgacagcgtgctggcagtcctcacagacctcgctccctctcggcgcctcctctgcctgggctcccactttggcggcacttgagggacccttcagcccatcactgcactgtgggagcccctttctgtgctggccaaggacagagccggctccctcagcttgcaaggaggtgtggaaggagaggcgcgagcgggaaccggggctgcgcgcggcgcttgcgggc

SEQ ID NO: 531073 - DNA, 599 bp, Homo sapiens
atgccactttaataaaactgctttcgtccaccactggcttagttttgaattccttcctgagtgaagccaagaacctgctctgtatcaatagtgcttatttacctagctccaccaaatcatagctttacctggagttgtgactrtcttgctttgggaaacttaaacagtgctaataggttggaaggaggcagattaatcaattactctgttgttcatctagccccacaggtcattgaggaaacatttattcctatccagtatgaaaattcatcaacacagattttattaaattgcacacctttcttgttttcaatggcccaaatttgataaagcatctttctctgctcattatatgttcctcttgggcacatttaggatttggtttatgatactcaaactccagaaagaaactagcttttaattagggttgaaggataaagggcagggccaagaaataaaagtaaatagtaggagaagtaaatagcaattgcctaataatttagttatgttattacaacacaaggaactgcaatggagagagacaagagctaaacaaaagtgaaaaaagagaaacaaataattggcacacactaaagggg

SEQ ID NO: 531074 - DNA, 668 bp, Homo sapiens
ggctgctaccctcagtgcactgactataggctaaccctgctctgcaaggagcagtcacagaactgtaactatgccactttaataaaactgctttcgtccaccactggcttagttttgaattccttcctgagtgaagccaagaacctgctctgtatcaatagtgcttatttacctagctccaccaaatcatagctttacctggagttgtgactgtcttgctttgggaaacttaaacagtgctaataggttggaaggaggcagattaatcaattactctgttgttcatctagccccacaggtcattgaggaaacatttattcctmtccagtatgaaaattcatcaacacagattttattaaattgcacacctttcttgttttcaatggcccaaatttgataaagcatctttctctgctcattatatgttcctcttgggcacatttaggatttggtttatgatactcaaactccagaaagaaactagcttttaattagggttgaaggataaagggcagggccaagaaataaaagtaaatagtaggagaagtaaatagcaattgcctaataatttagttatgttattacaacacaaggaactgcaatggagagagacaagagctaaacaaaagtgaaaaaagagaaacaaataattggcacacactaaaggg

SEQ ID NO: 531075 - DNA, 638 bp, Homo sapiens
tgcaaaacctcaaaagcagggctgaggtttcccagagagaataaatctcacctgtagacaacagcgctagcctgtccccagagactccagcctgcctatgatatcycttttctgaatgcccaccccatgatatcaactttttagccagctcatgcatttgtaaattcgatttcttataataaatatcttcctatattgtactgctactggttctgtttctttggttgaatcctaactgatataaaagggatcataggaagtacaatcgggcaatagaaaaatgagacagaaaataatgcagctcaataaagtgtgtttttatgaacagattactcctgtgggtatctgggctcaatcccagtggaaaccttctaaatgactgtagacaagaaacctccaaatgactgcatgaacggtggagaaaaccagggtatttctccttgaactctagctacttattgcttaagagcacctgtcccctccacttgtccatttccctcctttcctgtgacaaaagaacccttgcaggaagacagtggaaaaatgccataggtggcttgaaaggatacgggcttggaatgcacagaatctgatacaagtctacttcaaagacaatggcttttattcttcagtgactg

SEQ ID NO: 531076 - DNA, 583 bp, Homo sapiens
aagaactgacacatctgaattttcagagctgacagaaggaggttttgctccaccccaaactgtccgctgaaccagggcggcttacattaaaggattgtctagtatgtttagctcttttcttcctttcctctagtcaaacatgattcacattatccaaataacttaaataacataacataaaagccatgaatcttagataaacgacaacatggacttcaataaaaatgtcgaataaggcaaaggaaatgaagaggatttagatgggaatgrccagagcaagcaggttctgggcaatagtagcagtgtggattgtacaagcaaagctggtttgcctgaatccaagaaaagaaagaagtttttttagtgtccaatatgaaacaaaacagcaaggagaagagtcccctaatttccatcctagtgcttctcgatcacagctagtcagcatagcagcaacaaaatataaccatatctatctaatcttattgctcatagctgttaaataccaaatctcaatcaacaatcttagagacagagccttcattgctttttgttcccaatgtttcacaagcagacagatggatat

SEQ ID NO: 531077 - DNA, 583 bp, Homo sapiens
aagaactgacacatctgaattttcagagctgacagaaggaggttttgctccaccccaaactgtccgctgaaccagggcggcttacattaaaggattgtctagtatgtttagctcttttcttcctttcctctagtcaaacatgattcacattatccaaataacttaaataacataacataaaagccatgaatcttagataaacgacaacatggacttcaataaaaatgtcgaataaggcaaaggaaatgaagaggatttagatgggaatgaccagagcaagcaggttctgggcaatagtagcagtgtggattgtacaagcaaagctggtttgcctgaatccaagaaaagaaagaagtttttttagtgtccaatatgaaacaaaacagcaaggagaagagtcccctaatttccatcctagtgcttctcgatcacagctagtyagcatagcagcaacaaaatataaccatatctatctaatcttattgctcatagctgttaaataccaaatctcaatcaacaatcttagagacagagccttcattgctttttgttcccaatgtttcacaagcagacagatggatat

SEQ ID NO: 531078 - DNA, 409 bp, Homo sapiens
caagtgattctcctgcctcagcctcccgagtagctgggattataggcacctgccaccacaccyggctaattttttgtatttttagtagagacggggtttcaccatcttggccaggctggtcttgaacacctgaccttgtgatccacctgcctcggcctcccaaagtgctgggattacaggtgtgagccactgcgcctggcaggtgacattttcaaaagtccagcacaacattcacacctcaaggaatgtattatacagttggtgacttagattatacaaacataaaatgatttggggtaattaaatcctaaggttgatagtgctctttataagtaaaataagagctcagagaagtgaaaagtaagggtggaatgaagtttccgagaggaaatatgtggcagagatggac

SEQ ID NO: 531079 - DNA, 531 bp, Homo sapiens
atataggtttggatttggcaggtttggaatggagcctgcatttctgcatttctgccaaacttccaggtgatgcatcagcaaagtacaatatctacgctgctggttctggacaacacttagcaaagacttaaacgccagtggttcttgttttgttttgttttgttttgttttgagacagagtctcaccctggcacccaggctggagtgcagtggcgcaatctcagctcaccgcaacctccaccttccaggttcaagcgattctccccctcagcctcctgagtagctacgactacaggcatgagccaccacacctggccttaaactccagcggttcttaaagtatcatacctggactggcagcaccagtatcacttgggaaygtgggagaaatgccagtgttgtggcccttccccagacctcctgaatcagaaagtccggtggtagagcccagatggctgttaattgccttccaggtgattctgatgcacactgatagccaagaagcactagcttagagaatgagaagtaact

SEQ ID NO: 531080 - DNA, 589 bp, Homo sapiens
ctaaatgtatttacacatggtttggatcatggatggtttggccctttcttagataaacttcaagttgagttatgattatgtttaaaaggcgccattggccgggcacggtggctcacrcctgtaatcccagcactttgggaggccaaggcgggcagatcacgaggtcaggagatcgagaccaacccggctaacacggtgaaaccccatctctactaaaaatacaaaaatattagccgggcgtggtggcgggtgcctatagtcccagctactctggaggctgaggcaggagaatggcgtgaacctgggaggtggagcttgcagtgagccaagatcgcaccactgcactctagcctgggggacagagcgagactccgtctcaaagaaaaagaaaggtgccatttccattatcctacccagactacccactgacagcagaagggcaaaatgcatggagggtgggggtgggtgcccatctaagagtcagggaaagtagtatttaatacgtaggtagtggaaagtgaccttgggtgagcagtgggctgtaacaagtcctcccagtaagatttcagcccagctctgctgagctgca

SEQ ID NO: 531081 - DNA, 589 bp, Homo sapiens
ctaaatgtatttacacatggtttggatcatggatggtttggccctttcttagataaacttcaagttgagttatgattatgtttaaaaggcgccattggccgggcacggtggctcacgcctgtaatcccagcactttgggaggccaaggcgggcagatcacgaggtcaggagatcgagaccaacccggctaacacggtgaaaccccatctctactaaaaatacaaaaatattagccgggcgtggtggcgggtgcctatagtcccagctactctggaggctgaggcaggagaatggcgtgaacctgggaggtggagcttgcagtgagccaagatcgcaccactgcactctagcctgggggacagagcgagactcygtctcaaagaaaaagaaaggtgccatttccattatcctacccagactacccactgacagcagaagggcaaaatgcatggagggtgggggtgggtgcccatctaagagtcagggaaagtagtatttaatacgtaggtagtggaaagtgaccttgggtgagcagtgggctgtaacaagtcctcccagtaagatttcagcccagctctgctgagctgca

SEQ ID NO: 531082 - DNA, 453 bp, Homo sapiens
tgtgctgtgaatgtatctttttgccttgcctggttctgtttttgagatttcctcaactttgccttcttagccatctattgagtttaaatttttttagtcatacttttaacttgttagtccctttcttactctctggttgttccttatgttgttgtttcactagcatccatttttgtttaacaaatgcagtaccttctattatttctgttgctgtttccttccatgtgtttttcttcagtcttctacttttctgtgaaaggcttttctccaatctggggatcacatctggcgatccttggctgccctaaagatatttaagagtgaggcactaaaaagctgagcagaaacgctgggtctgagggctgggcttgtggaytgatgtttctcattatgggatggtttggtgacaatctggtcattctcttgtggggagggtccctcaattatctgtat

SEQ ID NO: 531083 - DNA, 625 bp, Homo sapiens
ttcattaaaaaactactttctacctttctgtattttcagcttcttggcttgtctctttcacagagaaagttccttttaagtatttctaccatgcaggagagtagacccacactaatgacaggggtgcaagtagatttctacagcttagttcttctcacttcacacagaacaatctgcataacaaccttttttaaatataatagacttagtaaaagtcatcactggaaaaacttggtagctttaaaccactggttctcaaccaggggtgatttttgtctccaaaacaacatttggcaatgtctggagacattcttcattatacagttatataactgaaggatcctgctggcatctaatgarcagaggccacaaatgctgctaagcattgggcaatgcacaggacagcccccatagcaactaattatccagctcaaaggtcaaccatggcaggttgagaaatccttgaacaaccaaaacaaagaaaatcctagatctagttcacagtcaccagcattcaagagtgagagataaatttataccttgttgttgtttttgttgttagactcaaagtcaattacattcctcttaagtgcctgccaagtaaaacttgagattctctacagaa

SEQ ID NO: 531084 - DNA, 510 bp, Homo sapiens
gaccaacccagagctgttttctactcctctccaggaatgtacctatagtccctcagtaaattctgctacaatgtgtctcttgactgaattctttcttccaagtcagacaagaaccaaagatgctcacacttcctgataacaataccaggaattttacatgttgctgtggtgtttgactagtactatgcctatcctcatctccacagaaggcctgttaaagtactgatgctatttgtcctatggaaaaagttgagaagatgaactaaactttggttgcagagttgttctgtattcaaactagggatgagctaatttccagccaaaaaggagmctgcagaaatggatatgtacatctatatattggtctgttatgcagttactagaaaggctatagaaaaatgtgcaatatcagagaaaattttttataatacacttatttattataatacaattattgtattatacacaatacaatacattaaatacaataaattttttatttaagtttta

SEQ ID NO: 531085 - DNA, 606 bp, Homo sapiens
gtctgagaggcataaagagagagggagagaaaaaagtgtcagcacatctacacagagcaaagggagtggaggaaattcacaggggaagacttcattcttttcacaaaagaaaaggttagatgtgcataaaggacaaagggcagggttgactaagggaaagagaaatataaagccatcagggcctgggaaggggcaccaggaacaaggaataagtgaagaaagggagatgggacaatatcaatttcaaaaatatgcttttattaactgtcaagattgtaattatgcataagctttgacctaaaatttyattttaatggcatttactccatatatatatatatacacacacatatacttgtataagtctgtagttacaagccctaggatgtttattaaaacactggttatatagcagaaaatttttaaaaacatctacatgtaaattacttaaggatagttaataaattagcccacattcttgtatcagaacagtagataggcagacaataagaatatactgacttgaaaagatgtccaagatattttattaagtgaagaaatcaatttatagaacaatatgtataacatgaacccatgtgaaataag

SEQ ID NO: 531086 - DNA, 610 bp, Homo sapiens
agcatcccgcatccagcacctacatcccgccaccgtcgtggccgtcaccatgcccaagagaaaggctgaaggggatgctaagggagataaagccaaggtgaaggacgaaccgcagagaagatccgcgaggttgtctgcyaaacctgctcctccaaagccagagcccaagcctagaaagtcccctgtaaagaagggagagaaggtacccaaagggaaaaagggaaaagctgatgctggcaaggaggggaataaccctgcagaaaatggagatgccaaaacagaccaggcacagaaagctgaaggtgctggagatgccaagtgaagtgtgtacatttttgataactgtgtacttctggtgactgtacagtttgaaatactatttttatcaagttttataaaaatgcagaattttgttttactttttttttttttaagctatgttgttagcacacagaacacttcattgttgtttttgggggaaggggcacatgtcactaacagaaagtctccaaagctggatttatgtgaggaaaacacctttcccttctagttttgagagacttcctcttggctcccaggaggagggattccctgactctgacacacatgg

SEQ ID NO: 531087 - DNA, 142 bp, Homo sapiens
ttagaaaatggcagataacccttctgatttaygaaaggaattttcaggactctatttgaaatgcagaaatagtttaaaaacttgatagcaagaaatgggctggtagcttatattggaaaagagagataagggagaaatagag

SEQ ID NO: 531088 - DNA, 544 bp, Homo sapiens
ctgctgggtacttggtttcttgtggttcctgattcctatcagtgtcatttctcaaatgacctgtggatctaggattattgaccacttccyatgtgacccaggtcctctgttagccctcacctgtaccagagcccctctactagagttgactagctccaccttaagttctctacttctatttattccctttctcttcatcgtggggtgctatgctctggtcctgagagctgtgttgagggttccttcagcatctggaagaagaaaggctttctctacctgtggctcccacctggctgtagtttcactgtttatggctcaatgatgatcacgtatgtgagcccaacatctgggcatgaattcggaatgcagaagactgtgactctgttctattctgtggtcactccccttattaatcctgtcatatacagtctgaggaacaaggaaatgaaacatgcaatgaggaactacactgtaatgttttattttctagaattcatagggctacaagagatgtcaaagatgtattctatctctttaattttcc

SEQ ID NO: 531089 - DNA, 569 bp, Homo sapiens
ccaccttccatctatgctagataagcagcattaacaacccagtatattctttcatactattctccatgcttctaattctatataaatatttattatcatatatcaggttttttcattatcttacaaaaatcaaattataycacatagtcttctctatatcttgcttttgcatttaaccttacaatatgcaaatccctccaaaataagattaggtataccaagtatttttacttcatatagtaggccagaaataaataattaagaaaaccagggtcctttgacagggcaggaagaactgttcctgagctttggctaatactcattccataaaaaaaaaactgaagataggttttaagttcatattgagtaaggtgtaattgacaaagtttaaaactagagtctttatggaggatatcattatgatattgtgatttgtcatcttcatttatactaaatggtcagatatgagattcacacacatcatcatatggtttcacagaacagagacaccactattaagtgagacccacggatagaaaaggcattttgatggctagctgctgaaagca

SEQ ID NO: 531090 - DNA, 630 bp, Homo sapiens
aaataaagaagaaagcaggacactagctccaaaacctctccaatcaccctagtgaaattaacttcatctgtcacatttaaactatcattgattacgtaatatactctgtggccctgaagcattattccctcagcagacagaatcaccgttagaatcatctatagaggattcccagagttttccagcacttattaggcactacctaattctaagagagacggtattaggaactcccctgattggagtctagatactttagtgacttgtttcttctatggaactataagttgagaaggtgcaygcccttctcgatattgtcccctctgaacccatggccctgacttcttctgaactggtaagcagaagacattgctgacattataaagccaatgtatttgcctgtcacagttcacacaagatagcaattgttaaatgaacttgttataatcagtcatgaaaaagcatagtctcaggtttgagaaaatgctcaagacattctggaaaatgtaccaaaaagaaaattaaactcagacttacgaagactaaatgagatgatatatgtgaagttcctagtacagagtccagcaaacagcagaacctcaataaatgattgaatttattatcatttgg

SEQ ID NO: 531091 - DNA, 600 bp, Homo sapiens
ttgtccccatgtatttcaattcaaaaaaactgtgtgtctgactccaaaaagaaaattatacattctaggtaaatgaactctagtcctagaaccaagatggttttcttgtgtgactgtgtgctgagcaccggctcagccaccatagagaattagtttctacctcaaactcagagccactgcaactctgcacttacccatacttccgtcacaaggtccccagctatttcaaaagcacctgcaccttgcataccattatagtttgggcagtggaattcctgggcccagatactgctgccattactatcccaaaccacagatctatagtacctccattcatacctgygcttatggctccagatccatggcttcccctagggtacccctcgtcagacatttatgccaaaaccaccacaagcagtttctcaagctggacccagtgccaagagggattcctccagccacaacatccccagtgggagaaaaagagatagaaaggactttagcagccctagccaccaaagaccacaacaatttttgtcaccacttcaaacatctacatcattggctgctgaagttccctacaatcttcatcaatgccaa

SEQ ID NO: 531092 - DNA, 411 bp, Homo sapiens
tgtggtgacatgtgcctgcaatcccatctactggggagcctgaggtgggaagattgcttgagcccgggaattagagaccagcttgggcaatatagtgagatgcctaactcaaaaataaaataagaaatttatctttttcagtattttatggctcaatatgtgttagctataagcagagatagacatttttataagattaataaagtttgaaaggattttataagaagtgagagatgaatggrttatgtattattatttatatattttttctattgtaatatgctatcaatacaatgtattaatatatttctaaaatttgattcacatctgtattctttaattaatgcttatagatcatggtgcagtgtttttgagaggttgctaaattcttacattatgtaggatttgcac

SEQ ID NO: 531093 - DNA, 521 bp, Homo sapiens
agaatacattatttttctgagtgaagctaagtgaacattagggcaagctaaacctgtgacccagctctcataaacatggtcaacacttgatctaactaacattgaaaactccttctgaatatatatatttwaaaaaactaagttatcattcattatgagaacactgttattttgtgtaaacttaagaataaaaaaagccaattaaatatccacaatgttaagaagcatttagcagagataataaaataagactagcataggataattaaaatttaaaagatgctagttaatttttagatggtaattatttaacttaagatacttttccacaagctctaaatatgtgtttatatttgacctaacaaagagaagattagctaagcgaattaacagatcacataaatatatgggagcatatttaatcggcttaagtcaacatcttttaaatataaccacctattaattttgattaataaatgattgatactatttctaaaaaatatatatacttgtcaactgga

SEQ ID NO: 531094 - DNA, 521 bp, Homo sapiens
agaatacattatttttctgagtgaagctaagtgaacattagggcaagctaaacctgtgacccagctctcataaacatggtcaacacttgatctaactaacattgaaaactccttctgaatatatatattttaaaaaactaagttatcattcattatragaacactgttattttgtgtaaacttaagaataaaaaaagccaattaaatatccacaatgttaagaagcatttagcagagataataaaataagactagcataggataattaaaatttaaaagatgctagttaatttttagatggtaattatttaacttaagatacttttccacaagctctaaatatgtgtttatatttgacctaacaaagagaagattagctaagcgaattaacagatcacataaatatatgggagcatatttaatcggcttaagtcaacatcttttaaatataaccacctattaattttgattaataaatgattgatactatttctaaaaaatatatatacttgtcaactgga

SEQ ID NO: 531095 - DNA, 521 bp, Homo sapiens
agaatacattatttttctgagtgaagctaagtgaacattagggcaagctaaacctgtgacccagctctcataaacatggtcaacacttgatctaactaacattgaaaactccttctgaatatatatattttaaaaaactaagttatcattcattatgagaacactgttattttgtgtaaacttaagaataaaaaaagccaattaaatatccacaatgttaagaagcatttagcagagataataaaatragactagcataggataattaaaatttaaaagatgctagttaatttttagatggtaattatttaacttaagatacttttccacaagctctaaatatgtgtttatatttgacctaacaaagagaagattagctaagcgaattaacagatcacataaatatatgggagcatatttaatcggcttaagtcaacatcttttaaatataaccacctattaattttgattaataaatgattgatactatttctaaaaaatatatatacttgtcaactgga

SEQ ID NO: 531096 - DNA, 521 bp, Homo sapiens
agaatacattatttttctgagtgaagctaagtgaacattagggcaagctaaacctgtgacccagctctcataaacatggtcaacacttgatctaactaacattgaaaactccttctgaatatatatattttaaaaaactaagttatcattcattatgagaacactgttattttgtgtaaacttaagaataaaaaaagccaattaaatatccacaatgttaagaagcatttagcagagataataaaataagactagcataggataattaaaatttaaaagatgctagttaatttttagatggtaattatttaacttaagatacttttccacaagctctaaatatgtgtttatmtttgacctaacaaagagaagattagctaagcgaattaacagatcacataaatatatgggagcatatttaatcggcttaagtcaacatcttttaaatataaccacctattaattttgattaataaatgattgatactatttctaaaaaatatatatacttgtcaactgga

SEQ ID NO: 531097 - DNA, 607 bp, Homo sapiens
ctttggctattatttcagaagcgctagtttggttgatcacatacttcatcgtgaaaaagtcaaaacccctagttgttttgctctcaataggccatggtggttacaattgcacctttgccactattgctgggcttggaagaaaaaagtgatacccaatgagtcctrtgagttccatacttatattttcctgcactcataatgtagcagcacacctagcttcttgtggtaattagagctaaaaatcctagcaagtaaattaactgcctgctgttccacaaaaggagtccaaactgataatacggtagtaataactacaatgtctccctgtgctcccctggtggaagcattttcaccagctcccaccactaggaacagaatcccagacatctgactcagcaaagcctaaggatttatggttttaaaacaaaaattccccaatggcttcactaaatgattggtttatatgttactgttagaaacaccacacatactatccttggattccatgttaatagaacatcatatattggatactggagaagtgtaaatagtggttcttcaaggatatcactcccacacatcagggagatttatctaagctagtgcc

SEQ ID NO: 531098 - DNA, 592 bp, Homo sapiens
gaagacaagcccaaaaactggggcttagcacaggaggttttttggctctgcccagaaaataatcaagggtgggctggtagtgtgagacagaaatttttattgaaacagtagtgtacagaagtagcagaggtactttgttttgcagatcagggctactctataggcagtgtgcccagagtagcagctcaggggcarttttgcagtcatattcatatccacttttaattacatgaaaattaagaggaagattagataggatagaaaaaaatggtaacttctagatcattgggtcattttcacagaaaggggcactaacctccaggtgttaccatgaaaatgatgaactgacatggcactggttgacatgtcttatcgagaaggtgtgtttgccacttctctgtttcagctagacttcaagttggtcaagtacaaaccccacctatggtgttgagtcttgcctcctaccttacttgaaaacgtagtcttgagcaaaaatacccaagacctctgcacacacaatgtacaaacacatgatacgcttttctcacagcagaagtgatcgctggcctctgcagtgaacatattcatatgg

SEQ ID NO: 531099 - DNA, 592 bp, Homo sapiens
gaagacaagcccaaaaactggggcttagcacaggaggttttttggctctgcccagaaaataatcaagggtgggctggtagtgtgagacagaaatttttattgaaacagtagtgtacagaagtagcagaggtactttgttttgcagatcagggctactctataggcagtgtgcccagagtagcagctcaggggcaattttgcagtcatattcatatccacttttaattacatgaaaattaagaggaagattagmtaggatagaaaaaaatggtaacttctagatcattgggtcattttcacagaaaggggcactaacctccaggtgttaccatgaaaatgatgaactgacatggcactggttgacatgtcttatcgagaaggtgtgtttgccacttctctgtttcagctagacttcaagttggtcaagtacaaaccccacctatggtgttgagtcttgcctcctaccttacttgaaaacgtagtcttgagcaaaaatacccaagacctctgcacacacaatgtacaaacacatgatacgcttttctcacagcagaagtgatcgctggcctctgcagtgaacatattcatatgg

SEQ ID NO: 531100 - DNA, 592 bp, Homo sapiens
gaagacaagcccaaaaactggggcttagcacaggaggttttttggctctgcccagaaaataatcaagggtgggctggtagtgtgagacagaaatttttattgaaacagtagtgtacagaagtagcagaggtactttgttttgcagatcagggctactctataggcagtgtgcccagagtagcagctcaggggcaattttgcagtcatattcatatccacttttaattacatgaaaattaagaggaagattagataggatagaaaaaaatggtaacttctagatcattgggtcattttcacagaaaggggcactaacctccaggtgttaccatgaaaatgatgaactgacatggcactggttgacatgtcttatcgagaaggtgtgtttgccacttctctgtttcagctagacttcaagttggtcaagtacaaaccccacctatggtgttgagtcttgcctcctaccttacttgaaaacgtagtcttgagcaaaaatacccaagacctctgcacacacaatgtacaaacacatgatacrcttttctcacagcagaagtgatcgctggcctctgcagtgaacatattcatatgg

SEQ ID NO: 531101 - DNA, 556 bp, Homo sapiens
cttatttgggagtcattagcatttttatgaaatttgaatttccttctactccttcatgcaaccctgagacttggatttctggtacatttctatagacttcctttatcttgctcagagacacaaggtctgataactctgaaaggcatgccaaatactagcaggaaaatttcacagtttgaatatcatgtgagttaccttgaaaggtaacaagaaaaagatctactaagttgagaagaattcagattcttgctgacgtaactgtcatttcagttcctcatatcaagtgttcagatatgcttttaygatccacaatttagcagtggaaacttcctctattaattattctccttctctcttctttctctttcttctctctctttctctctctctctctctctttctctctctctctccctccttcctctctccagataccacataatctatagctactgtcatgtatctcattcatttttattgaacttctctgaatagttgcctgcacacagaatttctctttccttacatttcgacagtccatatgttgcaagctggc

SEQ ID NO: 531102 - DNA, 613 bp, Homo sapiens
ccatctatactcaaataacaatagcaaatactacaaagatagacatcatttactggttacctattatgtgccaatcttgtgctagtgatttttaaagtctttattttaaaaatggagaaatccaacctctggaaggtgtattgatttgcaatgacatgagacttgaggagtgaacgggaatttagatacataaagtccaatctttattttacagatgaggaaactaaacccaaagaygctaagattttacaatggatgtcgcactatatagctccagtgagccgatttgaaatactgaagttggtttgcttgccctatcattaggcattctatcttactaatttcctgttgttatttatgcttatgcccatctttcctaatggatggttagagccttttggggacatggactatccattattaatccgtgaatccactttagtgattcttgttcaacttgccccatgatacttagtggtagtaagtcctatgatgcccaggtactacaccagggcagatatccagatgctgtggcagacagccaagtggctgctatgacaaagactgcaaagccaaatggaacatttgatgggggcatggcaggggccccaga

SEQ ID NO: 531103 - DNA, 567 bp, Homo sapiens
aggttaagtgaaatatgcctggcacagaataacaaatactgcatagtttctctgatatttggaatcttaaaatgttgatygttgaactcatagaagtagagagttagaatggtgattaccagaagctggaggtatagagagggcgttagggagatgttggtcaaaaaatacaaaacttcagttagatagaaagcgtaaattcaagagataaattatacaatgtggtgactacagttttcctttctaaaaagtgcaggcttttaggtctcacctaagagattctgatttagttgttaatggggaaaagaggttcaaggaatttgcgttttgaacaaaaggcccaaataattctgatataaacaaaagtttgacaactgtaatatatacagcttaacgttttccaaaagatgctaatggtctttcattaatttaaaaaaaaaggtaccagtgtcaaataaggaaccaccacatactattcttttcttggaaattcataatgcacattggcatattaaaagtcctgtggtaaagaaatcaatttcactcagcatttcccaaacttatttt

SEQ ID NO: 531104 - DNA, 657 bp, Homo sapiens
ccctgtgtcccccagcatctggtgagcttccatgagactggaaccaggggaggagaagtgggagcacacttgagggagtttgagctgcccagaaaggaagggcttcagagctaaaagtgtgtgcagagcccgtgagcagtgctcgtggactttggagtcagactaactggctaaatctctcctctactatttccccgctgggtgaccttgggcagctacttaattgtcccaaatctatttctttatctgtgagatggaagtaatttaaggcctgttctgagggctcagttagctaatctatagatagggcttggcacagttcctagaacatagtaagagctcagtaaatactactttttactgttaatcccaggtctgtggtcttaaggcctgggcagagaaagctaacatactctcgttgaaggcagcagagtatgttagctgacctcttcttgcctctggttgtggcttctgatgctgtggacatttttctgtccttctccttcttctgtccccatcccctttcttttgcttatttatgtctctgtgccactgaagagtaacttttagatgcctcactgtgcttgacaatcgagtsgttcctctaacctgggaagagagagcgttgtactctgtaatactcattttttggatttt

SEQ ID NO: 531105 - DNA, 638 bp, Homo sapiens
ctaatcagaattatcattagcaagcacgaatagcccgcagtgttttgttggcctttcactgaaaacaaaagcagactcagagagggctgttagcaatgcagtagttgtgaatgaagagctgattagggcagggggaggacagagattsgtgaggtggggaggacagacaggaggggacttgtttaccctaatgcacctgctaacccctgggtgaccttggtccaggaccttctcattctctctccaaggctccattttcttgtttctaacaatgaaagtgattataccaccacctaccttgtagagctgctgctgtgaaaaccaatgttaccacagagctgttctgttaccttatagcagggtgcttggaccataggggtttctcaggagtccacacacacacacgtgcatcagaatctcctggaggaagtacttcataagtacattcttgggcctcaccccagatacactaaatcagaattattaagattagtgcctagtaccaagcaccctcagtctgcatctcaaactttaatgtgcatgtgaatcaccagggatcttgctgaaatgcaagttctgattcagtacatctgagaggaggagactcgagaatgttcattttgctcccagatgatatc

SEQ ID NO: 531106 - DNA, 638 bp, Homo sapiens
ctaatcagaattatcattagcaagcacgaatagcccgcagtgttttgttggcctttcactgaaaacaaaagcagactcagagagggctgttagcaatgcagtagttgtgaatgaagagctgattagggcagggggaggacagagattcgtgaggtggggaggacagacaggaggggacttgtttaccctaatgcacctgctaacccctgggtgaccttggtccaggaccttctcmttctctctccaaggctccattttcttgtttctaacaatgaaagtgattataccaccacctaccttgtagagctgctgctgtgaaaaccaatgttaccacagagctgttctgttaccttatagcagggtgcttggaccataggggtttctcaggagtccacacacacacacgtgcatcagaatctcctggaggaagtacttcataagtacattcttgggcctcaccccagatacactaaatcagaattattaagattagtgcctagtaccaagcaccctcagtctgcatctcaaactttaatgtgcatgtgaatcaccagggatcttgctgaaatgcaagttctgattcagtacatctgagaggaggagactcgagaatgttcattttgctcccagatgatatc

SEQ ID NO: 531107 - DNA, 638 bp, Homo sapiens
ctaatcagaattatcattagcaagcacgaatagcccgcagtgttttgttggcctttcactgaaaacaaaagcagactcagagagggctgttagcaatgcagtagttgtgaatgaagagctgattagggcagggggaggacagagattcgtgaggtggggaggacagacaggaggggacttgtttaccctaatgcacctgctaacccctgggtgaccttggtccaggaccttctcattctctctccaaggctccattttcttgtttctaacaatgaaagtgattataccaccacctaccttgtagagctgctgctgtgaaaaccaatgttaccacagagctgttctgttaccttatagcagggtgcttggaccayaggggtttctcaggagtccacacacacacacgtgcatcagaatctcctggaggaagtacttcataagtacattcttgggcctcaccccagatacactaaatcagaattattaagattagtgcctagtaccaagcaccctcagtctgcatctcaaactttaatgtgcatgtgaatcaccagggatcttgctgaaatgcaagttctgattcagtacatctgagaggaggagactcgagaatgttcattttgctcccagatgatatc

SEQ ID NO: 531108 - DNA, 638 bp, Homo sapiens
ctaatcagaattatcattagcaagcacgaatagcccgcagtgttttgttggcctttcactgaaaacaaaagcagactcagagagggctgttagcaatgcagtagttgtgaatgaagagctgattagggcagggggaggacagagattcgtgaggtggggaggacagacaggaggggacttgtttaccctaatgcacctgctaacccctgggtgaccttggtccaggaccttctcattctctctccaaggctccattttcttgtttctaacaatgaaagtgattataccaccacctaccttgtagagctgctgctgtgaaaaccaatgttaccacagagctgttctgttaccttatagcagggtgcttggaccataggggtttctcaggagtccacacacacacacgtgcatcagaatctcctggaggaagtacttcrtaagtacattcttgggcctcaccccagatacactaaatcagaattattaagattagtgcctagtaccaagcaccctcagtctgcatctcaaactttaatgtgcatgtgaatcaccagggatcttgctgaaatgcaagttctgattcagtacatctgagaggaggagactcgagaatgttcattttgctcccagatgatatc

SEQ ID NO: 531109 - DNA, 542 bp, Homo sapiens
cagtatgtttgccataagtttctaacctttgcttacctgtatgtttttcttttgctttccttgctttgaagttctttaatgattttatttcctcattactttattaagaagatttaacttttgatttctagatgtgctccattaggtaccttggatgttagcagatcagaagactgccacagccaccagggatgaagggtgaggcagaaatgtacttgtagggcaagttttttaaggggtaatatacctgtggagttgtcagtactgcctttgacctgtttcagatcatctatctttgctcacagacccagatgagggtgcctttgtctgtgtgatcccacctgtcgttgacacaggtcccacctccgtggaccagggtggacactgacttgagacagtcacgtgacttgtatgtcacccaaaaggagccctgggccacctacagcccctctttcaggacttttgcactaagatccagagggaagttgttagtcgtgagccattgaatygaaaagtcacagggtccaggctgagggtgccag

SEQ ID NO: 531110 - DNA, 490 bp, Homo sapiens
gtaatttccaggggagaagtaagtacctgatttaaggcaggggctgtgggatcgaaaggagcagttgggcttgagattacacttctgagggattcatatttagatatgtggagagaatgaaaaagaacttcgagccgggtttgaaggtcttcctccaggaatggagtcagtagtgatagcactcactgagctatgtggcacaggattaggcacgtgtaggaagatacgatctcatttggggacatattaaatttgagatgctaatacattwtcaagatagagaagatctcttggcagtcagggaaaggagtctgaggcttggaaaagaggttaagattgaatatacaaatttgggagtttatatcactctgtccttcagattagcggatgggttcagagacgtgcacaagacagttttcaagatttgtattaatggaagggtctccagaccccatcagtgaaggtccacctgggtgtctgaaatactcta

SEQ ID NO: 531111 - DNA, 640 bp, Homo sapiens
tcagctgctcaaaatattccagagtaaagcagaagggaaaataaaagggaatggttgctttgttttaagatgtactattagccaggccctatgatagctggtttatctgtttaatccacatattcaaaaggcagatgtgattccttytacttttcatttgtgttaactaaggctcagaggtgttagctagctccagccatatagctattgggtggtgcagaacagtttcaaatgattttatctttctgccacagtgagttctttgcttggaacatatgcttttcaagatatatcaataattgaatttagggattacatgataggaaatgaggtttttccctcctatatgttttactatcaagataatggtagtaatgaaaaccccaagaagagacaggtctagaaaactagcaacagtcattttaagagttctgcctacatgtaagatataaaaatgatgtaagtggctataccttctctagtttctgccttttatttctacaatgttcattaataaaagtgcctgatccaactgataaatcagaaaacacctctcatttaaatacatccggtctctaatattgtagcagcttctcaagaaattttctgttcactgtaccatttaatattttaaattaac

SEQ ID NO: 531112 - DNA, 521 bp, Homo sapiens
ctcaaaatattccagagtaaagcagaagggaaaataaaagggaatggttgctttgttttaagatgtactattagccaggccctatgatagctggtttatctgtttaatccacatattcaaaaggcagatgtgattccttctacttttcatttgtgttaactaaggctcagaggtgttagctagctccagccatatagctattgggtggtgcagaacagtttcaaatgattttatctttctgccacagtgagttctttgcttggaacatatgcttttcaagatatatcaataattgaatttagggattacatgataggaaatgaggtttttccctcctatatgttttactatcaagataatggtagtaatgaaaaccccaagaagagacaggtctagaaaactagcaacagtcattttaagagttctgcctacatgtaagatataaaartgatgtaagtggctataccttctctagtttctgccttttatttctacaatgttcattaataaaagtgcctgat

SEQ ID NO: 531113 - DNA, 535 bp, Homo sapiens
ctggtacttataatatgctaagacagattattatttaacatcacttgctaactcaaagaacttccttgtcattcaaatataaacatttaattacatcatatttamattttaactattatcattcctcaaagaacatttttaaaaataattaccattctaaattgcttgatttatcctgagagttgtcagtgatggtgatgctgagggattatgagtactcacacaggtattatgaggtgtgtgtttagtttgtacacacacaaactaaagtttgtgaaaatatgaaactaagaaatcatgttgataacagtgattaggtgtgggtttccatagtattacattatggttaccctccagttggtgtattatctatccagattcacagagattttaacaaaggtgaaaaatgctttcctctaaagtataaatctgtccttaggaactaagatgaatttcggtgtgcccaaggacggctcagcaagtgcaatatgtgtacactgtgaggctgggatgctatgttttactgaagtgtgtc

SEQ ID NO: 531114 - DNA, 535 bp, Homo sapiens
ctggtacttataatatgctaagacagattattatttaacatcacttgctaactcaaagaacttccttgtcattcaaatataaacatttaattacatcatatttacattttaactattatcattyctcaaagaacatttttaaaaataattaccattctaaattgcttgatttatcctgagagttgtcagtgatggtgatgctgagggattatgagtactcacacaggtattatgaggtgtgtgtttagtttgtacacacacaaactaaagtttgtgaaaatatgaaactaagaaatcatgttgataacagtgattaggtgtgggtttccatagtattacattatggttaccctccagttggtgtattatctatccagattcacagagattttaacaaaggtgaaaaatgctttcctctaaagtataaatctgtccttaggaactaagatgaatttcggtgtgcccaaggacggctcagcaagtgcaatatgtgtacactgtgaggctgggatgctatgttttactgaagtgtgtc

SEQ ID NO: 531115 - DNA, 535 bp, Homo sapiens
ctggtacttataatatgctaagacagattattatttaacatcacttgctaactcaaagaacttccttgtcattcaaatataaacatttaattacatcatatttacattttaactattatcattcctcaaagaacatttttaaaaatarttaccattctaaattgcttgatttatcctgagagttgtcagtgatggtgatgctgagggattatgagtactcacacaggtattatgaggtgtgtgtttagtttgtacacacacaaactaaagtttgtgaaaatatgaaactaagaaatcatgttgataacagtgattaggtgtgggtttccatagtattacattatggttaccctccagttggtgtattatctatccagattcacagagattttaacaaaggtgaaaaatgctttcctctaaagtataaatctgtccttaggaactaagatgaatttcggtgtgcccaaggacggctcagcaagtgcaatatgtgtacactgtgaggctgggatgctatgttttactgaagtgtgtc

SEQ ID NO: 531116 - DNA, 621 bp, Homo sapiens
tgaacctgggaggtgaaggttgcagtgagctgagatcgcgccactgtactccagcctggacaacagtgggtggtaatggtggtggggtgggggctggggtagaaacttcatggaggagaataacatctttcagggcctcaaatatctttacaattttatatatgccacactcaatatacaatgaaaaataatcaaagatacaagaagataagtcatgacgaaagccaagaacaagagacattgaaaacaaatgatgtccacgtaatccagaaaacaattattagacaagaatttttaaatgactatgttgaaatacatgaaagaccaatgcggtagtctagtyctgctcctacaagatgacctacaaaatgcccactcctgttatatgtgcccacatcatctcctccccttgagtgcagcaagacctgtgaatatgatgggatagttacttcgtgattacattatggtttatggaacagttgaatttaagaaagggatattatccttggtgggcctgacctaattaggtggactggctgctgaaaataaataatttgaagtatgggagggatttgatgtgaggagatcctccattgctggctttaaagatggaggggacaa

SEQ ID NO: 531117 - DNA, 554 bp, Homo sapiens
ttatataatcacagcaaataactcaaatcttttacatcactagtaaactcaaaaaatatagcaaaaagcaataacattaaatttcattattgatctactagctttaactatttaatactagtacacttagttttgattactttgaaattgaagcaaaaacaataatcttttcttcttttaatgactttttcagttacaggaaagatgatattaaaagaagatatacaaccatagcttagctacaggtataaaattgttttaaagatatgtaattgtgctattgaattaaactgaaaacataaatatcaactcatgattttgaaaaaaaaatcttttttatgtttggttttggtaaaaggagagawaaataagtcagaagaacagaaaatacagaaataggcaaactttcccatattcaattaatttttgagcaaggggtcaaggtaattcaagagagcaataaataatcttttagaatgatgctggaactgccaaataattcatatggaaaacaaagaaacatgaatcttatctcgtattctcttatcatatgt

SEQ ID NO: 531118 - DNA, 554 bp, Homo sapiens
ttatataatcacagcaaataactcaaatcttttacatcactagtaaactcaaaaaatatagcaaaaagcaataacattaaatttcattattgatctactagctttaactatttaatactagtacacttagttttgattactttgaaattgaagcaaaaacaataatcttttcttcttttaatgactttttcagttacaggaaagatgatattaaaagaagatatacaaccatagcttagctacaggtataaaattgttttaaagatatgtaattgtgctattgaattaaactgaaaacataaatatcaactcatgattttgaaaaaaaaatcttttttatgtttggttttggtaaaaggagagataaataagtcagaagaacagaaaatacagaaataggcaaactttcccatattcaattaatttttgagcaaggggycaaggtaattcaagagagcaataaataatcttttagaatgatgctggaactgccaaataattcatatggaaaacaaagaaacatgaatcttatctcgtattctcttatcatatgt

SEQ ID NO: 531119 - DNA, 554 bp, Homo sapiens
ttatataatcacagcaaataactcaaatcttttacatcactagtaaactcaaaaaatatagcaaaaagcaataacattaaatttcattattgatctactagctttaactatttaatactagtacacttagttttgattactttgaaattgaagcaaaaacaataatcttttcttcttttaatgactttttcagttacaggaaagatgatattaaaagaagatatacaaccatagcttagctacaggtataaaattgttttaaagatatgtaattgtgctattgaattaaactgaaaacataaatatcaactcatgattttgaaaaaaaaatcttttttatgtttggttttggtaaaaggagagataaataagtcagaagaacagaaaatacagaaataggcaaactttcccatattcaattaatttttgagcaaggggtcaagrtaattcaagagagcaataaataatcttttagaatgatgctggaactgccaaataattcatatggaaaacaaagaaacatgaatcttatctcgtattctcttatcatatgt

SEQ ID NO: 531120 - DNA, 495 bp, Homo sapiens
agctggacacagtggctcacgcctgtaatcccagcactttgggaggcagaggtggttggatcacttgaggtcaggagttcgagaccagcctggccaacatcatgaaaccccatctgtactaaaaatacaaaaattagccaggcatggtggttcacgccgtgattccagctacttgggaggctgaggcatgagaatcacttgaacccaggaagcagaggttgcagtgagctgagatcattctactgcattccagcctgggcaacagagcaagagtctgcctcaaaaaaaaaaaaaaaagcaattacaaacttaattttgaaacaaaggaaacaatacaaagtttcacaaagaaatcaagaaagaaacaaataccaagttgaaaattaaaaaatatgctagcaataataaaatacaaactaaactgaacaacaaaatgggagagattacccaacctagagaagwaaatgaactgattaaaaaaaaaaaaaaacagtg

SEQ ID NO: 531121 - DNA, 584 bp, Homo sapiens
tactcgggaggctgaggcatgagaatggcatgaacctggggaggggaggggagatcaggtgagttaaactggatttgggggggaatgttggccaagtggcaggcagggtgggcctgggcctgagggaagccatggrcccctagacttgttcctgctgacagagtgccagtggctgggcaggagcatgagcaaggtgggtttgcatctgtcactggaggagcgctccgaatgcttctcaggacaaaagcaggaggctgccattgttcacaggatgtgagatctaatatggttcaggctggggcaaatcagtgaagatcaaaatccctcatcttccacaatgagggactagaatcaaaggtggatgtgctcccgcctgctcacaaagggtcctcacatgccccagggccctccgctggggcacagtccacattaggcgacacacaaacagcctgagggtgcccagtcactgagcagccccagacgctgtgccgttaccggcaggcagggccctgcaggagaccttcgcctgcccggaccagagaggctgcaggggtgctgtggggagagggccagatggccgcaac

SEQ ID NO: 531122 - DNA, 584 bp, Homo sapiens
tactcgggaggctgaggcatgagaatggcatgaacctggggaggggaggggagatcaggtgagttaaactggatttgggggggaatgttggccaagtggcaggcagggtgggcctgggcctgagggaagccatggacccctagacttgttcctgctgacagagtgccagtggctgggcaggagcatgagcaaggtgggtttgcatctgtcactggaggagcgctccgaatgcttctcaggacaaaagcaggaggctgccattgttcacaggatgtgagatctaatatggttcaggctggggcaaatcagtgaagatcaaaatccctcatcttccacaatgagggactagaatcaaaggtggatgtgctcccgcctgctcacaaagggtcctcacatgccccagggccctccgctggggcacagtccacattaggygacacacaaacagcctgagggtgcccagtcactgagcagccccagacgctgtgccgttaccggcaggcagggccctgcaggagaccttcgcctgcccggaccagagaggctgcaggggtgctgtggggagagggccagatggccgcaac

SEQ ID NO: 531123 - DNA, 584 bp, Homo sapiens
tactcgggaggctgaggcatgagaatggcatgaacctggggaggggaggggagatcaggtgagttaaactggatttgggggggaatgttggccaagtggcaggcagggtgggcctgggcctgagggaagccatggacccctagacttgttcctgctgacagagtgccagtggctgggcaggagcatgagcaaggtgggtttgcatctgtcactggaggagcgctccgaatgcttctcaggacaaaagcaggaggctgccattgttcacaggatgtgagatctaatatggttcaggctggggcaaatcagtgaagatcaaaatccctcatcttccacaatgagggactagaatcaaaggtggatgtgctcccgcctgctcacaaagggtcctcacatgccccagggccctccgctggggcacagtccacattaggcgacacacaaacagcctgagggtgcccagtcrctgagcagccccagacgctgtgccgttaccggcaggcagggccctgcaggagaccttcgcctgcccggaccagagaggctgcaggggtgctgtggggagagggccagatggccgcaac

SEQ ID NO: 531124 - DNA, 585 bp, Homo sapiens
gtgtggggcacaggtttccctggtgacccagggaagggatcaaattgctgtgtccactttgcaacaccagcatctaccaggtactgcgaggcagaagctcaaaaccatgcatgactttccttggctttttttttttttaataaacctctgttcaaaaataaacttaacacgtttttctgagcagcctgaacctgttcccaatttcttgtccacacaataaaaaatatacaagtgcattattttaagggtgactctagctgacctttctgtggggagaaaaacggcacctgcctggagccagaagcgtgttcggagagtttgatggcgtttgatgttaaggcagsggccacctgggtcggcctgtcatcgaatgacgttttcacaccagtccccaaaacaggagatctggaaaatctgacatccaaggttttagatcttggcttagaaaaacagacattccaagatgcctgaagtgtttaagtggctattgctaattggatagtgttgactgtggaagtaatggatcccaaattgaaatgggagattagatgattagacgtattctccagatgcttacaaacacaa

SEQ ID NO: 531125 - DNA, 353 bp, Homo sapiens
tgtcttgcaagaaatactaaaggaagttcttcaagtggagagaaaatgatgcaagtgagaaattcagatacacaataaagaagtaataaatgaaaaagaataaattaaagttaaaaactttttttattcttaktgatccataagataactgtttagtcacaagaaatgggtaattatagaatgtggacagatgaaattaacaatagcaatgtcataaggtacaggaggtacaatctggtagtatttttatgggatacctacactacgtgtgaagtaacaattttatttgaagatagacataaaatgtatataatcaattctaattaatttaaagatagacttaaaatgcatat

SEQ ID NO: 531126 - DNA, 353 bp, Homo sapiens
tgtcttgcaagaaatactaaaggaagttcttcaagtggagagaaaatgatgcaagtgagaaattcagatacacaataaagaagtaataaatgaaaaagaataaattaaagttaaaaactttttttattcttagtgatccataagataactgtttagtcacaagaaatgggtaattatagaatgtggacagatgaaattaacaatagcaatgtcataaggtacaggaggtacaatctggtagtatttttatgggatacctacactacgtgtgaagtaacaattttatttgaagatagayataaaatgtatataatcaattctaattaatttaaagatagacttaaaatgcatat

SEQ ID NO: 531127 - DNA, 592 bp, Homo sapiens
aaaaacaactaaatggagtctcagtcatgttaccaaaaacccaactgaagctccatgactaatttgacagccaatcttccccctgctttacatgtacatgggtaggacatcagaggcttggaaraagaggcaaacgggaggggacacctgccttaggccacagatctatgtaattcagcaaccttcaatcccctagcactcaaggggctctaagccactcctgtgagatttggggtgaaagaacagaataggacatttctattctgattgtggagacttttctgagttggtctttttttctaaatctttcaatagaaatcttgaagtttgcccattcctccaattaaacaagcaaaaaaagcagcaacctattcaggacttctttgaaccctattttagtatgcctttctagataactcccaatgtcttctgtgtttttggtcctctaatttatcttcatcaaacgtcataagatccaatattctgatctctttggtaaataaaacccttactcctaccaatcctgggattgtttctcttcaaacttggcctttccctgataattccattcttatctacttccactgggttc

SEQ ID NO: 531128 - DNA, 552 bp, Homo sapiens
atatgattgcatgtcagggctttcagctaaactgtgtagcgaaatcctctccatgctccctataaatacagcaatgaatacccattttaaataaagactttaaaagtctttgaaaggacaaaagttcaccasgtgtagcagagtgtaggaatcacctatagtcccaaccgagaaaaagttttaaccatttattaatattctgcaatttatttgctgccaatttttttctccagcaaattcttatctttagaattaaagaaaatttagtcacaatccatgttcactgaatattaaaactactattataaaccactgttatatacatcagttttaataactcaatattccagagtagagatggtataatttttggcaatttcaataatgagatacattgatttttttttcctcctcataaatctcttctattaacaagaggacaaagcacacctttctgcataaaggtttgcccacaattaggacaggtaatttgaagccacctttgtggccagatacagaagagtgcatattgggtaattcctctcatttgaa

SEQ ID NO: 531129 - DNA, 284 bp, Homo sapiens
tttgttttcccgtaaccatttgtccttttaacttttttgccttttttactcagctgattgcttcagctaagctcccyctcccctttctaaaccaaagtataaaagaaaatctagccccttctctggggccaagagaattttgagcactaagggtctctcggttgccggctaataaaggactcctgaattcgtctcatagtgtggcatttaactacaactcgctcggttacaacattatgatatttccacaatacatacattggcatgccgtggtcatatccagg

SEQ ID NO: 531130 - DNA, 284 bp, Homo sapiens
tttgttttcccgtaaccatttgtccttttaacttttttgccttttttactcagctgattgcttcagctaagctccccctcccctttctaaaccaaagtataaaagaaaatctagccccttctcyggggccaagagaattttgagcactaagggtctctcggttgccggctaataaaggactcctgaattcgtctcatagtgtggcatttaactacaactcgctcggttacaacattatgatatttccacaatacatacattggcatgccgtggtcatatccagg

SEQ ID NO: 531131 - DNA, 284 bp, Homo sapiens
tttgttttcccgtaaccatttgtccttttaacttttttgccttttttactcagctgattgcttcagctaagctccccctcccctttctaaaccaaagtataaaagaaaatctagccccttctctggggccaagagaattttgagcactaagggtctctcggttgccggctaataaaggactcctgaattcgtctcatagtgtggcakttaactacaactcgctcggttacaacattatgatatttccacaatacatacattggcatgccgtggtcatatccagg

SEQ ID NO: 531132 - DNA, 284 bp, Homo sapiens
tttgttttcccgtaaccatttgtccttttaacttttttgccttttttactcagctgattgcttcagctaagctccccctcccctttctaaaccaaagtataaaagaaaatctagccccttctctggggccaagagaattttgagcactaagggtctctcggttgccggctaataaaggactcctgaattcgtctcatagtgtggcatttaactacaactcgctcggttacaacattatgatatttccacaatacatacatyggcatgccgtggtcatatccagg

SEQ ID NO: 531133 - DNA, 443 bp, Homo sapiens
tattgaacttcttaaccctttctagtaggttttaacctctgtatcttatatgcttttccactaaatatgctgtattaaacataaataggagttgaaaatccttttatcttttcaatgactctgctttaagttgctttctttgaagaatattaatgttagcttatccccacatgacaattaattgctattcccacatacygtgggttcaacagcttttttccttttttatttccagtgtattttgatgtttttatttttagttggtatggagagagggagtgaagatagttttaagtggatacacttttcctttaatgaaggcaagctgtaggtgggtgataaagagaaaagatgaaattggaaatcatcattctcagtaaactatcgcaagaacaaaaaaccaaacaccgcatattctcactcataggtgggaattgaacaat

SEQ ID NO: 531134 - DNA, 599 bp, Homo sapiens
tattatcattgtcatttttattattttactactttattcagtgcttactgtgtgctagatgcccactggaagcttataattatgatttattatatattaattatgtgccagacrtatgtgatgaggaatgaaagttttgaaaaaaagtaggtatgattcaaggtaagcacgcagagtgagaagaatttttctaggtaaagaagcagaagaataatgtttggcagaaggaacacgcaacaagattgtgtgtttgccagaagaacatctaatgagattgcctgtttggcaggaagagcagcaagtgcaaaacacaagatgctgagtgaactttgcagggtttctgagcagttcacttttgctagtaccaaaagtgtgagacaccagaggttgggaataaggtgaatacttagctaaggcaagtttatgatagacttttttaatactatagaaatgagtaggtcttaccctgtgggccatgggaaatttaccaggtacaatgctttggactgtaaatactagatgagcagtggctaaaacagtaggaaccagagttgttttggttgttcagtgatatcctaggatcccacttgtccctcttt

SEQ ID NO: 531135 - DNA, 546 bp, Homo sapiens
tcctgcttccggtagtctctggagtacccacaatctaatcttctggagtgcaaatattgtaaatgcaactgaagtgaattcactcaaatttccttttcagaaactccaaagttggctggctatmttctttcttgctgcgtttcatgcctcacaatccctcttccttagccaaaataatgtctacatctgtggtcttgattcttcccattcaacatcttttaaaatcaattttcccaacactttctttctctttgattagggtagtatctgacatctgtaattactatttctttacctcttttttcccctctggtcagaaacatactcagaaataaaagcaatataatgctttctcttgaccctgctatgtcttgaacttctatccaactgcccttcttccagatttttccaaaggaaaggctgttcccttgctacttaagagtgaggtccaaggaccaccagcaacagcatcacttgagaatttattaaaaatgccagaatcccaagtctgctgagtcacagcgtgcattgttaacaaggtattca

SEQ ID NO: 531136 - DNA, 584 bp, Homo sapiens
agaagcttgtcacagattctttgaatttcctcaatggttctgaaacaggagtgttcccttgacccctttgcaggacttgtgacatgagtgacttgtttacttgtttaccatgctgaatcccttatggaaggaagcacatgagtggatgggtgtgggaaccagagcaaatgaatgtggaactggcctgtggctcctctccggcgggagcaagctttgtgtgggttctgcagcagtgtcaaagtgtgttacaatagtcttttagctctgcggtctgggaggggctgtctgcgacccccaragccccagagggcatgtgttacaatcagtgctcctttaacatttgctgtctgtggatggctaagtgttaaccagctcagtggaaggtcagggtgacagccttttacactttgctgtcttggtacctgagttctgatccagcgtccaggaagaatcaggtcacatgaacaaattgaaggtggtgaatgtggaggactttattgagtggtaaaagtgggcctcagtgggaaagggagctggaaaggggatggagtgggaagataatcttcccctggagcccgggtgtc

SEQ ID NO: 531137 - DNA, 508 bp, Homo sapiens
ttgggattcaaggtctcagacctctcagcaggggctttttatggaaagaattgataggggaagacagtagacaaaagatattgaaaaatcatgtttgggatttagttgatatatgaaataatcttatttaactttcatttactagatgaggaaactgaggcctagaaaaccaagtaatttgtggagggggcatggctaattagtgggaaaccctggcctggatccatgatgttttgctkctctttttgatgctggagcagagtctcctgcagtcacaagaaagaactatggaacgatgtgtttgcagcagggcaggaagccccgttaagtaaaatcccacggggctccagggtccctcagcatccacagggggcactcgagtccatgacaaagatgccttcagttctgtccacactacgcaagaacaggctgcttcaccctcttgcactggagggctgccctcttcctggtggtttgtccttgcccagtgcccctccttgctatccag

SEQ ID NO: 531138 - DNA, 652 bp, Homo sapiens
gctgcagtacacagtggagcatgtgcagaggagactccatcaaccctgggcaacttttctgacctcaagggtcaggcttgccatagaacttaggcttttgctgattcttcctgctcctctgtgagtgataaatttggtttatctgacttactgtgtgagcattcttctgtttctggcagcttggtttatataaaaaaacctcttgctagacctatgaatctatgcaatgtggaagtgtcatagaggtaaataggaagcaacttaactgagttgaaaactaacatacacaacatggggccactgcaccaaggggcaaaatgagcyggccaaaaaggccacatgtgacaatgccagccacactgtggaagaagaaggatgctgaaactcagagagatctgaagatcttatccaagccaacaggaggcagggaattccactgtactctgattcaagagtacaagcttcatctcagagaaaagcaatgcaatggcctcagcgatcagaccagagagaccctctgccacagagaaagcagagatccagagaacagcatgaagacaataggagacttgagactcactttcactttgccttgaggccacagaaagcccaaagcatctgaatatcttcttggaggcattttcctaaaata

SEQ ID NO: 531139 - DNA, 547 bp, Homo sapiens
ggctaaaacctgcaaagccacaggtgcactgccctagtagaggttttccacgaggctttgyctctgcagcaggctactcccccttcctactaccccccaccctcccaccaccctactgccaacccactcctcccaatcctacccatcccttttaccttccaccgccaccaacttcctgtccataattaagtcacttgcttcaacattagggattacaattccacatgagtttcatagggacacacaggaaaaccatataattctgaccctgatattccagaatctcatgtccttatcacagagcaaaataccatcatgacctctcaaaagtttgcaaaagtcttaactcattccaaatgtaaaaaattcagtctcatctgagacaaggccacagtcccttctgtctatgagtccctgaatttaaaacggagttcttttctttcaaggtacaatgatggtagagacattgtgtaagctttctcagtccaaagggaagaaatttcccagaaaaataatacaaatgggcctacaggcccaatgcaagtcc

SEQ ID NO: 531140 - DNA, 470 bp, Homo sapiens
accttccaccagcccccacctttaacatttcccattaaaattccacatgagttttggtagagacacagagccaaaacatattattctgcccctggtcccccaaatctcatgtctttttcatattgcaaaatgcaatgatgccttccctagagtcccctaaatctcaaytcattccagcctttactcaaatatccaaagcccaaagtctcttctgagacaaggctgcagtctcttctgccctgagactctgaaatacacagcaaattaactacttccaaggtacaatgactgtactggcattggttaagcattcccaggcaaaaagaagaaatttgccagaaagaagcataaaacacagatgggacttacaaactccctgcaagtcaaaagcccagcagaccagtcatccatcatacaccaccaaatcacctttttggaatctatgtccacatccagagcacagggtgatg

SEQ ID NO: 531141 - DNA, 470 bp, Homo sapiens
accttccaccagcccccacctttaacatttcccattaaaattccacatgagttttggtagagacacagagccaaaacatattattctgcccctggtcccccaaatctcatgtctttttcatattgcaaaatgcaatgatgccttccctagagtcccctaaatctcaattcattccagcctttactcaaatatccaaagcccaaagtctcttctgagacaaggctgcagtctcttctgccctgagactctgaaatacacagcaaattaactacttccaaggtacaatgactgtactggcattggttaagcattcccaggcaaaaagaagaaatttgccagaaagaagcataaaacacagatgggacttamaaactccctgcaagtcaaaagcccagcagaccagtcatccatcatacaccaccaaatcacctttttggaatctatgtccacatccagagcacagggtgatg

SEQ ID NO: 531142 - DNA, 470 bp, Homo sapiens
accttccaccagcccccacctttaacatttcccattaaaattccacatgagttttggtagagacacagagccaaaacatattattctgcccctggtcccccaaatctcatgtctttttcatattgcaaaatgcaatgatgccttccctagagtcccctaaatctcaattcattccagcctttactcaaatatccaaagcccaaagtctcttctgagacaaggctgcagtctcttctgccctgagactctgaaatacacagcaaattaactacttccaaggtacaatgactgtactggcattggttaagcattcccaggcaaaaagaagaaatttgccagaaagaagcataaaacacagatgggacttacaaactccctgcaagtcaaaagcccagcagaccagtcatccatcatacaccaccaaatcacctttttggaatctatgyccacatccagagcacagggtgatg

SEQ ID NO: 531143 - DNA, 640 bp, Homo sapiens
ctaagaccgtatctagctccttttagtatttccacagcatgccatggagatacatgtttctgattatatatgatacatggaaattatatgttgttgaatgagtgattgagtaaatgtgtactagggcagctaatcataaatatttctactattgctaaaatgactggatttatccattccttctgagagtttatactgattgcttatattgtatcaaataccgtaacygagggcaatgtttactcaaactaatagcaccattcaaatttatgcaaacaataacactatatctttaaaatgttttcactaaaagctgcataaagagtgtattcaacaacaatagaataattttacaatcttttttcttgcttaatggccatttgtgccttctgacatgctgctagccattcaaaggtcacactaccttgaagttgaagatcaagacaaatgattagactcataaaagacaaatcacgtctttctggacaggtgattattaataattaattagcatttaaacatgtattatttaagttctttttaagttataaagtctttgatttgctaaacagtttaaataatgaataaaacataaaataataatagttaccatttatttaattccataataactgatttg

SEQ ID NO: 531144 - DNA, 640 bp, Homo sapiens
ctaagaccgtatctagctccttttagtatttccacagcatgccatggagatacatgtttctgattatatatgatacatggaaattatatgttgttgaatgagtgattgagtaaatgtgtactagggcagctaatcataaatatttctactattgctaaaatgactggatttatccattccttctgagagtttatactgattgcttatattgtatcaaataccgtaactgagggcaatgtttactcaaactaatagcaccattcaaatttatgcaaacaataacactatatctttaaaatgttttcactaaaagctgcataaagagtgtattcaacaacaatagaataattttacaatcttttttcttgcttaatggccatttgtgccttctgacatgctgctagccattcaaaggtcacactaccttgaagttgaagatcaagacaaatgattagactcataaaagacaaatcacktctttctggacaggtgattattaataattaattagcatttaaacatgtattatttaagttctttttaagttataaagtctttgatttgctaaacagtttaaataatgaataaaacataaaataataatagttaccatttatttaattccataataactgatttg

SEQ ID NO: 531145 - DNA, 383 bp, Homo sapiens
agaagcaacctgtgagaagggttatagacagacgtgcgaaagaaggtgtttaagaagtgttgcaactttcattttcacattctcaatgttctcactckggtttttgtgtgaccccagactgatatgtcttccaaagcagtacccaatggctggaattcgtgtacattatcatttattattttaaatgttttcagagttattgtgatctcttctgccacaccaaatttatgcagagtccttggcaaagaatgtagtggacttgcccacattccactccattccctgtcctctgaccttcagcacagaccacagaacaatggttgagaacgcagactatgggagccagactgtctggtttccggtgtccgtgaccatgagcagac

SEQ ID NO: 531146 - DNA, 383 bp, Homo sapiens
agaagcaacctgtgagaagggttatagacagacgtgcgaaagaaggtgtttaagaagtgttgcaactttcattttcacattctcaatgttctcactctggtttttgtgtgaccccagactgatatgtcttccaaagcagtacccaatggctggaattcgtgtacattatcatttattattttaaatgttttcagagttattgtgatctcttctgccacaccaaatttatgcagagtccttggcaaagaatrtagtggacttgcccacattccactccattccctgtcctctgaccttcagcacagaccacagaacaatggttgagaacgcagactatgggagccagactgtctggtttccggtgtccgtgaccatgagcagac

SEQ ID NO: 531147 - DNA, 468 bp, Homo sapiens
cagctactcatcaggactgaattaggaatccaacccattaactggctcsgtgaccctggacaattcattttaccttttgagactcctggtgcttcccatataaaatgaggtgactacattctttctaagatactttccagttataaaactctatgatgcttaattaaggaagcaagtaaaggaaggaagttatatgaatgtgtggggaaccgtgatacccaaattcacagcatagactgccaaaatccttggcaaaactattgatgtgctggaaaaccagaggggagcattatgaaaaagcaggcagagaccagagagaaatctgctccttagagctagagcaacgtggatccaaatttgtgagctacatgcttttctttttttctttaactgaattttccaattatgtgcaacctgggtggtaaaaagcctgaagtgtccaagtttaaagacaaacctgacagaaca

SEQ ID NO: 531148 - DNA, 568 bp, Homo sapiens
ctgcctctcttctctctgccttattccaaattatgtacaccaggatgatttttaatgcaaatgaataccaaattttagctatcatccaattcttccacgatcattcaatccctgtttagttcatagaatcataacagcttggacttgaaagtgacttaaatagcatctagtgtaatctttcacctaaaaggcatggagtcttccagattatggttgaatatttcccatactgagaactctacttcacaaagcaacccactataatttttaaacttgatcttcaataatagcttaaaatcaattcctgtaattatcaaaaccttttgcatatctaaaaccatctatattaccatgctttaaatattcacatgtgaagacttcccactatcttctgttgtgtctcatgtgataaatttttcagatccttcaccactctactaattttcacttttaaagtagtgtgttttaaaataagttggacatttttccctgtaaaatackattgtttcttgctttcctaattctaataaaggcattcaccttctcctggccacacaagaaagtacag

SEQ ID NO: 531149 - DNA, 589 bp, Homo sapiens
cacctgtgttcactgtgggcttagccctgcagctccacttgccgatttgcatttctctgctgattttcagtcattgagttttcattctgttcttaagcctggatttgtcttttggatttttttattcttatactttatttacattgccatgtgtttgaagtggaaataatattttaaattatgaatgctgtaccatcttgactggaattctccttttgtacaaatgaaatctataaatgttttcttaaaaaggactgtttaattgggatctcctaaagtatagcttctttaagtaaaaaaattgtatatttaaccggatggtaagtgggactttgcctggtgaaccagaatttttagtaagcctccaaatctgaaacaatgttatgggtgcccacacattctaaagacattactagatcctcagattggacaccagagaaagaaacctggctgtttcatcttgtttgttttagagttaaaaatatataatttattttcaaagtaattataagaaaamcaatgatcacttctcaactattacaaaaaattatgacagggtttcagaaaaggtgttttttttttttaattg

SEQ ID NO: 531150 - DNA, 611 bp, Homo sapiens
tgtatataaaaaactttttgtttaagatggaatctcgctctgtcgcccaggctggagtgcagtggtgtgatctcagctcactgcaacccctgcctcctggattcaagcaattatcctgcctcagcctccggagtagctgggattacaggtgcccaccaccatgcccagcaaatattttttgtatttttagtagagacagggtttcaccatgttggccaggctggtcttgaactcctgacctcaagtgatctgctcacctaggcctcccaaagtgctaggattacaggcgtgagccaccgtgcctgacctaaagtaatattttaatacaatgtarcatccttcccaaatatactacagtctaatttaaatttatattgaacattaggaaatataaagtttgaaattactcatttttcaaatgaagaaattaaatggataaaagtctaatgattttatcaacaccacaggactagctagtagactgaacacaggaatggaagttgctgtcttttagcccagtgttcttgcttctaactcataaactcaatttgctttttggaagactcttctaatggttatgaaaatttggaaatgaatttgactatatccag

SEQ ID NO: 531151 - DNA, 401 bp, Homo sapiens
cataaaatcttttggaaaacatgtgttaatacatctctgtggcatacttgttttatttcttatatttcttaaattgcttaaaattactgttttgctcaccaagggcatcaatttattcattttactactgaccaaacaaaaatattgcataaatgtataataatgcaacaatgtaaccctgattcatttagtttcctaatcataatttcaagaacatatctacagacagcaaatacatacctacatttgtttcctggctctttttaatatgaaattccaatagatgtctatgatcctgaccatgtgarcactgacattaaaaaccaagatggaatacccataaatttttcacatttgtctactacttataaacaggcaattctggttgcctgtgtttgtgg

SEQ ID NO: 531152 - DNA, 613 bp, Homo sapiens
ttgctccaaataccacaacaaaataccacatactgggtggtttaaacaacaaaaaaaccattttcttacatttctagaggctaaaagtccaagatcaaggcactggcaaggttagtgtcctctgaggactccctcctaggtttgcaggtggccaccttcttgccacgttctcaggyggtcatctctaggtacacgtgcacaggcaccccgttctctctccactctccactctctgtatgtgtcttgatcttctcttcttataaaaataacagttagattgaattaggaccctctctgaaagcctatttaacctaattacctctttaaaggtcctgtctctcacattcataggatactgggggtcagaacctcgacataggaattctaggaaacacaatccagcccataataacatccaaatattctaatcactcaagaagggctgatgccgtttgactccttcctctctttacctctttccattcaaataggttttgtacagattctactatgtcacctttttgtactctccatttctactctaatggagatttcttatttggactaattcctacagcatgttaacaaactctccaatactgccttacacttt

SEQ ID NO: 531153 - DNA, 633 bp, Homo sapiens
ctccctttagtgataccccctatattcctttcttttyttcattgcttagcaatagcactgccagggaaatggaaacaaacaaaaaaggagaaaatcaacccccgtttatttttatgtacaataaagttttcatgaaagtgaaatcataatgcctaatggtgacaagaatgctttttagtaatgagagactttgtaaacctttcaagtgctttaaaaaacgatatataatatttgtacctattttgggggtacttgtgatattttgatacatgtatactatgtgaaatcaaattagggtaattgggggtatccatcacctcaaatatatatcttctctttgtgtggggaacataataattcttctagctattttgaaatgtacaataaattatggttaactataatttccctattctactattggatactacaacttattccatctaactgtacctgtcaagtgtttttgaataagaaacatttaactgacttttttttaaagagatggggtcttgctgtgttgcgcgggatgaatttgaactgaactccctagtagctgggactaaaggcacatacttttgagtttggcttaactgactttgaaagctataaaagtagggataggtaagatca

SEQ ID NO: 531154 - DNA, 633 bp, Homo sapiens
ctccctttagtgataccccctatattcctttctttttttcattgcttagcaatagcactgccagggaaatggaaacaaacaaaaaaggagaaaatcaacccccgtttatttttatgtacaataaagttttcatgaaagtgaaatcataatgcctaatggtgacaagaatgctttttagtaatgagagactttgtaaacctttcaagtgctttaaaaaacgatatataatatttgtacctattttgggggtacttgtgatattttgatacatgtatactatgtgaaatcaaattagggtaattgggrgtatccatcacctcaaatatatatcttctctttgtgtggggaacataataattcttctagctattttgaaatgtacaataaattatggttaactataatttccctattctactattggatactacaacttattccatctaactgtacctgtcaagtgtttttgaataagaaacatttaactgacttttttttaaagagatggggtcttgctgtgttgcgcgggatgaatttgaactgaactccctagtagctgggactaaaggcacatacttttgagtttggcttaactgactttgaaagctataaaagtagggataggtaagatca

SEQ ID NO: 531155 - DNA, 540 bp, Homo sapiens
cccagctgctctaggctgtattcacaacaaaggaagcttgactttgtgcagccctccaggctgttaactctcaggagcccatycatctacacagacatatggataggaacaacgtgggggtggaggtggaaaaaaacagtgaaaaagaaaaaaatgctaacatatttcaatttcataaagagtcaagtgttatgtcacttaacgttttcttccaatcttttttgatactaaaaaataaaagcaaaaaattatggaagtgtataaagtagaaatcaaaagcaccccatcctacttaatcattccctaattccactccgcagaagtaacggttttcaaccgttcaaaatctttccttccagatatttttagaatgcaaatatttgcgcttatatacatgtgagcatactgacttgttttacctagattatatcatactatacatgcaaatttgccttgtgtttactttgcttaaatgattgcaagattgttctaccagtacataaaatctgccttcctcattctttctaagagctgcagttt

SEQ ID NO: 531156 - DNA, 595 bp, Homo sapiens
tcaggaggcggaggttacagtaagcggagatcacaccactgcactccagcctgggtgacagagtaagatcctgtctcaaaaaaaaaaaaaagttaaagggtgagtgtaaaaggaaaggctgggtgtttggggaatcaaatagaaaataaggaaattgtctaacacttcattggcaagtctagaaataaaaacgagactgttttttctgtttctttcctcctttgtattgtccttaggttcctctctgaaggcagaaatgtcaaagatgctttgctaaaacccaaaaagttgctatgcaacctacatttaaaattatttcttcctacctagaatcccagggatctataattttgccatctaagagagaaacatgccacgtcagaaggaaggagaatatgacagcagattttggaatcaattgtcaatgtagtttgctagcttatcatggtttcttagacactgtgtgagcaaatctcacaaatggaactgatttaccataaaaatgtgcctaatttccattaaatcttgttcgttgctttactgaggcactgaagttaccaatgttycactggttgacctgcggggctatctctag

SEQ ID NO: 531157 - DNA, 591 bp, Homo sapiens
tcacagctgccttttggcttcccttttttttttttttttttgaaacagaatgttgctctgtcgccaggctggagtgcagtgttgtgatcttggctcactgcaacctccgcctcctgggttcaagtgattctcctgcctagcctcccgagtagctgggactacaggtgcctggcaccatgtccagctaatttttgtatttttagtagagatgggktttcactacgttggccaggatggtctccatctcttgacctcgtgatccgcccgcctcggcctcccagagtgttgggattacaggcgtgagccactgcacctgatctggcttcactttcttgttgggtctggggggtgcctggccaagcaagtgttatcttatcacctcagttcaccatacatatgcttatcactttgaggggtcagcaatttccgatttcactctgggctctcacttgtcacaagtgagtccattttgagacatgttaaatcacattatactaatgtgtatagtataattagtataatgtgatttaactataatgtgtcaatgaagagtctaactgtaaaatagttgaagagatttattctgagcta

SEQ ID NO: 531158 - DNA, 591 bp, Homo sapiens
tcacagctgccttttggcttcccttttttttttttttttttgaaacagaatgttgctctgtcgccaggctggagtgcagtgttgtgatcttggctcactgcaacctccgcctcctgggttcaagtgattctcctgcctagcctcccgagtagctgggactacaggtgcctggcaccatgtccagctaatttttgtatttttagtagagatgggttttcactacgttggccaggatggtctccatctcttgacctcgtgatccgcccgcctcggcctcccagagtgttgggattacaggcgtgagccactgcacctgatctggcttcactttcttgttgggtctggggggtgcctggccaagcaagtgttatcttatcacctcagttcaccatacatatgcttrtcactttgaggggtcagcaatttccgatttcactctgggctctcacttgtcacaagtgagtccattttgagacatgttaaatcacattatactaatgtgtatagtataattagtataatgtgatttaactataatgtgtcaatgaagagtctaactgtaaaatagttgaagagatttattctgagcta

SEQ ID NO: 531159 - DNA, 591 bp, Homo sapiens
tcacagctgccttttggcttcccttttttttttttttttttgaaacagaatgttgctctgtcgccaggctggagtgcagtgttgtgatcttggctcactgcaacctccgcctcctgggttcaagtgattctcctgcctagcctcccgagtagctgggactacaggtgcctggcaccatgtccagctaatttttgtatttttagtagagatgggttttcactacgttggccaggatggtctccatctcttgacctcgtgatccgcccgcctcggcctcccagagtgttgggattacaggcgtgagccactgcacctgatctggcttcactttcttgttgggtctggggggtgcctggccaagcaagtgttatcttatcacctcagttcaccatacatatgcttatcactttgaggggtcagcaatttcygatttcactctgggctctcacttgtcacaagtgagtccattttgagacatgttaaatcacattatactaatgtgtatagtataattagtataatgtgatttaactataatgtgtcaatgaagagtctaactgtaaaatagttgaagagatttattctgagcta

SEQ ID NO: 531160 - DNA, 522 bp, Homo sapiens
acatgaggttatacaatcctaaaagaacaatatttcatmtttggtttttagtgaaccaattatttccatggttataaggaagcttcctatatttctaaataaagcaccttaaacacaaaatacccaaaatcgaattcatgttttttctcttggaattttctctctctttagagaggaatcgttttagttgccaataccattatcctcctagtcacccaaactggaatttcgtttctgtatagaactgaggacaaaactttctctgccatctctttccatggaagagtatcctgagtttctaggtaattcatgttaaagttgttaccatttgcaactatgtatctgtgtaaaaattatcttgccactatacaagaaaaaaaactcagatgtaaaagaattgcaatgctgaggctagtataagatacaattgccatccataatctctgtatcaaatttgcattcaaacatcataatgttcattgctttaatttataaaataaatttatcctaattaaatttcct

SEQ ID NO: 531161 - DNA, 522 bp, Homo sapiens
acatgaggttatacaatcctaaaagaacaatatttcatctttggtttttagtgaaccaattatttccatggttataaggaagcttcctatatttctaaataaagcaccttaaacacaaaatacccaaaatcgaattcatgttttttctcttggaattttctctctctttagagaggaatcgttttagttgccaataccattatcctcctagtcacccaaactggaatttcgtttctgtatagaactgaggacaaaactttctctgccatctctttccatggaasagtatcctgagtttctaggtaattcatgttaaagttgttaccatttgcaactatgtatctgtgtaaaaattatcttgccactatacaagaaaaaaaactcagatgtaaaagaattgcaatgctgaggctagtataagatacaattgccatccataatctctgtatcaaatttgcattcaaacatcataatgttcattgctttaatttataaaataaatttatcctaattaaatttcct

SEQ ID NO: 531162 - DNA, 494 bp, Homo sapiens
ataggaagccctcagtaagtgttacctatttttattatactattttccaactatataaatttctacataagtgggatccaattatgtgtacttcaaggcaaattgcattttttctctaacaatctaccttggtcatacttttacatcaccaccaccattttatacagttgtatctcgattgctttctatggcgtgaaagtagttttataattcatttattcaattcattattgatgtgcatataggctaatttcaatttgttgttataaataatgctacaaagaacatttttcattatgaatttttatttactgtcacatccggggctatgcaatgtatcatgycctaatttggaaagggattttgtattaggcaggtttctccagagaaacagaatcaataggatgtatatacacacaaggaaacttgtttataaagaaattgtcttacacaattatgggggttggcaagtccaaaatctgcagggtagacca

SEQ ID NO: 531163 - DNA, 612 bp, Homo sapiens
ctgccttgcttccctcactgtgctgcaatcttaagcttctgaacttcagagggtctctgttgctaccctgctggattctagaattttcccatagaggctctgtttgacatttagttatgtacttgatgtttaggtctttttttgtggaggaggcaagtctgctgtgtgtctcaagtcagtcatcttgakgatatctctccccaaataatgaattttgaatgcaataagtcaagataaaatttctaagactactataaacacaaggatgcaaggagattctccgccagtacagtcccatattagagatatgaaactattataaatttcacttgaggaattaagtagaaaaaatatgaaaaagtaaaaagagccaatgactgaaaggtatataatcacctaagtgggaaaaactgatcagaaaatattaaaaagtaaaatgatccagtgactaggaggtatgtaataacataagtgggaaaaactgatcagaaattatggagtggtaatcagtaaaagtcatggaaatttagaaccaaagcattttgttggaagaattcaatcagtgtattttccaggctactgtatctccaacagctataatattttatcact

SEQ ID NO: 531164 - DNA, 563 bp, Homo sapiens
tgtgttttcagttctctgctgtataatttggcatggaaagatgctcttgggccagcctgatcctttaggcaattctgtgagcagctagaagagaacttgtacatcccaaaactctattatctgccctgactcccttctttcatttagattgattgatttatcaacaattttctcttyttagttttgattagtgatatttagaattattgtaaaacagaagatgcttcatcttaactaaaagtgttgacataatgagataaaatatatagtggaataataattaaataacgagagccctactaaattcaattacaagtattgttgttttgtattttagctcaccaacttaaaatagcagctagtgtgcagtttttaccaatgccttcctaatttaccatacaaagacaaatcctctcagattaaatgtctataaagtatgtctgggagaatttctaggttgaactcatgaggtcaataatttatttatgaatcttctgtagcttcttggatgttgtagggacatatagtaaaaacaacagacaatagcaaaagtatgcctttgc

SEQ ID NO: 531165 - DNA, 572 bp, Homo sapiens
cctctaaactaaatgtgcaatgttcttaatatttcgagtttagagattgattgtagtttttcttaagagcatgatggaaggwctaatttgaaaaatataaatttagtagacaattttgctcttttatgtaaccataaaaatggaaaatgcagagatatgcaagtttattacaaatctatacagcaaataaacagaaaataaagttatctgtgaagagtatatataagagtatatataaacttagtttctgaaagaaggaaactcaagtttagggattactttaggaattccctccccaccaaaaaaaaaaaaaaaaccactttctttgtacttgcttttataccatttgatttctatcaacttacttatcattttacaaccattttgaacagaattttaaggccattagtggccaggtagggactggaccaagctaagcgcgttcatcaagggaggaaaacatcagtaattgtagtcttacctacaaacactatgttgtaattctataaaataatgctacattgtttaccttttttttcctattatgacaagagctaagagcagtgactaca

SEQ ID NO: 531166 - DNA, 623 bp, Homo sapiens
ttcagcatatctgtcaatttgcttgccagaacagaccatcagaaaccaatgcacattcaaatagagatagtaagatgacaactttggggcctgttggaggatgggcggtgggaggaggcagagaatgaggagaaataactaacaggtgctaggcttaataactgggtgataaaataatctatacaacaaactcccatgacacaagtttacctatataacaaacctgtatatgtaccctgaaaagttaaaaaataaaaaatgaaaatattcatttttccatgccaaaaaagaaaaatgactatgaaaaaaatcaactaaaattgttcaaagataaaaacattacaaacaaactagtataaaggttaagagggcaracattaggatcagaccacagaggtcagaatgcctaagtctaaatgactgtgtgaaaaaggccatttaccaaaagtatctgtgttttggtcttctccctgattgggggatagtaatgacatcacataagaggattaatgtagagagtaaaaatgttgatagataaaccacctgttctagctaataatagccagtagtagttttcagctcatctgaatcaaagatttaaaatagacagtctctgctcaaac

SEQ ID NO: 531167 - DNA, 623 bp, Homo sapiens
ttcagcatatctgtcaatttgcttgccagaacagaccatcagaaaccaatgcacattcaaatagagatagtaagatgacaactttggggcctgttggaggatgggcggtgggaggaggcagagaatgaggagaaataactaacaggtgctaggcttaataactgggtgataaaataatctatacaacaaactcccatgacacaagtttacctatataacaaacctgtatatgtaccctgaaaagttaaaaaataaaaaatgaaaatattcatttttccatgccaaaaaagaaaaatgactatgaaaaaaatcaactaaaattgttcaaagataaaaacattacaaacaaactagtataaaggttaagagggcagacattaggatcagaccacagaggtcagaatgcctaagtctaaatgactgtgtgaaaaaggccatttaccaaaagtatctgtgtttyggtcttctccctgattgggggatagtaatgacatcacataagaggattaatgtagagagtaaaaatgttgatagataaaccacctgttctagctaataatagccagtagtagttttcagctcatctgaatcaaagatttaaaatagacagtctctgctcaaac

SEQ ID NO: 531168 - DNA, 480 bp, Homo sapiens
ctgccaggcaccatcacagaagactggggtcttcatgacaaaaaccacaaaataggttgttatttcataacatactttagaatgagagtgggaaaagcactgcatttgctcaaaagcatttggaaaaacttaaaatttcccactttgtaagtataaatcacaagtcacaatgcactggaacatgggacagttctaagtaacagacatgcagtgtgctcaagattctccctgtccaatccaccaaggattttcattttcatatttttctttattgtggtaagctcattgtgcttgactttttttttctttgttagggtttattcttccaaataagcctcctcagttactctgtaaatagrgatctcttgtcttgccctatatgttctccagacatgtgaaagaaagtgctgtatcttatgtagattcaaactgggacagcttccacactaggggaatattagagtgtaatattctagaatt

SEQ ID NO: 531169 - DNA, 557 bp, Homo sapiens
ctgatgtctgccaggcaccatcacagaagactggggtcttcatgacaaaaaccacaaaataggttgttatttcataacatactttagaatgagagtgggaaaagcactgcatttgctcaaaagcatttggaaaaacttaaaatttcccactttgtaagtataaatcacaagtcacaatgcactggaacatgggacagttctaagtaacagacatgcagtgtgctcaagattctccctgtccaatccaccaaggattttcattttcatatttttctttattgtggtaagctcattgtgcttgactttttttttctttgttagggtttattcttccaaataagcctcctcagttactctgtaaatagggatctcttgtcytgccctatatgttctccagacatgtgaaagaaagtgctgtatcttatgtagattcaaactgggacagcttccacactaggggaatattagagtgtaatattctagaattagaatgacagacttctattgagttttcactcacactctccatgtatgagagagataccagaaagtgaatt

SEQ ID NO: 531170 - DNA, 557 bp, Homo sapiens
ctgatgtctgccaggcaccatcacagaagactggggtcttcatgacaaaaaccacaaaataggttgttatttcataacatactttagaatgagagtgggaaaagcactgcatttgctcaaaagcatttggaaaaacttaaaatttcccactttgtaagtataaatcacaagtcacaatgcactggaacatgggacagttctaagtaacagacatgcagtgtgctcaagattctccctgtccaatccaccaaggattttcattttcatatttttctttattgtggtaagctcattgtgcttgactttttttttctttgttagggtttattcttccaaataagcctcctcagttactctgtaaatagggatctcttgtcttgccctatatgttctccagacatgtgaaagaaagtgctgtatcttatgtagattcaaactgggacagcttccacactaggggaatattagagtgtaatattctagaattagaatgacagacttctrttgagttttcactcacactctccatgtatgagagagataccagaaagtgaatt

SEQ ID NO: 531171 - DNA, 516 bp, Homo sapiens
ctgggacctaagcccattgttttgtttttttccaatagaggctgtaaattaatatgcagtaatgtatcaatccaatagagattcgattttttatttgacttcagtcatgtataaatgccaatcccaaactactccttttcagagttgattcctattctattagcttttaaaactgatataaagattgagctaaaaaaagtctatcattagaatgtcagatgtaatgaaacataaagaaataaaaaacaagtcaggcaacagtggctcgcaatttgggaggccaaggtgggaggattgcttgaggccacacacgttagagaccagcctgggcaacatggcaaaacctcatctctactaaaaatacgaaaattagccaggtgtggtgtcgcgggcctgtagtcccagctactcrgtagtccgaggtgggaggatcacttgaacccaggtggttgaggctgcagtgagccatgatagtgccactgcactccagcctggatgacagagcaagactctgtc

SEQ ID NO: 531172 - DNA, 333 bp, Homo sapiens
aatgacataatcaaaaaaatgcttttggaagatcagtcttaaagcctttgttagaaaatggagagagagagagaatatgtgtgcatgcgtgtgcatgtgtgtttgtgtgtgtgtgtgcgtgtgtgtgygtgtgtggtgagaaaggtactttgtagtttcaggagtagcctagacatattggtataatttccctgttagtttaggctaagttcaagggctgtacatttatttttttctttgaatttctttggtgcaatatcaaagtgtgtaatcagtaaaggtgatgattggattggcctatgaaaggcactttaaaggtctgcatgttagaag

SEQ ID NO: 531173 - DNA, 613 bp, Homo sapiens
cagtggtgtcttcacacttagatctgcattccctgtttaaagttaaaattgagagtactttctttgtggagaattctcatatgtaaaattagaatataaaattagtagtggtaagatgaaggaaatagtagcggtaagatgaaggaaatagcggtaagatgaaggaaattattaagtgaaaagttgagaatgtttkggtgcaataagccgaaaatagtcaacaagaacaatatttcaaatttataaagagagaaaaagcatgtcatgaccatgtttgctgttataaaattgcattgacatgtttgcaaatatttgcaaaaatatcctaaaataaagaataattaaaatcatcctttagttgattgttctcatttttgttgtctgcattctactgtcttgccaaaacaacagttttaagtcaaaatattttattgcttaagatattctcctaaaaaatcagtttattttgtttgtatagatcagcaattttttgcatttctattatttaaagtaaggttttctaattattagatttcttttttttcttttagaatataagctattttgtttcaggtgtttaagaaaattagaaatacattttatatagaatttt

SEQ ID NO: 531174 - DNA, 600 bp, Homo sapiens
gtttgtttatttttgttttagacggagtctcgcactgtcgcctgggcagtggtgcgatctcggctcactgcaaccttcgcctcccgggctcaagcgattctcgtgcctcgccctccggagtagctgggactgcagatgcgcaccaccacgcccagcagatttttttttgcattttagtagagatggggtttcaccacgttgcccagggtggtctcaaaccgctgagctcaggcgatccgccgaccttggcctcccaaagtgctgggattacaggcgtgagccaccacgcctggccaggaaagaaaaatcttaaagacacttttccccattctgacttaatatccagtatttttccaygttaagcctttccctctcatcctttctccttctttccacttcagggtccataaaactaccagagacttttgttctgggctccctcaacaatgagacagcccacctgtctgcactcattctttgctctccactgcagcactgttccaaggggaagaggcacgttctctcgatttagactcttgccaaaccatcgcagtcactgatttaaatcttaagtctttcatttttgtcttgcattaatca

SEQ ID NO: 531175 - DNA, 600 bp, Homo sapiens
gtttgtttatttttgttttagacggagtctcgcactgtcgcctgggcagtggtgcgatctcggctcactgcaaccttcgcctcccgggctcaagcgattctcgtgcctcgccctccggagtagctgggactgcagatgcgcaccaccacgcccagcagatttttttttgcattttagtagagatggggtttcaccacgttgcccagggtggtctcaaaccgctgagctcaggcgatccgccgaccttggcctcccaaagtgctgggattacaggcgtgagccaccacgcctggccaggaaagaaaaatcttaaagacacttttccccattctgacttaatatccagtatttttccacgttaagcctttccctctcatcctttctccttctttccacttcagggtccataaaactaccagagacttttgttctgggctccctcaacaatgagacagcccacctgtctgcactcattctttgctctccactgcagcactgttccaaggggaagaggcacgttctctmgatttagactcttgccaaaccatcgcagtcactgatttaaatcttaagtctttcatttttgtcttgcattaatca

SEQ ID NO: 531176 - DNA, 607 bp, Homo sapiens
catccaaagtaagctcctaggaacccaaatgagactgaggaaaacacagggccgcccgtgcactgtggggctttaagaaagaaccagagaacttctcctctagtgtcagtaggggccagcatacataagcaatgccatagttcagatgtttgaatcgcggcagccctctatagccagctcagtgtaggggctgaggtttggaggggaaactctttcccctgatatgtttgggggcagggatacaagaattgcagttgcagttgtattatgtagtaagatctttgccacaccattggtgatgaatgaactgagacacgggtctaagctttgagacagaatgaattaagcactggatttgaaagtgaccaggaccctctctaggattttctccttcaggagctcagctatggacaagttaccycttacttgtcactggcatgtatcaggggtacttttacaccatttgaaggctcaataggacaggtattaaagacttacaattatcattatagttatttaccccctttagcctctatttgtgtgtctctgtgggaactcattcacattcctcaggaagctgctcacttctgtttcctcagaattattt

SEQ ID NO: 531177 - DNA, 477 bp, Homo sapiens
ataaattgttatgcacacatttgtatttgyatctattgttttcacacaagtgggtgtgtgcaatttacagaacgtttagtttccctttccaaatgagtttactctctttgcattttaaatggaaaatacaagcagactgagttcttttaccttccatgtagactataaagacatgctgtttcctttattccatctacagtagtccgtcctgttttcaaacactttttaacaaaaagaagtatcagcattaattcattcattatttccaatattagtaatattcatagattatttcgatgatataatcaagttgccctggaatctcctctcctcaactgattgtggagtgacagccatatttttaaccagaaaatatttcaaattatggattattttgtttaaatataagaatttttctaggggtcactagaggaatctgagtagcctgataaaggtatataccaaaacaagcagctg

SEQ ID NO: 531178 - DNA, 477 bp, Homo sapiens
ataaattgttatgcacacatttgtatttgtatctattgttttcacacaagtgggtgtgtgcaatttacagaacgtttmgtttccctttccaaatgagtttactctctttgcattttaaatggaaaatacaagcagactgagttcttttaccttccatgtagactataaagacatgctgtttcctttattccatctacagtagtccgtcctgttttcaaacactttttaacaaaaagaagtatcagcattaattcattcattatttccaatattagtaatattcatagattatttcgatgatataatcaagttgccctggaatctcctctcctcaactgattgtggagtgacagccatatttttaaccagaaaatatttcaaattatggattattttgtttaaatataagaatttttctaggggtcactagaggaatctgagtagcctgataaaggtatataccaaaacaagcagctg

SEQ ID NO: 531179 - DNA, 477 bp, Homo sapiens
ataaattgttatgcacacatttgtatttgtatctattgttttcacacaagtgggtgtgtgcaatttacagaacgtttagtttccctttccaaatgagtttactctctttgcattttaaatggaaaatacaagcagactgagttcttttaccttccatgtagactataaagacatgctgtttcctttattccatctacagtagtccgtcctgttttcaaacactttttaacaaaaagaagtatcagcattaattcattcattatttccaatattagtaatattcatagattatttcgatgatataatcaagttgccctggaatctcctctcctcaactgattgtggagtgacagccatatttttaaccasaaaatatttcaaattatggattattttgtttaaatataagaatttttctaggggtcactagaggaatctgagtagcctgataaaggtatataccaaaacaagcagctg

SEQ ID NO: 531180 - DNA, 477 bp, Homo sapiens
ataaattgttatgcacacatttgtatttgtatctattgttttcacacaagtgggtgtgtgcaatttacagaacgtttagtttccctttccaaatgagtttactctctttgcattttaaatggaaaatacaagcagactgagttcttttaccttccatgtagactataaagacatgctgtttcctttattccatctacagtagtccgtcctgttttcaaacactttttaacaaaaagaagtatcagcattaattcattcattatttccaatattagtaatattcatagattatttcgatgatataatcaagttgccctggaatctcctctcctcaactgattgtggagtgacagccatatttttaaccagaaaatatttcaaatyatggattattttgtttaaatataagaatttttctaggggtcactagaggaatctgagtagcctgataaaggtatataccaaaacaagcagctg

SEQ ID NO: 531181 - DNA, 476 bp, Homo sapiens
ttattctggaacaaagtaagggttattggttttttgcttctttttcattcatattctgcagcctttaccaagtcacctctacttttcccaagcctcttgtttttctgtgaggtyctctttatggcgagtagtctagccatagaaggctagtcgaatgtctagcatggcatttgcgatgtcacaggtttcctttctcctctgaagaatctaatgaaagggcaagtcgttctttagtacaaacatttctaatctatttaattataataataaagtgaatcatagtggaataagtgagagacaggactagttggatttcctaggctgactaagaattcataagcctagctggggaaggtgaccacacctacctttaaacatggggcttgtaactcagctcacacctgaccaatcaagtagtaaagaggactcagtaaaatacaaattaggctaaaagcaggaggtaaagaaatagtcaa

SEQ ID NO: 531182 - DNA, 426 bp, Homo sapiens
tgcaggagcagattgcaaaagtaagaaacagaatctctctgagaagataatttccacatacaatgcgccttaccattttctgtctctctgctactcctttatgttcattttattgattmttttaaatcaaatttatctgctttcagttaaccatgcatccagtcctgttggtatttcctactactcagcttttcatagattcctgagttttgttcaactggctcttatttttataaatgaaataactatcaccccaactatgcctctgacacatttcctcggagagatgaagaagtggataaattgtcttacatgtaaattatgagctacatagaggagggaggatgcgtttctataccttttatatcctacactgcacatggcttactcatgttcatagatttggtacattcaataaaagtattc

SEQ ID NO: 531183 - DNA, 426 bp, Homo sapiens
tgcaggagcagattgcaaaagtaagaaacagaatctctctgagaagataatttccacatacaatgcgccttaccattttctgtctctctgctactcctttatgttcattttattgattattttaaatcaaatttatctgctttcagttaaccatgcatccagtcctgttggtatttcctactactcagcttttcatagattcctgagttttgttcaactggctcttatttttataaatgaaataactatcaccccaactatgcctctgacacatttcctcggagagatgaagaagtggataaattgtcttacwtgtaaattatgagctacatagaggagggaggatgcgtttctataccttttatatcctacactgcacatggcttactcatgttcatagatttggtacattcaataaaagtattc

SEQ ID NO: 531184 - DNA, 605 bp, Homo sapiens
cattgtgttcagtttctgaatcatgaaccaaacctaagaagtcgtttaaaactgagtcatgccatagaaagtttaagtacctttttttcttctcctaggctccttttctttagtctgtgatagcacacctccaattctcaccctagtgctatcaccatcctaaaacaactaagaataaaacttgcttctgcttctcttatgaagagtctcaatgagacatgtatgttaccatttttacaaatggcaggatatgtaaaactagaaggcagggctatgctggagcctgattgtatcattttagaaaaactcattgttacattttctgaaattktgtaagctgattgttaaacacagccattactaaaaattaaattatataagccagaaatataagctaaattaaaagcaaaggtaataaatgctcaaaactcaccagtttctaagtgttttattacatatactattacctatattctgtagttgtcttatgtctattgtacatgtctgcatatgatagaaatactatgtaactccgtattactgtgcattttttgaataccacattcagtaatgtcacattagtggctggtgtgccatttttgtgt

SEQ ID NO: 531185 - DNA, 652 bp, Homo sapiens
ctcaatgttggccacatatctgtctaccactaccagcggagaggctaaagaaagaatgtatgacgcttatctatatctgtcacatgttggggcttttttgtgttacggcaatgatctcaaaaactcagaggacataggtgcagccacccttggagaactggtagatatgtcatcaggagcctgaagcagtagtgaggtcactgcccaggtgccagcagtggtggcccacagggtaagggatgcttactgctactcctgtgccctccagtgtcagagaccagagatacaatcatggtgaacacacaccttcactccctaactcatcactcaatccatagatcaagagatgaaatgtcaataatccagagccctgcactgtgagtcacctaaatgagcagtcagcaccattttggagtatccccatcacttacgatcctgtggaataatatagtcttgactagtggactgactggttccctgtgccaccccctggaacccagctgtccaaaggacttcatgtctcyccatagggatgagcctggagctcttctgggcatctggctgactctactgagggggttatgagcgtgccagagaggctgtaaaggggagaaaaggaccttggacccatgcagatccttctcagtcgtca

SEQ ID NO: 531186 - DNA, 521 bp, Homo sapiens
caaggttctctcggcatagagttgaggagggtggttggggacagtgagktaacattaaagaaccttaatatgaggcaaaacacagtgtgaaagcaataatgatcaacaaagggtattggaataattgtagggaagtgtaggcttattaatattcagaatcaaagcactttatctaaaggactaacgaaacacctgaattgaacagggcttaaaaaagatactattcttgggtgcttgatataaaaggatacagaaaagtcttttcagaggcttacaatatagtgagtgttagaactgtaaatctcacgtaacttttgtctttccatctgaatgtacagtagaacagattgtaaagtgcacaattatatgatatacaaactctaaaacattgtcatggtagttttgaatttcttgaggaaatatgacatatacctgaatatcagctttcagactattgctctgaccttttgcccagttgtttaaaattttctcattagaactgggtgtataatacaggtctg

SEQ ID NO: 531187 - DNA, 521 bp, Homo sapiens
caaggttctctcggcatagagttgaggagggtggttggggacagtgagttaacattaaagaaccttaatatgaggcaaaacacagtgtgaaagcaataatgatcaayaaagggtattggaataattgtagggaagtgtaggcttattaatattcagaatcaaagcactttatctaaaggactaacgaaacacctgaattgaacagggcttaaaaaagatactattcttgggtgcttgatataaaaggatacagaaaagtcttttcagaggcttacaatatagtgagtgttagaactgtaaatctcacgtaacttttgtctttccatctgaatgtacagtagaacagattgtaaagtgcacaattatatgatatacaaactctaaaacattgtcatggtagttttgaatttcttgaggaaatatgacatatacctgaatatcagctttcagactattgctctgaccttttgcccagttgtttaaaattttctcattagaactgggtgtataatacaggtctg

SEQ ID NO: 531188 - DNA, 521 bp, Homo sapiens
caaggttctctcggcatagagttgaggagggtggttggggacagtgagttaacattaaagaaccttaatatgaggcaaaacacagtgtgaaagcaataatgatcaacaaagggtattggaataattgtagggaagtgtaggcttattaatattcagaatcaaagcactttatctaaaggactaacgaaacacctgaattgaacagggcttaaaaamgatactattcttgggtgcttgatataaaaggatacagaaaagtcttttcagaggcttacaatatagtgagtgttagaactgtaaatctcacgtaacttttgtctttccatctgaatgtacagtagaacagattgtaaagtgcacaattatatgatatacaaactctaaaacattgtcatggtagttttgaatttcttgaggaaatatgacatatacctgaatatcagctttcagactattgctctgaccttttgcccagttgtttaaaattttctcattagaactgggtgtataatacaggtctg

SEQ ID NO: 531189 - DNA, 521 bp, Homo sapiens
caaggttctctcggcatagagttgaggagggtggttggggacagtgagttaacattaaagaaccttaatatgaggcaaaacacagtgtgaaagcaataatgatcaacaaagggtattggaataattgtagggaagtgtaggcttattaatattcagaatcaaagcactttatctaaaggactaacgaaacacctgaattgaacagggcttaaaaaagatactattcttgggtgcttgatataaaaggatacagaaaagtcttttcagaggcttacaatatagtgagtgttagaactgtaaatctcacgtaacttttgtctttccatctgaatgtacagtagaacagattgtaaagtgcacaattatatgatatacaaactctaaaacattgtcatggtagttttgaatttcttgaggaaatatgacatatacctgaatatcagctttcagactattkctctgaccttttgcccagttgtttaaaattttctcattagaactgggtgtataatacaggtctg

SEQ ID NO: 531190 - DNA, 573 bp, Homo sapiens
tattgctctgaccttttgcccagttgtttaaaattttctcattagaactgggtgtataatacaggtctgtttccctttattggaattagaaatagctcagacacaatgccattaacaggagatcaacaggctattccatcaagaatggacttagaatattggtaaacattgctcagaatccaaattgagctgtagactcagtatcttattatgtaagtgcaaggtgtgaattttatgtgctgaagccatgtcaagcactattaaactgacaagggtataaagaagaaacaatacagacctcttggaaactctcattatcaacaggcgattagaggtgtgtagtttcaacagagagagayggaggaattcttgaatgctgttcaacaatcaatattctaagtctacatgttttttaggaaaacacaaaacagtgattcttttttaatatgctcatcagcttggttatcaaagtcatatttcaacattgcctgtgctcattaaatttgtacttgaatataaatgtttgaatatacatttttatgtggaaaaaagtcttgaaatgaatctaaagtg

SEQ ID NO: 531191 - DNA, 649 bp, Homo sapiens
acagaggatgtttagggcagtgaaactatattctgtatgatagatactgcagtggtggacacatgccattacacatttgtccaaacccatacaatgtgcaacaccgagcaagagtgaaccttcatgtaaatgatggataatgggtgataataacatgttaatttaagttcatcaattgcaacaaatataccccggtggtgggaagtgttgatagtgggggaagatgtggctgtgtcgagacaggggatatatgggaactttctgtactttctgctcaattttgctgtgaatctgaaacctctttaaagtttacaaatttcaaagcaaaatgacttaacctccgtaggcttcagtttcatcaaatttaaattgtaggtagtaatagtatctatttcataaagtagttttaagaccaaatcagtttgaagacatcrtttgtatacagcagtgcttatcactttactcacatattagcagttatcagaaagaggttataattgagatttacagttattaaagcctttttcatttctatgatcttgattgccaccaaacacccatgattaacctgtaaggtagactgaatggaaatccttaggccctctttatattgggaaacaaagggtcagcattcaaatgaattatgtag

SEQ ID NO: 531192 - DNA, 649 bp, Homo sapiens
acagaggatgtttagggcagtgaaactatattctgtatgatagatactgcagtggtggacacatgccattacacatttgtccaaacccatacaatgtgcaacaccgagcaagagtgaaccttcatgtaaatgatggataatgggtgataataacatgttaatttaagttcatcaattgcaacaaatataccccggtggtgggaagtgttgatagtgggggaagatgtggctgtgtcgagacaggggatatatgggaactttctgtactttctgctcaattttgctgtgaatctgaaacctctttaaagtttacaaatttcaaagcaaaatgacttaacctccgtaggcttcagtttcatcaaatttaaattgtaggtagtaatagtatctatttcataaagtagttttaagaccaaatcagtttgaagacatcatttgtatacagcagtgcttatcactttactcacatattagcagttatyagaaagaggttataattgagatttacagttattaaagcctttttcatttctatgatcttgattgccaccaaacacccatgattaacctgtaaggtagactgaatggaaatccttaggccctctttatattgggaaacaaagggtcagcattcaaatgaattatgtag

SEQ ID NO: 531193 - DNA, 562 bp, Homo sapiens
gtactgtgacagcagcattaatccctcttaattacctaatcatctcttaaagatactgcctcccaaatcaccacatgaggaaccaaatttccaacacataaattctgggggacacacacaaatcacagcatatagttactgtgtttgtcatgaaaagactaacagatacagacactgcagaaattcattaactctgaatatacaaccagaaaagcatatgacagaagccattcctcatcaaaagcacctatcctcatttagttcttcaattaggacagtcagtcagacaatcagtatttgatgagtatcatgtatggcaaaatataagcaaagcctctctcctcttaaatatataaattaaagaagagactttatgaaaacsatctttttacacacagctattatattgttcttcaaaatcattaaaatgaaactctctgtgtaataatattgtatataaataatgagataagagtttctagtaaaagatacctagcctttccttcccaaagcaccttgctctgtttgttatctcattccagagatgagaataaaatgttaa

SEQ ID NO: 531194 - DNA, 585 bp, Homo sapiens
gtaacgtgaagtgatgaagtatacactactatggtatactatagtgtacagtatactatataccatttactcccatcattaatggggttatatactatatactataatatatagtatagtacattatactatatgtatactacactataatacgtatacacacatactatacaaattatactatatactatatagtatcatatactatactgtatatacacacatatagtatatagtatagtatgctataatatacagtacagtattatatatacataaatagttatagtgtayagtgtagtatagtataccatagtatgtatcacacatagttaaaatattagaaaaaatttttaatatacacatatatgtatacacacacatatatacacacatatttatatatataggtacacatataatgttatttagtttttatttatatctaaatttgtgctatggctagccctcatgtcacatttttgtgagaaaagactttaagaatcagttctatggtgaactgtttgaactctctgttaacttttctaataatacagaacaaaaaatatagagatcataaaaatc

SEQ ID NO: 531195 - DNA, 613 bp, Homo sapiens
aactggccttcaggaatttgttaggaatttgtagaacatcacatttatatcagcttcagcaatgaaatttgagataagctagagaatctttgccaaaactgcctaacctgagagcccagctgcagaattaattgaatatattaaaatacaatgctactgatccaactagtcaaaatttatttgtgtttctcagaaacgtacaatgggagcgagagagagagggacagaaaccgaaacatgaagtttgataaacagtgcccttttataatttttgaagatgtataatttcttcataaattctactgtgcccttttatgagtgacataaarcgaaaaaaaagtctaatacctgatttactggtaagagaagaggctttagtgttaggcataacttcttaatatttatgaattccataatcatcgacaacttcaacaaactaaaaaatcaattttatgaaatctttagcataattttccatttttaggtttaaagtggtttgtaactttattctgtttatcataatgttatatgttattttctttgagctttgaaatggacttgaataataaaataatgataatataagaaaaagattgtgcaaccttttaatttc

SEQ ID NO: 531196 - DNA, 613 bp, Homo sapiens
aactggccttcaggaatttgttaggaatttgtagaacatcacatttatatcagcttcagcaatgaaatttgagataagctagagaatctttgccaaaactgcctaacctgagagcccagctgcagaattaattgaatatattaaaatacaatgctactgatccaactagtcaaaatttatttgtgtttctcagaaacgtacaatgggagcgagagagagagggacagaaaccgaaacatgaagtttgataaacagtgcccttttataatttttgaagatgtataatttcttcataaattctactgtgcccttttatgagtgacataaaacgaaaaaaaagtctaatacctgatttactggtaagagaagaggctttagtgttaggcataacttcttaatatttatgaattccataatcatcgacaacttcaacaaactaaaaaatcaattttatgaaatmtttagcataattttccatttttaggtttaaagtggtttgtaactttattctgtttatcataatgttatatgttattttctttgagctttgaaatggacttgaataataaaataatgataatataagaaaaagattgtgcaaccttttaatttc

SEQ ID NO: 531197 - DNA, 670 bp, Homo sapiens
ttattgtaataattaagcagcattgtttataaccttaatatatattctttgaaaaacttaacacagtccttagtatttttacctttagaaatttgattttttcatttttacaaacattgtgaattaagtaataatrttccactttgtgatggctgcagagaagccatctctaagaatctcaatagcatatatgaatataatgacagaaatgtcagataactttcatgtattgcatcactaaatcttaactgaacttgtgatgtactccaaataaacctctaaaatattagccttgaactcctgggctcaagcaatcctcctgctacgtcctcctcagtagctaagactacagcataccaccacacttagctttttttaaattattttttgtggagacagagtcttgctatgttgcccagattggtctcaaactcctgccctcaagcaatcctcccatctcagccttctaaagttctgggattagcataagctaccatggccagctctttgcccgtatttaaatcagcttctttgtttgcttgattttgagatgtttgagttccttatatatatcttagatagttgcccctattcagatgtatgatttgaaaatatatcctaccattccataggtttttctcttcactctgttgattgttttcttgaatat

SEQ ID NO: 531198 - DNA, 525 bp, Homo sapiens
ataacaacctaaagttccttgattttatattcctatcatgctgggctactgtgctgtgaaatgcatgcagatctattagggggtgataaaaagcaacatgattaacaggtgatttatatcctttgagattgacggcatatagagaatagtgacaaatgggggatctagttggattgagacagattatattaaaaataaaaagcctgattacttatcttgtgtaattcatcattcttaccttcatcagttatctccccttctccctgcacagtaaccagcgatgctaactcccaccctcactcccaaaaaagtacatgcttgacttacrtgacttatactattagagaaaattcaggttttactgttcaggaacatgtaaaagtccccaaattatactctgcaaatgatgatattataaaaatattcaaattgtatgggggaatttaaaaagtccaactcatattgcaagtgcatttgccttatccattcaaaaccccagtcaaacataactaggagctgatatat

SEQ ID NO: 531199 - DNA, 587 bp, Homo sapiens
tagtgatgaatatttatcttggaatttttaaggaatatgtgcaatattccctaataaataaatgaaatttattacccatgtaaaacaaagtatgttaataccataaccacaaaagttatacatggatagttctattgtcaatagtgccaacatttacaatgcagtcttaacgtagtaagatttgctgtttattctagcaatggtgattgtattctctcactaaagtatttaagcaaagggggcattaatccctggtgtctacccttgatgtgtcacttctcagaggaaaaacgttttacctgtagtacagagatatggatggctaacttgaagagttaagaaacaaaagtggaaatctttcctctaaccaagcccaaggttatttgacagtggcacatgttagagaaagaaaggaactcactaaaaaaatgccaatctattttcaaaaacataaagtgtgagttattttrgtgaagcttattgtgcaaaaatgcttagtaacatgaatacttagtagtacattctttcaaatgtattgtgctattaaatgtaacagattagaatcataatttctacataacattaaa

SEQ ID NO: 531200 - DNA, 650 bp, Homo sapiens
acgcccacccagattgagggtgggtctgcctcttccagtccattgacttaaatgttaatctcctttggcaacaccctcacagacccaggaacaatactttgcatctctcaatccaatcaagttgatgctcaatattaaccatcacaactggggtttatgtaatacgtagaatatttgatcgtttaggctgctgacagaatttgtgctgtgtcagaatccgatcaatcaattaactgggaaaagaaataacaaattttgcaaaaattttaaaaataataattcataatcaaataaatcatatcccaatcttgttttccttagaataataaaatatatggcattcttggtatcagtttcctatttgtgaaatatggaggtaggttaatttagtacttcaatttcttttattttcaatatccttattccaaagtgtatgargttatatttataatcattaaaaatgaaaacagtttgaaattgttatatataaatatgtaatatataatatatgacatcacacattaaatgtaaaatttaaaatgtatcaatcattttataaataaaattatatgtttcactatgacagagtacaggaagccttagaagatttttcactaaattaaaaatactggttttttagatattttatt

SEQ ID NO: 531201 - DNA, 619 bp, Homo sapiens
ctctaaaaaatcaattggagtcaacatctgggttatatgcctaagcaaaggacaaataatatagaatgatacaagaaataagactataaattaccaatgtgtaaaagaatttagatgttttataataaaatatttgctaaaatatttccttgaaaaagtataaatttcaaaaaagcaattwtaggtatatattattagaactacctcaattggcatttaaaagctaaagaataattaccaaagttgaaatgaacacatttatgaaggaatgtcttctataaatgctaggccaacatgctacttaaaagaatttagtagcatattaacataagtagttttcaaattggtcaaaaacagttgggttgcttgttttagtttccccagaggcacacattcgaatatgggtttggctgcaaattgtttgataggtaatcttaagaagcactggtatgtaaaagggaaagttagacagggaaagaaaggatgacattgatgttgtctaatgatacggttaccactgatggggacttctaggagacagcatagaatgtgttttcaaattgtttctcttgtacatgtgaagttggaatatttatctgttaagttgtatcattggttt

SEQ ID NO: 531202 - DNA, 619 bp, Homo sapiens
ctctaaaaaatcaattggagtcaacatctgggttatatgcctaagcaaaggacaaataatatagaatgatacaagaaataagactataaattaccaatgtgtaaaagaatttagatgttttataataaaatatttgctaaaatatttccttgaaaaagtataaatttcaaaaaagcaattttaggtatatattattagaactacctcaattggcatttaaaagcwaaagaataattaccaaagttgaaatgaacacatttatgaaggaatgtcttctataaatgctaggccaacatgctacttaaaagaatttagtagcatattaacataagtagttttcaaattggtcaaaaacagttgggttgcttgttttagtttccccagaggcacacattcgaatatgggtttggctgcaaattgtttgataggtaatcttaagaagcactggtatgtaaaagggaaagttagacagggaaagaaaggatgacattgatgttgtctaatgatacggttaccactgatggggacttctaggagacagcatagaatgtgttttcaaattgtttctcttgtacatgtgaagttggaatatttatctgttaagttgtatcattggttt

SEQ ID NO: 531203 - DNA, 619 bp, Homo sapiens
ctctaaaaaatcaattggagtcaacatctgggttatatgcctaagcaaaggacaaataatatagaatgatacaagaaataagactataaattaccaatgtgtaaaagaatttagatgttttataataaaatatttgctaaaatatttccttgaaaaagtataaatttcaaaaaagcaattttaggtatatattattagaactacctcaattggcatttaaaagctaaagaataattaccaaagttgaaatgaacacatttatgaaggaatgtcttctataaatgctaggccaacatgctacttaaaagaatttagyagcatattaacataagtagttttcaaattggtcaaaaacagttgggttgcttgttttagtttccccagaggcacacattcgaatatgggtttggctgcaaattgtttgataggtaatcttaagaagcactggtatgtaaaagggaaagttagacagggaaagaaaggatgacattgatgttgtctaatgatacggttaccactgatggggacttctaggagacagcatagaatgtgttttcaaattgtttctcttgtacatgtgaagttggaatatttatctgttaagttgtatcattggttt

SEQ ID NO: 531204 - DNA, 619 bp, Homo sapiens
ctctaaaaaatcaattggagtcaacatctgggttatatgcctaagcaaaggacaaataatatagaatgatacaagaaataagactataaattaccaatgtgtaaaagaatttagatgttttataataaaatatttgctaaaatatttccttgaaaaagtataaatttcaaaaaagcaattttaggtatatattattagaactacctcaattggcatttaaaagctaaagaataattaccaaagttgaaatgaacacatttatgaaggaatgtcttctataaatgctaggccaacatgctacttaaaagaatttagtagcatattaacataagtagttttcaaattggtcaaaaacagttgggttgcttgttttagtttccccagargcacacattcgaatatgggtttggctgcaaattgtttgataggtaatcttaagaagcactggtatgtaaaagggaaagttagacagggaaagaaaggatgacattgatgttgtctaatgatacggttaccactgatggggacttctaggagacagcatagaatgtgttttcaaattgtttctcttgtacatgtgaagttggaatatttatctgttaagttgtatcattggttt

SEQ ID NO: 531205 - DNA, 611 bp, Homo sapiens
aattttagcaagaagaacctttggctaagacctagtctacctgtccttgaactttagacatcatatgttccaaagttatttcaatcaattttaaaatctatgcaacaggaaagtaacagtatgytctattgtatgggttaagtctcacaaataatgcacttgcatgtatatgagttctttcacttattcagttcttttcttaaaatatgatctcctcagagaagacttaatgaccacctgtcattaatagctgctttcactctcttcatcttactctgatttattttttccacaacaattttaactcctgaaaaattgtatttcttaatttgtttattgtttattatatatctccactagattgtaagccagtgaaagcaagggtttgtttctgtactctgctatacatatttccagcttctaaaagtagtcctggtatataataggttcctaataaatatttgtccaatgaatagatcaatgagtgtatttagaagtagaatttcattaaacatttttagaagcatttaacatgttttacatatcttaagatataattttattattatattaattcaactttgcaagagtgcacaaataaatgaccgtaa

SEQ ID NO: 531206 - DNA, 611 bp, Homo sapiens
aattttagcaagaagaacctttggctaagacctagtctacctgtccttgaactttagacatcatatgttccaaagttatttcaatcaattttaaaatctatgcaacaggaaagtaacagtatgttctattgtatgggttaagtctcacaaataatgcacttgcatgtatatgagttctttcacttattcagttcttttcttaaaatatgatctcctcagagaagacttaatgaccacctgtcattaatagctgcttwcactctcttcatcttactctgatttattttttccacaacaattttaactcctgaaaaattgtatttcttaatttgtttattgtttattatatatctccactagattgtaagccagtgaaagcaagggtttgtttctgtactctgctatacatatttccagcttctaaaagtagtcctggtatataataggttcctaataaatatttgtccaatgaatagatcaatgagtgtatttagaagtagaatttcattaaacatttttagaagcatttaacatgttttacatatcttaagatataattttattattatattaattcaactttgcaagagtgcacaaataaatgaccgtaa

SEQ ID NO: 531207 - DNA, 487 bp, Homo sapiens
tgtgatttttatttgctatgctggtctctaagccttgttgacttataccagtactacctctgacagcttggctaagtttccttacttgtaaattcaaggggtcagttagtttttaygctaacatatgtcctcctacctagttctatcataacagaggtaatgttttctccttaatattgactccttatttcaaatctcagcctcttcaggttttgaggagaaaacagagatgatttgtattggaaaggccccagggaactctcaacgcatgcatgacactcaatgttgtacttcattgtcatgattatttggccttctcgatagagttataacatgtttactactctccttggaggtataaaaaatgttttgaaatatgattgaagtggagttagtcatagagatatgaaaaccagtactcttccccttacaggaagaaaggctactacaatgtcaatcctcaaaagactactgttgtctcaaaatg

SEQ ID NO: 531208 - DNA, 487 bp, Homo sapiens
tgtgatttttatttgctatgctggtctctaagccttgttgacttataccagtactacctctgacagcttggctaagtttccttacttgtaaattcaaggggtcagttagtttttacgctaacatatgtcctcctacctagttctatcataacagaggtaatgttttctccttaatattgactccttatttcaaatctcagcctcttcaggttttgaggagaaaacagagatgatttgtattggaaaggccccagggaactctcaacgcatgcatgacactcaatgttgtacttcattgtcatgattatttggccttctcgatagagttataacatgtttwctactctccttggaggtataaaaaatgttttgaaatatgattgaagtggagttagtcatagagatatgaaaaccagtactcttccccttacaggaagaaaggctactacaatgtcaatcctcaaaagactactgttgtctcaaaatg

SEQ ID NO: 531209 - DNA, 559 bp, Homo sapiens
tcattttaatgtgtgattagtggcatcttatttacctctcacttatttgactaacatttagaaaaatgttcttatatatttacacaaatcattttaagatgaatgtttatttgttaccaatgagttgatggtatttgacgatttacacaaatatattgctgtgmgtgaattaatgtttctttttgattatggtaattttcaaaattaatccctatcttctcatatttcttgatgttcaacaatctttactactactgttaaatgagttaccagttgtttaacatactatatctcagatattcttccacgggaacacatattaactcacttgattttcagaacaactgagtcatagagaagtttagaaagttgaataaatgtgtttgttttactgttgtatatgtgtctgtttatttacctatatagatatatatatacagttgtcctttggtatccatggaggaatggttccaggatgctgccaacactaaacttagtggatcctcaacttccttatgtaaaatgttgcatataatctatgcacgtactcctgtatatt

SEQ ID NO: 531210 - DNA, 559 bp, Homo sapiens
tcattttaatgtgtgattagtggcatcttatttacctctcacttatttgactaacatttagaaaaatgttcttatatatttacacaaatcattttaagatgaatgtttatttgttaccaatgagttgatggtatttgacgatttacacaaatatattgctgtgcgtgaattaatgtttctttttgattatggtaattttcaaaattaatccctatcttctcatatttcttgatgttcaacaatctttactactactgttaaatgagttaccasttgtttaacatactatatctcagatattcttccacgggaacacatattaactcacttgattttcagaacaactgagtcatagagaagtttagaaagttgaataaatgtgtttgttttactgttgtatatgtgtctgtttatttacctatatagatatatatatacagttgtcctttggtatccatggaggaatggttccaggatgctgccaacactaaacttagtggatcctcaacttccttatgtaaaatgttgcatataatctatgcacgtactcctgtatatt

SEQ ID NO: 531211 - DNA, 311 bp, Homo sapiens
tttttgccatatatactcatgcatatctgctcaatatacaaaattataaatataatgagaaagaaattaaggatataaaaagaaccaaactgaacttttaamggtaaaatgacatctaaattttaagagaactttaggcactattgaatataagatttattaagtagaagatataaaagcagaaaatatccaaaacgaagacagagagagaggaagaaagaaagactgaaagcctaagcagactctccttaacatgctggaaaaatatcaagcactcaatcctatatgttacttgagtaccagagaaatta

SEQ ID NO: 531212 - DNA, 626 bp, Homo sapiens
aagctggctcaggtttatctacctctttctatgaaaccaccagtcccactcttgtgatatcccattaattcaggattccattactctattaactcagaaatttattaatctgttcatgagggcagagccctcatgactcaatcagctcttaaaagccccacctctcaytaatgctatattgagatcaaatttcaattttagcttcagaagagacaaacatccaaaccacagcaccttacaaggatcaaataaactgaaacttaaccactatggcatgtaatacataccttgtttcctctttatcttcttccctactaggaaatgtctcccagccttcacctttttgcttccacttgtgatgtgtatgcatgcctttcaggctgatgaactaaatcaaaaatgacgttgactttaaagtgtatgtaaaagcctgtcattctcactctgccttttctctctcttccttctcagtgattctacttcccaaaataaaattttgcctcaggctctgttttgtaggaaccaatgccaagatgtagggttgtgaagttaatttcccgatgtgttacattttacaaaaaaggaaaaaattaccatcgcacggcatgtaataatatccaaattta

SEQ ID NO: 531213 - DNA, 568 bp, Homo sapiens
gtgtacagcttgtaaaatttattttcatatatttttcaatacttttcttggaacatatctatatgtttttctgttagaataaaactcacatattttggcaagcaatcaaatctgagcacattttcagttacatcttggagaacaaatgacttaaaatataaattaaaaattagttttttttaagatatgagatatttctgcatgtaaaaagacctcttgaggagaaacttaaaattatatttttagtgagctcagagtagagctgagagtgtggaaatcaggtaaaattttcatattattaactagctaacaaacaatgctaataaaataattgcatgctacttacttttctaaaatgtgtaacagaaatatatttttcttcatgctaaaatgtttcacagatacctatataagtatccagatcctycaaaaaagatatataataaacatattggtttaatgtatgccaaaacccagaatttccttatagaataagcttaccacaatgtttaatgcctgaagataaaaatcttaacttttatatctggttttaattttcgtaagtagt

SEQ ID NO: 531214 - DNA, 506 bp, Homo sapiens
gatatatctcacaggtccctgtagttttattgcattgatatcctccacggaaattctccaatttccctactctacagtctgcatttttttttcagttayatatgaaatgcagctttggaattcctcactctgtctacttagctaaagcttatggcagattcttggcacatatgttttactttatcagttttcttcagagtgttgttcttgccacatcacaaatgtttttgcttccttacataatgcaaattttcatcacccaagcccatgtattggaaaatgtagaaataaaatactgcttgagaatttgagatattataatgagttaaatttgccccacatagagcccattctctagggaccacaccacttagatcttgttactaaaatatatgaaccgaaagagaagccaaatcaggaaaaagctggttcaagatgtgcaaagggccaacctcgttagaaggatttacaacccaattacataaggtctaagagactgggcaaat

SEQ ID NO: 531215 - DNA, 366 bp, Homo sapiens
tctaaaacacacacaaaaattgtaatcacgatgtctaaatgactctttatttttaaaaaaagtatccaggagtccagagttttcctttttttttttttttggtaaggagtcagataccaaataatttaggccttttagaaaatatgctctttcttakgactgcttagctctactgttgcagtttaaaagtagttaaaactattggcaaatagaaggagtcaactatgtttcaatgaatgcatttagagaaacagacagcaagacagatttgcctggtgagtactattttgctgacctgtgctctaggattagaaatattttcttttataggatgaaaaaaccgagcatcatataaataaaataaaa

SEQ ID NO: 531216 - DNA, 639 bp, Homo sapiens
aaatatacataaagataaatcaaaaggaaagctaccttggacagtatttttaaggcattaaaagtcagtttgtggatgggcccagtggctcacgcctgtaatactagcattttgggaggccgaggcgaggggatggcttgagctcaggagttcgagaccagcctggacagcatggtgaaaccatgtctctacaaaacatacaaaaattagcctggcatggtggtgcatgcctgcagtcccagctacttggagggctgaggtgggaggatcccttgagcccaggcggctgaggctgcggtgaggcatgattgcaccactgcactccagcctrggctgcaaagcgtgaccctgtctcagaaaaaacaaaaacaaacaaaagaaaacaaaacaacaacaacaacaaaaatttatttgcaatgtactgcagttaaaatatacatatagctagaattgaaggttctcacttttagcttctatgtttgatctatttatttcatagtgctgctggcacagcattttactgtgtcacataaattaactttaagcaatctgtaaaacttttattaatgattccaacaagactatacaaatccttttgctaatgaggtcaaggtatgcttcaaactccaggcaaaacag

SEQ ID NO: 531217 - DNA, 648 bp, Homo sapiens
cgtatcatgaaaaattgacaagttcttattactgaatattgagattgtatcaaatgttttactgttgtaaatartactatactagacatctttacggccgatttgttcactctttctgaatatttctttggaaatatatattcagtactcatttatcttttcaaaatacaaacatattgcctaattgttctccagtttgtttatcctggtttacatatatatcatttgtatttgagaagcataactttctaaaaatttaccaatatttcatattaagaatgtttaatttttcataataagtaaatctgtagaaatagatcacatttccaaaaacattgcataaaatgtatggtggtaactattgaaaataacaatgtcataggtattctcaggacttctttagaaccaatataaacaccgattaaaagaaaagagcagggaagagaaatagctcactaatatccccgtaaaatcttttgttatacttaactaaaaaaataaattatattacattgtgttttctgctgttttgaaaatactgaaatgttgatccttctcaccaagtagaacatttatagaagagcaattatttttgtaggggtggtgagatagaaagtctgtaaattataacctaagtatcaaaataat

SEQ ID NO: 531218 - DNA, 648 bp, Homo sapiens
cgtatcatgaaaaattgacaagttcttattactgaatattgagattgtatcaaatgttttactgttgtaaataatactatactagacatctttacggccgatttgttcactctttctgaatatttctttggaaatatatattcagtactcatttatcttttcaaaatacaaacatattgcctaattgttctccagtttgtttatcctggtttacatatatatcatttgtatttgagaagcataactytctaaaaatttaccaatatttcatattaagaatgtttaatttttcataataagtaaatctgtagaaatagatcacatttccaaaaacattgcataaaatgtatggtggtaactattgaaaataacaatgtcataggtattctcaggacttctttagaaccaatataaacaccgattaaaagaaaagagcagggaagagaaatagctcactaatatccccgtaaaatcttttgttatacttaactaaaaaaataaattatattacattgtgttttctgctgttttgaaaatactgaaatgttgatccttctcaccaagtagaacatttatagaagagcaattatttttgtaggggtggtgagatagaaagtctgtaaattataacctaagtatcaaaataat

SEQ ID NO: 531219 - DNA, 642 bp, Homo sapiens
aaagattgaagcaattatccacatcattcagatcaaatatgctctcattaaataagagcagatggtgtggataaaaattgtagcttaaaggctatgttcctcatataaggcacatgaaaatagattgtttcttctgtgcatttattttagaagtctacaccttcmcttacagacgagtttatttaaaatgttaaatggaagcattagttataacttacatttaattagtttaaattaatatgttcattaatttagattttactacccttttgtaaacttggtgagtgtagtttctgttataataaaaataataagaatataataaaaatttaaaaactacacccaccaaatttacaaaagggtagtaaaatgagtatatactcttacaccattaattagaatataaatgttttatctgggcttctggcatccgctgctggaagctgcgagtccctcaatgccctccaccttcctcagaaatatatagatgcctggaagaaggatacaccaaggcaccaatagatgtcagagtttattgtttccagagtaactgcaaaccacttccccaagaaaaagtgctcaggttagatcccaagtgaaacaacagtgaataggggcaggaggctctggtttttattgtgg

SEQ ID NO: 531220 - DNA, 437 bp, Homo sapiens
attattccagcatcagtgcaatctgctacacctactaccattaaagttataaatagtagtgcgaaagcagccaaagtacaaagagcgccgaggatttcaggagaagatagaagctcacctgggaacagaacaggtatttttgtattttcttgtatttataaaatatatctatctaattaggtatattttgttgtwttttactgtatgaaaaatgtgaatttggactatccctctggcagtttttagacagcatttctagaaaaacaaaaattgtttttgccatggctgagatttaaaccacgggaccagtttgttgtctttgccttgggctaatctataacactatagctaatgctttgttcctcttaccaatttaggaaacaatggccaaatccaactatggcagtttttgctagaacttcttactgataaggacg

SEQ ID NO: 531221 - DNA, 541 bp, Homo sapiens
tcacccaagaactctcaaattataaccctccaggtggggtctgcaggctggttaagaatagttgtgttagaggaacatagctgaarggtatggcctgttacttggaaagggactcaccagttacataatgagacctttgtctggggaaggagcaactctaagccagtgggtctcaatcttggctgcccattggaatgaataataaggaaaaaaaccccaataccaggatgttattccagagattccagtttaattggactggagtgtggcctgggcactgagttgttcttttttttttttttttttttttaaacacttcccatccatttttatgtgcagccaaagtcgagacccactgctttaagcagagaataaagcaagttagaacatctagccttgaaagtatgtataaatggacacaggaaggggaacatcacactctggggactgttgtggggttgggggagggatagcattgggagatatacctaatgctagatgacgagttagtgggtgcagcgcaccagcatggcacatgtat

SEQ ID NO: 531222 - DNA, 218 bp, Homo sapiens
taaaacatatgttcgtttcggtgtctggggaaacttagtttcaatcttacactgttgtggagaagacatatacttatctatttgcttttaacctctgctactgccaagactrtttttctgatatcttccagggatttctctggacgataaattaaaaatgaaacatgaatcacagcggagctgaaaggcaggatgaccttgagtacatagcaaaggat

SEQ ID NO: 531223 - DNA, 597 bp, Homo sapiens
ttgctgtctaaaggtgcagggatggggagggattaatgcctagaggacatccttcaaccaatgggagatgggaggtagtgaaaaaatattccaatttcctatatttctggtagacaattctgggaggcattccatgtatgcttctcagagcttctggcagagtcccactcttgttgcttacagcagaaacctcagtaaagcaccatataatgtcttttctctctttgtgtctgactctcctcccttatttctgtttcctaggagcagtttggaaataaactaactgcaaccaagtctttgttctaggctcttctccgagggaaaccctaactacgatatcgtccctttccctttttctccaacaatgcagagttctttccccttcccttggagaacaytcagttaattaactcagccattgcatattgagggtcaatcctatgccaggcactgctttgtggaggatgcgaagacagactcagattctggccatcttggagctatattctagtggagcaggcagaaaatgagcacaataagtaagcaagatgttagacttcagaagtgctaaggggaagaaaggaagaaaggtaggaa

SEQ ID NO: 531224 - DNA, 526 bp, Homo sapiens
taatgattaatgatgccaagcattttttcacatgyttgttggctgagtgtatgacttcttttgagaagtgtctgtttgtgtcttttgcccatttttaaatagggttgtttgactacagtcaataataatttgttgtacttttaaaaatacgtaagagtataagaataattggattctttgcaacacaaagaaagggtaagtgcttgaggtggtggatacaccattttccctgatgggattattatgcattgtgtgcctgtatcaaaatatctcatgtacctcatcaatattcacatctactatataccccccaaaatttaaaaaagaaacacatacaatatacatataaagtacacatatatatcttatataactttgggagaaaaataatacttaaaaataatgtttctaaaaattttaaatttctaaaattgtaaatataaatgtttgatatttgaaaaataaaggtattgaattacatgaactaataatatatcattatgactcgaagtgggcaaaggctagc

SEQ ID NO: 531225 - DNA, 517 bp, Homo sapiens
cagaaaggtgacaaaactggatgaacacctgaactcaaataagtcttaggagtcaataatgaagtataagaataatttattgggcgcctaccagatacctgacttcctacttgttgacccagaaattatattgatttatacrcatatcaatatatatgaatcaatatcattcaaaatgaatgattcaattgtccattcactcactgataagctcaacaaacattaaatgagtcacaattatgtatcagtgtgttacttgcagaggatgcatgaataattctctagtggaaagatgcatacataaatcattacgataatcctcgcaattaacatttgatgagttcttactaagtgctgtgctctttgctaatccttttacatgaattatgttatttacacctcagaatgactttacgagacaggtgctattattatatcaattttacaaatgagtaaataggacacagatgaaggaacttgtttaaggtcaagtagctggttagtatttacagcagag

SEQ ID NO: 531226 - DNA, 225 bp, Homo sapiens
ctggctccctaaggagaggctaaagcagatgtctacaactccaaggacacatgcattggtctattatgtgaaaaagtaatccatttctattacattaagccaatggattcttgagtttgatttattactgcagctagtgttataaagcactgctcatttcattgatatgttttaagattgctaaagcatatttaaatgcagcgyccctccagaagcctagcattc

SEQ ID NO: 531227 - DNA, 568 bp, Homo sapiens
gacttttaaaatatttatgcttttttaaacagaaagattatacttttcatttggatgcttcttaaatgatttattttttgtaatttactcagaagtagtgtattagtctgctgaggctgctataacaaaataccacagatggggtggtgtaaacaacaggaatttattttctcacagctctggaggttggaagtccaagatgaagatttaggccattaagttttggtgaagtgtctcttcctagcttgcaggtggccatctcattatatgcgcatgtgacttccctgtagagaaagggaarcctctctctccttttcctataaggccaccagtcctattaggccccattcttatgatgtcatttaaccataattaattattttctaaacaccctatttccaaatacaatcacataaggggttaaggcttcaaataccaattttgggaggacataatttaatccaaagcaagcagcttacactaaaagtgttagtgtcataataaagacaggggtaagatgtgaaaaatggtgactattcttagggttctaggcattcttttcagagta

SEQ ID NO: 531228 - DNA, 568 bp, Homo sapiens
gacttttaaaatatttatgcttttttaaacagaaagattatacttttcatttggatgcttcttaaatgatttattttttgtaatttactcagaagtagtgtattagtctgctgaggctgctataacaaaataccacagatggggtggtgtaaacaacaggaatttattttctcacagctctggaggttggaagtccaagatgaagatttaggccattaagttttggtgaagtgtctcttcctagcttgcaggtggccatctcattatatgcgcatgtgacttccctgtagagaaagggaaacctctctctycttttcctataaggccaccagtcctattaggccccattcttatgatgtcatttaaccataattaattattttctaaacaccctatttccaaatacaatcacataaggggttaaggcttcaaataccaattttgggaggacataatttaatccaaagcaagcagcttacactaaaagtgttagtgtcataataaagacaggggtaagatgtgaaaaatggtgactattcttagggttctaggcattcttttcagagta

SEQ ID NO: 531229 - DNA, 561 bp, Homo sapiens
caataccattcgggacataggccatgagcaaagatttcatgagaaaaatgccaaaggcaactgcaagaaaacaaaaaattgacaaatgggacctaactaaactgaagaactctgcacagcaaaagaaactgtctgcagagtaaacagaccacctacagaatgggagaaaatgtttgcactgatttactttcacaaagtcagtttgtgaaagaaaaagagaacaagtggaatttgaaaggcaatggctaatttcttatgcatcagtgaagacrttggaatccaatagagttgagtgcaaaggtgagcacactgctttcttgctgtgtaactttgaataattaacataaacgtttaagtagattttcttataccagtactcatcacttaggattgtgatcaggatggaagtattatggtctaaaagttccacatacaacaatacctggcatataatatttaacaagtgataatatacttatcttctcatttgaatgaataacttttaaccttgaaatataaaggaatttgctaggtcacactgactaattacaaaggttaaat

SEQ ID NO: 531230 - DNA, 413 bp, Homo sapiens
ctaattctttgactcagataagactattcttctgttttatctcttattatagaggtatgttcctctttggaatttaagtaatttggttggactgcaacctcaggtatctaatgtgctcaaaaaagttataattttatgggtttttttttttttgtctttatctcattgttagaatgggaacaatsttcttttcagctttctacatcttagccagaaacagaaatctctttcctttggtatggctccacctatatgatatcaagataatttaatagtatgtagccacagtgcactaggaaaattaattggcttttaccagctttctgctgataatgccttaacttgaagaagttaaataattttggaaaagtcagatattgggaacaatcaaatttcgaatatacacatccaat

SEQ ID NO: 531231 - DNA, 413 bp, Homo sapiens
ctaattctttgactcagataagactattcttctgttttatctcttattatagaggtatgttcctctttggaatttaagtaatttggttggactgcaacctcaggtatctaatgtgctcaaaaaagttataattttatgggtttttttttttttgtctttatctcattgttagaatgggaacaatgttctttycagctttctacatcttagccagaaacagaaatctctttcctttggtatggctccacctatatgatatcaagataatttaatagtatgtagccacagtgcactaggaaaattaattggcttttaccagctttctgctgataatgccttaacttgaagaagttaaataattttggaaaagtcagatattgggaacaatcaaatttcgaatatacacatccaat

SEQ ID NO: 531232 - DNA, 413 bp, Homo sapiens
ctaattctttgactcagataagactattcttctgttttatctcttattatagaggtatgttcctctttggaatttaagtaatttggttggactgcaacctcaggtatctaatgtgctcaaaaaagttataattttatgggtttttttttttttgtctttatctcattgttagaatgggaacaatgttcttttcagctttctacatcttagccagaaacagaaatctctttcctttggtatggctccacctatwtgatatcaagataatttaatagtatgtagccacagtgcactaggaaaattaattggcttttaccagctttctgctgataatgccttaacttgaagaagttaaataattttggaaaagtcagatattgggaacaatcaaatttcgaatatacacatccaat

SEQ ID NO: 531233 - DNA, 413 bp, Homo sapiens
ctaattctttgactcagataagactattcttctgttttatctcttattatagaggtatgttcctctttggaatttaagtaatttggttggactgcaacctcaggtatctaatgtgctcaaaaaagttataattttatgggtttttttttttttgtctttatctcattgttagaatgggaacaatgttcttttcagctttctacatcttagccagaaacagaaatctctttcctttggtatggctccacctatatgatatcaagataatttaatagtatgtagccacagtgcactaggaaaattaattggcttttaccagctttctgctgataatgccttaacttgaagaagttaaataattttggaaaagtcagatattrggaacaatcaaatttcgaatatacacatccaat

SEQ ID NO: 531234 - DNA, 554 bp, Homo sapiens
accaggagaaacctctcttggggaaatgtggggaaaaggtaagcaaagagaatcccagcagcccccatcaacacctggggagcctccaatcctcatcactggggatatctgcagtcctcacagacactaagcttagctgaaagaactgcttgaagtccacataactgtgcttcccccagagaaggagctgatcctgtgacctgtgtgtctaccgcactgtgccgtcttggaactggaactattttgttctggggggctagtggccatggcaccctttcatccctgaggcgaagctgccgccaaaccacccttcctggtgactytacattcccaagccaagctgtgagccactgttacacattgcgccatggagccaagcagagtcgaactgctccaccaactcctaccagtcagagctgcattccaggccctcagatctgagctaaagctgtgcatttcctcctgtgctttggcagagctgtttcatccacctcacccatttgctgctgtaccctgcgacattgtgctggagctgaagcaatgactggcatccc

SEQ ID NO: 531235 - DNA, 554 bp, Homo sapiens
accaggagaaacctctcttggggaaatgtggggaaaaggtaagcaaagagaatcccagcagcccccatcaacacctggggagcctccaatcctcatcactggggatatctgcagtcctcacagacactaagcttagctgaaagaactgcttgaagtccacataactgtgcttcccccagagaaggagctgatcctgtgacctgtgtgtctaccgcactgtgccgtcttggaactggaactattttgttctggggggctagtggccatggcaccctttcatccctgaggcgaagctgccgccaaaccacccttcctggtgactctacattcccaagccaagctgtgagccactgttacacattgcgccatggagccaagcagagtcgaactgctccaccaactcctaccagtcagagctgcattccaggccctcagatctgagctaaagctgtgcatttcctcctgtgctytggcagagctgtttcatccacctcacccatttgctgctgtaccctgcgacattgtgctggagctgaagcaatgactggcatccc

SEQ ID NO: 531236 - DNA, 628 bp, Homo sapiens
ctgccaactttctcctttctgaagcgtttccttcccttggcttccatgacaccacacttctccttcttctctgtttatatcttgtttcttcatcaattcaacctcccatagagggcttgatatgttgaagtttctcaagaacccaggccctcttgccttctcaccttgaaatttcatcctagacatttgtgttgatttcctgaagttgctataacaaatcagcacaaatttgctagcttaaaacacgaaatgaattctctcacagctctggaggacggaagcctggaatacttcctccagaggatcaaagggagcttctgtttcttgtttgttccagcctttggtggctccagatattcctgggcttttggctgcattactccaatctctgcttccatcttcatatggccttcttctctgggtctaggtattttataaagttacttggmattagttttagggcccacctggataatcctagatgatcttattttgagatccttcacttagttatacctaaaaaaccaattttccaaataagttaacattcacaagtcctagggataaggacacagacatatttggtttggggtggtgaccataaacaccattcagtccacttcagcat

SEQ ID NO: 531237 - DNA, 662 bp, Homo sapiens
ctcactattgtctcccttcttgcacttttacctatcaaaattcaaactagctataatttccaaactaaatgccactttctccataaagctttctcatcagatgatgtctgctctacgaataatttttaattaccarccacacatgtcctgtgagatgttatagccttttgccctgtggaccacacatacagtgtggacactgtaaaaggaaaaaaattgtctaataactctgtctaattatcaatattgtctaatgactctgttcacctactatggaagtggctgattcttctcttatcgctcatctttacctctacattaacccaagtcaagtgcagccaataaggtcacaatgaactgcttatttgtaattattttccaaaggattaaaaaagtgcaacatatcatttacagatcctatgtaatcaggaatctttacataaataaaagtcaagcaatttcagaaaaatgctgctaggaaacaattctgtccaaaaattcagaaacaacaatacaaccaagggtatgcatgtgtaatccttttggtagcacattacagacatacttctaatacttctagtactttatattctgaagttgtattttcattatggtttctcagcaggaatttcacaaccagtgctcaaagctaatctcaacat

SEQ ID NO: 531238 - DNA, 371 bp, Homo sapiens
tgtatctggtttaattttgcataccttccgtgaaaaatgacttaccaagcagaacttcacacattgcggttatgagaatgcattttttcattggctccagttcacatggtttaaatagcatttcatttcrctatgagctttattttaatttgaaacttcacaaatacgaaaccatttgaatcaaaccagatgcaagcactcagaatatcctgctcgttcctgtcagcctgcttcacttgagaaacaattcaatttctcttgacttcaagcaaacccttattgagcaggcctctttttctctaattggcttttagacttctccaccctttactagctggtttgtggaaaaaagcaagtaatcttcaaaaaaa

SEQ ID NO: 531239 - DNA, 371 bp, Homo sapiens
tgtatctggtttaattttgcataccttccgtgaaaaatgacttaccaagcagaacttcacacattgcggttatgagaatgcattttttcattggctccagttcacatggtttaaatagcatttcatttcactatgagctttattttaatttgaaacttcacraatacgaaaccatttgaatcaaaccagatgcaagcactcagaatatcctgctcgttcctgtcagcctgcttcacttgagaaacaattcaatttctcttgacttcaagcaaacccttattgagcaggcctctttttctctaattggcttttagacttctccaccctttactagctggtttgtggaaaaaagcaagtaatcttcaaaaaaa

SEQ ID NO: 531240 - DNA, 371 bp, Homo sapiens
tgtatctggtttaattttgcataccttccgtgaaaaatgacttaccaagcagaacttcacacattgcggttatgagaatgcattttttcattggctccagttcacatggtttaaatagcatttcatttcactatgagctttattttaatttgaaacttcacaaatacgaaaccatttgaatcaaaccagatgcaagcactcagaatatcctgctcgttcctgtcagcctgcttcacttgagaaacaattcaatttctcttracttcaagcaaacccttattgagcaggcctctttttctctaattggcttttagacttctccaccctttactagctggtttgtggaaaaaagcaagtaatcttcaaaaaaa

SEQ ID NO: 531241 - DNA, 655 bp, Homo sapiens
tcatttctttaaaaatgaatttgttagaactccaggtttcttttccaatcaaaactttaggaaatgccactcccaaaccaactgaacagccaggcttttggtttctgagaaattcttgcccaggtcaccagagaatgaaaggtcaactttgaggaagtttctggaacaaggaagaatatcagtgaaattggctggaattttttgagcggtgaaaaaaaaaatcccttgactattaagtaagctatatgtgagtaaggtcacmgttttatcaaattcatcctgggcatttggtcagatcctttgaaactttttcccatggttaacattctattttgttgcatttttggcatgatgactaagagatttggggcactggcccaaaaatcataatttttttttgttgttgttgttataacaaattaataaattagaggaaataggtgttctttttttttttttggaaattcacaatgaatagcctactttggggagaaaaacatcacaatttgttacatgttctttttgcattcttaatttttattttttctgccatgataaatcttatggagctcttaaacagaagcgttttccaaatacggttcttaagaccctacagttttctcccgcttccatctaaagatctgcatgaagccaa

SEQ ID NO: 531242 - DNA, 642 bp, Homo sapiens
gctgattcattcatatgtttttacaaagtaccaaacayttattgaacaactactatatgccaggacactgtataagggcagatgattaagtgtgtgtgtgtgtgtgtgtgtgtgtgtgtgtgtgtgtaaaacacagtaactgtttttcaaagtgactcatggcccaagttttggacagaaatatgctttcaatatgttacattattcagttattttgactttatgttgcacctaggattttaatccactcaatatgaatgtggaatataataaaacaatagctttttattaataaaattaaattgtggcattatcataaaatacaagattgagttcctaatgtttacactacctatcttaaacattttgtgaaagcaagctaatacaaattcaatatcactattaaacaagttcataaattcattgaaaattatataattatagaataaactgaaaatgttatcaaagactaccttcgaaaggtgacaggtagtttcagaggtgaatttcttcaaatgctgatatataattcttgtgttatttaagctattttttatcttacagaaagaaagtaaattctttatgtaaaatcatattagtaatacaaaaacacaaaaactatagacagtcatcactgagtat

SEQ ID NO: 531243 - DNA, 621 bp, Homo sapiens
gtgcaaggggggaatcctatggaactgagcttgggaagcaggtatttgctggcagggatgctctcctcctttgctgagaggctgtggtccacagcccttgccaaatctgtcgcagtagctaacagtacatttccatgtatgtactattttctcccaattttccmcaaggaaagggcgagtcaggatatgcacgcatagcacaggacaaaaatagccttgtttaagtagataagtagctattaagtgaagttccttgactttgtctattctgagcaccagtatttgcactagtcaggcagcatccccctaggtcaactacctgtgtattcttgtactctctactgaaagacagtatgcacagggcttatgaaaacagacattagaaataggatttgagtccttggggtagttgtgtgacttactggttatatgaacttagacaatttaccgaacctctctgagcttaaatttgctcatttataaaatggggtaatacaagtttgtaacttatagacgtattataaggataaaattaattaatatactgcatataaagtttctagctcagtgactgacacatattacgtgctatgtgatgcatatgttaagtgcttgtgaagg

SEQ ID NO: 531244 - DNA, 601 bp, Homo sapiens
agaatttacaggaactattcaagcaggtaagaacaagttggatatcatccacagcaacctgatcactgaagcaatgccctaaacttctacagattcatgaaaactaatagatcacagatagggagggagtagcagcagaattcagagagcytgttgagacagatgcagggggaaagaattttagggaatagaatttgaaagaggaaaaaagtaaacaaaaaatgagaaaaaatattttggaaaaacaatacgtaagagatacagcacaagttagtagaagagctgatcaagatagctttattagcccctggaaaacatctgaaaccacaaaaaaaaaggagcagagaaatatattttttaaattgtgacattatccaagactggatcttgagtgaagagcagtaaaatattaaggaggctgctttatgttgtagaaaatacatagattttggaagcaaatatacctgtgtttgaatattgacctggaagactttgaatcttgaaactctttgagcttcatcgttctttctgtgtaaattagagaggactatacttaggtcacacaattattttgaaaagttcaatgaatacaaacacataa

SEQ ID NO: 531245 - DNA, 601 bp, Homo sapiens
agaatttacaggaactattcaagcaggtaagaacaagttggatatcatccacagcaacctgatcactgaagcaatgccctaaacttctacagattcatgaaaactaatagatcacagatagggagggagtagcagcagaattcagagagcttgttgagacagatgcarggggaaagaattttagggaatagaatttgaaagaggaaaaaagtaaacaaaaaatgagaaaaaatattttggaaaaacaatacgtaagagatacagcacaagttagtagaagagctgatcaagatagctttattagcccctggaaaacatctgaaaccacaaaaaaaaaggagcagagaaatatattttttaaattgtgacattatccaagactggatcttgagtgaagagcagtaaaatattaaggaggctgctttatgttgtagaaaatacatagattttggaagcaaatatacctgtgtttgaatattgacctggaagactttgaatcttgaaactctttgagcttcatcgttctttctgtgtaaattagagaggactatacttaggtcacacaattattttgaaaagttcaatgaatacaaacacataa

SEQ ID NO: 531246 - DNA, 599 bp, Homo sapiens
aattgcaaccctggaaacaacttttccaagtgctcttttcatactctttggtgattcgttcatccatatatttgtgtatatgtgtgtgtatgtatctatgtgtgtttgtgtgtgggtgtgtgagtgtgtgtgctgtgtgtgggtacatagctaagaatctgattctacataatgctaatacaatcatttgggaagataaaaaatcctaccacctgtgtgtttggtccatttgaggaaaaataataagactgactatattttgtactaatttgcaaatwatttagcaaatatttcttttaagtgttctaactgcaatttggagacactatatcataacaattaagaggatgatgtttaaaacaagaacagacttggggtggaatcctacttatctctcccactagttacttattctttttcatttttttctcctgtaaaatggagataatgagaacaacctcacaaaattgttataagaactagacgggctaacacacagagcctggtttataaccagcactcaataaacagtagatttcataattaaaaaggtgagatgatctttgaatgtaatcaccctaaaatcagtacagtgcttt

SEQ ID NO: 531247 - DNA, 625 bp, Homo sapiens
aatttcctactaaaagagaaatgagaaagtgcaatgataagtgtagtgaagtcacagaaacaagtagggactgtggaggacacatgcctgtctaaagagggcagcagccatccagccagcctgggactgcagtgcggtaatgtgagcccagtgttcccagatctcctaattttttgagagatgccagaaatctggatttttatgtgaaagcatccaatttcataatgttggctcaggaaagttttaaacattgtaccagccaaatgaaacactgcgatgggccaaatccagcctgtgggccatggtttgggacttctgcagtgcagcatgtggacaaaaggggctctgcagcaatgatatatggacctcaaytatcccatcacatggcccatcggcaagaacagactagttcaacattaggtgccaactttaattttaatgcaatgttggttacttgggatgggttcctctctgttcctgtctctggccgctctctccgtcttttttgttatcgtcattgaagacgttaggacaaagtccgtctaacctagcactgtcagccactaccatgatcactcacttcaatgtggagttaatttaaaatgaacactttggaggaaataaa

SEQ ID NO: 531248 - DNA, 625 bp, Homo sapiens
aatttcctactaaaagagaaatgagaaagtgcaatgataagtgtagtgaagtcacagaaacaagtagggactgtggaggacacatgcctgtctaaagagggcagcagccatccagccagcctgggactgcagtgcggtaatgtgagcccagtgttcccagatctcctaattttttgagagatgccagaaatctggatttttatgtgaaagcatccaatttcataatgttggctcaggaaagttttaaacattgtaccagccaaatgaaacactgcgatgggccaaatccagcctgtgggccatggtttgggacttctgcagtgcagcatgtggacaaaaggggctctgcagcaatgatatatggacctcaattatcccatcacatggcccatcggcaagaacagactagttcaacattaggtgccaactttaattttaatgcaatgttggttacttgggatgggttcctctctgttcctgtctctggccgctctctccgtcttttttgttatygtcattgaagacgttaggacaaagtccgtctaacctagcactgtcagccactaccatgatcactcacttcaatgtggagttaatttaaaatgaacactttggaggaaataaa

SEQ ID NO: 531249 - DNA, 625 bp, Homo sapiens
aatttcctactaaaagagaaatgagaaagtgcaatgataagtgtagtgaagtcacagaaacaagtagggactgtggaggacacatgcctgtctaaagagggcagcagccatccagccagcctgggactgcagtgcggtaatgtgagcccagtgttcccagatctcctaattttttgagagatgccagaaatctggatttttatgtgaaagcatccaatttcataatgttggctcaggaaagttttaaacattgtaccagccaaatgaaacactgcgatgggccaaatccagcctgtgggccatggtttgggacttctgcagtgcagcatgtggacaaaaggggctctgcagcaatgatatatggacctcaattatcccatcacatggcccatcggcaagaacagactagttcaacattaggtgccaactttaattttaatgcaatgttggttacttgggatgggttcctctctgttcctgtctctggccgctctctccgtcttttttgttatcgtcattgawgacgttaggacaaagtccgtctaacctagcactgtcagccactaccatgatcactcacttcaatgtggagttaatttaaaatgaacactttggaggaaataaa

SEQ ID NO: 531250 - DNA, 647 bp, Homo sapiens
ggatggggcttgagattctgcatatctgaaaagctcctggagggatattggttttactggtccagggaccacactttgagtagcaagactaaagtgtcaaggaattaacaatttcatttaaagaattagaattaatacacagagaaacacaaaacaattagggcagtgccacttgatagtatcagctgtttaagaggaaacatgaggtgattttgaaacagtggtatttaactctggkctgcagctcagaagcttattattgattttctgcatgaaaaaatgtttttagaagtaggtgtttatagtgagaagtaggctggattaggagttgaaagtcacattttcagcctggtaattggccttctgagctgtgggatcttaggaaatttagtgtctaccagcttagttctactaggaagtagggttgaaaatgtacactaagttttgaaaatatattgacaatacacatagaaaacaccattcgtttacttgttcattcaaaatataccttaggtgcgtactttgggccaagcactattctaggtgctggggaatatatcagtgaataagacagatgcagttccctgatctcacaaagctcagagtctagtggtaaagagaaacatcaaagaggcaataataataat

SEQ ID NO: 531251 - DNA, 360 bp, Homo sapiens
ttttccttttaaattacagcagcaaaagacatatctccctttacacggctgctctctatgttmtcttaaagttgtgaatcctttatgtagagttctagaactttttcgctgccacatagttaactgtgctgaattcatggttcaggtacctacacgtactgagctcttgtttcaactgagtatagcctgtgtggtgtttgtaaggacaggatctgatgtgtagagtcttagggccttccaggaggcaaatcctttaacagggcacagatgattcaacagcttggctatggtgcccagaataaattgctttcattccccttactgttatacctggtaagttgccagtgtaacaggtgaaaa

SEQ ID NO: 531252 - DNA, 596 bp, Homo sapiens
agatgaattgttaaattaggaaatatgattatatcttatatttataaatacatgaggttggttttccaagggttattaatgattattattttcattaatatagatatgaaatttcataaaggaattaaagattattaataatgtgaccagtattgaagtcaaaggaagatttatataatcaawagcctgtgaataaatgtatcttctggtgtgtgtatgtgaagtgtggtggtataataaaaatacacacacacacaaaatttaatttttacaaaaagcgaatgaaatatattttgtgttgagaagtttgtgaaatccttacaatttttttgagactcccagaatggtggtcggacagtatagcatgatggtggacagtatgggttttggggccagacttctgcaaaacctcagttagtaccttacaaacccttccttccttgcttggtttgccatgcttcaaacataaaattgtatctagacttttggctacaggggattaaaagatgtttattaggaggtcacaaatacaaattttctcttccatgtctgactattttctttttgttctaagagttttgataaagttgcttgga

SEQ ID NO: 531253 - DNA, 596 bp, Homo sapiens
agatgaattgttaaattaggaaatatgattatatcttatatttataaatacatgaggttggttttccaagggttattaatgattattattttcattaatatagatatgaaatttcataaaggaattaaagattattaataatgtgaccagtattgaagtcaaaggaagatttatataatcaatagcctgtgaataaatgtatcttctggtgtgtgtatgtgaagtgtggtggtataataaaaatacacacacacacaaaatttaatttttacaaaaagcgaatgaaatatattttgtgttgagaagtttgtgaaatccttacaatttttttgagactcccagaatggtggtyggacagtatagcatgatggtggacagtatgggttttggggccagacttctgcaaaacctcagttagtaccttacaaacccttccttccttgcttggtttgccatgcttcaaacataaaattgtatctagacttttggctacaggggattaaaagatgtttattaggaggtcacaaatacaaattttctcttccatgtctgactattttctttttgttctaagagttttgataaagttgcttgga

SEQ ID NO: 531254 - DNA, 594 bp, Homo sapiens
gctaggggtgggggacgatgggaagggtgtggtagtggtaagctgtcttactcccttcctgccagacacccyagtctctataagcagttattctgaagactctcatttggcatgcgctatggactgaacgtgtgtcccccgccccgcctaaattcatatgctgaaactgtaatccctaagatgatggtatgaggaggtggagacttcaggaggtaattaggtggagccctcatgatgggactggtgcccttttaagagacaggagagcgcttgcttcctctctctccaccatgtgaggacataccaagaactgattcagcctgcacctgggtcttcacttccagcctccaaaactgtgagaaataaatttctgttgcctaagccactcagcctatgacatttttgttatggcagtctgaactaactaaggcaatatgagaatgggagagaagcgctccagctactctcccagggggaggtgggacaaacatacaaagaaatccctattaatctttgtactcctcctgaatggaaactgaaggaaggtgaagtagatgaggttcaagtcacctcctagcaaatcatacacagata

SEQ ID NO: 531255 - DNA, 603 bp, Homo sapiens
gcagtggtgcaatcttggctcactgcaacctccgccccaccgggttcaagcgattttcctgcctcagcctcccaagtagctgggattacaggcatccatcaccacacccggctaatttttgtatttttagtaragacagggtttcaccatgttggccaggctggtctcaaactcctgacctcaagtgatctgcccacctcagcctcccaaagtgctgggattacaggcatgagccaccataccaggccccaatctctttttttatttccacgctcttctcaagtgttaacaattcaatctgcataacaatgctgacataacatttaataaccctcaccaaaaatcaacattataaatttgagagtctccatgactccaaccaaaaaatatacaacagaaataaactagcaaagttttaatacttacaagtgaaattttgcaaaaaattcttggccaatatggaagaactcctttcacagtttctgtgtctctctctgtacacatggttccaaattcctgcatagcctaaaagtaagttattaacatcattaggattaacaaccataataactggctatagattattctgttctggaagctttg

SEQ ID NO: 531256 - DNA, 481 bp, Homo sapiens
ccagtcctgattcttatgtagaatttgcatcttaacaccagtgcaaagacctgggtttgataagttaaatggttatttcaaaatgaataaaacagggatgttttgactactttgtttctttttgttttataatataayattacttttggatgagctaactgaatctgtccctctttccactgagagtaaaagtaataagtattctctactaatattattaagttcatagatgactctagcagctcttggtcctatttcctaatattatgtaaagaaatggcttaagttcaggcactgcattagttagcgattgttgtgtaacaaaccactccaaatctcagtggcttaaaacaacagctacttcttatttctcacaaaataatttctcacaaaaaatttctaaattttttgtatgcctaggactggttgggtggtttggctgatctgaccaagctttactgtattaggcagggattgttta

SEQ ID NO: 531257 - DNA, 481 bp, Homo sapiens
ccagtcctgattcttatgtagaatttgcatcttaacaccagtgcaaagacctgggtttgataagttaaatggttatttcaaaatgaataaaacagggatgttttgactactttgtttctttttgttttataatataatattacttttggatgagctaactgaatctgtccctctttccrctgagagtaaaagtaataagtattctctactaatattattaagttcatagatgactctagcagctcttggtcctatttcctaatattatgtaaagaaatggcttaagttcaggcactgcattagttagcgattgttgtgtaacaaaccactccaaatctcagtggcttaaaacaacagctacttcttatttctcacaaaataatttctcacaaaaaatttctaaattttttgtatgcctaggactggttgggtggtttggctgatctgaccaagctttactgtattaggcagggattgttta

SEQ ID NO: 531258 - DNA, 481 bp, Homo sapiens
ccagtcctgattcttatgtagaatttgcatcttaacaccagtgcaaagacctgggtttgataagttaaatggttatttcaaaatgaataaaacagggatgttttgactactttgtttctttttgttttataatataatattacttttggatgagctaactgaatctgtccctctttccactgagagtaaaagtaataagtattctytactaatattattaagttcatagatgactctagcagctcttggtcctatttcctaatattatgtaaagaaatggcttaagttcaggcactgcattagttagcgattgttgtgtaacaaaccactccaaatctcagtggcttaaaacaacagctacttcttatttctcacaaaataatttctcacaaaaaatttctaaattttttgtatgcctaggactggttgggtggtttggctgatctgaccaagctttactgtattaggcagggattgttta

SEQ ID NO: 531259 - DNA, 583 bp, Homo sapiens
tgtgatcacagttcctcttctgcaaaacagaatctaataactaacttcatgagctatgaggagattcatgtacagcacctattccagagccagggctactagtctacctcatggcctcaactctcttagctacttaaacatttccaagaagagcgtctattagcactgacttctcttctgaactggtgatctctaattgcaacataaatcttgatgtcaccccttggacgaaatgtcctgtcttcaatacatgttgtttagaatcaaacatattatctgtttccccaaatctgcactgactcctggtatactggtttctcttaaagacactaccattccrttcacttacttagatgtgacatatcagtgccatctttgatccttctccctgatttcttacctctatggaaaaattttcaagtctgactatttctccttccacagtttctcacatttcttcccacccctccattcccattgtcagcactaagttcacagttgtctctgatgtcagcctcagctcacatctcttttgttcttgaaggattttccttaatgctgctttgtcacttctttcttcctt

SEQ ID NO: 531260 - DNA, 601 bp, Homo sapiens
aactgaaatttacacagaaaagtaatgttcaagattggaaaaatatgtttcagtatattaatatccatattataatgttgtaagaatgaaatgagattatttatgcaatrtcatacacccctgggcacagaatagacactaaataaaagatagcttatttttgttatttttgctattacaactcaaagtgggagccagagaataacctgtttctgtaaaaaaaaatttaagaagcagcagcattagtaaggaaagctaataacctagattaatgcatcaagaaatctatgtagcaagtcatttaatatccttatatttactttaaaaatagaggataacaccttctaaatttccatccatacacatttaactgaaaggggcttggagggagggaaagaaagataataatcgataataaaagagtctatttaataaaaacagtgcaatagctacagcaactatgtagagacaaagcaacaaacagttctcttgatagtaattcatcttattgtgactaaatctcttgtaagaactctgtctccacttcagaaagccaaagtggattatgatttcaagtcttaaatatcactgggtttaatac

SEQ ID NO: 531261 - DNA, 604 bp, Homo sapiens
ctggacttgaacagtagatacctgatgttttcttaattcatactgtggtgcctctcaagtaatagtctgcaaccctgagcttctgcttgttaatactttattagactgctaattgtaactaagtctccagttacataaactttgatatctaagaataacatgagccccccaaaaccactcccacatatgaaatgtgaagtttatttttttaattgtttatcrttgacatcttgccaccccagacacaaagctgaggccctctatggcatccgtgttgtttccgtctctatttctggatttgtagaattggacaatcacacttacttattattatgtagtcttctacctcttgctgaccacatttcccagtttaataaaaaaggaacttgtagttttgtccccgaaacccacactgtattcttccaagcaattatgccaccgcttacgcagtttcctcttgctggcgctctcttctcacgcatccttcacaccaaaatcataggaggaaatttgtctctctcactagtgagagacatgagtctagtgacattggtcttttctaagctctcagcacttttcacagaagagctctagtgcaaagtta

SEQ ID NO: 531262 - DNA, 437 bp, Homo sapiens
tctggacttgaacagtagatacctgatgttttcttaattcatactgtggtgcctctcaagtaatagtctgcaaccctgagcttctgcttgttaatactttattagactgctaattgtaactaagtctccagttacataaactttgatatctaagaataacatgagccccccaaaaccactcccacatatgaaatgtgaagtttatttttttaattgtttatcgttgacatcttgccaccccagacacaaagctgaggccctctatggcatccgtgttgtttccgtctctatttctggatttgtagaattggacaatcacacttwcttattattatgtagtcttctacctcttgctgaccacatttcccagtttaataaaaaaggaacttgtagttttgtccccgaaacccacactgtattcttccaagcaattatgc

SEQ ID NO: 531263 - DNA, 604 bp, Homo sapiens
ctggacttgaacagtagatacctgatgttttcttaattcatactgtggtgcctctcaagtaatagtctgcaaccctgagcttctgcttgttaatactttattagactgctaattgtaactaagtctccagttacataaactttgatatctaagaataacatgagccccccaaaaccactcccacatatgaaatgtgaagtttatttttttaattgtttatcgttgacatcttgccaccccagacacaaagctgaggccctctatggcatccgtgttgtttccgtctctatttctggatttgtagaattggacaatcacacttacttattattatgtagtcttctacctcttgctgaccacatttcccagtttaataaaaaaggaacttgtagttttgtccccgaaacccacactgtattcttccaagcaattatgccaccgcttacgcagtttcctcttgctggcrctctcttctcacgcatccttcacaccaaaatcataggaggaaatttgtctctctcactagtgagagacatgagtctagtgacattggtcttttctaagctctcagcacttttcacagaagagctctagtgcaaagtta

SEQ ID NO: 531264 - DNA, 604 bp, Homo sapiens
ctggacttgaacagtagatacctgatgttttcttaattcatactgtggtgcctctcaagtaatagtctgcaaccctgagcttctgcttgttaatactttattagactgctaattgtaactaagtctccagttacataaactttgatatctaagaataacatgagccccccaaaaccactcccacatatgaaatgtgaagtttatttttttaattgtttatcgttgacatcttgccaccccagacacaaagctgaggccctctatggcatccgtgttgtttccgtctctatttctggatttgtagaattggacaatcacacttacttattattatgtagtcttctacctcttgctgaccacatttcccagtttaataaaaaaggaacttgtagttttgtccccgaaacccacactgtattcttccaagcaattatgccaccgcttacgcagtttcctcttgctggcgctctcttctcacgcatccttcacaccaaaatcataggaggaaatttgtctctctcactagtgagagacatgartctagtgacattggtcttttctaagctctcagcacttttcacagaagagctctagtgcaaagtta

SEQ ID NO: 531265 - DNA, 333 bp, Homo sapiens
ccaatgatctacaaaaaaaaaaaaagtctgttggttagagctcttcatgactaaatggctcatcagacatctgcscaaactagattcctctaaatattgagaaaggtgaagcagaaacactaagagtccacattggttttctgtcccaactcttaaaaagaactaaataaaccaggcatggtgatgtatgactgcagtcccagccactcaggaggctgaggcaggaggattgcttgaggtcaggatttcaaggccagcctgggcaacatggcaagaccccatctctcaaaagcaatttttattttaaataaataaatgaattaaagattgtag

SEQ ID NO: 531266 - DNA, 600 bp, Homo sapiens
ctgaaaaaattatttggaaacacctccctcaccttgttctccttcaaattccacatagaactgcttcaagtctgcaggattttccatagtgatcatctctagccggacaagtgcatcatctatgatatggtcacatctaacaatgagtctcaaatatggattcaactgcygtccttgaactaagctgtagagaacagtgattcttcgttcactgtacatgcgaattctattgtcataatataatcccaaattctttgtgacagcatacgctaaaaaggggtatgtcataaaagagaatttgttctgtttctactttgaaaacagtataatctttatgcatttctagaacctccttcagtggttcattaataaactcttcaaaagggataagggatttttgacaatccagggttttaacaccaagttcattttccagggggtccactcaaggacctttcttgtttcttctctcttcttccaaaagctcctgaagtgtcagctcactggactcagggatgggctcttcatcatcttcctcactgtgatttgtgtccacttcccctcccactaccatttgcatagtaaatcattttcaagcac

SEQ ID NO: 531267 - DNA, 600 bp, Homo sapiens
ctgaaaaaattatttggaaacacctccctcaccttgttctccttcaaattccacatagaactgcttcaagtctgcaggattttccatagtgatcatctctagccggacaagtgcatcatctatgatatggtcacatctaacaatgagtctcaaatatggattcaactgctgtccttgaactaagctgtagagaacagtgattcttcgttcactgtacatgcgaattctattgtcataatataatcccaaattctttgtgacagcatacgctaaaaaggggtatgtcataaaagagaatttgttctgtttctactttgaaaacagtataatctttatgcatttctagaacctccttcagtggttcattaataaactcttcaaaagggataagggatttttgacaatccagggttttaacaccaagttyattttccagggggtccactcaaggacctttcttgtttcttctctcttcttccaaaagctcctgaagtgtcagctcactggactcagggatgggctcttcatcatcttcctcactgtgatttgtgtccacttcccctcccactaccatttgcatagtaaatcattttcaagcac

SEQ ID NO: 531268 - DNA, 515 bp, Homo sapiens
ttttgagatgaaattaacatttaaatcagtgaactattaggtaaagtagattgccttccacaatgtgggtgggcctcatccaatacgttaaaggcctgaactgaacaaaaagatcagcctccctgagcaagaggaacttctccaacagactgccttcagcctttatctgcaccatcagctctccaggatctcagacttgccagtccccctgcagattttagacttcccagccgtcgtaatcacgtgagccaattcyatagatagaaagatgggtggatggatggatagatagatgataaacagatgatagacagatggagatagacagatagatagatgatatacagatagatgatatacggatagatgggtagatagataggcaggcaggcagatagatcctactggttctttctctctggagagcctgaacacacgggccaacaatctttccaggcccataaccagatgcaaaggcaacaacagggttcccaggctccttcccagtttcattc

SEQ ID NO: 531269 - DNA, 601 bp, Homo sapiens
aataagaaagaaatgtctggtgtttaaaccgcccagtctaggtgttttgttatggcagtctgagcagacaaagacacagaggtaaagcctttgaagcagggaagagcttggtgtctggctcccaggaggtgacagtgaagaggtgggcagggccatatcatgacaaagcgcttggggaatcttttctgcaggggtctgttgaacagctttcgagtgcagggaagtgatatgatctgattcccatttttttttttttttgagatggagtcttgctctgtcgcccaggctagagtgcaatggcatgatcttggctcactgcaacctctgcctccrgggttcaagcgattctccctgcctcagcctcccgagtagctgggattacaggtgcctgccaccacgcccggctaatttttgtatttttagtagagatggggttccgccatgttggccaggctggtcttgaactcctgacctcaggtgatcttcccccttggcctccttaagtgctgggattactgattcccattttgaagaactggttttggctttggcgtggaagcaaaggatgccacttaggaagtgagagaaagggtcacaggcg

SEQ ID NO: 531270 - DNA, 510 bp, Homo sapiens
cttggcacaggcaagggatctgacccaacgtctcccatcttattagtggaaggaccaagactggacccacaactatgctcctgttttgagtcaccatgctgccctcaagatcagatctcaaaacaagcagacatggggggctcagaaagtccccagcctagaactttcctgtcacccaacgacactaagggctaagctggctgcttattattctggattcacactagaatgaccttggggtgtgtttcacacatgccaatgtctgcagtttcacccccagctaactgactatggatctctgggttggggcctgggcactgatattcatgcagagmttctgagatgatcctattacatcgccaaggttgacacctgcagaaacattgcacgctttttcatttatttagttattaaatatgtaatatttattattatttttccagacacagaagcgttgcaagaatagtacaaagacatcctttatacccttcactgagattccccagtgct

SEQ ID NO: 531271 - DNA, 596 bp, Homo sapiens
gtcacccgacctgttctttaggcacggctttttggatttgccatttacatctgcttcaagttttagaaacttccaggctgtggcttttttgctgctttgggggaacaaagcatgtttggtcaagtgtacagtaaacctgtcctgctcctaaatccagtcatcttcaaaatagatttttgaggtttatagtgctactctccaaatgtcattatcatccctaaagtgaaaaaaaaaggtttaattattatgagcagtgaaattaccatrtaatcttccaattaactgaataaggcaccaaataagtgccctcaagccttaatttccaccttgaagttaaggtaggtatcatgcttaccttgatcatcctacacatcctcaaagtgggcagagttgaaaggctgtctaagcgggtgggatgggaggcggtgcccttccaccctcctgtctgtttgtcgagctctgttggtccttccgattggttagcgaccctgagtgtttctgagagccttttgttgtatgtgagggcagaaccactaatctggccaattccaagcagaaaagatcaagtatagatttcatatctgagttttaagtgc

SEQ ID NO: 531272 - DNA, 652 bp, Homo sapiens
ctgccctccttcccctgtaaaacaatgcaggccctgctggggacccccctccggtttccagggcagaggaggggctctctgcttcagaaactgcaggaaagcaggcgttcacctctgggcctctcagccaaggtacagacacctgagccctttccctgctctcagcggatcggcgtgtgagtgtgtgagttttaagctaactgctttctgaactgcttcgttttctgcatctgtagatttttcaaaaacccctgatggagtctgagctgctgacagaaaaagaggttgctatgatttttgtgaactggaaggagctgattatgtgtaatatcaaactactaaagtaagcctctcctctaatccccagcctggcttggcctcctcggctctcatgcactcgcacctctgtgggtctgtgtgtccttcttgcatgctgccctgtgcttctttctggctttttttttttcttctcattgccactcacaaacaccatcacccttttgtgccttcrtgctttctggaaacgcactccgaatctctcattgcaagagtaggtttcctgggcaccccagagcctgctgttgggtgaattactgtggttgtgaatttccagggctagggcgacgctggctcctgatggtgctggctccat

SEQ ID NO: 531273 - DNA, 536 bp, Homo sapiens
aatctgattttctaattcactaattcattctttagctgtatccattcaaccacgaagcccatttattgtgctctttattcccattatataatttccataccttgtattttctccctgttcttgttttatattgctatgtttggatgaacaaagagagagaatgggcaagcctgggaaagaaccccagataggatgcccccatttggtatcacccaccaagcaacacctgaggccagagcttcctcttcagatcctcaggcagaagcagcaacaggaataggcatgcacagtttatcatccccaactctgggattgggagggcagggaatgcagaggctactcagccttcactgaagttctataaggtttcactggaatgggacttctgggctgccctgattttactcttgtgtcagcagtytgggccacaactgccaatttctaaaggccgaggaaagatagtgattgtcccaaggcaatgatggaagagaagagtggaactcaagttgctttttctactgtctcctcctagagca

SEQ ID NO: 531274 - DNA, 502 bp, Homo sapiens
gggaaatgaaaggggggcacaggaatccagtcaacattgcctgatttacaggagtgacggctcacaagtgggtacacaattgaggatgggtggaagtgagaataaggagagcatctgtgggtaccagttttatggtgtcacagacttcttttgtaaaaataataaacacataaattaaatattaggtgaaatatattttattatatatgygtgtattaaattattatatattttactatatttatatagtttacatatatactatatactaattataaatatatatcaacatattaaataaatacaaatcaataaacaaataaatatttagcctggcacatatctgcacagcaaaagactgtatttcccagcctactttacagctaggtgcctccatatgtttgtttacgttctggtcaatgatttgtcagcaggagtgtctgggcaaatttcagatcctgctcttcaagggaaagagtagatcttccccttccatattctc

SEQ ID NO: 531275 - DNA, 637 bp, Homo sapiens
ctggcatcattgtattgaagcctggggaacttggtttttatctcaggtcaagagaacaggagaaaatccctttacaatctggatgccttttttctctcattataataaattgagaatgagcacaatacactttactgtccatgttcaatcctaggtatgctcttgcatgcatgtagacactgtatgcaaatcacaaaagcaaatcatgaagctgtagctgagaatttgacattgtagtttcttgctctacacacccatcaggtctgggctgacctggctgccctcctccatgttaaacctcctggtgcccatttcagtgccctgaggccaagtctctgcctccaagtgccatgacctccccaaggtcagccttctggtttatcttaccttggctagaccgggtaaacctttacatctggtaatcaacttgactgtgayctgtgctgggaagagaccatgcactcactccagaacacaatcacagggcaggtggtaacatgtgcttttggggaggctttctataaacccatacatatcccaggcattactcttttttatcagagccttttctggggggaaattacagtcaagaatgtaagtttcaccttgccaaggcagtgagaaaaatacttgtgtg

SEQ ID NO: 531276 - DNA, 430 bp, Homo sapiens
ggaggatgatcatagttgctgtttgttctacaaagcttgcagtcctatctagagacacctacttggcctcaatttccttgctcttttggccaattgctgcacactcttgagcagcaagtggaatggcagaagccccctccctagagttggggagtcwgctgctagttctttgaccatgtttacttctccattgaagaagctctctgtcgttctgcctccagcatccccacatcccctgctcatgggaggaaggatgaaatcagaattctccttgccatgcatgaagaaggatctcattagaccttgtattggggcttctttgctagttatgtccctgtccccacacacactggtacataatcactctgtgttgtatgcattcattccttgtcattttgtcatgcatttatgaagaggatatagggttaga

SEQ ID NO: 531277 - DNA, 430 bp, Homo sapiens
ggaggatgatcatagttgctgtttgttctacaaagcttgcagtcctatctagagacacctacttggcctcaatttccttgctcttttggccaattgctgcacactcttgagcagcaagtggaatggcagaagccccctccctagagttggggagtcagctgctagttctttgaccatgtttacttctccattgaagaagctctctgtcgttctgcctccagcatccccacatcccctgctcatgggaggaaggatgaaatcagaattctccttgccatgcatgaagaaggatctcattagaccttgtaytggggcttctttgctagttatgtccctgtccccacacacactggtacataatcactctgtgttgtatgcattcattccttgtcattttgtcatgcatttatgaagaggatatagggttaga

SEQ ID NO: 531278 - DNA, 520 bp, Homo sapiens
tagttctttgaccatgtttacttctccattgaagaagctctctgtcgttctgcctccagcatccccacatcccctgctcatgggaggaaggatgaaatcagaattctccttgccatgcatgaagaaggatctcattagaccttgtattggggcttctttgctagttatgtccctgtccccacacacactggtacataatcactctgtgttgtatgcattcattccttgtcattttgtcatgcatttatgaagaggatatagggttagagatatgttattcctgaaaataaatatctgtaaaggggatcatgagtgcaacaagacaaaataaatcaaggtgtttggatttttcctcttcctccccgtcagccttcctccctctattcttcctcttcactgtctggccctaatgcaggtgttgttgagtttgagttaaytgagaaagaaaaaactgagtttaaaactagccagtccaatttaattcattcaataagcatgcactgtgagtccattctataca

SEQ ID NO: 531279 - DNA, 554 bp, Homo sapiens
ctgcgtcgctacttagctgagtgaccttgactttgaccttgcttaayctcaattacctcacctgaaaatggggacaataatgatgattatataggattattcagaaggtgacatgagataaacataattaaagcacattgccctgtgcctagcgtattgtaaactctcaagaaatagtagccactatgaaagataaaagtgagttactaaaaagctataaaattatatgaatttaattgtagaacttacaagaaagtcattcattatgtaaaagaaatcttagaatggaaaaaggagcctcaaatattaacatgagttaagacaatagggactgtttcaatatggccagagtaatactgacatggagccagtatactgatatttatgacattaagcccttcttgtcccaccagaattctgggcagctctctgggattgaaataccttctgggacttactaaatgagctaataggccccacagtcaagttacctttgaatccttagttgtgaaaaacttggtgttggagctcccagactgtatagtttagttatt

SEQ ID NO: 531280 - DNA, 554 bp, Homo sapiens
ctgcgtcgctacttagctgagtgaccttgactttgaccttgcttaacctcaattacctcacctgaaaatggggacaataatgatgattatataggattattcagaaggtgacatgagataaacataattaaagcacattgccctgtgcctagcgtattgtaaactctcaagaaatagtagccactatgaaagataaaagygagttactaaaaagctataaaattatatgaatttaattgtagaacttacaagaaagtcattcattatgtaaaagaaatcttagaatggaaaaaggagcctcaaatattaacatgagttaagacaatagggactgtttcaatatggccagagtaatactgacatggagccagtatactgatatttatgacattaagcccttcttgtcccaccagaattctgggcagctctctgggattgaaataccttctgggacttactaaatgagctaataggccccacagtcaagttacctttgaatccttagttgtgaaaaacttggtgttggagctcccagactgtatagtttagttatt

SEQ ID NO: 531281 - DNA, 567 bp, Homo sapiens
cacaagtacttgaagtaaatggtttgagggatggtgctatcagcatacaagactccacagaggctataragagagagggaccagctctatatggcagagactcagaaaagggttttctgaaggaagcgagctgtggactaagattgaagctaaggggcaggggtggggtgcagttctaggtggatcctttgccacacaagcaaagagaaagaagctggaaacagcctgcagcctctaggaaattcagggactttagtacaactggaagggggtcaagaggaggctctaccaagacaggaggcaaaagggaggctggtccaggccagagacttgaggcactggaatgccaagtgaaggaatctggtgtcctttgggtaagagtaagcaagggcccctgaacttgggtagtaatagcagatgttgcagaggaaacatcagcaggatttggcaccatattgccaggaagaggtgaagtagcgcagtaggctaaggagggctccaggcaataacaaggatggaagcaataatgccagcaccacacaccagcccttcctgtgcacagaatac

SEQ ID NO: 531282 - DNA, 567 bp, Homo sapiens
cacaagtacttgaagtaaatggtttgagggatggtgctatcagcatacaagactccacagaggctataaagagagagggaccagytctatatggcagagactcagaaaagggttttctgaaggaagcgagctgtggactaagattgaagctaaggggcaggggtggggtgcagttctaggtggatcctttgccacacaagcaaagagaaagaagctggaaacagcctgcagcctctaggaaattcagggactttagtacaactggaagggggtcaagaggaggctctaccaagacaggaggcaaaagggaggctggtccaggccagagacttgaggcactggaatgccaagtgaaggaatctggtgtcctttgggtaagagtaagcaagggcccctgaacttgggtagtaatagcagatgttgcagaggaaacatcagcaggatttggcaccatattgccaggaagaggtgaagtagcgcagtaggctaaggagggctccaggcaataacaaggatggaagcaataatgccagcaccacacaccagcccttcctgtgcacagaatac

SEQ ID NO: 531283 - DNA, 401 bp, Homo sapiens
agtactcaagggtatttccgggcaggtcaaagaacatcactaaactttctaaatcggtaacagaaatattttcacaaygtcttaggtagaggaaaaaagtcaaaaggaggacgttcgtaaagttaggcgtgctcccttgaactcagttttcttttcctcttgagcactcagacagactttctatcttcctttcacagctaaagtagaccgacatgactgggtctagccaacggaagataaacaaaaataatctatcccacttccaggtctgtcccctagaagacctctggcacgatccctcctgccttctcttttcctggacccaaacactgactgcagagaagatctcaggaaagagcagagcatctaggaaagcagcctgtttctgagtcaccacctgg

SEQ ID NO: 531284 - DNA, 681 bp, Homo sapiens
tgggggttatcatagattttctcttccaaaaattaaaaaaaaattatcttaaaagaagcattgaatagttatgagatacatcataaaaatactctctatatgttaattattgaataaatgtttatattattaacttatctcctatccccttccacaagtgatttggagaagcttttaaaaatatagtcaatctgagtaagattagtggagtgtatcaatgtcagtttcctggttgtgatattgtatcatacttatgcaagatgatatcattgggggaccctgggtaaaagagacagtggatctctctgtattatttcttaccacctaatgtgaatctacaactgtcttaaaataagcaagctaaaccttaaaaaataaattcctcatcaaaagagtaaaatatattcctcatctcaaacatacatcatttctttgtgttgggaacactcaatatcttaattctagctattagagactatataatgtattactgttaactgtagttggaatcctacaatgggatagaacactaaaacttaccccttctatctaaatggaaatgccaattaccctgatccgatctctataacattacatatattgaaacatcactatgtaccccataggtacaattattatatgtcaatttaaarctaatttgaaaaatgttgtaattaaaaa

SEQ ID NO: 531285 - DNA, 538 bp, Homo sapiens
actgaagggtctgccttgactgcacaacacgtagtctttaacctcctggagttgattatctgaccaatgccaaatacagattggcccgaggtttcacccctcccagggcagcttgctgctgggggtataatggccagctatttcagccaggtgcccgcaaccctgaagagcaacctccactccaactccttttgggttgagtgagactttgtcctgctacatcacatctctacttctcctgccagtcttgcatcctccccactctcttctcagctcattccaaataaacaccttaagccaaaccttgattcagtgtcggctcagtttgtgctctgggagagcccaggctacaatagcactgctcaacttcttaattttgccaatccactgtgcagaaaatggcatctcattgtattaattttcatttcactgcttcctaataatttggaacacttattaatataaatrttggttgttcagtgatcccttcctctgaatttatttgttatagccattttcttagattttgtggcatttt

SEQ ID NO: 531286 - DNA, 258 bp, Homo sapiens
taacccatctctgattccaaaagctccttcaagtcttggtagataggaaacagggcatcaaaatgacacctaagtccagcccaaggaaaacactaggttgttgcagaggagaagcagcaaccagggtagatgctgagtaaagaccttctgatgtgtaaccaggcttatccccagaaagggggttaagtgtgatggtgataaccccactagtgtggggttatcagcatcayactagtgcccacctgggtggactttcgg

SEQ ID NO: 531287 - DNA, 638 bp, Homo sapiens
ccagtgcctgatagcccaagtgctgaaaaactaactgattttcctttttcactcctacctctgtttcagttgtataaccagygctctcttgctctctctccctctctcccctctcctctctctccctccctttctaccccatctctctctggtcttctttacccccacctcccatccaacattctatcaatggctaaatggttagttccaaatacatgatatctccctaatggatctaccatttttattcccactggcaggccatgcccctgtctgctaggctagtgcagtaacctcccaatggctagctagcctggagtcctcctcaatctcctcaacttccattctgctgcaagtgttaggattctaagaatggtataatctcaagcttttccatagatcccctgctccccatacctactgtatacaaagcaacatccaaattcattaacctggcaccagaatctctctaaattcctttttacttaatctgccatccttgccttacatattgtagtggattgatttgggtccccagaaacgatatgttcaagtcctaccccaccaggtaccatgtgaccttatttggaaatagggtctttgcagatgaaataaagttaaaatgaggtcatacctga

SEQ ID NO: 531288 - DNA, 603 bp, Homo sapiens
ctgatgggctcccggagaaaactcaggtagctgcactccagagagtttggtgaggccccagccagcaccagagacctgtggtgagctggcctccaggagaaggtggtgacagcggcagccgagttacatggcgccagatcccagaggacgagctctggcaaccgcctgtgcactcccctgcagccttttcttcagaagtgaagatgggggagtctggtcaaccacaggtgaggtggcaactcagagggaagcctgcacactgtcagctcagccaaccctaatgaggaccagacacccagaaatatttgcagactcagcaggggcgggagtgagaagtggagttggctggcctcaaaccaccaccagctgagcarggctcctcagccagggtgtgtcttctgggactcccggggcaaaaggtggcattagagatggaaattcaaaacaggctgggggctctggggccaggttttgtcctgggcgactgcttggcactttccccaaaacagcacacggaacctgtgaaaaatgtgctctggcccccttcaaccttgaccctgaggattgagggtgggaactgcggtgggtttgctcaaagtcctt

SEQ ID NO: 531289 - DNA, 201 bp, Homo sapiens
aacttttgtttttttcctttttttattattccttttgtccatctggtttagtataaacaaatatttcttttgaacttcaacaaataagcaatagatggccagtaaaattgcacagaaaacycttttccctccagctaaagcaacttcaaaatacatttatttaataaaataaagaatcaataaaattttaattttaagcag

SEQ ID NO: 531290 - DNA, 339 bp, Homo sapiens
caaataatggcaaacccaactaagagtggcttaagcagtgaagacaatgacttaattatcattatagtcacataacaacagtcagaaaattccagggttgctgtcgtgtggctcagtgatgtcatggaaggagmtttttctgcttggctagtcacagtaagttagattttcatctttaaactcatgacctcatgatcagaagatgtctctaaagctgtagatgcaacaacatttcaaacaggaacacatagggtgacgagccaactccctttgcccaaggctgaggggttactagaaagtcccaagttaactgggacaagttggttaccctatggccac

SEQ ID NO: 531291 - DNA, 669 bp, Homo sapiens
cctagtgaaggctctctgcagtgggcttgccctgyaggtgcccctctgagttcattgcatgccagagactgcaggcggttccatcttttgaaatctaggtggcgccagccacacccccacagctcatgcactccgcagcctggtggatgtgaaggtttactgcctgtgctctctgaaatcagaagattccaaaccccctgtgccaggcagtattattgtgctaaggtggactggaagatctactggctcttacctttggttggattatttgctagggggcctcttgcttctccagactactaacctcctggctcaagcacccacaggcttcaccaatgcccaaccccatctaagtcctggagtgagcaggcttaggtgcttgctgtcgctgtggccaaagcataccttggctacagtgctggatagcacagatacagataaacaaataccaggccaatttgttctcttgctttttattaggagaagaaaggaagtcctttctccatctggacataaagaacttatggagaaagactgggctgaccatgagtggtagaacaaaaataaggcagaagaacaggaaaaaaaaaaacaagaaggagaagcacagaaaaataaataagatgcagagtgatctgtttattgggttggtttctgtgtaagcacaca

SEQ ID NO: 531292 - DNA, 614 bp, Homo sapiens
ggccgccctgttgcagctctcatgccaagacctgcgcctaacggcagggattccggcggtcatcatttattcttggcgctaagctgccgcttctcttttttatcaccacagagtaacgcagaccccaccgtttccttccattctgagccaaccactccagcagccaccggggcgccaggttatgctggggctgcaccacccggcccgaggcttttgaagccacgcctgagcgcggaggatgggcaggatttgccccgtgaactcccgcgcacgcaggctccgcgcgaggcccgggcgcccgagcgkcgattccctcccctatcaccagctccagggtggtgccccccggctgtggagcccagaccccggccgtccagcagcgtatagacgagcccatgtctgcgatgtaactgcaccgcgctggggatccacctcccgccagggtgagggcgccgtcctccagcgtatgctaggcaggcgcgccccgccctcctggtcacgtgaccacgcctacagccgaagaggatgggaaaatgcggccctgttcctgaacaggaagcggaagcaggaaggaactgagaacaccagcatctgctgccgccctgaatcagcgt

SEQ ID NO: 531293 - DNA, 599 bp, Homo sapiens
gttactgcatgggctcatgcaaagtcaagatgaaagaaactctcacgtaaatcctccggctattagaacactccagccagcctggtctaggaataaattcatctcctgcaaggagaggttaaaaggaaccagcagaggagcacatgacatctaatggattaaaaaatgagagtgggaagggaaaggaaggaggggaagtgaggaaggagagaaatacgagtggcagatgaatgcgaaagccaggtcaggtcactgttccacttagatttttcagcagctcaccatctcaagcacacagtaagagccacagcagcctacaaagggggacccgccctctcyttacctgacggccctcatatggggccctctgctccctcgctcctgccctggcccccttgccattcctttcagaggcctgcacattccagccttaggcaactgcccacgttccttgctccacctgcttgttcttctcagatacctgcaggactcggttccgtgagcccacatttgaaactgtactactccctccctagcactcattatcccccctccctgactgactgcgctctgtgacacttacaccttccaaaataaga

SEQ ID NO: 531294 - DNA, 657 bp, Homo sapiens
tgggacaagaggggcttctccttctctcctctttctaggcttcacacaagttcctctcatggacagactcacccagaaccagacagggatggagagttggtaaaggtaattcctggcttccttgagatgcaaaggggagtgtagaaggtagtggcactggtgatgcaggctgacctcccatctccagccccacaaacagtggggaatcattcgcatgtcctcacaacacaagtgtcaccgtgtttatttctcaatacttctgcttatctttaaaatgcactcatccattcgttggctagaatagattgaatgcttactctggacaaggcatggcttccactgaaatgcatgtctggctcatatatttgctctggggaattcttccctagatctcctttcccttactctctgctcttccctcactttcttctcttttctcccattctttcattttctttccctttttcttttctcctgattcaatggtgaacttttgtgaagtcccgtttaagtcttcattcactcaattcataaacatgccttccctttttttctgtatcattcaaggattttggatgcaaataagaaagcttgaactctggttgggaagtaaactctacattttgaactgcatrtactcattgtcatgtcctctgt

SEQ ID NO: 531295 - DNA, 609 bp, Homo sapiens
caaatcatgccttttttcctgtctctctgatacaaaagtgagatttatagatcccactcattctctctcaactggtttcctctactggctaggagtatatatgaacaacagcttgttttcaactatattatttactcattttttaccttttggagtgaaaaaaggttgtaaagttccatctcagtgcagaaattcctgaggaagaaagccctctcgagacaattcagagtgaaatgttgggcaagacccagcattatgtttctcccccagccctccctgagactgagccagtatccaaggatcttcactcctcgagctcacagaacagttgaccaacgaactctcggctgcacgtggctgctgtcaaattcctgggtatccagactatgayggttaattttatatatcaactcgactgggcatggggcacccagatatttggttaaacaaccttctagatacttccgtgagagtggttctggatgagattagcatttgaatcaatagactgaataaaactgattgcccttattcaatctgctgaagccctgaacagaacaaaaaggcaaagtaaaagagaatctgctccctttgcctgactgtactaca

SEQ ID NO: 531296 - DNA, 609 bp, Homo sapiens
caaatcatgccttttttcctgtctctctgatacaaaagtgagatttatagatcccactcattctctctcaactggtttcctctactggctaggagtatatatgaacaacagcttgttttcaactatattatttactcattttttaccttttggagtgaaaaaaggttgtaaagttccatctcagtgcagaaattcctgaggaagaaagccctctcgagacaattcagagtgaaatgttgggcaagacccagcattatgtttctcccccagccctccctgagactgagccagtatccaaggatcttcactcctcgagctcacagaacagttgaccaacgaactctcggctgcacgtggctgctgtcaaattcctgggtatccagactatgacggttaattttatatatcaactcgactgggcatgggkcacccagatatttggttaaacaaccttctagatacttccgtgagagtggttctggatgagattagcatttgaatcaatagactgaataaaactgattgcccttattcaatctgctgaagccctgaacagaacaaaaaggcaaagtaaaagagaatctgctccctttgcctgactgtactaca

SEQ ID NO: 531297 - DNA, 609 bp, Homo sapiens
caaatcatgccttttttcctgtctctctgatacaaaagtgagatttatagatcccactcattctctctcaactggtttcctctactggctaggagtatatatgaacaacagcttgttttcaactatattatttactcattttttaccttttggagtgaaaaaaggttgtaaagttccatctcagtgcagaaattcctgaggaagaaagccctctcgagacaattcagagtgaaatgttgggcaagacccagcattatgtttctcccccagccctccctgagactgagccagtatccaaggatcttcactcctcgagctcacagaacagttgaccaacgaactctcggctgcacgtggctgctgtcaaattcctgggtatccagactatgacggttaattttatatatcaactcgactgggcatggggcacccagatatttggttaaacaaccttctagatacttccgtgagagtggttctggatgagattagcatttgaatcaatagactgaataaaactgattkcccttattcaatctgctgaagccctgaacagaacaaaaaggcaaagtaaaagagaatctgctccctttgcctgactgtactaca

SEQ ID NO: 531298 - DNA, 586 bp, Homo sapiens
ctctcctaggcgctgagaccctgtgatgagaggagaaaccagggaggcggagttccaaatctggaaaagtggcaggcttgagtgctcttcagttactcccacttgagcaattttgctttctaaacctggttaatagcccaaaatgtgggctgcttattgtcatctcccttcactgtgtgtgtgtgtgtgtgtgtgtgtgtgtgtgtgtgcttttcctatgtaaactgctgcaccactaactctgctatactttagaactcagtaaggcaatccttagactcttatacaattccctaaagggtccccttttactctaagtcacagagaaatgttgaacatttaaacctttaaagtgcagttttgctggaagaaaatttcaagggtctccatgaatcatgtctgagccatgtattggccatgaccrcatacttcttgtcagtcttatttcatttggttgttattgtggtttggtttcatttcatgttgctttggagggtcaacctttctttcattcatgacattcaatcaacctttctccccagtgcgtcttcccattttttatgtgtgtgtcaggagatagaaaaat

SEQ ID NO: 531299 - DNA, 544 bp, Homo sapiens
tataaatatgcttccagtttaggagttcacacaagacaaagtgaaaagttagaactcaaaaggagatgtgtagtggctgcttttgctgacttttgcctggcgtaggccaagcctcctggtccgtcttttcctttgtttctttattccagatcaagcttgcaaacctgcaccgtcccagatttcctggggtaagagaagtgattgtctaggagaggcagcttggaatgaataaaaacaggtccaggaaggatccctcagcatttaagaggctcaggaggggtccccctcatcatccttgttgtcytttgtgtttttcaagccgccttccaggtggatagcgattgcaatgagagagaaagagtatggaaggagaataagaagaatagggagacacagaagttaacaacgccctgaatgtctccttccaggacctgctgtgcagtgtccggtgaactcaccagcaagcatttcccagccctgttttaagcaatctccaatgcagatcaggtgctcgtgaataattgggagctcactgtgtctgtca

SEQ ID NO: 531300 - DNA, 506 bp, Homo sapiens
acaatataatatttatggcatttaaaaataactaaatttggtttttaaaaatttccattctattataaaaataacatgactttgaaagcattccctagtgtacaggttaattggctagacatcayagccaaacacaggataacttacgtttgtttttttgtttgcttttttgttttttgtgtgagatggagtttcgctcttgtcacccaggctggagtgcagtggcgtgatctcggctcactgcaacctccgcctcctaggttcaagggattctcctgtctcagcctcctgagttgctgggattacaggcacacgccaccacgcctggctaattttttgtatttttagtagagacaaggtttcaccatattggtcaggctggccttgaactcctgacctcaggtgatccacccgtctcggcctcccaaagtgttgagattataggcgtgaggcaccacgtccagcctacttatgtttttaaataaattgataaaatcatttcaaat

SEQ ID NO: 531301 - DNA, 496 bp, Homo sapiens
tgtgaccaccaggaagggtctgaagaggaggcrttgattgcagttttctgcctctgatcctcaggcatggagccccaccccccaactctcttacacggaggccaaagaaaaagctggaattctccaggagagcaggacctgttaaacagcaaagggcaacccaaaattgtatgagtggccttgccctgagaagctttgaagccagaggttactgaacaactaccctggttaaaaccctaacgtgacaatgataacatgtgactgtatgtggctgtcttcaaaacagcaatgatttaggcacaactgtggatctcagattgttccgtgagtttggtctgataagattgtatgcgtttcccaggggtgccataacaaagtgccacaccctgggcggcttccgccaccgaaatgtattttctcacagctctgaggtcgaaagtccaagatcaaggtgtcagcagggctggttccttttgaggctgtgagggaggatctg

SEQ ID NO: 531302 - DNA, 622 bp, Homo sapiens
atgatgaacagggctgtgaccaccaggaagggtctgaagaggaggcgttgattgcagttttctgcctctgatcctcakgcatggagccccaccccccaactctcttacacggaggccaaagaaaaagctggaattctccaggagagcaggacctgttaaacagcaaagggcaacccaaaattgtatgagtggccttgccctgagaagctttgaagccagaggttactgaacaactaccctggttaaaaccctaacgtgacaatgataacatgtgactgtatgtggctgtcttcaaaacagcaatgatttaggcacaactgtggatctcagattgttccgtgagtttggtctgataagattgtatgcgtttcccaggggtgccataacaaagtgccacaccctgggcggcttccgccaccgaaatgtattttctcacagctctgaggtcgaaagtccaagatcaaggtgtcagcagggctggttccttttgaggctgtgagggaggatctgttctaggctctctctcccccagcttctgggggctgctgcagtctttggtgttccttggcttatagaagcatcatcccaatctctgcttttgcgttcacatggccttctcctc

SEQ ID NO: 531303 - DNA, 621 bp, Homo sapiens
cagggacaaaataagaatgaacaaagatgggaaaaatgtccgcagcattctgcagagtcaagcgctgctgtgagtgagtgtgcatgtttccaattacacatcagggcttggcgagctccaggagtcaaattcagacagaacccaagtgcagtgcgttacacagaacccaggccaggaaaagcttcacagagtctttctttcaactgaggcaattgtgtagacaatttggttcatttcaagaaaaaaataaaactgacagaagaaagaaaaatatyattatattttgcctctcaaaacaaagtcaaattgtgttggtgtataaatcaagattcagtatttccttggctgcttccagaataatagtagatcacaaagagaataagaacaagaaagttcagttctcagccagacgatccaaggtaacaaagggtgagaccctcattccgttactcacaggagcaaacagacaaccaataataattgggcacatgggggtttcaacaagataaactgttatgtgagtccagggtgctaatttctggattcttttgagttgcaaggaaaatatataccgattccccacccccacccacccacataacaagacacaatagttaacag

SEQ ID NO: 531304 - DNA, 551 bp, Homo sapiens
tgagtgagtgtgcatgtttccaattacacatcagggcttggcgagctccaggagtcaaattcagacagaacccaagtgcagtgcgttacacagaacccaggccaggaaaagcttcacagagtctttctttcaactgaggcaattgtgtagacaatttggttcatttcaagaaaaaaataaaactgacagaagaaagaaaaatattattatattttgcctctcaaaacaaagtcaaattgtgttggtgtataaatcaagattyagtatttccttggctgcttccagaataatagtagatcacaaagagaataagaacaagaaagttcagttctcagccagacgatccaaggtaacaaagggtgagaccctcattccgttactcacaggagcaaacagacaaccaataataattgggcacatgggggtttcaacaagataaactgttatgtgagtccagggtgctaatttctggattcttttgagttgcaaggaaaatatataccgattccccacccccacccacccacataacaagacacaatagttaacag

SEQ ID NO: 531305 - DNA, 621 bp, Homo sapiens
cagggacaaaataagaatgaacaaagatgggaaaaatgtccgcagcattctgcagagtcaagcgctgctgtgagtgagtgtgcatgtttccaattacacatcagggcttggcgagctccaggagtcaaattcagacagaacccaagtgcagtgcgttacacagaacccaggccaggaaaagcttcacagagtctttctttcaactgaggcaattgtgtagacaatttggttcatttcaagaaaaaaataaaactgacagaagaaagaaaaatattattatattttgcctctcaaaacaaagtcaaattgtgttggtgtataaatcaagattcagtatttccttggctgcttccagaataatagtagatcacaaagagaataagaacaagaaagttcagttctcagccagacgatcyaaggtaacaaagggtgagaccctcattccgttactcacaggagcaaacagacaaccaataataattgggcacatgggggtttcaacaagataaactgttatgtgagtccagggtgctaatttctggattcttttgagttgcaaggaaaatatataccgattccccacccccacccacccacataacaagacacaatagttaacag

SEQ ID NO: 531306 - DNA, 621 bp, Homo sapiens
cagggacaaaataagaatgaacaaagatgggaaaaatgtccgcagcattctgcagagtcaagcgctgctgtgagtgagtgtgcatgtttccaattacacatcagggcttggcgagctccaggagtcaaattcagacagaacccaagtgcagtgcgttacacagaacccaggccaggaaaagcttcacagagtctttctttcaactgaggcaattgtgtagacaatttggttcatttcaagaaaaaaataaaactgacagaagaaagaaaaatattattatattttgcctctcaaaacaaagtcaaattgtgttggtgtataaatcaagattcagtatttccttggctgcttccagaataatagtagatcacaaagagaataagaacaagaaagttcagttctcagccagacgatccaaggtaacaaagggtgagaccctcattccgttactcacaggagcaaacagacaaccaataataattgggcacatgggggtttcaacaagataaactgttatgtgagtccagggtgctaatttcyggattcttttgagttgcaaggaaaatatataccgattccccacccccacccacccacataacaagacacaatagttaacag

SEQ ID NO: 531307 - DNA, 604 bp, Homo sapiens
aaagaaaaaaaatattcaaacatatttggtttcttattgaggtgaagttcacataacatgaaactaacagttttaaagtgaacaattcagtagcatttaattaacaatgttgtccaaccaacacctctgtctagttccaaacatttttgtcaccccaaaaggaaaccacgtgctcagaaggcagtcactccacatcacccctcttcctagtcctatgctttgcacacaactgactcaccctgacagttataacctaaaagttaaataaaattattagtaaactgcaaacccctggcaagtgaattacttaatatctcttaaaatcctgacatcaaatgattcccctgtraggccatgagatgataagaacatccacctccctctcttgctccagtggaatgaaaccccctcctcaaggagggttacactcaggcataggcccgatcactcatcatatattgacagatgtgcaggcctgagaccccgccttctggagctttctaatgctccttgtttctcaatccaatccttgctaggaattaggctcttctgctgaatgtaaaatttttccatctgcctccataaagtatgtgccacctgtcag

SEQ ID NO: 531308 - DNA, 421 bp, Homo sapiens
tgcctcaaacaagaaatagttttccatcagtctccaaatctttgaatagtaaatggcaaaagtatggaaatgcaagatggagtggggcttaatgttgccacaacattcctacaatactgggatagtcttccttgggaattactttctttcctatcacgtatcaataaggaaagccaaatgtagaaataaagaaatctccccgatttacttaacacacggaggtgacagttacagcgcaaattgagggaagagtaaatgatttcmacaaatgaaccaaaaacacttaaaagccacatttaagagaaatggagtcataaaggcaatatttgtgagcagataaaaaatcagcacagaaaaaggtgagaaatacacaatgtctttcatcaaggtgcaaggaaatgtaaaataacattaaaagtac

SEQ ID NO: 531309 - DNA, 503 bp, Homo sapiens
gagggatgtgcagagatctcagtgcagcccttcacacagggcatcatgggggaggcatgaagatggtcccaactgtcttctgaggacactctctggtctcatctggagccccgagcgtgggcttctaaaccactcaagggaccagtggaaaaacttgtctgattcaaaacccagtgaagaagccagggstgttggcatgtgcctgtagtgccagctacttaggaggctaagatgggaagatggctcaagcccaggagttcaaggccagcctgggcaaagtagagtccctgtctgtcacaaaagagtaaaattaaataaataaaatcaaccatgcactgctgtcctccttgcacaccactgaagaggctcctgccttctttggcggtccctccattcatatccagcatcataagatgtcaggcacacatctcagcctgctgtattcccagcagaggaggcagagccaggacaccagcccattcttcctaactaatctgccgttt

SEQ ID NO: 531310 - DNA, 503 bp, Homo sapiens
gagggatgtgcagagatctcagtgcagcccttcacacagggcatcatgggggaggcatgaagatggtcccaactgtcttctgaggacactctctggtctcatctggagccccgagcgtgggcttctaaaccactcaagggaccagtggaaaaacttgtctgattcaaaacccagtgaagaagccaggggtgttggcatgtgcctgtagtgccagctacttaggaggctaagatgggaagatggctcaagcccaggagttcaaggccagcctgggcaaagtagagtccctgtctgtcacaaaagagtaaaattaaataaataaaatcaaccatgcactgctgtcctccttgcacaccactgaagaggctcctgccttctttggcggtccctccattcayatccagcatcataagatgtcaggcacacatctcagcctgctgtattcccagcagaggaggcagagccaggacaccagcccattcttcctaactaatctgccgttt

SEQ ID NO: 531311 - DNA, 503 bp, Homo sapiens
gagggatgtgcagagatctcagtgcagcccttcacacagggcatcatgggggaggcatgaagatggtcccaactgtcttctgaggacactctctggtctcatctggagccccgagcgtgggcttctaaaccactcaagggaccagtggaaaaacttgtctgattcaaaacccagtgaagaagccaggggtgttggcatgtgcctgtagtgccagctacttaggaggctaagatgggaagatggctcaagcccaggagttcaaggccagcctgggcaaagtagagtccctgtctgtcacaaaagagtaaaattaaataaataaaatcaaccatgcactgctgtcctccttgcacaccactgaagaggctcctgccttctttggcggtccctccattcatatccagcatcataagatgtcaggcacacatctcagccygctgtattcccagcagaggaggcagagccaggacaccagcccattcttcctaactaatctgccgttt

SEQ ID NO: 531312 - DNA, 592 bp, Homo sapiens
aagagaaaagtctgatgaggcctgaatatcatcagctattatagaggaacgagtttgatttaattgtagcagctacacttgtacacatttgaggtggagaaaaaactggacctcctgacacagtcatgttttcatgtgaacaggaaagattctactgcagcaggccatgggccagcccagacaactgtctgcagccaacacctgctgtgtgtacttagctcttcactggcagcctcaccttccctgcaccccacatccttaatgggggtgatgctctttccaaagggcagaaaactggttcttaaggggtcaacaaatcttagacatcataatggtttgtggccctttaaattttcattctctacagcacattcttactctttagtattgaatttcctttgttgtgaggaaattaaattaagtttaaatygattagtttttctttctgggaggtgataaggatggaaaggttgtacaacagggccccaacccaccctggcaccagcagccctgtccactgaggagtctgaagctcactcacacttgggcctaagtgtttgactgggatgtctgatggatggaacctttccca

SEQ ID NO: 531313 - DNA, 592 bp, Homo sapiens
aagagaaaagtctgatgaggcctgaatatcatcagctattatagaggaacgagtttgatttaattgtagcagctacacttgtacacatttgaggtggagaaaaaactggacctcctgacacagtcatgttttcatgtgaacaggaaagattctactgcagcaggccatgggccagcccagacaactgtctgcagccaacacctgctgtgtgtacttagctcttcactggcagcctcaccttccctgcaccccacatccttaatgggggtgatgctctttccaaagggcagaaaactggttcttaaggggtcaacaaatcttagacatcataatggtttgtggccctttaaattttcattctctacagcacattcttactctttagtattgaatttcctttgttgtgaggaaattaaattaagtttaaatcgattagtttttctttctgggaggtgataaggatggaaaggttgtacaacasggccccaacccaccctggcaccagcagccctgtccactgaggagtctgaagctcactcacacttgggcctaagtgtttgactgggatgtctgatggatggaacctttccca

SEQ ID NO: 531314 - DNA, 574 bp, Homo sapiens
tacttcagcagtttcaaccacttacttcccaagcctacaaaatctcccttttgctccagttgcaaggggggaggcattggctaaagcaaatcatagtctctgtgggtacacctgggaggcaatgaaacgcaatagctgaatgcccccatccccacagagacagaactatagtagcctgccattcactcacactgcagaaacatctttgtctaagcataacttcgtccagccagttacaggaacaagtggcttcatctcaaagtaaaagttaaaaagaaaaaaaaattaaaggaaactgggatcttttggctcaactagccagtcttgcatctggaactaaaatcagaggccagcctcaaaaatggacaaaggacttgaacagatgtctctccaaagaaggcatacagatggcccgtaaggacctgaaaagacctgcaacatcactaaccattagggaaatgcaaagcaaaaccacsatttactaccgcttttcaaccatcaggatacctagtgggtttctttttttccattcctttctttaaaaaaaaaaaaaaacttttattttaggttcggg

SEQ ID NO: 531315 - DNA, 574 bp, Homo sapiens
tacttcagcagtttcaaccacttacttcccaagcctacaaaatctcccttttgctccagttgcaaggggggaggcattggctaaagcaaatcatagtctctgtgggtacacctgggaggcaatgaaacgcaatagctgaatgcccccatccccacagagacagaactatagtagcctgccattcactcacactgcagaaacatctttgtctaagcataacttcgtccagccagttacaggaacaagtggcttcatctcaaagtaaaagttaaaaagaaaaaaaaattaaaggaaactgggatcttttggctcaactagccagtcttgcatctggaactaaaatcagaggccagcctcaaaaatggacaaaggacttgaacagatgtctctccaaagaaggcatacagatggcccgtaaggacctgaaaagacctgcaacatcactaaccattagggaaatgcaaagcaaaaccacgatttactacygcttttcaaccatcaggatacctagtgggtttctttttttccattcctttctttaaaaaaaaaaaaaaacttttattttaggttcggg

SEQ ID NO: 531316 - DNA, 545 bp, Homo sapiens
taacataccaaaaagaatgttggtcgcacaggaaggaagccatagccccttgccgtctgcattagggaggattttaactttttgctagttaattttgtaatttttwaaatcttgtataagattgtgcaccatttgaaataagaaaaaaatctttaaaaaaatttttttaaaggagataaagataatgaaagaaaggagccttgaggacagtaattgccaaaccatactgctgagttcaatgcctgggtgacagacattttacctgcaaaacacataaggttttccttcttagtaaactcatgcaggctttactattaaaacacagaagcactatcgcaggaaggacattgacataaagtgctttcagggcccttgaagcacggactttaatcaattttcctgtgtctactgaaggaggcttcagctctttggtttaaaataacccagtggatggcccttaatttcagaaattgttctatgcagtttttttctcagcaggatgcagaaagcaatccccactgtggctgagaggagagcgggcctgg

SEQ ID NO: 531317 - DNA, 422 bp, Homo sapiens
gtgcaccatttgaaataagaaaaaaatctttaaaaaaatttttttaaaggagataaagataatgaaagaaaggagccttgaggacagtaattgccaaaccatactgctgagttcaatgcctgggtgacagacattttacctgcaaaacacataaggttttccttcttagtaaactcatgcaggctttactattaaaacacagaagcactatsgcaggaaggacattgacataaagtgctttcagggcccttgaagcacggactttaatcaattttcctgtgtctactgaaggaggcttcagctctttggtttaaaataacccagtggatggcccttaatttcagaaattgttctatgcagtttttttctcagcaggatgcagaaagcaatccccactgtggctgagaggagagcgggcctgg

SEQ ID NO: 531318 - DNA, 555 bp, Homo sapiens
ctccccacactgggaccaaagggctatgagagaaacttctttgtcttgatgagcctggcagttcacagggctgaatcaatatctgttcaatcaataatggaataataaacaaactcctaaggaattggaaaggaccagaaaaccctttcagaatctacatgaactmtccatcttcctcctcagccaccttcatttaacttcatcaaactgacagccagctttgaaaactaatgctttctagtttttgttctattgagtttagtgacaagcatcgcaatagtgattgtatctactatacttccctgcacattccctgtgtggctggtagaatcaatcagctcttctacagcaagatggaagagtacttgtcactaaacccaggaagcagaggttgcagtgagctgagatcatgccactgcactccagcctgggtgacagagcaagactccatctcaaaaaaagaaaagaaaagaaacactgcagagagctgctggtggaaagcgtccctcgtcacgccccctcccaggctccccattgcgtgggatctagtgtggt

SEQ ID NO: 531319 - DNA, 543 bp, Homo sapiens
tcttaataaggtatttttaaaagactttgaaagtttagaaacgatacatataccattaacaaaagaataattctctacacatgaggctcatcatcactcagtcctgggggactggagggcagagaggaaggtaaaaaaagaaaggacacccaccagacagaccaaatcagggaggcaatgatagatgccatatgtcatagccaaatcacagccatattatcacagaatttaagtgattttaaacaatagtaagtagggttttaagcaattctaccaacaaaagccaaaaaatttatataaattttttttttaaaaaaaagaaactaggccttgctccatctcccaggctggartgcagtggcaggaggatagttcaatgcagcctcaaactcccagagtcaagtgatccttccgcctcagcctccgaaatagctgggactacaggcacgcaccaccacagccgcctaattttctgttacttattctttgtggagacaagagttggtctgaactcctggcctcaagtgatcctcccacctcggc

SEQ ID NO: 531320 - DNA, 543 bp, Homo sapiens
tcttaataaggtatttttaaaagactttgaaagtttagaaacgatacatataccattaacaaaagaataattctctacacatgaggctcatcatcactcagtcctgggggactggagggcagagaggaaggtaaaaaaagaaaggacacccaccagacagaccaaatcagggaggcaatgatagatgccatatgtcatagccaaatcacagccatattatcacagaatttaagtgattttaaacaatagtaagtagggttttaagcaattctaccaacaaaagccaaaaaatttatataaattttttttttaaaaaaaagaaactaggccttgctccatctcccaggctggaatgcagtggcaggaggatagttcaatgcagcctcaaactcccagagtcaagtgatccttccgcctcagcctccgaaatagctgggactacaggcacgcaccaccacagccgcctrattttctgttacttattctttgtggagacaagagttggtctgaactcctggcctcaagtgatcctcccacctcggc

SEQ ID NO: 531321 - DNA, 612 bp, Homo sapiens
tgcggctgacggctcggctggatccatccaagcatggacaggaaaacgggactgtggggagagggtggtgcagacgggccgcagaccctccttaggaagagaagccggaaactagggagtcatgtgcagttagaatcctcttggaagactagtaggatgtgaggttggagaggtggacgacgaccagaaaattcccttgtcttgccaggcttytgacctaactatgagtttcctccgcgcatccagcctgccctgctctggcccctaaagtacagcagtaacactcagtggtgtccctgccttcctggaatgcgcgttaacaattctgattcttactcatggcaataacctacacaccacatagacgttaaatgtggttcgggtcagactctagggcaggactcactgcctgcaccttgtcttggctccaccagcttgaccttgagcaagtcacaacctgtgggtctcagtgttccttactagtaaaccgtaggtaattcctcactagtaaacagataatatttgtgcctgtctcaaagttgtgaggatttaatgaatttgtgttcctggtatacagtaagcaccgtgtacaagttggcttttatttacacc

SEQ ID NO: 531322 - DNA, 556 bp, Homo sapiens
ggctctgcaagctctgaacacagagctgagtctgaatccacttctttcttaacatccatgagccttggtgccctcgtttgaacaacaggcctcatctctaggcctgtttcaaggatgatatcaaaggatggcagaatgcaccatcccaatatgccactttggcacaaggaacattgactcaaaggaacttagaaaaaccgcaggtccaagaagagcactctgaccccaaccccacccacttaccactcttttttttccctagaggyaggaaataaaacttccatgtgaaaggcaccctccctttagcgggaggaaaggatgattcttatcactagaagcagggagtcaaagctccagagtattttgaacaaacagacttcgtgaaataactcttatcttcctttcatttccccacttatcttacttttcacaattgcctctctttgttcaacccagtagctaagcacttgggttttgccacttctttgggtcttcattttcctatggggactctcgtgtatgtgtaaaaatctgtgtgctttcctcgtgttaatcc

SEQ ID NO: 531323 - DNA, 556 bp, Homo sapiens
ggctctgcaagctctgaacacagagctgagtctgaatccacttctttcttaacatccatgagccttggtgccctcgtttgaacaacaggcctcatctctaggcctgtttcaaggatgatatcaaaggatggcagaatgcaccatcccaatatgccactttggcacaaggaacattgactcaaaggaacttagaaaaaccgcaggtccaagaagagcactctgaccccaaccccacccacttaccactcttttttttccctagaggtaggaaataaaacttccatgtgaaaggcaccctccctttagcgggaggaaaggatgattcttatcactagaagcagggagtcaaagctccagagtattttgaacaaacagacttcgtgaaataactcttatcttcctttcatttccccacttatcttacttttcacaattgcctctctttgttcaacccagtagctaagcacttgggttttgccacttctttgggtcttcattttcctatggggactctcgtgtaygtgtaaaaatctgtgtgctttcctcgtgttaatcc

SEQ ID NO: 531324 - DNA, 608 bp, Homo sapiens
ggtcccagctacttgaaaggctgaggcaggaagctcacttgagcctgacaggtcaaggctgcagtgagccatgatygggccacggtactctatgctgggcagcagagtaagaccctgtctcaaaaacaaacaaacaaacaaacaaacaaacatcactgcattggaatcccattagttgtctaatgatactaaaacacacacacacatcagtcatatttagaaaatatcaggggaccaattcactatttttggaagtataaacaaagagaaagggtataacatgtatcctgatttttctgtataaaatatactgcatatcaggggttggagaaccagagcttgagagtcaaattgggcctgctgctctgtttttgtgaataaagttttattggaacacagtgggtttgtctgtggcctctctcacactatggcagtagagctaagtagttgccaaaaagaccatatggcccagaaagccaaacatatttatcattgggccctaatgtaggttgaaccctgccttagggtatctatatatttgacgaggggagctatccttttttaaaaaataatttttatttttaatttttgtgggcacatagtaggca

SEQ ID NO: 531325 - DNA, 592 bp, Homo sapiens
agctctggacatagcatagtgagctggccacacagcatcactggcagtggtatgctgataaatgcttgagggtaaggagacctggtttgagcatttgtcaatttctgtgatgtaaacactcccaccatggttgagcctccaacagagacctcgctgaagggagatttaggaagagatgttctcaattggttcttgggagtcctgggagccggctgcactaccctctgaagacagtgccccaagagagcagaccagggcccttgctaaaatcattttcttaagggtaagccttagagtatagcttatctattgtatgttgcctttggctcttaaccattctccttgggatcttgattacactattaatttgcttagcaaacacttccctcagagtataacaaaatatactgtgagataaaagtcttctgatggctacatgcatctccagggcaaatagctaggaaggtgagcaggtttggtcataggtcagtgacttttctttcctttgaattccccaaaagtcttggcaagagctccatagctttcccattttctttttttgtgtgtgtrtaatgcaggttatgagacatac

SEQ ID NO: 531326 - DNA, 625 bp, Homo sapiens
cttagtctgttgcctgactctacctgcttgtcggggactagaagtctttcctaacagaccttaatctattgctgtgtcgttttctgtaacactgggttcacacttggcagtgactgcttttggtaaaatatgtaattttttataactggacgactcaatttctccttcatcctctgctagagcctgrcattccagatgactacttgtggagttgtgttaatcgaaccttaaaaattattaaatgatgacctggtgcggtggctcatgcctgtaatcccagcactttgggaggctgaggcgggcggatcacaaggtcaggagatcgagaccatcctggctaacacggtgaaaccctgtctctactgaaaatacaaaaaaattagccgagcatggtggcaggtgcctgtagtcccagctactcaggaggctgaggcaggagaatggcatgaacctgggaggtggagcttgcagtgagccaagatcgcaccattgcactccagactgggtgacagagcgagactccatctcaaaaaaaaaaaaaaaaattagtaaatgatttatttgacacttcataattctggattttggatcaatctgggaaggctgtgatttcattttggtttgt

SEQ ID NO: 531327 - DNA, 599 bp, Homo sapiens
gaggaatgtgctttgaggatggaggaaggggccaagarccaaggaatgcaggtggcctctagaaaaggaaggaacagattctccctaggagtctccagaaggaacacagccctgccaaaactttgatttttaccttattataatagacacattttggacttctgagccccagaactatagcatagtaaattgtgttgtttgaagctactaggttcgtggtagcttggaaattataatgcagtggtaatttctgtgccatgtctctagtaccttaatgcttggtgtggtcttgcagctcacctgttatgcatgcactgattactatcaccccagctcacacagcatccctcgagacagtcatccagtacatccctctctgtgaggacactgcagatacagaagagctgatgaaatgttttctggtctttaaaactgtggtacggtggtgaggctactgagatggctggcagatcacactgtcctcagccctggtctctgggaatgggtgggatctgcagcaacatgattataccacagtctctgtaggacccccttggacagggaggtgccaagggctgaggcgagccagcagcatcgtg

SEQ ID NO: 531328 - DNA, 617 bp, Homo sapiens
gcacccatttctcattcttttctcatcagcctcaccaaaacccagtgcagatcacaggctgcacccatcactgcctttctggagggaacccaggcagctgctttgacttccgccttgaggatgagacrctttacccattattgcagcattttgctttcttatttgacatcatgcttcatttctcatccttctgttgctgccctctggggaccttcagtgccattaatgtctccaaaagttctgattaaataggtcagcattgatttctctctctttctctaaccactttgcatactagtatcacaagctcctccttgcctctggtcctgaaatgtacagattccttctgcaggccccacatccatcagcagattcacactcagagcttgtccccctccactaacggtgcattagaaccatggttggcctgactgtgggaaaactgctgaactaaacctgcctccttttagctgaaacctaggaaagcaaaacttcctgaattttctcaatctattcagacacacgcaaggtttgaatgtatttcagttcttggaagaaggatggcaaaatcaatactgaaataacaagaatgaagcaattcagaaaatggatgtgca

SEQ ID NO: 531329 - DNA, 645 bp, Homo sapiens
tgtggtttgagggtacaagagctacagacagcttttcaaaggggacccaactaggtttctaaaggagcctacttttgatcaggcatggttaaatagtgctacaaaatctagattatttcgagtaataaggaaacactgaaggaagatgaactctgagctatcttaagctgccttctatccagatgctcagtaccgtgggtgcagagatctaaacacaggcatccactttttatgaggtatatattttgctaccctccattatataagatgctccacgccactgcactttccatgtacaacaagggccagaaagtcagcacttcaggaaaagagaatgcaaaaataatataatttctccctcagcaaaacggtctttatccygcatttagtaagcagagcagggataatggaatcctcgttcctctgtgatctctgctaaagctgagaagagtgttctcccaactttaaagtgtttttgtggaagcccaagtctccaaatgcttagaaattcaggaaagaggcacttacaggatgcccatgaagaggggtctgcaaaaccaagacaacactaggtcaagcagaaacattcggctaaggaaatggcagaagaaagagtgagatcattaaatggaggactctgaaacc

SEQ ID NO: 531330 - DNA, 363 bp, Homo sapiens
acatagagctgcatcatccctccttccttctggagttcctgggacaaaacctctttctctgaatatsatttctttgggattcatctccttgaaagtccacattttagattaaaaaaaaaacaaacgcaatttaccccatcattttccctctgaaaagcggtggctatgtggcaatgtggaaatgataggaaggtgggagcaagggtggctaagggagaagggcgcctccaaacggctgagagggcaagcgccacgcttcatggctgcccagccttggcacctcacattcacaccaacgcccttgattttcaaactgacattcttctttttaactgcaaatgaaacaataaaagagaggaccag

SEQ ID NO: 531331 - DNA, 547 bp, Homo sapiens
atggaggctcacactgggagaccccttctacacctccaggctgtgggggtccagcccccaacagggcaggaggcccctggggagggtgtggtttttgcccctgagaaatcacaggtgtctcctagtatagataagcaagcacccttcttccaatctgtcaatctgtcctacatcgcagatgacactatggctccagttcctcaccctgccctcctcctccttctctcccactactaaccacctgggcaaccctaaaggcatcccacgtsggccttcccaagcgtggcattgggggcaaggaggaggaggggagtgagagaaggaggatgctgtcttcattagtttgcaaatgatttgtgtggtcaggatatgtaaataaataatttatatacatataaaagaaacgaatataacacacatattttatataatatatataatgttcatttctgtcgctctgtgaaatataggttattttataataactcatgtatgagactctgtcttgctggctggtgttcccacgctgtgggcgagggtgctgacc

SEQ ID NO: 531332 - DNA, 509 bp, Homo sapiens
ttttcatagcctaaagattaaagtgatagttgaagaattaagtaaagtttatttcaaggcaacctttttgaatttcagttgatataggaaaaaagggtgtctactcactatgaaagttactctaagcttaagtttacaatttggaaagaaaaggatactaygtaagaatgtaaatttcatatatctttaatttttatggggttgggtataatttataacatgagtttgcaaggaatagtaaagggagttaatatttattgagcattattatgcacgaactacaatcttggcacttcctagtaattaactggttgactgctcagaaacccaggaggcagaaccaggcagcctgggtggaagtcctcaatctgacagtcaccagccttcagaacttgggtaagttcctttgacttcaggatctccctctgcacaaaactgggtgttcccagctcacagatcaaatgagataatgcatgcagaagtttagcattgtgcctggcggggagcaa

SEQ ID NO: 531333 - DNA, 509 bp, Homo sapiens
ttttcatagcctaaagattaaagtgatagttgaagaattaagtaaagtttatttcaaggcaacctttttgaatttcagttgatataggaaaaaagggtgtctactcactatgaaagttactctaagcttaagtttacaatttggaaagaaaaggatactacgtaagaatgtaaatttcatatatctttaatttttatggggttgggtataatttataacatgagtttgcaaggaatagtaaagggagttaatatttattgagcattattatgcacgaactacaatcttggcacttcctagtmattaactggttgactgctcagaaacccaggaggcagaaccaggcagcctgggtggaagtcctcaatctgacagtcaccagccttcagaacttgggtaagttcctttgacttcaggatctccctctgcacaaaactgggtgttcccagctcacagatcaaatgagataatgcatgcagaagtttagcattgtgcctggcggggagcaa

SEQ ID NO: 531334 - DNA, 613 bp, Homo sapiens
aggatggctgcattcactaggtcctgagcaacctttgctggacatgaaagattttaaaattagaagctcttctttggtgaaagaaataactaagataaaaagggtgccaggtgtggtagctcacgcctgtaatcccagcagtttgggaggccaaggtgsgtggatcacgtgaagtcaggagttcaagaccagcctggccaacatggtgaaaacccctgtctctattaaaaatacaaaaaaagtagctgggtgtggtggcacatgcctgtaatcccagctacttgggaggctgaggcaggagaattgcttgaactcgggagacacaggttgcactgagcaaagatcgtgtcattgcactccagcctgggcgacagagtgagactctgtctcaaaataaataaataaaataaaatgaaataaaagtggaaagttgcttattttgatcaatagagggtgtcattacagaagcagtgcttattcaatgataattaaataaatgtaatatctatctccagtgttacagaaaggccaccaaagtgccccttacctttcaaaggcttagagtctaaatggctattttcccaccaaaaccccagagctatttcctccttta

SEQ ID NO: 531335 - DNA, 612 bp, Homo sapiens
cgattctccagcatatgtggtttgttatggtttagaaatatgagtttgaaaggaaatggggacattgcggcctcgattttccagttaagatgtacttataattaaaacaaaggtgttaaaagacaagagctggagagagaggaggtgggggttaggtctctgggctgtttgttccctgcacccctcmttcacacacttgctgatgctgtccctgacatctgatccaaatggcccctgtcctatgctttctccaccatcgtccttatggggatccctatctctcactctgataccccactcccaccccacttctatgcctggtgacagtttctatttagttcctaaacattaattctggtctctattgtactcttttaaaagggacatggccccagagcacaattcacactgttcacccaccctagtaattttctgctcccagaaggcacctcgccgtcctctccacgctttcgttccgcgcactccctatgcaccctgtgtcccagccatgtccaaaacacacgggacccctgggtagagccgagccttttccctggggctttcttctccctccatcagggtttgccgcccatgcctgtgagcctcccgctg

SEQ ID NO: 531336 - DNA, 612 bp, Homo sapiens
cgattctccagcatatgtggtttgttatggtttagaaatatgagtttgaaaggaaatggggacattgcggcctcgattttccagttaagatgtacttataattaaaacaaaggtgttaaaagacaagagctggagagagaggaggtgggggttaggtctctgggctgtttgttccctgcacccctccttcacacacttgctgatgctgtccctgacatctgatccaaatggcccctgtcctatgctttctccaccatcgtccttatggggatccctatctctcactctgataccccactcccaccccacttctatgcctggtgacagtttctatttagttcctaaacattaattctggtctctattgtactcttttaaaagggacatggccccagagcacaattcacactgttcacccaccctagtaattttctgctcccagaaggcacctcgccgtcctctccacgctttcgttccgcgcactccctatgcaccctgtgtcccagccatgtccaaaacacacgggacccctggrtagagccgagccttttccctggggctttcttctccctccatcagggtttgccgcccatgcctgtgagcctcccgctg

SEQ ID NO: 531337 - DNA, 246 bp, Homo sapiens
ggaaagatgaggcaaggacttaactcagtgccagattcattggaaacccagtgactctgcrtcatgacccttccataatccacaccttctattctctgatggtctgtcaaattcagtggtgtttcaatgagcacccactaattgaagctgcatgttctatgcacagatttatagtgaaaataatgaagggggcagccatcccaaactcggtcacaaggcactaagtgactcatgacctgcaggggg

SEQ ID NO: 531338 - DNA, 641 bp, Homo sapiens
atgggctgctgtgattgatggagagcccactatttgttgaccagagcatgcctgtacagtactcctgagttaggcttctagttagtttttgtactaagactgtagtttttatttgaggactggagtatggaggcatcctcaggccaaatgtaatttagtctaaaatgctgctccctcagactgaaaagcctccatggagagtgggcgtggccaaagtgattttccagtacasgcggcagaatcctatgtgcacatgtcagggagaggccacccagtccagacctaagccttcagccatctgtgtgaaggagaaagtggtaacatgacggaaatgattgtactgcaatctggacatgacaatggcattcgtttcgtccataccactcgtttagacgccctgctccctcctggacacagaagctctgcaaaggcctctaggccactaggagggcgtggtgtgtgccctcgtagctaaggagaatgtccttttgtattgtctaagctttacagtgacatgacttgtgagttgtggactgtatcggtcggcagtgggaagtctctcttttgaacaaattttaaggatattctttctgccttgtatttctgagctggggccatcttgcaacaagcccagcaaacac

SEQ ID NO: 531339 - DNA, 641 bp, Homo sapiens
atgggctgctgtgattgatggagagcccactatttgttgaccagagcatgcctgtacagtactcctgagttaggcttctagttagtttttgtactaagactgtagtttttatttgaggactggagtatggaggcatcctcaggccaaatgtaatttagtctaaaatgctgctccctcagactgaaaagcctccatggagagtgggcgtggccaaagtgattttccagtacacgcggcagaatcctatgtgcacatgtcagggagaggccacccagtccagacctaagccttcagccatctgtgtgaaggagaaagtggtaacatgacggaaatgattgtactgcartctggacatgacaatggcattcgtttcgtccataccactcgtttagacgccctgctccctcctggacacagaagctctgcaaaggcctctaggccactaggagggcgtggtgtgtgccctcgtagctaaggagaatgtccttttgtattgtctaagctttacagtgacatgacttgtgagttgtggactgtatcggtcggcagtgggaagtctctcttttgaacaaattttaaggatattctttctgccttgtatttctgagctggggccatcttgcaacaagcccagcaaacac

SEQ ID NO: 531340 - DNA, 450 bp, Homo sapiens
accacccaactgagctcagcctaaattgccagttcacacaatcatgaactagacaaatagccattgttctaagccactaagttttgaagtagtttgttatacagtaataaataacagatacaccctggaataaatccagtataattatattgyagtgcctgtttctgctgtcattgctactggtgcaaaggaaacatgaagctcacccttgcctctggaggaagaaccgtgggtgaaatcctgagacagaaaccctgtatgcggctctccttttatctgaagaccacccgcctcatagctgtggaaacaggagcggatgctctaatcatgccactagtcatctccaggagttctgccatgtaaggtaacctggtctggctgccatccatcatctctgtgtctcaaaatatcacagctcctttttaaacctcaaagccaaaaagcaaacct

SEQ ID NO: 531341 - DNA, 643 bp, Homo sapiens
ctcataaactcatgactgaacctagctgacagcagaagaaccacccaactgagctcagcctaaattgccagttcacacaatcatgaactagacaaatagccattgttctaagccactaagttttgaagtagtttgttatacagtaataaataacagatacaccctggaataaatccagtataattatattgcagtgcctgtttctgctgtcattgctactggtgcaaaggaaacatgaagctcacccttgcctctggaggaagaacygtgggtgaaatcctgagacagaaaccctgtatgcggctctccttttatctgaagaccacccgcctcatagctgtggaaacaggagcggatgctctaatcatgccactagtcatctccaggagttctgccatgtaaggtaacctggtctggctgccatccatcatctctgtgtctcaaaatatcacagctcctttttaaacctcaaagccaaaaagcaaacctttcaacactggggtggttcagtgcccaaaaccatagtatttctaccatgttctgatgatgacttcataaatcatcattgatttaatttcacaaagctctccatgacataagcacagccatagccacagtcctgacccatatttaatggtgaaat

SEQ ID NO: 531342 - DNA, 643 bp, Homo sapiens
ctcataaactcatgactgaacctagctgacagcagaagaaccacccaactgagctcagcctaaattgccagttcacacaatcatgaactagacaaatagccattgttctaagccactaagttttgaagtagtttgttatacagtaataaataacagatacaccctggaataaatccagtataattatattgcagtgcctgtttctgctgtcattgctactggtgcaaaggaaacatgaagctcacccttgcctctggaggaagaaccgtgggtgaaatcctgagacagaaaccctgtatgyggctctccttttatctgaagaccacccgcctcatagctgtggaaacaggagcggatgctctaatcatgccactagtcatctccaggagttctgccatgtaaggtaacctggtctggctgccatccatcatctctgtgtctcaaaatatcacagctcctttttaaacctcaaagccaaaaagcaaacctttcaacactggggtggttcagtgcccaaaaccatagtatttctaccatgttctgatgatgacttcataaatcatcattgatttaatttcacaaagctctccatgacataagcacagccatagccacagtcctgacccatatttaatggtgaaat

SEQ ID NO: 531343 - DNA, 450 bp, Homo sapiens
accacccaactgagctcagcctaaattgccagttcacacaatcatgaactagacaaatagccattgttctaagccactaagttttgaagtagtttgttatacagtaataaataacagatacaccctggaataaatccagtataattatattgcagtgcctgtttctgctgtcattgctactggtgcaaaggaaacatgaagctcacccttgcctctggaggaagaaccgtgggtgaaatcctgagacagaaaccctgtatgcggctctccttttatctgaagaccacccgcctcatagctgtggaaacaggagyggatgctctaatcatgccactagtcatctccaggagttctgccatgtaaggtaacctggtctggctgccatccatcatctctgtgtctcaaaatatcacagctcctttttaaacctcaaagccaaaaagcaaacct

SEQ ID NO: 531344 - DNA, 643 bp, Homo sapiens
ctcataaactcatgactgaacctagctgacagcagaagaaccacccaactgagctcagcctaaattgccagttcacacaatcatgaactagacaaatagccattgttctaagccactaagttttgaagtagtttgttatacagtaataaataacagatacaccctggaataaatccagtataattatattgcagtgcctgtttctgctgtcattgctactggtgcaaaggaaacatgaagctcacccttgcctctggaggaagaaccgtgggtgaaatcctgagacagaaaccctgtatgcggctctccttttatctgaagaccacccgcctcatagctgtggaaacaggagcggatgctctaatcatgccactagtcatctccaggagttctgccatgtaaggtaacctggtctggctgccatccatcatctctgtgtctcaaaatatcacagctcctttttaaacctcaaagccaaaaagcaaacctttcaacactggggtggttcagtgcccaaaaccatagtatttctacmatgttctgatgatgacttcataaatcatcattgatttaatttcacaaagctctccatgacataagcacagccatagccacagtcctgacccatatttaatggtgaaat

SEQ ID NO: 531345 - DNA, 541 bp, Homo sapiens
ctataacttcattaaagaaaacatggtcacccctgcctgaactgcacccagattgcaccccagtggctctgagccaggacaggtggccagtcaccccctgcctgaattgcacccagatggcaccccagtggctctgagccaagacaggtggccttcccacctgcctcattaccttacggtgacacccctccccccacccccaccctgaggggctgcagtgtgataattctgggaagagcttcagaacctatctgtcctgcatgctaatccaagtttccaagtgattttatgtgcattttctcatccagtgctcccaacaattacagcttgtctttcactaacygaaagcattcttctctatccctcccagtaattcctgcagggcataacctgtgaggaaaagattagagatggctaatattttgggtataatgaacgaagccagcttcagtttattttcattaaacacaattcccatttccaggtgtttgttagttttggtgaacatcacaggatggcctttccccggtaagtgcagcaa

SEQ ID NO: 531346 - DNA, 605 bp, Homo sapiens
ggttagaaatgcagaatctcagctcccacccaagaatctgcattttaataaaattcccaggaatgaatgtcacaataaaatatgataagtgctgatttaacacatggtcatggacgcatatgcttcatgaataatcaagatcaaagagctatgaattagaaatgaaaaaaagcatccacttccaattctattttccagattggaaagacaagagtatccacttattttccttgtctcttggagatcagaggggtagaaacaatgtgttgtaactacaatggtttactgtaaaacattctaggacttgctctagtcactaaatatcaccctttgatagagcagcttacacctcattgctagtcaygctgacctcttgttcacaatccaatagcatgttcattgaacaaataaacattagggcctatttgtcttcattaaggactgtatgcttgtaggggaaaaaatgacacattgtgcttatcttgacttccctgttccaagatcccattattgtcttatcacccttttgatgagtgacattgaccattaaccatatcagtaaacatcacagcttcctaaacacaagttctcatcataattaaggg

SEQ ID NO: 531347 - DNA, 618 bp, Homo sapiens
agttcgccactccctccccgagaaaaagaattattttgcccaaaatgtcaatgggttgaggttgagaaactctgctatagracaaagctaggcataaggtatgtgtttcccattggcatgtgccgtattaaggagtgagatagaaatctttattaaagtaaggccaatataagcagttagtagacagaaacccagtacaaactcagagtaaatggtgttgttctccttaggagaagagctaagcaaacaaagcccatttcagctcagttaccatgtgctgacacaaatccacaacaagggataatagcaaagcaattcgttccacttgattatagttcattttgctcaacaggaaagtcagatttgatgttcatgatcatcaggcataaatcctacaaaatgtatttaataagaatgcaatgtatttttaactgccttcattaatttgattgtcccccctttaaaacaataaataatgactaaatctaggtcacgttttctctttgggccttggctcctcagtttcaaaagtggagagttctactctgtgagtcctttagttcatgaatccttgctgatgcaggatacatatttttttccttgaaagggaaacagaat

SEQ ID NO: 531348 - DNA, 497 bp, Homo sapiens
caatggtaaccctgtgacaaaaggttcaggctcagagctctttcttagaggcgcactggaataaagcagtttcttgcttctctgttatacagtaaaactttctactgccagaggctgcttcctccccttcccacaagtattcctgctctaggacgaaaacttggaactatwtctcaatgaaggactagattagttatgggatccaaagtaactgaaacaagtaaaatctgattgggtttatgagctgctgggcacataaaagattcacccttgctctgtggtgctgtgtgttgttcagccattgcatgtgatttacagcccatcggtaactatttcaatgatcaggaacgactcataaagcatggtgagaactacctatagtttccgaaatggaaatgccagggaaatccccctttcacccaagcagccagcatcacaaggaatcctgcctgttagaaaagaaaaggaaatgggaccaaactcagctgatacctgcc

SEQ ID NO: 531349 - DNA, 528 bp, Homo sapiens
caggatgtacactttaggcctaaaagggaaagctatatgctgatcattgctgtttcccgtgaacccattttgattatgggaagtacagtatattagtccattattgcactgctataaagacctgaggttgggtaatttataaagagaagaaatttaattggctcacggttctgcaggctgtacaggaagcatagaagcttctggggaggcctcaggaaacttgaaatcatgggggaaggtgaagggaagcaggcacatcttacatggccrgagcagaaggaaggtggtgggggaggcgtcatacacttttaaacaatctgatgtcgagaactcactcactatacagtaccaaagggagatggtgctaaaccattcatgacaccttcaccccatgatccaatcacctctccctggacctgacctctaccactggggattacaattcgacttgagatttgggtggagacacagacccaaaccatagcatatggacaaggtgtacaaagcagcaagtcatgcaaattgcag

SEQ ID NO: 531350 - DNA, 564 bp, Homo sapiens
gcttcccaccatggccatgccccagagggcatcctctttcttctgagtctcctgtgctcatagtaaaaaaaaaaaaaaaaaaaaaaragagagagagagagagagactacagttctgaaatgccccatctccaataaattttaccctatgctcctatctctgcccctgccagatgcctgccaaagtgaagggcagggatttagccagccactgtccactccctgcccactttgtggctcaactcagaggcatccttcaagttccaccatatcatattcatgtactatcttctttgctgtaatttatggacacaattggagcacttccgagctccaattaagatggtgaatgtatctcattttataatatttagcaagacttcaccactggctgaccttccaaatgcgaagattgggctatattttaattctcacttcgtggtgatagctttgtgtctgagttatgagtgagagaatataagatgctattgttttcctcttttctaaccacaaagggcaattgcattggaagtggaaatttcatagaaaggaaaatgaagacacc

SEQ ID NO: 531351 - DNA, 494 bp, Homo sapiens
aacacaccatcgcatgcaatcagtgtgcatgtttacctgtggatttcccatgttcctactggaatgtgagcaccgtaaggactgatatttcatgggtctctctctgttgcatttccaggacctagaataacacccagtgcataggaggtgctctatttgtagaatgtagagtgtttgtagaatgcragtgtgctctcacagcacgactgttcacgccatcacggtgctctcttgctctattctaattgtctgtcactccaatcgcctcccacacagggctataagatcttcaggggtgggggtgttatctcctttgccccaatgcctaggtatttgtatgtcttggatgcttggaaagatgaatggagaaatgaattgatgagattagatgagtcagaattatgcctaaggttggccttgggcccactgttcgacaggtaaattggtttgcttttaattcatcagacatttcagtgggctgtataaatgccatc

SEQ ID NO: 531352 - DNA, 494 bp, Homo sapiens
aacacaccatcgcatgcaatcagtgtgcatgtttacctgtggatttcccatgttcctactggaatgtgagcaccgtaaggactgatatttcatgggtctctctctgttgcatttccaggacctagaataacacccagtgcataggaggtgctctatttgtagaatgtagagtgtttgtagaatgcaagtgtgctctcacagcacgactgttcacrccatcacggtgctctcttgctctattctaattgtctgtcactccaatcgcctcccacacagggctataagatcttcaggggtgggggtgttatctcctttgccccaatgcctaggtatttgtatgtcttggatgcttggaaagatgaatggagaaatgaattgatgagattagatgagtcagaattatgcctaaggttggccttgggcccactgttcgacaggtaaattggtttgcttttaattcatcagacatttcagtgggctgtataaatgccatc

SEQ ID NO: 531353 - DNA, 466 bp, Homo sapiens
aaacttctccatccaaagaaatcttactcagaagactgtctcagacctgcctgtgggaggattctctcgctagccagaaagtataggaccaatgcccgctggagattttaccatttgttttctccctctcacctgtgcccagacacccatagggtgaccgacctctgccctacggggatcctggcagtcccagcagcccagaaacccccatccaggtgccagggtcasaggcgcaggaatgtgtcacagactcctggcatgacaacaagtgtcgtggccgagacaatggccaggctgcctctgctatgaggcagtgcgtgttcttgcatcattatgtgttcccccagaacagaaacgaggggctggggctggccctcagacacaattctcctatttacttcctggggcagccataacaaagcaccacaagctgggggtgcttaaatgacaggaaggtactctctca

SEQ ID NO: 531354 - DNA, 466 bp, Homo sapiens
aaacttctccatccaaagaaatcttactcagaagactgtctcagacctgcctgtgggaggattctctcgctagccagaaagtataggaccaatgcccgctggagattttaccatttgttttctccctctcacctgtgcccagacacccatagggtgaccgacctctgccctacggggatcctggcagtcccagcagcccagaaacccccatccaggtgccagggtcagaggcgcaggaatgtgtcacagactcctggcatgacaacaagtgtcgtggccgagacaatggccaggctgcctctgctatgaggcagtgcgtgttcttgcatcattatgygttcccccagaacagaaacgaggggctggggctggccctcagacacaattctcctatttacttcctggggcagccataacaaagcaccacaagctgggggtgcttaaatgacaggaaggtactctctca

SEQ ID NO: 531355 - DNA, 588 bp, Homo sapiens
accaagtgaaaggggaagccccttataaaaccataagatcttgtgagaactcactcactatcacaagaagagcatggtggaaatagtcccctgatcgaataatctccrcctggtcccttccacgacatgttgggattatggaaactacaattcaagatgagatttgggcggggacacagccaaaccatatcaactaagaaggaaaataaagcaaggtaagaggatggaaaatggccagtgtgtccctttccagagggtggtcctcagagagccatcccaaggatgatgatatgtgggcagagaatgaaagaaggcagacactgtgccatgcaagtgtcagaagatgttcctgagagaagaaaaagagaaagaatctgagatgggtttgtgtgtgtccaaactaaataagaagagttggaggccggatgggtctgaagggcaggtcgttcaggaactggagattgagtggtctgcaaagaggtaaaagatgagaaaagaacgtgaggccaggaaaggggcattgggcaggaagcatggtgaagaggtgcccagcatggcacacattgattccagttggcctggccaaaa

SEQ ID NO: 531356 - DNA, 588 bp, Homo sapiens
accaagtgaaaggggaagccccttataaaaccataagatcttgtgagaactcactcactatcacaagaagagcatggtggaaatagtcccctgatcgaataatctccgcctggtcccttccacgacatgttgggattatggaaactacaattcaagatgagatttgggcggggacacagccaaaccatatcaactaagaaggaaaataaagcaaggtaagaggatggaaaatggccagtgtgtccctttccagagggtggtcctcagagagccatcccaaggatgatgatatgtgggcagagaatgaaagaaggcagacactgtgccatgcaagtgtcagaagatgttcctgagagaagaaaaagagaaagaatctgagatgggtttgtgtgtgtccaaactaaataagaagagttggaggccggatgggtctgaagggcaggtcgttcaggaactggagattgagtggtctgcaaagaggtaaaagatgagaaaagaacgtgaggccaggaaaggggcattggkcaggaagcatggtgaagaggtgcccagcatggcacacattgattccagttggcctggccaaaa

SEQ ID NO: 531357 - DNA, 566 bp, Homo sapiens
ataaagaaaaaaaaaaagtctctctgacttattttctagctccaggtcaaaggacaaaatggaaagaacattttgaggctgtattttctcatttagaaccttcttaccacttctcraatgagcatcacgttgcataagaaaagggtttcccccacccctcacctgtgttcacaggtagggccgactctttctttcctgcacctggggtcacacagaagattctcaagtggggcttcttctacttgcatttcagagctagacagggctggaagaatggtgatacacgcctgaccaattttattgtcatctgtcaaagagcccactagccctgtaagagggagacaggtgatgggaataaagaagctagagtttcagggctgccatcacggtctggggtttcattgcaatattctgtgattttatgggaatgcaaataatggatacgaaggaagacagagaatgagagacctgcagaggtaagagtaactcacctgaagtcgaaaagaggccaaggcccaggctatttcatgatttcttatcaacttttatttttatattccaatcac

SEQ ID NO: 531358 - DNA, 477 bp, Homo sapiens
acctgtgtgtaggtaaggaggaaacattcaaatagaaatttgcatccttggccctgaacactaaactacccgctgaaacaagagccacattctctcctatgaatcrctaaatcaatgccttgtttatggatttcattttcattcactcaaaacttagggcatcaataaacggaggaaaaagacgataaaatactgaaatgagtgaaagtcaggaaacttaaatcgcagtcttgttgacgtaggagggagagaaggggctagaacaatggtctacaacttctctctttgttcttgctcatgggcactttcctctattggccctgaactctctcttgccttcaagtctcactagattttccttgcacagaattatctaggtcagggcttctcagagttgaatgtgtatgtgagtcacatggggattttcttaaaatgcatattctgattctgtaggtctggggtgggccttcctgacga

SEQ ID NO: 531359 - DNA, 644 bp, Homo sapiens
agctaattagccctgttaatagaaatgttattctacttatccccctccccaactatcatcaaagtatgaaggtcagagctcttttgtcctttttaatagtttgttttcttaaaagtggttgagtgtgaattttctcttgcatgggaaaaggatcattgttttcactggcatcagtgaatgcgctcacacatgactgtttaaatatgtcttcattcgttagtcagtaggatcgcatcctgctggaagacagattgtgtaacctcagaggcttccagggaaactccagtcccagggagagagtgggacagtggcatgctctatagagaaagcacyccttgttctctctctctgcctccccaaccccgccccactgatctccctcctggtgcaggagggactgttggagcagaagaaaacatccagctcacctgtcactgaatagcccctgttgcaaaggaacacaggctctctggcctccagcccacatctgcggaagcttggttggagtgaggctgcttacggctgctcccctttcagtccatgtttggtttctgcatccaagaggcagagtgagaatcagaccctggtcgggggtgatccctgaaggcaacgcagtcatatgcagtctcttggcaagcagccag

SEQ ID NO: 531360 - DNA, 518 bp, Homo sapiens
gaattttctcttgcatgggaaaaggatcattgttttcactggcatcagtgaatgcgctcacacatgactgtttaaatatgtcttcattcgttagtcagtaggatcgcatcctgctggaagacagattgtgtaacctcagaggcttccagggaaactccagtcccagggagagagtgggacagtggcatgctctatagagaaagcaccccttgttctctctctctgcctccccaaccccgccccactgatctccctcctggtgyaggagggactgttggagcagaagaaaacatccagctcacctgtcactgaatagcccctgttgcaaaggaacacaggctctctggcctccagcccacatctgcggaagcttggttggagtgaggctgcttacggctgctcccctttcagtccatgtttggtttctgcatccaagaggcagagtgagaatcagaccctggtcgggggtgatccctgaaggcaacgcagtcatatgcagtctcttggcaagcagccag

SEQ ID NO: 531361 - DNA, 658 bp, Homo sapiens
aaatgtctgaactattgtcgtgcccttcaaaactggagttttctaaaataatcttatttttatacttgtatgttccagcaatttaagatatataccattgaaagggaaataaaacatttttgtttatttgaataaataatactcccaacctgttgcttttggaatgttttgtaaatacttctcttggrtcacatgtctggcggtccattacgtccactccttcattgtgggttcctggaaaatgtcaaggataaaatggagtggaagggagggttcaggctcaatcattaagatgcaaaacatgctgaaggtggggagggtaaagtgctttagagtctggaaaccctacaggtggaaagaaaacacctgcagagaagaaactcagtaagcacatttcagcggtcttaaggatgggacagatggcttagcttggtcctggggactgagggtgaccaggttggcaatgcctgtgcggtcactcccatgatcaccctgcagggagatggcattctaccatttcacagacgagaaaccatctctgagtcacctgcccagaaaaacacagctaaaaagtggagaggaacccagctctgttcccctccaacagcccagctctttctctgcactacactctggtccatccgccatcctgaaccac

SEQ ID NO: 531362 - DNA, 391 bp, Homo sapiens
ggcggtgggcttctctgccttgcgccttcagtgtcttaagggggacttttaggatcaccagctcagtgctcagcccctggggatctgtgtcccgtgaaggcctccatgtactgcagacccgtgtggaggaccggcttctcctttcctgccctttgccctctgtgcccacgygacccttctgtgccccccaggctcccacagcaccctgaacagtgaggaggtctcccattcagttgtccatcctggtcctttctacagtgcgggcgggctgggctgagctttatactgaagagcatagcaggccactcagtgcctagtatggggccaggctgcctctcccagcaaggtgagcaggagcaagcactttccacccagcccgagcacagccctc

SEQ ID NO: 531363 - DNA, 504 bp, Homo sapiens
aggctgcctaagaaagaagagaatttgaagacaaaaatgatgaaaagacatggaatgcgaggagaaaagagtgtgcagaggagagggtgagcaggagatggaggaagagcagggaaatagaagctgcacttcgcagatgtggaggctgtgaggaacgcagagtgagggaggatgagagaccgtggcaagttctgtgttttaggcctggacaagctcagtggtttgttgaagctgcattatccatacctagaacagcaggggacacacagtagtccttgataaaaatgtgctagatgaatgaatgacatcatgataatgaaggccgttttaactcagggtctgagaccaagtccttccaggacagcccatctgcggtggtgagctggcagaaaggatcctctctccaccctcacacctcgatccccygcacactaacaattctcctctataaggatgcccacccttcgtcttatacttagaaatctgcaggaaccccaggaatga

SEQ ID NO: 531364 - DNA, 518 bp, Homo sapiens
ggctgtccctgctacgggggagccccaytctccccaccaaacgctggggcacagaccgggcagacgttgattcagcctgtaccccacataccatgtcccccacgtactgcgtctaacagcatggacaggtgcctgagccttgacagggtagacattgactcagcgtatgccccacgtgccacgtcccccatgtaccgtgtcccacacctgccatgtcccccacctaccacgtcccccacctaccacatctaacagcatagacaggtgccccagctctagacggccacacccgtgtggctccagcaccgaaaaggagtagacgtctccagacttgtcggccaccaagaccttctcctccgaggctatgaaagtcagggctgtacacctccttgccacggtcctagaaggccagaaagacacccccattagcttccaggagcagcgcagggtcctcgacagcctggcaggccacgtgggcggtggcaggcaccggtacctggccatatgctctgttttcc

SEQ ID NO: 531365 - DNA, 538 bp, Homo sapiens
aaatgattcttaagtatataaagagttgctcttctggccaggcgccagtggctcacacctgtaatcccggcaccctgggaagccgatgtgggtggatcacctgaggtcaggagttcaagaccagcctggccaacattgtgaaaccccatctctactaaaaaaatagaaaaaattagccggtcgtggtggtgcatgcctgtaatcccagctactcgggaggctgaggcaggagaatcacttgaacccaggaggcggaggttgcagtgagcctagatcgtgccattgccctccagcctgggcaacaacagcraaactccatctcaaaaaaaaaaaaaaatgctgaccaccagtagagggatagtcaagaaaactgctgtagctgggctcagtggctcacgcctgtaatcccaacattttgggaggccaaggtcagcggatcacctgaggtcatgagttcaagaccggcctggccaaaatggcaaaaccccatctctactaaaaagacaaaaattaactgggcatggtggtaagtgcctgt

SEQ ID NO: 531366 - DNA, 637 bp, Homo sapiens
ctgcttgggcttgggcaagtcaccctagctctcagatgtcatctgtaaatgatgacaatgccaatgtggcactgttctgagagtcagacagaacgtatgtgtgcttcacatatggtgctcatgaagtgctatcattatctaaggaaaacagaaaacgaagttcagagtctctctaaacgcatgacaccagaccaacagggagtttcaaaaaataggtctgaagtaaatcaattctcctggtctcaatacactgaaaacaaactattaggggactgaccraacccaccttaggaaccaccttacgtcaccttctgtctctactgcaaaaccctcccttaatactgttcaaatacgctgacaatccagatccatatccaatggaaccagcaatcatgcctgtgtgccagcaatgtcagggagggaagccgatctctgatgaattaggacatcttaccagacagactttgttcaaaattcaatttttttttaaccaagtgccattatgttttaaacagtcaatccagagttaagattgaagggcctcaacctcagtgaaatctaatggaccatgaagactgactagccactgatttattatcaggtagcaataaagatgggaaagtccaaatttatcagg

SEQ ID NO: 531367 - DNA, 637 bp, Homo sapiens
ctgcttgggcttgggcaagtcaccctagctctcagatgtcatctgtaaatgatgacaatgccaatgtggcactgttctgagagtcagacagaacgtatgtgtgcttcacatatggtgctcatgaagtgctatcattatctaaggaaaacagaaaacgaagttcagagtctctctaaacgcatgacaccagaccaacagggagtttcaaaaaataggtctgaagtaaatcaattctcctggtctcaatacactgaaaacaaactattaggggactgaccgaacccaccttaggaaccaccttacgtcaccttctgtctctactgcaaaaccctcccttaatactgttcaaatacgctgacaatccagatccatatccaatggaaccagcaatcatgcctgtgtgccagcaatgtcagggagggaagccgatctctgatgaattaggacatcttaccagacagactttgttcaaaattcaatttttttttaaccaagtgccattatgttttaaacagtcaatccagagttaagattgaagggcctcaacctcagtgaaatctratggaccatgaagactgactagccactgatttattatcaggtagcaataaagatgggaaagtccaaatttatcagg

SEQ ID NO: 531368 - DNA, 579 bp, Homo sapiens
acccacaccacctctacccctcacgtcaccgacgccactcacatgccactcacatrccattgacacgccacccacgccactcacatgccacccatgccacccacaccacctctgcccctcacatgtcacccacgccactcacatgccactcacatgccattgacacgccaccacgccacttacgccacccacgctactacccatgccacccatgtgccgtccaccacccacgccacccacaccactcacatgccacacacagaaccagtgtggaggctggacagggggggcttctcacctgagagcgtgaggaagcagtggggagcacctggcaattctggagagctcagccaagtcaccaaagtgccgtgccgcgctagcacgctttgctgtgcgggcatcggttgtgtcacacactgggccgtgtggtggccttgcgtggtgagggagcaggaggcaggctcaggacacaccacaagagcaaatgtcagagctgggacccaggggcagcaccctccagtagcagcacccagatcccgcctctctccagccccggggaggctgagccggggtccccag

SEQ ID NO: 531369 - DNA, 340 bp, Homo sapiens
gtgacttctggttaaacactcgagaaaaacacaggcttggctttttcttcttttctgtgtctactctatctgacgtcagatgcaggtttgctgagtgccaggtgagtgcctaaagggctgttcccccacctccccctttcacttgcaacgtgcactcagygcgtgctaattaaagcctcccaggagcctgaccactggcctcattgcccacccaccgtcttctctctcccccttccccctgccctctcctctcctcctcttttaaatactcagcacctcaaaatgctctctggaaaaggcctggccacaggtcctgctgtgactggtgccactttttcct

SEQ ID NO: 531370 - DNA, 264 bp, Homo sapiens
ctgcgccccggccccctccctgagcctggtctgcaccccagtgagctgtgtgtccagcccctgctgccaggcggcctgtgagcccagcgcctgccaatcaggctgcaccagctcctgcacgccstcatgctgccagcagtctagctgccagccggcttgctgcacctcctccccctgccagcaggcctgctgtgtgcctgtctgctgcaagactgtctgctgcaagcctgtgtgctgtgtgcctgtctgctgtggggctgcttc

SEQ ID NO: 531371 - DNA, 264 bp, Homo sapiens
ctgcgccccggccccctccctgagcctggtctgcaccccagtgagctgtgtgtccagcccctgctgccaggcggcctgtgagcccagcgcctgccaatcaggctgcaccagctcctgcacgccgtcrtgctgccagcagtctagctgccagccggcttgctgcacctcctccccctgccagcaggcctgctgtgtgcctgtctgctgcaagactgtctgctgcaagcctgtgtgctgtgtgcctgtctgctgtggggctgcttc

SEQ ID NO: 531372 - DNA, 264 bp, Homo sapiens
ctgcgccccggccccctccctgagcctggtctgcaccccagtgagctgtgtgtccagcccctgctgccaggcggcctgtgagcccagcgcctgccaatcaggctgcaccagctcctgcacgccgtcatgctgccagcagtctagctgccagccggcttgctgcacctcctccccctgccagcaggcctgctgygtgcctgtctgctgcaagactgtctgctgcaagcctgtgtgctgtgtgcctgtctgctgtggggctgcttc

SEQ ID NO: 531373 - DNA, 633 bp, Homo sapiens
cgtgatcagtgcctctgcctctgtgtcttctgggcgcccccttagtgtcccccacccgacaggactggagtacagcgcttcaccaccacagggcccttgggacatgctgtggcaggagatggctgtttcttcaggaagtaaaattaacctcggttttttggtgtggcttcctaagaagaagaacagatgaatctcaaagtcagcaatcttgtaatagtaccttgtaatataacaaaggtgacagcacctaatggaagtctgtgtctgggagtggggaacccctgaccctgggccctctgtgcaccgtgctgccaggtgcttgtgtccagggctggggatgccacaccctcgatgctttcctggactgacgggcggtctcaggacagccartctgtgcggccccctctgccctcacctcaagaggtcacagcattggcctgtttttgtttcctcagttaagctttggaaattgagatgtcactaagacaggcaatagggagtaaaacaaaggcacaggcaaaaactaaaggacatttttaccaaataccctcaatttagaattaccaccacttttcccatggacactcatcactaattatttaagttgggaaaaatattgagaagtacaagaat

SEQ ID NO: 531374 - DNA, 387 bp, Homo sapiens
tccccaagtgctttgagatattactggcgcctcccggcacccagtgtggtaaggaagctggctctcagccttgttgctgctcttttatgggtcatctgcsttttctctcctgggactcagcatcctctgtctttgttttctgcaggttcaccatcactctccaaatgtgggtttcttttgatttagcctgttgggattcactgggccttctgaatgtgaggatttatgtctggaaaatcctcacctgacatctccttgaatgtgacctctcctgcatgctttattgtctctttctagaatattctttacataaagatgaagcctgtacattctctcttctgtgtcctttcatatttctttgattttctatctctttagctttcttgg

SEQ ID NO: 531375 - DNA, 387 bp, Homo sapiens
tccccaagtgctttgagatattactggcgcctcccggcacccagtgtggtaaggaagctggctctcagccttgttgctgctcttttatgggtcatctgccttttctctcctgggactcagcatcctctgtctttgttttctgcaggttcaccatcrctctccaaatgtgggtttcttttgatttagcctgttgggattcactgggccttctgaatgtgaggatttatgtctggaaaatcctcacctgacatctccttgaatgtgacctctcctgcatgctttattgtctctttctagaatattctttacataaagatgaagcctgtacattctctcttctgtgtcctttcatatttctttgattttctatctctttagctttcttgg

SEQ ID NO: 531376 - DNA, 387 bp, Homo sapiens
tccccaagtgctttgagatattactggcgcctcccggcacccagtgtggtaaggaagctggctctcagccttgttgctgctcttttatgggtcatctgccttttctctcctgggactcagcatcctctgtctttgttttctgcaggttcaccatcactctccaaatgtgggtttcttttgatttagcctgttgggattcactgggccttctgaatgtgaggatttatgtctggaaaatcctcacctgacatctccttgaatgtgacctctcctgcatgctttattgtctctttctagaatattctttacatraagatgaagcctgtacattctctcttctgtgtcctttcatatttctttgattttctatctctttagctttcttgg

SEQ ID NO: 531377 - DNA, 500 bp, Homo sapiens
acaccccgacgcctgctcccaggctcaccctcctccagctcagaggctgaccctgaacactgcacagcggtcagaggccagccccaggagcaggtgccacagtgctcaccacagcccccccgacctccaccacctggcacaggcctgaasgggggttcccaccatttcccaagaacccctcggaacctggcaggtggcctgcttctgcgtggcctgcggtgtctgctcccgagtcccctgcttggtggtgcttgctgcccccccatggtgctgagacagcggaagggtgcccatgagggccagaacgtcccgcctggcagagcagggtgaggagagccacagcaggtgaccaggagctgatccccagggcttcgcgcccagagcaacccccagcagcctgcacatggagcccgtctccatctcggcagcggaagctgtgctacgatgaccagaaggagcagcaccagcgttggccacatctctcctgattctcgcagctg

SEQ ID NO: 531378 - DNA, 500 bp, Homo sapiens
acaccccgacgcctgctcccaggctcaccctcctccagctcagaggctgaccctgaacactgcacagcggtcagaggccagccccaggagcaggtgccacagtgctcaccacagcccccccgacctccaccacctggcacaggcctgaaggggggttcccaccatttcccaagaacccctcggaacctggcaggtggcctgcttctgcgtggcctgcggtgtctgctcccgagtcccctgcttggtggtgcttgctgcccccccatggtgctgagacagcggaagggtgcccatgagggccagaacgtcycgcctggcagagcagggtgaggagagccacagcaggtgaccaggagctgatccccagggcttcgcgcccagagcaacccccagcagcctgcacatggagcccgtctccatctcggcagcggaagctgtgctacgatgaccagaaggagcagcaccagcgttggccacatctctcctgattctcgcagctg

SEQ ID NO: 531379 - DNA, 573 bp, Homo sapiens
atggctgctgacggcttcctgccccaacactgcctggtgggacccctctccccaacacgcccctgtcccatgtcccactgcatcgtcctctctgaacagggacctctggctcccgaccgtcccggcagcctgggagcgttcgcctgcggaaagctggcagtggccacagaaggaatcgttattaacaagcctgttcatctaagcttctctatttttatctctttcttgggacagagtcttgctctgtcgcccaggctggagtgcagtggcacsatcttagctcattgcaacctccacctcccaggttcaagcagttctcctgcctcagcctcccgagtagctgagattacaggtgcgtaccaccatgtctggctaatttttgtatttttagtagagatgggggtttcaccatgttgggcaggctggtctcgaactcctgacctcaggtgatctgcccaccttagcctcccaaagtgctaggattacaggcaccagccaccacacccagccagcttctctatttttaatagaatcaaaacatggttttatttcattttaaacaatatggaaaac

SEQ ID NO: 531380 - DNA, 461 bp, Homo sapiens
cccgaccgtcccggcagcctgggagcgttcgcctgcggaaagctggcagtggccacagaaggaatcgttattaacaagcctgttcatctaagcttctctatttttatctctttcttgggacagagtcttgctctgtcgcccaggctggagtgcagtggcacgatcttagctcattgcaacctccacctcccaggttcaagcagttctcctgcctcagcctcccgagtagctgagattacaggtgcgtaccaccatgtctggctaatttttgtatttttagtagagatgggggtttcaccaygttgggcaggctggtctcgaactcctgacctcaggtgatctgcccaccttagcctcccaaagtgctaggattacaggcaccagccaccacacccagccagcttctctatttttaatagaatcaaaacatggttttatttcattttaaacaatatggaaaa

SEQ ID NO: 531381 - DNA, 496 bp, Homo sapiens
tgccgccccaggaacgcacgcctggcagggggcaaatcccagacggcgaggacggggcaggaggcccagcagcgctgggagggtggggatgagccgggaggaggtgackcagcaatcccagtgggaatctctgtcggagacaggccggtgccccacgccattcagtgagtgcgaagccaggtgtgaactgcagcagacatgaagggaaggcagtgacgaattctcacctccctcgtcaggcgcctgcttggatttgaatgtgggctcagagaaggccttgggtgagcagggtcaacacgaggtgggcgttggacctgcactgtctttctggcacagcaaagccactgactgggcctccggggtgatcaccggcggcctgcgcccagacggatttcagaattgctatgggctggtggccactcgcacccgtgcccctcttgggagtggggagtgctatttgcagctactctgtcccattgtagactagggggatcca

SEQ ID NO: 531382 - DNA, 549 bp, Homo sapiens
acacggtgatctggccgggcacctgcccagggtcccacccgcagaggaacccgcctcttccaggttggttccgggctcctggacggatcacgcgctgttgacatgcagttgtagcttttttcttgtgggtgggagcaatgctcttcccagctccacctggaattccaccagggatgggtgcagcatcctaaccccgccttcccttggagaattcactgctctggacagacgcctggcccaggatttcaaaggcgcatctgttatggaccgggcccccagaggagacgtctttttgccattttgttttctgaccggagggttttttggaggttgccctcccacccaccgggttgctggcagcccagcccgtgctgttttcagtggacccttttgcaaatgtcttcacaggctcccgggaagctgagctgaacagtgacctcagccttgagcaatcccgaggatgtgtttgctgaggaaatcattaaacagggagatgagagcactcaacccccmacatgccaggctctgcgggaggctgcttattcctgt

SEQ ID NO: 531383 - DNA, 681 bp, Homo sapiens
acagagagctgcatcacacagcacatgtgtatatagactcatgtaccacacacattacatgcatgtgcacacaaacgtatcacacaacacacatgcatataaatttgcaccacacaccacaccacacatatgcatacagacatgcgccccatgccacacatgtacgtgcacacaaacatgtatcacacagcacatgtgcatatagwcagcaccacacacatcacacacatgtgtatacatatcacacatagacttacacatgtgcaatgcattcccacacacaccatgtacattcatatacccacatgcatcacacacactgccacatatacacgtgtgttgcatatgtgtgcacatgtaccacatataccgcatacgtgtgcatgggtgcatgccacacacacacacacacacaccatgtacctgtgtgtaggtgcatgcactcacatataccatagctatgtacacacacaattcgtatgtacacatatctgcacatagacctgcatttacatatatacctgccatagaagccagatgtgagaatgaaaacctcagaacccagaagccgttgtgagaggagtgtggtgatcaggagatggactggggctgggagaaagcccctcccacgggctgcagtgctcgggacttacagaagaccccagggtaagggacaagctg

SEQ ID NO: 531384 - DNA, 561 bp, Homo sapiens
ggcctaggacagtgcgcctgagggtcccagcctttgggaacccggggcatagcccaggaatgagaagccgagcagatggacagggaggggagcatcctggcagcagaggtggcttagggcatctgagggggtgggggccagccctgcaggccctgggaaggcgggctagtctgggcgcagagcaggagagcggcatggagyggggtctgtgcgtgggttgcccctgcactggaagcagctaggggcagggccaaccccactgaaccttcccagggttcgcagccccagggagatgccttcctcagctcagcttttaatgcctcctccggcactccccattgcagccccaggagtccctcaaggggctatacctcccactccctcatgctcaccagccagaaaatgcaatggaaaaaaggacctcatattcacagttgcaggcacacgcaaacgttaacacaggcaatctgcactgtgtatggccaaacacgagtgaacttttaaactgcagtgtgagctttaggcacttggagggcgggaagccccacatcccctgacccc

SEQ ID NO: 531385 - DNA, 566 bp, Homo sapiens
gaggctgagcatctttccatgtgcgattggccatttggagctcctctttcatgaagtgcttttcttggttttcagccatttttctattgatgtctgtgttatgtatcagggatgatcaggctggtccgagttgttttcaccacaattttcatggtagaaaaaagtgtagcaaagtatacaaaaatctttagagaaagaaatgatattctcaacagtacatttgcaacctgtaagaacttgggaaaagtgattctcacaagcattgttgaaagagctcctggagatagaaccagaggccaaaagaggaatggagaaggggggaaggtcacagagagtggcggtggcctcccagaggcacagcgcacagcggagtgagaagttagggtgaggacgggattttaacgttgcaagcttcacaaggtagccatggtgatggaggaggtcagtgcacggcctgagctgcagaggccagggctggaaagatggycctgtgctcttggggccaactgatgagctagtagggatttaagaacatagttcagtgattaccagtaaaagaaccaaaa

SEQ ID NO: 531386 - DNA, 585 bp, Homo sapiens
gctggcatttgggggttttaggagggctggaaaagatagaggtagagtcgatggaggagctggaagggaaggacggggcggggggagtgctgggcaggggcagtgggaggaaaaggagggagagcttacgagcctgggggtctggtttgttgccgacgtctgccaggttgctgactagctgtagccaaagaatgttttagtgaaactatttttaaatgagaagttcayttgaaggcctcttcataccaatcaaaaaatgctgcccattgggcctgaaaaaatcttattatctttcttttttaaggtgcctcttaatgaacaatttcgttaaagtcaaatgttcccccagggcagccagtgaggcccaatcatccttggggaattgaggccacttggagagacaggcaccagaattccagttgcagtgactccattcaaggagttttcctgggagaggaggggattgagacatggccccatgagagcgggtggcaggaagtgggaatttagtgtccgtgcctgtgcctcaggtccctaacccgacaccttgacacacagagcctctccccagcctcaccagaaaga

SEQ ID NO: 531387 - DNA, 572 bp, Homo sapiens
tgcaaggaaatgaattctgccaacaacctgggtgggcccagaagtgggttctgccccagtccagcctctgcacgggaatgtgaccaccggctccccgatggcagcctgggagaccctgaagaacagaagccagctgagctgagccgactcctgacccaggaaccgtgagttaatacctgggtgccgcttcggcttctatgccttcggtcatttgatacacggctgcaaaagtaaggcagtggccagacacgtcactggcactccctcctgcttctgccttctgtaagctcgtgggcgggttgaggtcaatgggtgctcctggggtggcaggcatccccagcaggctgggcctgtccccagaggctccttggcccgtgtgacctcggatcaacacatccccctggcatggggctgtccatctgagagcctgcttggcacgagaaagtctctggtgttgaacgccattttcacagtgaacaatgrgccggcattcgtcctagaataggcagtttgggtcttgtgaaaatttgaccatttgcaagtttttccgaacgttctgtttgagaagcatt

SEQ ID NO: 531388 - DNA, 542 bp, Homo sapiens
actcaaatgcagtaagcacaacagaccattcaaaggcaccaggagctcctgtcctttgcacgacagtgatttctccacccacacgtctgctaactgcatggtctctggctgcggcagcagcagtattcatctcccttacctgtctcacaagcatgtatttgctctttccccctttttttttttgagacagagtctcgctctgtcagccaggctggagtgcggtggtgagatctcagcttactgcaatctccaccttcagggttcatgcattctcctgcctcagcctcctgagyagctgggactacaggcgcccgccaccacatccggctaattttttgtatttgtagtagagacggggtttcaccgtgttagccaggatggtcttgatctcctgacctcaggtgatccgcccaccttggcctcccaaagtgctgggattacaggcgtgagccaccgcgcccggccccttttttttaattaacaactttgcttcatagaactcacaaacttggccttgttggcatttggtgagatgattctca

SEQ ID NO: 531389 - DNA, 296 bp, Homo sapiens
gcaggttcctgtggggtcatcctctgagccggtttaaaattattctgacaggtgacggccacccacggactctgtcacttgctgggattcacacacggcacggaggcagagtggcagcaggtaaggagcccatccatcccactaccgagggggtgcgtgggggaaggaggctcccccaggcccctgccagcccccaccctccatcytgaccgcccccgcaggaactggacctcagacctgcccttgtaaaaatgacacagatgtttgctttcaacaccgggctccccaaatacttc

SEQ ID NO: 531390 - DNA, 291 bp, Homo sapiens
accaccatgcccagctaatataaattgaatacataaaattagctattactacatgataaagacaatgtttgtcagtccccaaagggaatatgtctattgggacyatataccttataaagaattccttaattcaatgtaaatataaatacaaaaatgaattttattagatagtttaaagacgcatttcaagtaagaatgaatttaatacaaggaattaatgcttacacaactaatggaagggctgtgggacaaaggtcaagggaaaagactgctgggtcttaggggattaag

SEQ ID NO: 531391 - DNA, 629 bp, Homo sapiens
ttatcatcttactcaagaattttaataacttttatggcttatggcagtgaccttcaaactgtttttgtaacagaattcataagtaatggtcacaagcccagtgattgtttgtttgctaatattcctatactgttttatcctatactgttgtattgtaaccattacaaaaattttcaaaattgtaaataaaattaagaaatactgataaaaattattatttaaaaacttggtactgatagtaccaactcmtttagtttgcagtattaagtagaccttgcatgtggaaaatcagggcaatgagtggcatccagtaagcacttgataaaggtttgtttgtattatcattgctgctactggtactgaactccttgctggccaaaatgccccttttttgtagttggatagcccagcaaattctttttttcactcttagcatttccttaagtctggacttctgattttgtaagcaaataactgctattacaaaataattttatactttaaacagtactataatgtgaagaatagttatattcgaaattgatttatttgataaaagttaagtcactggtagaaatgaatagatataagattaatttagaaattttatgttgactttgttatcatat

SEQ ID NO: 531392 - DNA, 449 bp, Homo sapiens
agatatccttcctaattctgagatccatgacttayatcataacccaaggtctaaggactttcacccacagtgtaggtaggcagaggtgatattcaccatgccaagaagtttggtgaagtatttgcctgccgtgcttacaaagtagcttacaggccccttttagctatttacatctgtttatatgtgtcatgttagtgctaaaggataagaaccatatgcagatattttcaaaagtctagaagtaggatccatgtcattgggtcacatttccaaacaacttttaacatatttatgcaagttatgaatgtatgcatatatgaattagcactgcattctcaaactgcttctaattcacttttatatgaaaatgctgacttataagttctgatattttagacgattcagacatttgtaggtacattcctcctacaaaagacctttgtgcttgt

SEQ ID NO: 531393 - DNA, 523 bp, Homo sapiens
ggtgatgacaggcctggtgtcagarggagggccgggtgggaaagggaaaatgggcctgcccttggctgaatcgacctaatgaaacatgatggaacgttcacaagacgttttcttctgagattgacaaggtaaggcccgcttttccgccttctctgggtctctaattgagtgtgagtaatgaatatacatggggagcagccctgtcaatgtgcaagggttttgcattttgcatttggaggctgcagcgccattctctgcctctgtagtttgggagaggaaagggtggctgaccagatgctcccagctacccacaaaatcctgtcaaggtcataaatcagtgaggatttgataaagatttgagaaagaattggacgtagctaacaggagacatttgagtaaaggaggtatgatttcagacgatgaatagccacttgctactttgaggaaattaaccaggtgctcagggctcgtggttacttatttggacaccaggtttattgacttaggacagtgagtgccagaa

SEQ ID NO: 531394 - DNA, 662 bp, Homo sapiens
gatgacaggcctggtgtcagagggagggccgggtgggaaagggaaaatgggcctgcccttggctgaatcgacctaatgaaacatgatggaacgttcacaagacgttttcttctgagattgacaaggtaaggcccgcttttccgccttctctgggtctctaattgagtgtgagtaatgaatatacatggggagcagccctgtcaatgtgcaagggttttgcattttgcatttggaggctgcagcgccattctctgcctctgtagtttgggagaggaaagggtggctgaccagatgctcccagctacccacaaaatcctgtcaaggtcataaatcagtgaggatttgataaagatttgagaaagaattggacrtagctaacaggagacatttgagtaaaggaggtatgatttcagacgatgaatagccacttgctactttgaggaaattaaccaggtgctcagggctcgtggttacttatttggacaccaggtttattgacttaggacagtgagtgccagaagtggacttattaaaatctctgcattttttattatgttgcatgtggtttttaagaacaagaattaatttacttcatagaaagttgtttttttgctttttttctgtttctaatttaaatatttttaaaataaccaggcacagta

SEQ ID NO: 531395 - DNA, 648 bp, Homo sapiens
attctaaattactctatatctgtttttattttaaaaaagaatgctggctgggtgctgtgactcatgcctgtaatcccagcactttgggaggctgaggcgggtggatcacttgaggtcaggagttcgagaccagcctggccaacatggtgaaaccctgtctctamtaaaaatacaaaaattagctgggtgtagtggtgcgtgcctgtaatcctagctacttgggaggctgagacaggagattcacttgaacccaggaggcagaggttgcagtggcaggagctgagatcgtgccactgcattccagcctgggagagcagcaacactctgtctcaaaagaaaaatagaaagaatgcttactcttactcttattttctgtaagtatttgatgactgggaatgtaataaacagaagggaaacatgacttagaatcataaaacaaaattaattacctcaacagcttctgatcaaacatcaaatttcagtagtttactgggatgttaaagacctacctttctatcgtaagccattattgtcaagaaaatataaattatgaattttcacctcatgctaaaactaacatatcacatctctaaacataggctaacttgttttttttaatgaaatatattgacttttaaaatatattca

SEQ ID NO: 531396 - DNA, 648 bp, Homo sapiens
attctaaattactctatatctgtttttattttaaaaaagaatgctggctgggtgctgtgactcatgcctgtaatcccagcactttgggaggctgaggcgggtggatcacttgaggtcaggagttcgagaccagcctggccaacatggtgaaaccctgtctctactaaaaatacaaaaattagctgggtgtagtggtgcgtgcctgtaatcctagctacttgggaggctgagacaggagattcacttgaacccaggaggcagaggttgcagtggcaggagctgagatcgtgccactgcattccagcctgggagagcagcaacactctgtctcaaaagaaaaatagaaagaatgcttactcttactcttattttctgtaagtatttgatgactgggaatgtaataaacagaagggaaacatgacttagaatcataaaacaaaattaattacctcaacagcttctgatcaaacatcaaatttcartagtttactgggatgttaaagacctacctttctatcgtaagccattattgtcaagaaaatataaattatgaattttcacctcatgctaaaactaacatatcacatctctaaacataggctaacttgttttttttaatgaaatatattgacttttaaaatatattca

SEQ ID NO: 531397 - DNA, 626 bp, Homo sapiens
cattaaagaacattatatgttttttaaaagggtcatcaatgaggtcatagtagtttattgttgcagtttatttaatatttattaactacacagccatctgaatattcattttgaaaatkttaatgtgcatatacaaagtctttaccataatttaaagtttttgaatgtgctatattttataaatttgtctttaaaaccatacactatttttccaaagattttcttttaattaaattttataaaagtaactaagtagctgctttttttttttcttttcttttcttttcttttttgagatggagtctcactctgtcacccaggctggagtgcagtggtgcagtcttggctcattgcaacctctgcctcctgggtccaagcagttctcgagcccagcctctgagtagctgggattacaggtgcgtgcccccatgtccggctaatttttgtatttttagtagagatggggttttgctatgttgaccagtctggtcttgaacacctgacataaagtgatccacctgcctgagcttcccaaagtgctgggatgacaggtgtgagccactgtgcccagcccaaaagtaacctctttataaatgaaaagttacacaaatatattgagttgacag

SEQ ID NO: 531398 - DNA, 626 bp, Homo sapiens
cattaaagaacattatatgttttttaaaagggtcatcaatgaggtcatagtagtttattgttgcagtttatttaatatttattaactacacagccatctgaatattcattttgaaaattttaatgtgcatatacaaagtctttaccataatttaaagtttttgaatgtgctatattttataaatttgtctttaaaaccatacactatttttccaaagattttcttttaattaaattttataaaagtaactaagtagctgctttttttttttcttttcttttcttttcttttttgagatggagtctcactctgtcacccaggctggagtgcagtggtgmagtcttggctcattgcaacctctgcctcctgggtccaagcagttctcgagcccagcctctgagtagctgggattacaggtgcgtgcccccatgtccggctaatttttgtatttttagtagagatggggttttgctatgttgaccagtctggtcttgaacacctgacataaagtgatccacctgcctgagcttcccaaagtgctgggatgacaggtgtgagccactgtgcccagcccaaaagtaacctctttataaatgaaaagttacacaaatatattgagttgacag

SEQ ID NO: 531399 - DNA, 626 bp, Homo sapiens
cattaaagaacattatatgttttttaaaagggtcatcaatgaggtcatagtagtttattgttgcagtttatttaatatttattaactacacagccatctgaatattcattttgaaaattttaatgtgcatatacaaagtctttaccataatttaaagtttttgaatgtgctatattttataaatttgtctttaaaaccatacactatttttccaaagattttcttttaattaaattttataaaagtaactaagtagctgctttttttttttcttttcttttcttttcttttttgagatggagtctcactctgtcacccaggctggagtgcagtggtgcagtcttggctcattgcaacctctgcctcctgggtccaagcagttctcgagcccagcctctgagtagctgggattacaggtgcgtgcccccatgtccrgctaatttttgtatttttagtagagatggggttttgctatgttgaccagtctggtcttgaacacctgacataaagtgatccacctgcctgagcttcccaaagtgctgggatgacaggtgtgagccactgtgcccagcccaaaagtaacctctttataaatgaaaagttacacaaatatattgagttgacag

SEQ ID NO: 531400 - DNA, 576 bp, Homo sapiens
ttattttctctatgatttacttagggatagatactgcattagatactatatgccaaatcttattaaagataccagattgaattgattctatacaatcaatgttaaagtctagaaatattctgtataatttaaaaatggtttaagtgtagtaaatacatttgcctctttgtatgcaagggaaaaatatttttcttacatgtaaaatgggagaagttgaaactccaagtggcttccaaatgctagaatcagctatatcgaaaaatttgggaaagctttaaaagtacacttcctgcatttcacctagtactgaatatactaaagttaatcaargattatacaatttttaatgatgcctcagtgttctgatttccaaccagctttattaatccttgtgctatttattctcctaatttccttccaattaaaaggctatctaactttgaaatatcttatcaatgttaaatttctccagatattttcctgtgtacatttattttgtttttattgttactattactattttgaccagagagaaacatgcaattataatatattttattaaaaattggcaccaat

SEQ ID NO: 531401 - DNA, 443 bp, Homo sapiens
cacaatagtccaaataaaataccaactttagaagctattttcagttaagagactggactcgagaattcaacatatctggaaagtttcccaataatggaacagacgaactgtcttttttctcctgcttagctacaggcaaaatctaaaattataaaaataatcatcacccaaaacttaacagattatgatgctgaaaatcaaaacaacaactgcactctttccaaattttcggatttctcattatctagcatttgaataaattccttccgaattaaagcttaaactatattcatgagttaaatggcattatgttagatgtatatagacttacatatgaattcctttcatgaagaaacatayactctcttaagcaggtttccctacctttatctaatgttttcccattttattctaagtggaggcctatcttaatctctgcattg

SEQ ID NO: 531402 - DNA, 497 bp, Homo sapiens
ctgagtgggaagcacgtttgcaatgggagtatgaagtgtgttgcttcaactcaagratgcgtctgtgctctgagtagcctgtgtttccattttaatatgtaaatatttaaacagtatccaagtgacaacttttattcacatgatttacacatgataaatttgtttccttttcttctgttgtatcatttataattctataattctctaataatttacaaatataataacattattattctataatttagagtaatattgtttccagttttcatttttctgtacaatgaagagagactttgaacttctccacagtgagttaagatggctactctctatgtcataaaaatataaaccaaggtgttccatctttatgacaatgtataaaatattcggtccgtgctaatagctaaagagtatggaaatggtaggatagagagtaataccgggataaaaagacaagaatagcttgattcaaggcttagcctactcaaaggata

SEQ ID NO: 531403 - DNA, 207 bp, Homo sapiens
tgggaagactcaatatagttcagaactactgcaacccataaaacagttacactcctctaatcatgtatgattttcttttgtccttgatcctggccacacagaacatactctaggctcttgaaaagaagagaataaacagcagattacaatcagatacatcagtaaaatgttttktaaatggaaataaaatttttatgtctgtcacag

SEQ ID NO: 531404 - DNA, 592 bp, Homo sapiens
tgactgttttccatttggcccttctgttccttcttcctttgttcttcctttcttgccttctgggataatcaaatcattattttaggatttcatttgatatctatgttattcttgatggttactagaaattatactatgtacccttaactcatctctactttcaaataacatagtacttcataaacaatgtaaaacacaacagtgtaagtctatttatcactttcacactcagcatttactgtcacatattttactgtcacatacattataaatgccataaattttaaacagttactagtcttttaagcagatacagacctaattattgatgaccttttctatttaatcccatatttactttgtctggactccttgcagatccaggtttccaaatggtatcatttccctgaagcgttaagaattttttgtagtacaggttgctggaggactaattctctgagacttttgtctgaacaaaatgtctttcatttttaaaakatattttcactgactatagaattatagaatgacaagtttcttccttttagcacttacccactgttttctggtccaatgtttctgatgacaagtc

SEQ ID NO: 531405 - DNA, 576 bp, Homo sapiens
tgaaacttgagttttagttttcctcattctgtaaaatggtgtaaggatgtcttctatacatagttgtgaggatcagagataaagcaggtaaaatgcctagcacaacttgacaaagggtaagggctctagaaatgacagccaatgagatcaactctcaacccacacaagtatactgagaaataactaagtggaaatgttatccaatgtgctcttggcacccccaaattaatgagattgtgaattccarcatgctcagagtgctacctgactgattacaagccatatacttccgtttagggcaaggagtttcaaagctaaccatgctatcctcttttattctcagatcatatggtttaagtattggaaaaccatatttacataattgggttttttgaactaggatttagcaaccctggcaaacttgacccttctgcagaatctcagaaccttgctctattgccttctagactatgagctctcagtctgtcctctatatttctctctctctctctcacagatagtattagtatcattaatatccattttcccctttttcccacctatcccttcctcttt

SEQ ID NO: 531406 - DNA, 576 bp, Homo sapiens
tgaaacttgagttttagttttcctcattctgtaaaatggtgtaaggatgtcttctatacatagttgtgaggatcagagataaagcaggtaaaatgcctagcacaacttgacaaagggtaagggctctagaaatgacagccaatgagatcaactctcaacccacacaagtatactgagaaataactaagtggaaatgttatccaatgtgctcttggcacccccaaattaatgagattgtgaattccaacatgctcagagtgctacctgactgattacaagccatayacttccgtttagggcaaggagtttcaaagctaaccatgctatcctcttttattctcagatcatatggtttaagtattggaaaaccatatttacataattgggttttttgaactaggatttagcaaccctggcaaacttgacccttctgcagaatctcagaaccttgctctattgccttctagactatgagctctcagtctgtcctctatatttctctctctctctctcacagatagtattagtatcattaatatccattttcccctttttcccacctatcccttcctcttt

SEQ ID NO: 531407 - DNA, 551 bp, Homo sapiens
ttaaaataccatgttctgctatgcatttaatttgaagaactgcgaaaagtagtctttttaattttcagtttttgaaaactcgagactgttgctggaagtaaaccgctaatttaaaaattaaccttaaaatgagaaagaattcctatgatgctcccattgatccctaagcccatcacatagtttctgaataattaagaactctcgtctccaccagggaactctcccttgcagaggggccaaatcaagaagcaatcgccattgcacgtcagcaccacaaactgagaggaagcttctgccctcgctaaagcccaggcgcgcgggtaaagacccccggggatgataccccgcgcgccgcggctccgtgcgcgcggtcccccgcactcgcgggccgccccacctcctcccctgcactccaagagtccggcctggtctccgaggccgggagccacgcggcaccgcagcctcgagggagaggacgcccgcaaccaacacgcacgcgggcaccaagagggcacaggccagggcggsgagggccgaatggggccgggggg

SEQ ID NO: 531408 - DNA, 519 bp, Homo sapiens
aatatatatatggagtgtcctccaaaacatagcagtgaatgaaaaatacaaagttcataattacagtatgccatttagtaaaaagtactatgtagtcctacatrtatgaaagagacgggggggcggaggtgggggacacggtggagagagagagagagcgagagagtgtgtgtcagagaaggaaatgtctcaaattcataataatgaatttattattctaagggaggaggaacagagctgagactcaaaaggtactttaattgcaaatgtgttgcaagtttttaaaagacgtatatattcaggtgttatctgcatgatcaatattttgatttcgtacaaacaactagaagatactggatatataaataacaaaccattacaggaaaaaattgtaataaagtcagcaatggacaagaaagtattaatttttttaacaaaaaggaggcactaatagtgactatggccttccaaataatcacagtaagtgttaatgggtgaactcactattaatggctaaga

SEQ ID NO: 531409 - DNA, 606 bp, Homo sapiens
tttagagaataatcacagaccacaagtcaagccaggaaaaataactgcctagttaaaaaaaaaaaaaaaaagtctttttctaaaaagaagaggggaagaggaggaggggaccatgcagcgttatgacagccaatatgagtgcaggtaatttcaaatactttcagaccattcaccttgtcagcagctcacttcacattcaggttacatttctctgtagtctgatgagagaaatgacagagtttatctcatgatacctmattctgtactatagggcattttacaaggtcaatgataataaaattttccctagtaatacgccctttaatcttacttatccacgacatccaaaatcaatatgaaataaagaattctgctacatgaaaacacttaacctgagaacaggttgtatctaaatgactcattgttaatctatcaatattatcctaatctgattgtatttggatttactattttggtccctgacatctcttgtaagcctccaaattctagttttccagaaatgagaagctagctcgagatatagctctatttccccacttatttttccagccttacctcctaaaccaggctgaaattctatgttct

SEQ ID NO: 531410 - DNA, 506 bp, Homo sapiens
ctcttttattgccatcaaaatcaacatgtagacttttttcaaacccaatgacagcccattacaatggaggccatagcaatggaggtctctacatgcaaaaaaaatggtgggacagtttcctgataacaggtcaactttattccaaggataagcatgtcatgaaattattggatggcagattatgcttgagttatctatggtcttcctttttctccttggtctcatcccaataacttacagatcctttaaaggcaaaggccaaatattcagctaagttaggcatacttcagatgcccaatatcaattttagctatatgggagatcctacttaagatattgaggacgatcatgtgtgtacagggcaaaaaagatgggacaaagagataagaaggggatgggaaatcacaccctccmtccgcaccacagaccatgacctggggcaggtcctctaacaccaaacccacccaggccccatctaacagtatgccgcattctacatgacctca

SEQ ID NO: 531411 - DNA, 506 bp, Homo sapiens
ctcttttattgccatcaaaatcaacatgtagacttttttcaaacccaatgacagcccattacaatggaggccatagcaatggaggtctctacatgcaaaaaaaatggtgggacagtttcctgataacaggtcaactttattccaaggataagcatgtcatgaaattattggatggcagattatgcttgagttatctatggtcttcctttttctccttggtctcatcccaataacttacagatcctttaaaggcaaaggccaaatattcagctaagttaggcatacttcagatgcccaatatcaattttagctatatgggagatcctacttaagatattgaggacgatcatgtgtgtacagggcaaaaaagatgggacaaagagataagaaggggatgggaaatcacaccctccctccscaccacagaccatgacctggggcaggtcctctaacaccaaacccacccaggccccatctaacagtatgccgcattctacatgacctca

SEQ ID NO: 531412 - DNA, 506 bp, Homo sapiens
ctcttttattgccatcaaaatcaacatgtagacttttttcaaacccaatgacagcccattacaatggaggccatagcaatggaggtctctacatgcaaaaaaaatggtgggacagtttcctgataacaggtcaactttattccaaggataagcatgtcatgaaattattggatggcagattatgcttgagttatctatggtcttcctttttctccttggtctcatcccaataacttacagatcctttaaaggcaaaggccaaatattcagctaagttaggcatacttcagatgcccaatatcaattttagctatatgggagatcctacttaagatattgaggacgatcatgtgtgtacagggcaaaaaagatgggacaaagagataagaaggggatgggaaatcacaccctccctccgcaccacagaccatgacctggggcaggtcctctaacaccaarcccacccaggccccatctaacagtatgccgcattctacatgacctca

SEQ ID NO: 531413 - DNA, 506 bp, Homo sapiens
ctcttttattgccatcaaaatcaacatgtagacttttttcaaacccaatgacagcccattacaatggaggccatagcaatggaggtctctacatgcaaaaaaaatggtgggacagtttcctgataacaggtcaactttattccaaggataagcatgtcatgaaattattggatggcagattatgcttgagttatctatggtcttcctttttctccttggtctcatcccaataacttacagatcctttaaaggcaaaggccaaatattcagctaagttaggcatacttcagatgcccaatatcaattttagctatatgggagatcctacttaagatattgaggacgatcatgtgtgtacagggcaaaaaagatgggacaaagagataagaaggggatgggaaatcacaccctccctccgcaccacagaccatgacctggggcaggtcctctaacaccaaacccacccaggccccatctaacartatgccgcattctacatgacctca

SEQ ID NO: 531414 - DNA, 414 bp, Homo sapiens
ttttgctgtcatatgtatacctrcttttaattacatgtagattcaggggtggtttgtgcagaaattgctaggaaaagggtggtaacttttgggtcatcaggtcattgctgctgaaagtggtggtaatgcctgagtgttgccatggcaatggtaaactgacagggcacactggtgggtgtgtcttacagaaagctgcttccaccctgtccttgtttagctagccctcaattttttgtttgtaaatgagcaagagagtcatggccttggcgttttatcccagaagtacagtggaccccagagcactctagacccaagggctaaaccaaatcacagcatcccacagttgtgtccagccctccatcactgattggctgcaatccaacaagtggcccagaggggagggttcattgaaag

SEQ ID NO: 531415 - DNA, 414 bp, Homo sapiens
ttttgctgtcatatgtatacctacttttaattacatgtagattcaggggtggtttgtgcagaaattgctaggaaaagggtggtaacttttgggtcatcaggtcattgctgctgaaagkggtggtaatgcctgagtgttgccatggcaatggtaaactgacagggcacactggtgggtgtgtcttacagaaagctgcttccaccctgtccttgtttagctagccctcaattttttgtttgtaaatgagcaagagagtcatggccttggcgttttatcccagaagtacagtggaccccagagcactctagacccaagggctaaaccaaatcacagcatcccacagttgtgtccagccctccatcactgattggctgcaatccaacaagtggcccagaggggagggttcattgaaag

SEQ ID NO: 531416 - DNA, 633 bp, Homo sapiens
ataaatccatgaggtattggagcttctcaaaatgactttacaaaactagctcaccttagactacatactgggttttcaagaaggtgcttgtgcactggtgagttcccaatgcttttcattcatgaatgataaagagaaatgaatcaagaagycgtggcagcacgtgcctgagaagcagccaacatagctcacgcccctctggagaggcttagtctctaaggagaaaatggtttccccagccaaatggcttaggagactttttaagggacttggctttttttttttttcttttaacttttattttaaggtcaggggcacatgtgaagatttgttacaaaggtaaactcatgtcatggggtcttgttgtacaggttatttaatcacccaggaattaagcccagtacccaacagttactgtttccactcctctcccacctcccacacggcatgctcaagcagaccccagtgtctgctgtttccctctttgtgttaataagttctcatcatttagcctccacttataagtaagaacatgcagtatttggttttctgttcctgcgttagttgctgaggataatagcctccagctctagccatgttcctgcaaacgacataatctcattcttttttatg

SEQ ID NO: 531417 - DNA, 633 bp, Homo sapiens
ataaatccatgaggtattggagcttctcaaaatgactttacaaaactagctcaccttagactacatactgggttttcaagaaggtgcttgtgcactggtgagttcccaatgcttttcattcatgaatgataaagagaaatgaatcaagaagccgtggcagcacgtgcctgagaagcagccaacatagctcacgcccctctggagaggcttagtctctaaggagaaaatggtttccccagccaaatggcttaggagactttttaagggacttggctttttttttttttcttttaacttttattktaaggtcaggggcacatgtgaagatttgttacaaaggtaaactcatgtcatggggtcttgttgtacaggttatttaatcacccaggaattaagcccagtacccaacagttactgtttccactcctctcccacctcccacacggcatgctcaagcagaccccagtgtctgctgtttccctctttgtgttaataagttctcatcatttagcctccacttataagtaagaacatgcagtatttggttttctgttcctgcgttagttgctgaggataatagcctccagctctagccatgttcctgcaaacgacataatctcattcttttttatg

SEQ ID NO: 531418 - DNA, 382 bp, Homo sapiens
gccaaatggcttaggagactttttaagggacttggctttttttttttttcttttaacttttattttaaggtcaggggyacatgtgaagatttgttacaaaggtaaactcatgtcatggggtcttgttgtacaggttatttaatcacccaggaattaagcccagtacccaacagttactgtttccactcctctcccacctcccacacggcatgctcaagcagaccccagtgtctgctgtttccctctttgtgttaataagttctcatcatttagcctccacttataagtaagaacatgcagtatttggttttctgttcctgcgttagttgctgaggataatagcctccagctctagccatgttcctgcaaacgacataatctc

SEQ ID NO: 531419 - DNA, 532 bp, Homo sapiens
tgagttcccaatgcttttcattcatgaatgataaagagaaatgaatcaagaagccgtggcagcacgtgcctgagaagcagccaacatagctcacgcccctctggagaggcttagtctctaaggagaaaatggtttccccagccaaatggcttaggagactttttaagggacttggctttttttttttttcttttaacttttattttaaggtcaggggcacatgtgaagatttgttacaaaggtaaactcatgtcatggggtcttgttgtacaggttatttaatcacccaggaattaagcccagtacccaacagttactgtttccactcctctcccacctcccacackgcatgctcaagcagaccccagtgtctgctgtttccctctttgtgttaataagttctcatcatttagcctccacttataagtaagaacatgcagtatttggttttctgttcctgcgttagttgctgaggataatagcctccagctctagccatgttcctgcaaacgacataatctcattctttttt

SEQ ID NO: 531420 - DNA, 284 bp, Homo sapiens
gcactcaagaatatttattttatctaatactgctctattttgttgccctttacacacatggaatcttccgtattgccacaggtgccatcagatctccagcatttgcacatactgtttcctctccgggattcccacatgccrggcattaggtcaagctccacgggactccctgagatggatcagacatagatcccaccatgaatacctcacagtccggctgggaagatgagacagggacctaactatctacagaacagagtcaccagcttataggtacaaaggaa

SEQ ID NO: 531421 - DNA, 563 bp, Homo sapiens
cagctgcagagacgaactctcccctctactgagagcttcagagacctgcagagacctccaaatgaccagcctgcggagagcagccaggctcgccagggcctcctctctgctgaaagctgaacactccaccggaygacctgcctgcagagaggagctacccactgtgggtcttctctgagctgttctaacactaaataaaactcctcttaatcttcttcgcccttcctttgcatacctcattcttcctggatgcaggacaagaactcaggcaaagatgccactgtccacagaggtttctgggcaagaaaatcgacaccccaaagatcctgtaacatcatgattggctgtctccacatttacatcatacaattcaattacaaaccactgcaaagcagcacttattgatgaagagctggctcgtgagctgtaagtggacatgccatcagtggtggcaggttgtagcttattaacttgaaatgatactttttttacattcctctctgccctcacgtggtgctaataattgtcataaaagggagtatatgactccaccatgacctcaa

SEQ ID NO: 531422 - DNA, 563 bp, Homo sapiens
cagctgcagagacgaactctcccctctactgagagcttcagagacctgcagagacctccaaatgaccagcctgcggagagcagccaggctcgccagggcctcctctctgctgaaagctgaacactccaccggacgacctgcctgcagagaggagctacccactgtgggtcttctctgagctgttctaacactaaataaaactcctcttaatcttcttcgccmttcctttgcatacctcattcttcctggatgcaggacaagaactcaggcaaagatgccactgtccacagaggtttctgggcaagaaaatcgacaccccaaagatcctgtaacatcatgattggctgtctccacatttacatcatacaattcaattacaaaccactgcaaagcagcacttattgatgaagagctggctcgtgagctgtaagtggacatgccatcagtggtggcaggttgtagcttattaacttgaaatgatactttttttacattcctctctgccctcacgtggtgctaataattgtcataaaagggagtatatgactccaccatgacctcaa

SEQ ID NO: 531423 - DNA, 563 bp, Homo sapiens
cagctgcagagacgaactctcccctctactgagagcttcagagacctgcagagacctccaaatgaccagcctgcggagagcagccaggctcgccagggcctcctctctgctgaaagctgaacactccaccggacgacctgcctgcagagaggagctacccactgtgggtcttctctgagctgttctaacactaaataaaactcctcttaatcttcttcgcccttcctttgcatacctcattcytcctggatgcaggacaagaactcaggcaaagatgccactgtccacagaggtttctgggcaagaaaatcgacaccccaaagatcctgtaacatcatgattggctgtctccacatttacatcatacaattcaattacaaaccactgcaaagcagcacttattgatgaagagctggctcgtgagctgtaagtggacatgccatcagtggtggcaggttgtagcttattaacttgaaatgatactttttttacattcctctctgccctcacgtggtgctaataattgtcataaaagggagtatatgactccaccatgacctcaa

SEQ ID NO: 531424 - DNA, 563 bp, Homo sapiens
cagctgcagagacgaactctcccctctactgagagcttcagagacctgcagagacctccaaatgaccagcctgcggagagcagccaggctcgccagggcctcctctctgctgaaagctgaacactccaccggacgacctgcctgcagagaggagctacccactgtgggtcttctctgagctgttctaacactaaataaaactcctcttaatcttcttcgcccttcctttgcatacctcattcttcctggatgcaggacaagaactcaggcaaagatgccactgtccacagaggtttctgggcaagaaaatcgacaccccaaagatcctgtaacatcatgattggctgtctccacatttacatcatacaattcaattacaaaccactgcaaarcagcacttattgatgaagagctggctcgtgagctgtaagtggacatgccatcagtggtggcaggttgtagcttattaacttgaaatgatactttttttacattcctctctgccctcacgtggtgctaataattgtcataaaagggagtatatgactccaccatgacctcaa

SEQ ID NO: 531425 - DNA, 524 bp, Homo sapiens
  misc_feature (1)...(524): n = A,T,C or G
cccttatgctgcntggggatgcgtcgtggtgacctggagctccaagaggagccagacgcgctccacccacccaggtctgagaaatgagatccgacatggactgcagccctttgctccggttgtcgggctccacctgccggtcgatgttacstattgcacttgttctctggagctcccgccagagagaagtggccactgtgcaccgggtcgagttccaggatgtccctagcgttagcaggattgttccgtccgctggcaaagcattcgctccccatctgttcgtggaagcttggacctgcagcttaagctcggaggaggctcttagccctggatgctctgtggtggggcaacatgcgggtcgaccagcaacccccagtgcctgcccctccaacacgagacctatcggggtcaacacgaaccatcttgaaagggtgtttggaggcctccccgcgtgtgtccccataccagtaccttccatttgaccccattttcctcaagttctgcctcagaggtggcgaccggca

SEQ ID NO: 531426 - DNA, 524 bp, Homo sapiens
  misc_feature (1)...(524): n = A,T,C or G
cccttatgctgcntggggatgcgtcgtggtgacctggagctccaagaggagccagacgcgctccacccacccaggtctgagaaatgagatccgacatggactgcagccctttgctccggttgtcgggctccacctgccggtcgatgttacctattgcacttgttctctggagctcccgccagagagaagtggccactgtgcaccgggtcgagttccaggatgtccctagcgttagcaggattgttccgtccgctggcaaagcattcgctccccatctgttcgtggragcttggacctgcagcttaagctcggaggaggctcttagccctggatgctctgtggtggggcaacatgcgggtcgaccagcaacccccagtgcctgcccctccaacacgagacctatcggggtcaacacgaaccatcttgaaagggtgtttggaggcctccccgcgtgtgtccccataccagtaccttccatttgaccccattttcctcaagttctgcctcagaggtggcgaccggca

SEQ ID NO: 531427 - DNA, 524 bp, Homo sapiens
  misc_feature (1)...(524): n = A,T,C or G
cccttatgctgcntggggatgcgtcgtggtgacctggagctccaagaggagccagacgcgctccacccacccaggtctgagaaatgagatccgacatggactgcagccctttgctccggttgtcgggctccacctgccggtcgatgttacctattgcacttgttctctggagctcccgccagagagaagtggccactgtgcaccgggtcgagttccaggatgtccctagcgttagcaggattgttccgtccgctggcaaagcattcgctccccatctgttcgtggaagcttggacctgcagcttaagctcggaggaggctcttagccctggatgctctgtggtggggcaacatgcgggtcgaccagcaacccccagtgcctgcccctccaacacgagacctatcggggtcaacacgaaccatcttgaaagggtgtttggaggcctccccgcgtgtgtcccsataccagtaccttccatttgaccccattttcctcaagttctgcctcagaggtggcgaccggca

SEQ ID NO: 531428 - DNA, 619 bp, Homo sapiens
aaaatatcatttaaaaataaaaaatctgtctctctgtgtgtatctgtatcaaactaactgaaatcagtctccaaactaactcacaccaactcaattctgattttggtaatgtctcgccaatgttcagggaaaataattacatgtggatctggtatctgtccctgatgaatgctgctgcagataaacatatcagctttccccagcaagctcgtgtgatttctcgtaactgctttacaataacaacagccacgtctccgaaacatcatgtccttgtctcaggagatcaatctacaaagcatatctagtgtttacctgttcagtaagggcatattaaaaagagtcagrttccagagaaaatggagaaaaatataataaatggaaatcgttgttttttttattttttaaggtaatcagtccatttagatatcaaaccacaaccttactggttctgaaatgggcatggtaatcttgagcctactgactattctcttattgtacacagtatatttgaggagtggaaggagcagttgctctaaatttcatgcaatacaggtaagtaattaaggtttttttggtacaaatataggaaatatatgcaaatgtagagtgtattccatgg

SEQ ID NO: 531429 - DNA, 523 bp, Homo sapiens
aaagagtcaggttccagagaaaatggagaaaaatataataaatggaaatcgttgttttttttattttttaaggtaatcagtccatttagatatcaaaccacaaccttactggttctgaaatgkgcatggtaatcttgagcctactgactattctcttattgtacacagtatatttgaggagtggaaggagcagttgctctaaatttcatgcaatacaggtaagtaattaaggtttttttggtacaaatataggaaatatatgcaaatgtagagtgtattccatggtttctacatactcataacctgtagcacgttatagttctgggcttccaaactggtcaaaactttaataaaaaataagttttaaaaatcacatatacatattagatgtaaatatatagacacacatacatgcacacatatatataatcccaaacctgaaagtcaagaatttaccaaagatataaaagagggattgtcttattctattttctgttgctataacagaatactacagactgaa

SEQ ID NO: 531430 - DNA, 478 bp, Homo sapiens
ccgtggtcccagctacttgaggtattgaggtgggaggatcatttgagcccaggaggtcgaggttgcattgagtcataaccgtgccactgctctctagcctgggagacatagcaagactctatctcaaaaaaaaaaaaaaaaaaaaaaagaaaagaaaaaaagaaaagaaaaawgaagaaaaggagaatttaccatgccaatttggaacttataataattatagaaaggaaattatgaccattctttacaaatattatgatttgaggggagcagatttcaataccgaaaaatagctaatacagtatgagcattacaagtaaaagggaatacaatttgaaactgatattaaaattgataaattctggaaatccaagtagaatgtgacaatctcaattttcacaagagaaaaagcaatcttcctccaatagtttccttaaatttcttaaaggtaaagtattcatcttcagtctttgaattg

SEQ ID NO: 531431 - DNA, 628 bp, Homo sapiens
ttctggctaaagtggaataatcacagataaaagcctaaatctccataaaggaaaaaggattactcaaaatgatgaatatatgagtaaatattttgtaaaacctcagaaattattagaaaatgattgactatttaaataaaatataatatgcatagtaggctttataacataatagtagtaaaatataaataatgatagtacaggggatggggatcaattaaattatacctaaacttattttattttatgtgaagtagtataataataatttgaaatagactctaataatttaaccatgtatattttaactcttaaagtagcaataataataataataatacaaaagaggtatattcaagccaatagtggagaacacttgaatgacaaaaataaaaattgatttaarttaactcaattaggaacaaggaaataaatatcaaatggcaaataaatgtaaaatagtacacttatacccaactatatcatagattacattaaatataaacagacctaatagtccagtcaaaagatagaggttcagcagataaaaacaaaacaaaaaaacagtttacaatagatccaatttaaatataaggatacaatcaggttagaaataaaatgttgaaaa

SEQ ID NO: 531432 - DNA, 403 bp, Homo sapiens
aatgtctcaccttttttttaaagtcttacctggctatgttgaccccatccaagattattttcyttttgattaactcaaaatcaattaattagtagctttatgaagggagagatatctcatccatcagttaagtccatactcaagggaaggggactatacaagatgcccagggatgaaaatttgggaggccattagagaatcttgcctattacagtcaagttagtaatagcaagctagaaaatgcaatttgtagttacatatattagcagtgtacctgtgtgtgtggatgaacatgtggttatagcaatttccttggaatataccaagtaaactgttctaaagatcttaatggaactcttgggtgtaaatgagttggatctctggaactgagaatcagaaacat

SEQ ID NO: 531433 - DNA, 606 bp, Homo sapiens
taacagaaagaacagcttctacagtcttgtacaaataaataaatctacctccagggaatcagtactcctaggacaacttctactaatttgtagaataatgcctcctgagagttggctttaaagctcttgttccaactrtagcaattggatggtgtttttgaacatgaatgttataacggtaatccatggagtcattcactctctaggctcccagaatagtacccagatgatcctatctatagactgatgattggagataactgatttggcgagtataagtatttgttattgagtgttagcattacttcattctttccttcaggttaaatgtttattgagggccagctctaagatgacacacttgttgccatctgtggtgtaccacacatgaagacagatatgtaaataaataaacacaatgcagttttttagtgttagactgcaggtctgtataaaatgctgtgggaacacagaagatgaattgactagtaactgtgccttgagaggttggaaaaggtttcagatattgtttaaattggtagctcccagggttttctccttggccttttcttttccttgggcaatgtcagtcactcttatatcctt

SEQ ID NO: 531434 - DNA, 606 bp, Homo sapiens
taacagaaagaacagcttctacagtcttgtacaaataaataaatctacctccagggaatcagtactcctaggacaacttctactaatttgtagaataatgcctcctgagagttggctttaaagctcttgttccaactgtagcaattggatggtgtttttgaacatgaatgttataacggtaatccatggagtcattcactctctaggctcccagaatagtacccagatgatcytatctatagactgatgattggagataactgatttggcgagtataagtatttgttattgagtgttagcattacttcattctttccttcaggttaaatgtttattgagggccagctctaagatgacacacttgttgccatctgtggtgtaccacacatgaagacagatatgtaaataaataaacacaatgcagttttttagtgttagactgcaggtctgtataaaatgctgtgggaacacagaagatgaattgactagtaactgtgccttgagaggttggaaaaggtttcagatattgtttaaattggtagctcccagggttttctccttggccttttcttttccttgggcaatgtcagtcactcttatatcctt

SEQ ID NO: 531435 - DNA, 480 bp, Homo sapiens
tgcccacagacaaacatagtgacttcaatatttttattttaaaaattgttttaaatgatctttttgctctctaaatctgtaatctttaggaaataatatctttttgtctgaaattaagccgtatctgtagtttcatttatttttttcttgttgctaaaattttagtaaaattaaacctaaccttaattttaaattttaatggcacttatctcataattttttcattatctatcacttctttggtctttgtattacccaccagtttatcagatcaccttaagtacacagcagatcctctgctctctaactttctggcttgtggaacctagctagcatcatcaggaaatgacttcccatgtaacctatttgtatgtaaggaagsctttagggagaacctagcaaacaaaaaggcccttctcatcctgttattcagtagttcggtgactgtttttataatcattatacattcctctgcctaac

SEQ ID NO: 531436 - DNA, 392 bp, Homo sapiens
acaggatcagatttgcatttaagaatttaacctggtatcaacatggaaagctaactggaagagactagaggcaatgaggttaaaaagccattaccaaagggaagcaaataatgaagtcttgttcatacctcatgcttctgaacatattgtttaaactgccaaaaatgttctatccactcctgagccactkgaaaaatcctatattattcttgcaggcttagctcaagcttcatcttctctctgaagctttccctattccgtctcctgaatcccagtattacttcttctccatatccccagtcattccaatgcagtcttaactcgtctgcctctatcctaaactatcagctagatgaaccattcatctgaacaaaacagagagtatagtgggg

SEQ ID NO: 531437 - DNA, 392 bp, Homo sapiens
acaggatcagatttgcatttaagaatttaacctggtatcaacatggaaagctaactggaagagactagaggcaatgaggttaaaaagccattaccaaagggaagcaaataatgaagtcttgttcatacctcatgcttctgaacatattgtttaaactgccaaaaatgttctatccactcctgagccacttgaaaaatcctatrttattcttgcaggcttagctcaagcttcatcttctctctgaagctttccctattccgtctcctgaatcccagtattacttcttctccatatccccagtcattccaatgcagtcttaactcgtctgcctctatcctaaactatcagctagatgaaccattcatctgaacaaaacagagagtatagtgggg

SEQ ID NO: 531438 - DNA, 617 bp, Homo sapiens
aaaatatcatttaaaaataaaaaatctgtctctctgtgtgtatctgtatcaaactaactgaaatcagtctccaaactaactcacaccaactcaattctgattttggtaatgtctcgccaatgttcagggaaaataattacatgtggatctggtatctgtccctgatgaatgctgctgcagataaacatatcagctttccccagcaagctcgtgtgatttctcgtaactgctttacaataacaacagccacgtctccgaaacatcatgtccttgtctcaggagatcaatctacaaagcatatctagtgtttacctgttcagtaagggcatattaaaaagagtcagattccagagaaaatggagaaaaatataataaatggaaatcgttgttttttttattttttaaggtaatcagtccatttagatatcaaaccacaaccttactggttctgaaatgggcatggtaatcttgagcctactgactattctcttattgtacacagtatatttgaggagtggaaggagcagttgctctaaatttcatgcaatacaggtaagtaattaagktttttttggtacaaatataggaaatatatgcaaatgtagagtgtattccat

SEQ ID NO: 531439 - DNA, 283 bp, Homo sapiens
aaggtagaataaaatagaataggtggaaatgtgacacggggcagacaatcagtgtatcacctgtattttgtctcctaaaacaaactatgtgtgtacactagctatcaatacttcttactgtagtcatggtctaaaatgttggaaagccactgatatgattttgagacttrcctggcattattgtgaaaactgtgttggatcaacagtgaggatgttagttttacactcacaggtgagggtaagctttgctttgttctggaaatattacccttctggaaccact

SEQ ID NO: 531440 - DNA, 621 bp, Homo sapiens
caaaataaattcaccattaaatcatatcttgactctcatcagtayctgatttagatgatatttagatgaaactttgaacttcagatttttgagttgatgctggaatgaattaagacttttgggactattggaattaaattaatgtatttttcctgtaagaaagacatgaattctgggggaccaggggcggaatgctatgatctgaatatttatgtcctcaaaaattcatatgttgaaacactaacccccaagttggtggcattaggaggaaagagccctcatagtagggattagtgcctttataaaacaggccccagagagcaagtttgctccttccacaaactaatgacccatctagaagacaccatctgtgaaccagaaagtgggtcctcaccagacactgaatctgctggcacattgattttgcacttccagcctccaaaactgtgaggcaattttgtttataaacttgtttataagccaactagtttatggtatttctttatagcagcctgaataaactaagacaaccatcatccaaggttggaagggtgaatccttctcacatttaacatcagaaagttggtttcacttctcatttgtttccataaaaagataagc

SEQ ID NO: 531441 - DNA, 621 bp, Homo sapiens
caaaataaattcaccattaaatcatatcttgactctcatcagtacctgatttagatgatatttagatgaaactttgaacttcagatttttgagttgatgctggaatgaattaagacttttgggactattggaattaaattaatgtatttttcctgtaagaaagacatgaattctgggggaycaggggcggaatgctatgatctgaatatttatgtcctcaaaaattcatatgttgaaacactaacccccaagttggtggcattaggaggaaagagccctcatagtagggattagtgcctttataaaacaggccccagagagcaagtttgctccttccacaaactaatgacccatctagaagacaccatctgtgaaccagaaagtgggtcctcaccagacactgaatctgctggcacattgattttgcacttccagcctccaaaactgtgaggcaattttgtttataaacttgtttataagccaactagtttatggtatttctttatagcagcctgaataaactaagacaaccatcatccaaggttggaagggtgaatccttctcacatttaacatcagaaagttggtttcacttctcatttgtttccataaaaagataagc

SEQ ID NO: 531442 - DNA, 467 bp, Homo sapiens
aaaatagcatcttgtcatgtagcttcagataaacagatgtgagcctgggcttcattgccmtgggaccttactctccttaatttcagtgaccttctgggataattacagtcaccatttacagagtttattgattaagtaattaataaatgatgataaacccaggcattcgtacgtgtgtgtactgcagcagcagcaaagcaggtgttgaatacaaaacttccacctatgtaatagcagagtcagaataaaatctaggaagcacaagcattctaacagtctctgctatagttgaagaaattaaagaattccagacattcatttccatctgctcgtagtttgcaaaactctaaagcattgtccaaaaggacatttcaaacagctacttataacaaacacatgggaagattgaaaatgctcagttccaatacattttcactagaaatttcatatctattccccattttctt

SEQ ID NO: 531443 - DNA, 467 bp, Homo sapiens
aaaatagcatcttgtcatgtagcttcagataaacagatgtgagcctgggcttcattgccatgggaccttactctccttaatttcagtgaccttctgggataattacagtcaccatttacagagtttattgattaagtaattaataaatgatgataaacccaggcattcgtacgtgtgtgtactgcagcagcagcaaagcaggtgttgaatacaaaacttccacctatgtaatagcagagtcagaataaaatctaggaagcacaagcattctaacagtctctgctatagttgaagaaattaaagaattccagacattcatttccatctgctcgtagtttgcaaaactctaaagcattgtccaaaaggacatttcaaacagytacttataacaaacacatgggaagattgaaaatgctcagttccaatacattttcactagaaatttcatatctattccccattttctt

SEQ ID NO: 531444 - DNA, 585 bp, Homo sapiens
acaagaatctctcttccttgggttagtctgtttcaaaactgaaaacactgtcattccttaagaaaataggaaaaagtattccaaacctctgtcactagaaaatttgccatattaccaaatctcaaaaacctctcaggaaatgagaaagtcccagtttctggtaaactatttgggcccttttctcaagttctccaaccagtgctatttccttgaggtgaggcaaagttactcaagatcatygctgccactcaaggccttgatagggcaagtgaaaggcatggaccattattatattgatcacagcataagctgtgaaaacccacatcttctccaaacatctgcttggagcattatcatcgcatagtttgctctggtgttcagggaaatcgctgtttcataggaaatcacatggcagtgggatgggagtgtttcctgacctgccgatggtactggcacctgagcaagcattcctagtcctttttggtctgggcctcttgttctatcacaaccacaagctgtttaaaataaaacgtcaagtcacaggcaggtcattttatcctgcgtgaatcaattgaagaattgaag

SEQ ID NO: 531445 - DNA, 543 bp, Homo sapiens
aaacactgtcattccttaagaaaataggaaaaagtattccaaacctctgtcactagaaaatttgccatattaccaaatctcaaaaacctctcaggaaatgagaaagtcccagtttctggtaaactatttgggcccttttctcaagttctccaaccagtgctatttccttgaggtgaggcaaagttactcaagatcatcgctgccactcaaggccttgatagggcaagtgaaaggcatggaccattattatattgatcacagcataagctgtgaaaacccacatcttctccaaacatctgcttggagcattatcatcgcatagtttgctctggtgttcagggaaatcgctgtttcataggaaatcacatggcagtgggatgggagtgtttcctgacctgccgatggtactggcacctgagcaagcattcctagtcctttttggtctgggcctcttgttctaycacaaccacaagctgtttaaaataaaacgtcaagtcacaggcaggtcattttatcctgcgtgaatcaattgaagaattgaag

SEQ ID NO: 531446 - DNA, 543 bp, Homo sapiens
aaacactgtcattccttaagaaaataggaaaaagtattccaaacctctgtcactagaaaatttgccatattaccaaatctcaaaaacctctcaggaaatgagaaagtcccagtttctggtaaactatttgggcccttttctcaagttctccaaccagtgctatttccttgaggtgaggcaaagttactcaagatcatcgctgccactcaaggccttgatagggcaagtgaaaggcatggaccattattatattgatcacagcataagctgtgaaaacccacatcttctccaaacatctgcttggagcattatcatcgcatagtttgctctggtgttcagggaaatcgctgtttcataggaaatcacatggcagtgggatgggagtgtttcctgacctgccgatggtactggcacctgagcaagcattcctagtcctttttggtctgggcctcttgttctatcacaaccacaagctgtttaaaataaaaygtcaagtcacaggcaggtcattttatcctgcgtgaatcaattgaagaattgaag

SEQ ID NO: 531447 - DNA, 623 bp, Homo sapiens
gtgtcaaaagaagttcttactgtgagtcagggtggtgcagtggagaaagcgtttggggaaaatcctgacccaaaagtgtgcgttgggatgatgtggagatcattcaattttctcttgtagctacagctttgagatgcacccattggtatccacactggcctgctgtcctcaaatatttctctatgtcttgtttacttgagtagtgcagaaaagctgacgtcctgggtctgctctcgcatgcataggtgaggttttctctgtagctagtcatcttgctaaaccatatttttggtcacaaagaatcaggatgagagaaagtagataaaaccatggaaactcgaggtgccaccggaagagcaaaccaaagtatattgatctgctgaagctrtaatccaagtactaagtataccttcagaagttgtatgcattgttcttggggcaaaaaggaaatcaaacatctgcccttcctcccacaacctctttacttccctctcttcctaacactgtatctcacatctacagctgcaggcacacagatatgacatacagcttgatatctttatgtgcaaaggcaaaagatggctatggatataggaggtggcatttaaaagaacaatatccat

SEQ ID NO: 531448 - DNA, 648 bp, Homo sapiens
gcttaaggaaccctcggaccatggcacggacccaccataggagccccacataagttaggaccccctgggacccaggctccctataagtagaaacactctacttactgaactccatgtgccaactacagacaggaaggccattggaaaaaagactgaccaaaccacaaaggggccaataatgggaaaatcaatttccaattcaccaaatgcctgaaatatctcagggatctggggctragaacttctgtaataaggatcaaaaatgatggggcccgagggcagcctctgacccagctagtaccctccatatttcccatgtggagccctgggtcattatgatgctgagaaatcaacttttagcctttctagtagataccagtgccacctactcagtagtaaacacacacttgttcaaattgtcttctgaaactatgaaagtgaaggcagttttagaggagaccctaaaagaaccattcctgcaacccctagatttccaactgtgacagacttgcctaaagcgtcacttcttacatatgcctgaataccttatcgatttcttgggacatcatctcttgactgaactgaatgcaaatattaccttttccccaggatgggtgaatattacagtgtccccagatcaagcccgta

SEQ ID NO: 531449 - DNA, 648 bp, Homo sapiens
gcttaaggaaccctcggaccatggcacggacccaccataggagccccacataagttaggaccccctgggacccaggctccctataagtagaaacactctacttactgaactccatgtgccaactacagacaggaaggccattggaaaaaagactgaccaaaccacaaaggggccaataatgggaaaatcaatttccaattcaccaaatgcctgaaatatctcagggatctggggctaagaacttctgtaataaggatcaaaaatgatggggccygagggcagcctctgacccagctagtaccctccatatttcccatgtggagccctgggtcattatgatgctgagaaatcaacttttagcctttctagtagataccagtgccacctactcagtagtaaacacacacttgttcaaattgtcttctgaaactatgaaagtgaaggcagttttagaggagaccctaaaagaaccattcctgcaacccctagatttccaactgtgacagacttgcctaaagcgtcacttcttacatatgcctgaataccttatcgatttcttgggacatcatctcttgactgaactgaatgcaaatattaccttttccccaggatgggtgaatattacagtgtccccagatcaagcccgta

SEQ ID NO: 531450 - DNA, 578 bp, Homo sapiens
gcttaaggaaccctcggaccatggcacggacccaccataggagccccacataagttaggaccccctgggacccaggctccctataagtagaaacactctacttactgaactccatgtgccaactacagacaggaaggccattggaaaaaagactgaccaaaccacaaaggggccaataatgggaaaatcaatttccaattcaccaaatgcctgaaatatctcagggatctggggctaagaacttctgtaataaggatcaaaaatgatggggcccgagggcagcctctgacccagctagtaccctccatatttcccaygtggagccctgggtcattatgatgctgagaaatcaacttttagcctttctagtagataccagtgccacctactcagtagtaaacacacacttgttcaaattgtcttctgaaactatgaaagtgaaggcagttttagaggagaccctaaaagaaccattcctgcaacccctagatttccaactgtgacagacttgcctaaagcgtcacttcttacatatgcctgaataccttatcgatttcttgggacatcatctcttgact

SEQ ID NO: 531451 - DNA, 578 bp, Homo sapiens
gcttaaggaaccctcggaccatggcacggacccaccataggagccccacataagttaggaccccctgggacccaggctccctataagtagaaacactctacttactgaactccatgtgccaactacagacaggaaggccattggaaaaaagactgaccaaaccacaaaggggccaataatgggaaaatcaatttccaattcaccaaatgcctgaaatatctcagggatctggggctaagaacttctgtaataaggatcaaaaatgatggggcccgagggcagcctctgacccagctagtaccctccatatttcccatgtggagccctgggtcattatgatgctgagaaatcaacttttagcctttctagtagataccagtgccacctactcagtaktaaacacacacttgttcaaattgtcttctgaaactatgaaagtgaaggcagttttagaggagaccctaaaagaaccattcctgcaacccctagatttccaactgtgacagacttgcctaaagcgtcacttcttacatatgcctgaataccttatcgatttcttgggacatcatctcttgact

SEQ ID NO: 531452 - DNA, 264 bp, Homo sapiens
gtaacatagcataaccctccagggacttccccagaagtttgttagaattgagagcagagctaagtctctggttgtctcctgatagcaccagataacccttttctggggtcacctagggtcttgcaatcattttgtrcccagggctcagcctttgatgtttgtagcctttgctcgaggctactgtttgagtgagcccaagtgttccagatgaaacgatacagggacaagttcacataataaggctgttccccatcaccacctcgg

SEQ ID NO: 531453 - DNA, 668 bp, Homo sapiens
tggagacacaatggacatacctgtgtttgaggcagaagacaagaagagtccagaggacatagaggtccatggagaaggttataaagttcaggtaaacagcaggaatctttttatggcctctgtttgttgacccctcttctggttacactgatggagaakaaaatcaacattcctgcacatggaaacacattccttctcggagtcacaacattgcagtgcttcgcaaaggggcagcagcatggctgtcaccaaagcaggcactgtggacatgccagcaaccaagtctgcatactccagacagataaacccagcactgacagaagcagcctccacagatataggagataaaggagccagcagggaatggtggacacttttgctatgtactcagaaagtcttaacatggctacagcaagtggaacaagcctgtccctgtcttcaaagggtagttccagcttatcagcaaaagctgccagtctctccccagaagataggatgcatgtggtcattgcaggagctgagactgcctgcaagcctgtggcagaaactgttaaagaaccagtagggggactccctcatatcaatcttgcaaggtgaagcctatataagtgagtgggatggaagccagagagtccctgtattagtctgttttcacattgctgataaag

SEQ ID NO: 531454 - DNA, 693 bp, Homo sapiens
taacagtattcaaatggaaaagggccttggcttttctccttgatagttatataattctgtgaaggtcaatttgtttctgagatgatttctgcagctttccatttctgcttttataaaaaggagataattatatgcacaggcatttttgtgtgaatccatatacatatctcgaaatggtagtggtgatctcatgagttgatcttgcatccatctccatggctatgtccatatgtcatctccactgttgttgctgtaattccaccaccaaacttagagtttgatatggtttggctctgtgtcctcacccaaatctcatgttgaattgyaatccccacatgttgggagaggagcctggtgggaagtgattgaatcatggggaggacctcccctttgctgttctggtaatagtgagttctcatgaggtttggttgtttgaaagtgtgtggcacatatcctatgtcctccttctgtcaccatgagaaaatatgcttttcttcccctttgccttccaccataattgtaagtttcctgagacctccccagccatgtggaagtgtgaattgattttttcttcataaagtactcagtctcaggtcgttctttatagcagtgtaaaaacaaactaatacagagttgacctggttctccttaggcttgatttattctgtttgctggatatgctagtcttaatga

SEQ ID NO: 531455 - DNA, 611 bp, Homo sapiens
gtctgcttcttttgactatattttctcttgattacaagccacatttttctactttttggtgtgtttagagaatttttattgtatactagataccatggatttatatggatactctgrattttgttatcatcctcaaaataatattgaggtttttgtttgtttttttctgacagacaatgaaattactagatcacctgaccctgtagtagcttggatttatacctttctaggaccagtttactttggtttttcacttagttcttgctcttatgacatagaatttctgtgttttcaatgagaaatcaaatgttttatgaaattcctctaatctggtgggacgttaactctaaattgcacctccctactggtggccaactctaacactactcagttccttagacctcaaatactggcttccaccaaacttcttggtgtcccttaatgtctgtcatacacaccaatgctggaattgtgagtataagtgtgaggtaattaaaatgagttttagatgggactttccttcctaggagaaaatatttcattaatttaagtaaaaataaaaagaaaaaaaagatggcaatgatcttgggaagagatgaccttcactgcaa

SEQ ID NO: 531456 - DNA, 600 bp, Homo sapiens
ccagtctgcttcttttgactatattttctcttgattacaagccacatttttctactttttggtgtgtttagagaatttttattgtatactagataccatggatttatatggatactctggattttgttatcatcctcaaaataatattgaggtttttgtttgtttttttctgacagrcaatgaaattactagatcacctgaccctgtagtagcttggatttatacctttctaggaccagtttactttggtttttcacttagttcttgctcttatgacatagaatttctgtgttttcaatgagaaatcaaatgttttatgaaattcctctaatctggtgggacgttaactctaaattgcacctccctactggtggccaactctaacactactcagttccttagacctcaaatactggcttccaccaaacttcttggtgtcccttaatgtctgtcatacacaccaatgctggaattgtgagtataagtgtgaggtaattaaaatgagttttagatgggactttccttcctaggagaaaatatttcattaatttaagtaaaaataaaaagaaaaaaaagatggcaatgatcttgggaagagat

SEQ ID NO: 531457 - DNA, 584 bp, Homo sapiens
ttcttcccactagacccccttggtggagtgaggactttctcctgcagctcctcatactttcctactgcttttctcctctcatcccaccctttccttcagagacatctcactctgctgctggggtggagtctcctagggctcctgaagggtcagcatgagcaggacacgcctcttgcaccaaaacatgggtgtgtggccttgatccagatatcatctcacagctttgattatcattcaatatacagggtgtgctcaggacatcctggtgatgggaagtgcagcatctctatcttcaacttayagagacatacccctaaatgtactaaacatcatagcatagcctagcctaacttaaacatgatcagaacgcttagcctgcagttgggcaaaatcatctagcacaaggcctatttttgtaaaacagtgttgaatagctcatgcaatttattgaatactgtactgaaagtaaaaagcagaatgattgtataggcgctctaggtagggttcttactgaatgagtatcactttcacactattgtaaagttgaaaataaaaatcctaaagtcgtggatcctttgtcccat

SEQ ID NO: 531458 - DNA, 533 bp, Homo sapiens
atgaaccaatcacaagcacttcctccactctggggttcataaaagccycaggctcagccagagcacaggagaggatggccagaggaggaggagagtagagagacaatgggatgaccagctgcagagaggaacactctctccgctgacagctggagatgatgggacaaccagctacagagaggagctaccttctctgtcgagagctgcagagacaacctgctggcagaaaggagccactctctccagcgcctcctctcagctgagaactgaatactccatgcatgacctgtctacagagaggagctatccactgcaggtctcttctgagctgttgcaacactcaataaagctcatctttgtcttgttcacttttcacttgtctgcatacctcattcttcttggatgcaggacaagaactgggcaaagacaccatggccacagagatttccagccagaaaactgacaacccacagatcctgtaacagtaagtctgtaatgagactattgacttatctttcctaccagatacttat

SEQ ID NO: 531459 - DNA, 639 bp, Homo sapiens
actccatgcatgacctgtctacagagaggagctatccactgcaggtctcttctgagctgttgcaacactcaataaagctcatctttgtcttgttcacttttcacttgtctgcatacctcattcttcttggatgcaggacaagaactgggcaaagacaccatggccacagagatttccagccagaaaactgacaacccacagatcctgtaacagtaagtctgtaatgagactattgacttatctttcctaccagatacttattaatcagtgtctttagacgtaatttgagccattcttccaacacttttgtcaactttatgaaattctacatcttttgcaacaygtgcaaattcattttacaaatgatgtgcatctctttttcttttaattgagaaattcagaaataatctctggtgaatcagtagaagattggccaacaaggagggggactggccattgtccagctcttaaatagagaggtatgtttgagtaatgttatattttgatcaaatgttacaaatataacatgtgtaacatcacaaataaaaatacttaaacatttttattttagtgatggtttttcttccccagggtacctaggaggcatgggaaatgacaatatgactatctctataggat

SEQ ID NO: 531460 - DNA, 639 bp, Homo sapiens
actccatgcatgacctgtctacagagaggagctatccactgcaggtctcttctgagctgttgcaacactcaataaagctcatctttgtcttgttcacttttcacttgtctgcatacctcattcttcttggatgcaggacaagaactgggcaaagacaccatggccacagagatttccagccagaaaactgacaacccacagatcctgtaacagtaagtctgtaatgagactattgacttatctttcctaccagatacttattaatcagtgtctttagacgtaatttgagccattcttccaacacttttgtcaactttatgaaattctacatcttttgcaacacgtgcaaattcattttacaaatgatgtgcatctctttttcttttaattgagaaattcagaaataatctctggtgaatcagtagaagattggccaacaaggagggggactggccattgtccagctcttaaatagagaggyatgtttgagtaatgttatattttgatcaaatgttacaaatataacatgtgtaacatcacaaataaaaatacttaaacatttttattttagtgatggtttttcttccccagggtacctaggaggcatgggaaatgacaatatgactatctctataggat

SEQ ID NO: 531461 - DNA, 565 bp, Homo sapiens
ctggcaatctttgtccttccttggtttgtcaaagcatcacctgatctctgccttcatctccatgtagtgttctttctgtgtccaaatttccctgttttataaagacaccagaggcatattggatgagggcctcaccttactctggtataactcatcttaactaattacatctgtagccaccctttttccaaatatgattgtaatctgaggggctgtgggtgaagactgaaatgaacgttttttgaaaggacacaattcaacccatgacaccttggttagtgtcatttgtttctgagtgtgtgccacttacactatctgggaaaacacacacacacacacatttgcacttagggagtcatctctcaatgaaccaatcacagacatgacctctgcaaggctcagaagtaatacaacctcttccccccattccctctcctggcctgggtgttgatgaaatgctgcccatgaattattgatagacccctaagcttgccaagcatgttctttgtgtgtgtgtgtgtcctgtgtgtgtgtgsgtgtttgagacaaagagagaagggaaaag

SEQ ID NO: 531462 - DNA, 565 bp, Homo sapiens
ctggcaatctttgtccttccttggtttgtcaaagcatcacctgatctctgccttcatctccatgtagtgttctttctgtgtccaaatttccctgttttataaagacaccagaggcatattggatgagggcctcaccttactctggtataactcatcttaactaattacatctgtagccaccctttttccaaatatgattgtaatctgaggggctgtgggtgaagactgaaatgaacgttttttgaaaggacacaattcaacccatgacaccttggttagtgtcatttgtttctgagtgtgtgccacttacactatctgggaaaacacacacacacacacatttgcacttagggagtcatctctcaatgaaccaatcacagacatgacctctgcaaggctcagaagtaatacaacctcttccccccattccctctcctggcctgggtgttgatgaaatgctgcccatgaattattgatagacccctaagcttgccaagcatgttctttgtgtgtgtgtgtgtcctgtgtgtgtgtgcgygtttgagacaaagagagaagggaaaag

SEQ ID NO: 531463 - DNA, 562 bp, Homo sapiens
gtggtggcgggcgcctgtagtctcagctactcgggaggctgaggcaggagaatggcatgaacccrggaggaggagcttgcagtgagcggagatcaggccactgcactccagcctgggtgacagagcgagacttcctctaaaaaaaaagaaacttaaggtgtccttaagactccactcaaacttggccctcttctgtactgaattgaatagtgtttcctcaaatgtttatgtccaaccagaactgcagaatgtgagttgatttggaaatagaatctttgaggtgtaaacaaatgaagataagacttattggattagcataggtaggctctaatccactggctggtgttctcataaggagagggacatttggacacagagacatgctcgttcagagggcaggcgatataaagacagatgcagggaatgctgtgtgaagatgggagatgagtccacaaggtggaaatgctacagacagccagaaaaccagcagctactagcagagaggggtggggcagatccctcagcctccaatagtaccaatcctgtggacaccttgatttca

SEQ ID NO: 531464 - DNA, 562 bp, Homo sapiens
gtggtggcgggcgcctgtagtctcagctactcgggaggctgaggcaggagaatggcatgaacccaggaggaggagcttgcagtgagcggagatcaggccactgcactccagcctgggtgacagagcgagacttcctctaaaaaaaaagaaactwaaggtgtccttaagactccactcaaacttggccctcttctgtactgaattgaatagtgtttcctcaaatgtttatgtccaaccagaactgcagaatgtgagttgatttggaaatagaatctttgaggtgtaaacaaatgaagataagacttattggattagcataggtaggctctaatccactggctggtgttctcataaggagagggacatttggacacagagacatgctcgttcagagggcaggcgatataaagacagatgcagggaatgctgtgtgaagatgggagatgagtccacaaggtggaaatgctacagacagccagaaaaccagcagctactagcagagaggggtggggcagatccctcagcctccaatagtaccaatcctgtggacaccttgatttca

SEQ ID NO: 531465 - DNA, 607 bp, Homo sapiens
cattggcctccacaagtagacagtgaacttaaaaaggcaagcttggtctggtttttccactgaacttcccctttgggaaaattaatctttcccatcaatcaagattctttaayagtttttaatgtcctaatcactcctaggtctttttctgacctccaccttgtgggctttatcaagcttattagggcctttggaaatgtctttttctcccccttcaacttaaaacctcaagattagcctccagatcttctgctttttgaaattccgttcaatacagaaaatatttagagaataccatgccagactcttattaagacacagatcttgtcacaagagcaatcatgttctaactgagaatgggcaaaatctctgaaaccatgagctagcctagaagaataagcaaaacattgcaggaaaacagatgaggcatttattttatcaagagagggttcttagtgagttgtgatcccaattgcatgagacatcattttagatagcatttaatgttagctttgtgtcatattgccacttcccttaccgtacgcattttccagaaatctagaatgctccctttaggttgtaaaattaacagaatgaagataataca

SEQ ID NO: 531466 - DNA, 612 bp, Homo sapiens
gcttgaaatgtcctggagatgcagttaaacaacagatctatctgttgatcttacaccatgatgttggttagggtgtgggccctgcagggccccgtcgcctgatggggcatcttatgtggcactctttaactagggacccatgggggaaaccccaccacgttcyccagggctgtatcttgaaaatggtcttaacacaagcttgaaatgttttttttttattctagctttaaacacacacacctacacacagagagaaatgttaagtttgctgatgacgtgtgatatggtttggctgcgtccgcacccaaatctcatcttgaattgtagttcccataatcctcacatgtcgtgggagagacccagtgggaggtaattgaatcacggggtggttacccccatgctgctgttctcatgatagtcagtgagttctcatgagatctgatggttttataagaggcttttcacgctttactcagcacttctccttcctgacatcacgtttgcttccccttctgccatgattgtaagtttcctgaggcctcctcagccatgtggaactgtgaggcaattaaacctctttcctttataaattactcagtctcaggcagttct

SEQ ID NO: 531467 - DNA, 628 bp, Homo sapiens
gaggcagaaaagggcaggtgaggaaggctctagaacagcagggtcactttactcaggtctgggatttttaagtgttttatctggtagaaatgcatacagcatttacaaattggaaataactctgtaagctcagataagattgtmgcgtaatattgtagccagaaacagctcaccacggcttcctttcaattaaccatttaaatcacagcccatacaaaccccaacccccactgctatataataaaaaaagaaagttagactagagctgaagagttttgattcatgctgctgaatatggaagatctgcaatctttctcatggagcttatagtctaatgtgactctttgaaagaacattcctttggctgctggcaaagatatcttccccctagaccctttcctcctgagctgcatggtgattcattatagataacccctcctgattaattttgttttgactttaactttgacattaaaaaaaaagaaagaaagaaacataagaggtaaaattctcccctctaacattcactgtgtgactatttttagccagctttggtgtttgatgcagaaaaaggaaaaatctaaatttagaaataaattaaattgttgattgccatcaaaagtcccag

SEQ ID NO: 531468 - DNA, 509 bp, Homo sapiens
taaatgcaagtcacagaatcccttcctggaaaggagactgagaaatgtaaagatctttcccatcagccagcacataagaaagctggagagaaaggatgcactttttttcaggagtagtggatctgcttccttcagaaatggtaaagactggcatttactaaaataaaaactgtgctagtcacagatcatttcctccatcagtgtctccccactaaggaaacccagatgcaaacattttggttgagtcacgcctgtaaattctcctgccctcttttgcccaatcatttctaacaacagccaaccattccaggggctgarataataagcccatcttcagcgaggtaatatcttatttcactccatcatcagttatatgattggtgtcatctttcttaataaaaagccattgctagaagctatctccactaaatactcttgacatcacttcctttaatagagcttaaaagttatagaatatttaagcggcaaagcgtgacagtgcatttatt

SEQ ID NO: 531469 - DNA, 588 bp, Homo sapiens
tggtggtgttacgtaattccctaaaggcactacctcctagaagacaacattgtaaataaccgcatcaaatcccagcaaactctggtctcagcaatgaccttgaggctaatcggacctctactttctatatccaacagacacccagaagtgyaggatatgtctgggtgggctcctccaggagctacattcactgttgtaacctacaaaaccatagtaacaatctctatacaatttggataatgacagtctgtaagtgtgctattggttttcattatgatagaccatattacaaaactagctataaaatgttagatgggcagcaatgaccttcatttcaatatcagattcttccctgacagcctcctcagtgtccacttcgggatcacgcaggtgctgagtttcagtcagggcatatgggaacatttttgctgtccgtttgtaatcagagccataggaacttggggtgcttgttagctctgtaactcagatgttagctgggatttcacagacacttaagatctaggtaagatgaattcatgccctcttatcaaagcccaaagccctaagctccctcctcaaaattcctca

SEQ ID NO: 531470 - DNA, 636 bp, Homo sapiens
tattaatgtttacatacctataagcaccttccttgccctaagtaggtgagctgtaagtaactgtagaataaatattagtgactcaagtagtctgtagaagattggcttctaaatctattaagtttccagaaagcatttttgtaagtattcatttattttttagatattcattaacaagctggatttgggtttgatctggagttagggtgttaatatagcatgtgaatgtagatgaactaggagtagaacctgtttttcatgccaacgcatctaatcaggctaacgtccttcaagtcagttttccrattaaacatcccaattatcagttaattgctagagaatagatggaactgactcatttatcttcaaattccaagctggaagcctcaaatgaacaagaataattctagctccacagttagctaaaagccaggctaaacctggccagtgtcactgtaaaatatgtcctcaggcttcacaaccctagcatatagtaccaaagagatttaacctcaatatggtgttttgaagagcgctgtcacagcagagagctaaaatccaatagcacaaaccacatggatccacattattcaagataaatacttcacatgactccttaattagtcattaacgata

SEQ ID NO: 531471 - DNA, 617 bp, Homo sapiens
ctgggagtctggggccagggtgcagcatgaacattgctgagcccaccmttgcagtggctccagtcagccttggcgtttgtatgcaaggtccctgagcctctgcatcatgcacaagcacttgggaggagatggtagcattgaacagacattctctcctcacccacataaatcctcagagggtttccctctgtgggtttataaaagccctttatctaattcatggctcagagaattgagctcactggcaagaggctttttaagtcaaattttgaataatttctcagcaattcattacgtaggaaaacaggtcctttttgttctaatacttagcctaggaatgcaactactctctgccaaattcattaacaaaacctgtgtataaggcctggaaggctcaggccaatttcttaaatgtgctaaaacttgctggtcattgaaatgtaaatttttaccttcagctagaaattattcacaagtgttagattgtaggaaatagcaatgtcactttcaaatgcccaggatagttccagaccaagtacccattgtgagctgaggcttaacgtgtggcaaccaagagagacagccacatgtcatctttctgattggcacagaaggga

SEQ ID NO: 531472 - DNA, 614 bp, Homo sapiens
ggagtctggggccagggtgcagcatgaacattgctgagcccaccattgcagtggctccagtcagccttggcgtttgtatgcaaggtccctgagcctctgcatcatgcacaagcacttgggaggagatggtagcattgaacagacattctctcctcacccacataaatcctcagagggtttccctctgtgggtttataaaagccctttatctaattcatggctcagagaattgagctcactggcaagaggctttttaagtcaaattttgaataatttctcagcaattcattacgtaggaaaacaggtcctttttgttctaatacttagcctaggaatgcaactactctctgccaaattcattaacaaaacctgtgtataaggcctggaaggctcaggccaatttcttaaatgtgctaaaacttgctggtcattgaaatgtaaatttttaccttcagctagaaattrttcacaagtgttagattgtaggaaatagcaatgtcactttcaaatgcccaggatagttccagaccaagtacccattgtgagctgaggcttaacgtgtggcaaccaagagagacagccacatgtcatctttctgattggcacagaaggga

SEQ ID NO: 531473 - DNA, 638 bp, Homo sapiens
ttgagttttttttctgggtagggtctctttaggaatctgtaaacatttgctaaatgagtgaatgagtaagggactctaaaacctatatttttaatctctatgttatacaggactaatttatagccatgataataagccttggacattgcatatgttccctaactgtaggtgattaaaattacataaaattaacagttgtcttcaaaatgtaacactaagggaaaaaaatccaggaagctgcacaagtaaggggacctatgagtggaggttccctaccctatacactggtcatctttatagccatcactgaccaccaccgttccctaggtctgaacgtggactccaacaggccgcacctatcaaggactggccaaaagaaatagatcggtttcgccttgggccattaaattcacacatcaagattatgtcttcagggaaccggaagacattggcagaggacttcctgtgagcaagtcatggtgctagagcctagggttgagttccaaccttctcacccacagtctgggttctggagtccatttccactatgtgggatgcatcattgctattaatatttatctttcttgggatcttattaatgagccaayagactgataaacacactcaatccatgcacc

SEQ ID NO: 531474 - DNA, 506 bp, Homo sapiens
gtactagtgcccttgtaaaagaggccccagggagctcatttactccttctgccacatgaggttagagtgataagactattgtctttgagggagcgaggcctcatctgtcaccaaatttgtcgatgccttgatcttggacttcccagctgccagaaccatgaacaataaatttctattgtttgtgagccacccagtttatggtattttttttttacggcagcctgaatggactaggacaaaaagaaaaaagaagtaaaaaaccctttctttcaaggacccrcaaacttcatgtgtataggtagtttccattttatgacaaaacttcagacaaaactatttcaaacaagataggagtcatattatttgtaggactttatcaatacaaattttacaaatgttttagttgacaaacttttaaattttagattatttatagaaagtagaaaattctccctttacattataagtgtgattaatgaagttagttagtggcattcacagcaccc

SEQ ID NO: 531475 - DNA, 506 bp, Homo sapiens
gtactagtgcccttgtaaaagaggccccagggagctcatttactccttctgccacatgaggttagagtgataagactattgtctttgagggagcgaggcctcatctgtcaccaaatttgtcgatgccttgatcttggacttcccagctgccagaaccatgaacaataaatttctattgtttgtgagccacccagtttatggtattttttttttacggcagcctgaatggactaggacaaaaagaaaaaagaagtaaaaaaccctttctttcaaggacccgcaaacttcatgtgtataggtagtttccattttatgacaaaacttcagacaaaactatttcaaacaagataggagtcatattatttgtagractttatcaatacaaattttacaaatgttttagttgacaaacttttaaattttagattatttatagaaagtagaaaattctccctttacattataagtgtgattaatgaagttagttagtggcattcacagcaccc

SEQ ID NO: 531476 - DNA, 659 bp, Homo sapiens
ccttttttaaaaggtagcagattgattgttctgatatgtgaaaatgcccaacacacacttaaatgttttttgttgttgttttagttttttttgaaacggactttcgctatgttgctyaggctggagtgcagtggcacaatctcagctcactgcaaccctcacctcccgggttaaggaattctcctgcctcagcttcccaagtagctgggattacaggtacccgccaccacacccggctaatttttgcatttttagtagagatgggttttcaccatgttggccaggctggtcttgaactcctgacctcaagtgatccacccgcctcagcctttcaaagttctgggattacaggtgtgagccgctgtgcctggcctcaggtgaacattttttaaaaattaaaaatatttagtgatacacgttactaaaatgtctcaggtaatttggtatgaaaatcatattttatttatttttctttttttccagatcccataagactaatgaaaaccacatttttctaaacaggaaattaactatgcagcatgtatttaaacaattattaggataaaatataagtattattcagagaataagtatagagagtatttgtgtgtggtgtctaaagaaattctatcccaaataaatcacttctcagattatga

SEQ ID NO: 531477 - DNA, 659 bp, Homo sapiens
ccttttttaaaaggtagcagattgattgttctgatatgtgaaaatgcccaacacacacttaaatgttttttgttgttgttttagttttttttgaaacggactttcgctatgttgcttaggctggagtgcagtggcacaatctcagctcactgcaaccctcacctcccgggttaaggaattctcctgcctcagcttcccaagtagctgggattacaggtacccgccaccacacccggctaatttttgcatttttagtagagatgggttttcaccatgttggccaggctggtcttgaactcctgacctcaagtgatccacccgcctcagcctttcaaagttctgggattacaggtgtgagccgctgtgcctggcctcaggtgaacattttttaaaaattaaaaatatttagtgatacacgttactaaaatgtctcaggtaatttggtatgaaaatyatattttatttatttttctttttttccagatcccataagactaatgaaaaccacatttttctaaacaggaaattaactatgcagcatgtatttaaacaattattaggataaaatataagtattattcagagaataagtatagagagtatttgtgtgtggtgtctaaagaaattctatcccaaataaatcacttctcagattatga

SEQ ID NO: 531478 - DNA, 625 bp, Homo sapiens
aaagcattagaaataaagaaactagaattatgtcagtaagccacaatgggggaaattgaaaacaggtaagacagtggttctcaactggagtgctgagatgatatagtatgcagcaaaattttcacaaatgtataactttaatttttgttataaaacaattatgttcattgtatgtagtattgaggtgctgtaggttgtacaatttgtttcaagttggaactaaaggcaaagcatagcattaagttggctttacaagaagatggtggttcactggaatgtgagagagctttgccttgtcattgtatgagaaatcattgagcagagataattctcaaacacctacaatrctgaaagtgtaccatatggataggggattaattgtggatgggttctatgtcctctgagatggtacaataactaatttagtgttattttaccttctttaattcatttaagttggctgccctaaattctggcattcaaagtatttcacaaacatgaaaagtttgagaaccatttctaaaagattccttagagttgatgctaagcttcctggttgtaaataggagaggatagggaagggcagtataatctatttcatagttctagggataagcagagcttt

SEQ ID NO: 531479 - DNA, 596 bp, Homo sapiens
ctctccgcccaggcttccagagcaggacaaggactgtgtcctctccrcccaggcttccagagcaggacaaggactgtgtcctctccgcccaggcttccagagcaggacaaggactgtgtcctctccgcccaggcttccagagcaggacaaggactgtgtcctctctgcccaggattccagagcaggacaaggattccggtccccacaaaccagactagaaacagaagcttgagacagccccagactgccaggaggcagtggcagggcggacacttcaacccagatcccccgacggcagagcctatgctcttaatgcccagcctgccagggcccaccacatcctgactccagaggcttcctcagcagggtccgtggcttgttttctttcatactcatgattcatgttctgaagacaccctattgcaggatcagcacattctccggggcccacattggaagaatgcgtgtatcaggacagcccaggactgactgagcatcccccatgagggatttgtatttccgtcatccccacttccctgggaagcggccaggaccctcagaggagggatcagggagacctggggagcctgcggtgg

SEQ ID NO: 531480 - DNA, 601 bp, Homo sapiens
ctgggctccaatcccagcatgctgcaggggcaagtacacactttaccaccaaaagaattacaagactttgcttatatatgtgggcagaaacctgggtaccacgtgcagagtggattctaagggtgttagatcacagagggagaaatattaatacaacattagaccaggccaaatgttttggcatagttgcacttactagaaaatctgaatccaatgtgctagtttgtgtaactatgcattaatcatctattgccatgtatcagattaccacaaacttcaaggcttacaacagcacacacttttaatctcatggcttctatggggtaggaacctgggcatggctgacgtggctcctctgggccaggattctcatagggcagcaatccaggtgtcagccagagctgcagtcttatcrgaagggttccctgggaaaccatccacttccaggcacacaaggttgttgcaggagtcagttccctgcaggctgttgggctgaaggcctcagttactaggtggccctggctgaaggctgccctcatggacctcttcagcatggtcacttactttatcaaagcctgcatgctgagaaggcaactgagag

SEQ ID NO: 531481 - DNA, 449 bp, Homo sapiens
tgttgcattgggaattgagtttcaacatgaattttggagtggacaccatcattcaaaccataaccacctttgggaggaactaggtcgtaagggtggagccttcacaaatgggattagtgcccttagaagaagagtcaggagagagaggatacaaggagaagatggctgctgtggcagcccatactgagacaagaggtgattagggtcaaatgaagtcatgaaggtggggctccatgatgggattagtgtccttagatgacgagaccacagaccaaaagaaactctctcctccctccstctctccctctctctcactcattctgtctctctcattctgtctctcattctctctctctctctctctctctctctctttatatatatatctcctatttgaggatacagcaagaaggcagtggtcatctgcaagacagtccttgccaggagcc

SEQ ID NO: 531482 - DNA, 368 bp, Homo sapiens
ccgcctgctggcatcgagtcctggctgagcaggggaaggggtcatcacagaaactgagccagctttgtcactccctgctgtgggtcgtcatcctctgggygctctctggctggacaccggggagagaaattaggatgttttggggtgggggcttctgcgtccattagaactaggtttggctgcaaaacaagaggcatagaatagcacaggattcaacacacgaggatttattttctccagtaaaataacttgggagatcagccatccagggctggggtggcgaatcatcaaggaccctgatccttccacccgtctgtcttttcccacatcttcagcatgtaatttccatccctcagaaaacctcctgg

SEQ ID NO: 531483 - DNA, 636 bp, Homo sapiens
caggtggatgggcaaaagatgtggtgagatttccttggctgtcctggtgatggagctgtgcagagcgtcgggcaaatgggacctcatccaggggctggcacccccaccttggtgctgacctttcctgccctgtaccatctgtgtcccctgggccagggagggtcctcrtgggctgcccggatgttgctcgtgccccagttccaccttctcccaacacaggatggagacggaggccgtgggatgggtttgtgggatatcaacctgtagccacccaggaaggctttcctgccgggagggggtctgttctgaggatgaattccgggtgagcacggtgactctcgccgagtgatactcgccgagcattgactagtgttctcagcttctgacccccagcttgggcgcaaccccaggaggtcggcgccatcattatgtccccagtgcatggaggaggagggaggtggaggagccgggttgggcccaggcactttgccctccacctctgcacctctgccacctgtgtgctgctggccctcaggtggcctgctctgtccagggatggccagggacaggccggtgggtgggaagttctggtgatttgaagccctgccagccctttccctgtaggtctgcatggcc

SEQ ID NO: 531484 - DNA, 636 bp, Homo sapiens
caggtggatgggcaaaagatgtggtgagatttccttggctgtcctggtgatggagctgtgcagagcgtcgggcaaatgggacctcatccaggggctggcacccccaccttggtgctgacctttcctgccctgtaccatctgtgtcccctgggccagggagggtcctcgtgggctgcccggatgttgctcgtgccccagttccaccttctcccaacacaggatggagacggaggccgtgggatgggtttgtgggatatcaacctgtagccacccaggaaggctttcctgccgggagggggtctgttctgaggatgaattccgggtgagcacggtgactctcgccgagtgatactcgccgagcattgactagtgttctcagcttctgacccccagcttgggcgcaaccccaggaggtcggcgccatcaktatgtccccagtgcatggaggaggagggaggtggaggagccgggttgggcccaggcactttgccctccacctctgcacctctgccacctgtgtgctgctggccctcaggtggcctgctctgtccagggatggccagggacaggccggtgggtgggaagttctggtgatttgaagccctgccagccctttccctgtaggtctgcatggcc

SEQ ID NO: 531485 - DNA, 607 bp, Homo sapiens
tgcagtctgtggggagagaaaaacttcacccatcaaatctgcaaaatataccagwacataaaaaaaaatcaattgattggcagatgtggatatttacatctctctctttaattgcttaaaatcagcgagttgggagacttcactaaacttggcagcaattcaagttgagtacagcttctctttggcaggaggctgagaaaactgaaatgtgtatgatacctttaaaaaagaggattaaaaaaaaccaggggagataatgaggaaattacaaccagcaaagctgaagaagttcagtgttgtagcctgagggatattaagagaggagcaagttcaaagaagcatagaattgtcatcatcgaatgcagaggagttaaatatcatagactaatctaggttaatatattttaaaaaataatagtttaaaattatttttgaacaattataattgagaataaggttttaaaagcagcgacatgacactactagtatcttacccaaacaatatttatttggtttcataaaggtcaaggaaaattgcttctatttttaaagaaatagggatttttagaaccacaggaagtgcttacatggattttcagcccactgt

SEQ ID NO: 531486 - DNA, 507 bp, Homo sapiens
gaaacatcttaccaatgccctcattaattcatgagttatctatatttgtgtgagagggatgacttaacttactttttaaaaatttctcttttaggaaaaggcagagagagctggtaaaaggtattaatcactcagagctctggattttctgaaagataaccaaagtaatgaaggctatctggttgggatctgagtagagaaacaatgttgattaagtgattcaccaaatgaggtactcaaggacgttacactgagccagagtgtatactcaggaagtggggagtaaccactactagatgtacacgagtcggcagcatacagcaagctttgtgggatctggtaaaagttaggagagaaaacccatttgcttctgactggttcttgctatgatatgatggtcaggaaagctgactgaattcagaggcaaggaytggacagataggcctgaatgaaaccttgtgtatagcagaaggtttcagaggcattcaaaccagagtgactccatct

SEQ ID NO: 531487 - DNA, 568 bp, Homo sapiens
atgatcaaatccgtggtctytgtgtgtgtgtgtcaccctgtctccagtctgttgcaggacttctctgagtccacaagtttaagtttgtttgtacaatttggcaaagcaccctagtcataaaaatgggccatattgtctttaaaagatgttgaaagctgtgtaaatgaatcaaattctgtgtagtaaagaatttggccttgctggaagagaggtctggcaattgccctcaacttctaggagatcttttcatatctgataaaagcacctttgtttagggagggggcttgcggcaaggagctcagggtggagttggtaagacctgataatattaggaggaggcctaaccacaccacaaagagctcctatgtgatttaaggtaggggctttggatcatacaatataattcaccacgtgtgcaatgaatcagtcatgcccatgtcatggaactccagtgaaatctctgcacatagaagctccagagtttatctggttggcaatactctataaatattgtcacacattaatgttgggaaaataacgtatcctaattccatggaagatgacaagg

SEQ ID NO: 531488 - DNA, 317 bp, Homo sapiens
actaggctatacatttagaaatcttaccaagtacattcttaaattgtgctgacttttcaaaaaagaagaaaaggtgggggaaggattggtmtgtcttagagctatatctttaatatcttttccttgaagccatatgttactgaaaggcccctggatttggcctttgccctgagctcttacattgaggactttttgctgactagaaagactgccctagctcttgatatttcctctaattctgctcaaaaatggaacaatttttctttagttcatccctctcttcttgtgccttatcctaggccactagtagaagccag

SEQ ID NO: 531489 - DNA, 624 bp, Homo sapiens
cttggcattgttttgtacattccagatattttataagacaggaaaaaataaattcaagttatacaaagaagaagagtactcattaatcatccattaccagtgatattatgaatcagtagacaatatatctagaatatcttacatagttaactaaaagaaaatatgtatagctttaagccagttcaataaattaaccagacagaakatcaatagcctagtcaaaactgggttacatgagccatcttggcacacatcactttcagaagaagcacaaatacagcatccaaaaagaaccaaaaaatgttaacatctttactattatgcccccaagaaatgtcggttttatattatattacacaaaggaaaacttctacctaaggtaggtgatatttaaattaaagttaaaataaataaatagtaggacttgtggaaaacgtggatgaatactgaaataaattctgggccagtaaaaagactccctaaatgtaaaacacgtggtataatctgctatgatctgaatgtttatgcccttgcaaaattcacatgttgatatcctcactctcaaagtgatggtattaggaagttgggcccttagaaagtgactgggccctgaagactccaccg

SEQ ID NO: 531490 - DNA, 624 bp, Homo sapiens
cttggcattgttttgtacattccagatattttataagacaggaaaaaataaattcaagttatacaaagaagaagagtactcattaatcatccattaccagtgatattatgaatcagtagacaatatatctagaatatcttacatagttaactaaaagaaaatatgtatagctttaagccagttcaataaattaaccagacagaagatcaatagcctagtcaaaactgggttacatgagccatcttggcacacatcactttcagaagaagcacaaatacagcatccaaaaagaaccaaaaaatgttaacatctttactattatgcccccaagaaatgtcggttttatattatattacacaaaggaaaacttctacctaaggtaggtgatatttaaattaaagttaaaataaataaatagtaggacttgtggaaaacgtggatgaatactgaaataaattctgggccagtaaaaagactccctaaatgtaaaacacgtggtataayctgctatgatctgaatgtttatgcccttgcaaaattcacatgttgatatcctcactctcaaagtgatggtattaggaagttgggcccttagaaagtgactgggccctgaagactccaccg

SEQ ID NO: 531491 - DNA, 600 bp, Homo sapiens
tgtgtgtcatccctaaaactgaaaagaaagaaggccaggcctctgacctagaactggcatgatgggatagaagcagcgctgggcctattctcagagggctggagtccatgcctggctctggccctcattatgggaaggaaagtaacattcattgagcccccactgagctgggcacccatcttaagttatctcaaaatcattaaaacgtgctggtgacccagttttctttatgctcatcagggagacaaggagcctgagggtcagagaggtgaccaccatttctgaaggtgctagcaaactgggggcactgcagcagtttcaaagcaggctccctgatgccatgccagggctttccctgctgaccttggctgcttgattggaggaagtctatgagacttgtctggcccctgctattcccccaggctctggagtccatttcaaaacccctaaagtcacttggcctttagctttcctccaaagggcagtgtccccagagtcacatcagccctgcggtgcctgtcccaattagaaacaacagcctccaggcgaggtttgagcctgtgccttcagkgtgggaggcaggtctcatagccacccttc

SEQ ID NO: 531492 - DNA, 309 bp, Homo sapiens
gctcattggagttgccagctagaacccttcaatcagcaattcagggaagctgcatatrttggagagaatgggcttaccccagtgaagcaagttcctagagagggataaagggcctgaatcagtagcacaaggacaagacttcggcatggaaagtaggaatagaccccttactcagagacaagggagagaacataaggagagatgcagaatgaaaaaaatgcatgaccaagaagaaagttggaggaggtgatagatgagaggtaaaagcattgctgggggagaagggttcgataagtgatcgaggaatat

SEQ ID NO: 531493 - DNA, 509 bp, Homo sapiens
ttattaacaaatataataatactgaatgaatatactgactggtttattgataactaggtaaatgaggttgtatgaatgtacaaattaaaataacacctgtgaatctggcatgaagtacatgttaagctcatgctagttattgtgaaagaaaacacaccaaaatttagagaaaaaaaaaagcctatataaaccccaccaaccttaaaatattcctgggatctagttcttcattggagtcatttaccaccccaagactgaagagaggatttattccaatagagttggactcttggggaagaagataggatagtgatcayggaattttcagtttatgtaataattcattgaactatgtggataagatattaatttgcccaaacttcattagccttgtaacttcttagatagcttccaaaccttagagagatctaatctgtacccatgactgtctacccatctttcttttcatcaatcaatgggtagccgtggacataaatcaaatcaatgtt

SEQ ID NO: 531494 - DNA, 621 bp, Homo sapiens
taaatattgagcatgattgctggatcatatgataagaatatgtttagttttgtaagtgactgccaaactgtcttgcaaagtgaatgtaccattttgacttcccmcagcaatgaatgaggattcctattgctccatatcctcatcagcatttggtgttctgaattttggccattttaataagtcagcagtgatatctcattgctttaatttgcatttccccaatgacatgtaatgtaaagtgtcttcatatgctcatttgccatatgcatattttctttggcgaggtatttgttaaagtctttggcccatttttattttctttaacatgcaaattatattatgtcacagtcgagcccttctccgttcttcattcctacactctaaacttatatacctttggtggatacctaatgcttttagaataaagcctcaaactcttacaaagttgataaggccttgggtaatctggttttcattttacctcgccagccttgtctagacttctctgcactgatcctctgctaatctttcagtccttcaactgtgccaagttgcctttgccagtaacatctctatgaacacagttcttttagccatagacaataggtaaacagatgggtg

SEQ ID NO: 531495 - DNA, 646 bp, Homo sapiens
gtggacataaattttcaactcctttggataaatattgagcatgattgctggatcatatgataagaatatgtttagttttgtaagtgactgccaaactgtcttgcaaagtgaatgtaccattttgacttcccccagcaatgaatgaggattcctattgctccatatcctcatcagcatttggtgttctgaattttggccattttaataagtcagcagtgatatctcattgctttaatttgcatttccccaatgacatgtaatgtaaagtgtcttcatatgctcatttgccatatgcatattttctttggcgaggtatttgttaaagtctttggcccatttttattttctttaacatgcaaattatattatgtcacagtcgagcccttctccgttcttcattcctacacyctaaacttatatacctttggtggatacctaatgcttttagaataaagcctcaaactcttacaaagttgataaggccttgggtaatctggttttcattttacctcgccagccttgtctagacttctctgcactgatcctctgctaatctttcagtccttcaactgtgccaagttgcctttgccagtaacatctctatgaacacagttcttttagccatagacaataggtaaacagatgg

SEQ ID NO: 531496 - DNA, 556 bp, Homo sapiens
ctgacaccaattttttttttatagaacactgttttcaaatacataagtaacagatattcatctcctgatgactatgttgctatgataaattcattgtgtgtcttaattttccaacctcaaccactagcatagataaagcaaattaggtatcagcatttaccaataatgttataagaacacaaattaactgtattgatgagcatcataataaattttactctaaggatttttacacctaaatatgaatgttattrtggtccaacaatacttcttgtatttaatggacataatttatccctgtaaatctgggcagcaaatcactgcataattaaacagtttggcaatcactagaaagatttcagattctttggcagcagatgccaagacaaaacatgaggtatgagatgtttgttgagaatcaacattatgaaaaaaaggaaaggaaaaaagattgctcagagacagaatgtgaacagacatgtaggccctccaaggcctcgaccaacccagtggtaaactctggagtgagtattgcccctgagtgttccatgctggg

SEQ ID NO: 531497 - DNA, 556 bp, Homo sapiens
ctgacaccaattttttttttatagaacactgttttcaaatacataagtaacagatattcatctcctgatgactatgttgctatgataaattcattgtgtgtcttaattttccaacctcaaccactagcatagataaagcaaattaggtatcagcatttaccaataatgttataagaacacaaattaactgtattgatgagcatcataataaattttactctaaggatttttacacctaaatatgaatgttattatggtccaacaatacttcttgtatttaatggacataatttatccctgtaaatctgggcagcaaatyactgcataattaaacagtttggcaatcactagaaagatttcagattctttggcagcagatgccaagacaaaacatgaggtatgagatgtttgttgagaatcaacattatgaaaaaaaggaaaggaaaaaagattgctcagagacagaatgtgaacagacatgtaggccctccaaggcctcgaccaacccagtggtaaactctggagtgagtattgcccctgagtgttccatgctggg

SEQ ID NO: 531498 - DNA, 666 bp, Homo sapiens
cagattgtcaggtctgtgttctgaggtggccagcaatggagttgagggtttaagtacataagtattgctttagacttagcattgacacttctcatgggatattctaaatggtatcatcctccaggaaaaatcttctgtttcttacatgtttctatctcattataattctgatttttgtttctgtctctctaaatgacataatttcaataagactgatttggccactctgggaaacacttaacttgaactaattgtttatttggaagtctccttagaaaaggaaggagataagattcctcaggccccaatggacagcaatatgtattagtacacagagctctccaaatataaccctgattaaaaaattgctttgttgaaaagaatccttggccaaatctaacaagcaatttgacaaacttaagcaacaacaaactagattcatttccttggtgaatcctgcccctacttgtgctccagttgtctttctatattgagctcgcctgcttcycgctatgctctaatttgtcttttttccaccgctctactccccttccccttgtcctgaccctccaccttttccaacagctcttctaagatctcccaatgccagttgcctctaaagattcatcctcccatgcgccaggtagcaggcagataaggaattta

SEQ ID NO: 531499 - DNA, 618 bp, Homo sapiens
gtataaatcttaaaatctgtattaccattaaaagaaataagactgtagggctatatgccatatgattccattcatgtggttgtagagttagagttggtaaacacatcagttgttgccagggatttggtgaaggagttgagttgtttaggtgaagcacatagtattcttaggaattcatactgcagcaagaatatctaaatatactaaaaatgattgaaataaccttactgaagggaagggaggatatctgctgacytaagtagcactggagatgaatggagcctctaagactgaaggcaaaataaactgcacatgaacactgtattctggttgttcatctgttcccactggagtatggttttaaaattctgaaaccactatacactttttgcatacaggaatgaaacaagtaaatgtatggaagatggagaaagctactgctgaagcgagagtttaaagacaaacaaggggagaaagctagagtgacccatgtggtaatgaataagggttggaaacatcagtatgaactcatgtttatcttaatatggataaagatggatccatatggaaatgtttatagatatgtgtatatatgtgtgttagtataaacatgtattt

SEQ ID NO: 531500 - DNA, 618 bp, Homo sapiens
gtataaatcttaaaatctgtattaccattaaaagaaataagactgtagggctatatgccatatgattccattcatgtggttgtagagttagagttggtaaacacatcagttgttgccagggatttggtgaaggagttgagttgtttaggtgaagcacatagtattcttaggaattcatactgcagcaagaatatctaaatatactaaaaatgattgaaataaccttactgaagggaagggaggatatctgctgacttaagtagcactggagatgaatggagcctctaagactgaaggcaaaataaactgcacatgaacactgtattctggttgttyatctgttcccactggagtatggttttaaaattctgaaaccactatacactttttgcatacaggaatgaaacaagtaaatgtatggaagatggagaaagctactgctgaagcgagagtttaaagacaaacaaggggagaaagctagagtgacccatgtggtaatgaataagggttggaaacatcagtatgaactcatgtttatcttaatatggataaagatggatccatatggaaatgtttatagatatgtgtatatatgtgtgttagtataaacatgtattt

SEQ ID NO: 531501 - DNA, 618 bp, Homo sapiens
gtataaatcttaaaatctgtattaccattaaaagaaataagactgtagggctatatgccatatgattccattcatgtggttgtagagttagagttggtaaacacatcagttgttgccagggatttggtgaaggagttgagttgtttaggtgaagcacatagtattcttaggaattcatactgcagcaagaatatctaaatatactaaaaatgattgaaataaccttactgaagggaagggaggatatctgctgacttaagtagcactggagatgaatggagcctctaagactgaaggcaaaataaactgcacatgaacactgtattctggttgttcrtctgttcccactggagtatggttttaaaattctgaaaccactatacactttttgcatacaggaatgaaacaagtaaatgtatggaagatggagaaagctactgctgaagcgagagtttaaagacaaacaaggggagaaagctagagtgacccatgtggtaatgaataagggttggaaacatcagtatgaactcatgtttatcttaatatggataaagatggatccatatggaaatgtttatagatatgtgtatatatgtgtgttagtataaacatgtattt

SEQ ID NO: 531502 - DNA, 671 bp, Homo sapiens
aatgtttaagggattttctaaaaagttggaaaagttttacaagttaaaggattttgctgaagagatggggccatattttgaggagggggattcaagccaggggcccagagatccagaagatcttctggagggtcagggacaggcagttgggggtaaagggaagtataagtggatggagaaggaggatttgtagtgtgtgtggactttaacttttgttctaaatctgttcttccctaaagctagctgttaccctcctctacatcctctttacaatgtgatgttcccatagtgccaataggacagttgttttcgatgacaaaatttttttcaaatagggaagtttttccaattcaaaggatccatcgtctggccattgacaaataggatctccaagaatgtgtttattccaatagcaactcaaaccaataaaccttttcatggaaagactgtgaaataactttccaggcttagaataaatctttaccatggatgcaagaggcatccctagagtgagtgtagaagatgcacgcacatgatcctaaaaagttcacaccagaggtggcctaggaaagcaaagacctttgccgtcaccagcagtgagaactgtgtttgtgsaattgctgtctctggtctctcacaagatgtgggacacctccagccacatacccact

SEQ ID NO: 531503 - DNA, 671 bp, Homo sapiens
aatgtttaagggattttctaaaaagttggaaaagttttacaagttaaaggattttgctgaagagatggggccatattttgaggagggggattcaagccaggggcccagagatccagaagatcttctggagggtcagggacaggcagttgggggtaaagggaagtataagtggatggagaaggaggatttgtagtgtgtgtggactttaacttttgttctaaatctgttcttccctaaagctagctgttaccctcctctacatcctctttacaatgtgatgttcccatagtgccaataggacagttgttttcgatgacaaaatttttttcaaatagggaagtttttccaattcaaaggatccatcgtctggccattgacaaataggatctccaagaatgtgtttattccaatagcaactcaaaccaataaaccttttcatggaaagactgtgaaataactttccaggcttagaataaatctttaccatggatgcaagaggcatccctagagtgagtgtagaagatgcacgcacatgatcctaaaaagttcacaccagaggtggcctaggaaagcaaagacctttgccgtcaccagcagtgagaactgtgtttgtgcaaktgctgtctctggtctctcacaagatgtgggacacctccagccacatacccact

SEQ ID NO: 531504 - DNA, 604 bp, Homo sapiens
gtaaagttcaatattaccttgtaaaaaactgataatgatttttgtccagttaataagataacctcaaaggttatgactttattgccctgtaggacatttaccagttttatatctaattttgccatcttcttccaggagtcttttctttttcaccaatcctatagatcagctttctagattctcttcraatcaactgaaccattctgctgctttactcattaatgagttaaataaatttttaacatgtgttcactatatatttatatgaaagtcacgctttgaaaattgtactctgactttcccccaggctactatctcttaggagcttttgtaaaaatgtgtttcttttgcttatcaccataaattctaacttttaactcctgttagaatttatagatcgaaatgctttttatgccaagttttcaattctgtcatccatgggactacttcaatggagttttctgtggcttgccactgacagcattctccttgagatatatgtagacatatatagatatatatatattgtatttctctcccccaagtgctttaaggaatttataatttcactaggtctgcaaaaaatccagtgagccaataaagc

SEQ ID NO: 531505 - DNA, 625 bp, Homo sapiens
ctggtgcccagtgaaagtggaaggaacaagaaggctgaatgtgggggtgaggccagatcaggggcagcatcaaaactcgtggaagctgctgactttgtcctgtgagtgacggaagaccactgaatagtagacaagagggggacaggggaatgagttggtcagagttgagttataaaaaatatgactccagtggaaacgacaaaaatgacttggggagagagagagagagattagtaccactttcactcatycccccatccctctaccccttgctcatatgcacacacacacacacagaaagagagaaaatggaggtatagctttcaagttgtcttgtttgtgtggctatgaactccaaagttttggcaaatacatctaaattacatatataatagctttttttttttttcaccagagagatccttcctgaagaaggctaaagtgttccttgtagcccaggattgatcactccttgtaattgaaacctctcaaaatagtgtaacgtggctctccacttgcatgattcctttaaggagatgttgaaagccatgtaggaaatggaccgtgcttagtcagttccagtactgtgtttggatgtaaccaatggttggtaatttaataaatg

SEQ ID NO: 531506 - DNA, 575 bp, Homo sapiens
tgtgtggggagccactgagtctctgtgatgagatattgcaataggcagaatcaaggcaccctaaagatgccccacgttagtccccaggacccatgaatatgtccccttatgtggataaagggactgtgcagatgtaataaagttaaaaaccttgaaatgggaagatgatcctagtacacctgggaggacactaaatatagtcacaagggtccttgaaatccacgaaccattcctggctgagttcagagtcagagggrgagaggaccatgaagaagggtcagagagaaatgatgttgctgactttgaagaaagaggaaggggtccatgagccaagggatgtgggaggcatctgtgaccttaaaaaggggacacatttttccacctagagcttccagaaaggaatgcaacctgctggcatcttgatgtgagtccagtgagacccatgtctgatgtctgtcctacagagctgaaagaaaataaatttgtattgctttaagccacccagttggtgataatttattacaagagaagactcatacaaacatttcttctgaggcttatcctgcaaacaaacc

SEQ ID NO: 531507 - DNA, 587 bp, Homo sapiens
tggggagccactgagtctctgtgatgagatattgcaataggcagaatcaaggcaccctaaagatgccccacgttagtccccaggacccatgaatatgtccccttatgtggataaagggactgtgcagatgtaataaagttaaaaaccttgaaatgggaagatgatcctagtacacctgggaggacactaaatatagtcacaagggtccttgaaatccacgaaccattcctggctgagttcagagtcagagggagagaggaccatgaagaagggtcagagagaaatgatgttgctgactttgaagaaagaggaaggggtccrtgagccaagggatgtgggaggcatctgtgaccttaaaaaggggacacatttttccacctagagcttccagaaaggaatgcaacctgctggcatcttgatgtgagtccagtgagacccatgtctgatgtctgtcctacagagctgaaagaaaataaatttgtattgctttaagccacccagttggtgataatttattacaagagaagactcatacaaacatttcttctgaggcttatcctgcaaacaaaccaacacacacataaacc

SEQ ID NO: 531508 - DNA, 587 bp, Homo sapiens
tggggagccactgagtctctgtgatgagatattgcaataggcagaatcaaggcaccctaaagatgccccacgttagtccccaggacccatgaatatgtccccttatgtggataaagggactgtgcagatgtaataaagttaaaaaccttgaaatgggaagatgatcctagtacacctgggaggacactaaatatagtcacaagggtccttgaaatccacgaaccattcctggctgagttcagagtcagagggagagaggaccatgaagaagggtcagagagaaatgatgttgctgactttgaagaaagaggaaggggtccatgagccaagggatgtgggaggcatctgtgaccttaaaaaggggacacatttttccacctagagcttccagaaaggaatgcaacctgctggcatcttgatgtgagtccagtgagacccatgtctgatgtctgtcctacagagctgaaagaaaataaatttgtattgctttaagcmacccagttggtgataatttattacaagagaagactcatacaaacatttcttctgaggcttatcctgcaaacaaaccaacacacacataaacc

SEQ ID NO: 531509 - DNA, 613 bp, Homo sapiens
ttcattcacaaggagatattatgacttgattaagatcccaccattcaactataatagaactggaatttgaacccagaaaaccaggcctagaaagtgcatgtttgcccactggactaggcaccatcttctctctttcttccttaaaagtctgtgagggcatgtcatcacttcaagagtcaagttcaagctgcctagtaagtgcacagagcatttcatctctggcccctgcttattctgtctccctttcctacatactgcaaacctggcaccttgcttgcaaatccagaaatctcgcacactctatttttttataaactttgcttatgctggggcccttagagcaccctgctcaccctcaccttccaaactgcctgggcatcagcaattgattgttccacacagaaagaaagtcagctcctctaggaaacccactrcagcccttctaccctccacaggccccacccaagacaaaatacaggctctcatgggaccctgcagggacctaatgtgtgccttttctgacctgaacatgccctttcatagtctctctttgatgaccatgtatcatcctgtgttagaaggccaaggactgtctgatcaacctctattttta

SEQ ID NO: 531510 - DNA, 649 bp, Homo sapiens
ctcctaaaccaggatgttcaggaccaaaagggcagagcagaaaacccccacagggatatttcttctttaagaggacaagaggaaggcattcctattggactcaggggcttcagattttgctgtttcttttaaacctgaaacagagaaatttaatttgaggaggacagaaatcctcttttgcatgccccaaatctaaatgtttcttctctctgtttatagcacttcataaataacccatagccaagataacagtgtgactttcttcccccagcgttgcaatcctgtagcgtcagaacaaagactgtgtgtgtgaggaaaaagctggagatatttgtttactggaaggaagaaaactgagattaaaaattgcagttagcaggggagaaggtgtcttccttcccgctggcattgccctgtgcctgcgagccagccagcygtgctcacaaggagccttggagagggctgcgtccgcctctgtgcaagatgctgaaccagtgaagagggcacgctgggcagggggaggggctgcctcggccctgggaggtggaggtgcagccgggaacttggagctttcgcttaaacataaggaatgattttttctcatcaacagtaagtgccattttcgtcatcagctctgcattgggccgag

SEQ ID NO: 531511 - DNA, 592 bp, Homo sapiens
aactgagaaaaaattaaagtaattcaagcaagaagctaatcccttctcaacttcgtaatatgaccagcttggttcaggtaatccatgtgagatagacctgggagactccacttgtttctaaaaagccatgtcttcaaagtaaaacagaatctagagacatatatcaggtgaaattctagtctgtttcctacattaacctagatgactcagacacaggtgagattttgcccaaatggcccagattacccaatttcccatgtcaacggagatgaccaaagacagcttgccccaaatgaagaatgtgaatgcaactgtttgaaacataccatggccagaagaataattggccagttccttgaaaaacttaattatgaatgtgcttcccattccattgcttttctcctctctagttggaaatgtcacttgaaccacctggcaaattctaggaggcattccaccacaaggctgaggatacattttcctgcggggatgtcccgggaaagggagaacacttgagaggaaatcataacacccrccaaagctgaagacaaatggctatgatttaacctagaggttcgcctacaggcttgta

SEQ ID NO: 531512 - DNA, 567 bp, Homo sapiens
cacacctggctatttttttttgtatttttagtagagaygaggtttctccatgttggtcaggctggtctcaaactcctgacctcaggtgatccgcccacctcggcctcccaaagtgctgggattacaagcatgagccaccacgcccaactttttgtttttgttttgagacggagtctcactctgtcgcccaggctggagggcagttgtgagatcttggctcactgcaacttccgcctcccgggttcaagtgattctcctgccttagtctcttgagtagctgggctacaggggccagccaccatgcccggctaactttttgtatttttagtagagatggggtttcaccgtgttagccaggatggtctcaatttcctaacctcgtgatccacccgccttggcctcccaaagtgctgggattataggcgtgagccaccgcgcccggcccctccaatatgttaattttcttaactttccctcactttgaaaaactcccagtttctgtcaccccaaaagttctgttcagtaaaatcacccatcaggcagagtgagggcagtgaaaactcatga

SEQ ID NO: 531513 - DNA, 608 bp, Homo sapiens
gcaggcaagtgcccccctcacrgtttaatacctgggcttaaggcacgaattcctggcggctccaccccatccttctagtgaacatgcaggcccttagactaaacttctctatattgatttaattcccttactgtgcatgtgttcaggaattcaactttccactgcaggcatgtttaggcaagcaccctgtgcaagtttccttatctgaacaaaacatctgatgtaagcacttgtggggcgggtaagaggttctctggggccccttccctactgtttgcctaaagcaagctggctaactcctttcactaggacatggaatttccaatgtttttcttattgttgtttttaagagaaaagatttccctatgttgcccagactggccttaaactcttgggctcaaactatcttcctgcctcagtttcccaagtaactgggactacagtagcacatcaccccccccagctagaattttatgttttaaaactgtgaaagttccaggcaaaccaggatgacttggtcactctatttacgtgttataaatatgattatgaagtgtgactacccccaagagaagaaaaagttcaaccaggaatagatggaggggaac

SEQ ID NO: 531514 - DNA, 577 bp, Homo sapiens
tcacactgtaccatctcgtgtcatccccgcagcagtctcacgagygagggtcttctgccaagttcactctgtcaatgagaaaatgaggatgtagagggaataagccccttgcccggagccacacaattacagagcagcagagctgagactcacagcaaactctgcttccagaattctgctctgaatcactggtctccaaatgctctggatcttgctctccatcagagacaaaaagagcaaaatttaaaaattcattttatacatatgcaactctcactatgtacattcaatgtcagtagagcaggaagatagggaaaaagctagtcactttctaacgtttcttcccttgcccttggggctgtctgtgcacccctggagtgggcacgctccctttggaagtaggctctggacccctctctggattgtactcagatgccaggaccacatgtacttcaatggccagggtcttttccaagggcgggcagccctgctctagagagaactcaagggatttgggaaggcaggggaaacactgatcctacattttgtccattgcattggcttcatcacaagaggc

SEQ ID NO: 531515 - DNA, 589 bp, Homo sapiens
tgtccatgccaggtgatgctttgggaggacacagggcctgaatgtgtttgcatgtgtgtaagtcggtgtgtgtccgggtgtgtttgtggaagcagggtgaggggaagaggagaaagaggagggcgtaaagtggytccagccagcctggtttgcatgaagcatgtttatgcacagttggcaaatttccaacaggtgccattcacgtcagttggtgcaagaggccccttggccccggctggttgcaccactctgggcagttgtccaaagcagcattatctgtgcctcttgcaatgtcagtggcttcctccagcctgccctgtttgtccttcttagaccctcggacaggcccattcatcctcagcagcacttctcaggggaagggacagatctagaatagattagtagaagcagcacagagaagagtcctctttgggtctgatggccttttccagaaagagcagactcttccaggtagtgcttgcaatgtgaaaccctagacaccttgggctttccccccttgcccaatcccacagaattatgatgttcatcaacatgcataatttatgaaagaacacataaaaaagcgctt

SEQ ID NO: 531516 - DNA, 589 bp, Homo sapiens
tgtccatgccaggtgatgctttgggaggacacagggcctgaatgtgtttgcatgtgtgtaagtcggtgtgtgtccgggtgtgtttgtggaagcagggtgaggggaagaggagaaagaggagggcgtaaagtggttccagccagcctggtttgcatgaagcatgtttatgcacarttggcaaatttccaacaggtgccattcacgtcagttggtgcaagaggccccttggccccggctggttgcaccactctgggcagttgtccaaagcagcattatctgtgcctcttgcaatgtcagtggcttcctccagcctgccctgtttgtccttcttagaccctcggacaggcccattcatcctcagcagcacttctcaggggaagggacagatctagaatagattagtagaagcagcacagagaagagtcctctttgggtctgatggccttttccagaaagagcagactcttccaggtagtgcttgcaatgtgaaaccctagacaccttgggctttccccccttgcccaatcccacagaattatgatgttcatcaacatgcataatttatgaaagaacacataaaaaagcgctt

SEQ ID NO: 531517 - DNA, 589 bp, Homo sapiens
tgtccatgccaggtgatgctttgggaggacacagggcctgaatgtgtttgcatgtgtgtaagtcggtgtgtgtccgggtgtgtttgtggaagcagggtgaggggaagaggagaaagaggagggcgtaaagtggttccagccagcctggtttgcatgaagcatgtttatgcacagtyggcaaatttccaacaggtgccattcacgtcagttggtgcaagaggccccttggccccggctggttgcaccactctgggcagttgtccaaagcagcattatctgtgcctcttgcaatgtcagtggcttcctccagcctgccctgtttgtccttcttagaccctcggacaggcccattcatcctcagcagcacttctcaggggaagggacagatctagaatagattagtagaagcagcacagagaagagtcctctttgggtctgatggccttttccagaaagagcagactcttccaggtagtgcttgcaatgtgaaaccctagacaccttgggctttccccccttgcccaatcccacagaattatgatgttcatcaacatgcataatttatgaaagaacacataaaaaagcgctt

SEQ ID NO: 531518 - DNA, 546 bp, Homo sapiens
aacagtctctgatttagtaagttaaattagcaactgagaatgcctcaaacctcagcctgcatggtttaaagatttctttcttaagataatagtaaataaattcaaccaaaaaagtgcccagggaaaaygttggagaaaaatcttccatgatgacaaatattaatcatcaaactcaagtgtttatgtacttcaagcctcagtcagcctcctccagttattaatattcaaatgtcctttccctctagtctgcatgcaagaagaaagcattcaagtttcagacttttatcgatgagttaagacaagaagatggcagactcttttgttttttcccctggaagtgaaatctactttgtctattcaccttccggagtttctggtggtatatatattccttctgtagagtcgctgagctgaacaccctccagaaactcaaaaaagaggcaagtcaggccctaagctctcccagttcctctgcctccattataatcccccagtctagcctggcctcttagcagaacagttgagtttatttatttgatcatcttc

SEQ ID NO: 531519 - DNA, 653 bp, Homo sapiens
taaatgcatgtaaaacctttcacagatttttgttgcattttagttgttcgtgtaaggatttctatgaataacatgtttatttctgcttaattgcttataggtatcacagtaatataaattaagaaaatatggactaataaaatcattaaaccaataatcctaaaaggcaaataaaagtgcaattacttttatcataaacttatattacacagattacactcgattacatagataaattctggctaaaaatactaactttttatgtaaattttttacagtggctaaaaaggcaagaaaacacaaatagaygtttcatctacttaatgtcttaatttgaaatccagtgaacaaactattcaaattattaaactatgaatgactatttatgagggaaattactatcatttcatttatgttttgtgatttgaggtagtatttgtcaaattccatgtagtcacaccttccttttctaattaaactttgctagtcacagccatagaaaaaccagtattatgttgtgccctaaccccatctccacccgtatgtaaagctaattaaaccaaggtgtaccttactacagactctcaaatcagtgacaaattagattcattatcttttgataatttgaactaaaggatccaacacctaggtgc
